United States Patent Application Publication US 2026/0193644 A1 - sequence listing, part 7

SEQ ID NO: 15070 - protein, 2290 aa, Homo sapiens
MGRIQEVGWVTAGLVIWAGTCYYIYKFTKGRAQSVRTLARNGSTVKMETVVGVQSQTLAINEAEIKTKPQVEIGAETGARSGPRAEVETKATAIAIHRANSQAKAMVGAEPETQSESKVVAGTLVMTEAVTLTEVKAKAREVAMKEAVTQTDAEAGKIVKKEAVTQTKAKAWALVAKTEAKREAMTQTKAETHILAEKETEINRVMVTQSETLAVPREVAKMGATNKTGIVDETKTRALEETVSVAKTQSEARPGATVDARGNPNGMSREVAGVDMKSCAQSQAVTKIQGDDMPGTGVEDMGNCKTMSRAESGADTRASAQPQIFAKTQTEAIPGAKIDAGGNTNAMCKVGAGADVRACIQPQTVAKKQAEVTSGARVDGRGNTNVISKAITGADMRAAAQPQAVASTHAEAMSDAKVKNRGNPNAMTKAGAKANLRANSQVEALPDARDKSRGNPNVMAKVGDGTDMLSCTQPQLVASVQADTLSDGKIKVRGNVNTMPKEGAGVDMKAQGMAQSQGEALPNTRGKARGKAKAKCKTGPGMDMKTCTQPQAGVKTPAEALLDSRVDGRGNPNATSKAGTKADQRVCGQPLVVANPQGEALPGAKNKVKGNPHTVLKVGAGEGTTDSAQPEAVVSFQGEALLGTKNKVKGNPNVVLKAEVGEGAMGTAQLQIMASSKGEALLDSKNKVKGNSNAVSKAGAGTDTTGSVQPQIVANSQGEVLPGAKNKIRGNPTTVPNSGVGPYTTDSARLQAVANSQGEVLPGAKNKVKANLNAVSKAEAGMGATGSVQPQAVANSHCETLPGAKNKVRGNWNAVSKAGAGMDTRGSAQPQAVANSQGEVLPGAKNKVKGNPNVVSKAGAREDTVGSTQPQVLASSQRETLPGARNKVKGNSNVVSKAGAREDTMGSAQPQVVANSQRETLPGARNKVKGNSNAISKAEAGAGIMGSVQVQVVASFQGEVLPGAKNKVRGNSNAVPKAEAGADTVGSAQPQAVANSQSETLLGARNKVKGNTIAVPKAGTGAGTRHSAQPQIVAGSQGETLPGARDKSMSTSEAEATAEDEAYAKPEAEAMPTSESEGGSGTQACRKTQPNIHDYYWNGIGVEDWIAAERWIKFRFQTMDGDWENSVSWADDENEASIGSWSGASDKAGIIRSWAVACDETSVKSWAGARAENVVGIGTWARAGEQASGGLWAGGQTSEGTWAGDKASGGAWTGAENQASGGSWALAGNQAIGELWAAGQASDGSWPGGQASGVSWVGEEAIGGSWTGAENQASEGSWAGAGAGNMSSVSYWAGVVDQAGGGSWAGTSDQSGGGSKPRFEDQASGEGSWAGAGGQASGGSMLGPEDQSSGRSWADTADQASGGSRLGHVDQSSGGAWAGTLDQSGGGSKPRFENQTTEEGSWAGAGGQAGGGSKVGPEDQSSGRSWANSGDQISGGFLVGIVDQANGGSWTGAGHPASVGPKPIFEDQVSGRGSWADAREQVVGDSRLGLRDQSSGDSWAGTGDQASGWFCVCPGSQTNGGSWGGASGQDVGGSRPGPTNQSSAGSWDSPGSQVSGSCWTGAGAVDQAGGCSKPGFEDQAIGGGFWPGAGDQTGGGSRPGSEDQSSGIGSWGVAGGQVLGGARPGPADQSSGGSWAGTGNQSSGRSWIGPGDQAVDCSKPEFEDQACGGGSWAGAGSQASGESWAGSRPGNEAIGGSRMGSEDQATGGSWARSEDQASGRFQVSFEVEANEGFWFGPGAEAVIGSWCWTEEKADIVSRPDDKDEATTASRSGAGEEAMICSRIEAENKASSGSWIRSEEVAYMGSCVGAEAGAGAEAGAGAEAGAGAGAEAGAEAGAGAGAGPGTESGAGIWSWDGDATTVESRLGAGEEAGVESWTLARNVGEDELSRESSPDIEEISLRSLFWAESENSNTFRSKSGKDASFESGAGDNTSIKDKFEAAGGVDIGSWFCAGNENTSEDKSAPKAKAKKSSESRGIYPYMVPGAGMGSWDGAMIWSETKFAHQSEASFPVEDESRKQTRTGEKTRPWSCRCKHEANMDPRDLEKLICMIEMTEDPSVHEIANNALYNSADYSYSHEVVRNVGGISVIESLLNNPYPSVRQKALNALNNISVAAENHRKVKTYLNQVCEDTVTYPLNSNVQLAGLRLIRHLTITSEYQHMVTNYISEFLRLLTVGSGETKDHVLGMLLNFSKNPSMTKDLLIANAPTSLINIFSKKETKENILNALSLFENINYHFKRRAKAFTQDKFSKNSLYFLFQRPKACAKKLRALAAECNDPEVKERVELLISKL

SEQ ID NO: 15071 - protein, 318 aa, Homo sapiens
MAIKSIASRLRGSRRFLSGFVAGAVVGAAGAGLAALQFFRSQGAEGALTGKQPDGDADRKHCKFKPDPNIPPTFSAFNEDYVGSGWSRGHMAPAGNNKFSSKAMAETFYLSNIVPQDFDNNSGYWNRIEMYCRELTERFEDVWVVSGPLTLPQTRGDGKKIVSYQVIGEDNVAVPSHLYKVILARRSSVSTEPLALGAFVVPNEAIGFQPQLTEFQVSLQDLEKLSGLVFFPHLDRTSDIRNICSVDTCKLLDFQEFTLYLSTRKIEGARSVLRLEKIMENLKNAEIEPDDYFMSRYEKKLEELKAKEQSGTQIRKPS

SEQ ID NO: 15072 - protein, 547 aa, Homo sapiens
MEKARPLWANSLQFVFACISYAVGLGNVWRFPYLCQMYGGGSFLVPYIIMLIVEGMPLLYLELAVGQRMRQGSIGAWRTISPYLSGVGVASVVVSFFLSMYYNVINAWAFWYLFHSFQDPLPWSVCPLNGNHTGYDEECEKASSTQYFWYRKTLNISPSLQENGGVQWEPALCLLLAWLVVYLCILRGTESTGKVVYFTASLPYCVLIIYLIRGLTLHGATNGLMYMFTPKIEQLANPKAWINAATQIFFSLGLGFGSLIAFASYNEPSNNCQKHAIIVSLINSFTSIFASIVTFSIYGFKATFNYENCLKKVSLLLTNTFDLEDGFLTASNLEQVKGYLASAYPSKYSEMFPQIKNCSLESELDTAVQGTGLAFIVYTEAIKNMEVSQLWSVLYFFMLLMLGIGSMLGNTAAILTPLTDSKIISSHLPKEAISGLVCLVNCAIGMVFTMEAGNYWFDIFNDYAATLSLLLIVLVETIAVCYVYGLRRFESDLKAMTGRAVSWYWKVMWAGVSPLLIVSLFVFYLSDYILTGTLKYQAWDASQDDKL

SEQ ID NO: 15073 - protein, 676 aa, Homo sapiens
MIPPQEASARRREIEDKLKQEEETLSFIRDSLEKSDQLTKNMVSILSSFESRLMKLENSIIPVHKQTENLQRLQENVEKTLSCLDHVISYYHVASDTEKIIREGPTGRLEEYLGSMAKIQKAVEYFQDNSPDSPELNKVKLLFERGKEALESEFRSLMTRHSKVVSPVLILDLISGDDDLEAQEDVTLEHLPESVLQDVIRISRWLVEYGRNQDFMNVYYQIRSSQLDRSIKGLKEHFHKSSSSSGVPYSPAIPNKRKDTPTKKPVKRPGHEHDFRVKHLSEALNDKHGPLAGRDDMLDVETDAYIHCVSAFVKLAQSEYQLLADIIPEHHQKKTFDSLIQDALDGLMLEGENIVSAARKAIVRHDFSTVLTVFPILRHLKQTKPEFDQVLQGTAASTKNKLPGLITSMETIGAKALEDFADNIKNDPDKEYNMPKDGTVHELTSNAILFLQQLLDFQETAGAMLASQETSSSATSYSSEFSKRLLSTYICKVLGNLQLNLLSKSKVYEDPALSAIFLHNNYNYILKSLEKSELIQLVAVTQKTAERSYREHIEQQIQTYQRSWLKVTDYIAEKNLPVFQPGVKLRDKERQIIKERFKGFNDGLEELCKIQKAWAIPDTEQRDRIRQAQKTIVKETYGAFLQKFGSVPFTKNPEKYIKYGVEQVGDMIDRLFDTSA

SEQ ID NO: 15074 - protein, 673 aa, Homo sapiens
MGKKYKNIVLLKGLEVINDYHFRMVKSLLSNDLKLNLKMREEYDKIQIADLMEEKFRGDAGLGKLIKIFEDIPTLEDLAETLKKEKLKVKGPALSRKRKKEVDATSPAPSTSSTVKTEGAEATPGAQKRKKSTKEKAGPKGSKVSEEQTQPPSPAGAGMSTAMGRSPSPKTSLSAPPNSSSTENPKTVAKCQVTPRRNVLQKRPVIVKVLSTTKPFEYETPEMEKKIMFHATVATQTQFFHVKVLNTSLKEKFNGKKIIIISDYLEYDSLLEVNEESTVSEAGPNQTFEVPNKIINRAKETLKIDILHKQASGNIVYGVFMLHKKTVNQKTTIYEIQDDRGKMDVVGTGQCHNIPCEEGDKLQLFCFRLRKKNQMSKLISEMHSFIQIKKKTNPRNNDPKSMKLPQEQRQLPYPSEASTTFPESHLRTPQMPPTTPSSSFFTKLKPRLKTEPEEVSIEDSAQSDLKEVMVLNATESFVYEPKEQKKMFHATVATENEVFRVKVFNIDLKEKFTPKKIIAIANYVCRNGFLEVYPFTLVADVNADRNMEIPKGLIRSASVTPKINQLCSQTKGSFVNGVFEVHKKNVRGEFTYYEIQDNTGKMEVVVHGRLTTINCEEGDKLKLTCFELAPKSGNTGELRSVIHSHIKVIKTRKNKKDILNPDSSMETSPDFFF

SEQ ID NO: 15075 - protein, 129 aa, Homo sapiens
MMVQGQEYEAGGSVIHPLNLHMKRFVKDLGLSAVQASGGLLGIYNGETLVFEESNWFIINVIKLVWRYGFQSLRMHMWVEDVLDKFMRIYRYQSHDYAFSSVEKLLHALGGDDFLGMLNRTLLETLQKA

SEQ ID NO: 15076 - protein, 616 aa, Homo sapiens
MPFTLHLRSRLPSAIRSLILQKKPNIRNTSSMAGELRPASLVVLPRSLAPAFERFCQVNTGPLPLLGQSEPEKWMLPPQGAISETRMGHPQFWKYEFGACTGSLASLEQYSEQLKDMVAFFLGCSFSLEEALEKAGLPRRDPAGHSQTTVPCVTHAGFCCPLVVTMRPIPKDKLEGLVRACCSLGGEQGQPVHMGDPELLGIKELSKPAYGDAMVCPPGEVPVFWPSPLTSLGAVSSCETPLAFASIPGCTVMTDLKDAKAPPGCLTPERIPEVHHISQDPLHYSIASVSASQKIRELESMIGIDPGNRGIGHLLCKDELLKASLSLSHARSVLITTGFPTHFNHEPPEETDGPPGAVALVAFLQALEKEVAIIVDQRAWNLHQKIVEDAVEQGVLKTQIPILTYQGGSVEAAQAFLCKNGDPQTPRFDHLVAIERAGRAADGNYYNARKMNIKHLVDPIDDLFLAAKKIPGISSTGVGDGGNELGMGKVKEAVRRHIRHGDVIACDVEADFAVIAGVSNWGGYALACALYILYSCAVHSQYLRKAVGPSRAPGDQAWTQALPSVIKEEKMLGILVQHKVRSGVSGIVGMEVDGLPFHNTHAEMIQKLVDVTTAQV

SEQ ID NO: 15077 - protein, 257 aa, Homo sapiens
MAVWLAQWLGPLLLVSLWGLLAPASLLRRLGEHIQQFQESSAQGLGLSLGPGAAALPKVGWLEQLLDPFNVSDRRSFLQIVLHSLGQKCLSFSRAETVAQLRSTEPQLSGVGDRQWLYQTCTEFGFYVTCENPRCPFSQLPALPSQLDLCEQVFGLSALSVAQAVAQTNSYYGGQTPGANKVLFVNGDTDPWHVLSVTQALGSSESTLLIRTGSHCLDMAPERPSDSPSLRLGRQNIFQQLQTWLKLAKESQIKGEV

SEQ ID NO: 15078 - protein, 378 aa, Homo sapiens
MDSVAFEDVAVNFTQEEWALLDSSQKNLYREVMQETCRNLASVGSQWKDQNIEDHFEKPGKDIRNHIVQRLCESKEDGQYGEVVSQIPNLDLNENISTGLKPCECSICGKVFVRHSLLNRHILAHSGYKPYGEKQYKCEQCGKFFVSVPGVRRHMIMHSGNPAYKCTICGKAFYFLNSVERHQRTHTGEKPYKCKQCGKAFTVSGSCLIHERTHTGEKPYECKECGKTFRFSCSFKTHERTHTGERPYKCTKCDKAFSCSTSLRYHGSIHTGERPYECKQCGKAFSRLSSLCNHRSTHTGEKPYECKQCDQAFSRLSSLHLHERIHTGEKPYECKKCGKAYTRSSHLTRHERSHDIEAGCSDSAYNPSTLGGQGVWIA

SEQ ID NO: 15079 - protein, 952 aa, Homo sapiens
MDLRVGQRPPVEPPPEPTLLALQRPQRLHHHLFLAGLQQQRSVEPMRLSMDTPMPELQVGPQEQELRQLLHKDKSKRSAVASSVVKQKLAEVILKKQQAALERTVHPNSPGIPYRTLEPLETEGATRSMLSSFLPPVPSLPSDPPEHFPLRKTVSEPNLKLRYKPKKSLERRKNPLLRKESAPPSLRRRPAETLGDSSPSSSSTPASGCSSPNDSEHGPNPILGSEALLGQRLRLQETSVAPFALPTVSLLPAITLGLPAPARADSDRRTHPTLGPRGPILGSPHTPLFLPHGLEPEAGGTLPSRLQPILLLDPSGSHAPLLTVPGLGPLPFHFAQSLMTTERLSGSGLHWPLSRTRSEPLPPSATAPPPPGPMQPRLEQLKTHVQVIKRSAKPSEKPRLRQIPSAEDLETDGGGPGQVVDDGLEHRELGHGQPEARGPAPLQQHPQVLLWEQQRLAGRLPRGSTGDTVLLPLAQGGHRPLSRAQSSPAAPASLSAPEPASQARVLSSSETPARTLPFTTGLIYDSVMLKHQCSCGDNSRHPEHAGRIQSIWSRLQERGLRSQCECLRGRKASLEELQSVHSERHVLLYGTNPLSRLKLDNGKLAGLLAQRMFVMLPCGGVGVDTDTIWNELHSSNAARWAAGSVTDLAFKVASRELKNGFAVVRPPGHHADHSTAMGFCFFNSVAIACRQLQQQSKASKILIVDWDVHHGNGTQQTFYQDPSVLYISLHRHDDGNFFPGSGAVDEVGAGSGEGFNVNVAWAGGLDPPMGDPEYLAAFRIVVMPIAREFSPDLVLVSAGFDAAEGHPAPLGGYHVSAKCFGYMTQQLMNLAGGAVVLALEGGHDLTAICDASEACVAALLGNRVDPLSEEGWKQKPNLNAIRSLEAVIRVHSKYWGCMQRLASCPDSWVPRVPGADKEEVEAVTALASLSVGILAEDRPSEQLVEEEEPMNL

SEQ ID NO: 15080 - protein, 998 aa, Homo sapiens
MKLMTALVNVALNLSIHQDNTQRQYEAERNKMIGKRANERLELLLQKRKELQENQDEIENMMNSIFKGIFVHRYRDAIAEIRAICIEEIGVWMKMYSDAFLNDSYLKYVGWTLHDRQGEVRLKCLKALQSLYTNRELFPKLELFTNRFKDRIVSMTLDKEYDVAVEAIRLVTLILHGSEEALSNEDCENVYHLVYSAHRPVAVAAGEFLHKKLFSRHDPQAEEALAKRRGRNSPNGNLIRMLVLFFLESELHEHAAYLVDSLWESSQELLKDWECMTELLLEEPVQGEEAMSDRQESALIELMVCTIRQAAEAHPPVGRGTGKRVLTAKERKTQIDDRNKLTEHFIITLPMLLSKYSADAEKVANLLQIPQYFDLEIYSTGRMEKHLDALLKQIKFVVEKHVESDVLEACSKTYSILCSEEYTIQNRVDIARSQLIDEFVDRFNHSVEDLLQEGEEADDDDIYNVLSTLKRLTSFHNAHDLTKWDLFGNCYRLLKTGIEHGAMPEQIVVQALQCSHYSILWQLVKITDGSPSKEDLLVLRKTVKSFLAVCQQCLSNVNTPVKEQAFMLLCDLLMIFSHQLMTGGREGLQPLVFNPDTGLQSELLSFVMDHVFIDQDEENQSMEGDEEDEANKIEALHKRRNLLAAFSKLIIYDIVDMHAAADIFKHYMKLFNELVQEQGPNLDRTSAHVSGIKELARRFALTFGLDQIKTREAVATLHKDGIEFAFKYQNQKGQEYPPPNLAFLEVLSEFSSKLLRQDKKTVHSYLEKFLTEQMMERREDVWLPLISYRNSLVTGGEDDRMSVNSGSSSSKTSSVRNKKGRPPLHKKRVEDESLDNTWLNRTDTMIQTPGPLPAPQLTSTVLRENSRPMGDQIQEPESEHGSEPDFLHNPQMQISWLGQPKLEDLNRKDRTGMNYMKVRTGVRHAVRGLMEEDAEPIFEDVMMSSRSQLEDMNEEFEDTMVIDLPPSRNRRERAELRPDFFDSAAIIEDDSGFGMPMF

SEQ ID NO: 15081 - protein, 326 aa, Homo sapiens
QAEAQAKVDKKRDKIERKILDSQERAFWDVHRPVPGCVNTTEVDIKKSSRMRNPHKTRKSVYGLQNDIRSHSPTHTPTPETKPPTEDELQQQIKYWQIQLDRHRLKMSKVADSLLSYTEQYLEYDPFLLPPDPSNPWLSDDTTFWELEASKEPSQQRVKRWGFGMDEALKDPVGREQFLKFLESEFSSENLRFWLAVEDLKKRPIKEVPSRVQEIWQEFLAPGAPSAINLDSKSYDKTTQNVKEPGRYTFEDAQEHIYKLMKSDSYPRFIRSSAYQELLQAKKKSGNSMDRRTSFEKFAQNVGRNIPIFPCHKNCTPTLRASTNLL

SEQ ID NO: 15082 - protein, 289 aa, Homo sapiens
MSRESDVEAQQSHGSSACSQPHGSVTQSQGSSSQSQGISSSSTSTMPNSSQSSHSSSGTLSSLETVSTQELYSIPEDQEPEDQEPEEPTPAPWARLWALQDGFANLECVNDNYWFGRDKSCEYCFDEPLLKRTDKYRTYSKKHFRIFREVGPKNSYIAYIEDHSGNGTFVNTELVGKGKRRPLNNNSEIALSLSRNKVFVFFDLTVDDQSVYPKALRDEYIMSKTLGSGACGEVKLAFERKTCKKVAIKIISKRKFAIGSAREADPALNVETEIEILKKLNHDGRGRAV

SEQ ID NO: 15083 - protein, 209 aa, Homo sapiens
MESTAYPLNLSLKEEEEEEEIQSRELEDGPADMQKVRICSEGGWVPALFDEVAIYFSDEEWEVLTEQQKALYREVMRMNYETVLSLEFPFPKPDMITRLEGEEESQNSDEWQLQGGTSAENEESDVKPPDWPNPMNATSQFPQPQHFDSFGLRLPRDITELPEWSEGYPFYMAMGFPGYDLSADDIAGKFQFSRGMRRSYDAGFKLMVV

SEQ ID NO: 15084 - protein, 753 aa, Homo sapiens
MDDFTRDPLYILDNNHTHLLLVDNGCHGHPTVEAKLRNQLEKYISERTIQDSNYGGKIPIVCFAQGGGKETLKAINTSIKNKIPCVVVEGSGQIADVIASLVEVEDALTSSAVKEKLVRFLPRTVSRLPEEETESWIKWLKEILECSHLLTVIKMEEAGDEIVSNAISYALYKAFSTSEQDKDNWNGQLKLLLEWNQLDLANDEIFTNDRRWESADLQEVMFTALIKDRPKFVRLFLENGLNLRKFLTHDVLTELFSNHFSTLVYRNLQIAKNSYNDALLTFVWKLVANFRRGFRKEDRNGRDEMDIELHDVSPITRHPLQALFIWAILQNKKELSKVIWEQTRGCTLAALGASKLLKTLAKVKNDINAAGESEELANEYETRAVELFTECYSSDEDLAEQLLVYSCEAWGGSNCLELAVEATDQHFIAQPGVQWYVNGVNYFTDLWNVMDTLGLFYFIAGIVFRLHSSNKSSLYSGRVIFCLDYIIFTLRLIHIFTVSRNLGPKIIMLQRMLIDVFFFLFLFAVWMVAFGVARQGILRQNEQRWRWIFRSVIYEPYLAMFGQVPSDVDGTTYDFAHCTFTGNESKPLCVELDEHNLPRFPEWITIPLVCIYMLSTNILLVNLLVAMFGYTVGTVQENNDQVWKFQRYFLVQEYCSRLNIPFPFIVFAYFYMVVKKCFKCCCKEKNMESSVCCFKNEDNETLAWEGVMKENYLVKINTKANDTSEEMRHRFRQLDTKLNDLKGLLKEIANKIK

SEQ ID NO: 15085 - protein, 1797 aa, Homo sapiens
MENEIFTPLLEQFMTSPLVTWVKTFGPLAAGNGTNLDEYVALVDGVFLNQVMLQINPKLESQRVNKKVNNDASLRMHNLSILVRQIKFYYQETLQQLIMMSLPNVLIIGKNPFSEQGTEEVKKLLLLLLGCAVQCQKKEEFIERIQGLDFDTKAAVAAHIQEVTHNQENVFDLQWMEVTDMSQEDIEPLLKNMALHLKRLIDERDEHSETIIELSEERDGLHFLPHASSSAQSPCGSPGMKRTESRQHLSVELADAKAKIRRLRQELEEKTEQLLDCKQELEQMEIELKRLQQENMNLLSDARSARMYRDELDALREKAVRVDKLESEVSRYKERLHDIEFYKARVEELKEDNQVLLETKTMLEDQLEGTRARSDKLHELEKENLQLKAKLHDMEMERDMDRKKIEELMEENMTLEMAQKQSMDESLHLGWELEQISRTSELSEAPQKSLGHEVNELTSSRLLKLEMENQSLTKTVEELRTTVDSVEGNASKILKMEKENQRLSKKVEILENEIVQEKQSLQNCQNLSKDLMKEKAQLEKTIETLRENSERQIKILEQENEHLNQTVSSLRQRSQISAEARVKDIEKENKILHESIKETSSKLSKIEFEKRQIKKELEHYKEKGERAEELENELHHLEKENELLQKKITNLKITCEKIEALEQENSELERENRKLKKTLDSFKNLTFQLESLEKENSQLDEENLELRRNVESLKCASMKMAQLQLENKELESEKEQLKKGLELLKASFKKTERLEVSYQGLDIENQRLQKTLENSNKKIQQLESELQDLEMENQTLQKNLEELKISSKRLEQLEKENKSLEQETSQLEKDKKQLEKENKRLRQQAEIKDTTLEENNVKIGNLEKENKTLSKEIGIYKESCVRLKELEKENKELVKRATIDIKTLVTLREDLVSEKLKTQQMNNDLEKLTHELEKIGLNKERLLHDEQSTDDSRYKLLESKLESTLKKSLEIKEEKIAALEARLEESTNYNQQLRQELKTVKKNYEALKQRQDEERMVQSSPPISGEDNKWERESQETTRELLKVKDRLIEVERNNATLQAEKQALKTQLKQLETQNNNLQAQILALQRQTVSLQEQNTTLQTQNAKLQVENSTLNSQSTSLMNQNAQLLIQQSSLENENESVIKEREDLKSLYDSLIKDHEKLELLHERQASEYESLISKHGTLKSAHKNLEVEHRDLEDRYNQLLKQKGQLEDLEKMLKVEQEKMLLENKNHETVAAEYKKLCGENDRLNHTYSQLLKETEVLQTDHKNLKSLLNNSKLEQTRLEAEFSKLKEQYQQLDITSTKLNNQCELLSQLKGNLEEENRHLLDQIQTLMLQNRTLLEQNMESKDLFHVEQRQYIDKLNELRRQKEKLEEKIMDQYKFYDPSPPRRRGNWITLKMRKLIKSKKDINRERQKSLTLTPTRSDSSEGFLQLPHQDSQDSSSVGSNSLEDGQTLGTKKSSMVALKRLPFLRNRPKDKDKMKACYRRSMSMNDLVQSMVLAGQWTGSTENLEVPDDISTGKRRKELGAMAFSTTAINFSTVNSSAGFRSKQLVNNKDTTSFEDISPQGVSDDSSTGSRVHASRPASLDSGRTSTSNSNNNASLHEVKAGAVNNQSRPQSHSSGEFSLLHDHEAWSSSGSSPIQYLKRQTRSSPVLQHKISETLESRHHKIKTGSPGSEVVTLQQFLEESNKLTSVQIKSSSQENLLDEVMKSLSVSSDFLGKDKPVSCGLASVISTAEGTTRRTSIHDFLTKDSRLPISVDSPPAAADSNTTAASNVDKVQESRNSKSRSREQQSS

SEQ ID NO: 15086 - protein, 703 aa, Homo sapiens
IIHKYEPSKEGQEKGWLSIDGFTNYLMSPDCYIFDPEHKKVCQDMKQPLSHYFINSSHNTYLIEDQFRGPSDITGYIRALKMGCRSVELDVWDGPDNEPVIYTGHTMTSQIVFRSVIDIINKYAFFASEYPLILCLENHCSIKQQKVMVQHMKKLLGDKLYTTSPNVEESYLPSPDVLKGKILIKAKKLSSNCSGVEGDVTDEDEGAEMSQRMGKENMEQPNNVPVKRFQLCKELSELVSICKSVQFKEFQVSFQVQKYWEVCSFNEVLASKYANENPGDFVNYNKRFLARVFPSPMRIDSSNMNPQDFWKCGCQIVAMNFQTPGLMMDLNIGWFRQNGNCGYVLRPAIMREEVSFFSANTKDSVPGVSPQLLHIKIISGQNFPKPKGSGAKGDVVDPYVYVEIHGIPADCAEQRTKTVHQNGDAPIFDESFEFQINLPELAMVRFVVLDDDYIGDEFIGQYTIPFECLQTGYRHVPLQSLTGEVLAHASLFVHVAITNRRGGGKPHKRGLSVRKGKKSREYASLRTLWIKTVDEVFKNAQPPIRDATDLRENMQNAVVSFKELCGLSSVANLMQCMLAVSPRFLGPDNTPLVVLNLSEQYPTMELQGIVPEVLKKIVTTYDMMIQSLKALIENADAVYEKIVHCQKAAMEFHEHLHSIGTKEGLKERKLQKAVESFTWNITILKIRKTGRRSIFVPQTPIMV

SEQ ID NO: 15087 - protein, 387 aa, Homo sapiens
MASRCSEPYPEVSRIPTVRGCNGSLSGALSCCEDSARGSGPPKAPTVAEGPSSCLRRNVISERERRKRMSLSCERLRALLPQFDGRREDMASVLEMSVQFLRLASALGPSQEQHAILASSKEMWHSLQEDVLQLTLSSQIQAGVPDPGTGASSGTRTPDVKAFLESPWSLDPASASPEPVPHILASSRQWDPASCTSLGTDKCEALLGLCQVRGGLPPFSEPSSLVPWPPGRSLPKAVRPPLSWPPFSQQQTLPVMSGEALGWLGQAGPLAMGAAPLGEPAKEDPMLAQEAGSALGSDVDDGTSFLLTAGPSSWPGSLEGRGGSGPAWAPAESSPLDVGEPGFLGDPELGSQELQDSPLEPWGLDVDCAGLALKDEVESIFPDFFAC

SEQ ID NO: 15088 - protein, 519 aa, Homo sapiens
MAFNDLLQQVGGVGRFQQIQVTLVVLPLLLMASHNTLQNFTAAIPTHHCRPPADANLSKNGGLEVWLPRDRQGQPESCLRFTSPQWGLPFLNGTEANGTGATEPCTDGWIYDNSTFPSTIVTEWDLVCSHRALRQLAQSLYMVGVLLGAMVFGYLADRLGRRKVLILNYLQTAVSGTCAAFAPNFPIYCAFRLLSGMALAGISLNCMTLNVEWMPIHTRACVGTLIGYVYSLGQFLLAGVAYAVPHWRHLQLLVSAPFFAFFIYSWFFIESARWHSSSGRLDLTLRALQRVARINGKREEGAKLSMEVLRASLQKELTMGKGQASAMELLRCPTLRHLFLCLSMLWFATSFAYYGLVMDLQGFGVSIYLIQVIFGAVDLPAKLVGFLVINSLGRRPAQMAALLLAGICILLNGVIPQDQSIVRTSLAVLGKGCLAASFNCIFLYTGELYPTMIRAVTVLLPETLGQPLPDTVQDLESRWAPTQKEAGIYPRKGKQTRQQQEHQKYMVPLQASAQEKNGL

SEQ ID NO: 15089 - protein, 434 aa, Homo sapiens
MGMGRGAGRSALGFWPTLAFLLCSFPAATSPCKILKCNSEFWSATSGSHAPASDDTPEFCAALRSYALCTRRTARTCRGDLAYHSAVHGIEDLMSQHNCSKDGPTSQPRLRTLPPAGDSQERSDSPEICHYEKSFHKHSATPNYTHCGLFGDPHLRTFTDRFQTCKVQGAWPLIDNNYLNVQVTNTPVLPGSAATATSKLTIIFKNFQECVDQKVYQAEMDELPAAFVDGSKNGGDKHGANSLKITEKVSGQHVEIQAKYIGTTIVVRQVGRYLTFAVRMPEEVVNAVEDWDSQGLYLCLRGCPLNQQIDFQAFHTNAEGTGARRLAAASPAPTAPETFPYETAVAKCKEKLPVEDLYYQACVFDLLTTGDVNFTLAAYYALEDVKMLHSNKDKLHLYERTRDLPGRAAAGLPLAPRPLLGALVPLLALLPVFC

SEQ ID NO: 15090 - protein, 340 aa, Homo sapiens
MSKTHDHQLESSLSPVEVFAKTSASLEMNQGVSEERIHLGSSPKKGGNCDLSHQERLQSKSLHLSPQEQSASYQDRRQSWRRASMKETNRRKSLHPIHQGITELSRSISVDLAESKRLGCLLLSSFQFSIQKLEPFLRDTKGFSLESFRAKASSLSEELKHFADGLETDGTLQKCFEDSNGKASDFSLEASVAEMKEYITKFSLERQTWDQLLLHYQQEAKEILSRGSTEAKITEVKVEPMTYLGSSQNEVLNTKPDYQKILQNQSKVFDCMELVMDELQGSVKQLQAFMDESTQCFQKVSVQLGKRSMQQLDPSPARKLLKLQLQNPPAIHGSGSGSCQ

SEQ ID NO: 15091 - protein, 406 aa, Homo sapiens
MVPPPPSRGGAARGQLGRSLGPLLLLLALGHTWTYREEPEDGDREICSESKIATTKYPCLKSSGELTTCYRKKCCKGYKFVLGQCIPEDYDVCAEAPCEQQCTDNFGRVLCTCYPGYRYDRERHRKREKPYCLDIDECASSNGTLCAHICINTLGSYRCECREGYIREDDGKTCTRGDKYPNDTGHEKSENMVKAGTCCATCKEFYQMKQTVLQLKQKIALLPNNAADLGKYITGDKVLASNTYLPGPPGLPGGQGPPGSPGPKGSPGFPGMPGPPGQPGPRGSMGPMGPSPDLSHIKQGRRGPVGPPGAPGRDGSKGERGAPGPRGSPGPPGSFDFLLLMLADIRNDITELQEKVFGHRTHSSAEEFPLPQEFPSYPEAMDLGSGDDHPRRTETRDLRAPRDFYP

SEQ ID NO: 15092 - protein, 1368 aa, Homo sapiens
MQGPPLLTAAHLLCVCTAALAVAPGPRFLVTAPGIIRPGGNVTIGVELLEHCPSQVTVKAELLKTASNLTVSVLEAEGVFEKGSFKTLTLPSDPKSNLIQQWLSQQSDLGVISKTFQLSSHPILGDWSIQVQVNDQTYYQSFQVSEYVLPKFEVTLQTPLYCSMNSKHLNGTITAKYTYGKPVKGDVTLTFLPLSFWGKKKNITKTFKINGSANFSFNDEEMKNVMDSSNGLSEYLDLSSPGPVEILTTVTESVTGISRNVSTNVFFKQHDYIIEFFDYTTVLKPSLNFTATVKVTRADGNQLTLEERRNNVVITVTQRNYTEYWSGSNSGNQKMEAVQKINYTVPQSGTFKIEFPILEDSSELQLKAYFLGSKSSMAVHSLFKSPSKTYIQLKTRDENIKVGSPFELVVSGNKRLKELSYMVVSRGQLVAVGKQNSTMFSLTPENSWTPKACVIVYYIEDDGEIISDVLKIPVQLVFKNKIKLYWSKVKAEPSEKVSLRISVTQPDSIVGIVAVDKSVNLMNASNDITMENVVHELELYNTGYYLGMFMNSFAVFQECGLWVLTDANLTKDYIDGVYDNAEYAERFMEENEGHIVDIHDFSLGSSPHVRKHFPETWIWLDTNMGYRIYQEFEVTVPDSITSWVATGFVISEDLGLGLTTTPVELQAFQPFFIFLNLPYSVIRGEEFALEITIFNYLKDATEVKVIIEKSDKFDILMTSNEINATGHQQTLLVPSEDGATVLFPIRPTHLGEIPITVTALSPTASDAVTQMILVKAEGIEKSYSQSILLDLTDNRLQSTLKTLSFSFPPNTVTGSERVQITAIGDVLGPSINGLASLIRMPYGCGEQNMINFAPNIYILDYLTKKKQLTDNLKEKALSFMRQGYQRELLYQREDGSFSAFGNYDPSGSTWLSAFVLRCFLEADPYIDIDQNVLHRTYTWLKGHQKSNGEFWDPGRVIHSELQGGNKSPVTLTAYIVTSLLGYRKYQPNIDVQESIHFLESEFSRGISDNYTLALITYALSSVGSPKAKEALNMLTWRAEQEGGMQFWVSSESKLSDSWQPRSLDIEVAAYALLSHFLQFQTSEGIPIMRWLSRQRNSLGGFASTQDTTVALKALSEFAALMNTERTNIQVTVTGPSSPSPVKFLIDTHNRLLLQTAELAVVQPTAVNISANGFGFAICQLNVVYNVKASGSSRRRRSIQNQEAFDLDVAVKENKDDLNHVDLNVCTSFSGPGRSGMALMEVNLLSGFMVPSEAISLSETVKKVEYDHGKLNLYLDSVNETQFCVNIPAVRNFKVSNTQDASVSIVDYYEPRRQAVRSYNSEVKLSSCDLCSDVQGCRPCEDGASGSHHHSSVIFIFCFKLLYFMELWL

SEQ ID NO: 15093 - protein, 1054 aa, Homo sapiens
MEIKDQGAQMEPLLPTRNDEEAVVDRGGTRSILKTHFEKEDLEGHRTLFIGVHVPLGGRKSHRRHRHRGHKHRKRDRERDSGLEDGRESPSFDTPSQRVQFILGTEDDDEEHIPHDLFTELDEICWREGEDAEWRETARWLKFEEDVEDGGERWSKPYVATLSLHSLFELRSCILNGTVLLDMHANTLEEIADMVLDQQVSSGQLNEDVRHRVHEALMKQHHHQNQKKLTNRIPIVRSFADIGKKQSEPNSMDKNAGQVVSPQSAPACVENKNDVSRENSTVDFSKGLGGQQKGHTSPCGMKQRHEKGPPHQQEREVDLHFMKKIPPGAEASNILVGELEFLDRTVVAFVRLSPAVLLQGLAEVPIPTRFLFILLGPLGKGQQYHEIGRSIATLMTDEVFHDVAYKAKDRNDLVSGIDEFLDQVTVLPPGEWDPSIRIEPPKNVPSQEKRKIPAVPNGTAAHGEAEPHGGHSGPELQRTGRIFGGLILDIKRKAPYFWSDFRDAFSLQCLASFLFLYCACMSPVITFGGLLGEATEGRISAIESLFGASMTGIAYSLFGGQPLTILGSTGPVLVFEKILFKFCKEYGLSYLSLRASIGLWTATLCIILVATDASSLVCYITRFTEEAFASLICIIFIYEALEKLFELSEAYPINMHNDLELLTQYSCNCVEPHNPSNGTLKEWRESNISASDIIWENLTVSECKSLHGEYVGRACGHDHPYVPDVLFWSVILFFSTVTLSATLKQFKTSRYFPTKVRSIVSDFAVFLTILCMVLIDYAIGIPSPKLQVPSVFKPTRDDRGWFVTPLGPNPWWTVIAAIIPALLCTILIFMDQQITAVIINRKEHKLKKGCGYHLDLLMVAVMLGVCSIMGLPWFVAATVLSITHVNSLKLESECSAPGEQPKFLGIREQRVTGLMIFILMGSSVFMTSILKFIPMPVLYGVFLYMGASSLKGIQFFDRIKLFWMPAKHQPDFIYLRHVPLRKVHLFTIIQMSCLGLLWIIKVSRAAIVFPMMVLALVFVRKLMDLLFTKRELSWLDDLMPESKKKKLEDAEKEH

SEQ ID NO: 15094 - protein, 496 aa, Homo sapiens
MVLWGPVLGALLVVIAGYLCLPGMLRQRRPWEPPLDKGTVPWLGHAMAFRKNMFEFLKRMRTKHGDVFTVQLGGQYFTFVMDPLSFGSILKDTQRKLDFGQYAKKLVLKVFGYRSVQGDHEMIHSASTKHLRGDGLKDLNETMLDSLSFVMLTSKGWSLDASCWHEDSLFRFCYYILFTAGYLSLFGYTKDKEQDLLQAGELFMEFRKFDLLFPRFVYSLLWPREWLEVGRLQRLFHKMLSVSHSQEKEGISNWLGNMLQFLREQGVPSAMQDKFNFMMLWASQGNTGPTSFWALLYLLKHPEAIRAVREEATQVLGEARLETKQSFAFKLGALQHTPVLDSVVEETLRLRAAPTLLRLVHEDYTLKMSSGQEYLFRHGDILALFPYLSVHMDPDIHPEPTVFKYDRFLNPNGSRKVDFFKTGKKIHHYTMPWGSGVSICPGRFFALSEADFERNVDSGPQLTQSIYDTMISWLMELFSAAETEPLLREPWSPPTL

SEQ ID NO: 15095 - protein, 189 aa, Homo sapiens
MSLADLTKTNIDEHFFGVALENNRRSAACKRSPGTGDFSRNSNASNKSVDYSRSQCSCGSLSSQYDYSEDFLCDCSEKAINRNYLKQPVVKEKEKKKYNVSKISQSKGQKEISVEKKHTWNASLFNSQIHMIAQRRDAMAHRILSARLHKIKGLKNELADMHHKLEAILTENQFLKQLQLRHLKAIGKY

SEQ ID NO: 15096 - protein, 196 aa, Homo sapiens
MMGDEGSAYWIAHQAVKIVFDSIDNLEAAPHDIGYVKQAMFHYFQVPDRLGILTHLYRDFDKCRFAGFCRKIAEGAQQGDPLSRYIFRKAGEMLGRHIVAVLPEIDPVLFQGKIGLPILCVGSVWKSWELLKEGFLLALTQGREIQAQNFFSSFTLMKLRHSSALGGASLGARHIGHLLPMDYSANAIAFYSYTFS

SEQ ID NO: 15097 - protein, 616 aa, Homo sapiens
MEDSQDLNEQSVKKTCTESDVSQSQNSRSMEMQDLASPHTLVGGGDTPGSSKLEKSNLSSTSVTTNGTGVSLLAVKTEPLNSSETTATTGDGALDTFTGSVITSSGYSPRSAHQYSPQLYPSKPYPHILSTPAAQTMSAYAGQTQYSGMQQPAVYTAYSQTGQPYSLPTYDLGVMLPAIKTESGLSQTQSPLQSGCLSYSPGFSTPQPGQTPYSYQMPGSSFAPSSTIYANNSVSNSTNFSGSQQDYPSYTAFGQNQYAQYYSASTYGAYMTSNNTADGTPSSTSTYQLQESLPGLTNQPGEFDTMQSPSTPIKDLDERTCRSSGSKSRGRGRKNNPSPPPDSDLERVFVWDLDETIIVFHSLLTGSYAQKYGKDPPMAVTLGLRMEEMIFNLADTHLFFNDLEECDQVHIDDVSSDDNGQDLSTYSFATDGFHAAASSANLCLPTGVRGGVDWMRKLAFRYRRVKELYNTYKNNVGGLLGPAKRDAWLQLRAEIEGLTDSWLTNALKSLSIISTRSNCINVLVTTTQLIPALAKVLLYSLGGAFPIENIYSATKIGKESCFERIMQRFGRKVVYVVIGDGVEEEQAAKKHNMPFWRISSHSDLLALHQALELEYL

SEQ ID NO: 15098 - protein, 320 aa, Homo sapiens
MSVAGLKKQFYKASQLVSEKVGGAEGTKLDDDFKEMEKKVDVTSKAVTEVLARTIEYLQPNPGDALLDAGESMKRLAEVKDSLDIEVKQNFIDPLQNLCEKDLKEIQHHLKKLEGRRLDFDYKKKRQGKIPDEELRQALEKFEESKEVAETSMHNLLETDIEQVSQLSALVDAQLDYHRQAVQILDELAEKLKRRMREASSRPKREYKPKPREPFDLGEPEQSNGGFPCTTAPKIAASSSFRSSDKPIRTPSRSMPPLDQPSCKALYDFEPENDGELGFHEGDVITLTNQIDENWYEGMLDGQSGFFPLSYVEVLVPLPQ

SEQ ID NO: 15099 - protein, 856 aa, Homo sapiens
MGSKRRRATSPSSSVSGDFDDGHHSVSTPGPSRKRRRLSNLPTVDPIAVCHELYNTIRDYKDEQGRLLCELFIRAPKRRNQPDYYEVVSQPIDLMKIQQKLKMEEYDDVNLLTADFQLLFNNAKSYYKPDSPEYKAACKLWDLYLRTRNEFVQKGEADDEDDDEDGQDNQGTVTEGSSPAYLKEILEQLLEAIVVATNPSGRLISELFQKLPSKVQYPDYYAIIKEPIDLKTIAQRIQNGSYKSIHAMAKDIDLLAKNAKTYNEPGSQVFKDANSIKKIFYMKKAEIEHHEMAKSSLRMRTPSNLAAARLTGPSHSKGSLGEERNPTSKYYRNKRAVQGGRLSAITMALQYGSESEEDAALAAARYEEGESEAESITSFMDVSNPFYQLYDTVRSCRNNQGQLIAEPFYHLPSKKKYPDYYQQIKMPISLQQIRTKLKNQEYETLDHLECDLNLMFENAKRYNVPNSAIYKRVLKLQQVMQAKKKELARRDDIEDGDSMISSATSDTGSAKRKSKKNIRKQRMKILFNVVLEAREPGSGRRLCDLFMVKPSKKDYPDYYKIILEPMDLKIIEHNIRNDKYAGEEGMIEDMKLMFRNARHYNEEGSQVYNDAHILEKLLKEKRKELGPLPDDDDMASPKLKLSRKSGISPKKSKYMTPMQQKLNEVYEAVKNYTDKRGRRLSAIFLRLPSRSELPDYYLTIKKPMDMEKIRSHMMANKYQDIDSMVEDFVMMFNNACTYNEPESLIYKDALVLHKVLLETRRDLEGDEDSHVPNVTLLIQELIHNLFVSVMSHQDDEGRCYSDSLAEIPAVDPNFPNKPPLTFDIIRKNVENNRYRRLDLFQEHMFEVLERARRMNR

SEQ ID NO: 15100 - protein, 1824 aa, Homo sapiens
MSAGGRDEERRKLADIIHHWNANRLDLFEISQPTEDLEFHGVMRFYFQDKAAGNFATKCIRVSSTATTQDVIETLAEKFRPDMRMLSSPKYSLYEVHVSGERRLDIDEKPLVVQLNWNKDDREGRFVLKNENDAIPPKKAQSNGPEKQEKEGVIQNFKRTLSKKEKKEKKKREKEALRQASDKDDRPFQGEDVENSRLAAEVYKDMPETSFTRTISNPEVVMKRRRQQKLEKRMQEFRSSDGRPDSGGTLRIYADSLKPNIPYKTILLSTTDPADFAVAEALEKYGLEKENPKDYCIARVMLPPGAQHSDEKGAKEIILDDDECPLQIFREWPSDKGILVFQLKRRPPDHIPKKTKKHLEGKTPKGKERADGSGYGSTLPPEKLPYLVELSPGRRNHFAYYNYHTYEDGSDSRDKPKLYRLQLSVTEVGTEKLDDNSIQLFGPGIQPHHCDLTNMDGVVTVTPRSMDAETYVEGQRISETTMLQSGMKVQFGASHVFKFVDPSQDHALAKRSVDGGLMVKGPRHKPGIVQETTFDLGGDIHSGTALPTSKSTTRLDSDRVSSASSTAERGMVKPMIRVEQQPDYRRQESRTQDASGPELILPASIEFRESSEDSFLSAIINYTNSSTVHFKLSPTYVLYMACRYVLSNQYRPDISPTERTHKVIAVVNKMVSMMEGVIQKQKNIAGALAFWMANASELLNFIKQDRDLSRITLDAQDVLAHLVQMAFKYLVHCLQSELNNYMPAFLDDPEENSLQRPKIDDVLHTLTGAMSLLRRCRVNAALTIQLFSQLFHFINMWLFNRLVTDPDSGLCSHYWGAIIRQQLGHIEAWAEKQGLELAADCHLSRIVQATTLLTMDKYAPDDIPNINSTCFKLNSLQLQALLQNYHCAPDEPFIPTDLIENVVTVAENTADELARSDGREVQLEEDPDLQLPFLLPEDGYSCDVVRNIPNGLQEFLDPLCQRGFCRLIPHTRSPGTWTIYFEGADYESHLLRENTELAQPLRKEPEIITVTLKKQNGMGLSIVAAKGAGQDKLGIYVKSVVKGGAADVDGRLAAGDQLLSVDGRSLVGLSQERAAELMTRTSSVVTLEVAKQGAIYHGLATLLNQPSPMMQRISDRRGSGKPRPKSEGFELYNNSTQNGSPESPQLPWAEYSEPKKLPGDDRLMKNRADHRSSPNVANQPPSPGGKSAYASGTTAKITSVSTGNLCTEEQTPPPRPEAYPIPTQTYTREYFTFPASKSQDRMAPPQNQWPNYEEKPHMHTDSNHSSIAIQRVTRSQEELREDKAYQLERHRIEAAMDRKSDSDMWINQSSSLDSSTSSQEHLNHSSKSVTPASTLTKSGPGRWKTPAAIPATPVAVSQPIRTDLPPPPPPPPVHYAGDFDGMSMDLPLPPPPSANQIGLPSAQVAAAERRKREEHQRWYEKEKARLEEERERKRREQERKLGQMRTQSLNPAPFSPLTAQQMKPEKPSTLQRPQETVIRELQPQQQPRTIERRDLQYITVSKEELSSGDSLSPDPWKRDAKEKLEKQQQMHIVDMLSKEIQELQSKPDRSAEESDRLRKLMLEWQFQKRLQESKQKDEDDEEEEDDDVDTMLIMQRLEAERRARLQDEERRRQQQLEEMRKREAEDRARQEEERRRQEEERTKRDAEEKRRQEEGYYSRLEAERRRQHDEAARRLLEPEAPGLCRPPLPRDYEPPSPSPAPGAPPPPPQRNASYLKTQVLSPDSLFTAKFVAYNEEEEEEDCSLAGPNSYPGSTGAAVGAHDACRDAKEKRSKSQDADSPGSSGAPENLTFKERQRLFSQGQDVSNKVKASRKLTELENELNTK

SEQ ID NO: 15101 - protein, 78 aa, Homo sapiens
GNTGMVGGSVPVFDEIILSTARMNRVLSFHSVSESPFYVLIETSGSNAGHDAEKLGHFLEHALGSGLVTDGTMATDQR

SEQ ID NO: 15102 - protein, 866 aa, Homo sapiens
MEEGNNNEEVIHLNNFHCHRGQEWINLRDGPITISDSSDEERIPMLVTPAPQQHEEEDLDDDVILTEDDSEDDYGEFLDLGPPGISEFTKPSGQTEREPKPGPSHNQAANDIVNPRSEQKVIILEEGSLLYTESDPLETQNQSSEDSETELLSNLGESAALADDQAIEEDCWLDHPYFQSLNQQPREITNQVVPQERQPEAELGRLLFQHEFPGPAFPRPEPQQGGISGPSSPQPAHPLGEFEDQQLASDDEEPGPAFPMQESQEPNLENIWGQEAAEVDQELVELLVKETEARFPDVANGFIEEIIHFKNYYDLNVLCNFLLENPDYPKREDRIIINPSSSLLASQDETKLPKIDFFDYSKLTPLDQRCFIQAADLLMADFKVLSSQDIKWALHELKGHYAITRKALSDAIKKWQELSPETSGKRKKRKQMNQYSYIDFKFEQGDIKIEKRMFFLENKRRHCRSYDRRALLPAVQQEQEFYEQKIKEMAEHEDFLLALQMNEEQYQKDGQLIECRCCYGEFPFEELTQCADAHLFCKECLIRYAQEAVFGSGKLELSCMEGSCTCSFPTSELEKVLPQTILYKYYERKAEEEVAAAYADELVRCPSCSFPALLDSDVKRFSCPNPHCRKETCRKCQGLWKEHNGLTCEELAEKDDIKYRTSIEEKMTAARIRKCHKCGTGLIKSEGCNRMSCRCGAQMCYLCRVSINGYDHFCQHPRSPGAPCQECSRCSLWTDPTEDDEKLIEEIQKEAEEEQKRKNGENTFKRIGPPLEKPVEKVQRVEALPRPVPQNLPQPQMPPYAFAHPPFPLPPVRPVFNNFPLNMGPIPAPYVPPLPNVRVNYDFGPIHMPLEHNLPMHFGPQPRHRF

SEQ ID NO: 15103 - protein, 1144 aa, Homo sapiens
MAVPARTCGASRPGPARTARPWPGCGPHPGPGTRRPTSGPPRPLWLLLPLLPLLAAPGASAYSFPQQHTMQHWARRLEQEVDGVMRIFGGVQQLREIYKDNRNLFEVQENEPQKLVEKVAGDIESLLDRKVQALKRLADAAENFQKAHRWQDNIKEEDIVYYDAKADAELDDPESEDVERGSKASTLRLDFIEDPNFKNKVNYSYAAVQIPTDIYKGSTVILNELNWTEALENVFMENRRQDPTLLWQVFGSATGVTRYYPATPWRAPKKIDLYDVRRRPWYIQGASSPKDMVIIVDVSGSVSGLTLKLMKTSVCEMLDTLSDDDYVNVASFNEKAQPVSCFTHLVQANVRNKKVFKEAVQGMVAKGTTGYKAGFEYAFDQLQNSNITRANCNKMIMMFTDGGEDRVQDVFEKYNWPNRTVRVFTFSVGQHNYDVTPLQWMACANKGYYFEIPSIGAIRINTQEYLDVLGRPMVLAGKEAKQVQWTNVYEDALGLGLVVTGTLPVFNLTQDGPGEKKNQLILGVMGIDVALNDIKRLTPNYTLGANGYVFAIDLNGYVLLHPNLKPQTTNFREPVTLDFLDAELEDENKEEIRRSMIDGNKGHKQIRTLVKSLDERYIDEVTRNYTWVPIRSTNYSLGLVLPPYSTFYLQANLSDQILQVKYFEFLLPSSFESEGHVFIAPREYCKDLNASDNNTEFLKNFIELMEKVTPDSKQCNNFLLHNLILDTGITQQLVERVWRDQDLNTYSLLAVFAATDGGITRVFPNKAAEDWTENPEPFNASFYRRSLDNHGYVFKPPHQDALLRPLELENDTVGILVSTAVELSLGRRTLRPAVVGVKLDLEAWAEKFKVLASNRTHQDQPQKQCGPNSHCEMDCEVNNEDLLCVLIDDGGFLVLSNQNHQWDQVGRFFSEVDANLMLALYNNSFYTRKESYDYQAACAPQPPGNLGAAPRGVFVPTVADFLNLAWWTSAAAWSLFQQLLYGLIYHSWFQADPAEAEGSPETRESSCVMKQTQYYFGSVNASYNAIIDCGNCSRLFHAQRLTNTNLLFVVAEKPLCSQCEAGRLLQKETHSDGPEQCELVQRPRYRRGPHICFDYNATEDTSDCGRGASFPPSLGVLVSLQLLLLLGLPPRPQPQVLVHASRRL

SEQ ID NO: 15104 - protein, 524 aa, Homo sapiens
ASKTVQEVHPGEPPFDLELFYVKYRNFSYLHCKWATMEELEKDPRIAQKIKRFRNKQAQMKHIFTEPDEDLFNPDYVEVDRILEVAHTKDAETGEEVTHYLVKWCSLPYEESTWELEEDVDPAKVKEFESLQVLPEIKHVERPASDSWQKLEKSREYKNSNQLREYQLEGMNWLLFNWYNRKNCILADEMGLGKTIQSITFLSEIFLRGIHGPFLIIAPLSTITNWEREFRTWTEMNAIVYHGSQISRQMIQQYEMVYRDAQGNPLSGVFKFHVVITTFEMILADCPELKKIHWGRWKDILTHGRFKWHLNEKDMEMICRALLVYCVKHYKGDEKIKSFIWELITPTKDGQAQTLQNHSGLSAPVPRGRKGKKTKNQLLIPELKDADWLATCNPEVVLHDDGYKKHLKQHCNKVLLRVRMLYYLKAEILGEAAEKAFEGSPARELDVPLPDIDYMEIPVDWWDAEADKSLLIGVFKHGYERYNAMRADPALCFLEKVGMPDEKSLSAEQGVTDGTSDIPERQHR

SEQ ID NO: 15105 - protein, 156 aa, Homo sapiens
MELRSYQWEVIMPALEGKNIIIWLPTGAGKTRAAAYVAKRHLETVDGAKVVVLVNRVHLVTQHGEEFRRMLDGRWTVTTLSGDMGPRAGFGHLARCHDLLICTAELLQMALTSPEEEEHVELTVFSLIVVDECHHTHKDTVYNVIMSQYLELKLQR

SEQ ID NO: 15106 - protein, 747 aa, Homo sapiens
MEIPNPPTSKCITYWKRKVKSEYMRLRQLKRLQANMGAKALYVANFAKVQEKTQILNEEWKKLRVQPVQSMKPVSGHPFLKKCTIESIFPGFASQHMLMRSLNTVALVPIMYSWSPLQQNFMVEDETVLCNIPYMGDEVKEEDETFIEELINNYDGKVHGEEEMIPGSVLISDAVFLELVDALNQYSDEEEEGHNDTSDGKQDDSKEDLPVTRKRKRHAIEGNKKSSKKQFPNDMIFSAIASMFPENGVPDDMKERYRELTEMSDPNALPPQCTPNIDGPNAKSVQREQSLHSFHTLFCRRCFKYDCFLHPFHATPNVYKRKNKEIKIEPEPCGTDCFLLLEGAKEYAMLHNPRSKCSGRRRRRHHIVSASCSNASASAVAETKEGDSDRDTGNDWASSSSEANSRCQTPTKQKASPAPPQLCVVEAPSEPVEWTGAEESLFRVFHGTYFNNFCSIARLLGTKTCKQVFQFAVKESLILKLPTDELMNPSQKKKRKHRLWAAHCRKIQLKKDNSSTQVYNYQPCDHPDRPCDSTCPCIMTQNFCEKFCQCNPDCQNRFPGCRCKTQCNTKQCPCYLAVRECDPDLCLTCGASEHWDCKVVSCKNCSIQRGLKKHLLLAPSDVAGWGTFIKESVQKNEFISEYCGELISQDEADRRGKVYDKYMSSFLFNLNNDFVVDATRKGNKIRFANHSVNPNCYAKVVMVNGDHRIGIFAKRAIQAGEELFFDYRYSQADALKYVGIERETDVL

SEQ ID NO: 15107 - protein, 228 aa, Homo sapiens
MCPKSLSEKNSNNEVACKKTKIKKTCRRIIPPKMKNTSSKAESTLQNSSSAVHTESNKLQPKRTADAMNLSVDVESSQDGDSDEDTTPSLDFSGLSPYERKRLKNISENADFFASLQLSESAARLREMIEKRQPPKSKRKKPKRENGIGCRRSMRLLKVDPSGVSLPAAPTPPTLVADETPLLPPGPLEMTSENQEDNNERFKGFLHTWAGMSKPSSKNTEKGLSSIK

SEQ ID NO: 15108 - protein, 724 aa, Homo sapiens
MAEAGLRGWLLWALLLRLAQSEPYTTIHQPGYCAFYDECGKNPELSGSLMTLSNVSCLSNTPARKITGDHLILLQKICPRLYTGPNTQACCSAKQLVSLEASLSITKALLTRCPACSDNFVNLHCHNTCSPNQSLFINVTRVAQLGAGQLPAVVAYEAFYQHSFAEQSYDSCSRVRVPAAATLAVGTMCGVYGSALCNAQRWLNFQGDTGNGLAPLDITFHLLEPGQAVGSGIQPLNEGVARCNESQGDDVATCSCQDCAASCPAIARPQALDSTFYLGQMPGSLVLIIILCSVFAVVTILLVGFRVAPARDKSKMVDPKKGTSLSDKLSFSTHTLLGQFFQGWGTWVASWPLTILVLSVIPVVALAAGLVFTELTTDPVELWSAPNSQARSEKAFHDQHFGPFFRTNQVILTAPNRSSYRYDSLLLGPKNFSGILDLDLLLELLELQERLRHLQVWSPEAQRNISLQDICYAPLNPDNTSLYDCCINSLLQYFQNNRTLLLLTANQTLMGQTSQVDWKDHFLYCANAPLTFKDGTALALSCMADYGAPVFPFLAIGGYKGKDYSEAEALIMTFSLNNYPAGDPRLAQAKLWEEAFLEEMRAFQRRMAGMFQVTFMAERSLEDEINRTTAEDLPIFATSYIVIFLYISLALGSYSSWSRVMVDSKATLGLGGVAVVLGAVMAAMGFFSYLGIRSSLVILQVVPFLVLSVGADNIFIFVLEYQGP

SEQ ID NO: 15109 - protein, 817 aa, Homo sapiens
CTEILNLPSAARRLYNEKGKEIFALKDLQRDELVYVSCGELWINPDLSIAQQKKQIFLRNLESDIAKIQIFCSTHKIEALVLEVQSDIVSGSKLAVHKPVAIFGEEKQVTEPEEKQMQEDPLTTENASSEILDSHVRAHLRMKACHTLPRYAWQETSHDFDEDDSLPKKTEKGLFENVEPQKKHSCSPKHSKLHKHCHQQFEYRDGQIISHAAPQLVLGVQGPNLRSGMEVVLVEKKSDGSHQRWIHQEDSRTFHLVSNPDLVLAVSMTKTRNEVCGYPVIVQKYKPYNNGAANQKWHYMKNIKALVAFHSTALDKEITSANYAGVCTSSVIKEENIDQPGYCYLSPDGKRKTMLCLACGQSMRTEKGLKQLLPGVPFLCISGTKTQKPFLQGPFKVISVAEVDLSCDKAEKTLSYYQARLLSLRMKTCTQAASHSGMAATHQKAVKIIAYKNGDGYRNGKLIVAGTFPMLLTECTEQLGLARAASKVYTKDGTPIFTLRDLVLWALDESFLQRDSEKQKQDAAPVGKEQIIVEKNPRMKVKNRLFAKSVTSDSLDGIDKSLLTLILRNPIAIWVSCGEPFLPPNALQKAEKLEKQNWLKKDRILADLDTMRHKMRQLKGRRVAACQPATMVPTKSPVQPVVVEGGWTEQTQQEIKLMELIRHTEAHLSEIQEMESKINFPIATKRIAVKPSNLYKQPNTKRVWIYLNGGRPEDGTYAWGKTISELLQDCSSRLKMTHPARALYTPSGEPIQSWDDIERDMVICVSMGHGFKTPKELKQLMEIRANYARIRRQQGPQATDIVVSPSTKLLSLAHLHN

SEQ ID NO: 15110 - protein, 238 aa, Homo sapiens
MTEDSQRNFRSVYYEKVGFRGVEEKKSLEILLKDDRLGILPPHHESHAKVMMYRKEQYLDVLHALKVVRFVSDATPQAEVYLRMYQLESGKLPRSPSFPLEPDDEVFLAIAKAMEEMVEDSVDCYWITRRFVNQLNTKYRDSLPQLPKAFEQYLNLEDGRLLTHLRMCSAAPKLPYDLWFKRCFAGCLPESSLQRVWDKVVSGSCKILVFVAVEILLTFKIKVMALNSAEKITKFLEN

SEQ ID NO: 15111 - protein, 758 aa, Homo sapiens
MGLADASGPRDTQALLSATQAMDLRRRDYHMERPLLNQEHLEELGRWGSAPRTHQWRTWLQCSRARAYALLLQHLPVLVWLPRYPVRDWLLGDLLSGLSVAIMQLPQGLAYALLAGLPPVFGLYSSFYPVFIYFLFGTSRHISVGTFAVMSVMVGSVTESLAPQALNDSMINETARDAARVQVASTLSVLVGLFQVGLGLIHFGFVVTYLSEPLVRGYTTAAAVQVFVSQLKYVFGLHLSSHSGPLSLIYTVLEVCWKLPQSKVGTVVTAAVAGVVLVVVKLLNDKLQQQLPMPIPGELLTLIGATGISYGMGLKHRFEVDVVGNIPAGLVPPVAPNTQLFSKLVGSAFTIAVVGFAIAISLGKIFALRHGYRVDSNQELVALGLSNLIGGIFQCFPVSCSMSRSLVQESTGGNSQVAGAISSLFILLIIVKLGELFHDLPKAVLAAIIIVNLKGMLRQLSDMRSLWKANRADLLIWLVTFTATILLNLDLGLVVAVIFSLLLVVVRTQMPHYSVLGQVPDTDIYRDVAEYSEAKEVRGVKVFRSSATVYFANAEFYSDALKQRCGVDVDFLISQKKKLLKKQEQLKLKQLQKEEKLRKQAASPKGASVSINVNTSLEDMRSNNVEDCKMMVSSGDKMEDATANGQEDSKAPDGSTLKALGLPQPDFHSLILDLGALSFVDTVCLKSLKNIFHDFREIEVEVYMAACHSPVVSQLEAGHFFDASITKKHLFASVHDAVTFALQHPRPVPDSPVSVTRL

SEQ ID NO: 15112 - protein, 291 aa, Homo sapiens
MDLEKNYPTPRTSRTGHGGVNQLGGVFVNGRPLPDVVRQRIVELAHQGVRPCDISRQLRVSHGCVSKILGRIIRTKVQQPPNQPVPASSHSIVSTGSVTQVSSVSTDSAGSSYSISGILGITSPSADTNKRKRDEGIQESPVPNGHSLPGRDFLRKQMRGDLFTQQQLEVLDRVFERQHYSDIFTTTEPIKPEQTTEYSAMASLAGGLDDMKANLASPTPADIGSSVPGPQSYPIVTGSEFSGSPYSHPQYSSYNDSWRFPNPGLLGSPYYYSAAARGAAPPAAATAYDRH

SEQ ID NO: 15113 - protein, 1426 aa, Homo sapiens
MENEPDHENVEQSLCAKTSEEELNKSFNLEASLSKFSYIDMDKELEFKNDLIDDKEFDIPQVDTPPTLESILNETDDEDESFILEDPTLLNIDTIDSHSYDTSSVASSDSGDRTNLKRKKKLPDSFSLHGSVMRHSLLKGISAQIVSAADKVDAGLPTAIAVSSLIAVGTSHGLALIFDQNQALRLCLGSTSVGGQYGAISALSINNDCSRLLCGFAKGQITMWDLASGKLLRSITDAHPPGTAILHIKFTDDPTLAICNDSGGSVFELTFKRVMGVRTCESRCLFSGSKGEVCCIEPLHSKPELKDHPITQFSLLAMASLTKILVIGLKPSLKVWMTFPYGRMDPSSVPLLAWHFVAVQNYVNPMLAFCRGDVVHFLLVKRDESGAIHVTKQKHLHLYYDLINFTWINSRTVVLLDSVEKLHVIDRQTQEELETVEISEVQLVYNSSHFKSLATGGNVSQALALVGEKACYQSISSYGGQIFYLGTKSVYVMMLRSWRERVDHLLKQDCLTEALALAWSFHEGKAKAVVGLSGDASKRKAIVADRMVEILFHYADRALKKCPDQGKIQVMEQHFQDMVPVIVDYCLLLQRKDLLFSQMYDKLSENSVAKGVFLECLEPYILSDKLVGITPQVMKDLIVHFQDKKLMENVEALIVHMDITSLDIQQVVLMCWENRLYDAMIYVYNRGMNEFISPMEKLFRVIAPPLNAGKTLTDEQVVMGNKLLVYISCCLAGRAYPLGDIPEDLVPLVKNQVFEFLIRLHSAEASPEEEIYPYIRTLLHFDTREFLNVLALTFEDFKNDKQAVEYQQRIVDILLKVMVENSDFTPSQVGCLFTFLARQLAKPDNTLFVNRTLFDQVLEFLCSPDDDSRHSERQQVLLELLQAGGIVQFEESRLIRMAEKAEFYQICEFMYEREHQYDKIIDCYLRDPLREEEVFNYIHNILSIPGHSAEEKQSVWQKAMDHIEELVSLKPCKAAELVATHFSGHIETVIKKLQNQVLLFKFLRSLLDPREGIHVNQELLQISPCITEQFIELLCQFNPTQVIETLQVLECYRLEETIQITQKYQLHEVTAYLLEKKGDIHGAFLIMLERLQSKLQEVTHQGENTKEDPSLKDVEDTMVETIALCQRNSHNLNQQQREALWFPLLEAMMAPQKLSSSAIPHLHSEALKSLTMQVLNSMAAFIALPSILQRILQDPVYGKGKLGEIQGLILGMLDTFNYEQTLLETTTSLLNQDLHWSLCNLRASVTRGLNPKQDYCSICLQQYKRRQEMADEIIVFSCGHLYHSFCLQNKECTVEFEGQTRWTCYKCSSSNKVGKLSENSSEIKKGRITPSQVKMSPSYHQSKGDPTAKKGTSEPVLDPQQIQAFDQLCRLYRGSSRLALLTELSQNRSSESYRPFSGSQSAPAFNSIFQNENFQLQLIPPPVTED

SEQ ID NO: 15114 - protein, 795 aa, Homo sapiens
MGENEASLPNTSLQGKKMAYQKVHADQRAPGHSQYLDNDDLQATALDLEWDMEKELEESGFDQFQLDGAENQNLGHSETIDLNLDSIQPATSPKGRFQRLQEESDYITHYTRSAPKSNRCNFCHVLKILCTATILFIFGILIGYYVHTNCPSDAPSSGTVDPQLYQEILKTIQAEDIKKSFRNLVQLYKNEDDMEISKKIKTQWTSLGLEDVQFVNYSVLLDLPGPSPSTVTLSSSGQCFHPNGQPCSEEARKDSSQDLLYSYAAYSAKGTLKAEVIDVSYGMADDLKRIRKIKNVTNQIALLKLGKLPLLYKLSSLEKAGFGGVLLYIDPCDLPKTVNPSHDTFMVSLNPGGDPSTPGYPSVDESFRQSRSNLTSLLVQPISAPLVAKLISSPKARTKNEACSSLELPNNEIRVVSMQVQTVTKLKTVTNVVGFVMGLTSPDRYIIVGSHHHTAHSYNGQEWASSTAIITAFIRALMSKVKRGWRPDRTIVFCSWGGTAFGNIGSYEWGEDFKKVLQKNVVAYISLHSPIRGNSSLYPVASPSLQQLVVEKNNFNCTRRAQCPETNISSIQIQGDADYFINHLGVPIVQFAYEDIKTLEGPSFLSEARFSTRATKIEEMDPSFNLHETITKLSGEVILQIANEPVLPFNALDIALEVQNNLKGDQPNTHQLLAMALRLRESAELFQSDEMRPANDPKERAPIRIRMLNDILQDMEKSFLVKQAPPGFYRNILYHLDEKTSRFSILIEAWEHCKPLASNETLQEALSEVLNSINSAQVYFKAGLDVFKSVLDGKN

SEQ ID NO: 15115 - protein, 215 aa, Homo sapiens
MSNPSAPPPYEDRNPLYPGPPPPGGYGQPSVLPGGYPAYPGYPQPGYGHPAGYPQPMPPTHPMPMNYGPGHGYDGEERAVSDSFGPGEWDDRKVRHTFIRKGTCQRLCEEKCGCLLRVLCCLRCHLPDPCLLPGTQTPFPMEHHSADPFYFCHGLHDGHHFQYVPNQSRHHCNDHHCGGIHFSHHLLLSDQGGLHLVHRPLLCPGNCAPGDWDCH

SEQ ID NO: 15116 - protein, 1403 aa, Homo sapiens
MSGARTASTPTPPQTGGGLEPQANGETPQVAVIVRPDDRSQGAIIADRPGLPGPEHSPSESQPSSPSPTPSPSPVLEPGSEPNLAVLSIPGDTMTTIQMSVEESTPISRETGEPYRLSPEPTPLAEPILEVEVTLSKPVPESEFSSSPLQAPTPLASHTVEIHEPNGMVPSEDLEPEVESSPELAPPPACPSESPVPIAPTAQPEELLNGAPSPPAVDLSPVSEPEEQAKEVTASMAPPTIPSATPATAPSATSPAQEEEMEEEEEEEEGEAGEAGEAESEKGGEELLPPESTPIPANLSQNLEAAAATQVAVSVPKRRRKIKELNKKEAVGDLLDAFKEANPAVPEVENQPPAGSNPGPESEGSGVPPRPEEADETWDSKEDKIHNAENIQPGEQKYEYKSDQWKPLNLEEKKRYDREFLLGFQFIFASMQKPEGLPHISDVVLDKANKTPLRPLDPTRLQGINCGPDFTPSFANLGRTTLSTRGPPRGGPGGELPRGPAGLGPRRSQQGPRKEPRKIIATVLMTEDIKLNKAEKAWKPSSKRTAADKDRGEEDADGSKTQDLFRRVRSILNKLTPQMFQQLMKQVTQLAIDTEERLKGVIDLIFEKAISEPNFSVAYANMCRCLMALKVPTTEKPTVTVNFRKLLLNRCQKEFEKDKDDDEVFEKKQKEMDEAATAEERGRLKEELEEARDIARRRSLGNIKFIGELFKLKMLTEAIMHDCVVKLLKNHDEESLECLCRLLTTIGKDLDFEKAKPRMDQYFNQMEKIIKEKKTSSRIRFMLQDVLDLRGSNWVPRRGDQGPKTIDQIHKEAEMEEHREHIKVQQLMAKGSDKRRGGPPGPPISRGLPLVDDGGWNTVPISKGSRPIDTSRLTKITKPGSIDSNNQLFAPGGRLSWGKGSSGGSGAKPSDAASEAARPATSTLNRFSALQQAVPTESTDNRRVVQRSSLSRERGEKAGDRGDRLERSERGGDRGDRLDRARTPATKRSFSKEVEERSRERPSQPEGLRKAASLTEDRDRGRDAVKREAALPPVSPLKAALSEEELEKKSKAIIEEYLHLNDMKEAVQCVQELASPSLLFIFVRHGVESTLERSAIAREHMGQLLHQLLCAGHLSTAQYYQGLYEILELAEDMEIDIPHVWLYLAELVTPILQEGGVPMGELFREITKPLRPLGKAASLLLEILGLLCKSMGPKKVGTLWREAGLSWKEFLPEGQDIGAFVAEQKVEYTLGEESEAPGQRALPSEELNRQLEKLLKEGSSNQRVFDWIEANLSEQQIVSNTLVRALMTAVCYSAIIFETPLRVDVAVLKARAKLLQKYLCDEQKELQALYALQALVVTLEQPPNLLRMFFDALYDEDVVKEDAFYSWESSKDPAEQQGKGVALKSVTAFFKWLREAEEESDHN

SEQ ID NO: 15117 - protein, 961 aa, Homo sapiens
MRWPQPGAAARLPPESPGPPESPGPPEREAAAARRWTGAEPQDCAPGSGRPEKPPQLSEDDIWLKSEGDNYSATLLEPAASSLSPDHKNMEIEVSVAECKSVPGITSTPHPMDHPSAFYSPPHNGLLTDHHESLDNDVAREIRYLDEVLEANCCDSAVDGTYNGTSSPEPGAVVLVGGLSPPVHEATQPEPTERTASRQAPPHIELSNSSPDPMAEAERTNGHSPSQPRDALGDSLQVPVSPSSTTSSRCSSRDGEFTLTTLKKEAKFELRAFHEDKKPSKLFEDDEHEKEQYCIRKVRPSEEMLELEKERRELIRSQAVKKNPGIAAKWWNPPQEKTIEEQLDEEHLESHKKYKERKERRAQQEQLLLQKQLQQQQQQPPSQLCTAPASSHERASMIDKAKEDIVTEQIDFSAARKQFQLMENSRQAVAKGQSTPRLFSIKPFYRPLGSVNSDKPLTNPRPPSVGGPPEDSGASAAKGQKSPGALETPSAAGSQGNTASQGKEGPYSEPSKRGPLSKLWAEDGEFTSARAVLTVVKDDDHGILDQFSRSVNVSLTQEELDSGLDELSVRSQDTTVLETLSNDFSMDNISDSGASNETTNALQENSLADFSLPQTPQTDNPSEGRGEGVSKSFSDHGFYSPSSTLGDSPLVDDPLEYQAGLLVQNAIQQAIAEQVDKAVSKTSRDGAEQQGPEATVEEAEAAAFGSEKPQSMFEPPQVSSPVQEKRDVLPKILPAEDRALRERGPPQPLPAVQPSGPINMEETRPEGSYFSKYSEAAELRSTASLLATQESDVMVGPFKLRSRKQRTLSMIEEEIRAAQEREEELKRQRQVLQSTQSPRTKNAPSLPSRTCYKTAPGKIEKVKPPPSPTTEGPSLQPDLAPEEAAGTQRPKNLMQTLMEDYETHKSKRRERMDDSSYTSKLLSCKVTSEVLEATRVNRRKSALALRWEAGIYANQEEEDNE

SEQ ID NO: 15118 - protein, 1022 aa, Homo sapiens
MATEGAAQLGNRVAGMVCSLWVLLLVSSVLALEEVLLDTTGETSEIGWLTYPPGGWDEVSVLDDQRRLTRTFEACHVAGAPPGTGQDNWLQTHFVERRGAQRAHIRLHFSVRACSSLGVSGGTCRETFTLYYRQAEEPDSPDSVSSWHLKRWTKVDTIAADESFPSSSSSSSSSSSSAAWAVGPHGAGQRAGLQLNVKERSFGPLTQRGFYVAFQDTGACLALVAVRLFSYTCPAVLRSFASFPETQASGAGGASLVAAVGTCVAHAEPEEDGVGGQAGGSPPRLHCNGEGKWMVAVGGCRCQPGYQPARGDKACQACPRGLYKASAGNAPCSPCPARSHAPNPAAPVCPCLEGFYRASSDPPEAPCTGPPSAPQELWFEVQGSALMLHWRLPRELGGRGDLLFNVVCKECEGRQEPASGGGGTCHRCRDEVHFDPRQRGLTESRVLVGGLRAHVPYILEVQAVNGVSELSPDPPQAAAINVSTSHEVPSAVPVVHQVSRASNSITVSWPQPDQTNGNILDYQLRYYDQAEDESHSFTLTSETNTATVTQLSPGHIYGFQVRARTAAGHGPYGGKVYFQTLPQGELSSQLPERLSLVIGSILGALAFLLLAAITVLAVVFQRKRRGTGYTEQLQQYSSPGLGVKYYIDPSTYEDPCQAIRELAREVDPAYIKIEEVIGTGSFGEVRQGRLQPRGRREQTVAIQALWAGGAESLQMTFLGRAAVLGQFQHPNILRLEGVVTKSRPLMVLTEFMELGPLDSFLRQREGQFSSLQLVAMQRGVAAAMQYLSSFAFVHRSLSAHSVLVNSHLVCKVARLGHSPQGPSCLLRWAAPEVIAHGKHTTSSDVWSFGILMWEVMSYGERPYWDMSEQEVLNAIEQEFRLPPPPGCPPGLHLLMLDTWQKDRARRPHFDQLVAAFDKMIRKPDTLQAGGDPGERPSQALLTPVALDFPCLDSPQAWLSAIGLECYQDNFSKFGLCTFSDVAQLSLEDLPALGITLAGHQKKLLHHIQLLQQHLRQQGSVEV

SEQ ID NO: 15119 - protein, 681 aa, Homo sapiens
MDRRNDYGYRVPLFQGPLPPPGSLGLPFPPDIQTETTEEDSVLLMHTLLAATKDSLAMDPPVVNRPKKSKTKKAPIKTITKAAPAAPPVPAANEIATNKPKITWQALNLPVITQISQALPTTEVTNTQASSVTAQPKKANKMKRVTAKAAQGSQSPTGHEGGTIQLKSPLQVLKLPVISQNIHAPIANESASSQALITSIKPKKASKAKKAANKAIASATEVSLAATATHTATTQGQITNETASIHTTAASIRTKKASKARKTIAKVINTDTEHIEALNVTDAATRQIEASVVAIRPKKSKGKKAASRGPNSVSEISEAPLATQIVTNQALAATLRVKRGSRARKAATKARATESQTPNADQGAQAKIASAQTNVSALETQVAAAVQALADDYLAQLSLEPTTRTRGKRNRKSKHLNGDERSGSNYRRIPWGRRPAPPRDVAILQERANKLVKYLLVKDQTKIPIKRSDMLRDVIQEYDEYFPEIIERASYTLEKMFRVNLKEIDKQSSLYILISTQESSAGILGTTKDTPKLGLLMVILSVIFMNGNKASEAVIWEVLRKLGLRPGVRHSLFGEVRKLITDEFVKQKYLEYKRVPNSRPPEYEFFWGLRSYHETSKMKVLKFACRVQKKDPKDWAVQYREAVEMEVQAAAVAVAEAEARAEWFQHQHWLYWRTQHQHGLQ

SEQ ID NO: 15120 - protein, 783 aa, Homo sapiens
MSEGDAPTPFSRGSRTRASLPVVRSTNQTKERSLGVLYLQYGDETKQLRMPNEITSADTIRALFVSAFPQQLTMKMLESPSVAIYIKDESRNVYYELNDVRNIQDRSLLKVYNKDPAHAFNHTPKTMNGDMRMQRELVYARGDGPGAPRPGSTAHPPHAIPNSPPSTPVPHSMPPSPSRIPYGGTRSMVVPGNATIPRDRISSLPVSRPISPSPSAILERRDVKPDEDMSGKNIAMYRNEGFYADPYLYHEGRMSIASSHGGHPLDVPDHIIAYHRTAIRSASAYCNPSMQAEMHMEQSLYRQKSRKYPDSHLPTLGSKTPPASPHRVSDLRMIDMHAHYNAHGPPHTMQPDRASPSRQAFKKEPGTLVYIEKPRSAAGLSSLVDLGPPLMEKQVFAYSTATIPKDRETSEKMMKTTANRNHTDSAGTPHVSGGKMLSALESTVPPSQPPPVGTSAIHMSLLEMRRSVAELRLQLQQMRQLQLQNQELLRAMMKKAELEISGKVMETMKRLEDPVQRQRVLVEQERQKYLHEEEKIVKKLCELEDFVEDLKKDSTAASRLVTLKDVEDGAFLLRQVGEAVATLKGEFPTLQNKMRAILRIEVEAVRFLKEEPHKLDSLLKRVRSMTDVLTMLRRHVTDGLLKGTDAAQAAQYMAMEKATAAEVLKSQEEAAHTSGQPFHSTGAPGDAKSEVVPLSGMMVRHAQSSPVVIQPSQHSVALLNPAQNLPHVASSPAVPQEATSTLQMSQAPQSPQIPMNGSAMQSLFIEEIHSVSAKNRAVSIEKA

SEQ ID NO: 15121 - protein, 599 aa, Homo sapiens
MLGMYVPDRFSLKSSRVQDGMGLYTARRVRKGEKFGPFAGEKRMPEDLDENMDYRLMWEVRGSKGEVLYILDATNPRHSNWLRFVHEAPSQEQKNLAAIQEGENIFYLAVEDIETDTELLIGYLDSDMEAEEEEQQIMTVIKEGEVENSRRQSTAGRKDRLGCKEDYACPQCESSFTSEDILAEHLQTLHQKPTEEKEFKCKNCGKKFPVKQALQRHFEQHQETCRGDARFVCKADSCGKRLKSKDALKRHQENVHTGDPKKKLICSVCNKKCSSASSLQEHRKIHEIFDCQECMKKFISANQLKRHMITHSEKRPYNCEICNKSFKRLDQVGAHKVIHSEDKPYKCKLCGKGFAHRNVYKNHKKTHSEERPFQCEECKALFRTPFSLQRHLLIHNSERTFKCHHCDATFKRKDTLNVHVQVVHERHKKYRCELCNKAFVTPSVLRSHKKTHTGEKEKICPYCGQKFASSGTLRVHIRSHTGERPYQCPYCEKGFSKNDGLKMHIRTHTREKPYKCSECSKAFSQKRGLDEHKRTHTGEKPFQCDVCDLAFSLKKMLIRHKMTHNPNRPLAECQFCHKKFTRNDYLKVHMDNIHGVADS

SEQ ID NO: 15122 - protein, 504 aa, Homo sapiens
MKSLSLLLAVALGLATAVSAGPAVIECWFVEDASGKGLAKRPGALLLRQGPGEPPPRPDLDPELYLSVHDPAGALQAAFRRYPRGAPAPHCEMSRFVPLPASAKWASGLTPAQNCPRALDGAWLMVSISSPVLSLSSLLRPQPEPQQEPVLITMATVVLTVLTHTPAPRVRLGQDALLDLSFAYMPPTSEAASSLAPGPPPFGLEWRRQHLGKGHLLLAATPGLNGQMPAAQEGAVAFAAWDDDEPWGPWTGNGTFWLPTVQPFQEGTYLATIHLPYLQGQVTLELAVYKPPKVSLMPATLARAAPGEAPPELLCLVSHFYPSGGLEVEWELRGGPGGRSQKAEGQRWLSALRHHSDGSVSLSGHLQPPPVTTEQHGARYACRIHHPSLPASGRSAEVTLEVAGLSGPSLEDSVGLFLSAFLLLGLFKALGWAAVYLSTCKDSKKVQCSTSLYLSLVTLSPHPISKPMEGGCWCGRQNLGLEFTLIWVKTWHYILTVGLFEHAT

SEQ ID NO: 15123 - protein, 106 aa, Homo sapiens
MFTELRSKLSPPRGRAGAVRAGFGERRDVDGSVHLQIPYRAFIHSFIDNECGVPLCNQTWIKTPASPDSATAHFSFCRTLLEHTVSAESIPCHLPRTPGTSLTWHD

SEQ ID NO: 15124 - protein, 1445 aa, Homo sapiens
MAYSWQTDPNPNESHEKQYEHQEFLFVNQPHSSSQVSLGFDQIVDEISGKIPHYESEIDENTFFVPTAPKWDSTGHSLNEAHQISLNEFTSKSRELSWHQVSKAPAIGFSPSVLPKPQNTNKECSWGSPIGKHHGADDSRFSILAPSFTSLDKINLEKELENENHNYHIGFESSIPPTNSSFSSDFMPKEENKRSGHVNIVEPSLMLLKGSLQPGMWESTWQKNIESIGCSIQLVEVPQSSNTSLASFCNKVKKIRERYHAADVNFNSGKIWSTTTAFPYQLFSKTKFNIHIFIDNSTQPLHFMPCANYLVKDLIAEILHFCTNDQLLPKDHILSVCGSEEFLQNDHCLGSHKMFQKDKSVIQLHLQKSREAPGKLSRKHEEDHSQFYLNQLLEFMHIWKVSRQCLLTLIRKYDFHLKYLLKTQENVYNIIEEVKKICSVLGCVETKQITDAVNELSLILQRKGENFYQSSETSAKGLIEKVTTELSTSIYQLINVYCNSFYADFQPVNVPRCTSYLNPGLPSHLSFTVYAAHNIPETWVHRINFPLEIKSLPRESMLTVKLFGIACATNNANLLAWTCLPLFPKEKSILGSMLFSMTLQSEPPVEMITPGVWDVSQPSPVTLQIDFPATGWEYMKPDSEENRSNLEEPLKECIKHIARLSQKQTPLLLSEEKKRYLWFYRFYCNNENCSLPLVLGSAPGWDERTVSEMHTILRRWTFSQPLEALGLLTSSFPDQEIRKVAVQQLDNLLNDELLEYLPQLVQAVKFEWNLESPLVQLLLHRSLQSIQVAHRLYWLLKNAENEAYFKSWYQKLLAALQFCAGKALNDEFSKEQKLIKILGDIGERVKSASDHQRQEVLKKEIGRLEEFFQDVNTCHLPLNPALCIKGIDHDACSYFTSNALPLKITFINANPMGKNISIIFKAGDDLRQDMLVLQLIQVMDNIWLQEGLDMQMIIYRCLSTGKDQGLVQMVPDAVTLAKIHRHSGLIGPLKENTIKKWFSQHNHLKADYEKALRNFFYSCAGWCVVTFILGVCDRHNDNIMLTKSGHMFHIDFGKFLGHAQTFGGIKRDRAPFIFTSEMEYFITEGGKNPQHFQDFVELCCRAYNIIRKHSQLLLNLLEMMLYAGLPELSGIQDLKYVYNNLRPQDTDLEATSHFTKKIKESLECFPVKLNNLIHTLAQMSAISPAKSTSQTFPQESCLLSTTRSIERATILGFSKKSSNLYLIQVTHSNNETSLTEKSFEQFSKLHSQLQKQFASLTLPEFPHWWHLPFTNSDHRRFRDLNHYMEQILNVSHEVTNSDCVLSFFLSEAVQQTVEESSPVYLGEKFPDKKPKVQLVISYEDVKLTILVKHMKNIHLPDGSAPSAHVEFYLLPYPSEVRRRKTKSVPKCTDPTYNEIVVYDEVTELQGHVLMLIVKSKTVFVGAINIRLCSVPLDKEKWYPLGNSII

SEQ ID NO: 15125 - protein, 255 aa, Homo sapiens
RNATDIASQIKYKQSAEMEKANFTSVVDTPEIIHAQQVKNLSSQLQYQCDLKNSKGKITVVQDTPEILRVKENQKNFSSVLYKEDVSPGTAIGKTPEMMRVKQTQDHISSVKYKEAIGQGTPIPDLPEVKRVKETQKHISSVMYKENLGTGIPTTVTPEIERVKRNQENFSSVLYKENLGKGIPTPITPEMERVKRNQENFSSVLYKENMGKGTPLPVTPEMERVKHNQENISSVLYKENMGKGTPLAVTPEMER

SEQ ID NO: 15126 - protein, 745 aa, Homo sapiens
RSKGCDCCGEKSQPQEKSLIGLKNTENNDVEISETKKADVQAPVSPSETSQANPYSEGQFLDEHHSVNFHLGLKEDNDTINDSLIVSETKSKENTMQESLPSGIVNFREEICDMDSSEAMSLESQESPNENFKTVGPCLGDSKNVSQESLETKEEKPEETPKMELSLENVTVEGNACKVTESNLEKAKTMELNVGNEASFHGQERTKTGISEEAAIEENKRNDDSEADTAKLNAKEVATEEFNSDISLSDNTTPVKLNAQTEISEQTAAGELDGGNDVSDLHSSEETNTKMKNNEEMMIGEAMAETGHDGETENEGITTKTSKPDEAETNMLTAEMDNFVCDTVEMSTEEGIIDANKTETNTEYSKSEEKLDNNQMVMESDILQEDHHTSQKVEEPSQCLASGTAISELIIEDNNASPQKLRELDPSLVSANDSPSGMQTRCVWSPLASPSTSILKRGLKRSQEDEISSPVNKVRRVSFADPIYQAGLADDIDRRCSIVRSHSSNSSPIGKSVKTSPTTQSKHNTTSAKGFLSPGSRSPKFKSSKKCLISEMAKESIPCPTESVYPPLVNCVAPVDIILPQITSNMWARGLGQLIRAKNIKTIGDLSTLTASEIKTLPIRSPKVSNVKKALRIYHEQQVKTRGLEEIPVFDISEKTVNGIENKSLSPDEERLVSDIIDPVALEIPLSKNLLAQISALALQLDSEDLHNYSGSQLFEMHEKLSCMANSVIKNLQSRWRSPSHENSI

SEQ ID NO: 15127 - protein, 2058 aa, Homo sapiens
LVRLTGDLIVWSDEMNPPQVIRTLLPLLLESSTESVAEISSNSLERILGPAESDEFLARVYEKLITGCYNILANHADPNSGLDESILEECLQYLEKQLESSQARKAMEEFFSDSGELVQIMMATANENLSAKFCNRVLKFFTKLFQLTEKSPNPSLLHLCGSLAQLACVEPVRLQAWLTRMTTSPPKDSDQLDVIQENRQLLQLLTTYIVRENSQVGEGVCAVLLGTLTPMATEMLANGDGTGFPELMVVMATLASAGQGAGHLQLHNAAVDWLSRCKKYLSQKNVVEKLNANVMHGKHVMILECTCHIMSYLADVTNALSQSNGQGPSHLSVDGEERAIEVDSDWVEELAVEEEDSQAEDSDEDSLCNKLCTFTITQKEFMNQHWYHCHTCKMVDGVGVCTVCAKVCHKDHEISYAKYGSFFCDCGAKEDGSCLALVKRTPSSGMSSTMKESAFQSEPRISESLVRHASTSSPADKAKVTISDGKVADEEKPKKSSLCRTVEGCREELQNQANFSFAPLVLDMLNFLMDAIQTNFQQASAVGSSSRAQQALSELHTVEKAVEMTDQLMVPTLGSQEGAFENVRMNYSGDQGQTIRQLISAHVLRRVAMCVLSSPHGRRQHLAVSHEKGKITVLQLSALLKQADSSKRKLTLTRLASAPVPFTVLSLTGNPCKEDYLAVCGLKDCHVLTFSSSGSVSDHLVLHPQLATGNFIIKAVWLPGSQTELAIVTADFVKIYDLCVDALSPTFYFLLPSSKIRDVTFLFNEEGKNIIVIMSSAGYIYTQLMEEASSAQQGPFYVTNVLEINHEDLKDSNSQVAGGGVSVYYSHVLQMLFFSYCQGKSFAATISRTTLEVLQLFPINIKSSNGGSKTSPALCQWSEVMNHPGLVCCVQQTTGVPLVVMVKPDTFLIQEIKTLPAKAKIQDMVAIRHTACNEQQRTTMILLCEDGSLRIYMANVENTSYWLQPSLQPSSVISIMKPVRKRKTATITTRTSSQVTFPIDFFEHNQQLTDVEFGGNDLLQVYNAQQIKHRLNSTGMYVANTKPGGFTIEISNNNSTMVMTGMRIQIGTQAIERAPSYIEIFGRTMQLNLSRSRWFDFPFTREEALQADKKLNLFIGASVDPAGVTMIDAVKIYGKTKEQFGWPDEPPEEFPSASVSNICPSNLNQSNGTGDSDSAAPTTTSGTVLESSETESLTKLDRLVVSSLEALESCFAVGPIIEKERNKNAAQELATLLLSLPAPASVQQQSKSLLASLHTSRSAYHSHKDQALLSKAVQCLNTSSKEGKDLDPEVFQRLVITARSIAIMRPNNLVHFTESKLPQMETEGMDEGKEPQKQLEGDCCSFITQLVNHFWKLHASKPKNAFLAPACLPGLTHIEATVNALVDIIHGYCTCELDCINTASKIYMQMLLCPDPAVSFSCKQALIRVLRPRNKRRHVTLPSSPRSNTPMGDKDDDDDDDADEKMQSSGIPNGGHIRQESQEQSEVDHGDFEMVSESMVLETAENVNNGNPSPLEALLAGAEGFPPMLDIPPDADDETMVELAIALSLQQDQQAPASDDEGSTAATDGSTLRTSPADHGGSVGSESGGSAVDSVAGEHSVSGRSSAYGDATAEGHPAGPGSVSSSTGAISTTTGHQEGDGSEGEGEGETEGDVHTSNRLHMVRLMLLERLLQTLPQLRNVGGVRAIPYMQVILMLTTDLDGEDEKDKGALDNLLSQLIAELGMDKKDVSKKNERSALNEVHLVVMRLLSVFMSRTKSGSKSSICESSSLISSATAAALLSSGAVDYCLHVLKSLLEYWKSQQNDEEPVATSQLLKPHTTSSPPDMSPFFLRQYVKGHAADVFEAYTQLLTEMVLRLPYQIKKITDTNSRIPPPVFDHSWFYFLSEYLMIQQTPFVRRQVRKLLLFICGSKEKYRQLRDLHTLDSHVRGIKKLLEEQGIFLRASVVTASSGSALQYDTLISLMEHLKACAEIAAQRTINWQKFCIKDDSVLYFLLQVSFLVDEGVSPVLLQLLSCALCGSKVLAALAASSGSSSASSSSAPVAASSGQATTQSKSSTKKSKK

SEQ ID NO: 15128 - protein, 1165 aa, Homo sapiens
MPNSVLWAVDLFGRVYTLSTAGQYWEMCKDSQLEFKRVSATTQCCWGIACDNQVYVYVCASDVPIRRREEAYENQRWNPMGGFCEKLLLSDRWGWSDVSGLQHRPLDRVALPSPHWEWESDWYVDENFGGEPTEKGGWTYAIDFPATYTKDKKWNSCVRRRKWIRYRRYKSRDIWAKIPSKDDPKELPDPFNDLSVGGWEITEEPVGRLSVWAVSLQGKVWYREDVSHSNPEGSSWSLLDTPGEVVQISCGPHDLLWATLWEGQALVREGINRSNPKGSSWSIVEPPGSENGVMHISVGVSVVWAVTKDWKVWFRRGVNSHNPCGTSWIEMVGEMTMVNVGMNDQVWGIGCEDRAVYFRQGVTPSELSGKTWKAIIAARECDRSHSGSSSSLLSAGCFFGDEVRGSGESAPSDTDASSEVERPGPGQILPAEPLDDSKNATGNSASGLGAGRTAEDTVEDACPAEGSREARPNTHPGPAPTPAELPWTNIDLKEAKKVPSHSAAGFPETTSLSSLGLLPLGLEEPYGVDDHPLWAWVSGGGCVVEACAMPRWFTVQAGLSSSVHMLSLSITPAQTAAWRKQIFQQLTERTKRELENFRHYEQAVEQSVWVKTGALQWWCDWKPHKWVDVRLALEQFTGHDGVRDSILFIYYVVHEEKKYIHIFLNEVVALVPVLNETKHSFALYTPERTRQRWPVRLAAATEQDMNDWLALLSLSCCESRKVQGRPSPQAIWSITCKGDIFVSEPSPDLEAHEHPLPCDQMFWRQMGGHLRMVEANSRGVVWGIGYDHTAWVYTGGYGGGCFQGLASSTSNIYTQSDVKCVHIYENQRWNPVTGYTSRGLPTDRYMWSDASGLQECTKAGTKPPSLQWAWVSDWFVDFSVPGGTDQEGWQYASDFPASYHGSKTMKDFVRRRCWARKCKLVTSGPWLEVPPIALRDVSIIPESPGAEGSGHSIALWAVSDKGDVLCRLGVSELNPAGSSWLHVGTDQPFASISIGACYQVWAVARDGSAFYRGSVYPSQPAGDCWYHIPSPPRQRLKQVSAGQTSVYALDENGNLWYRQGITPSYPQGSSWEHVSNNVCRVSVGPLDQVWVIANKVQGSHSLSRGTVCHRTGVQPHEPKGHGWDYGIGGGWDHISVRANATRAPRSSSQEQEPSAPPEAHGPVCC

SEQ ID NO: 15129 - protein, 3060 aa, Homo sapiens
MHSSSYSYRSSDSVFSNTTSTRTSLDSNENLLLVHCGPTLINSCISFGSESFDGHRLEMLQQIANRVQRDSVICEDKLILAGNALQSDSKRLESGVQFQNEAEIAGYILECENLLRQHVIDVQILIDGKYYQADQLVQRVAKLRDEIMALRNECSSVYSKGRILTTEQTKLMISGITQSLNSGFAQTLHPSLTSGLTQSLTPSLTSSSMTSGLSSGMTSRLTPSVTPAYTPGFPSGLVPNFSSGVEPNSLQTLKLMQIRKPLLKSSLLDQNLTEEEINMKFVQDLLNWVDEMQVQLDRTEWGSDLPSVESHLENHKNVHRAIEEFESSLKEAKISEIQMTAPLKLTYAEKLHRLESQYAKLLNTSRNQERHLDTLHNFVSRATNELIWLNEKEEEEVAYDWSERNTNIARKKDYHAELMRELDQKEENIKSVQEIAEQLLLENHPARLTIEAYRAAMQTQWSWILQLCQCVEQHIKENTAYFEFFNDAKEATDYLRNLKDAIQRKYSCDRSSSIHKLEDLVQESMEEKEELLQYKSTIANLMGKAKTIIQLKPRNSDCPLKTSIPIKAICDYRQIEITIYKDDECVLANNSHRAKWKVISPTGNEAMVPSVCFTVPPPNKEAVDLANRIEQQYQNVLTLWHESHINMKSVVSWHYLINEIDRIRASNVASIKTMLPGEHQQVLSNLQSRFEDFLEDSQESQVFSGSDITQLEKEVNVCKQYYQELLKSAEREEQEESVYNLYISEVRNIRLRLENCEDRLIRQIRTPLERDDLHESVFRITEQEKLKKELERLKDDLGTITNKCEEFFSQAAASSSVPTLRSELNVVLQNMNQVYSMSSTYIDKLKTVNLVLKNTQAAEALVKLYETKLCEEEAVIADKNNIENLISTLKQWRSEVDEKRQVFHALEDELQKAKAISDEMFKTYKERDLDFDWHKEKADQLVERWQNVHVQIDNRLRDLEGIGKSLKYYRDTYHPLDDWIQQVETTQRKIQENQPENSKTLATQLNQQKMLVSEIEMKQSKMDECQKYAEQYSATVKDYELQTMTYRAMVDSQQKSPVKRRRMQSSADLIIQEFMDLRTRYTALVTLMTQYIKFAGDSLKRLEEEEKSLEEEKKEHVEKAKELQKWVSNISKTLKDAEKAGKPPFSKQKISSEEISTKKEQLSEALQTIQLFLAKHGDKMTDEERNELEKQVKTLQESYNLLFSESLKQLQESQTSGDVKVEEKLDKVIAGTIDQTTGEVLSVFQAVLRGLIDYDTGIRLLETQLMISGLISPELRKCFDLKDAKSHGLIDEQILCQLKELSKAKEIISAASPTTIPVLDALAQSMITESMAIKVLEILLSTGSLVIPATGEQLTLQKAFQQNLVSSALFSKVLERQNMCKDLIDPCTSEKVSLIDMVQRSTLQENTGMWLLPVRPQEGGRITLKCGRNISILRAAHEGLIDRETMFRLLSAQLLSGGLINSNSGQRMTVEEAVREGVIDRDTASSILTYQVQTGGIIQSNPAKRLTVDEAVQCDLITSSSALLVLEAQRGYVGLIWPHSGEIFPTSSSLQQELITNELAYKILNGRQKIAALYIPESSQVIGLDAAKQLGIIDNNTASILKNITLPDKMPDLGDLEACKNARRWLSFCKFQPSTVHDYRQEEDVFDGEEPVTTQTSEETKKLFLSYLMINSYMDANTGQRLLLYDGDLDEAVGMLLEGCHAEFDGNTAIKECLDVLSSSGVFLNNASGREKDECTATPSSFNKCHCGEPEHEETPENRKCAIDEEFNEMRNTVINSEFSQSGKLASTISIDPKVNSSPSVCVPSLISYLTQTELADISMLRSDSENILTNYENQSRVETNERANECSHSKNIQNFPSDLIENPIMKSKMSKFCGVNETENEDNTNRDSPIFDYSPRLSALLSHDKLMHSQGSFNDTHTPESNGNKCEAPALSFSDKTMLSGQRIGEKFQDQFLGIAAINISLPGEQYGQKSLNMISSNPQVQYHNDKYISNTSGEDEKTHPGFQQMPEDKEDESEIEEYSCAVTPGGDTDNAIVSLTCATPLLDETISASDYETSLLNDQQNNTGTDTDSDDDFYDTPLFEDDDHDSLLLDGDDRDCLHPEDYDTLQEENDETASPADVFYDVSKENENSMVPQGAPVGSLSVKNKAHCLQDFLMDVEKDELDSGEKIHLNPVGSDKVNGQSLETGSERECTNILEGDESDSLTDYDIVGGKESFTASLKFDDSGSWRGRKEEYVTGQEFHSDTDHLDSMQSEESYGDYIYDSNDQDDDDDDGIDEEGGGIRDENGKPRCQNVAEDMDIQLCASILNENSDENENINTMILLDKMHSCSSLEKQQRVNVVQLASPSENNLVTEKSNLPEYTTEIAGKSKENLLNHEMVLKDVLPPIIKDTESEKTFGPASISHDNNNISSTSELGTDLANTKVKLIQGSELPELTDSVKGKDEYFKNMTPKVDSSLDHIICTEPDLIGKPAEESHLSLIASVTDKDPQGNGSDLIKGRDGKSDILIEDETSIQKMYLGEGEVLVEGLVEEENRHLKLLPGKNTRDSFKLINSQFPFPQITNNEELNQKGSLKKATVTLKDEPNNLQIIVSKSPVQFENLEEIFDTSVSKEISDDITSDITSWEGNTHFEESFTDGPEKELDLFTYLKHCAKNIKAKDVAKPNEDVPSHVLITAPPMKEHLQLGVNNTKEKSTSTQKDSPLNDMIQSNDLCSKESISGGGTEISQFTPESIEATLSILSRKHVEDVGKNDFLQSERCANGLGNDNSSNTLNTDYSFLEINNKKERIEQQLPKEQALSPRSQEKEVQIPELSQVFVEDVKDILKSRLKEGHMNPQEVEEPSACADTKILIQNLIKRITTSQLVNEASTVPSDSQMSDSSGVSPMTNSSELKPESRDDPFCIGNLKSELLLNILKQDQHSQKITGVFELMRELTHMEYDLEKRGITSKVLPLQLENIFYKLLADGYSEKIEHVGDFNQKACSTSEMMEEKPHILGDIKSKEGNYYSPNLETVKEIGLESSTVWASTLPRDEKLKDLCNDFPSHLECTSGSKEMASGDSSTEQ

SEQ ID NO: 15130 - protein, 185 aa, Homo sapiens
MSSPLASLSKTRKVPLPSEPMNPGRRGIRIYGDVPASHDSELMAFMTRKLWDLEQQVKAQTDEILSKDQKIAALEDLVQTLRPHPAEATLQRQEELETMCVQLQRQVREMERFLSDYGLQWVGEPMDQEDSESKTVSEHGERDWMTAKKFWKPGDSLAPPEVDFDRLLASLQDLSELVVEGDTQV

SEQ ID NO: 15131 - protein, 462 aa, Homo sapiens
MSLPSRQTAIIVNPPPPEYINTKKNGRLTNQLQYLQKVVLKDLWKHSFSWPFQRPVDAVKLQLPDYYTIIKNPMDLNTIKKRLENKYYAKASECIEDFNTMFSNCYLYNKPGDDIVLMAQALEKLFMQKLSQMPQEEQVVGVKERIKKGTQQNIAVSSAKEKSSPSATEKVFKQQEIPSVFPKTSISPLNVVQGASVNSSSQTAAQVTKGVKRKADTTTPATSAVKASSEFSPTFTEKSVALPPIKENMPKNVLPDSQQQYNVVKTVKVTEQLRHCSEILKEMLAKKHFSYAWPFYNPVDVNALGLHNYYDVVKNPMDLGTIKEKMDNQEYKDAYKFAADVRLMFMNCYKYNPPDHEVVTMARMLQDVFETHFSKIPIEPVESMPLCYIKTDITETTGRENTNEASSEGNSSDDSEDERVKRLAKLQEQLKAVHQQLQVLSQVPFRKLNKKKEKSKKEKKKE

SEQ ID NO: 15132 - protein, 540 aa, Homo sapiens
MDALPRSGLNLKEEPLLPAGLGSVRSWMQGAGILDASTAAQSGVGLARAHFEKQPPSNLRKSNFFHFVLAMYDRQGQPVEVERTAFIDFVEKDREPGAEKTNNGIHYRLRLVYNNGLRTEQDLYVRLIDSMSKQAIIYEGQDKNPEMCRVLLTHEIMCSRCCDRKSCGNRNETPSDPVIIDRFFLKFFLKCNQNCLKNAGNPRDMRRFQVVVSTTVSVDGHVLAVSDNMFVHNNSKHGRRARRLDPSEAATPCIKAISPGEGWTTGGATVIVIGDNFFDGLQVVFGNVLVWSELITPHAIRVQTPPRHIPGVVEVTLSYKSKQFCKGCPGRFVYTALNEPTIDYGFQRLQKVIPRHPGDPERLPKEVLLKRAADLAEALYGVPGSNQELLLKRAADVAEALYSTPRAPGPLAPLAPSHPHPAVVGINAFSSPLAIAVGDATPGPEPGYARSCSSASPRGFAPSPGSQQSGYGGGLGAGLGGYGAPGVAGLGVPGSPSFLNGSTATSPFAKERLRPRAAPPKLPTPGLPQSPRRGASRPVF

SEQ ID NO: 15133 - protein, 2912 aa, Homo sapiens
MSSPRLIPLWKDLKLLLNDTINKSKQPSEDPKNCLIVLSDRSQVLFKESRYPQNMPCVCYYFSDAHFFASLSWVTSNTKEIQAVAWMKSKTEDMVEKRTFSMTERLPPIQSMVHAGSFHILVVYCGDLILRLFGDHFRAFKPLGKVPCRFNISCLCYDPEMKMLLSGILGAVVTWVIELGGTGLQIAHMVSMPGDELVQDIVLNGPSGSLLALCETVVRVLMHQGKGQLGEVKRFTSTSSGSSITCCFTCFDQGFLYAGNQAGEIQVWSLQQGHPLHSFQAHQSGVICIRSRPEAHTLLTAGSDSLIKEWNLTSGSLLRRLELGEELYRLQFIDSITFFCQTAHSFSLHRLPCFYSLFNVCGSAPQQLRRVCCGNNWFRILCTTEDGLLRFVSPVTGDLLVITWPFSILDQAVDWAYDPGKEELFVATGSSEVLVFDTTRCPCPAKYLLGTSPNSQDFVQCLAYGHFNLGRGLEGLIFSGHQSGVIRVLSQHSCARLEKFMHFGAVLALSTLSGGIFGGQGNSLLCSYGMDDYVHLSEAVLDGVKVQLRPLASILSSCHLTHLILLPKSVGAITETNCLRLWKFHDFLSSGSQNGLKFIETLPLHLCAITSFDVCLSLSLFVTGSADGSVRIWDFHGRLIGILDSSLHFGPVCFANDRGDLLVTFNQSLYLVSCLKLLPPALLTRLSFMSISDEVLEVPKPFIPSFFFSFETMFVPKYIYPGQAQQKLVGLEKLVNNRAIAFDHSVPHVIEEDEEGSPVLLRSSMHYSLQDMEDWMQVSKRYQCHYVLPPQLQLTSWDGLNPYQILRYYFGHGREWLFAPDCYIPNSVIRARLWPEGTPIYLQCNLHAPQRELEWDRSQEFFFWHSRVRAISNTEYPKNKEEDEHFLEMRLSKDVTYSVLTDGANRSWLGRKMSEITINSMIETMLNIMVHASLLKYQCCVGALGQIFASYQVSPALRSETARRLLNDTTNSNPLIRELAWEGLKRLGMITHLFAMPLAQGLMDKDERVRIKTLSLMAEIGIHSRTSLLQLTQKQETFREMQQQMIGEEPLDHLLGMRATDLQILSTQVEQRLNENLTLSHRDEKPAFSLDVSMPSELKSSLKPPTVSEESEVAIKPSKGQRRGQAGVKKHSQKWLRGLKKTKERDSKQMSTEPGLLEDESGTEAAPIEMEEASVYSQWSSSTSVIKLSKDVDSQEKDISKDHIALTLKRLQKIRDKRDKKATAQKLKKKHKKKGKEAKVINEETTPPVMEQPVTKKVKIQGRGASGISGRRSTAGDGSSWRDDLCRLMALRISGSQTKMSENLNAELVTFAQEMLVDRHPSWELFQEICPLLKKESKVLLEDLDWDVVPPEKKPIFIQEGAIREDMIQGVTQEVIRHKEVMPREEEQAQKKARDMLGLEETQVILKKGKKVIFLEPGNVTMGKEISKKEEKKTFQKSPKQGRKAVQKERKVGKIKREMTKEERDMSEEVEEMATLEEKVVKQEGKLVMIERTPSWQDWKKAWDEWKQVHGETRKSWKAWKEEWEKRLLQEEEKLHQAGEKLSPEEEMLQEDKKLKWEEWKQVWENMLSSKSKEQQYKDEEEVTLEEEVSREGEEKEQQVTEEQRHIQEEHKWARIHRKRARAEKKRAQEERKLAQEEEKLAQEERQLAQEERKLAQAYVKITQDDREMAQAEGKFAQKEETLAQRGEKLSQEAEKLAQKRKKLAKKWEKVAREEEKLAKKGGKLAEVKNILAQKVEELPQREQNLDWQEKELAQELEELEWDMEELSWKEEELNQEEGKLVEEKKKLAEEEEALAWQREKLSEEETKLAQEEELLIQEKEKLAQHKEKMPEEEERLGRKREQLIEKKMKLAQKRERWINSMEELTKNKMILYQKKNLAQEKKNLAQEKEKLAQRKENLLYNKERLTHSKKQLVQVKNKLGMFNKILAQVEEKLTQEKETVIKKKEKLAETEKKLVQVEDSLAKKQEKLAQEKMKLALEKAMVQGKKRLRGELDIAKEEKALNLEMKRLAEEKMRLVEGKETLSKGETPETSRQRKMTQVEQELFERKLSLEEKILLHEDRILAMEESEIAKGKLEFTRGQRIFVQGQRKLAKASRKLIKKRESLSKEPAKLNKILKALQKLTRDERKLTQEEIKMTKMKRALFVKERRLSIEQSKLDIKEWDFSEKRSELTKDEKKLARKQRKLANKMRRMINKEEKMTEEESKLARKHSEVILDDEEEGGIEEEEVIPFLKRRWRKRKEAKRGDKPKEKFSSQVDEVESEEHFSEEMESLLDELEKQESLSSEEEEEREEEEEREEEEEREEEEERKEEEEGEEKQVEKEEEEKKKKKKEKKKEEVQEKEEVFEEKEEIMSEEETESLSDEEEEEESCSLEEEVDREKEILKKEKQFKLQEQRRKSLRGRERVLSILRGVPHGKGRAIRLGVLKSPLKKLMSTALEMKEKTPVPVPEKQISWEDKKATVVEIPRKFLGTMDKEREVMGKYEPIPPHVLGTVLESQAQDLKTPFMSHILRRTVEAEELQHKPLGAWWKWFLQHPPLMGQTEVQLPLSQIPAKEQHADVSLSDVEWIRHVLERMEAGEQLSRDGFHRLCQLLKDLASKGNLEWLHLAKHEAIVYRHRQALESQDTRISSRQSMSPKYLKVIPPIKAKEKESWPKPLAVPTQKSPLATKRIPDPRAKNWHLLGEPYRSERAQQISIAHKEMEMQYFYPATRDIFPSAHASVEKQTLALMFQKDFWDFKDKRRFPKLPKLEKKTQPISKKKEELPLWETFVALYHVLRMLQQRYPKDSTAWMEQFYQLMDLYQLKSPRIQKLLQELLMREEPQPQEIIYEEALKATELVPGERLFCCLFCGSSHTPRSPQEFQGAVPLPWQNCVRTILPVGIARYGILELAWKSLPEADLHLTKALTHTVAPTL

SEQ ID NO: 15134 - protein, 1519 aa, Homo sapiens
MKPSFPPSTSAVKVNLSEKFTAAATSTPVSSSQSAPPMSPFSSASKPAASGPLSHPTPLSAPPSSVPLKSSVLPSPSGRSAQGSSSPVPSMVQKSPRITPPAAKPGSPQAKSLQPAVAEKQGHQWKDSDPVMAGIGEEIAHFQKELEELKARTSKACFQVGTSEEMKMLRTESDDLHTFLLEIKETTESLHGDISSLKTTLLEGFAGVEEAREQNERNRDSGYLHLLYKRPLDPKSEAQLQEIRRLHQYVKFAVQDVNDVLDLEWDQHLEQKKKQRHLLVPERETLFNTLANNREIINQQRKRLNHLVDSLQQLRLYKQTSLWSLSSAVPSQSSIHSFDSDLESLCNALLKTTIESHTKSLPKVPAKLSPMKQAQLRNFLAKRKTPPVRSTAPASLSRSAFLSQRYYEDLDEVSSTSSVSQSLESEDARTSCKDDEAVVQAPRHAPVVRTPSIQPSLLPHAAPFAKSHLVHGSSPGVMGTSVATSASKIIPQGADSTMLATKTVKHGAPSPSHPISAPQAAAAAALRRQMASQAPAVNTLTESTLKNVPQVVNVQELKNNPATPSTAMGSSVPYSTAKTPHPVLTPVAANQAKQGSLINSLKPSGPTPASGQLSSGDKASGTAKIETAVTSTPSASGQFSKPFSFSPSGTGFNFGIITPTPSSNFTAAQGATPSTKESSQPDAFSSGGGSKPSYEAIPESSPPSGITSASNTTPGEPAASSSRPVAPSGTALSTTSSKLETPPSKLGELLFPSSLAGETLGSFSGLRVGQADDSTKPTNKASSTSLTSTQPTKTSGVPSGFNFTAPPVLGKHTEPPVTSSATTTSVAPPAATSTSSTAVFGSLPVTSAGSSGVISFGGTSLSAGKTSFSFGSQQTNSTVPPSAPPPTTAATPLPTSFPTLSFGSLLSSATTPSLPMSAGRSTEEATSSALPEKPGDSEVSASAASLLEEQQSAQLPQAPPQTSDSVKKEPVLAQPAVSNSGTAASSTSLVALSAEATPATTGVPDARTEAVPPASSFSVPGQTAVTAAAISSAGPVAVETSSTPIASSTTSIVAPGPSAEAAAFGTVTSGSSVFAQPPAASSSSAFNQLTNNTATAPSATPVFGQVAASTAPSLFGQQTGSTASTAAATPQVSSSGFSSPAFGTTAPGVFGQTTFGQASVFGQSASSAASVFSFSQPGFSSVPAFGQPASSTPTSTSGSVFGAASSTSSSSSFSFGQSSPNTGGGLFGQSNAPAFGQSPGFGQGGSVFGGTSAATTTAATSGFSFCQASGFGSSNTGSVFGQAASTGGIVFGQQSSSSSGSVFGSGNTGRGGGFFSGLGGKPSQDAANKNPFSSASGGFGSTATSNTSNLFGNSGAKTFGGFASSSFGEQKPTGTFSSGGGSVASQGFGFSSPNKTGGFGAAPVFGSPPTFGGSPGFGGVPAFGSAPAFTSPLGSTGGKVFGEGTAAASAGGFGFGSSSNTTSFGTLASQNAPTFGSLSQQTSGFGTQSSGFSGFGSGTGGFSFGSNNSSVQGFGGWRS

SEQ ID NO: 15135 - protein, 242 aa, Homo sapiens
MLPPQKKPWESMAKGLVLGALFTSFLLLVYSYAVPPLHAGLASTTPEAAASCSPPALEPEAVIRANGSAGECQPRRNIVFLKTHKTASSTLLNILFRFGQKHRLKFAFPNGRNDFDYPTFFARSLVQDYRPGACFNIICNHMRFHYDEVRGLVPTNAIFITVLRDPARLFESSFHYFGPVVPLTWKLSAGDKLTEFLQDPDRYYDPNGFNAHYLRNLLFFDLGYDNSLDPSSPQVQEHILEV

SEQ ID NO: 15136 - protein, 339 aa, Homo sapiens
MSDPSQLTQNVCLTQEMELSKAFSGQRTLLSAILSMLSLSFSTTSLLSNYWFVGTQKVPKPLCEKGLAAKCFDMPVSLDGDTNTSTQEVVQYNWETGDDRFSFRSFRSGMWLSCEETVEEPGERCRSFIELTPPAKREILWLSLGTQITYIGLQFISFLLLLTDLLLTGNPACGLKLSAFAAVSSVLSGLLGMVAHMMYSQVFQATVNLGPEDWRPHVWNYGWAFYMAWLSFTCCMASAVTTFNTYTRMVLEFKCKHSKSFKENPNCLPHHHQCFPRRLSSAAPTVGPLTSYHQYHNQPIHSVSEGVDFYSELRNKGFQRGASQELKEAVRSSVEEEQC

SEQ ID NO: 15137 - protein, 373 aa, Homo sapiens
MHFEETTALGTTKESPPTSPLSGGSAPGAHLEPPYDPGTHHLPSGDFAQCTSPVPTLPQVGNSGDQAGATVLRMVRPQDTVAYEDLSVDYTQKKWKSLTLSQRALQWNMMPENHHSMASLGENMMKGSELTPKQEFFKGSESSNRTSGGLFGVVPGAAETGDVCEDTFKELEGQTSDEEGSRLENDFLEITDEDKKKSTKDRYDKYKEVGEHPPLSSSPVEHEGVLKGQKSYRCDECGKAFNRSSHLIGHQRIHTGEKPYECNECGKTFRQTSQLIVHLRTHTGEKPYECSECGKAYRHSSHLIQHQRLHNGEKPYKCNECAKAFTQSSRLTDHQRTHTGEKPYECNECGEAFIRSKSLARHQVLHTGWSTMA

SEQ ID NO: 15138 - protein, 715 aa, Homo sapiens
MLLDEYQERLFVGGRDLVYSLSLERISDGYKEIHWPSTALKMEECIMKGKDAGECANYVRVLHHYNRTHLLTCGTGAFDPVCAFIRVGYHLEDPLFHLESPRSERGRGRCPFDPSSSFISTLIGSELFAGLYSDYWSRDAAIFRSMGRLAHIRTEHDDERLLKEPKFVGSYMIPDNEDRDDNKVYFFFTEKALEAENNAHAIYTRVGRLCVNDVGGQRILVNKWSTFLKARLVCSVPGMNGIDTYFDELEDVFLLPTRDHKNPVIFGLFNTTSNIFRGHAICVYHMSSIRAAFNGPYAHKEGPEYHWSVYEGKVPYPRPGSCASKVNGGRYGTTKDYPDDAIRFARSHPLMYQAIKPAHKKPILVKTDGKYNLKQIAVDRVEAEDGQYDVLFIGTDNGIVLKVITIYNQEMESMEEVILEELQIFKDPVPIISMEISSKRQQLYIGSASAVAQVRFHHCDMYGSACADCCLARDPYCAWDGISCSRYYPTGTHAKRRFRRQDVRHGNAAQQCFGQQFVGDALDKTEEHLAYGIENNSTLLECTPRSLQAKVIWFVQKGRETRKEEVKTDDRVVKMDLGLLFLRLHKSDAGTYFCQTVEHSFVHTVRKITLEVVEEEKVEDMFNKDDEEDRHHRMPCPAQSSISQGAKPWYKEFLQLIGYSNFQRVEEYCEKVWCTDRKRKKLKMSPSKWKYANPQEKKLRSKPEHYRLPRHTLDS

SEQ ID NO: 15139 - protein, 242 aa, Homo sapiens
MSAAHVGKSGGQEGRMEYLVKWKGWSQKYSTWEPEENILDARLLAAFEEREREMELYGPKKRGPKPKTFLLKAQAKAKAKTYEFRSDSARGIRIPYPGRSPQDLASTSRAREGLRNMGLSPPASSTSTSSTCRAEAPRDRDRDRDRDRERDRERERERERERERERERERGTSRVDDKPSSPGDSSKKRGPKPRKELPDPSQRPLGEPSAGLGEYLKGRKLDDTPSGAGKFPAGHSVIQLAR

SEQ ID NO: 15140 - protein, 1148 aa, Homo sapiens
MSVPDYMQCAEDHQTLLVVVQPVGIVSEENFFRIYKRICSVSQISVRDSQRVLYIRYRHHYPPENNEWGDFQTHRKVVGLITITDCFSAKDWPQTFEKFHVQKEIYGSTLYDSRLFVFGLQGEIVEQPRTDVAFYPNYEDCQTVEKRIEDFIESLFIVLESKRLDRATDKSGDKIPLLCVPFEKKDFVGLDTDSRHYKKRCQGRMRKHVGDLCLQAGMLQDSLVHYHMSVELLRSVNDFLWLGAALEGLCSASVIYHYPGGTGGKSGARRFQGSTLPAEAANRHRPGAQEVLIDPGALTTNGINPDTSTEIGRAKNCLSPEDIIDKYKEAISYYSKYKNAGVIELEACIKAVRVLAIQKRSMEASEFLQNAVYINLRQLSEEEKIQRYSILSELYELIGFHRKSAFFKRVAAMQCVAPSIAEPGWRACYKLLLETLPGYSLSLDPKDFSRGTHRGWAAVQMRLLHELVYASRRMGNPALSVRHLSFLLQTMLDFLSDQEKKDVAQSLENYTSKCPGTMEPIALPGGLTLPPVPFTKLPIVRHVKLLNLPASLRPHKMKSLLGQNVSTKSPFIYSPIIAHNRGEERNKKIDFQWVQGDVCEVQLMVYNPMPFELRVENMGLLTSGVEFESLPAALSLPAESGLYPVTLVGVPQTTGTITVNGYHTTVFGVFSDCLLDNLPGIKTSGSTVEVIPALPRLQISTSLPRSAHSLQPSSGDEISTNVSVQLYNGESQQLIIKLENIGMEPLEKLEVTSKVLTTKEKLYGDFLSWKLEETLAQFPLQPGKVATFTINIKVKLDFSCQENLLQDLSDDGISVSGFPLSSPFRQVVRPRVEGKPVNPPESNKAGDYSHVKTLEAVLNFKYSGGPGHTEGYYRNLSLGLHVEVEPSVFFTRVSTLPATSTRQCHLLLDVFNSTEHELTVSTRSSEALILHAGECQRMAIQVDKFNFESFPESPGEKGQFANPKQLEEERREARGLEIHSKLGICWRIPSLKRSGEASVEGLLNQLVLEHLQLAPLQWDVLVDGQPCDREAVAACQVGDPVRLEVRLTNRSPRSVGPFALTVVPFQDHQNGVHNYDLHDTVSFVGSSTFYLDAVQPSGQSACLGALLFLYTGDFFLHIRFHEDSTSKELPPSWFCLPSVHVCALEAQA

SEQ ID NO: 15141 - protein, 1202 aa, Homo sapiens
QLEKDKKQLEKENKRLRQQAEIKDTTLEENNVKIGNLEKENKTLSKEIGIYKESCVRLKELEKENKELVKRATIDIKTLVTLREDLVSEKLKTQQMNNDLEKLTHELEKIGLNKERLLHDEQSTDDSRYKLLESKLESTLKKSLEIKEEKIAALEARLEESTNYNQQLRQELKTVKKNYEALKQRQDEERMVQSSPPISGEDNKWERESQETTRELLKVKDRLIEVERNNATLQAEKQALKTQLKQLETQNNNLQAQILALQRQTVSLQEQNTTLQTQNAKLQVENSTLNSQSTSLMNQNAQLLIQQSSLENENESVIKEREDLKSLYDSLIKDHEKLELLHERQASEYESLISKHGTLKSAHKNLEVEHRDLEDRYNQLLKQKGQLEDLEKMLKVEQEKMLLENKNHETVAAEYKKLCGENDRLNHTYSQLLKETEVLQTDHKNLKSLLNNSKLEQTRLEAEFSKLKEQYQQLDITSTKLNNQCELLSQLKGNLEEENRHLLDQIQTLMLQNRTLLEQNMESKDLFHVEQRQYIDKLNELRRQKEKLEEKIMDQYKFYDPSPPRRRGNWITLKMRKLIKSKKDINRERQKSLTLTPTRSDSSEGFLQLPHQDSQDSSSVGSNSLEDGQTLGTKKSSMVALKRLPFLRNRPKDKDKMKACYRRSMSMNDLVQSMVLAGQWTGSTENLEVPDDISTGKRRKELGAMAFSTTAINFSTVNSSAGFRSKQLVNNKDTTSFEDISPQGVSDDSSTGSRVHASRPASLDSGRTSTSNSNNNASLHEVKAGAVNNQSRPQSHSSGEFSLLHDHEAWSSSGSSPIQYLKRQTRSSPVLQHKISETLESRHHKIKTGSPGSEVVTLQQFLEESNKLTSVQIKSSSQENLLDEVMKSLSVSSDFLGKDKPVSCGLARSVSGKTPGDFYDRRTTKPEFLRPGPRKTEDTYFISSAGKPTPGTQGKIKLVKESSLSRQSKDSNPYATLPRASSVISTAEGTTRRTSIHDFLTKDSRLPISVDSPPAAADSNTTAASSEYHLHQWSSHILDIPTHTIGSCAQNDLAIDMPEPLYAQARNSRTGRSHFLNQTFATIRMPSDAFGMLAKDSIGPFTVAHSSQPFLSLNTELVSNISGLPPRPVIRITDQASASLDKPAQKENEQFSDHQNPSNSNLQFSINSNNLVTSACLYPDDTEAALLVSEDNQTVWYEYGCI

SEQ ID NO: 15142 - protein, 754 aa, Homo sapiens
MMSTYKRATLDEEDLVDSLSEGDAYPNGLQVNFHSPRSGQRCWAARTQVEKRLVVLVVLLAAGLVACLAALGIQYQTRSPSVCLSEACVSVTSSILSSMDPTVDPCHDFFSYACGGWIKANPVPDGHSRWGTFSNLWEHNQAIIKHLLENSTASVSEAERKAQVYYRACMNETRIEELRAKPLMELIERLGGWNITGPWAKDNFQDTLQVVTAHYRTSPFFSVYVSADSKNSNSNVIQVDQSGLGLPSRDYYLNKTENEKVLTGYLNYMVQLGKLLGGGDEEAIRPQMQQILDFETALANITIPQEKRRDEELIYHKVTAAELQTLAPAINWLPFLNTIFYPVEINESEPIVVYDKEYLEQISTLINTTDRCLLNNYMIWNLVRKTSSFLDQRFQDADEKFMEVMYGTKKTCLPRWKFCVSDTENNLGFALGPMFVKATFAEDSKSIATEIILEIKKAFEESLSTLKWMDEETRKSAKEKADAIYNMIGYPNFIMDPKELDKVFNDYTAVPDLYFENAMRFFNFSWRVTADQLRKAPNRDQWSMTPPMVNAYYSPTKNEIVFPAGILQAPFYTRSSPKALNFGGIGVVVGHELTHAFDDQGREYDKDGNLRPWWKNSSVEAFKRQTECMVEQYSNYSVNGEPVNGRHTLGENIADNGGLKAAYRAYQNWVKKNGAEHSLPTLGLTNNQLFFLGFAQVWCSVRTPESSHEGLITDPHSPSRFRVIGSLSNSKEFSEHFRCPPGSPMNPPHKCEVW

SEQ ID NO: 15143 - protein, 338 aa, Homo sapiens
MLGRCFPPDTKEKQQLRMTKLCDPAESELSPFLITLILAVLLAEYLIGIIANGFIMAIHAAEWVQNKAVSTSGRILVFLSVSRIALQSLMMLEITISSTSLSFYSEDAVYYAFKISFIFLNFCSLWFAAWLSFFYFVKIANFSYPLFLKLRWRITGLIPWLLWLSVFISFSHSMFCINICTVYCNNSFPIHSSNSTKKTYLSEINVVGLAFFFNLGIVTPLIMFILTATLLILSLKRHTLHMGSNATGSNDPSMEAHMGAIKAISYFLILYIFNAVALFIYLSNMFDINSLWNNLCQIIMAAYPASHSILLIQDNPGLRRAWKRLQLRLHLYPKEWTL

SEQ ID NO: 15144 - protein, 148 aa, Homo sapiens
MSVEHADIWVKSYSLYSRERYICNSGFKRKAGTSSLTECVLNKATNVAHWTTPSLKCINPALVHQRPAPPSTVTTAGVTPQPESLSPSGKEPAASSPSSNNTAATTAAIVPGSQLMPSKSPSTGTTEISSHESSHGTPSQTTAKNWEL

SEQ ID NO: 15145 - protein, 221 aa, Homo sapiens
MSSVAVLTQESFAEHRSGLVPQQIKVATLNSEEESDPPTYKDAFPPLPEKAACLESAQEPAGAWGNKIRPIKASVITQVFHVPLEERKYKDMNQFGEGEQAKICLEIMQRTGAHLELSLAKDQGLSIMVSGKLDAVMKARKDIVARLQTQASATVAIPKEHHRFVIGKNGEKLQDLELKTATKIQIPRPDDPSNQIKITGTKEGIEKARHEVLLISAEQDK

SEQ ID NO: 15146 - protein, 1386 aa, Homo sapiens
MSSSVRRKGKPGKGGGKGSSRGGRGGRSHASKSHGSGGGGGGGGGGGGGNRKASSRIWDDGDDFCIFSESRRPSRPSNSNISKGESRPKWKPKAKVPLQTLHMTSENQEKVKALLRDLQEQDADAGSERGLSGEEEDDEPDCCNDERYWPAGQEPSLVPDLDPLEYAGLASVEPYVPEFTVSPFAVQKLSRYGFNTERCQAVLRMCDGDVGASLEHLLTQCFSETFGERMKISEAVNQISLDECMEQRQEEAFALKSICGEKFIERIQNRVWTIGLELEYLTSRFRKSKPKESTKNVQENSLEICKFYLKGNCKFGSKCRFKHEVPPNQIVGRIERSVDDSHLNAIEDASFLYELEIRFSKDHKYPYQAPLVAFYSTNENLPLACRLHISEFLYDKALTFAETSEPVVYSLITLLEEESEIVKLLTNTHHKYSDPPVNFLPVPSRTRINNPACHKTVIPNNSFVSNQIPEVEKASESEESDEDDGPAPVIVENESYVNLKKKISKRYDWQAKSVHAENGKICKQFRMKQASRQFQSILQERQSLPAWEERETILNLLRKHQVVVISGMTGCGKTTQIPQFILDDSLNGPPEKVANIICTQPRRISAISVAERVAKERAERVGLTVGYQIRLESVKSSATRLLYCTTGVLLRRLEGDTALQGVSHIIVDEVHERTEESDFLLLVLKDIVSQRPGLQVILMSATLNAELFSDYFNSCPVITIPGRTFPVDQFFLEDAIAVTRYVLQDGSPYMRSMKQISKEKLKARRNRTAFEEVEEDLRLSLHLQDQDSVKDAVPDQQLDFKQLLARYKGVSKSVIKTMSIMDFEKVNLELIEALLEWIVDGKHSYPPGAILVFLPGLAEIKMLYEQLQSNSLFNNRRSNRCVIHPLHSSLSSEEQQAVFVKPPAGVTKIIISTNIAETSITIDDVVYVIDSGKMKEKRYDASKGMESLEDTFVSQANALQRKGRAGRVASGVCFHLFTSHHYNHQLLKQQLPEIQRVPLEQLCLRIKILEMFSAHNLQSVFSRLIEPPHTDSLRASKIRLRDLGALTPDERLTPLGYHLASLPVDVRIGKLMLFGSIFRCLDPALTIAASLAFKSPFVSPWDKKEEANQKKLEFAFANSDYLALLQAYKGWQLSTKEGVRASYNYCRQNFLSGRVLQEMASLKRQFTELLSDIGFAREGLRAREIEKRAQGGDGVLDATGEEANSNAENPKLISAMLCAALYPNVVQVKSPEGKFQKTSTGAVRMQPKSAELKFVTKNDGYVHIHPSSVNYQVRHFDSPYLLYHEKIKTSRVFIRDCSMVSVYPLVLFGGGQVNVQLQRGEFVVSLDDGWIRFVAASHQVAELVKELRCELDQLLQDKIKNPSIDLCTCPRGSRIISTIVKLVTTQ

SEQ ID NO: 15147 - protein, 1726 aa, Homo sapiens
MKKIFSKKGESPLGSFARRQRSSAGGGGEPGEGAYSQPGYHVRDRDLGKIHKAASAGNVAKVQQILLLRKNGLNDRDKMNRTALHLACANGHPEVVTLLVDRKCQLNVCDNENRTALMKAVQCQEEKCATILLEHGADPNLADVHGNTALHYAVYNEDISVATKLLLYDANIEAKNKDDLTPLLLAVSGKKQQMVEFLIKKKANVNAVDKLESSHQLISEYKEERIPKHSSQNSNSVDESSEDSLSSLFYFIFFETKSCTVAQAGVLQHDLSSLQSLLPGFTQFFCLHLPSSWDHRLSGKPGVDDSWPTSDDEDLNFDTKNVPKPSLAKLMTASQQSRKNLEATYGTVRTGNRTLFEDRDSDSQDEVVVESLPTTSIKVQCFSHPTYQSPDLLPKPSHKSLANPGLMKEEPTKPGIAKKENGIDIIESAPLEQTNNDNLTYVDEVHKNNRSDMMSALGLGQEEDIESPWDSESISENFPQKYVDPLAGAADGKEKNIGNEQAEESPERYLHLKPTIEMKDSVPNKAGGMKDVQTSKAAEHDLEVASEEEQEREGSENNQPQVEEERKKHRNNEMEVSANIHDGATDDAEDDDDDDGLIQKRKSGETDHQQFPRKENKEYASSGPALQMKEVKSTEKEKRTSKESVNSPVFGKASLLTGGLLQVDDDSSLSEIDEDEGRPTKKTSNEKNKVKNQIQSMDDVDDLTQSSETASEDCELPHSSYKNFMLLIEQLGMECKDSVSLLKIQDAALSCERLLELKKNHCELLTVKIKKMEDKVNVLQRELSETKEIKSQLEHQKVEWERELCSLRFSLNQEEEKRRNADTLYEKIREQLRRKEEQYRKEVEVKQQLELSLQTLEMELRTVKSNLNQVVQERNDAQRQLSREQNARMLQDGILTNHLSKQKEIEMAQKKMNSENSHSHEEEKDLSHKNSMLQEEIAMLRLEIDTIKNQNQEKEKKCFEDLKIVKEKNEDLQKTIKQNEETLTQTISQYNGRLSVLTAENAMLNSKLENEKQSKERLEAEVESYHSRLAAAIHDRDQSETSKRELELAFQRARDECSRLQDKMNFDVSNLKDNNEILSQQLFKTESKLNSLEIEFHHTRDALREKTLGLERVQKDLSQTQCQMKEMEQKYQNEQVKVNKYIGKQESVEERLSQLQSENMLLRQQLDDAHNKADNKEKTVINIQDQFHAIVQKLQAESEKQSLLLEERNKELISECNHLKERQYQYENEKAEREVVVRQLQQELADTLKKQSMSEASLEVTSRYRINLEDETQDLKKKLGQIRNQLQEAQDRHTEAVRCAEKMQDHKQKLEKDNAKLKVTVKKQMDKIEELQKNLLNANLSEDEKEQLKKLMELKQSLECNLDQEMKKNVELEREITGFKNLLKMTRKKLNEYENGEFSFHGDLKTSQFEMDIQINKLKHKIDDLTAELETAGSKCLHLDTKNQILQEELLSMKTVQKKCEKLQKNKKKLEQEVINLRSHIERNMVELGQVKQYKQEIEERARQEIAEKLKEVNLFLQAQAASQENLEQFRENNFASMKSQMELRIKDLESELSKIKTSQEDFNKTELEKYKQLYLEELKVRKSLSSKLTKTNERLAEVNTKLLVEKQQSRSLFTTLTTRPVMEPPCVGNLNNSLDLNRKLIPRENLVISTSNPRASNNSMENYLSKMQQELEKNITRELKEAAAELESGSIASPLGSTDESNLNQDLVWKASREYVQVLKKNYMI

SEQ ID NO: 15148 - protein, 933 aa, Homo sapiens
REHWQLLGNLKTTVEGLVSTNSPNVWSKYGGLERLCRDMQSILYHGLIRDQACRRQTDYWQFVKDIRWLSPHSALHVEKFISVHENDQSSADGASERAVAELWLQHSLQYHCLSAQLRPLLGDRQYIRKFYTDAAFLLSDAHVTAMLQCLEAVEQNNPRLLAQIDASMFARKHESPLLVTKSQSLTALPSSTYTPPNSYAQHSYFGSFSSLHQSVPNNGSERRSTSFPLSGPPRKPQESRGHVSPAEDQTIQAPPVSVSALARDSPLTPNEMSSSTLTSPIEASWVSSQNDSPGDASEGPEYLAIGNLDPRGRTASCQSHSSNAESSSSNLFSSSSSQKPDSAASSLGDQEGGGESQLSSVLRRSSFSEGQTLTVTSGAKKSHIRSHSDTSIASRGAPGGPRNITIIVEDPIAEGGRYLCSGEGMFRRPSEGQSLISYLSEQDFGSCADLEKENAHFSISESLIAAIELMKCNMMSQCLEEEEVEEEDSDREIQELKQKIRLRRQQIRTKNLLPMYQEAEHGSFRVTSSSSQFSSRDSAQLSDSGSADEVDEFEIQDADIRRNTASSSKSFVSSQSFSHCFLHSTSAEAVAMGLLKQFEGMQLPAASELEWLVPEHDAPQKLLPIPDSLPISPDDGQHADIYKLRIRVRGNLEWAPPRPQIIFNVHPAPTRKIAVAKQNYRCAGCGIRTDPDYIKRLRYCEYLGKYFCQCCHENAQMAIPSRVLRKWDFSKYYVSNFSKDLLIKIWNDPLFNVQDINSALYRKVKLLNQVRLLRVQLCHMKNMFKTCRLAKELLDSFDTVPGHLTEDLHLYSLNDLTATRKGELGPRLAELTRAGATHVERCMLCQAKGFICEFCQNEDDIIFPFELHKCRTCEECKACYHKACFKSGSCPRCERLQARREALARQSLESYLSDYEEEPAEALALEAAVLEAT

SEQ ID NO: 15149 - protein, 962 aa, Homo sapiens
MLRDVIQEYDEYFPEIIERASYTLEKMFRVNLKEIDKQSSLYILISTQESSAGILGTTKDTPKLGLLMVILSVIFMNGNKASEAVIWEVLRKLGLRPGVRHSLFGEVRKLITDEFVKQKYLEYKRVPNSRPPEYEFFWGLRSYHETSKMKVLKFACRVQKKDPKDWAVQYREAVEMEVQAAAVAVAEAEARAEARAQMGIGEEAVAGPWNWDDMDIDCLTREELGDDAQAWSRFSFEIEARAQENADASTNVNFSRGASTRAGFSDGASISFNGAPSSSGGFSGGPGITFGVAPSTSASFSNTASISFGGTLSTSSSFSSAASISFGCAHSTSTSFSSEASISFGGMPCTSASFSGGVSSSFSGPLSTSATFSGGASSGFGGTLSTTAGFSGVLSTSTSFGSAPTTSTVFSSALSTSTGFGGILSTSVCFGGSPSSSGSFGGTLSTSICFGGSPCTSTGFGGTLSTSVSFGGSSSTSANFGGTLSTSICFDGSPSTGAGFGGALNTSASFGSVLNTSTGFGGAMSTSADFGGTLSTSVCFGGSPGTSVSFGSALNTNAGYGGAVSTNTDFGGTLSTSVCFGGSPSTSAGFGGALNTNASFGCAVSTSASFSGAVSTSACFSGAPITNPGFGGAFSTSAGFGGALSTAADFGGTPSNSIGFGAAPSTSVSFGGAHGTSLCFGGAPSTSLCFGSASNTNLCFGGPPSTSACFSGATSPSFCDGPSTSTGFSFGNGLSTNAGFGGGLNTSAGFGGGLGTSAGFSGGLSTSSGFDGGLGTSAGFGGGPGTSTGFGGGLGTSAGFSGGLGTSAGFGGGLVTSDGFGGGLGTNASFGSTLGTSAGFSGGLSTSDGFGSRPNASFDRGLSTIIGFGSGSNTSTGFTGEPSTSTGFSSGPSSIVGFSGGPSTGVGFCSGPSTSGFSGGPSTGAGFGGGPNTGAGFGGGPSTSAGFGSGAASLGACGFSYG

SEQ ID NO: 15150 - protein, 154 aa, Homo sapiens
LVHQRPAPPSTVTTAGVTPQPESLSPSGKEPAASSPSSNNTAATTAAIVPGSQLMPSKSPSTGTTEISSHESSHGTPSQTTAKNWELTASASHQPPGVYPQGHSDTTVAISTSTVLLCGLSAVSLLACYLKSRASVCSCHPRSAGHTCSVGSVC

SEQ ID NO: 15151 - protein, 232 aa, Homo sapiens
MAATCEISNIFSNYFSAMYSSEDSTLASVPPAATFGADDLVLTLSNPQMSLEEKASWLGEQPQFWSKTQVLDWISYQVEKNKYDASAIDFSRCDMDGATLCNCALEELRLVFGPLGDQLHAQLRDLTSSSSDELSWIIELLEKDGMAFQEALDPGPFDQGSPFAQELLDDGQQASPYHPGSCGAGAPSPGSSDVSTAGTGASRSSHSSDSGGSDVDLDPTDGKLFPSDGFRD

SEQ ID NO: 15152 - protein, 764 aa, Homo sapiens
MTTFGAVAEWRLPSLRRATLWIPQWFAKKAIFNSPLEAAMAFPHLQQPSFLLASLKADSINKPFAQQCQDLVKVIEDFPAKGPVKASIQECILPDSPLYHNKVQFTPTGGLGLNLALNPFEYYIFFFALSLITQKPLPVSLHVRTSDCAYFILVDRYLSWFLPTEGSVPPPLSSSPGGTSPSPPPRTPAIPFASYGLHHTSLLKRHISHQTSVNADPASHEIWRSETLLQVFVEMWLHHYSLEMYQKMQSPHAKESFTPTEEHVLVVRLLLKHLHAFANSLKPEQASPSAHSHATSPLEEFKRAAVPRFVQQKLYLFLQHCFGHWPLDASFRAVLEMWLSYLQPWRYAPDKQAPGSDSQPRCVSEKWAPFVQENLLMYTKLFVGFLNRALRTDLVSPKHALMVFRVAKVFAQPNLAEMIQKGEQLFLEPELVIPHRQHRLFTAPTFTGSFLSPWPPAVTDASFKVKSHVYSLEGQDCKYTPMFGPEARTLVLRLAQLITQAKHTAKSISDQCAESPAGHSFLSWLGFSSMDTNGSYTANDLDEMGQDSVRKTDEYLEKALEYLRQIFRLSEAQLRQFTLALGTTQDENGKKQLPDCIVGEDGLILTPLGRYQIINGLRRFEIEYQGDPELQPIRSYEIASLVRTLFRLSSAINHRFAGQMAALCSRDDFLGSFCRYHLTEPGLASRHLLSPVGRRQVAGHTRGPRLSLRFLGSYRTLVSLLLAFFVASLFCVGPLPCTLLLTLGYVLYASAMTLLTERGKLHQP

SEQ ID NO: 15153 - protein, 309 aa, Homo sapiens
MPHTLSLPYPQLLGLSVATMVTLTYFGAHFAVIRRASLEKNPYQAVHQWAFSAGLSLVGLLTLGAVLSAAATVREAQGLMAGGFLCFSLAFCAQVQVVFWRLHSPTQVEDAMLDTYDLVYEQAMKGTSHVRRQELAAIQDVFLCCGKKSPFSRLGSTEADLCQGEEAAREDCLQGIRSFLRTHQQVASSLTSIGLALTVSALLFSSFLWFAIRCGCSLDRKGKYTLTPRACGRQPQEPSLLRCSQGGPTHCLHSEAVAIGPRGCSGSLRWLQESDAAPLPLSCHLAAHRALQGRSRGGLSGCPERGLSD

SEQ ID NO: 15154 - protein, 840 aa, Homo sapiens
MALTQGQVTFRDVAIEFSQEEWTCLDPAQRTLYRDVMLENYRNLASLAGISCFDLSIISMLEQGKEPFTLESQVQIAGNPDGWEWIKAVITALSSEFVMKDLLHKGKSNTGEVFQTVMLERQESQDIEGCSFREVQKNTHGLEYQCRDAEGNYKGVLLTQEGNLTHGRDEHDKRDARNKLIKNQLGLSLQSHLPELQLFQYEGKIYECNQVEKSFNNNSSVSPPQQMPYNVKTHISKKYLKDFISSLLLTQGQKANNWGSPYKSNGCGMVFPQNSHLASHQRSHTKEKPYKCYECGKAFRTRSNLTTHQVIHTGEKRYKCNECGKVFSRNSQLSQHQKIHTGEKPYKCNECGKVFTQNSHLVRHRGIHTGEKPYKCNECGKAFRARSSLAIHQATHSGEKPYKCNECGKVFTQNSHLTNHWRIHTGEKPYKCNECGKAFGVRSSLAIHLVIHTGEKPYKCHECGKVFRRNSHLARHQLIHTGEKPYKCNECGKAFRAHSNLTTHQVIHTGEKPYKCNECGKVFTQNSHLANHQRIHTGVKPYMCNECGKAFSVYSSLTTHQVIHTGEKPYKCNECGKVFTQNSHLARHRGIHTGEKPYKCNECGKVFRHNSYLSRHQRIHTGEKPYKYNEYGKAFSEHSNLTTHQVIHTGEKPYKCNECGKVFTQNSHLARHRRVHTGGKPYQCNECGKAFSQTSKLARHQRVHTGEKPYECNQCGKAFSVRSSLTTHQAIHTGKKPYKCNECGKVFTQNSHLARHRGIHTGEKPYKCNECGKAFSQTSKLARHQRIHTGEKPYECGKPFSICSSLTTHQTIHTGGKPYKCNVWKVLKSEFKPCKPSQNS

SEQ ID NO: 15155 - protein, 600 aa, Homo sapiens
MSHQEGSTGGLPDLVTESLFSSPEEQSGVAAVTAASSDIEMAATEPSTGDGGDTRDGGFLNDASTENQNTDSESSSEDVELESMGEGLFGYPLVGEETEREEEEEEMEEEGEEEEQPRMCPRCGGTNHDQCLLDEDQALEEWISSETSALPRSRWQVLTALRQRQLGSSARFVYEACGARTFVQRFRLQYLLGSHAGSVSTIHFNQRGTRLASSGDDLRVIVWDWVRQKPVLNFESGHDINVIQAKFFPNCGDSTLAMCGHDGQVRVAELINASYCENTKRVAKHRGPAHELALEPDSPYKFLTSGEDAVVFTIDLRQDRPASKVVVTRENDKKVGLYTISMNPANIYQFAVGGHDQFVRIYDQRRIDKKENNGVLKKFTPHHLVYCDFPTNITCVVYSHDGTELLASYNDEDIYLFNSSLSDGAQYVKRYKGHRNNDTIKCVNFYGPRSEFVVSGSDCGHVFFWEKSSSQIIQFMEGDRGDIVNCLEPHPYLPVLATSGLDQHVRIWTPTAKTATELTGLKDVIKKNKQERDEDNLNYTDSFDNRMLRFFVRHLLQRAHQPGWRDHGAEFPDEEELDESSSTSDTSEEEGQDRVQCIPS

SEQ ID NO: 15156 - protein, 786 aa, Homo sapiens
MWALCSLLRSAAGRTMSQGRTISQAPARRERPRKDPLRHLRTREKRGPSGCSGGPNTVYLQVVAAGSRDSGAALYVFSEFNRYLFNCGEGVQRLMQEHKLKVARLDNIFLTRMHWSNVGGLSGMILTLKETGLPKCVLSGPPQLEKYLEAIKIFSGPLKGIELAVRPHSAPEYEDETMTVYQIPIHSVSQRRGVRDSSLVVAFICKLHLKRGNFLVLKAKEMGLPVGTAAIAPIIAAVKDGKSITHEGREILAEELCTPPDPGAAFVVVECPDESFIQPICENATFQRYQGKADAPVALVVHMAPASVLVDSRYQQWMERFGPDTQHLVLNENCASVHNLRSHKIQTQLNLIHPDIFPLLTSFRCKKEGPTLSVPMVQGECLLKYQLRPRREWQRDAIITCNPEEFIVEALQLPNFQQSVQEYRRSAQDGPAPAEKRSQYPEIIFLGTGSAIPMKIRNVSATLVNISPDTSLLLDCGEGTFGQLCRHYGDQVDRVLGTLAAVFVSHLHADHHTGLPSILLQRERALASLGKPLHPLLVVAPNQLKAWLQQYHNQCQEVLHHISMIPAKCLQEGAEISSPAVERLISSLLRTCDLEEFQTCLVRHCKHAFGCALVHTSGWKVVYSGDTMPCEALVRMGKDATLLIHEATLEDGLEEEAVEKTHSTTSQAISVGMRMNAEFIMLNHFSQRYAKVPLFSPNFSEKVGVAFDHMKVCFGDFPTMPKLIPPLKALFAGDIEEMEERREKRELRQVRAALLSRELAGGLEDGEPQQKRAHTEEPQAKKVRAQ

SEQ ID NO: 15157 - protein, 265 aa, Homo sapiens
MTREQYILATQQNNLPRTENAQLYPVGIYGWRKRCLYFFVLLLLVTMIVNLAMTIWILKVMNFTVDSPLVLQSDRNVTVNARNHMGQLTGQLTIGADAVEAQCKRFEVRASEDGRVLFSADEDEITIGAEKLKVTGTEGAVFGHSVETPHIRAEPSQDLRLESPTRSLIMEAPRGVQVSAAAGDFKATCRKELHLQSTEGEIFLNAETIKLGNLPTGSFSSSSPSSSSSRQTVYELCVCPNGKLYLSPAGVGSTCQSSSNICLWS

SEQ ID NO: 15158 - protein, 168 aa, Homo sapiens
MEKRTCALCPKDVEYNVLYFAQSENIAAHENCLLYSSGLVECEDQDPLNPDRSFDVESVKKEIQRGRKLKCKFCHKRGATVGCDLKNCNKNYHFFCAKKDDAVPQSDGVRGIYKLLCQQHAQFPIIAQSAKFSGVKRKRGRKKPLSGNHVQPPETMKCNTFIRQVKEE

SEQ ID NO: 15159 - protein, 177 aa, Homo sapiens
CTLPWGTLSSLKLQSRKDSDDGPIMWVRPGEQMIPVADMPKSPFKRKRTTNEIKNLQYLPRTSEPREMLFEDRTRAHADHIGQGFERQTTAAVGVLKAVHCGEWPDQPRITKDVICFHAEDFLEVVQRMQLDLHEPPLSQECCSSVQDSFSCMQFSMAYSAQIISLRGGHFSEYSYS

SEQ ID NO: 15160 - protein, 348 aa, Homo sapiens
MERPEAGGINSNECENVSRKKKMSEEFEANTMDSLVDMPFATVDIQDDCGITDEPQINLKRSQENEWVKSDQVKKRKKKRKDYQPNYFLSIPITNKEIIKGIKILQNAIIQQDERLAKAMVSDGSFHITLLVMQLLNEDEVNIGIDALLELKPFIEELLQGKHLTLPFQGIGTFGNQVGFVKLAEGDHVNSLLEIAETANRTFQEKGILVGESRSFKPHLTFMKLSKSPWLRKNGVKKIDPDLYEKFISHRFGEEILYRIDLCSMLKKKQSNGYYHCESSIVIGEKNGGEPDDAELVRLSKRLVENAVLKAVQQYLEETQNKNKPGEGSSVKTEAADQNGNDNENNRK

SEQ ID NO: 15161 - protein, 630 aa, Homo sapiens
MAEDWLDCPALGPGWKRREVFRKSGATCGRSDTYYQSPTGDRIRSKVELTRYLGPACDLTLFDFKQGILCYPAPKAHPVAVASKKRKKPSRPAKTRKRQVGPQSGEVRKEAPRDETKADTDTAPASFPAPGCCENCGISFSGDGTQRQRLKTLCKDCRAQRIAFNREQRMFKRVGCGECAACQVTEDCGACSTCLLQLPHDVASGLFCKCERRRCLRIVERSRGCGVCRGCQTQEDCGHCPICLRPPRPGLRRQWKCVQRRCLRHLAHRLRRRHQRCQRRTPLAVAPPTGKHARRKGGCDSKMAARRRPGAQPLPPPPPSQSPEPTEPHPRALAPSPPAEFIYYCVDEDELQPYTNRRQNRKCGACAACLRRMDCGRCDFCCDKPKFGGSNQKRQKCRWRQCLQFAMKRLLPSVWSESEDGAGSPPPYRRRKRPSSARRHHLGPTLKPTLATRTAQPDHTQAPTKQEAGGGFVLPPPGTDLVFLREGASSPVQVPGPVAASTEALLQEAQCSGLSWVVALPQVKQEKADTQDEWTPGTAVLTSPVLVPGCPSKAVDPGLPSVKQEPPDPEEDKEENKDDSASKLAPEEEAGGAGTPVITEIFSLGGTRFRDTAVWLPRSKDLKKPGARKQ

SEQ ID NO: 15162 - protein, 793 aa, Homo sapiens
MSEQGDLNQAIAEEGGTEQETATPENGIVKSESLDEEEKLELQRRLEAQNQERRKSKSGAGKGKLTRSLAVCEESSARPGGESLQDQESIHLQLSSFSSLQEEDKSRKDDSEREKEKDKNKDKTSEKPKIRMLSKDCSQEYTDSTGIDLHEFLINTLKNNSRDRMILLKMEQEIIDFIADNNNHYKKFPQMSSYQRMLVHRVAAYFGLDHNVDQTGKSVIINKTSSTRIPEQRFCEHLKDEKGEESQKRFILKRDNSSIDKEDNQSVCSQESLFVENRGNRDGSGRTSGSRQSSSENELKWSDHQRAWSSTDSDSSNRNLKPAMTKTASFGGITVLTRGDSTSSTRSTGKLSKAGSESSSSAGSSGSLSRTHPPLQSTPLVSGVAAGSPGCVPYPENGIGGQVAPSSTSYILLPLEAATGIPPGSILLNPHTGQPFVNPDGTPAIYNPPTSQQPLRSAMVGQSQQQPPQQQPSPQPQQQVQPPQPQMAGPLVTQSVQGLQASSQSVQYPAVSFPPQHLLPVSPTQHFPMRDDVATQFGQMTLSRQSSGETPEPPSGPVYPSSLMPQPAQQPSYVIASTGQQLPTGGFSGSGPPISQQVLQPPPSPQGFVQQPPPAQMPVYYYPSGQYPTSTTQQYRPMAPVQYNAQRSQQMPQAAQQAGYQPVLSGQQGFQGLIGVQQPPQSQNVINNQQGTPVQSVMVSYPTMSSYQVPMTQGSQGLPQQSYQQPIMLPNQAGQGSLPATGMPVYCNVTPPTPQNNLRLIGPHCPSSTVPVMSASCRTNCASMSNAGWQVKF

SEQ ID NO: 15163 - protein, 751 aa, Homo sapiens
MDSKESLTPGREENPSSVLAQERGDVMDFYKTLRGGATVKVSASSPSLAVASQSDSKQRRLLVDFPKGSVSNAQQPDLSKAVSLSMGLYMGETETKVMGNDLGFPQQGQISLSSGETDLKLLEESIANLNRSTSVPENPKSSASTAVSAAPTEKEFPKTHSDVSSEQQHLKGQTGTNGGNVKLYTTDQSTFDILQDLEFSSGSPGKETNESPWRSDLLIDENCLLSPLAGEDDSFLLEGNSNEDCKPLILPDTKPKIKDNGDLVLSSPSNVTLPQVKTEKEDFIELCTPGVIKQEKLGTVYCQASFPGANIIASLSQQQDQKPIFNVIPPIPVGSENWNRCQGSGDDNLTSLGTLNFPGRTVFSNGYSSPSMRPDVSSPPSSSSTATTGPPPKLCLVCSDEASGCHYGVLTCGSCKVFFKRAVEGQHNYLCAGRNDCIIDKIRRKNCPACRYRKCLQAGMNLEARKTKKKIKGIQQATTGVSQETSENPGNKTIVPATLPQLTPTLVSLLEVIEPEVLYAGYDSSVPDSTWRIMTTLNMLGGRQVIAAVKWAKAIPGFRNLHLDDQMTLLQYSWMFLMAFALGWRSYRQSSANLLCFAPDLIINEQRMTLPCMYDQCKHMLYVSSELHRLQVSYEEYLCMKTLLLLSSVPKDGLKSQELFDEIRMTYIKELGKAIVKREGNSSQNWQRFYQLTKLLDSMHEVVENLLNYCFQTFLDKTMSIEFPEMLAEIITNQIPKYSNGNIKKLLFHQK

SEQ ID NO: 15164 - protein, 757 aa, Homo sapiens
MAAPDLAHGGHVSRDSVCLHEEQTQAAGMVAGWLINCYQDAVTFDDVAVDFTQEEWTLLDPSQRDLYRDVMLENYENLASVGHHLFQPSVIYWLEQEEELRAGRRAVLQEWRLKTKGPALRQDRSWFRASNETQTARSHNGGQLCDRTQCGEAFSEHSGLSTHVRTQNTGDSCVSNHYERDFFIPCQKTLFKIGEQFSVLGQCGKAFSSTPNVVSQQACTRDRSLDYSSCGEVFLNQSYLQARAGSHNGEETWKWKPCGKALTHSMGCATPVEMHAVRNPHVCRECGKAFRYTAYLTGRVQVHPGEKPCELEECGKASPVSSSLTQHVRIHAAEKPCECKECGKAFTGLSGLSKHVQTDPGQKPYECKDCGKACGGFYLLNEHGKTHTREKPFACVVCGKYFRNSSCLNNHVRIHTGIKPYTCSYCGKAFTVRCGLTRHVRTHTGEKPYTCKDCGKAFCTSSGLTEHVRTHTGEKPYECKDCGKSFTVSSSLTEHARIHTGEKPYECKQCGKAFTGRSGLTKHMRTHTGEKPYECKDCGKAYNRVYLLNEHVKTHTEEKPFICTVCRKSFRNSSCLNKHIQIHTGIKPYECKDCGKTFTVSSSLTEHIRTHTGEKPYECKVCGKAFTTSSHLIVHIRTHTGEKPYICKECGKAFASSSHLIEHRRTHTGEKPYICNECGKAFRASSHLHKHGRIHTGQKPYKCKECGKAYNRFYLLKEHLKTYTEEQVFVCKDCGKSFKNSSCLNHHTQIHTDEKPF

SEQ ID NO: 15165 - protein, 590 aa, Homo sapiens
MAAPYPGSGGGSEVKCVGGRGASVPWDFLPGLMVKAPSGPCLQAQRKEKSRNAARSRRGKENLEFFELAKLLPLPGAISSQLDKASIVRLSVTYLRLRRFAALGAPPWGLRAAGPPAGLAPGRRGPAALVSEVFEQHLGGHILQSLDGFVFALNQEGKFLYISETVSIYLGLSQVEMTGSSVFDYIHPGDHSEVLEQLGLRTPTPGPPTPPSVSSSSSSSSSLADTPEIEASLTKVPPSSLVQERSFFVRMKSTLTKRGLHVKASGYKVIHVTGRLRAHALGLVALGHTLPPAPLAELPLHGHMIVFRLSLGLTILACESRVSDHMDLGPSELVGRSCYQFVHGQDATRIRQSHVDLLDKGQVMTGYYRWLQRAGGFVWLQSVATVAGSGKSPGEHHVLWVSHVLSQAEGGQTPLDAFQLPASVACEEASSPGPEPTEPEPPTEGKQAAPAENEAPQTQGKRIKVEPGPRETKGSEDSGDEDPSSHPATPRPEFTSVIRAGVLKQDPVRPWGLAPPGDPPPTLLHAGFLPPVVRGLCTPGTIRYGPAELGLVYPHLQRLGPGPALPEAFYPPLGLPYPGPAGTRLPRKGD

SEQ ID NO: 15166 - protein, 1210 aa, Homo sapiens
MEEHSYIQKELDLQNGSLEEDSVVHSVENDSQNMMESLSPKKYSSSLRFKANGDYSGSYLTLSQPVPAKRSPSPLGTSVRSSPSLAKIQGSKQFSYDGTDKNIPMKPPTPLLNTTSSLSGYPLGRADFDHYTGRDSERALRLSEKPPYSKYSSRHKSHDNVYSLGGLEGRKASGSLLAMWNGSSLSDAGPPPISRSGAASMPSSPKQARKMSIQDSLALQPKLTRHKELASENINLRTRKYSSSSLSHMGAYSRSLPRLYRATENQLTPLSLPPRNSLGNSKRTKLGEKDLPHSVIDNDNYLNFSSLSSGALPYKTSASEGNPYVSSTLSVPASPRVARKMLLASTSSCASDDFDQASYVGTNPSHSLLAGESDRVFATRRNFSCGSVEFDEADLESLRQASGTPQPALRERKSSISSISGRDDLMDYHRRQREERLREQEMERLERQRLETILSLCAEYTKPDSRLSTGTTVEDVQKINKELEKLQLSDEESVFEEALMSPDTRYRCHRKDSLPDADLASCGSLSQSSASFFTPRSTRNDELLSDLTRTPPPPSSTFPKASSESSYLSILPKTPEGISEEQRSQELAAMEETRIVILNNLEELKQKIKDINDQMDESFRELDMECALLDGEQKSETTELMKEKEILDHLNRKIAELEKNIVGEKTKDADLLDVESKHFEDLEFQQLEHESRLDEEKENLTQQLLREVAEYQRNIVSRKEKISALKKQANHIVQQAQREQDHFVKEKNNLIMMLQREKENLCNLEKKYSSLSGGKGFPVNPNTLKEGYISVNEINEPCGNSTNLSPSTQFPADADAVATEPATAVLASQPQSKEHFRSLEERKKQHKEGLYLSDTLPRKKTTSSISPHFSSATMGRSITPKAHLPLGQSNSCGSVLPPSLAAMAKDSESRRMLRGYNHQQMSEGHRQKSEFYNRTASESNVYLNSFHYPDHSYKDQAFDTLSLDSSDSMETSISACSPDNISSASTSNIARIEEMERLLKQAHAEKTRLLESREREMEAKKRALEEEKRRREILEKRLQEETSQRQKLIEKEVKIRERQRAQARPLTRYLPVRKEDFDLRSHVETAGHNIDTCYHVSITEKTCRGFLIKMGGKIKTWKKRWFVFDRNKRTFSYYADKHETKLKGVIYFQAIEEVYYDHLKNANKSPNPLLTFSVKTHDRIYYMVAPSPEAMRIWMDVIVTGAEGYTHFLL

SEQ ID NO: 15167 - protein, 471 aa, Homo sapiens
MQLPRWWELGDPCAWTGQGRGTRRMSPATTGTFLLTAFLLSCADGINGTVNWKTRQANNFIISRKMAAGMKDVYSIFSKVHSDRNVYPSAGVLFVHVLEREYFKGEFPPYPKPGEISNDPITFNTNLMGYPDRPGWLRYIQRTPYSDGVLYGSPTAENVGKPTIIEITAYNRRTFETARHNLIINIMSAEDFPLPYQAEFFIKNMNVEEMLASEVLGDFLGAVKNVWQPERLNAINITSALDRGGRVPLPINDLKEGVYVMVGADVPFSSCLREVENPQNQLRCSQEMEPVITCDKKFRTQFYIDWCKISLVDKTKQVSTYQEVIRGEGILPDGGEYKPPSDSLKSRDYYTDFLITLAVPSAVALVLFLILAYIMCCRREGVEKRNMQTPDIQLVHHSAIQKSTKELRDMSKNREIAWPLSTLPVFHPVTGEIIPPLHTDNYDSTNMPLMQTQQNLPHQTQIPQQQTTGEC

SEQ ID NO: 15168 - protein, 1189 aa, Homo sapiens
MVPCWNHGNITRSKAEELLSRTGKDGSFLVRASESISRAYALCVLYRNCVYTYRILPNEDDKFTVQASEGVSMRFFTKLDQLIEFYKKENMGLVTHLQYPVPLEEEDTGDDPEEDTVESVVSPPELPPRNIPLTASSCEAKEVPFSNENPRATETSRPSLSETLFQRLQSMDTSGLPEEHLKAIQDYLSTQLAQDSEFVKTGSSSLPHLKKLTTLLCKELYGEVIRTLPSLESLQRLFDQQLSPGLRPRPQVPGEANPINMVSKLSQLTSLLSSIEDKVKALLHEGPESPHRPSLIPPVTFEVKAESLGIPQKMQLKVDVESGKLIIKKSKDGSEDKFYSHKKILQLIKSQKFLNKLVILVETEKEKILRKEYVFADSKKREGFCQLLQQMKNKHSEQPEPDMITIFIGTWNMGNAPPPKKITSWFLSKGQGKTRDDSADYIPHDIYVIGTQEDPLSEKEWLEILKHSLQEITSVTFKTVAIHTLWNIRIVVLAKPEHENRISHICTDNVKTGIANTLGNKGAVGVSFMFNGTSLGFVNSHLTSGSEKKLRRNQNYMNILRFLALGDKKLSPFNITHRFTHLFWFGDLNYRVDLPTWEAETIIQKIKQQQYADLLSHDQLLTERREQKVFLHFEEEEITFAPTYRFERLTRDKYAYTKQKATGMKYNLPSWCDRVLWKSYPLVHVVCQSYGSTSDIMTSDHSPVFATFEAGVTSQFVSKNGPGTVDSQGQIEFLRCYATLKTKSQTKFYLEFHSSCLESFVKSQEGENEEGSEGELVVKFGETLPKLKPIISDPEYLLDQHILISIKSSDSDESYGEGCIALRLEATETQLPIYTPLTHHGELTGHFQGEIKLQTSQGKTREKLYDFVKTERDESSGPKTLKSLTSHDPMKQWEVTSRAPPCSGSSITEIINPNYMGVGPFGPPMPLHVKQTLSPDQQPTAWSYDQPPKDSPLGPCRGESPPTPPGQPPISPKKFLPSTANRGLPPRTQESRPSDLGKNAGDTLPQEDLPLTKPEMFENPLYGSLSSFPKPAPRKDQESPKMPRKEPPPCPEPGILSPSIVLTKAQEADRGEGPGKQVPAPRLRSFTCSSSAEGRAAGGDKSQGKPKTPVSSQAPVPAKRPIKPSRSEINQQTPPTPTPRPPLPVKSPAVLHLQHSKGRDYRDNTELPHHGKHRPEEGPPGPLGRTAMQ

SEQ ID NO: 15169 - protein, 143 aa, Homo sapiens
MLPPQKKPWESMAKGLVLGALFTSFLLLVYSYAVPPLHAGLASTTPEAAASCSPPALEPEAVIRANGSAGECQPRRNIVFLKTHKTASSTLLNILFRFGQKHRLKFAFPNGRNDFDYPTFFARSLVQDYRPGACFNIICNHMR

SEQ ID NO: 15170 - protein, 174 aa, Homo sapiens
MRGCFSMPPEAEKEQKHWNRSPAHYDLAISVALQWLDPSEDLTWLEWEELKIPLHGRPIYPNRREREAMILSSYAGILMNSIPIEEVFKIYGADSSADSGTIKVPRVSSLCLSLHPFAMLTAPKAAAYARKQSVKSRKVTTNKNATSISAKEANATEWKSSQRFSDTQPKHKVT

SEQ ID NO: 15171 - protein, 309 aa, Homo sapiens
MAAGCLLALTLTLFQSLLIGPSSEEPFPSAVTIKSWVDKMQEDLVTLAKTASGVNQLVDIYEKYQDLYTVEPNNARQLVEIAARDIEKLLSNRSKALVRLALEAEKVQAAHQWREDFASNEVVYYNAKDDLDPEKNDSEPGSQRIKPVFIEDANFGRQISYQHAAVHIPTDIYEGSTIVLNELNWTSALDEVFKKNREEDPSLLWQVFGSATGLARYYPASPWVDNSRTPNKIDLYDVRRRPWYIQGAASPKDMLILVDVSGSVSGLTLKLIRTSVSEMLETLSDDDFVNVASDSKEISPSPEEIFNAE

SEQ ID NO: 15172 - protein, 1143 aa, Homo sapiens
MSSNDSSLMAGIIYYSQEKYFHHVQQAAAVGLEKFSNDPVLKFFKAYGVLKEEHIQDAISDLESIRHHPDVSLCSTMALIYAHKRCEIIDREAIQELEYSLKEIRKTVSGTALYYAGLFLWLIGRHDKAKEYIDRMLKISRGFREAYVLRGWVDLTSDKPHTAKKAIEYLEQGIQDTKDVLGLMGKAMYFMMQQNYSEALEVVNQITVTSGSFLPALVLKMQLFLARQDWEQTVEMGHRILEKDESNIDACQILTVHELAREGNMTTATNHVRNLIKALETREPENPSLHLKKIIVVSRLCGSHQVILGLVCSFIERTFMATPSYVHVATELGYLFILKNQVKEALLWYSEAMKLDKDGMAGLTGIILCHILEGHLEEAEYRLEFLKEVQKSLGKSEVLIFLQALLMSRKHKGEEETTALLKEAVELHFSSMQGIPLGSEYFEKLDPYFLVCIAKEYLLFCPKQPRLPGQIVSPLLKQVAVILNPVVKAAPALIDPLYLMAQVRYYSGELENAQSILQRCLELDPASVDAHLLMCQIYLAQGNFGMCFHCLELGVSHNFQVRDHPLYHLIKARALNKAGDYPEAIKTLKMVIKLPALKKEEGRKFLRPSVQPSQRASILLELVEALRLNGELHEATKVMQDTINEFGGTPEENRITIANVDLVLSKGNVDVALNMLRNILPKQSCYMEAREKMANIYLQTLRDRRLYIRCYRELCEHLPGPHTSLLLGDALMSILEPEKALEVYDEAYRQNPHDASLASRIGHAYVKAHQYTEAIEYYEAAQKINGQDFLCCDLGKLLLKLKKVNKAEKVLKQALEHDIVQDIPSMMNDVKCLLLLAKVYKSHKKEAVIETLNKALDLQSRILKRVPLEQPEMIPSQKQLAASICIQFAEHYLAEKEYDKAVQSYKDVFSYLPTDNKVMLELAQLYLLQGHLDLCEQHCAILLQTEQNHETASVLMADLMFRKQKHEAAINLYHQVLEKAPDNFLVLHKLIDLLRRSGKLEDIPAFFELAKKVSSRVPLEPGFNYCRGIYCWHIGQPNEALKFLNKARKDSTWGQSAIYHMVQICLNPDNEVVGGEAFENQGAESNYMEKKELEQQGVSTAEKLLQGQRPCPAGLGTSLRVPEADPQGAYAVEAPGQDPLGAE

SEQ ID NO: 15173 - protein, 677 aa, Homo sapiens
AKALPKVMIPLSSIPTYNAAMDSNSFLKNSFHKFPYPTKAELCYLTVVTKYPEEQLKIWFTAQRLKQGISWSPEEIEDARKKMFNTVIQSVPQPTITVLNTPLVASAGNVQHLIQAALPGHVVGQPEGTGGGLLVTQPLMANGLQATSSPLPLTVTSVPKQPGVAPINTVCSNTTSAVKVVNAAQSLLTACPSITSQAFLDASIYKNKKSHEQLSALKGSFCRNQFPGQSEVEHLTKVTGLSTREVRKWFSDRRYHCRNLKGSRAMIPGDHSSIIIDSVPEVSFSPSSKVPEVTCIPTTATLATHPSAKRQSWHQTPDFTPTKYKERAPEQLRALESSFAQNPLPLDEELDRLRSETKMTRREIDSWFSERRKKVNAEETKKAEENASQEEEEAAEDEGGEEDLASELRVSGENGSLEMPSSHILAERKVSPIKINLKNLRVTEANGRNEIPGLGACDPEDDESNKLAEQLPGKVSCKKTAQQRHLLRQLFVQTQWPSNQDYDSIMAQTGLPRPEVVRWFGDSRYALKNGQLKWYEDYKRGNFPPGLLVIAPGNRELLQDYYMTHKMLYEEDLQNLCDKTQMSSQQVKQWFAEKMGEETRAVADTGSEDQGPGTGELTAVHKGMGDTYSEVSENSESWEPRVPEASSEPFDTSSPQAGRQLGSWSLSSQPLPSLLTL

SEQ ID NO: 15174 - protein, 874 aa, Homo sapiens
MTKDKNSPGLKKKSQSVDINAPGFNPLAGAGKQTPQASKPPAPKTPIIEEEQNNAANTQKHPSRRSELKRFYTIDTGQKKTLDKKDGRRMSFQKPKGTIEYTVESRDSLNSIALKFDTTPNELVQLNKLFSRAVVTGQVLYVPDPEYVSSVESSPSLSPVSPLSPTSSEAEFDKTTNPDVHPTEATPSSTFTGIRPARVVSSTSEEEEAFTEKFLKINCKYITSGKGTVSGVLLVTPNNIMFDPHKNDPLVQENGCEEYGIMCPMEEVMSAAMYKEILDSKIKESLPIDIDQLSGRDFCHSKKMTGSNTEEIDSRIRDAGNDSASTAPRSTEESLSEDVFTESELSPIREELVSSDELRQDKSSGASSESVQTVNQAEVESLTVKSESTGTPGHLRSDTEHSTNEVGTLCHKTDLNNLEMAIKEDQIADNFQGISGPKEDSTSIKGNSDQDSFLHENSLHQEESQKENMPCGETAEFKQKQSVNKGKQGKEQNQDSQTEAEELRKLWKTHTMQQTKQQRENIQQVSQKEAKHKITSADGHIESSALLKEKQRHRLHKFLCLRVGKPMRKTFVSQASATMQQYAQRDKKHEYWFAVPQERTDHLYAFFIQWSPEIYAEDTGEYTREPGFIVVKKIEESETIEDSSNQAAAREWEVVSVAEYHRRIDALNTEELRTLCRRLQITTREDINSKQVATVKADLESESFRPNLSDPSELLLPDQIEKLTKHLPPRTIGYPWTLVYGTGKHGTSLKTLYRTMTGLDTPVLMVIKDSDGQVFGALASEPLKVSDGFYGTGETFVFTFCPEFEVFKWTGDNMFFIKGDMDSLAFGGGGGEFALWLDGDLYHGRSHSCKTFGNRTLSKKEDFFIQDIEIWAFE

SEQ ID NO: 15175 - protein, 684 aa, Homo sapiens
MASLRNANPRLKNYFKENYIPQVCEALLCGILVTCPEDPLRYLEGMIMVIIKSGLQNLLWDMCITPSMKPNIRRLSETYLEQLFELDDQLMTPELMIKACSFYTGHLVKTHFCTWRDIARTNENVVLAEKMNRAVTCYNFRLQKSVFHHWHSYMEDQKEKLKNILLRIQQIIYCHKLTIILTKWRNTARHKSKKKEDELILKHELQLKKWKNRLILKRAAAEESNFPERSSSEVFLVDETLKCDISLLPERAILQIFFYLSLKDVIICGQVNHAWMLMTQLNSLWNAIDFSSVKNVIPDKYIVSTLQRWRLNVLRLNFRGCLLRPKTFRSVSHCRNLQELNVSDCPTFTDESMRHISEGCPGVLCLNLSNTTITNRTMRLLPRHFHNLQNLSLAYCRRFTDKGLQYLNLGNGCHKLIYLDLSGCTQISVQGFRYIANSCTGIMHLTINDMPTLTDNCVKALVEKCSRITSLVFTGAPHISDCTFRALSACKLRKIRFEGNKRVTDASFKFIDKNYPNLSHIYMADCKGITDSSLRSLSPLKQLTVLNLANCVRIGDMGLKQFLDGPASMRIRELNLSNCVRLSDASVMKLSERCPNLNYLSLRNCEHLTAQGIGYIVNIFSLVSIDLSGTDISNEGLNVLSRHKKLKELSVSECYRITDDGIQIARMEASANKEGLPKTPIADY

SEQ ID NO: 15176 - protein, 754 aa, Homo sapiens
TPTASRRNSTIVLRTDSEKRSLAESGLSWFSESEEKAPKKLEYDSGSLKMEPGTSKWRRERPESCDDSSKGGELKKPISLGHPGSLKKGKTPPVAVTSPITHTAQSALKVAGKPEGKATDKGKLAVKNTGLQRSSSDAGRDRLSDAKKPPSGIARPSTSGSFGYKKPPPATGTATVMQTGGSATLSKIQKSSGIPVKPVNGRKTSLDVSNSAEPGFLAPGARSNIQYRSLPRPAKSSSMSVTGGRGGPRPVSSSIDPSLLSTKQGGLTPSRLKEPTKVASGRTTPAPVNQTDREKEKAKAKAVALDSDNISLKSIGSPESTPKNQASHPTATKLAELPPTPLRATAKSFVKPPSLANLDKVNSNSLDLPSSSDTTHASKVPDLHATSSASGGPLPSCFTPSPAPILNINSASFSQGLELMSGFSVPKETRMYPKLSGLHRSMESLQMPMSLPSAFPSSTPVPTPPAPPAAPTEEETEELTWSGSPRAGQLDSNQRDRNTLPKKGLRYQLQSQEETKERRHSHTIGGLPESDDQSELPSPPALPMSLSAKGQLTNIVSPTAATTPRITRSNSIPTHEAAFELYSGSQMGSTLSLAERPKGMIRSGSFRDPTDDVHGSVLSLASSASSTYSSQIRKLRRELESSQEKVATLTSQLSANANLVAAFEQSLVNMTSRLRHLAETAEEKDTELLDLRETIDFLKKKNSEAQAVIQGALNASETTPKELRIKRQNSSDSISSLNSITSHSSIGSSKDADA

SEQ ID NO: 15177 - protein, 469 aa, Homo sapiens
MCYLSAIISISLLNKKPSMEQWDHFHNQQEDTDSCSESVKFDARSMTALLPPNPKNSPSLQEKLKSFKAALIALYLLVFAVLIPLIGIVAAQLLKWETKNCSVSSTNANDITQSLTGKGNDSEEEMRFQEVFMEHMSNMEKRIQHILDMEANLMDTEHFQNFSMTTDQRFNDILLQLSTLFSSVQGHGNAIDEISKSLISLNTTLLDLQLNIENLNGKIQENTFKQQEEISKLEERVYNVSAEIMAMKEEQVHLEQEIKGEVKVLNNITNDLRLKDWEHSQTLRNITLIQGPPGPPGEKGDRGPTGESGPRGFPGPIGPPGLKGDRGAIGFPGSRGLPGYAGRPGNSGPKGQKGEKGSGNTLTPFTKVRLVGGSGPHEGRVEILHSGQWGTICDDRWEVRVGQVVCRSLGYPGVQAVHKAAHFGQGTGPIWLNEVFCFGRESSIEECKIRQWGTRACSHSEDAGVTCTL

SEQ ID NO: 15178 - protein, 151 aa, Homo sapiens
MSDKSELKAELERKKQRLAQIREEKKRKEEERKKKETDQKKEAVAPVQEESDLEKKRREAEALLQSMGLTPESPIAEQPLRVVTADTCLFHYLVPPPMSPSSKSVSTPSEAGSQDSGDGAVGSRTLHWDTDPSVLQLHSDSDLGRGPIKLG

SEQ ID NO: 15179 - protein, 623 aa, Homo sapiens
MESYHKPDQQKLQALKDTANRLRISSIQATTAAGSGHPTSCCSAAEIMAVLFFHTMRYKSQDPRNPHNDRFVLSKGHAAPILYAVWAEAGFLAEAELLNLRKISSDLDGHPVPKQAFTDVATGSLGQGLGAACGMAYTGKYFDKASYRVYCLLGDGELSEGSVWEAMAFASIYKLDNLVAILDINRLGQSDPAPLQHQMDIYQKRCEAFGWHAIIVDGHSVEELCKAFGQAKHQPTAIIAKTFKGRGITGVEDKESWHGKPLPKNMAEQIIQEIYSQIQSKKKILATPPQEDAPSVDIANIRMPSLPSYKVGDKIATRKAYGQALAKLGHASDRIIALDGDTKNSTFSEIFKKEHPDRFIECYIAEQNMVSIAVGCATRNRTVPFCSTFAAFFTRAFDQIRMAAISESNINLCGSHCGVSIGEDGPSQMALEDLAMFRSVPTSTVFYPSDGVATEKAVELAANTKGICFIRTSRPENAIIYNNNEDFQVGQAKVVLKSKDDQVTVIGAGVTLHEALAAAELLKKEKINIRVLDPFTIKPLDRKLILDSARATKGRILTVEDHYYEGGIGEAVSSAVVGEPGITVTHLAVNRVPRSGKPAELLKMFGIDRDAIAQAVRGLITKA

SEQ ID NO: 15180 - protein, 826 aa, Homo sapiens
LDDPVVTVHQSIGEAKEQFYYERTVFLRCVANSNPPVRYSWRRGQEVLLQGSDKGVEIYEPFFTQGETKILKLKNLRPQDYANYSCIASVRNVCNIPDKMVSFRLSNKTASPSIKLLVDDPIVVNPGEAITLVCVTTGGEPAPSLTWVRSFGTLPEKTVLNGGTLTIPAITSDDAGTYSCIANNNVGNPAKKSTNIIVRALKKGRFWITPDPYHKDDNIQIGREVKISCQVEAVPSEELTFSWFKNGRPLRSSERMVITQTDPDVSPGTTNLDIIDLKFTDFGTYTCVASLKGGGISDISIDVNISSSTVPPNLTVPQEKSPLVTREGDTIELQCQVTGKPKPIILWSRADKEVAMPDGSMQMESYDGTLRIVNVSREMSGMYRCQTSQYNGFNVKPREALVQLIVQYPPAVEPAFLEIRQGQDRSVTMSCRVLRAYPIRVLTYEWRLGNKLLRTGQFDSQEYTEYAVKSLSNENYGVYNCSIINEAGAGRCSFLVTGKAYAPEFYYDTYNPVWQNRHRVYSYSLQWTQMNPDAVDRIVAYRLGIRQAGQQRWWEQEIKINGNIQKGELITYNLTELIKPEAYEVRLTPLTKFGEGDSTIRVIKYSAPVNPHLREFHCGFEDGNICLFTQDDTDNFDWTKQSTATRNTKYTPNTGPNADRSGSKEGFYMYIETSRPRLEGEKARLLSPVFSIAPKNPYGPTNTAYCFSFFYHMYGQHIGVLNVYLRLKGQTTIENPLWSSSGNKGQRWNEAHVNIYPITSFQLIFEGIRGPGIEGDIAIDDVSIAEGECAKQDLATKNSVDGAVGILVHIWLFPIIVLISILSPRR

SEQ ID NO: 15181 - protein, 780 aa, Homo sapiens
MTWICLSCMLWPEDLEAPKTHRFKVKTFKKVKPCGICRQVITQEGCTCKVCSFSCHRKCQAKVAAPCVPPSNHELVPITTENAPKNVVDKGEGASRGGNTRKSLEDNGSTRVTPSVQPHLQPIRNMSVSRTMEDSCELDLVYVTERIIAVSFPSTANEENFRSNLREVAQMLKSKHGGNYLLFNLSERRPDITKLHAKVLEFGWPDLHTPALEKICSICKAMDTWLNADPHNVVVLHNKGNRGRIGVVIAAYMHYSNISASADQALDRFAMKRFYEDKIVPIGQPSQRRYVHYFSGLLSGSIKMNNKPLFLHHVIMHGIPNFESKGGCRPFLRIYQAMQPVYTSGIYNIPGDSQTSVCITIEPGLLLKGDILLKCYHKKFRSPARDVIFRVQFHTCAIHDLGVVFGKEDLDDAFKDDRFPEYGKVEFVFSYGPEKIQGMEHLENGPSVSVDYNTSDPLIRWDSYDNFSGHRDDGMEEVVGHTQGPLDGSLYAKVKKKDSLHGSTGAVNATRPTLSATPNHVEHTLSVSSDSGNSTASTKTDKTDEPVPGASSATAALSPQEKRELDRLLSGFGLEREKQGAMYHTQHLRSRPAGGSAVPSSGRHVVPAQVHVNGGALASERETDILDDELPNQDGHSAGSMGTLSSLDGVTNTSEGGYPEALSPLTNGLDKSYPMEPMVNGGGYPYESASRAGPAHAGHTAPMRPSYSAQEGLAGYQREGPHPAWPQPVTTSHYAHDPSGMFRSQSFSEAEPQLPPAPVRGGSSREAVQRGLNSWQQQQQ

SEQ ID NO: 15182 - protein, 370 aa, Homo sapiens
MPYLHLDHQTILRAWAVKDFAPNCPLYVQILKPENKFHIKFADHVVCEEEFKYAMLALNCICPATSTLITLLVHTSRGQEGQQSPEQWQKMYGRCSGNEVYHIVLEESTFFAEYEGKSFTYASFHAHKKFGVCLIGVRREDNKNILLNPGPRYIMNSTDICFYINITKEENSAFKNQDQQRKSNVSRSFYHGPSRLPVHSIIASMGTVAIDLQDTSCRSASGPTLSLPTEGSKEIRRPSIAPVLEVADTSSIQTCDLLSDQSEDETTPDEEMSSNLEYAKGYPPYSPYIGSSPTFCHLLHEKVPFCCLRLDKSCQHNYYEDAKAYGFKNKLIIVAAETAGNGLYNFIVPLRAYYRPKKELNPIVLLLDNP

SEQ ID NO: 15183 - protein, 492 aa, Homo sapiens
MATKPTEPVTILSLRKLSLGTAEPQVKEPKTFTVEDAVETIGFGRFHIALFLIMGSTGVVEAMEIMLIAVVSPVIRCEWQLENWQVALVTTMVFFGYMVFSILFGLLADRYGRWKILLISFLWGAYFSLLTSFAPSYIWFVFLRTMVGCGVSGHSQGLIIKTEFLPTKYRGYMLPLSQVFWLAGSLLIIGLASVIIPTIGWRWLIRVASIPGIILIVAFKFIPESARFNVSTGNTRAALATLERVAKMNRSVMPEGKLVEPVLEKRGRFADLLDAKYLRTTLQIWVIWLGISFAYYGVILASAELLERDLVCGSKSDSAVVVTGGDSGESQSPCYCHMFAPSDYRTMIISTIGEIALNPLNILGINFLGRRLSLSITMGCTALFFLLLNICTSSAGLIGFLFMLRALVAANFNTVYIYTAEVYPTTMRALGMGTSGSLCRIGAMVAPFISQVLMSASILGALCLFSSVCVVCAISAFTLPIETKGRALQQIK

SEQ ID NO: 15184 - protein, 1336 aa, Homo sapiens
MENEPDHENVEQSLCAKTSEEELNKSFNLEASLSKFSYIDMDKELEFKNDLIDDKEFDIPQVDTPPTLESILNETDDEDESFILEDPTLLNIDTIDSHSYDTSSVASSDSGDRTNLKRKKKLPDSFSLHGSVMRHSLLKGISAQIVSAADKVDAGLPTAIAVSSLIAVGTSHGLALIFDQNQALRLCLGSTSVGGQYGAISALSINNDCSRLLCGFAKGQITMWDLASGKLLRSITDAHPPGTAILHIKFTDDPTLAICNDSGGSVFELTFKRVMGVRTCESRCLFSGSKGEVCCIEPLHSKPELKDHPITQFSLLAMASLTKILVIGLKPSLKVWMTFPYGRMDPSSVPLLAWHFVAVQNYVNPMLAFCRGDVVHFLLVKRDESGAIHVTKQKHLHLYYDLINFTWINSRTVVLLDSVEKLHVIDRQTQEELETVEISEVQLVYNSSHFKSLATGGNVSQALALVGEKACYQSISSYGGQIFYLGTKSVYVMMLRSWRERVDHLLKQDCLTEALALAWSFHEGKAKAVVGLSGDASKRKAIVADRMVEILFHYADRALKKCPDQGKIQVMEQHFQVVLMCWENRLYDAMIYVYNRGMNEFISPMEKLFRVIAPPLNAGKTLTDEQVVMGNKLLVYISCCLAGRAYPLGDIPEDLVPLVKNQVFEFLIRLHSAEASPEEEIYPYIRTLLHFDTREFLNVLALTFEDFKNDKQAVEYQQRIVDILLKVMVENSDFTPSQVGCLFTFLARQLAKPDNTLFVNRTLFDQVLEFLCSPDDDSRHSERQQVLLELLQAGGIVQFEESRLIRMAEKAEFYQICEFMYEREHQYDKIIDCYLRDPLREEEVFNYIHNILSIPGHSAEEKQSVWQKAMDHIEELVSLKPCKAAELVATHFSGHIETVIKKLQNQVLLFKFLRSLLDPREGIHVNQELLQISPCITEQFIELLCQFNPTQVIETLQVLECYRLEETIQITQKYQLHEVTAYLLEKKGDIHGAFLIMLERLQSKLQEVTHQGENTKEDPSLKDVEDTMVETIALCQRNSHNLNQQQREALWFPLLEAMMAPQKLSSSAIPHLHSEALKSLTMQVLNSMAAFIALPSILQRILQDPVYGKGKLGEIQGLILGMLDTFNYEQTLLETTTSLLNQDLHWSLCNLRASVTRGLNPKQDYCSICLQQYKRRQEMADEIIVFSCGHLYHSFCLQNKECTVEFEGQTRWTCYKCSSSNKVGKLSENSSEIKKGRITPSQVKMSPSYHQSKGDPTAKKGTSEPVLDPQQIQAFDQLCRLYRGSSRLALLTELSQNRSSESYRPFSGSQSAPAFNSIFQNENFQLQLIPPPVTED

SEQ ID NO: 15185 - protein, 251 aa, Homo sapiens
VVDQIDTLTSDLQLEDEMTDSSKTDTLNSSSSGTTASSLEKIKVQANAPLIKPPAHPSAILTVLRKPNPPPPPPRLTPVKCEDPKRVVPTANPVKTNGTLLRNGGLPGGPNKIPNGDICCIPNSNLDKAPVQLLMHRPEKDRCPQAGPRERVRFNEKVQYHGYCPDCDTRYNIKNREVHLHSEPVHPPGKIPHQGPPLPPTPHLPPFPLENGGMGISHSNSFPPIRPATVPPPTAPKPQKTILRKSTTTTV

SEQ ID NO: 15186 - protein, 42 aa, Homo sapiens
MLKNPYTIKKQPLHQFVQRPLFPLPAAFYHPGSHYVAQAKVQ

SEQ ID NO: 15187 - protein, 1374 aa, Homo sapiens
MLKTESSGERTTLRSASPHRNAYRTEFQALKSTFDKPKSDGEQKTKEGEGSQQSRGRKYGSNVNRIKNLFMQMGMEPNENAAVIAKTRGKGGHSSPQRRMKPKEFLEKTDGSVVKLESSVSERISRFDTMYDGPSYSKFTETRKMFERSVHESGQNNRYSPKKEKAGGSEPQDEWGGSKSNRGSTDSLDSLSSRTEAVSPTVSQLSAVFENTDSPSAIISEKAENNEYSVTGHYPLNLPSVTVTNLDTFGHLKDSNSWPPSNKRGVDTEDAHKSNATPVPEVASKSTSLASIPGEEIQQSKEPEDSTSNQQTPDSIDKDGPEEPCAESKAMPKSEIPSPQSQLLEDAEANLVGREAAKQQRKELAGGDFTSPDASASSCGKEVPEDSNNFDGSHVYMHSDYNVYRVRSRYNSDWGETGTEQDEEEDSDENSYYQPDMEYSEIVGLPEEEEIPANRKIKFSSAPIKVFNTYSNEDYDRRNDEVDPVAASAEYELEKRVEKLELFPVELEKDEDGLGISIIGMGVGADAGLEKLGIFVKTVTEGGAAQRDGRIQVNDQIVEVDGISLVGVTQNFAATVLRNTKGNVRFVIGREKPGQVSEVAQLISQTLEQERRQRELLEQHYAQYDADDDENTVAELQGMSGNCNNNNNYFLKTGEYATDEEEDEVGPVLPGSDMAIEVFELPENEDMFSPSELDTSKLSHKFKELQIKHAVTEAEIQKLKTKLQAAENEKVRWELEKTQLQQNIEENKERMLKLESYWIEAQTLCHTVNEHLKETQSQYQALEKKYNKAKKLIKDFQQKELDFIKRQEAERKKIEDLEKAHLVEVQGLQVRIRDLEAEVFRLLKQNGTQVNNNNNIFERRTSLGEVSKGDTMENLDGKQTSCQDGLSQDLNEAVPETERLDSKALKTRAQLSVKNRRQRPSRTRLYDSVSSTDGEDSLERKPSNSFYNHMHITKLLPPKGLRTSSPESDSGVPPLTPVDSNVPFSSDHIAEFQEEPLDPEMGPLSSMWGDTSLFSTSKSDHDVEESPCHHQTTNKKILREKDDAKDPKSLRASSSLAVQGGKIKRKFVDLGAPLRRNSSKGKKWKEKEKEASRFSAGSRIFRGRLENWTPKPCSTAQTSTRSPCMPFSWFNDSRKGSYSFRNLPAPTSSLQPSPETLISDKKGSKVENTWITKANKRNPNPSSSSIFGRHSQLMSVVWIQETNNFTFNDDFSPSSTSSADLSGLGAEPKTPGLSQSLALSSDEILDDGQSPKHSQCQNRAVQEWSVQQVSHWLMSLNLEQYVSEFSAQNITGEQLLQLDGNKLKALGMTASQDRAVVKKKLKEMKMSLEKARKAQEKMEKQREKLRRKEQEQMQRKSKKTEKMTSTTAEGAGEQ

SEQ ID NO: 15188 - protein, 67 aa, Homo sapiens
MSNPSAPPPYEDRNPLYPGPPPPGGYGQPSVLPGGYPAYPGYPQPGYGHPAGYPQPMPPTHPMPMNY

SEQ ID NO: 15189 - protein, 213 aa, Homo sapiens [sequence omitted]

SEQ ID NO: 15190 - protein, 1752 aa, Homo sapiens
MAGPRPSPWARLLLAALISVSLSGTLANRCKKAPVKSCTECVRVDKDCAYCTDEMFRDRRCNTQAELLAAGCQRESIVVMESSFQITEETQIDTTLRRSQMSPQGLRVRLRPGEERHFELEVFEPLESPVDLYILMDFSNSMSDDLDNLKKMGQNLARVLSQLTSDYTIGFGKFVDKVSVPQTDMRPEKLKEPWPNSDPPFSFKNVISLTEDVDEFRNKLQGERISGNLDAPEGGFDAILQTAVCTRDIGWRPDSTHLLVFSTESAFHYEADGANVLAGIMSRNDERCHLDTTGTYTQYRTQDYPSVPTLVRLLAKHNIIPIFAVTNYSYSYYEKLHTYFPVSSLGVLQEDSSNIVELLEEAFNRIRSNLDIRALDSPRGLRTEVTSKMFQKTRTGSFHIRRGEVGIYQVQLRALEHVDGTHVCQLPEDQKGNIHLKPSFSDGLKMDAGIICDVCTCELQKEVRSARCSFNGDFVCGQCVCSEGWSGQTCNCSTGSLSDIQPCLREGEDKPCSGRGECQCGHCVCYGEGRYEGQFCEYDNFQCPRTSGFLCNDRGRCSMGQCVCEPGWTGPSCDCPLSNATCIDSNGGICNGRGHCECGRCHCHQQSLYTDTICEINYSAIHPGLCEDLRSCVQCQAWGTGEKKGRTCEECNFKVKMVDELKRAEEVVVRCSFRDEDDDCTYSYTMEGDGAPGPNSTVLVHKKKDCPPGSFWWLIPLLLLLLPLLALLLLLCWKYCACCKACLALLPCCNRGHMVGFKEDHYMLRENLMASDHLDTPMLRSGNLKGRDVVRWKVTNNMQRPGFATHAASINPTELVPYGLSLRLARLCTENLLKPDTRECAQLRQEVEENLNEVYRQISGVHKLQQTKFRQQPNAGKKQDHTIVDTVLMAPRSAKPALLKLTEKQVEQRAFHDLKVAPGYYTLTADQDARGMVEFQEGVELVDVRVPLFIRPEDDDEKQLLVEAIDVPAGTATLGRRLVNITIIKEQARDVVSFEQPEFSVSRGDQVARIPVIRRVLDGGKSQVSYRTQDGTAQGNRDYIPVEGELLFQPGEAWKELQVKLLELQEVDSLLRGRQVRRFHVQLSNPKFGAHLGQPHSTTIIIRDPDELDRSFTSQMLSSQPPPHGDLGAPQNPNAKAAGSRKIHFNWLPPSGKPMGYRVKYWIQGDSESEAHLLDSKVPSVELTNLYPYCDYEMKVCAYGAQGEGPYSSLVSCRTHQEVPSEPGRLAFNVVSSTVTQLSWAEPAETNGEITAYEVCYGLVNDDNRPIGPMKKVLVDNPKNRMLLIENLRESQPYRYTVKARNGAGWGPEREAIINLATQPKRPMSIPIIPDIPIVDAQSGEDYDSFLMYSDDVLRSPSGSQRPSVSDDTEHLVNGRMDFAFPGSTNSLHRMTTTSAAAYGTHLSPHVPHRVLSTSSTLTRDYNSLTRSEHSHSTTLPRDYSTLTSVSSHDSRLTAGVPDTPTRLVFSALGPTSLRVSWQEPRCERPLQGYSVEYQLLNGGELHRLNIPNPAQTSVVVEDLLPNHSYVFRVRAQSQEGWGREREGVITIESQVHPQSPLCPLPGSAFTLSTPSAPGPLVFTALSPDSLQLSWERPRRPNGDIVGYLVTCEMAQGGGPATAFRVDGDSPESRLTVPGLSENVPYKFKVQARTTEGFGPEREGIITIESQDGGPFPQLGSRAGLFQHPLQSEYSSITTTHTSATEPFLVDGLTLGAQHLEAGGSLTRHVTQEFVSRTLTTSGTLSTHMDQQFFQT

SEQ ID NO: 15191 - protein, 488 aa, Homo sapiens
EYLQVRRVKRQQNEMAERFHHVTVLQIYFCDWQQAWERRESLYAHHAQVEKLARKMALRRAFTHWKHYMLLCAEEAAQFEMAEEHHRHSQLYFCFRALKDNVTHAHLQQIRRNLAHQQHGVTLLHRFWNLWRSQIEQKKERELLPLLHAAWDHYRIALLCKCIELWLQYTQKRRYKQLLQARADGHFQQRALPAAFHTWNRLWRWRHQENVLSARATRFHRETLEKQVFSLWRQKMFQHRENRLAERMAILHAERQLLYRSWFMWHQQAAARHQEQEWQTVACAHHRHGRLKKAFCLWRESAQGLRTESWSSGGKLCQCRCITDSRRTVPSGRPRRCWTGAVCGPGFSAGGTAAGGQPSRDCSWRGQCNTTTGSCCWRGWPGGRRTICSVSGRGSCTGRAPNCWHRDSAGPASASGDNSWQPGGRSSGRQCGPCGSGPSRCRQRCGPRGWPLYWKGGERRRGCSGRSRPTRGSSSRRVPRGSCALQPA

SEQ ID NO: 15192 - protein, 708 aa, Homo sapiens
MKLVFLVLLFLGALGLCLAGRRRSVQWCAVSQPEATKCFQWQRNMRKVRGPPVSCIKRDSPIQCIQAIAENRADAVTLDGGFIYEAGLAPYKLRPVAAEVYGTERQPRTHYYAVAVVKKGGSFQLNELQGLKSCHTGLRRTAGWNVPIGTLRPFLNWTGPPEPIEAAVARFFSASCVPGADKGQFPNLCRLCAGTGENKCAFSSQEPYFSYSGAFKCLRDGAGDVAFIRESTVFEDLSDEAERDEYELLCPDNTRKPVDKFKDCHLARVPSHAVVARSVNGKEDAIWNLLRQAQEKFGKDKSPKFQLFGSPSGQKDLLFKDSAIGFSRVPPRIDSGLYLGSGYFTAIQNLRKSEEEVAARRARVVWCAVGEQELRKCNQWSGLSEGSVTCSSASTTEDCIALKGEADAMSLDGGYVYTAGKCGLVPVLAENYKSQQSSDPDPNCVDRPVEGYLAVAVVRRSDTSLTWNSVKGKKSCHTAVDRTAGWNIPMGLLFNQTGSCKFDEYFSQSCAPGSDPRSNLCALCIGDEQGENKCVPNSNERYYGYTGAFRCLAENAGDVAFVKDVTVLQNTDGNNNEAWAKDLKLADFALLCLDGKRKPVTEARSCHLAMAPNHAVVSRMDKVERLKQVLLHQQAKFGRNGSDCPDKFCLFQSETKNLLFNDNTECLARLHGKTTYEKYLGPQYVAGITNLKKCSTSPLLEACEFLRK

SEQ ID NO: 15193 - protein, 189 aa, Homo sapiens
MQKIKSLMTRQGLKSPQESLSDLGAIESLRVPGKEEFRELREQPSDPQAEQELINSIEQVYFSVDSFDIVKYELELPPVLNLQELEAYRDKLKQQQAAVSKKVADLILEKQPAYVKELERVTSLQTGLQLAAVICTNGRRHLNIAKEGFTQASLGLLANQRKRQLLIGLLKSLRTIKTLQRTDVRLSEM

SEQ ID NO: 15194 - protein, 334 aa, Homo sapiens
YQQIKAGAYDFPSPEWDTVTPEAKNLINQMLTINPAKRITADQALKHPWVCQRSTVASMMHRQETVECLRKFNARRKLKGAILTTMLVSRNFSAAKSLLNKKSDGGVKPQSNNKNSLVSPAQEPAPLQTAMEPQTTVVHNATDGIKGSTESCNTTTEDEDLKAAPLRTGNGSSVPEGRSSRDRTAPSAGMQPQPSLCSSAMRKQEIIKITEQLIEAINNGDFEAYTKICDPGLTSFEPEALGNLVEGMDFHKFYFENLLSKNSKPIHTTILNPHVHVIGEDAACIAYIRLTQYIDGQGRPRTSQSEETRVWHRRDGKWLNVHYHCSGAPAAPLQ

SEQ ID NO: 15195 - protein, 1249 aa, Homo sapiens
MSPAAAAAGAGERRRPIASVRDGRGRGCGGPARAVLLGLSLVGLLLYLVPAAAALAWLTVGATAAWWGLSREPRGSRPLSSFVRKARHRRPLSSFVRKARHRRTLFASPLAKSTANGNLLEPRTLLEGPDPAELLLMGSYLGKPGPPQPAAAPEGQDLRDRPGRRPPARPAPRSPPPRSPPPRSPPPSPPTHRAHHVYPSLPTPLLRPSRRPSPRDCGTLPNRFVITPRRRYPIHQAQYSCLGVLPTVCWNGYHKKAVLSPRNSRMVCSPVTVRIAPPDRRFSRSAIPEQIISSTLSSPSSNAPDPCAKETVLSALKEKEKKRTVEEEDQIFLDGQENKRRRHDSSGSGHSAFEPLVANGVPASFVPKPGSLKRGLNSQSSDDHLNKRSRSSSMSSLTGAYASGIPSSSRNAITSSYSSTRGISQLWKRNGPSSSPFSSPASSRSQTPERPAKKIREEELCHHSSSSTPLAADRESQGEKAADTTPRKKQNSNSQSTPGSSGQRKRKVQLLPSRRGEQLTLPPPPQLGYSITAEDLDLEKKASLQWFNQALEDKSDAASNSVTETPPITQPSFTFTLPAAAPASPPTSLLAPSTNPLLESLKKMQTPPSLPPCPESAGAATTEALSPPKTPSLLPPLGLSQSGPPGLLPSPSFDSKPPTTLLGLIPAPSMVPATDTKAPPTLQAETATKPQATSAPSPAPKQSFLFGTQNTSPSSPAAPAASSAPPMFKPIFTAPPKSEKEGPTPPGPSVTATAPSSSSLPTTTSTTAPTFQPVFSSMGPPASVPLPAPFFKQTTTPATAPTTTAPLFTGLASATSAVAPITSASPSTDSASKPAFGFGINSVSSSSVSTTTSTATAASQPFLFGAPQASAASFTPAMGSIFQFGKPPALPTTTTVTTFSQSLHTAVPTATSSSAADFSGFGSTLATSAPATSSQPTLTFSNTSTPTFNIPFGSSAKSPLPSYPGANPQPAFGAAEGQPPGAAKPALAPSFGSSFTFGNSAAPAAAPTPAPPSMIKVVPAYVPTPIHPIFGGATHSAFGLKATASAFGAPASSQPAFGGSTAVFFGAATSSGFGATTQTASSGSSSSVFGSTTPSPFTFGGSAAPAGSGSFGINVATPGSSTTTGAFSFGAGQSGSTATSTPFAGGLGQNALGTTGQSTPFAFNVSSTTESKPVFGGTATPTFGLNTPAPGVGTSGSSLSFGASSAPAQGFVGVAPFGSAALSFSIGAGSKTPGARQRLQARRQHTRKK

SEQ ID NO: 15196 - protein, 128 aa, Homo sapiens
MGNLEITSIEHNRDLSFLRSVREVTGYVLVALNQFRYLPLENLRIIRGTKLYEDRYALAIFLNYRKDGNFGLQELGLKNLTEILNGGVYVDQNKFLCYADTIHWQDIVRNPWPSNLTLVSTNGSSGCG

SEQ ID NO: 15197 - protein, 382 aa, Homo sapiens
RTVMVEEFKQGLAVTDEILQGKSDWSKLLEPPNFFQKYRHYIVLTASASTEENHLEWVGLVESKIRVLVGNLERNEFITLAHVNPQSFPGNKEHHKDNNYVSMWFLGIIFRRVENAESVNIDLTYDIQSFTDTVYRQANNINMLKEGMKIEATHVKKKQLHHYLPAEILQKKKKQSLSDVNRSSGGLQSKRLSLDSSCLDSSRDTDNGTPFNSPASKSDSPSVGETERNSAEPAAVIVEKPLSVPPAQGLSIPVIGAKVDSTVKTVSPPTVCTIPTVVGRNVIPRITTPHNPAQGQPHLNGMSNITKTVTPKRSHSPSIDGTPKRLKDVEKDAIGGESMPIPTIDTSRKKRLPSKELPDSSSPVPANNIRVIKNSIRLTLNR

SEQ ID NO: 15198 - protein, 373 aa, Homo sapiens
MSLLLLLLLVSYYVGTLGTHTEIKRVAEEKVTLPCHHQLGLPEKDTLDIEWLLTDNEGNQKVVITYSSRHVYNNLTEEQKGRVAFASNFLAGDASLQIEPLKPSDEGRYTCKVKNSGRYVWSHVILKVLVRPSKPKCELEGELTEGSDLTLQCESSSGTEPIVYYWQRIREKEGEDERLPPKSRIDYNHPGRVLLQNLTMSYSGLYQCTAGNEAGKESCVVRVTVQYVQSIGMVAGAVTGIVAGALLIFLLVWLLIRRKDKERYEEEERPNEIREDAEAPKARLVKPSSSSSGSRSSRSGSSSTRSTANSASRSQRTLSTDAAPQPGLATQAYSLVGPEVRGSEPKKVHHANLTKAETTPSMIPSQSRAFQTV

SEQ ID NO: 15199 - protein, 869 aa, Homo sapiens
MKIIFPILSNPVFRRTVKLLLCLLWIGYSQGTTHVLRFGGIFEYVESGPMGAEELAFRFAVNTINRNRTLLPNTTLTYDTQKINLYDSFEASKKACDQLSLGVAAIFGPSHSSSANAVQSICNALGVPHIQTRWKHQVSDNKDSFYVSLYPDFSSLSRAILDLVQFFKWKTVTVVYDDSTGLIRLQELIKAPSRYNLRLKIRQLPADTKDAKPLLKEMKRGKEFHVIFDCSHEMAAGILKQALAMGMMTEYYHYIFTTLDLFALDVEPYRYSGVNMTGFRILNTENTQVSSIIEKWSMERLQAPPKPDSGLLDGFMTTDAALMYDAVHVVSVAVQQFPQMTVSSLQCNRHKPWRFGTRFMSLIKEAHWEGLTGRITFNKTNGLRTDFDLDVISLKEEGLEKIGTWDPASGLNMTESQKGKPANITDSLSNRSLIVTTILEEPYVLFKKSDKPLYGNDRFEGYCIDLLRELSTILGFTYEIRLVEDGKYGAQDDANGQWNGMVRELIDHKADLAVAPLAITYVREKVIDFSKPFMTLGISILYRKPNGTNPGVFSFLNPLSPDIWMYILLAYLGVSCVLFVIARFSPYEWYNPHPCNPDSDVVENNFTLLNSFWFGVGALMQQGSELMPKALSTRIVGGIWWFFTLIIISSYTANLAAFLTVERMESPIDSADDLAKQTKIEYGAVEDGATMTFFKKSKISTYDKMWAFMSSRRQSVLVKSNEEGIQRVLTSDYAFLMESTTIEFVTQRNCNLTQIGGLIDSKGYGVGTPMGSPYRDKITIAILQLQEEGKLHMMKEKWWRGNGCPEEESKEASALGVQNIGGIFIVLAAGLVLSVFVAVGEFLYKSKKNAQLEKESSIWLVPPYHPDTV

SEQ ID NO: 15200 - protein, 1241 aa, Homo sapiens
MSSAPRRPAKGADSFCTPEPESLGPGTPGFPEQEEDELHRTLGVERFEEILQEAGSRGGEEPGRSYGEEDFEYHRQSSHHIHHPLSTHLPPDARRRKTPQGPGRKPRRRPGASPTGETPTIEEGEEDEDEASEAEGARALTQPSPVSTPSSVQFFLQEDDSADRKAERTSPSSPAPLPHQEATPRASKGAQAGTQVEEAEAEAVAVASGTAGGDDGGASGRPLPKAQPGHRSYNLQERRRIGSMTGAEQALLPRVPTDEIEAQTLATADLDLMKSHRFEDVPGVRRHLVRKNAKGSTQSGREGREPGPTPRARPRAPHKPHEVFVELNELLLDKNQEPQWRETARWIKFEEDVEEETERWGKPHVASLSFRSLLELRRTLAHGAVLLDLDQQTLPGVAHQVVEQMVISDQIKAEDRANVLRALLLKHSHPSDEKDFSFPRNISAGSLGSLLGHHHGQGAESDPHVTEPLMGGVPETRLEVERERELPPPAPPAGITRSKSKHELKLLEKIPENAEATVVLVGCVEFLSRPTMAFVRLREAVELDAVLEVPVPVRFLFLLLGPSSANMDYHEIGRSISTLMSDKQFHEAAYLADEREDLLTAINAFLDCSVVLPPSEVQGEELLRSVAHFQRQMLKKREEQGRLLPTGAGLEPKSAQDKALLQMVEAAGAAEDDPLRRTGRPFGGLIRDVRRRYPHYLSDFRDALDPQCLAAVIFIYFAALSPAITFGGLLGEKTQDLIGVSELIMSTALQGVVFCLLGAQPLLVIGFSGPLLVFEEAFFSFCSSNHLEYLVGRVWIGFWLVFLALLMVALEGSFLVRFVSRFTQEIFAFLISLIFIYETFYKLVKIFQEHPLHGCSASNSSEVDGGENMTWAGARPTLGPGNRSLAGQSGQGKPRGQPNTALLSLVLMAGTFFIAFFLRKFKNSRFFPGRIRRVIGDFGVPIAILIMVLVDYSIEDTYTQKLSVPSGFSVTAPEKRGWVINPLGEKSPFPVWMMVASLLPAILVFILIFMETQITTLIISKKERMLQKGSGFHLDLLLIVAMGGICALFGLPWLAAATVRSVTHANALTVMSKAVAPGDKPKIQEVKEQRVTGLLVALLVGLSIVIGDLLRQIPLAVLFGIFLYMGVTSLNGIQFYERLHLLLMPPKHHPDVTYVKKVRTLRMHLFTALQLLCLALLWAVMSTAASLAFPFILILTVPLRMVVLTRIFTDREMKCLDANEAEPVFDEREGVDEYNEMPMPV

SEQ ID NO: 15201 - protein, 608 aa, Homo sapiens
EHESEGGRTPLMKAARAGHLCTVQFLISKGANVNRATANNDHTVVSLACAGGHLAVVELLLAHGADPTHRLKDGSTMLIEAAKGGHTNVVSYLLDYPNNVLSVPTTDVSQLPPPSQDQSQVPRVPTHTLAMVVPPQEPDRTSQENSPALLGVQKAVSTRVPTGSNSSSQTTECLTPESCSQTTSNVASQSMPPVYPSVDIDAHTESNHDTALTLACAGGHEELVSVLIARDAKIEHRDKKGFTPLILAATAGHVGVVEILLDKGGDIEAQSERTKDTPLSLACSGGRQEVVDLLLARGANKEHRNVSDYTPLSLAASGGYVNIIKILLNAGAEINSRTGSKLGISPLMLAAMNGHVPAVKLLLDMGSDINAQIETNRNTALTLACFQGRAEVVSLLLDRKANVEHRAKTGLTPLMEAASGGYAEVGRVLLDKGADVNAPPVPSSRDTALTIAADKGHYKFCELLIHRGAHIDVRNKKGNTPLWLASNGGHFDVVQLLVQAGADVDAADNRKITPLMSAFRKGHVKVVQYLVKEVNQFPSDIECMRYIATITDKELLKKCHQCVETIVKAKDQQAAEANKNASILLKELDLEKSREESRKQALAAKREK

SEQ ID NO: 15202 - protein, 173 aa, Homo sapiens
MSWIKEGELSLWERFCANIIKAGPMPKHIAFIMDGNRRYAKKCQVERQEGHSQGFNKLAETLRWCLNLGILEVTVYAFSIENFKRSKSEVDGLMDLARQKFSRLMEEKEKLQKHGVCIRVLGDLHLLPLDLQELIAQAVQATKNYNKCFLNVCFAYTSRHEISNAVREMAWGV

SEQ ID NO: 15203 - protein, 221 aa, Homo sapiens
PASGDGFEPQMVKSPSFGGASEASARTPPQVVQPSPSLSTFFGDTAASHSLASDFFDSFTTSAFISVSNPGAGSPAPASPPPLAVPGTEGRPEPVAMRGPQAAAPPASPEPFAHIQAVFAGSDDPFATALSMSEMDRRNDAWLPGEATRGVLRAVATQQRGAVFVDKENLTMPGLRFDNIQGDAVKDLMLRFLGEKAAAKRQVLNADSVEQSFVGLKQLIR

SEQ ID NO: 15204 - protein, 251 aa, Homo sapiens
MLPAATEVQLRLQGQKDMVWKWMPLLLLLVCVATMCSAQDRTDLLNVCMDAKHHKTKPGPEDKLHDQCSPWKKNACCTASTSQELHKDTSRLYNFNWDHCGKMEPACKRHFIQDTCLYECSPNLGPWIQQVNQSWRKERFLDVPLCKEDCQRWWEDCHTSHTCKSNWHRGWDWTSAALCEGLWSHSYKVSNYSRGSGRCIQMWFDSAQGNPNEEVARFYAAAMHVNAGEMLHGTGGLLLSLALMLQLWLLG

SEQ ID NO: 15205 - protein, 77 aa, Homo sapiens
MGSSGLGKAATLDELLCTCIEMFDDNGELDNSYLPRIVLLMHRWYLSSTELAEKLLCMYRNATGESCNEFRLKICYF

SEQ ID NO: 15206 - protein, 823 aa, Homo sapiens
MATPRGRTKKKASFDHSPDSLPLRSSGRQAKKKATETTDEDEDGGSEKKYRKCEKAGCTATCPVCFASASERCAKNGYTSRWYHLSCGEHFCNECFDHYYRSHKDGYDKYTTWKKIWTSNGKTEPSPKAFMADQQLPYWVQCTKPECRKWRQLTKEIQLTPQIAKTYRCGMKPNTAIKPETSDHCSLPEDLRVLEVSNHWWYSMLILPPLLKDSVAAPLLSAYYPDCVGMSPSCTSTNRAAATGNASPGKLEHSKAALSVHVPGMNRYFQPFYQPNECGKALCVRPDVMELDELYEFPEYSRDPTMYLALRNLILALWYTNCKEALTPQKCIPHIIVRGLVRIRCVQEVERILYFMTRKGLINTGVLSVGADQYLLPKDYHNKSVIIIGAGPAGLAAARQLHNFGIKVTVLEAKDRIGGRVWDDKSFKGVTVGRGAQIVNGCINNPVALMCEQLGISMHKFGERCDLIQEGGRITDPTIDKRMDFHFNALLDVVSEWRKDKTQLQDVPLGEKIEEIYKAFIKESGIQFSELEGQVLQFHLSNLEYACGSNLHQVSARSWDHNEFFAQFAGDHTLLTPGYSVIIEKLAEGLDIQLKSPQVQCIDYSGDEVQVTTTDGTGYSAQKVLVTVPLALLQKGAIQFNPPLSEKKMKAINSLGAGIIEKIALQFPYRFWDSKVQGADFFGHVPPSASKRGLFAVFYDMDPQKKHSVLMSVIAGEAVASVRTLDDKQVLQQCMATLRELFKEQEVPDPTKYFVTRWSTDPWIQMAYSFVKTGGSGEAYDIIAEDIQGTVFFAGEATNRHFPQTVTGAYLSGVREASKIAAF

SEQ ID NO: 15207 - protein, 788 aa, Homo sapiens
MKKASRSVGSVPKVSAISKTQTAEKIKPENSSSASTGGKLVKPGTAASLSKTKSSDDLLAGMAGGVTVTNGVKGKKSTCPSAAPSASAPAMTTVENKSKISTGTASSTKRSTSTGNKESSSTRERLRERTRLNQSKKLPSAGQGANDMALAKRSRSRTATECDVRMSKSKSDNQISDRAALEAKVKDLLTLAKTKDVEILHLRNELRDMRAQLGINEDHSEGDEKSEKETIMAHQPTDVESTLLQLQEQNTAIREELNQLKNENRMLKDRLNALGFSLEQRLDNSEKLFGYQSLSPEITPGNQSDGGGTLTSSVEGSAPGSVEDLLSQDENTLMDHQHSNSMDNLDSECSEVYQPLTSSDDALDAPSSSESEGIPSIERSRKGSSGNASEVSVACLTERIHQMEENQHSTSEELQATLQELADLQQITQELNSENERLGEEKVILMESLCQQSDKLEHFSRQIEYFRSLLDEHHISYVIDEDVKSGRYMELEQRYMDLAENARFEREQLLGVQQHLSNTLKMAEQDNKEAQEMIGALKERSHHMERIIESEQKGKAALAATLEEYKATVASDQIEMNRLKAQLENEKQKVAELYSIHNSGDKSDIQDLLESVRLDKEKAETLASSLQEDLAHTRNDANRLQDAIAKVEDEYRAFQEEAKKQIEDLNMTLEKLRSDLDEKETERSDMKETIFELEDEVEQHRAVKLHDNLIISDLENTVKKLQDQKHDMEREIKTLHRRLREESAEWRQFQADLQTAVVIANDIKSEAQEEIGDLKRRLHEAQEKNEKL

SEQ ID NO: 15208 - protein, 1301 aa, Homo sapiens
MWRRKHPRTSGGTRGVLSGNRGVEYGSGRGHLGTFEGRWRKLPKMPEAVGTDPSTSRKMAELEEVTLDGKPLQALRVTDLKAALEQRGLAKSGQKSALVKRLKGALMLENLQKHSTPHAAFQPNSQIGEEMSQNSFIKQYLEKQQELLRQRLEREAREAAELEGKSSSISEEKGDSDDEKPRKGERRSSRVRQARAAKLSEGSQPAEEEEDQETPSRNLRVRADRNLKTEEEEEEEEEEEEDDEEEEGDDEGQKSREAPILKEFKEEGEEIPRVKPEEMMDERPKTRSQEQEVLERGGRFTRSQEEARKSHLARQQQEKEMKTTSPLEEEEREIKSSQGLKEKSKSPSPPRLTEDRKKASLVALPEQTASEEETPPPLLTKEASSPPPHPQLHSEEEIEPMEGPAPAVLIQLSPPNTDADTRELLVSQHTVQLVGGLSPLSSPSDTKAESPAEKVPEESVLPLVQKSTLADYSAQKDLEPESDRSAQPLPLKIEELALAKGITEECLKQPSLEQKEGRRASHTLLPSHRLKQSADSSSSRSSSSSSSSSRSRSRSPDSSGSRSHSPLRSKQRDVAQARTHANPRGRPKMGSRSTSESRSRSRSRSRSASSNSRKSLSPGVSRDSSTSYTETKDPSSGQEVATPPVPQLQVCEPKERTSTSSSSVQARRLSQPESAEKHVTQRLQPERGSPKKCEAEEAEPPAATQPQTSETQTSHLPESERIHHTVEEKEEVTMDTSENRPENDVPEPPMPIADQVSNDDRPEGSVEDEEKKESSLPKSFKRKISVVSATKGVPAGNSDTEGGQPGRKRRWGASTATTQKKPSISITTESLKSLIPDIKPLAGQEAVVDLHADDSRISEDETERNGDDGTHDKGLKICRTVTQVVPAEGQENGQREEEEEEKEPEAEPPVPPQVSVEVALPPPAEHEVKKVTLGDTLTRRSISQQKSGVSITIDDPVRTAQVPSPPRGKISNIVHISNLVRPFTLGQLKELLGRTGTLVEEAFWIDKIKSHCFVTYSTVEEAVATRTALHGVKWPQSNPKFLCADYAEQDELDYHRGLLVDRPSETKTEEQGIPRPLHPPPPPPVQPPQHPRAEQREQERAVREQWAEREREMERRERTRSEREWDRDKVREGPRSRSRSRDRRRKERAKSKEKKSEKKEKAQEEPPAKLLDDLFRKTKAAPCIYWLPLTDSQIVQKEAERAERAKEREKRRKEQEEEEQKEREKEAERERNRQLEREKRREHSRERDRERERERERDRGDRDRDRERDRERGRERDRRDTKRHSRSRSRSTPVRDRGGRR

SEQ ID NO: 15209 - protein, 998 aa, Homo sapiens
MKVKEEKAGVGKLDHTNHRRRFPDQKECPPIHIGLPVPTYPQRKTDQKGHLSGLQKVHWGLRPDQPQQELTGPGSGASSQDSSMDLISRTRSPAAEQLQDILGEEDEAPNPTLFTEMDTLQHDGDQMEWKESARWIKFEEKVEEGGERWSKPHVSTLSLHSLFELRTCLQTGTVLLDLDSGSLPQIIDDVIEKQIEDGLLRPELRERVSYVLLRRHRHQTKKPIHRSLADIGKSVSTTNRSPARSPGAGPSLHHSTEDLRMRQSANYGRLCHAQSRSMNDISLTPNTDQRKNKFMKKIPKDSEASNVLVGEVDFLDQPFIAFVRLIQSAMLGGVTEVPVPTRFLFILLGPSGRAKSYNEIGRAIATLMVDDLFSDVAYKARNREDLIAGIDEFLDEVIVLPPGEWDPNIRIEPPKKVPSADKRKSVFSLAELGQMNGSVGGGGGAPGGGNGGGGGGGSGGGAGSGGAGGTSSGDDGEMPAMHEIGEELIWTGRFFGGLCLDIKRKLPWFPSDFYDGFHIQSISAILFIYLGCITNAITFGGLLGDATDNYQGVMESFLGTAMAGSLFCLFSGQPLIILSSTGPILIFEKLLFDFSKGNGLDYMEFRLWIGLHSAVQCLILVATDASFIIKYITRFTEEGFSTLISFIFIYDAIKKMIGAFKYYPINMDFKPNFITTYKCECVAPDTVNTTVFNASAPLAPDTNASLYNLLNLTALDWSLLSKKECLSYGGRLLGNSCKFIPDLALMSFILFFGTYSMTLTLKKFKFSRYFPTKPTRPDRGWFVAPFGKNPWWVYPASILPALLVTILIFMDQQITAVIVNRKENKLKGTESNRHHRLHPDGNLCLPGSHPKVYPPAGAVRSLPLHGRGLPEWHPVLGTLQALPDASQAPAGPCLPAARAAAPDPPLHPGADPLPGGALDPQIHGGCHHLPGHVSLHHRSWASSSFEGFWISSFPSTTWPGLTTSSQRRKKRRQTRRGREKKGPTRTVMRSPSSLLPRL

SEQ ID NO: 15210 - protein, 666 aa, Homo sapiens
MRKVRGPPVSCIKRDSPIQCIQAIAENRADAVTLDGGFIYEAGLAPYKLRPVAAEVYGTERQPRTHYYAVAVVKKGGSFQLNELQGLKSCHTGLRRTAGWNVPIGTLRPFLNWTGPPEPIEAAVARFFSASCVPGADKGQFPNLCRLCAGTGENKCAFSSQEPYFSYSGAFKCLRDGAGDVAFIRESTVFEDLSDEAERDEYELLCPDNTRKPVDKFKDCHLARVPSHAVVARSVNGKEDAIWNLLRQAQEKFGKDKSPKFQLFGSPSGQKDLLFKDSAIGFSRVPPRIDSGLYLGSGYFTAIQNLRKSEEEVAARRARVVWCAVGEQELRKCNQWSGLSEGSVTCSSASTTEDCIALVLKGEADAMSLDGGYVYTAGKCGLVPVLAENYKSQQSSDPDPNCVDRPVEGYLAVAVVRRSDTSLTWNSVKGKKSCHTAVDRTAGWNIPMGLLFNQTGSCKFDEYFSQSCAPGSDPRSNLCALCIGDEQGENKCVPNSNERYYGYTGAFRCLAENAGDVAFVKDVTVLQNTDGNNNEAWAKDLKLADFALLCLDGKRKPVTEARSCHLAMAPNHAVVSRMDKVERLKQVLLHQQAKFGRNGSDCPDKFCLFQSETKNLLFNDNTECLARLHGKTTYEKYLGPQYVAGITNLKKCSTSPLLEACEFLRK

SEQ ID NO: 15211 - protein, 945 aa, Homo sapiens
MTPALREATAKGISFSSLPSTMESDKMLYMESPRTVDEKLKGDTFSQMLGFPTPEPTLNTNFVNLKHFGSPQSSKHYQTVFLMRSNSTLNKHNENYKQKKLGEPSCNKLKNILYNGSNIQLSKICLSHSEEFIKKEPLSDTTSQCMKDVQIILDSNITKDTNVDKVQLQNCKWYQENALLDKVTDAEIKKGLLHCTQKKIVPGHSNVPVSSSAAEKEEEVHARLLHCVSKQKILLSQARRTQKHLQMLLAKHVVKHYGQQMKLSMKHQLPKMKTFHEPTTILGNSLPKCTEIKPEVNTLTAENKLWDDAKNGFARCTAAEIQRFAFSATGLLSHVEEGLDSDATDSSSDDDLDEYTLRKNVAVNCSTEWKWLVDRARVGSRWTWLQAQISDLECKIQQLTDIHRQIRASKGIVVLEECQLPKDILKKQMQFADQAASLNILGNPQVPQECQDPVPEQDFEMSPSSPTLLLRNIEKQSAQLTEIINSLIAPLNLSPTSSPLSSKSCSHKCLANGIYRSASENLDELSSSSSWLLNQKHSKKKRKDRTRLKSSSLTFMSTSARTRPLQSFHKRKLYRLSPTFYWTPQTLPSKETAFLNTTQMPCLQSASTWSSYEHNSESYLLREHVSELDSSFHSVLSLPSDVPLHFHFETLLKKTEIKGNLAENKFVDEYIISPSPGERTKLEESDFQHTESGSHSNFTAVSNVNVLSRIQNSSRNTARRRLRSESSYDIDNIVIPMSLVAPAKLEKLQYKEILTPSWRMVVLQPLDEYNLGKEEIEDLSDEVFSLRHKKYEEREQARWSLWEQSKWHRRNSRAYSKNVEGQDLLLKEYPNNFSSSQQCAAASPPGLPSENQDLCAYGLPSLNQSQETKSLWWERRAFPLKGEDMAALLCQDEKKDQVERSSTAFHGEIFGTSVPENGHHPKKQSDGMEEYKTFGLGLTNVKKNR

SEQ ID NO: 15212 - protein, 1384 aa, Homo sapiens
MATDDKTSPTLDSANDLPRSPTSPSHLTHFKPLTPDQDEPPFKSAYSSFVNLFRFNKERAEGGQGEQQPLSGSWTSPQLPSRTQSVRSPTPYKKQLNEELQRRSSALDTRRKAEPTFGGHDPRTAVQLRSLSTVLKRLKEIMEGKSQDSDLKQYWMPDSQCKECYDCSEKFTTFRRRHHCRLCGQIFCSRCCNQEIPGKFMGYTGDLRACTYCRKIALSYAHSTDSNSIGEDLNALSDSACSVSVLDPSEPRTPVGSRKASRNIFLEDDLAWQSLIHPDSSNTPLSTRLVSVQEDAGKSPARNRSASITNLSLDRSGSPMVPSYETSVSPQANRTYVRTETTEDERKILLDSVQLKDLWKKICHHSSGMEFQDHRYWLRTHPNCIVGKELVNWLIRNGHIATRAQAIAIGQAMVDGRWLDCVSHHDQLFRDEYALYRPLQSTEFSETPSPDSDSVNSVEGHSEPSWFKDIKFDDSDTEQIAEEGDDNLAKYLISDTGGQQLSISDAFIKESLFNRRVEEKSKELPFTPLGWHHNNLELLREENGEKQAMERLLSANHNHMMALLQQLLHSDSLSSSWRDIIVSLVCQVVQTVRPDVKNQDDDMDIRQFVHIKKIPGGKKFDSVVVNGFVCTKNIAHKKMSSCIKNPKILLLKCSIEYLYREETKFTCIDPIVLQEREFLKNYVQRIVDVRPTLVLVEKTVSRIAQDMLLEHGITLVINVKSQVLERISRMTQGDLVMSMDQLLTKPHLGTCHKFYMQIFQLPNEQTKTLMFFEGCPQHLGCTIKLRGGSDYELARVKEILIFMICVAYHSQLEISFLMDEFAMPPTLMQNPSFHSLIEGRGHEGAVQEQYGGGSIPWDPDIPPESLPCDDSSLLELRIVFEKGEQENKNLPQAVASVKHQEHSTTACPAGLPCAFFAPVPESLLPLPVDDQQDALGSEQPETLQQTVVLQDPKSQIRAFRDPLQDDTGLYVTEEVTSSEDKRKTYSLAFKQELKDVILCISPVITFREPFLLTEKGMRCSTRDYFAEQVYWSPLLNKEFKEMENRRKKQLLRDLSGLQGMNGSIQAKSIQVLPSHELVSTRIAEHLGDSQSLGRMLADYRARGGRIQPKNSDPFAHSKDASSTSSGQSGSKNEGDEERGLILSDAVWSTKVDCLNPINHQRLCVLFSSSSAQSSNAPSACVSPWIVTMEFYGKNDLTLGIFLERYCFRPSYQCPSMFCDTPMVHHIRRFVHGQGCVQIILKELDSPVPGYQHTILTYSWCRICKQVTPVVALSNESWSMSFAKYLELRFYGHQYTRRANAEPCGHSIHHDYHQYFSYNQMVASFSYSPIRLLEVCVPLPKIFIKRQAPLKVSLLQDLKDFFQKVSQVYVAIDERLASLKTDTFS

SEQ ID NO: 15213 - protein, 681 aa, Homo sapiens
MTASPDYLVVLFGITAGATGAKLGSDEKELILLFWKVVDLANKKVGQLHEVLVRPDQLELTEDCKEETKIDVESLSSASQLDQALRQFNQSVSNELNIGVGTSFCLCTDGQLHVRQILHPEASKKNVLLPECFYSFFDLRKEFKKCCPGSPDIDKLDVATMTEYLNFEKSSSVSRYGASQVEDMGNIILAMISEPYNHRFSDPERVNYKFESGTCSKMELIDDNTVVRARGLPWQSSDQDIARFFKGLNIAKGGAALCLNAQGRRNGEALVRFVSEEHRDLALQRHKHHMGTRYIEVYKATGEDFLKIAGGTSNEVAQFLSKENQVIVRMRGLPFTATAEEVVAFFGQHCPITGGKEGILFVTYPDGRPTGDAFVLFACEEYAQNALRKHKDLLGKRYIELFRSTAAEVQQVLNRFSSAPLIPLPTPPIIPVLPQQFVPPTNVRDCIRLRGLPYAATIEDILDFLGEFATDIRTHGVHMVLNHQGRPSGDAFIQMKSADRAFMAAQKCHKKNMKDRYVEVFQCSAEEMNFVLMGGTLNRNGLSPPPCKLPCLSPPSYTFPAPAAVIPTEAAIYQPSVILNPRALQPSTAYYPAGTQLFMNYTAYYPSPPGSPNSLGYFPTAANLSGVPPQPGTVVRMQGLAYNTGVKEILNFFQGYQYATEDGLIHTNDQARTLPKEWVCI

SEQ ID NO: 15214 - protein, 320 aa, Homo sapiens
MPHIDNDVKLDFKDVLLRPKRSTLKSRSEVDLTRSFSFRNSKQTYSGVPIIAANMDTVGTFEMAKVLCKHLAASSGTGSSDFEQLEQILEAIPQVKYICLDVANGYSEHFVEFVKDVRKRFPQHTIMAGNVVTGEMVEELILSGADIIKVGIGPGSVCTTRKKTGVGYPQLSAVMECADAAHGLKGHIISDGGCSCPGDVAKAFGAGADFVMLGGMLAGHSESGGELIERDGKKYKLFYGMSSEMAMKKYAGGVAEYRASEGKTVEVPFKGDVEHTIRDILGGIRSTCTYVGAAKLKELSRRTTFIRVTQQVNPIFSEAC

SEQ ID NO: 15215 - protein, 666 aa, Homo sapiens
MTDLKEGVCLSAFWYSHEQCCWTSNETTFEDRDKCPLWQKWSELLVNQSEGASAYILNYLMYILWALLFAFLAVSLVRVFAPYACGSGIPEIKTILSGFIIRGYLGKWTLLIKTVTLVLVVSSGLSLGKEGPLVHVACCCGNFFSSLFSKYSKNEGKRREVLSAAAAAGVSVAFGAPIGGVLFSLEEVSYYFPLKTLWRSFFAALVAAFTLRSINPFGNSRLVLFYVEYHTPWYMAELFPFILLGVFGGLWGTLFIRCNIAWCRRRKTTRLGKYPVLEVIVVTAITAIIAYPNPYTRQSTSELISELFNDCGALESSQLCDYINDPNMTRPVDDIPDRPAGVGVYTAMWQLALALIFKIVVTIFTFGMKIPSGLFIPSMAVGAIAGRMVGIGVEQLAYHHHDWIIFRNWCRPGADCVTPGLYAMVGAAACLGGVTRMTVSLVVIMFELTGGLEYIVPLMAAAVTSKWVADAFGKEGIYEAHIHLNGYPFLDVKDEFTHRTLATDVMRPRRGEPPLSVLTQDSMTVEDVETLIKETDYNGFPVVVSRDSERLIGFAQRRELILAIKNARQRQEGIVSNSIMYFTEEPPELPANSPHPLKLRRILNLSPFTVTDHTPMETVVDIFRKLGLRQCLVTRSGRLLGIITKKDVLRHMAQMANQDPESIMFN

SEQ ID NO: 15216 - protein, 1441 aa, Homo sapiens
MSKSLKKKSHWTSKVHESVIGRNPEGQLGFELKGGAENGQFPYLGEVKPGKVAYESGSKLVSEELLLEVNETPVAGLTIRDVLAVIKHCKDPLRLKCVKQGGIVDKDLRHYLNLRFQKGSVDHELQQIIRDNLYLRTVPCTTRPHKEGEVPGVDYIFITVEDFMELEKSGALLESGTYEDNYYGTPKPPAEPAPLLLNVTDQILPGATPSAEGKRKRNKSVSNMEKASIEPPEEEEEERPVVNGNGVVVTPESSEHEDKSAGASGEMPSQPYPAPVYSQPEELKEQMDDTKPTKPEDNEEPDPLPDNWEMAYTEKGEVYFIDHNTKTTSWLDPRLAKKAKPPEECKENELPYGWEKIDDPIYGTYYVDHINRRTQFENPVLEAKRKLQQHNMPHTELGTKPLQAPGFREKPLFTRDASQLKGTFLSTTLKKSNMGFGFTIIGGDEPDEFLQVKSVIPDGPAAQDGKMETGDVIVYINEVCVLGHTHADVVKLFQSVPIGQSVNLVLCRGYPLPFDPEDPANSMVPPLAIMERPPPVMVNGRHNYETYLEYISRTSQSVPDITDRPPHSLHSMPTDGQLDGTYPPPVHDDNVSMASSGATQAELMTLTIVKGAQGFGFTIADSPTGQRVKQILDIQGCPGLCEGDLIVEINQQNVQNLSHTEVVDILKDCPIGSETSLIIHRGGFFSPWKTPKPIMDRWENQGSPQTSLSAPAIPQNLPFPPALHRSSFPDSTEAFDPRKPDPYELYEKSRAIYESRRPDYKELDVHLRRMESGFGFRILGGDEPGQPILIGAVIAMGSADRDGRLHPGDELVYVDGIPVAGKTHRYVIDLMHHAARNGQVNLTVRRKVLCGGEPCPENGRSPGSVSTHHSSPRSDYATYTNSNHAAPSSNASPPEGFASHSLQTSDVVIHRKENEGFGFVIISSLNRPESGSTITVPHKIGRIIDGSPADRCAKLKVGDRILAVNGQSIINMPHADIVKLIKDAGLSVTLRIIPQEELNSPTSAPSSEKQSPMAQQSPLAQQSPLAQPSPATPNSPIAQPAPPQPLQLQGHENSYRSEVKARQDVKPDIRQPPFTDYRQPPLDYRQPPGGDYQQPPPLDYRQPPLLDYRQHSPDTRQYPLSDYRQPQDFDYFTVDMEKGAKGFGFSIRGGREYKMDLYVLRLAEDGPAIRNGRMRVGDQIIEINGESTRDMTHARAIELIKSGGRRVRLLLKRGTGQVPEYDEPAPWSSPAAAAPGLPEVGVSLDDGLAPFSPSHPAPPSDPSHQISPGPTWDIKREHDVRKPKELSACGQKKQRLGEQRERSASPQRAARPRLEEAPGGQGRPEAGRPASEARAPGLAAADAADAARAGGKEAPRAAAGSELCRREGPGAAPAFAGPGGGGSGALEAEGRAGARAGPRPGPRPPGGAPARKAAVAPGPWKVPGSDKLPSVLKPGASAASR

SEQ ID NO: 15217 - protein, 864 aa, Homo sapiens
QLLSFSKLPEPTSGVIARAAEIMETSIQAMKRKVNLKTQQSQHPTDALSEDLLSIIANMSGCLPYMLPPKCPNTCLANKYRPITGACNNRDHPRWGASNTALARWLPPVYEDGFSQPRGWNPGFLYNGFPLPPVREVTRHVIQVSNEVVTDDDRYSDLLMAWGQYIDHDIAFTPQSTSKAAFGGGADCQMTCENQNPCFPIQLPEEARPAAGTACLPFYRSSAACGTGDQGALFGNLSTANPRQQMNGLTSFLDASTVYGSSPALERQLRNWTSAEGLLRVHARLRDSGRAYLPFVPPRAPAACAPEPGIPGETRGPCFLAGDGRASEVPSLTALHTLWLREHNRLAAALKALNAHWSADAVYQEARKVVGALHQIITLRDYIPRILGPEAFQQYVGPYEGYDSTANPTVSNVFSTAAFRFGHATIHPLVRRLDASFQEHPDLPGLWLHQAFFSPWTLLRGGGLDPLIRGLLARPAKLQVQDQLMNEELTERLFVLSNSSTLDLASINLQRGRDHGLPGYNEWREFCGLPRLETPADLSTAIASRSVADKILDLYKHPDNIDVWLGGLAENFLPRARTGPLFACLIGKQMKALRDGDWFWWENSHVFTDAQRRELEKHSLSRVICDNTGLTRVPMDAFQVGKFPEDFESCDSITGMNLEAWRETFPQDDKCGFPESVENGDFVHCEESGRRVLVYSCRHGYELQGREQLTCTQEGWDFQPPLCKDSGRLPRVTWISMSLAALLIGGFAGLTSTVICRWTRTGTKSTLPISETGGGTPELRCGKHQAVGTSPQRAAAQDSEQVGHTMPHVSSCHRSGWTGSGCRSSSAGAPCIFLFTPCFLVRSAPSSGRFYLQANDSEPECEPA

SEQ ID NO: 15218 - protein, 502 aa, Homo sapiens
MQSEIAMDRMKKIKRQLSMTLRGGRGIDKTNGAPEQIGLDESGGGGGSDPGEAPTRAAPGELRSARGPLSSAPEIVHEDLKMGSDGESDQASATSSDEVQSPVRVRMRNHPPRKISTEDINKRLSLPADIRLPEGYLEKLTLNSPIFDKPLSRRLRRVSLSEIGFGKLETYIKLDKLGEGTYATVYKGKSKLTDNLVALKEIRLEHEEGAPCTAIREVSLLKDLKHANIVTLHDIIHTEKSLTLVFEYLDKDLKQYLDDCGNIINMHNVKLFLFQLLRGLAYCHRQKVLHRDLKPQNLLINERGELKLADFGLARAKSIPTKTYSNEVVTLWYRPPDILLGSTDYSTQIDMWGVGCIFYEMATGRPLFPGSTVEEQLHFIFRILGTPTEETWPGILSNEEFKTYNYPKYRAEALLSHAPRLDSDGADLLTKLLQFEGRNRISAEDAMKHPFFLSLGERIHKLPDTTSIFALKEIQLQKEASLRSSSMPDSGRPAFRVVDTEF

SEQ ID NO: 15219 - protein, 297 aa, Homo sapiens
MTSAGGAPGALPAGTPESSLHEALDQCMTALDLFLTNQFSEALSYLKPRTKESMYHSLTYATILEMQAMMTFDPQDILLAGNMMKEAQMLCQRHRRKSSVTDSFSSLVNRPTLGQFTEEEIHAEVCYAECLLQRAALTFLQDENMVSFIKGGIKVRNSYQTYKELDSLVQSSQYCKGENHPHFEGGVKLGVGAFNLTLSMLPTRILRLLEFVGFSGNKDYGLLQLEEGASGHSFRSVLCVMLLLCYHTFLTFVLGTGNVNIEEAEKLLKPYLNRYPKGAIFLFFAGRIEVIKGNIDA

SEQ ID NO: 15220 - protein, 1093 aa, Homo sapiens
MPAAGSNEPDGVLSYQRPDEEAVVDQGGTSTILNIHYEKEELEGHRTLYVGVRMPLGRQSHRHHRTHGQKHRRRGRGKGASQGEEGLEALAHDTPSQRVQFILGTEEDEEHVPHELFTELDEICMKEGEDAEWKETARWLKFEEDVEDGGERWSKPYVATLSLHSLFELRSCLINGTVLLDMHANSIEEISDLILDQQELSSDLNDSMRVKVREALLKKHHHQNEKKRNNLIPIVRSFAEVGKKQSDPHLMDKHGQTVSPQSVPTTNLEVKNGVNCEHSPVDLSKVDLHFMKKIPTGAEASNVLVGEVDILDRPIVAFVRLSPAVLLSGLTEVPIPTRFLFILLGPVGKGQQYHEIGRSMATIMTDEIFHDVAYKAKERDDLLAGIDEFLDQVTVLPPGEWDPSIRIEPPKNVPSQEKRKMPGVPNGNVCHIEQEPHGGHSGPELQRTGRLFGGLVLDIKRKAPWYWSDYRDALSLQCLASFLFLYCACMSPVITFGGLLGEATEGRISAIESLFGASMTGIAYSLFAGQALTILGSTGPVLVFEKILFKFCKDYALSYLSLRACIGLWTAFLCIVLVATDASSLVCYITRFTEEAFASLICIIFIYEAIEKLIHLAETYPIHMHSQLDHLSLYYCRCTLPENPNNHTLQYWKDHNIVTAEVHWANLTVSECQEMHGEFMGSACGHHGPYTPDVLFWSCILFFTTFILSSTLKTFKTSRYFPTRVRSMVSDFAVFLTIFTMVIIDFLIGVPSPKLQVPSVFKPTRDDRGWIINPIGPNPWWTVIAAIIPALLCTILIFMDQQITAVIINRKEHKLKKGCGYHLDLLMVAIMLGVCSIMGLPWFVAATVLSITHVNSLKLESECSAPGEQPKFLGIREQRVTGLMIFVLMGCSVFMTAILKFIPMPVLYGVFLYMGVSSLQGIQFFDRLKLFGMPAKHQPDFIYLRHVPLRKVHLFTLIQLTCLVLLWVIKASPAAIVFPMMVLALVFVRKVMDLCFSKRELSWLDDLMPESKKKKLDDAKKKAKEEEEAEKMLEIGGDKFPLESRKLLSSPGKNISCRCDPSEINISDEMPKTTVWKALSMNSGNAKEKSLFN

SEQ ID NO: 15221 - protein, 628 aa, Homo sapiens
MTIRHQGQQYRPRMAFLQKIEALVKDMQNPETGVRMQNQRVLVTSVPHAMTGSDVLQWIVQRLWISSLEAQNLGNFIVRYGYIYPLQDPKNLILKPDGSLYRFQTPYFWPTQQWPAEDTDYAIYLAKRNIKKKGILEEYEKENYNFLNQKMNYKWDFVIMQAKEQYRAGKERNKADRYALDCQEKAYWLVHRCPPGMDNVLDYGLDRVTNPNEVKKQTVVAVKKEIMYYQQALMRSTVKSSVSLGGIVKYSEQFSSNDAIMSGCLPSNPWITDDTQFWDLNAKLVEIPTKMRVERWAFNFSELIRDPKGRQSFQYFLKKEFSGENLGFWEACEDLKYGDQSKVKEKAEEIYKLFLAPGARRWINIDGKTMDITVKGLKHPHRYVLDAAQTHIYMLMKKDSYARYLKSPIYKDMLAKAIEPQETTKKSSTLPFMRRHLRSSPSPVILRQLEEEAKAREAANTVDITQPGQHMAPSPHLTVYTGTCMPPSPSSPFSSSCRSPRKPFASPSRFIRRPSTTICPSPIRVALESSSGLEQKGECSGSMAPRGPSVTESSEASLDTSWPRSRPRAPPKARMALSFSRFLRRGCLASPVFARLSPKCPAVSHGRVQPLGDVGQQLPRLKSKRVAK

SEQ ID NO: 15222 - protein, 73 aa, Homo sapiens
MLKTESSGERTTLRSASPHRNAYRTEFQALKSTFDKPKSDGEQKTKEGEGSQQSRGRKYGSNVNRIKNLFMQM

SEQ ID NO: 15223 - protein, 1023 aa, Homo sapiens
MCARMAGRTTAAPRGPYGPWLCLLVALALDVVRVDCGQAPLDPVYLPAALELLDAPEHFRVQQVGHYPPANSSLSSRSETFLLLQPWPRAQPLLRASYPPFATQQVVPPRVTEPHQRPVPWDVRAVSVEAAVTPAEPYARVLFHLKGQDWPPGSGSLPCARLHATHPAGTAHQACRFQPSLGACVVELELPSHWFSQASTTRAELAYTLEPAAEGPGGCGSGEENDPGEQALPVGGVELRPADPPQYQEVPLDEAVTLRVPDMPVRPGQLFSATLLLRHNFTASLLTLRIKVKKGLHVTAARPAQPTLWTAKLDRFKGSRHHTTLITCHRAGLTEPDSSPLELSEFLWVDFVVENSTGGGVAVTRPVTWQLEYPGQAPEAEKDKMVWEILVSERDIRALIPLAKAEELVNTAPLTGVPQHVPVRLVTVDGGGALVEVTEHVGCESANTQVLQVSEACDAVFVAGKESRGARGVRVDFWWRRLRASLRLTVWAPLLPLRIELTDTTLEQVRGWRVPGPAEGPAEPAAEASDEAERRARGCHLQYQRAGVRFLAPFAAHPLDGGRRLTHLLGPDWLLDVSHLVAPHARVLDSRVASLEGGRVVVGREPGVTSIEVRSPLSDSILGEQALAVTDDKVSVLELRVQPVMGISLTLSRGTAHPGEVTATCWAQSALPAPKQEVALSLWLSFSDHTVAPAELYDRRDLGLSVSAEEPGAILPAEEQGAQLGVVVSGAGAEGLPLHVALHPPEPCRRGRHRVPLASGTAWLGLPPASTPAPALPSSPAWSPPATEATMGGKRQVAGSVGGNTGVRGKFERAEEEARKEETEAREEEEEEEEEMVPAPQHVTELELGMYALLGVFCVAIFIFLVNGVVFVLRYQRKEPPDSATDPTSPQPHNWVWLGTDQEELSRQLDRQSPGPPKGEGSCPCESGGGGEAPTLAPGPPGGTTSSSSTLARKEAGGRRKRVEFVTFAPAPPAQSPEEPVGAPAVQSILVAGEEDIRWVCEDMGLKDPEELRNYMERIRGSS

SEQ ID NO: 15224 - protein, 176 aa, Homo sapiens
MPAPIRLRELIRTIRTARTQAEEREMIQKECAAIRSSFREEDNTYRCRNVAKLLYMHMLGYPAHFGQLECLKLIASQKFTDKRIGYLGAMLLLDERQDVHLLMTNCIKNDLNHSTQFVQGLALCTLGCMGSSEMCRDLAGEVEKLLKTSNSYLRKKEMIYKQTNVTGYILGGIPNS

SEQ ID NO: 15225 - protein, 784 aa, Homo sapiens
MTSGSVFFYILIFGKYFSHGGGQDVKCSLGYFPCGNITKCLPQLLHCNGVDDCGNQADEDNCGDNNGWSLQFDKYFASYYKMTSQYPFEAETPECSFHFFLFITLLFLVPHCHHALPLPLDSVVGSVPVQCLCQGLELDCDETNLRAVPSVSSNVTAMSLQWNLIRKLPPDCFKNYHDLQKLYLQNNKITSISIYAFRGLNSLTKLYLSHNRITFLKPGVFEDLHRLEWLIIEDNHLSRISPPTFYGLNSLILLVLMNNVLTRLPDKPLCQHMPRLHWLDLEGNHIHNLRNLTFISCSNLTVLVMRKNKINHLNENTFAPLQKLDELDLGSNKIENLPPLIFKDLKELSQLNLSYNPIQKIQANQFDYLVKLKSLSLEGIEISNIQQRMFRPLMNLSHIYFKKFQYCGYAPHVRSCKPNTDGISSLENLLASIIQRVFVWVVSAVTCFGNIFVICMRPYIRSENKLYAMSIISLCCADCLMGIYLFVIGGFDLKFRGEYNKHAQLWMESTHCQLVGSLAILSTEVSVLLLTFLTLEKYICIVYPFRCVRPGKCRTITVLILIWITGFIVAFIPLSNKEFFKNYYGTNGVCFPLHSEDTESIGAQIYSVAIFLGINLAAFIIIVFSYGSMFYSVHQSAITATEIRNQVKKEMILAKRFFFIVFTDALCWIPIFVVKFLSLLQVEIPGTITSWVVIFILPINSALNPILYTLTTRPFKEMIHRFWYNYRQRKSMDSKGQKTYAPSFIWVEMWPLQEMPPELMKPDLFTYPCEMSLISQSTRLNSYS

SEQ ID NO: 15226 - protein, 2099 aa, Homo sapiens [sequence omitted]

SEQ ID NO: 15227 - protein, 524 aa, Homo sapiens
QKQVEQKSSATLLLTWGLEDVEHVFSEEDYHTLTNYKAFSQFMRPLIAKKNPKIPMSKMMTILGAKWREFSANNPFKGSAAAVAAAAAAAAAAVAEQVSAAVSSATPIAPSGPPALPPPPAADIQPPPIRRAKTKEGKGPGHKRRSKSPRVPDGRKKLRGKKMAPLKIKLGLLGGKRKKGGSSDEGPEPEAEESDLDSGSVHSASGRPDGPVRTKKLKRGRPGRKKKKVLGCPAVAGEEEVDGYETDHQDYCEVCQQGGEIILCDTCPRAYHLVCLDPELDRAPEGKWSCPHCEKEGVQWEAKEEEEEYEEEGEEEGEKEEEDDHMEYCRVCKDGGELLCCDACISSYHIHCLNPPLPDIPNGEWLCPRCTCPVLKGRVQKILHWRWGEPPVAVPAPQQADGNPDVPPPRPLQGRSEREFFVKWVGLSYWHCSWAKELQLEIFHLVMYRNYQRKNDMDEPPPLDYGSGEDDGKSDKRKVKDPHYAEMEEKYYRFGIKPEWMTVHRIINHSVDKKGNYHYLVKWR

SEQ ID NO: 15228 - protein, 579 aa, Homo sapiens
MSDPAVNAQLDGIISDFEALKRSFEVEEVETPNSTPPRRVQTPLLRATVASSTQKFQDLGVKNSEPSARHVDSLSQRSPKASLRRVELSGPKAAEPVSRRTELSIDISSKQVENAGAIGPSRFGLKRAEVLGHKTPEPAPRRTEITIVKPQESAHRRMEPPASKVPEVPTAPATDAAPKRVEIQMPKPAEAPTAPSPAQTLENSEPAPVSQLQSRLEPKPQPPVAEATPRSQEATEAAPSCVGDMADTPRDAGLKQAPASRNEKAPVDFGYVGIDSILEQMRRKAMKQGFEFNIMVVGQSGLGKSTLINTLFKSKISRKSVQPTSEERIPKTIEIKSITHDIEEKGVRMKLTVIDTPGFGDHINNENCWQPIMKFINDQYEKYLQEEVNINRKKRIPDTRVHCCLYFIPATGHSLRPLDIEFMKRLSKVVNIVPVIAKADTLTLEERVHFKQRITADLLSNGIDVYPQKEFDEDSEDRLVNEKFREMIPFAVVGSDHEYQVNGKRILGRKTKWGTIEVENTTHCEFAYLRDLLIRTHMQNIKDITSSIHFEAYRVKRLNEGSSAMANGMEEKEPEAPEM

SEQ ID NO: 15229 - protein, 699 aa, Homo sapiens
MGETKIIYHLDGQETPYLVKLPLPAERVTLADFKGVLQRPSYKFFFKSMDDDFGVVKEEISDDNAKLPCFNGRVVSWLVSAEGSHPDPAPFCADNPSELPPPMERTGGIGDSRPPSFHPHAGGGSQENLDNDTETDSLVSAQRERPRRRDGPEHATRLNGTAKGERRREPGGYDSSSTLMSSELETTSFFDSDEDDSTSRFSSSTEQSSASRLMRRHKRRRRKQKVSRIERSSSFSSITDSTMSLNIITVTLNMEKYNFLGISIVGQSNERGDGGIYIGSIMKGGAVAADGRIEPGDMLLQVNEINFENMSNDDAVRVLREIVHKPGPITLTVAKCWDPSPRGCFTLPRTMTGTFPAYGMSPSLSTITSTSSSITSSIPDTERLDDFHLSIHSDMAAIVKAMASPESGLEVRDRMWLKITIPNAFIGSDVVDWLYHNVEGFTDRREARKYASNLLKAGFIRHTVNKITFSEQCYYIFGDLCGNMANLSLHDHDGSSGASDQDTLAPLPHPGAAPWPMAFPYQYPPPPHPYNPHPGFPELGYSYGGGSASSQHSEGSRSSGSNRSGSDRRKEKDPKAGDSKSGGSGSESDHTTRSSLRGPRERAPSERSGPAASEHSHRSHHSLASSLRSHHTHPSYGPPGVPPLYGPPMLMMPPPPAAMGPPGAPPGRDLASVPPELTASRQSFRMAMGNPSEFFVDVM

SEQ ID NO: 15230 - protein, 483 aa, Homo sapiens
MDVKGKKGPVGMPKEATCDHFMCLQQGSECDIWDGQPVCKCKDRCEKEPSFTCASDGLTYYNRCYMDAEACSKGITLAVVTCRYHFTWPNTSPPPPETTMHPTTASPETPELDMAAPALLNNPVHQSVTMGETVSFLCDVVGRPRPEITWEKQLEDRENVVMRPNHVRGNVVVTNIAQLVIYNAQLQDAGIYTCTARNVAGVLRADFPLSVVRGHQAAATSESSPNGTAFPAAECLKPPDSEDCGEEQTRWHFDAQANNCLTFTFGHCHRNLNHFETYEACMLACMSGPLAACSLPALQGPCKAYAPRWAYNSQTGQCQSFVYGGCEGNGNNFESREACEESCPFPRGNQRCRACKPRQKLVTSFCRSDFVILGRVSELTEEPDSGRALVTVDEVLKDEKMGLKFLGQEPLEVTLLHVDWACPCPNVTVSEMPLIIMGEVDGGMAMLRPDSFVGASSARRVRKLREVMHKKTCDVLKEFLGLH

SEQ ID NO: 15231 - protein, 430 aa, Homo sapiens
MDEQPRLMHSHAGVGMAGHPGLSQHLQDGAGGTEGEGGRKQDIGDILQQIMTITDQSLDEAQARKHALNCHRMKPALFNVLCEIKEKTVLSIRGAQEEEPTDPQLMRLDNMLLAEGVAGPEKGGGSAAAAAAAAASGGAGSDNSVEHSDYRAKLSQIRQIYHTELEKYEQACNEFTTHVMNLLREQSRTRPISPKEIERMVSIIHRKFSSIQMQLKQSTCEAVMILRSRFLDARRKRRNFNKQATEILNEYFYSHLSNPYPSEEAKEELAKKCGITVSQVSNWFGNKRIRYKKNIGKFQEEANIYAAKTAVTATNVSAHGSQANSPSTPNSAGSSSSFNMSNSGDLFMSVQSLNGDSYQGAQVGANVQSQVDTLRHVISQTGGYSDGLAASQMYSPQGISANGGWQDATTPSSVTSPTEGPGSVHSDTSN

SEQ ID NO: 15232 - protein, 136 aa, Homo sapiens
MESEMETQSARAEEGFTQVTRKGGRRAKKRQAEQLSAAGEGGDAGRMDTEEARPAKRPVFPPLCGDGLLSGKEETRKIPVPANRYTPLKENWMKIFTPIVEHLGLQIRFNLKSRNVEIRCMQVVRPGAVGLRNISI

SEQ ID NO: 15233 - protein, 684 aa, Homo sapiens
CRSLVKVNLSGCHLTSLRLSKMLSALQHLRSLAIDVSPGFDASQLSSECKATLSRVRELKQTLFTPSYGVVPCCTSLEKLLLYFEILDRTREGAILSGQLMVGQSNVPHYQNLRVFYARLAPGYINQEVVRLYLAVLSDRTPQNLHAFLISVPGSFAESGATKNLLDSMARNVVLDALQLPKSWLNGSSLLQHMKFNNPFYFSFSRCTLSGGHLIQQVINGGKDLRSLASLNLSGCVHCLSPDSLLRKAEDDIDSSILETLVASCCNLRHLNLSAAHHHSSEGLGRHLCQLLARLRHLRSLSLPVCSVADSAPRADRAPAQPAMHAVPRGFGKKVRVGVQSCPSPFSGQACPQPSSVFWSLLKNLPFLEHLELIGSNFSSAMPRNEPAIRNSLPPCSRAQSVGDSEVAAIGQLAFLRHLTLAQLPSVLTGSGLVNIGLQCQQLRSLSLANLGMMGKVVYMPALSDMLKHCKRLRDLRLEQPYFSANAQFFQALSQCPSLQRLCLVSRSGTLQPDAVLAFMARCLQVVMCHLFTGESLATCKSLQQSLLRRWGEVTGRRPQLFTELREEPSARTSRATGRRQPCLPDSGVVCCPCGRPLAVSGIILVGVSPSLVVKTTCVYRVLFKNLDYASIFFLVCLFETESHSVVQAGVQWRDLSSLQPLLSGLQPQPPEQLGLQVCTTIPG

SEQ ID NO: 15234 - protein, 998 aa, Homo sapiens
GTLYESCNQPQDAIKCYLNATRSKSCSNTSALAARIKYLQNTSDNWSGGHAVSHPPVQQQAHSWCLTPQKLQHLEQLRANRNNLNPAQKLMLEQLESQFVLMQQHQMRPTGVAQVRSTGIPNGPTADSSLPTNSVSGQQPQLALTRVPSVSQPGVRPACPGQPLANGPFSAGHVPCSTSRTLGSTDTILIGNNHITGSGSNGNVPYLQRNALTLPHNRTNLTSSAEEPWKNQLSNSTQGLHKGQSSHSAGPNGERPLSSTGPSQHLQAAGSGIQNQNGHPTLPSNSVTQGAALNHLSSHTATSGGQQGITLTKESKPSGNILTVPETSRHTGETPNSTASVEGLPNHVHQMTADAVCSPSHGDSKSPGLLSSDNPQLSALLMGKANNNVGTGTCDKVNNIHPAVHTKTDNSVASSPSSAISTATPSPKSTEQTTTNSVTSLNSPHSGLHTINGEGMEESQSPMKTDLLLVNHKPSPQIIPSMSVSIYPSSAEVLKACRNLGKNGLSNSSILLDKCPPPRPPSSPYPPLPKDKLNPPTPSIYLENKRDAFFPPLHQFCTNPNNPVTVIRGLAGALKLDLGLFSTKTLVEANNEHMVEVRTQLLQPADENWDPTGTKKIWHCESNRSHTTIAKYAQYQASSFQESLREENEKRSHHKDHSDSESTSSDNSGRRRKGPFKTIKFGTNIDLSDDKKWKLQLHELTKLPAFVRVVSAGNLLSHVGHTILGMNTVQLYMKVPGSRTPGHQENNNFCSVNINIGPGDCEWFVVPEGYWGVLNDFCEKNNLNFLMGSWWPNLEDLYEANVPVYRFIQRPGDLVWINAGTVHWVQAIGWCNNIAWNVGPLTACQYKLAVERYEWNKLQSVKSIVPMVHLSWNMARNIKVSDPKLFEMIKYCLLRTLKQCQTLREALIAAGKEIIWHGRTKEEPAHYCSICEVEVFDLLFVTNESNSRKTYIVHCQDCARKTSGNLENFVVLEQYKMEDLMQVYDQFTLAPPLPSASS

SEQ ID NO: 15235 - protein, 317 aa, Homo sapiens
MRFRFGVVVPPAVAGARPELLVVGSRPELGRWEPRGAVRLRPAGTAAGDGALALQEPGLWLGEVELAAEEAAQDGAEPGRVDTFWYKFLKREPGGELSWEGNGPHHDRCCTYNENNLVDGVYCLPIGHWIEATGHTNEMKHTTDFYFNIAGHQAMHYSRILPNIWLGSCPRQVEHVTIKLKHELGITAVMNFQTEWDIVQNSSGCNRYPEPMTPDTMIKLYREEGLAYIWMPTPDMSTEGRVQMLPQAVCLLHALLEKGHIVYVHCNAGVGRSTAAVCGWLQYVMGWNLRKVQYFLMAKRPAVYIDEEAASQDTFPL

SEQ ID NO: 15236 - protein, 223 aa, Homo sapiens
GSAGSTVAVAVKAAQELQEGQRCVVILPDSVRNYMTKFLSDRWMLQKGFLKEEDLTEKKPWWWHLRVQELGLSAPLTVLPTITCGHTIEILREKGFDQAPVVDEAGVILGMVTLGNMLSSLLAGKVQPSDQVGKVIYKQFKQIRLTDTLGRLSHILEMDHFALVVHEQIQSQDQAWAGVVGGPAGSPNQVFLEHVHACHHRLWLLSSTSGLRAHNRDGTAPKT

SEQ ID NO: 15237 - protein, 246 aa, Homo sapiens
MASAGRSEGTAGGGAGPEEPRREEGRAGLSPSSPPGSHSMRYFYTSVSRPGRGEPRFISVGYVDDTQFVRFDSDAASPREEPRAPWIEQEGPEYWDRNTQIYKAQAQTDRESLRNLRGYYNQSEAGSHTLQSMYGCDVGPDGRLLRGHDQYAYDGKDYIALNEDLRSWTAADTAAQITQRKWEAAREAEQRRAYLEGECVEWLRRYLENGKDKLERADPPKTHVTHHPISDHEATLRCWALGFYPA

SEQ ID NO: 15238 - protein, 1273 aa, Homo sapiens
MQKGIRLNDGHVASLGLLARKDGTRKGYLSKRSSDNTKWQTKWFALLQNLLFYFESDSSSRPSGLYLLEGCVCDRAPSPKPALSAKEPLEKQHYFTVNFSHENQKALELRTEDAKDCDEWVAAIAHASYRTLATEHEALMQKYLHLLQIVETEKTVAKQLRQQIEDGEIEIERLKAEITSLLKDNERIQSTQTVAPNDEDSDIKKIKKVQSFLRGWLCRRKWKTIIQDYIRSPHADSMRKRNQVVFSMLEAEAEYVQQLHILVNNFLRPLRMAASSKKPPITHDDVSSIFLNSETIMFLHQIFYQGLKARISSWPTLVLADLFDILLPMLNIYQEFVRNHQYSLQILAHCKQNRDFDKLLKHYEAKPDCEERTLETFLTYPMFQIPRYILTLHELLAHTPHEHVERNSLDYAKSKLEELSRIMHDEVSETENIRKNLAIERMIIEGCEILLDTSQTFVRQGSLIQVPMSEKGKITRGRLGSLSLKKEGERQCFLFSKHLIICTRGSGGKLHLTKNGVISLIDCTLLEEPESTEEEAKGSGQDIDHLDFKIGVEPKDSPPFTVILVASSRQEKAAWTSDISQCVDNIRCNGLMMNAFEENSKVTVPQMIKRTREGTREAEMSRSDASLYCDDVDIRFSKTMNSCKVLQIRYASVERLLERLTDLRFLSIDFLNTFLHSYRVFTTAIVVLDKLITIYKKPISAIPARWLRSLELLFASGQNNKLLYGEPPKSPRATRKFSSPPPLSITKTSSPSRRRKLSLNIPIITGGKALDLAALSCNSNGYTSMYSAMSPFSKATLDTSKLYVSSSFTNKIPDEGDTTPEKPEDPSALSKQSSEVSMREESDIDQNQSDDGDTETSPTKSPTTPKSVKNKNSSEFPLFSYNNGVVMTSCRELDNNRSALSAASAFAIATAGANEGTPNKEKYRRMSLASAGFPPDQRNGDKEFVIRRAATNRVLNVLRHWVSKHSQDFETNDELKCKVIGFLEEVMHDPELLTQERKAAANIIRTLTQEDPGDNQITLEEITQMAEGVKAEPFENHSALEIAEQLTLLDHLVFKKIPYEEFFGQGWMKLEKNERTPYIMKTTKHFNDISNLIASEIIRNEDINARVSAIEKWVAVADICRCLHNYNAVLEITSSMNRSAIFRLKKTWLKVSKQTKALIDKLQKLVSSEGRFKNLREALKNCDPPCVPYLGMYLTDLAFIEEGTPNYTEDGLVNFSKMRMISHIIREIRQFQQTAYKIEHQAKVTQYLLDQSFVMDEESLYESSLRIEPKLPT

SEQ ID NO: 15239 - protein, 566 aa, Homo sapiens
MEVPQPEPAPGSALSPAGVCGGAQRPGHLPGLLLGSHGLLGSPVRAAASSPVTTLTQTMHDLAGLGSRSRLTHLSLSRRASESSLSSESSESSDAGLCMDSPSPMDPHMAEQTFEQAIQAASRIIRNEQFAIRRFQSMPVRLLGHSPVLRNITNSQAPDGRRKSEAGSGAASSSGEDKENDGFVFKMPWKPTHPSSTHALAEWASRREAFAQRPSSAPDLMCLSPDRKMEVEELSPLALGRFSLTPAEGDTEEDDGFVDILESDLKDDDAVPPGMESLISAPLVKTLEKEEEKDLVMYSKCQRLFRSPSMPCSVIRPILKRLERPQDRDTPVQNKRRRSVTPPEEQQEAEEPKARVLRSKSLCHDEIENLLDSDHRELIGDYSKAFLLQTVDGKHQDLKYISPETMVALLTGKFSNIVDKFVIVDCRYPYEYEGGHIKTAVNLPLERDAESFLLKSPIAPCSLDKRVILIFHCEFSSERGPRMCRFIRERDRAVNDYPSLYYPEMYILKGGYKEFFPQHPNFCEPQDYRPMNHEAFKDELKTFRLKTRSWAGERSRRELCSRLQDQ

SEQ ID NO: 15240 - protein, 709 aa, Homo sapiens
MRGFNLLLFWGCCVMHSWEGHIRPTRKPNTKGNNCRDSTLCPAYATCTNTVDSYYCACKQGFLSSNGQNHFKDPGVRCKDIDECSQSPQPCGPNSSCKNLSGRYKCSCLDGFSSPTGNDWVPGKPGNFSCTDINECLTSRVLFKCKEDVIPDNKQIQQCQEGTAVKPAYVSFCAQINNIFSVLDKVCENKTTVVSLKNTTESFVPVLKQISTWTKFTKEETSSLATVFLESVESMTLASFWKPSANITPAVRTEYLDIESKVINKECSEENVTLDLVAKGDKMKIGCSTIEESESTETTGVAFVSFVGMESVLNERFFKDHQAPLTTSEIKLKMNSRVVGGIMTGEKKDGFSDPIIYTLENIQPKQKFERPICVSWSTDVKGGRWTSFGCVILEASETYTICSCNQMANLAVIMASGELTMDFSLYIISHVGIIISLVCLVLAIATFLLCRSIRNHNTYLHLHLCVCLLLAKTLFLAGIHKTDNKMGCAIIAGFLHYLFLACFFWMLVEAVILFLMVRNLKVVNYFSSRNIKMLHICAFGYGLPMLVVVISASVQPQGYGMHNRCWLNTETGFIWSFLGPVCTVIVINSLLLTWTLWILRQRLSSVNAEVSTLKDTRLLTFKAFAQLFILGCSWVLGIFQIGPVAGVMAYLFTIINSLQGAFIFLIHCLLNGQVREEYKRWITGKTKPSSQSQTSRILLSSMPSASKTG

SEQ ID NO: 15241 - protein, 688 aa, Homo sapiens
MNVRGAAPGVRASPRPWQFPTSQRLPAGSPEAAPCSASGCCWPGSAASWRQDPEQISYIIPIDEKLYTVHLKQRYFLADNFMIYLYNQGSMNTYSSDIQTQCYYQGNIEGYPDSMVTLSTCSGLRGILQFENVSYGIEPLESAVEFQHVLYKLKNEDNDIAIFIDRSLKEQPMDDNIFISEKSEPAVPDLFPLYLEMHIVVDKTLYDYWGSDSMIVTNKVIEIVGLANSMFTQFKVTIVLSSLELWSDENKISTVGEADELLQKFLEWKQSYLNLRPHDIAYLLIYMDYPRYLGAVFPGTMCITRYSAGVALQCGPASCCDFRTCVLKDGAKCYKGLCCKDCQILQSGVECRPKAHPECDIAENCNGTSPECGPDITLINGLSCKNNKFICYDGDCHDLDARCESVFGKGSRNAPFACYEEIQSQSDRFGNCGRDRNNKYVFCGWRNLICGRLVCTYPTRKPFHQENGDVIYAFVRDSVCITVDYKLPRTVPDPLAVKNGSQCDIGRVCVNRECVESRIIKASAHVCSQQCSGHGVCDSRNKCHCSPGYKPPNCQIRSKGFSIFPEEDMGSIMERASGKTENTWLLGFLIALPILIVTTAIVLARKQLKKWFAKEEEFPSSESKSEGSTQTYASQSSSEGSTQTYASQTRSESSSQADTSKSKSEDSAEAYTSRSKSQDSTQTQSSSN

SEQ ID NO: 15242 - protein, 1179 aa, Homo sapiens
MAACGRVRRMFRLSAALHLLLLFAAGAEKLPGQGVHSQGQGPGANFVSFVGQAGGGGPAGQQLPQLPQSSQLQQQQQQQQQQQQPQPPQPPFPAGGPPARRGGAGAGGGWKLAEEESCREDVTRVCPKHTWSNNLAVLECLQDVREPENEISSDCNHLLWNYKLNLTTDPKFESVAREVCKSTITEIKECADEPVGKGYMVSCLVDHRGNITEYQCHQYITKMTAIIFSDYRLICGFMDDCKNDINILKCGSIRLGEKDAHSQGEVVSCLEKGLVKEAEEREPKIQVSELCKKAILRVAELSSDDFHLDRHLYFACRDDRERFCENTQAGEGRVYKCLFNHKFEESMSEKCREALTTRQKLIAQDYKVSYSLAKSCKSDLKKYRCNVENLPRSREARLSYLLMCLESAVHRGRQVSSECQGEMLDYRRMLMEDFSLSPEIILSCRGEIEHHCSGLHRKGRTLHCLMKVVRGEKGNLGMNCQQALQTLIQETDPGADYRIDRALNEACESVIQTACKHIRSGDPMILSCLMEHLYTEKMVEDCEHRLLELQYFISRDWKLDPVLYRKCQGDASRLCHTHGWNETSEFMPQGAVFSCLYRHAYRTEEQGRRLSRECRAEVQRILHQRAMDVKLDPALQDKCLIDLGKWCSEKTETGQELECLQDHLDDLVVECRDIVGNLTELESEDIQIEALLMRACEPIIQNFCHDVADNQIDSGDLMECLIQNKHQKDMNEKCAIGVTHFQLVQMKDFRFSYKFKMACKEDVLKLCPNIKKKVDVVICLSTTVRNDTLQEAKEHRVSLKCRRQLRVEELEMTEDIRLEPDLYEACKSDIKNFCSAVQYGNAQIIECLKENKKQLSTRCHQKVFKLQETEMMDPELDYTLMRVCKQMIKRFCPEADSKTMLQCLKQNKNSELMDPKCKQMITKRQITQNTDYRLNPMLRKACKADIPKFCHGILTKAKDDSELEGQVISCLKLRYADQRLSSDCEDQIRIIIQESALDYRLDPQLQLHCSDEISSLCAEEAAAQEQTGQVEECLKVNLLKIKTELCKKEVLNMLKESKADIFVDPVLHTACALDIKHHCAAITPGRGRQMSCLMEALEDKRVRLQPECKKRLNDRIEMWSYAAKVAPADGFSDLAMQVMTSPSKNYILSVISGSICILFLIGLMCGRITKRVTRELKDR

SEQ ID NO: 15243 - protein, 498 aa, Homo sapiens
EGAFNYTVMALSDSSELTCSTTFSSCTISSLQCGTEYLISVLASNDAGSSKSSSAMTLKTVACAPGRVTIQEDPPGHLSVAWSSVDLGDYYVVFVKSDDGLEVHCNTSLTQCNFLSECGFTYFISVFVYNKAGQSPLGDIFNYTTAPCCPSDINPVLVSSDRVEIVWSPVRGAELYETKAVDGYNMVECNDTTPACTLSALECDTKYNITVYSFNEVRGSNMSCTPQFITTAPCSPEIKNVSRDAFSMINVHWRSTNDDATYTVTAQGEKGLYQCSSTGESCTMRGLPCGSVFSVTAVAETQAGRSLPSYSVPLETVPCCPTGLTVTQITQSVINVSWTIGRVAQTHVAVLESHTGQSKCHTHQNHCLLGCITCGINYTVTLKAISATGLTADCSYQSYFSGACCPLGVKLYRLGPNGIRIYWQASRGSANYSTDLYGSKGIFTCTPSAGLSFCDVTEIPCGDVYTVMVSPVAKTGLKLTFCPKKIYSVIYRGKRNEE

SEQ ID NO: 15244 - protein, 860 aa, Homo sapiens
MSEKEGMSEVLEDTISQFRKESRSQSMKEPGFIKETSNLINEASDYLEGKSSNQIYETHPRQNTLESTSSSGRKSKRNEEQKKNLQFSETSTRTGTSQSLSSLTGRTAEYQALVNFLSHETVGEVSPQVSEENQKQLGLGADNFTVNLEAKGLQEFPKDILKIKYVKYLYLDKNQIKTFQGADSGDLLGLEILSLQENGLSSLPSEIQLLHNLRILNVSHNHISHIPKEISQLGNIRQLFFYNNYIENFPSDLECLGNLEILSLGKNKLRHIPDTLPSLKTLRVLNLEYNQLTTFPKALCFLPKLISLDLTGNLISSLPKEIRELKNLETLLMDHNKLTFLAVEIFQLLKIKELQLADNKLEVISHKIENFRELRILILDKNLLKNIPEKISCCAMLECLSLSDNKLTELPKYIHKLNNLRKLHVNRNNMVKITDCISHLNNICSLEFSGNIITDVPIEIKNCQKIIKIELSYNKIMYFPLGLCALDSLYYLSVNGNYISEIPVDISFSKQLLHLELSENKLLIFSEHFCSLINLKYLDLGKNQIKKIPASISNMISLHVLILCCNKFETFPRELCTLENLQVLDLSENQLQKISSDICNLKGIQKLNFSSNQFIHFPIELCQLQSLEQLNISQIKGRKLTRLPGELSNMTQLKELDISNNAIREIPRNIGELRNLVSLHAYNNQISYLPPSLLSLNDLQQLNLSGNNLTALPSAIYNIFSLKEINFDDNPLLRPPVEICKGKQLYTIARYLQRADERDEKILEKIFKIVANNITETNFEFLCQKLNLANSETDMPTKSTVSLSERAHQALVIWKTQSNKLSLTAAALRDQLIRALTMIGAYEIMDKITALNLFTRAIKF

SEQ ID NO: 15245 - protein, 662 aa, Homo sapiens
MLKLSGEGLRDSYHSRRDQIALKNLQSDVTEAKSDFTKETLASQNTKMISSIVISQMIDENKSRENRASLPLPCAIAQSRAHHAKQSLANRSGVNIHRAFALLPGRLGIPAPSDERGPEAELPPKEERPCGGPRRGFASITITARRVGPPARALVWGTAGDSLCPKCRAEDTLFQAPPALANGAHPGRHQRSFACTEFSRNSSVVRLKVPEAHTGLCERRKYWVTHADDKETSFSPDTPLSGKSPLVFSSCVHLRVSQQCPDSIYYVDKSLSVPIEPPQIASPKMHRSVLSLNLNCSSHRLTADGVDGLVNREPISEALKQELLEGDQDLVGQRWNPGLQESHLKETPSLRRVHLGTGACPWSGSFPLENTELANVGANQVTVRKGEKDHTTHCHASDHANQLSIHIPGWSYRAVHTKVFSGSSKRQQGEVCMTVSAPPVEQKPTRHFLPIGDSSPSDDCLSRDLSEPTERRHQSFLKPRILFPGFLCPLQDVCASLQEDNGVQIESKFPKGDYTCCDLVVKIKECKKSEDPTTPEPSPAAPSPAPRDGAGSPGLSEDCSESQQTPARSLTLQEALEVRKPQFISRSQERLKKLEHMVQQRKAQRKEDLRQKQSLLPIRTSKKQFTIPHPLSDNLFKPKERCISEKEMHMRSKRIYDNLPEV

SEQ ID NO: 15246 - protein, 767 aa, Homo sapiens
MGPEALSSLLLLLLVASGDADMKGHFDPAKCRYALGMQDRTIPDSDISASSSWSDSTAARHSRLESSDGDGAWCPAGSVFPKEEEYLQVDLQRLHLVALVGTQGRHAGGLGKEFSRSYRLRYSRDGRRWMGWKDRWGQEVISGNEDPEGVVLKDLGPPMVARLVRFYPRADRVMSVCLRVELYGCLWRDGLLSYTAPVGQTMYLSEAVYLNDSTYDGHTVGGLQYGGLGQLADGVVGLDDFRKSQELRVWPGYDYVGWSNHSFSSGYVEMEFEFDRLRAFQAMQVHCNNMHTLGARLPGGVECRFRRGPAMAWEGEPMRHNLGGNLGDPRARAVSVPLGGRVARFLQCRFLFAGPWLLFSEISFISDVVNNSSPALGGTFPPAPWWPPGPPPTNFSSLELEPRGQQPVAKAEGSPTAILIGCLVAIILLLLLIIALMLWRLHWRRLLSKVLESHPRTRSPGLVGIRPTPLPVSPMALVHLCEVDSPQDLVSLDFPLNVRKGHPLLVAVKILRPDATKNARNDFLKEVKIMSRLKDPNIIRLLGVCVQDDPLCMITDYMENGDLNQFLSAHQLEDKAAEGAPGDGQAAQGPTISYPMLLHVAAQIASGMRYLATLNFVHRDLATRNCLVGENFTIKIADFGMSRNLYAGDYYRVQGRAVLPIRWMAWECILMGKFTTASDVWAFGVTLWEVLMLCRAQPFGQLTDEQVIENAGEFFRDQGRQVYLSRPPACPQGLYELMLRCWSRESEQRPPFSQLHRFLAEDALNTV

SEQ ID NO: 15247 - protein, 1462 aa, Homo sapiens
MALYYDHQIEAPDAAGSPSFISWHPVHPFLAVAYISTTSTGSVDIYLEQGECVPDTHVERPFRVASLCWHPTRLVLAVGWETGEVTVFNKQDKEQHTMPLTHTADITVLRWSPSGNCLLSGDRLGVLLLWRLDQRGRVQGTPLLKHEYGKHLTHCIFRLPPPGEDLVQLAKAAVSGDEKALDMFNWKKSSSGSLLKMGSHEGLLFFVSLMDGTVHYVDEKGKTTQVVSADSTIQMLFYMEKREALVVVTENLRLSLYTVPPEGKAEEVMKVKLSGKTGRRADIALIEGSLLVMAVGEAALRFWDIERGENYILSPDEKFGFEKGENMNCVCYCKVKGLLAAGTDRGRVAMWRKVPDFLGSPGAEGKDRWALQTPTELQGNITQIQWGSRKNLLAVNSVISVAILSERAMSSHFHQQVAAMQVSPSLLNVCFLSTGVAHSLRTDMHISGVFATKDAVAVWNGRQVAIFELSGAAIRSAGTFLCETPVLAMHEENVYTVESNRVQVRTWQGTVKQLLLFSETEGNPCFLDICGNFLVVGTDLAHFKSFDLSRREAKAHCSCRSLAELVPGVGGIASLRCSSSGSTISILPSKADNSPDSKICFYDVEMDTVTVFDFKTGQIDRRETLSFNEQETNKSHLFVDEGLKNYVPVNHFWDQSEPRLFVCEAVQETPRSQPQSANGQPQDGRAGPAADVLILSFFISEEHGFLLHESFPRPATSHSLLGMEVPYYYFTRKPEEADREDEVEPGCHHIPQMVSRRPLRDFVGLEDCDKATRDAMLHFSFFVTIGDMDEAFKSIKLIKSEAVWENMARMCVKTQRLDVAKVCLGNMGHARGARALREAEQEPELEARVAVLATQLGMLEDAEQLYRKCKRHDLLNKFYQAAGRWQEALQVAEHHDRVHLRSTYHRYAGHLEASADCSRALSYYEKSDTHRFEVPRMLSEDLPSLELYVNKMKDKTLWRWWAQYLESQGEMDAALHYYELARDHFSLVRIHCFQGNVQKAAQIANETGNLAASYHLARQYESQEEVGQAVHFYTRAQAFKNAIRLCKENGLDDQLMNLALLSSPEDMIEAARYYEEKGVQMDRAVMLYHKAGHFSKALELAFATQQFVALQLIAEDLDETSDPALLARCSDFFIEHSQYERAVELLLAARKYQEALQLCLGQNMSITEEMAEKMTVAKDSSDLPEESRRELLEQIADCCMRQGSYHLATKKYTQAGNKLKAMRALLKSGDTEKITFFASVSRQKEIYIMAANYLQSLDWRKEPEIMKNIIGFYTKGRALDLLAGFYDACAQVEIDEYQNYDKAHGALTEAYKCLAKAKAKSPLDQETRLAQLQSRMALVKRFIQARRTYTEDPKESIKQCELLLEEPDLDSTIRIGDVYGFLVEHYVRKEEYQTAYRFLEEMRRRLPLANMSYYVSPQAVDAVHRGLGLPLPRTVPEQVRHNSMEDARELDEEVVEEADDDP

SEQ ID NO: 15248 - protein, 1714 aa, Homo sapiens
MSVSRTMEDSCELDLVYVTERIIAVSFPSTANEENFRSNLREVAQMLKSKHGGNYLLFNLSERRPDITKLHAKVLEFGWPDLHTPALEKICSICKAMDTWLNADPHNVVVLHNKGNRGRIGVVIAAYMHYSNISASADQALDRFAMKRFYEDKIVPIGQPSQRRYVHYFSGLLSGSIKMNNKPLFLHHVIMHGIPNFESKGGCRPFLRIYQAMQPVYTSGIYNIPGDSQTSVCITIEPGLLLKGDILLKCYHKKFRSPARDVIFRVQFHTCAIHDLGVVFGKEDLDDAFKDDRFPEYGKVEFVFSYGPEKIQGMEHLENGPSVSVDYNTSDPLIRWDSYDNFSGHRDDGMEEVVGHTQGPLDGSLYAKVKKKDSLHGSTGAVNATRPTLSATPNHVEHTLSVSSDSGNSTASTKTDKTDEPVPGASSATAALSPQEKRELDRLLSGFGLEREKQGAMYHTQHLRSRPAGGSAVPSSGRHVVPAQVHVNGGALASERETDILDDELPNQDGHSAGSMGTLSSLDGVTNTSEGGYPEALSPLTNGLDKSYPMEPMVNGGGYPYESASRAGPAHAGHTAPMRPSYSAQEGLAGYQREGPHPAWPQPVTTSHYAHDPSGMFRSQSFSEAEPQLPPAPVRGGSSREAVQRGLNSWQQQQQQQQQPRPPPRQQERAHLESLVASRPSPQPLAETPIPSLPEFPRAASQQEIEQSIETLNMLMLDLEPASAAAPLHKSQSVPGAWPGASPLSSQPLSGSSRQSHPLTQSRSGYIPSGHSLGTPEPAPRASLESVPPGRSYSPYDYQPCLAGPNQDFHSKSPASSSLPAFLPTTHSPPGPQQPPASLPGLTAQPLLSPKEATSDPSRTPEEEPLNLEGLVAHRVAGVQAREKQPAEPPAPLRRRAASDGQYENQSPEATSPRSPGVRSPVQCVSPELALTIALNPGGRPKEPHLHSYKEAFEEMEGTSPSSPPPSGVRSPPGLAKTPLSALGLKPHNPADILLHPTGEPRSYVESVARTAVAGPRAQDSEPKSFSAPATQAYGHEIPLRNGTLGGSFVSPSPLSTSSPILSADSTSVGSFPSGESSDQGPRTPTQPLLESGFRSGSLGQPSPSAQRNYQSSSPLPTVGSSYSSPDYSLQHFSSSPESQARAQFSVAGVHTVPGSPQARHRTVGTNTPPSPGFGWRAINPSMAAPSSPSLSHHQMMGPPGTGFHGSTVSSPQSSAATTPGSPSLCRHPAGVYQVSGLHNKVATTPGSPSLGRHPGAHQGNLASGLHSNAIASPGSPSLGRHLGGSGSVVPGSPCLDRHVAYGGYSTPEDRRPTLSRQSSASGYQAPSTPSFPVSPAYYPGLSSPATSPSPDSAAFRQGSPTPALPEKRRMSVGDRAGSLPNYATINGKVSSPVASGMSSPSGGSTVSFSHTLPDFSKYSMPDNSPETRAKVKFVQDTSKYWYKPEISREQAIALLKDQEPGAFIIRDSHSFRGAYGLAMKVSSPPPTIMQQNKKGDMTHELVRHFLIETGPRGVKLKGCPNEPNFGSLSALVYQHSIIPLALPCKLVIPNRDPTDESKDSSGPANSTADLLKQGAACNVLFVNSVDMESLTGPQAISKATSETLAADPTPAATIVHFKVSAQGITLTDNQRKLFFRRHYPLNTVTFCDLDPQERKWMKTEGGAPAKLFGFVARKQGSTTDNACHLFAELDPNQPASAIVNFVSKVMLNAGQKR

SEQ ID NO: 15249 - protein, 931 aa, Homo sapiens
MRKGLRATAARCGLGLGYLLQMLVLPALALLSASGTGSAAQDDDFFHELPETFPSDPPEPLPHFLIEPEEAYIVKNKPVNLYCKASPATQIYFKCNSEWVHQKDHIVDERVDETSGLIVREVSIEISRQQVEELFGPEDYWCQCVAWSSAGTTKSRKAYVRIAYLRKTFEQEPLGKEVSLEQEVLLQCRPPEGIPVAEVEWLKNEDIIDPVEDRNFYITIDHNLIIKQARLSDTANYTCVAKNIVAKRKSTTATVIVYVNGGWSTWTEWSVCNSRCGRGYQKRTRTCTNPAPLNGGAFCEGQSVQKIACTTLCPVDGRWTPWSKWSTCGTECTHWRRRECTAPAPKNGGKDCDGLVLQSKNCTDGLCMQTAPDSDDVALYVGIVIAVIVCLAISVVVALFVYRKNHRDFESDIIDSSALNGGFQPVNIKAARQDLLAVPPDLTSAAAMYRGPVYALHDVSDKIPMTNSPILDPLPNLKIKVYNTSGAVTPQDDLSEFTSKLSPQMTQSLLENEALSLKNQSLARQTDPSCTAFGSFNSLGGHLIVPNSGVSLLIPAGAIPQGRVYEMYVTVHRKETMRPPMDDSQTLLTPVVSCGPPGALLTRPVVLTMHHCADPNTEDWKILLKNQAAQGQWEDVVVVGEENFTTPCYIQLDAEACHILTENLSTYALVGHSTTKAAAKRLKLAIFGPLCCSSLEYSIRVYCLDDTQDALKEILHLERQMGGQLLEEPKALHFKGSTHNLRLSIHDIAHSLWKSKLLAKYQEIPFYHVWSGSQRNLHCTFTLERFSLNTVELVCKLCVRQVEGEGQIFQLNCTVSEEPTGIDLPLLDPANTITTVTGPSAFSIPLPIRQKLCSSLDAPQTRGHDWRMLAHKLNLDRYLNYFATKSSPTGVILDLWEAQNFPDGNLSMLAAVLEEMGRHETVVSLAAEGQY

SEQ ID NO: 15250 - protein, 607 aa, Homo sapiens
MWMTPKRSKMEVDEALVFRPEWTQRYLVVEPPEGDGALCLVCRRLIVATRERDVRRHYEAEHEYYERYVADGERAALVERLRQGDLPVASFTPEERAARAGLGLCRLLALKGRGWGEGDFVYQCMEVLLREVLPEHVSVLQGVDLSPDITRQRILSIDRNLRNQLFNRARDFKAYSLALDDQAFVAYENYLLVFIRGVGPELEVQEDLLTIINLTHHFSVGALMSAILESLQTAGLSLQRMVGLTTTHTLRMIGENSGLVSYMREKAVSPNCWNVIHYSGFLHLELLSSYDVDVNQIINTISEWIVLIKTRGVRRPEFQTLLTESESEHGERVNGRCLNNWLRRGKTLKLIFSLRKEMEAFLVSVGATTVHFSDKQWLCDFGFLVDIMEHLRELSEELRVSKVFAAAAFDHICTFEVKLNLFQRHIEEKNLTDFPALREVVDELKQQNKEDEKIFDPDRYQMVICRLQKEFERHFKDLRFIKKDLELFSNPFNFKPEYAPISVRVELTKLQANTNLWNEYRIKDLGQFYAGLSAESYPIIKGVACKVASLFDSNQICEKAFSYLTRNQHTLSQPLTDEHLQALFRVATTEMEPGWDDLVRERNESNP

SEQ ID NO: 15251 - protein, 467 aa, Homo sapiens
MAAQGAAAAVAAGTSGVAGEGEPGPGENAAAEGTAPSPGRVSPPTPARGEPEVTVEIGETYLCRRPDSTWHSAEVIQSRVNDQEGREEFYVHYVGFNRRLDEWVDKNRLALTKTVKDAVQKNSEKYLSELAEQPERKITRNQKRKHDEINHVQKTYAEMDPTTAALEKEHEAITKVKYVDKIHIGNYEIDAWYFSPFPEDYGKQPKLWLCEYCLKYMKYEKSYRFHLGQCQWRQPPGKEIYRKSNISVYEVDGKDHKIYCQNLCLLAKLFLDHKTLYFDVEPFVFYILTEVDRQGAHIVGYFSKEKESPDGNNVACILTLPPYQRRGYGKFLIAFSYELSKLESTVGSPEKPLSDLGKLSYRSYWSWVLLEILRDFRGTLSIKDLSQMTSITQNDIISTLQSLNMVKYWKGQHVICVTPKLVEEHLKSAQYKKPPITGGWGAAVCRGRWGSVSIWTGRSQGLLIAVT

SEQ ID NO: 15252 - protein, 1531 aa, Homo sapiens
MLLPSGSLFFLRIVHGRKSRPDEGVYVCVARNYLGEAVSHNASLEVAILRDDFRQNPSDVMVAVGEPAVMECQPPRGHPEPTISWKKDGSPLDDKDERITIRGGKLMITYTRKSDAGKYVCVGTNMVGERESEVAELTVLERPSFVKRPSNLAVTVDDSAEFKCEARGDPVPTVRWRKDDGELPKSRYEIRDDHTLKIRKVTAGDMGSYTCVAENMVGKAEASATLTVQEPPHFVVKPRDQVVALGRTVTFQCEATGNPQPAIFWRREGSQNLLFSYQPPQSSSRFSVSQTGDLTITNVQRSDVGYYICQTLNVAGSIITKAYLEVTDVIADRPPPVIRQGPVNQTVAVDGTFVLSCVATGSPVPTILWRKDGVLVSTQDSRIKQLENGVLQIRYAKLGDTGRYTCIASTPSGEATWSAYIEVQEFGVPVQPPRPTDPNLIPSAPSKPEVTDVSRNTVTLSWQPNLNSGATPTSYIIEAFSHASGSSWQTVAENVKTETSAIKGLKPNAIYLFLVRAANAYGISDPSQISDPVKTQDVLPTSQGVDHKQVQRELGNAVLHLHNPTVLSSSSIEVHWTVDQQSQYIQGYKILYRPSGANHGESDWLVFEVRTPAKNSVVIPDLRKGVNYEIKARPFFNEFQGADSEIKFAKTLEEGNAPPQGVTVSKNDGNGTAILVSWQPPPEDTQNGMVQEYKVWCLGNETRYHINKTVDGSTFSVVIPFLVPGIRYSVEVAASTGAGSGVKSEPQFIQLDAHGNPVSPEDQVSLAQQISDVVKQPAFIAGIGAACWIILMVFSIWLYRHRKKRNGLTSTYAGIRKVPSFTFTPTVTYQRGGEAVSSGGRPGLLNISEPAAQPWLADTWPNTGNNHNDCSISCCTAGNGNSDSNLTTYSRPADCIANYNNQLDNKQTNLMLPESTVYGDVDLSNKINEMKTFNSPNLKDGRFVNPSGQPTPYATTQLIQSNLSNNMNNGSGDSGEKHWKPLGQQKQEVAPVQYNIVEQNKLNKDYRANDTVPPTIPYNQSYDQNTGGSYNSSDRGSSTSGNQGHKKGARTPKVPKQGGMNWADLLPPPPAHPPPHSNSEEYNISVDESYDQEMPCPVPPARMYLQQDELEEEEDERGPTPPVRGAASSPAAVSYSHQSTATLTPSPQEELQPMLQDCPEETGHMQHQPDRRRQPVSPPPPPRPISPPHTYGYISGPLVSDMDTDAPEEEEDEADMEVAKMQTRRLLLRGLEQTPASSVGDLESSVTGSMINGWGSASEEDNISSGRSSVSSSDGSFFTDADFAQAVAAAAEYAGLKVARRQMQDAAGRRHFHASQCPRPTSPVSTDSNMSAAVMQKTRPAKKLKHQPGHLRRETYTDDLPPPPVPPPAIKSPTAQSKTQLEVRPVVVPKLPSMDARTDRSSDRKGSSYKGREVLDGRQVVDMRTNPGDPREAQEQQNDGKGRGNKAAKRDLPPAKTHLIQEDILPYCRPTFPTSNNPRDPSSSSSMSSRGSGSRQREQANVGRRNIAEMQVLGGYERGEDNNEELEETES

SEQ ID NO: 15253 - protein, 1107 aa, Homo sapiens
MDGKRRPGPGPGVPPKRARGGLWDDDDAPRPSQFEEDLALMEEMEAEHRLQEQEEEELQSVLEGVADGQVPPSAIDPRWLRPTPPALDPQTEPLIFQQLEIDHYVGPAQPVPGGPPPSRGSVPVLRAFGVTDEGFSVCCHIHGFAPYFYTPAPPGFGPEHMGDLQRELNLAISRDSRGGRELTGPAVLAVELCSRESMFGYHGHGPSPFLRITVALPRLVAPARRLLEQGIRVAGLGTPSFAPYEANVDFEIRFMVDTDIVGCNWLELPAGKYALRLKEKATQCQLEADVLWSDVVSHPPEGPWQRIAPLRVLSFDIECAGRKGIFPEPERDPVIQICSLGLRWGEPEPFLRLALTLRPCAPILGAKVQSYEKEEDLLQAWSTFIRIMDPDVITGYNIQNFDLPYLISRAQTLKVQTFPFLGRVAGLCSNIRDSSFQSKQTGRRDTKVVSMVGRVQMDMLQVLLREYKLRSYTLNAVSFHFLGEQKEDVQHSIITDLQNGNDQTRRRLAVYCLKDAYLPLRLLERLMVLVNAVEMARVTGVPLSYLLSRGQQVKVVSQLLRQAMHEGLLMPVVKSEGGEDYTGATVIEPLKGYYDVPIATLDFSSLYPSIMMAHNLCYTTLLRPGTAQKLGLTEDQFIRTPTGDEFVKTSVRKGLLPQILENLLSARKRAKAELAKETDPLRRQVLDGRQLALKVSANSVYGFTGAQVGKLPCLEISQSVTGFGRQMIEKTKQLVESKYTVENGYSTSAKVVYGDTDSVMCRFGVSSVAEAMALGREAADWVSGHFPSPIRLEFEKVYFPYLLISKKRYAGLLFSSRPDAHDRMDCKGLEAVRRDNCPLVANLVTASLRRLLIDRDPEGAVAHAQDVISDLLCNRIDISQLVITKELTRAASDYAGKQAHVELAERMRKRDPGSAPSLGDRVPYVIISAAKGVAAYMKSEDPLFVLEHSLPIDTQYYLEQQLAKPLLRIFEPILGEGRAEAVLLRGDHTRCKTVLTGKVGGLLAFAKRRNCCIGCRTVLSHQGAVCEFCQPRESELYQKEVSHLNALEERFSRLWTQCQRCQGSLHEDVICTSRDCPIFYMRKKVRKDLEDQEQLLRRFGPPGPEAW

SEQ ID NO: 15254 - protein, 1035 aa, Homo sapiens
MSEQERIQECLRKEIRSLLISTKDGLSPQELEKEYLLMVGNHLPLRILGYRSTMELVLDMPDVVRVCPGAGGTVILKAIPDESTKGIASLVAKQRSSHKLRNSMHKGRPSIYSGPRSHRRVPYRGRVAPILPAVVKSELKDLLALSPVLLSDFEKAFAKRFGRSFQYMQYGFLSMFEVLNAASDVISVEQTRAGSLLMLKKSVTEEKPRGCPAGKIFTQPFRMKQGSYSTGFPVAKPCFSQPTSNMEPPKQIMSMEKTSKLNVVETSRLNHTEKLNQLENTFKSVIAQIGPGGTISSELKHKIKFVVSKFPEGLFISKLLGEYEVIFKEQLSPKKLGFLNVTELVGALSDILHVEFRKGHQDLLVFDADKKPLPPVQSDKKIEAKACVSSPPRNSLSTAAVKETVWNCPSKKQKEPQQKICKKPNLVVKPLQLQVETNKSELNLAMANHDIPPDAVPNKKLCRLPPLDTSSLIGVFVEYIISPSQFYIRIYSRDSSELLEDMMIEMRRCYSNQLVSDRYVMPECFIQPGHLCCVRISEDKWWYRVIIHRVLEKQEVEVFYPDFGNIGIVQKSSLRFLKCCYTKLPAQAIPCSLAWVRPVEEHWTSKAILQFQKLCGLKPLVGVVDEYVDGILNIFLCDTSSNEDVYFHHVLRTEGHAIVCRENISSKGFSELNPLALYTTSSGGPEDIVLTELGYPSQQHYFNEDRKISPQSKESELRILQDINDEKSLSHLKSESKEPLKDSEFESLKTCNKSFEEDPKWSNPEPNDLKEENEDEIPTGMPCLESVTIGDDIWDENWLPLQAKMGKGGDAASHLFTASLGGKNQYSSCKEMPQKDWCFSTPKDTWDDSWQPSGLVNGTKVEVHKPEVLGAQEKNTGTNRTQKQLDINGSSDSSTLPKLEEFCTSLTQSEQSADGSQSEPNNSQTQPKQIQLSTAAPCSTTAVDDSAEKPSGSVESSPEILKNEDFSSSRAITLYKDKRQESVDQLSLILSYECQISQKLYIPRSTATAALGAAARLATSRSLLHWYPSVKRMEA

SEQ ID NO: 15255 - protein, 600 aa, Homo sapiens
MATEGGGKEMNEIKTQFTTREGLYKLLPHSEYSRPNRVPFNSQGSNPVRVSFVNLNDQSGNGDRLCFNVGRELYFYIYKGVRKAADLSKPIDKRIYKGTQPTCHDFNHLTATAESVSLLVGFSAGQVQLIDPIKKETSKLFNEENSCQHLWKVDWNEERQNEGSKTSEEALVTVQRLIDKSRVTCVKWVPGSESLFLVAHSSGNMYLYNVEHTCGTTAPHYQLLKQGESFAVHTCKSKSTRNPLLKWTVGEGALNEFAFSPDGKFLACVSQDGFLRVFNFDSVELHGTMKSYFGGLLCVCWSPDGKYIVTGGEDDLVTVWSFVDCRVIARGHGHKSWVSVVAFDPYTTSVEEGDPMEFSGSDEDFQDLLHFGRDRANSTQSRLSKRNSTDSRPVSVTYRFGSVGQDTQLCLWDLTEDILFPHQPLSRARTHTNVMNATSPPAGSNGNSVTTPGNSVPPPLPRSNSLPHSAVSNAGSKSSVMDGAIASGVSKFATLSLHDRKERHHEKDHKRNHSMGHISSKSSDKLNLVTKTKTDPAKTLGTPLCPRMEDVPLLEPLICKKIAHERLTVLIFLEDCIVTACQEGFICTWGRPGKVVSFNP

SEQ ID NO: 15256 - protein, 137 aa, Homo sapiens
MSDKSELKAELERKKQRLAQIREEKKRKEEERKKKETDQKKEAVAPVQEESDLEKKRREAEALLQSMGLTPESPIAEQPLRVVTADTCLFHYLVPPPMSPSSKSVSTPSEAGSQDSGDGAVGSRRGPIKLGMAKITQ

SEQ ID NO: 15257 - protein, 783 aa, Homo sapiens
MVCRPVFPCRRRFCPRPFLVGLVVAICLFYQTLTLRGSRKLTAAAPGAVPHTSTETQASRCKKGFSQDKQCFLLSGNAQETRKVKESMETHFGSHGRRAILYRPPFYSKTELQLHQHILTQHGYTVVIAEERLNAGLGPGLLEQGDLGSWDLLICLSSKKAEGTPCISKEVMCQLGLHQKANRLPEIQQPLCRKEGLCQIVRRFPELQLPVSPSVCLDQGMQLKPSTSSHLLKTVKPRVWKPGDWSREQLNETTVLAPHETIFRAEDLSVILKAYVLVTSLTPLRAFIHSTGTVWNPPKKKRFTVKLQTFFETFLRASSPQQAFDIMKEAIGKLLLAAEVFSETSTLGPKTFHRCRFCFQLLTFDIGYGSFMYPVVLQVHEHLNFQDYDNMDFEDQNTEEFLLNDTFNFLFPNESSLSIFSEIFQRLYRSDVFKGENYQKELNQCLSLEEINSIMTFIKELGSLGQFQLLFPSTTPGIQSLMHEFYDVANPVGNPGSVLTQYWSLLNVFEQFQFMNKKTQPHPLEWNSFTEDKNIEKPQVPFDAIENKKAAVPQIKNENKEIHCSDDENTPCHIKQIFTHPHLELNPDFHPKIKDYYCEVPFDVVTVTIGVETPKCLCKVHLYEQAGPSFASYPLGLGMNKISIFVVDESPAHGETLITYKLTIYREDRPSLPLFEAFTACGFVQDCGLLIHPEETCGLQPISSDYIEAILQSELKRCPSGDMKGQWIVPCLSCSDNRTCDWREITWQPHNCQYGVLTKPQLQQCLGGRKLGVDVQRVPRSRN

SEQ ID NO: 15258 - protein, 700 aa, Homo sapiens
MERAVQGTDGGGGSNSSSRSSSRATSAGSSPSCSLAGRGVSSRSAAAGLGGGGSRSSPGSVAASPSGGGGRRREPALEGVLSKYTNLLQGWQNRYFVLDFEAGILQYFVNEQSKHQKPRGVLSLSGAIVSLSDEAPHMLVVYSANGEMFKLRAADAKEKQFWVTQLRACAKYHMEMNSKMMNQVEGQQKNLVHAIESLPGSGPLTALDQDLLLLKATSAATLSCLGECLNLLQQSVHQAGQPSQKPGASENILGWHGSKSHSTEQLKNGTLGSLPSASANITWAILPNSAEDEQTSQPEPEPNSGSELVLSEDEKSDNEDKEETELGVMEDQRSIILHLISQLKLGMDLTKVVLPTFILEKRSLLEMYADFMAHPDLLLAITAGATPEERVICFVEYYLTAFHEGRKGALAKKPYNPIIGETFHCSWEVPKDRVKPKRTASRSPASCHEHPMADDPSKSYKLRFVAEQVSHHPPISCFYCECEEKRLCVNTHVWTKSKFMGMSVGVSMIGEGVLRLLEHGEEYVFTLPSAYARSILTIPWVELGGKVSINCAKTGYSATVIFHTKPFYGGKVHRVTAEVKHNPTNTIVCKAHGEWNGTLEFTYNNGETKVIDTTTLPVYPKKIRPLEKQGPMESRNLWREVTRYLRLGDIDAATEQKRHLEEKQRVEERKRENLRTPWKPKYFIQEGDGWVYFNPLWKAH

SEQ ID NO: 15259 - protein, 729 aa, Homo sapiens
MHLKIVLAFLALSLITIFALAYVLLTSPGGSSQPPHCPSVSHRAQPWPHPGQSQLFADLSREELTAVMRFLTQRLGPGLVDAAQAQPSDNCIFSVELQLPPKAAALAHLDRGSPPPAREALAIVLFGGQPQPNVSELVVGPLPHPSYMRDVTVERHGGPLPYHRRPVLRAEFTQMWRHLKEVELPKAPIFLSSTFNYNGSTLAAVHATPRGLRSGDRATWMALYHNISGVGLFLHPVGLELLLDHRALDPAHWTVQQVFYLGHYYADLGQLEREFKSGRLEVVRVPLPPPNGASSLRSRNSPGPLPPLQFSPQGSQYSVQGNLVVSSLWSFTFGHGVFSGLRIFDVRFQGERIAYEVSVQECVSIYGADSPKTMLTRYLDSSFGLGRNSRGLVRGVDCPYQATMVDIHILVGKGAVQLLPGAVCVFEEAQGLPLRRHHNYLQNHFYGGLASSALVVRSVSSVGNYDYIWDFVLYPNGALEGRVHATGYINTAFLKGGEEGLLFGNRVGERVLGTVHTHAFHFKLDLDVAGLKNWVVAEDVVFKPVAAPWNPEHWLQRPQLTRQVLGKEDLTAFSLGSPLPRYLYLASNQTNAWGHQRGYQLVVTQRKEEESQSSSIYHQNDIWTPTVTFADFINNETLLGEDLVAWVTASFLHIPHAEDIPNTVTLGNRVGFLLRPYNFFDEDPSIFSPGSVYFEKGQDAGLCSINPVACLPDLAACVPDLPPFSYHGF

SEQ ID NO: 15260 - protein, 1049 aa, Homo sapiens
MKEENVKTVLMNPNIASVQTNEVGLKQADTVYFLPITPQFVTEVIKAEQPDGLILGMGGQTALNCGVELFKRGVLKEYGVKVLGTSVESIMATEDRQLFSDKLNEINEKIAPSFAVESIEDALKAADTIGYPVMIRSAYALGGLGSGICPNRETLMDLSTKAFAMTNQILVEKSVTGWKEIEYEVVRDADDNCVTVCNMENVDAMGVHTGDSVVVAPAQTLSNAEFQMLRRTSINVVRHLGIVGECNIQFALHPTSMEYCIIEVNARLSRSSALASKATGYPLAFIAAKIALGIPLPEIKNVVSGKTSACFEPSLDYMVTKIPRWDLDRFHGTSSRIGSSMKSVGEVMAIGRTFEESFQKALRMCHPSIEGFTPRLPMNKEWPSNLDLRKELSEPSSTRIYAIAKAIDDNMSLDEIEKLTYIDKWFLYKMRDILNMEKTLKGLNSESMTEETLKRAKEIGFSDKQISKCLGLTEAQTRELRLKKNIHPWVKQIDTLAAEYPSVTNYLYVTYNGQEHDVNFDDHGMMVLGCGPYHIGSSVEFDWCAVSSIRTLRQLGKKTVVVNCNPETVSTDFDECDKLYFEELSLERILDIYHQEACGGCIISVGGQIPNNLAVPLYKNGVKIMGTSPLQIDRAEDRSIFSAVLDELKVAQAPWKAVNTLNEALEFAKSVDYPCLLRPSYVLSGSAMNVVFSEDEMKKFLEEATRVSQEHPVVLTKFVEGAREVEMDAVGKDGRVISHAISEHVEDAGVHSGDATLMLPTQTISQGAIEKVKDATRKIAKAFAISGPFNVQFLVKGNDVLVIECNLRASRSFPFVSKTLGVDFIDVATKVMIGENVDEKHLPTLDHPIIPADYVAIKAPMFSWPRLRDADPILRCEMASTGEVACFGEGIHTAFLKAMLSTGFKIPQKGILIGIQQSFRPRFLGVAEQLHNEGFKLFATEATSDWLNANNVPATPVAWPSQEGQNPSLSSIRKLIRDGSIDLVINLPNNNTKFVHDNYVIRRTAVDSGIPLLTNFQVTKLFAEAVQKSRKVDSKSLFHYRQYSAGKAA

SEQ ID NO: 15261 - protein, 445 aa, Homo sapiens
MSPTHQIQDPKHWNRIADSDYLWRSLSLQRWDCSNFTNQHLGTHTWKQFFLHQRRKELRLALAQPHNFIYKVTKNIAFETELAYLSGNRLTVDEQEKSIICSVSPKQELCAWDVQEGTMIWSSPVQEFHFSNLVTLPQMHLAITMDRKKTIKVWNCQDRDALAVLPMPQPCYCMEAYLTKDGPFLMVGDAAGDIYTFTLPGLRDVSKVTAFQYGIVLLHCSPDKKWVFACGTYSRTLPQVFLTESLLRPSEGSVPLSTFLPHKLCASACWTPKVKNRITLMSQSSTGKKTEFITFDLTTKKTGGQTVIQAYEIASFQVAAHLKCPIWMGASDGYMIVFTSGPYLLLFSITGFLLQRFEDHQAAINNFWVDPCYVLTTSENSVHVYMWEEGGRHPYLRSCCHLENTWHDHTTDSCISSVMCDNASIVLRVRKVSDSSILVMYSLNT

SEQ ID NO: 15262 - protein, 713 aa, Homo sapiens
IGPPSPGDDEEEAAAAAGAPAAAGATGDLASAQLGGAPNRWEVLSATPTTIKDEAGNLVQIPSAATSSGQYVLPLQNLQNQQIFSVAPGSDSSNGTVSSVQYQVIPQIQSADGQQVQIGFTGSSDNGGINQESSQIQIIPGSNQTLLASGTPSANIQNLIPQTGQVQVQGVAIGGSSFPGQTQVVANVPLGLPGNITFVPINSVDLDSLGLSGSSQTMTAGINADGHLINTGQAMDSSDNSERTGERVSPDINETNTDTDLFVPTSSSSQLPVTIDSTGILQQNTNSLTTSSGQVHSSDLQGNYIQSPVSEETQAQNIQVSTAQPVVQHLQLQESQQPTSQAQIVQGITPQTIHGVQASGQNISQQALQNLQLQLNPGTFLIQAQTVTPSGQVTWQTFQVQGVQNLQNLQIQNTAAQQITLTPVQTLTLGQVAAGGAFTSTPVSLSTGQLPNLQTVTVNSIDSAGIQLHPGENADSPADIRIKEEEPDPEEWQLSGDSTLNTNDLTHLRVQVVDEEGDQQHQEGKRLRRVACTCPNCKEGGGRGTNLGKKKQHICHIPGCGKVYGKTSHLRAHLRWHSGERPFVCNWMYCGKRFTRSDELQRHRRTHTGEKKFVCPECSKRFMRSDHLAKHIKTHQNKKGIHSSSTVLASVEAARDDTLITAGGTTLILANIQQGSVSGIGTVNTSATSNQDILTNTEIPLQLVTVSGNETME

SEQ ID NO: 15263 - protein, 203 aa, Homo sapiens
MITSAAGIISLLDEDEPQLKEFALHKLNAVVNDFWAEISESVDKIEVLYEDEGFRSRQFAALVASKVFYHLGAFEESLNYALGAGDLFNVNDNSEYVETIIGNYRLSAKCIDHYTKQCVENADLPEGEKKPIDQRLEGIVNKMFQRCLDDHKYKQAIGIALETRRLDVFEKTILESNDVPGMLAYSLKLCMSLMQNKQFRNKV

SEQ ID NO: 15264 - protein, 581 aa, Homo sapiens
MAFLTTWKEAASGKSDRRTPESSLHEALDQCMTALDLFLTNQFSEALSYLKPRTKESMYHSLTYATILEMQAMMTFDPQDILLAGNMMKEAQMLCQRHRRKSSVTDSFSSLVNRPTLGQFTEEEIHAEVCYAECLLQRAALTFLQDENMVSFIKGGIKVRNSYQTYKELDSLVQSSQYCKGENHPHFEGGVKLGVGAFNLTLSMLPTRILRLLEFVGFSGNKDYGLLQLEEGASGHSFRSVLCVMLLLCYHTFLTFVLGTGNVNIEEAEKLLKPYLNRYPKGAIFLFFAGRIEVIKGNIDAAIRRFEECCEAQQHWKQFHHMCYWELMWCFTYKGQWKMSYFYADLLSKENCWSKATYIYMKAAYLSMFGKEDHKPFGDDEVELFRAVPGLKLKIAGKSLPTEKFAIRKSRRYFSSNPISLPVPALEMMYIWNGYAVIGKQPKLTDGILEIITKAEEMLEKGPENEYSVDDECLVKLLKGLCLKYLGRVQEAEENFRSISANEKKIKYDHYLIPNALLELALLLMEQDRNEEAIKLLESAKQNYKNYSMESRTHFRIQAATLQAKSSLENSSRSMVSSVSL

SEQ ID NO: 15265 - protein, 188 aa, Homo sapiens
MEAALLGLCNWSTLGVCAALKLPQISAVLAARSARGLSLPSLLLELAGFLVFLRYQCYYGYPPLTYLEYPILIAQDVILLLCIFHFNGNVKQATPYIAVLVSSWFILALQKWIIDLAMNLCTFISAASKFAQLQCLWKTRDSGTVSALTWSLSSYTCAILLRFVIMLALNIWVTVTVLRYRKTAIKAE

SEQ ID NO: 15266 - protein, 112 aa, Homo sapiens
MPRNQGFSEPEYSAEYSAEYSVSLPSDPDRGVGRTHEISVRNSGSCLCLPRFMRLTFVPESLENLYQTYFKRQRHETLLVLVVFAALFDCYVVVMCAVVFSSDKLASLAVAG

SEQ ID NO: 15267 - protein, 371 aa, Homo sapiens
MPQLSGGGGGGGGDPELCATDEMIPFKDEGDPQKEKIFAEISHPEEEGDLADIKSSLVNESEIIPASNGHEVARQAQTSQEPYHDKAREHPDDGKHPDGGLYNKGPSYSSYSGYIMMPNMNNDPYMSNGSLSPPIPRTSNKVPVVQPSHAVHPLTPLITYSDEHFSPGSHPSHIPSDVNSKQGMSRHPPAPDIPTFYPLSPGGVGQITPPLGWFSHHMIPGPPGPHTTGIPHPAIVTPQVKQEHPHTDSDLMHVKPQHEQRKEQEPKRPHIKKPLNAFMLYMKEMRANVVAECTLKESAAINQILGRRWHALSREEQAKYYELARKERQLHMQLYPGWSARDNYGKKKKRKREKLQESASGTGPRMTAAYI

SEQ ID NO: 15268 - protein, 328 aa, Homo sapiens
MGPLMVLFCLLFLYPGLADSAPSCPQNVNISGGTFTLSHGWAPGSLLTYSCPQGLYPSPASRLCKSSGQWQTPGATRSLSKAVCKPVRCPAPVSFENGIYTPRLGSYPVGGNVSFECEDGFILRGSPVRQCRPNGMWDGETAVCDNGAGHCPNPGISLGAVRTGFRFGHGDKVRYRCSSNLVLTGSSERECQGNGVWSGTEPICRQPYSYDFPEDVAPALGTSFSHMLGATNPTQKTKESLGRKIQIQRSGHLNLYLLLDCSQSVSENDFLIFKESASLMVDRVRNQESACSRGLPVLTISLCLLPLLRTPLTAHLLQEVFSDYTHAM

SEQ ID NO: 15269 - protein, 143 aa, Homo sapiens
MPGNIVFVLKKGNDNWATVMFNGQKGLVPCNYLEPVELRIHPQQQPQEESSPQSDIPAPPSSKAPGRPQLSPGQKQKEEPKEVKLSVPMPYTLKVHYKYTVVMKTQPGLPYSQVRDMVSKKLELRLEHTKLSYRPRDSNELVP

SEQ ID NO: 15270 - protein, 818 aa, Homo sapiens
MALTQVRLTFRDVAIEFSQEEWKCLDPAQRILYRDVMLENYWNLVSLGLCHFDMNIISMLEEGKEPWTVKSCVKIARKPRTPECVKGVVTDIPPKCTIKDLLPKEKSSTEAVFHTVVLERHESPDIEDFSFKEPQKNVHDFECQWRDDTGNYKGVLMAQKEGKRDQRDRRDIENKLMNNQLGVSFHSHLPELQLFQGEGKMYECNQVEKSTNNGSSVSPLQQIPSSVQTHRSKKYHELNHFSLLTQRRKANSCGKPYKCNECGKAFTQNSNLTSHRRIHSGEKPYKCSECGKTFTVRSNLTIHQVIHTGEKPYKCHECGKVFRHNSYLATHRRIHTGEKPYKCNECGKAFRGHSNLTTHQLIHTGEKPFKCNECGKLFTQNSHLISHWRIHTGEKPYKCNECGKAFSVRSSLAIHQTIHTGEKPYKCNECGKVFRYNSYLGRHRRVHTGEKPYKCNECGKAFSMHSNLATHQVIHTGTKPFKCNECSKVFTQNSQLANHRRIHTGEKPYKCNECGKAFSVRSSLTTHQAIHSGEKPYKCIECGKSFTQKSHLRSHRGIHSGEKPYKCNECGKVFAQTSQLARHWRVHTGEKPYKCNDCGRAFSDRSSLTFHQAIHTGEKPYKCHECGKVFRHNSYLATHRRIHTGEKPYKCNECGKAFSMHSNLTTHKVIHTGEKPYKCNQCGKVFTQNSHLANHQRTHTGEKPYRCNECGKAFSVRSSLTTHQAIHTGKKPYKCNECGKVFTQNAHLANHRRIHTGEKPYRCTECGKAFRVRSSLTTHMAIHTGEKRYKCNECGKVFRQSSNLASHHRMHTGEKPYK

SEQ ID NO: 15271 - protein, 568 aa, Homo sapiens [sequence omitted]

SEQ ID NO: 15272 - protein, 4588 aa, Homo sapiens
MGRHLALLLLLLLLFQHFGDSDGSQRLEQTPLQFTHLEYNVTVQENSAAKTYVGHPVKMGVYITHPAWEVRYKIVSGDSENLFKAEEYILGDFCFLRIRTKGGNTAILNREVKDHYTLIVKALEKNTNVEARTKVRVQVLDTNDLRPLFSPTSYSVSLPENTAIRTSIARVSATDADIGTNGEFYYSFKDRTDMFAIHPTSGVIVLTGRLDYLETKLYEMEILAADRGMKLYGSSGISSMAKLTVHIEQANECAPVITAVTLSPSELDRDPAYAIVTVDDCDQGANGDIASLSIVAGDLLQQFRTVRSFPGSKEYKVKAIGGIDWDSHPFGYNLTLQAKDKGTPPQFSSVKVIHVTSPQFKAGPVKFEKDVYRAEISEFAPPNTPVVMVKAIPAYSHLRYVFKSTPGKAKFSLNYNTGLISILEPVKRQQAAHFELEVTTSDRKASTKVLVKVLGANSNPPEFTQTAYKAAFDENVPIGTTVMSLSAVDPDEGENGYVTYSIANLNHVPFAIDHFTGAVSTSENLDYELMPRVYTLRIRASDWGLPYRREVEVLATITLNNLNDNTPLFEKINCEGTIPRDLGVGEQITTVSAIDADELQLVQYQIEAGNELDFFSLNPNSGVLSLKRSLMDGLGAKVSFHSLRITATDGENFATPLYINITVAASHKLVNLQCEETGVAKMLAEKLLQANKLHNQGEVEDIFFDSHSVNAHIPQFRSTLPTGIQVKENQPVGSSVIFMNSTDLDTGFNGKLVYAVSGGNEDSCFMIDMETGMLKILSPLDRETTDKYTLNITVYDLGIPQKAAWRLLHVVVVDANDNPPEFLQESYFVEVSEDKEVHSEIIQVEATDKDLGPNGHVTYSIVTDTDTFSIDSVTGVVNIARPLDRELQHEHSLKIEARDQAREEPQLFSTVVVKVSLEDVNDNPPTFIPPNYRVKVREDLPEGTVIMWLEAHDPDLGQSGQVRYSLLDHGEGNFDVDKLSGAVRIVQQLDFEKKQVYNLTVRAKDKGKPVSLSSTCYVEVEVVDVNENLHPPVFSSFVEKGTVKEDAPVGSLVMTVSAHDEDARRDGEIRYSIRDGSGVGVFKIGEETGVIETSDRLDRESTSHYWLTVFATDQGVVPLSSFIEIYIEVEDVNDNAPQTSEPVYYPEIMENSPKDVSVVQIEAFDPDSSSNDKLMYKITSGNPQGFFSIHPKTGLITTTSRKLDREQQDEHILEVTVTDNGSPPKSTIARVIVKILDENDNKPQFLQKFYKIRLPEREKPDRERNARREPLYHVIATDKDEGPNAEISYSIEDGNEHGKFFIEPKTGVVSSKRFSAAGEYDILSIKAVDNGRPQKSSTTRLHIEWISKPKPSLEPISFEESFFTFTVMESDPVAHMIGVISVEPPGIPLWFDITGGNYDSHFDVDKGTGTIIVAKPLDAEQKSNYNLTVEATDGTTTILTQVFIKVIDTNDHRPQFSTSKYEVVIPEDTAPETEILQISAVDQDEKNKLIYTLQSSRDPLSLKKFRLDPATGSLYTSEKLDHEAVHQHTLTVMVRDQDVPVKRNFARIVVNVSDTNDHAPWFTASSYKGRVYESAAVGSVVLQVTALDKDKGKNAEVLYSIESGNIGNSFMIDPVLGSIKTAKELDRSNQAEYDLMVKATDKGSPPMSEITSVRIFVTIADNASPKFTSKEYSVELSETVSIGSFVGMVTAHSQSSVVYEIKDGNTGDAFDINPHSGTIITQKALDFETLPIYTLIIQGTNMAGLSTNTTVLVHLQDENDNAPVFMQAEYTGLISESASINSVVLTDRNVPLVIRAADADKDSNALLVYHIVEPSVHTYFAIDSSTGAIHTVLSLDYEETSIFHFTVQVHDMGTPRLFAEYAANVTVHVIDINDCPPVFAKPLYEASLLLPTYKGVKVITVNATDADSSAFSQLIYSITEGNIGEKFSMDYKTGALTVQNTTQLRSRYELTVRASDGRFAGLTSVKINVKESKESHLKFTQDVYSAVVKENSTEAETLAVITAIGNPINEPLFYHILNPDRRFKISRTSGVLSTTGTPFDREQQEAFDVVVEVTEEHKPSAVAHVVVKVIVEDQNDNAPVFVNLPYYAVVKVDTEVGHVIRYVTAVDRDSGRNGEVHYYLKEHHEHFQIGPLGEISLKKQFELDTLNKEYLVTVVAKDGGNPAFSAEVIVPITVMNKAMPVFEKPFYSAEIAESIQVHSPVVHVQANSPEGLKVFYSITDGDPFSQFTINFNTGVINVIAPLDFEAHPAYKLSIRATDSLTGAHAEVFVDIIVDDINDNPPVFAQQSYAVTLSEASVIGTSVVQVRATDSDSEPNRGISYQMFGNHSKSHDHFHVDSSTGLISLLRTLDYEQSRQHTIFVRAVDGGMPTLSSDVIVTVDVTDLNDNPPLFEQQIYEARISEHAPHGHFVTCVKAYDADSSDIDKLQYSILSGNDHKHFVIDSATGIITLSNLHRHALKPFYSLNLSVSDGVFRSSTQVHVTVIGGNLHSPAFLQNEYEVELAENAPLHTLVMEVKTTDGDSGIYGHVTYHIVNDFAKDRFYINERGQIFTLEKLDRETPAEKVISVRLMAKDAGGKVAFCTVNVILTDDNDNAPQFRATKYEVNIGSSAAKGTSVVKVLASDADEGSNADITYAIEADSESVKENLEINKLSGVITTKESLIGLENEFFTFFVRAVDNGSPSKESVVLVYVKILPPEMQLPKFSEPFYTFTVSEDVPIGTEIDLIRAEHSGTVLYSLVKGNTPESNRDESFVIDRQSGRLKLEKSLDHETTKWYQFSILARCTQDDHEMVASVDVSIQVKDANDNSPVFESSPYEAFIVENLPGGSRVIQIRASDADSGTNGQVMYSLDQSQSVEVIESFAINMETGWITTLKELDHEKRDNYQIKVVASDHGEKIQLSSTAIVDVTVTDVNDSPPRFTAEIYKGTVSEDDPQGGVIAILSTTDADSEEINRQVTYFITGGDPLGQFAVETIQNEWKVYVKKPLDREKRDNYLLTITATDGTFSSKAIVEVKVLDANDNSPVCEKTLYSDTIPEDVLPGKLIMQISATDADIRSNAEITYTLLGSGAEKFKLNPDTGELKTSTPLDREEQAVYHLLVRATDGGGRFCQASIVLTLEDVNDNAPEFSADPYAITVFENTEPGTLLTRVQATDADAGLNRKILYSLIDSADGQFSINELSGIIQLEKPLDRELQAVYTLSLKAVDQGLPRRLTATGTVIVSVLDINDNPPVFEYREYGATVSEDILVGTEVLQVYAASRDIEANAEITYSIISGNEHGKFSIDSKTGAVFIIENLDYESSHEYYLTVEATDGGTPSLSDVATVNVNVTDINDNTPVFSQDTYTTVISEDAVLEQSVITVMADDADGPSNSHIHYSIIDGNQGSSFTIDPVRGEVKVTKLLDRETISGYTLTVQASDNGSPPRVNTTTVNIDVSDVNDNAPVFSRGNYSVIIQENKPVGFSVLQLVVTDEDSSHNGPPFFFTIVTGNDEKAFEVNPQGVLLTSSAIKRKEKDHYLLQVKVADNGKPQLSSLTYIDIRVIEESIYPPAILPLEIFITSSGEEYSGGVIGKIHATDQDVYDTLTYSLDPQMDNLFSVSSTGGKLIAHKKLDIGQYLLNVSVTDGKFTTVADITVHIRQVTQEMLNHTIAIRFANLTPEEFVGDYWRNFQRALRNILGVRRNDIQIVSLQSSEPHPHLDVLLFVEKPGSAQISTKQLLHKINSSVTDIEEIIGVRILNVFQKLCAGLDCPWKFCDEKVSVDESVMSTHSTARLSFVTPRHHRAAVCLCKEGRCPPVHHGCEDDPCPEGSECVSDPWEEKHTCVCPSGRFGQCPGSSSMTLTGNSYVKYRLTENENKLEMKLTMRLRTYSTHAVVMYARGTDYSILEIHHGRLQYKFDCGSGPGIVSVQSIQVNDGQWHAVALEVNGNYARLVLDQVHTASGTAPGTLKTLNLDNYVFFGGHIRQQGTRHGRSPQVGNGFRGCMDSIYLNGQELPLNSKPRSYAHIEESVDVSPGCFLTATEDCASNPCQNGGVCNPSPAGGYYCKCSALYIGTHCEISVNPCSSKPCLYGGTCVVDNGGFVCQCRGLYTGQRCQLSPYCKDEPCKNGGTCFDSLDGAVCQCDSGFRGERCQSDIDECSGNPCLHGALCENTHGSYHCNCSHEYRGRHCEDAAPNQYVSTPWNIGLAEGIGIVVFVAGIFLLVVVFVLCRKMISRKKKHQAEPKDKHLGPATAFLQRPYFDSKLNKNIYSDIPPQVPVRPISYTPSIPSDSRNNLDRNSFEGSAIPEHPEFSTFNPESVHGHRKAVAVCSVAPNLPPPPPSNSPSDSDSIQKPSWDFDYDTKVVDLDPCLSKKPLEEKPSQPYSARESLSEVQSLSSFQSESCDDNGYHWDTSDWMPSVPLPDIQEFPNYEVIDEQTPLYSADPNAIDTDYYPGGYDIESDFPPPPEDFPAADELPPLPPEFSNQFESIHPPRDMPAAGSLGSSSRNRQRFNLNQYLPNFYPLDMSEPQTKGTGENSTCREPHAPYPPGYQRHFEAPAVESMPMSVYASTASCSDVSACCEVESEVMMSDYESGDDGHFEEVTIPPLDSQQHTEV

SEQ ID NO: 15273 - protein, 485 aa, Homo sapiens
MAPRLQLEKAAWRWAETVRPEEVSQEHIETAYRIWLEPCIRGVCRRNCKGNPNCLVGIGEHIWLGEIDENSFHNIDDPNCERRKKNSFVGLTNLGATCYVNTFLQVWFLNLELRQALYLCPSTCSDYMLGDGIQEEKDYEPQTICEHLQYLFALLQNSNRRYIDPSGFVKALGLDTGQQQDAQEFSKLFMSLLEDTLSKQKNPDVRNIVQQQFCGEYAYVTVCNQCGRESKLLSKFYELELNIQGHKQLTDCISEFLKEEKLEGDNRYFCENCQSKQNATRKIRLLSLPCTLNLQLMRFVFDRQTGHKKKLNTYIGFSEILDMEPYVEHKGGSYVYELSAVLIHRGVSAYSGHYIAHVKDPQSGEWYKFNDEDIEKMEGKKLQLGIEEDLAEPSKSQTRKPKCGKGTHCSRNAYMLVYRLQTQEKPNTTVQVPAFLQELVDRDNSKFEEWCIEMAEMRKQSVDKGKAKHEEVKELYQRLPAGAGL

SEQ ID NO: 15274 - protein, 2697 aa, Homo sapiens
MNGDMPHVPITTLAGIASLTDLLNQLPLPSPLPATTTKSLLFNARIAEEVNCLLACRDDNLVSQLVHSLNQVSTDHIELKDNLGSDDPEGDIPVLLQAVLARSPNVFREKSMQNRYVQSGMMMSQYKLSQNSMHSSPASSNYQQTTISHSPSSRFVPPQTSSGNRFMPQQNSPVPSPYAPQSPAGYMPYSHPSSYTTHPQMQQASVSSPIVAGGLRNIHDNKVSGPLSGNSANHHADNPRHGSSEDYLHMVHRLSSDDGDSSTMRNAASFPLRSPQPVCSPAGSEGTPKGSRPPLILQSQSLPCSSPRDVPPDILLDSPERKQKKQKKMKLGKDEKEQSEKAAMYDIISSPSKDSTKLTLRLSRVRSSDMDQQEDMISGVENSNVSENDIPFNVQYPGQTSKTPITPQDINRPLNAAQCLSQQEQTAFLPANQVPVLQQNTSVAAKQPQTSVVQNQQQISQQGPIYDEVELDALAEIERIERESAIERERFSKEVQDKDKPLKKRKQDSYPQEAGGATGGNRPASQETGSTGNGSRPALMVSIDLHQAGRVDSQASITQDSDSIKKPEEIKQCNDAPVSVLQEDIVGSLKSTPENHPETPKKKSDPELSKSEMKQSESRLAESKPNENRLVETKSSENKLETKVETQTEELKQNESRTTECKQNESTIVEPKQNENRLSDTKPNDNKQNNGRSETTKSRPETPKQKGESRPETPKQKSDGHPETPKQKGDGRPETPKQKGESRPETPKQKNEGRPETPKHRHDNRRDSGKPSTEKKPEVSKHKQDTKSDSPRLKSERAEALKQRPDGRSVSESLRRDHDNKQKSDDRGESERHRGDQSRVRRPETLRSSSRNEHGIKSDSSKTDKLERKHRHESGDSRERPSSGEQKSRPDSPRVKQGDSNKSRSDKLGFKSPTSKDDKRTEGNKSKVDTNKAHPDNKAEFPSYLLGGRSGALKNFVIPKIKRDKDGNVTQETKKMEMKGEPKDKVEKIGLVEDLNKGAKPVVVLQKLSLDDVQKLIKDREDKSRSSLKPIKNKPSKSNKGSIDQSVLKELPPELLAEIESTMPLCERVKMNKRKRSTVNEKPKYAEISSDEDNDSDEAFESSRKRHKKDDDKAWEYEERDRRSSGDHRRSGHSHEGRRSSGGGRYRNRSPSDSDMEDYSPPPSLSEVARKMKKKEKQKKRKAYEPKLTPEEMMDSSTFKRFTASIENILDNLEDMDFTAFGDDDEIPQELLLGKHQLNELGSESAKIKAMGIMDKLSTDKTVKVLNILEKNIQDGSKLSTLLNHNNDTEEEERLWRDLIMERVTKSADACLTTINIMTSPNMPKAVYIEDVIERVIQYTKFHLQNTLYPQYDPVYRLDPHGGGLLSSKAKRAKCSTHKQRVIVMLYNKVCDIVSSLSELLEIQLLTDTTILQVSSMGITPFFVENVSELQLCAIKLVTAVFSRYEKHRQLILEEIFTSLARLPTSKRSLRNFRLNSSDMDGEPMYIQMVTALVLQLIQCVVHLPSSEKDSNAEEDSNKKIDQDVVITNSYETAMRTAQNFLSIFLKKCGSKQGEEDYRPLFENFVQDLLSTVNKPEWPAAELLLSLLGRLLVHQFSNKSTEMALRVASLDYLGTVAARLRKDAVTSKMDQGSIERILKQVSGGEDEIQQLQKALLDYLDENTETDPSLVFSRKFYIAQWFRDTTLETEKAMKSQKDEESSEGTHHAKEIETTGQIMHRAENRKKFLRSIIKTTPSQFSTLKMNSDTVDYDDACLIVRYLASMRPFAQSFDIYLTQILRVLGENAIAVRTKAMKCLSEVVAVDPSILARLDMQRGVHGRLMDNSTSVREAAVELLGRFVLCRPQLAEQYYDMLIERILDTGISVRKRVIKILRDICIEQPTFPKITEMCVKMIRRVNDEEGIKKLVNETFQKLWFTPTPHNDKEAMTRKILNITDVVAACRDTGYDWFEQLLQNLLKSEEDSSYKPVKKACTQLVDNLVEHILKYEESLADSDNKGVNSGRLVACITTLFLFSKIRPQLMVKHAMTMQPYLTTKCSTQNDFMVICNVAKILELVVPLMEHPSETFLATIEEDLMKLIIKYGMTVVQHCVSCLGAVVNKVTQNFKFVWACFNRYYGAISKLKSQHQEDPNNTSLLTNKPALLRSLFTVGALCRHFDFDLEDFKGNSKVNIKDKVLELLMYFTKHSDEEVQTKAIIGLGFAFIQHPSLMFEQEVKNLYNNILSDKNSSVNLKIQVLKNLQTYLQEEDTRMQQADRDWKKVAKQEDLKEMGDVSSGMSSSIMQLYLKQVLEAFFHTQSSVRHFALNVIALTLNQGLIHPVQCVPYLIAMGTDPEPAMRNKADQQLVEIDKKYAGFIHMKAVAGMKMSYQVQQAINTCLKDPVRGFRQDESSSALCSHLYSMIRGNRQHRRAFLISLLNLFDDTAKTDVTMLLYIADNLACFPYQTQEEPLFIMHHIDITLSVSGSNLLQSFKESMVKDKRKERKSSPSKENESSDSEEEVSRPRKSRKRVDSDSDSDSEDDINSVMKCLPENSAPLIEFANVSQGILLLLMLKQHLKNLCGFSDSKIQKYSPSESAKVYDKAINRKTGVHFHPKQTLDFLRSDMANSKITEEVKRSIVKQYLDFKLLMEHLDPDEEEEEGEVSASTNARNKAITSLLGGGSPKNNTAAETEDDESDGEDRGGGTSGVRRRRSQRISQRIT

SEQ ID NO: 15275 - protein, 573 aa, Homo sapiens
MLQPGPHPPSPQAAAPGEAWPGPSQAPWQSLEEKMGSPEDDLIGIPFPDHSSELLSCLNEQRQLGHLCDLTIRTQGLEYRTHRAVLAACSHYFKKLFTEGGGGAVMGAGGSGTATGGAGAGVCELDFVGPEALGALLEFAYTATLTTSSANMPAVLQAARLLEIPCVIAACMEILQGSGLEAPSPDEDDCERARQYLEAFATATASGVPNGEDSPPQVPLPPPPPPPPRPVARRSRKPRKAFLQTKGARANHLVPEVPTVPAHPLTYEEEEVAGRVGSSGGSGPGDSYSPPTGTASPPEGPQSYEPYEGEEEEEELVYPPAYGLAQGGGPPLSPEELGSDEDAIDPDLMAYLSSLHQDNLAPGLDSQDKLVRKRRSQMPQECPVCHKIIHGAGKLPRHMRTHTGEKPFACEVCGVRFTRNDKLKIHMRKHTGERPYSCPHCPARFLHSYDLKNHMHLHTGDRPYECHLCHKAFAKEDHLQRHLKGQNCLEVRTRRRRKDDAPPHYPPPSTAAASPAGLDLSNGHLDTFRLSLARFWEQSAPTGPPVSTPGPPDDDEEEGAPTTPQAEGAMESS

SEQ ID NO: 15276 - protein, 2302 aa, Homo sapiens
MKGESKRITLVLQQPQSGGPQGHRHVVLGSLPGKIVLQGNQLAALTQAKNAQGQPAKVVTIQLQVQQPQQKIQIVPQPPSSQPQPQQPPSTQPVTLSSVQQAQIMGPGQSPGQRLSVPVKVVLQPQAGSSQGASSGLSVVKVLSASEVAALSSPASSAPHSGGKTGMEENRRLEHQKKQEKANRIVAEAIARARARGEQNIPRVLNEDELPSVRPEEEGEKKRRKKSAGERLKEEKPKKSKTSGASKTKGKSKLNTITPVVGKKRKRNTSSDNSDVEVMPAQSPREDEESSIQKRRSNRQVKRKKYTEDLDIKITDDEEEEEVDVTGPIKPEPILPEPVQEPDGETLPSMQFFVENPSEEDAAIVDKVLSMRIVKKELPSGQYTEAEEFFVKYKNYSYLHCEWATISQLEKDKRIHQKLKRFKTKMAQMRHFFHEDEEPFNPDYVEVDRILDESHSIDKDNGEPVIYYLVKWCSLPYEDSTWELKEDVDEGKIREFKRIQSRHPELKRVNRPQASAWKKLELSHEYKNRNQLREYQLEGVNWLLFNWYNRQNCILADEMGLGKTIQSIAFLQEVYNVGIHGPFLVIAPLSTITNWEREFNTWTEMNTIVYHGSLASRQMIQQYEMYCKDSRGRLIPGAYKFDALITTFEMILSDCPELREIEWRCVIIDEAHRLKNRNCKLLDSLKHMDLEHKVLLTGTPLQNTVEELFSLLHFLEPSQFPSESEFLKDFGDLKTEEQVQKLQAILKPMMLRRLKEDVEKNLAPKQETIIEVELTNIQKKYYRAILEKNFSFLSKGAGHTNMPNLLNTMMELRKCCNHPYLINGAEEKILTEFREACHIIPHDFHLQAMVRSAGKLVLIDKLLPKLKAGGHKVLIFSQMVRCLDILEDYLIQRRYLYERIDGRVRGNLRQAAIDRFSKPDSDRFVFLLCTRAGGLGINLTAADTCIIFDSDWNPQNDLQAQARCHRIGQSKAVKVYRLITRNSYEREMFDKASLKLGLDKAVLQSMSGRDGNITGIQQFSKKEIEDLLRKGAYAAIMEEDDEGSKFCEEDIDQILLRRTTTITIESEGKGSTFAKASFVASENRTDISLDDPNFWQKWAKKADLDMDLLNSKNNLVIDTPRVRKQTRHFSTLKDDDLVEFSDLESEDDERPRSRRHDRHHAYGRTDCFRVEKHLLVYGWGRWRDILSHGRFKRRMTERDVETICRAILVYCLLHYRGDENIKGFIWDLISPAENGKTKELQNHSGLSIPVPRGRKGKKVKSQSTFDIHKADWIRKYNPDTLFQDESYKKHLKHQCNKVLLRVRMLYYLRQEVIGDQAEKVLGGAIASEIDIWFPVVDQLEVPTTWWDSEADKSLLIGVFKHGYEKYNTMRADPALCFLEKAGRPDDKAIAAEHRVLDNFSDIVEGVDFDKDCEDPEYKPLQGPPKDQDDEGDPLMMMDEEISVIDGDEAQVTQQPGHLFWPPGSALTARLRRLVTAYQRSYKREQMKIEAAERGDRRRRRCEAAFKLKEIARREKQQRWTRREQTDFYRVVSTFGVEYDPDTMQFHWDRFRTFARLDKKTDESLTKYFHGFVAMCRQVCRLPPAAGDEPPDPNLFIEPITEERASRTLYRIELLRRLREQVLCHPLLEDRLALCQPPGPELPKWWEPVRHDGELLRGAARHGVSQTDCNIMQDPDFSFLAARMNYMQNHQAGAPAPSLSRCSTPLLHQQYTSRTASPLPLRPDAPVEKSPEETATQVPSLESLTLKLEHEVVARSRPTPQDYEMRVSPSDTTPLVSRSVPPVKLEDEDDSDSELDLSKLSPSSSSSSSSSSSSSSTDESEDEKEEKLTDQSRSKLYDEESLLSLTMSQDGFPNEDGEQMTPELLLLQERQRASEWPKDRVLINRIDLVCQAVLSGKWPSSRRSQEMVTGGILGPGNHLLDSPSLTPGEYGDSPVPTPRSSSAASMAEEEASAVSTAAAQFTKLRRGMDEKEFTVQIKDEEGLKLTFQKHKLMANGVMGDGHPLFHKKKGNRKKLVELEVECMEEPNHLDVDLETRIPVINKVDGTLLVGEDAPRRAELEMWLQGHPEFAVDPRFLAYMEDRRKQKWQRCKKNNKAELNCLGMEPVQTANSRNGKKGHHTETVFNRVLPGPIAPESSKKRARRMRPDLSKMMALMQGGSTGSLSLHNTFQHSSSGLQSVSSLGHSSATSASLPFMPFVMGGAPSSPHVDSSTMLHHHHHHPHPHHHHHHHPGLRAPGYPSSPVTTASGTTLRLPPLQPEEDDDEDEEDDDDLSQGYDSSERDFSLIDDPMMPANSDSSEDADD

SEQ ID NO: 15277 - protein, 141 aa, Homo sapiens
MAAAPPSYCFVAFPPRAKDGLVVFGKNSARPRDEVQEVVYFSAADHEPESKVECTYISIDQVPRTYAIMISRPAWLWGAEMGANEHGVCIANEAINTREPAAEIEALLGMDLVRLGLERGETAKEALDVIVSLLEEHGQGG

SEQ ID NO: 15278 - protein, 833 aa, Homo sapiens
MAGALAGLAAGLQVPRVAPSPDSDSDTDSEDPSLRRSAGGLLRSQVIHSGHFMVSSPHSDSLPRRRDQEGSVGPSDFGPRSIDPTLTRLFECLSLAYSGKLVSPKWKNFKGLKLLCRDKIRLNNAIWRAWYIQYVKRRKSPVCGFVTPLQGPEADAHRKPEAVVLEGNYWKRRIEVVMREYHKWRIYYKKRLRKPSREDDLLAPKQAEGRWPPPEQWCKQLFSSVVPVLLGDPEEEPGGRQLLDLNCFLSDISDTLFTMTQSGPSPLQLPPEDAYVGNADMIQPDLTPLQPSLDDFMDISDFFTNSRLPQPPMPSNFPEPPSFSPVVDSLFSSGTLGPEVPPASSAMTHLSGHSRLQARNSCPGPLDSSAFLSSDFLLPEDPKPRLPPPPVPPPLLHYPPPAKVPGLEPCPPPPFPPMAPPTALLQEEPLFSPRFPFPTVPPAPGVSPLPAPAAFPPTPQSVPSPAPTPFPIELLPLGYSEPAFGPCFSMPRGKPPAPSPRGQKASPPTLAPATASPPTTAGSNNPCLTQLLTAAKPEQALEPPLVSSTLLRSPGSPQETVPEFPCTFLPPTPAPTPPRPPPGPATLAPSRPLLVPKAERLSPPAPSGSERRLSGDLSSMPGPGTLSVRVSPPQPILSRGRPDSNKTENRRITHISAEQKRRFNIKLGFDTLHGLVSTLSAQPSLKERAGLQEEAQQLRDEIEELNAAINLCQQQLPATGVPITHQRFDQMRDMFDDYVRTRTLHNWKFWVFSILIRPLFESFNGMVSTASVHTLRQTSLAWLDQYCSLPALRPTVLNSLRQLGTSTSILTDPGRIPEQATRAVTEGTLGKPL

SEQ ID NO: 15279 - protein, 192 aa, Homo sapiens
MKMHSTESLLKKIERETWRESGVSLIATVTRLMERLLDYRDCMKMGEVDGKKIGCTVSLLNFYKTELNKEEMYIRYIHKLYDLHLKAQNFTEAAYTLLLYDELLEWSDRPLREFLTYPMQTEWQRKEHLHLTIIQNFDRGKCWENGIILCRKIAEQYESYYDYRNLSKMRMMEASLYDKIMDQQRLEPEFFR

SEQ ID NO: 15280 - protein, 941 aa, Homo sapiens
MVFLPLKWSLATMSFLLSSLLALLTVSTPSWCQSTEASPKRSDGTPFPWNKIRLPEYVIPVHYDLLIHANLTTLTFWGTTKVEITASQPTSTIILHSHHLQISRATLRKGAGERLSEEPLQVLEHPRQEQIALLAPEPLLVGLPYTVVIHYAGNLSETFHGFYKSTYRTKEGELRILASTQFEPTAARMAFPCFDEPAFKASFSIKIRREPRHLAISNMPLVKSVTVAEGLIEDHFDVTVKMSTYLVAFIISDFESVSKITKSGVKVSVYAVPDKINQADYALDAAVTLLEFYEDYFSIPYPLPKQDLAAIPDFQSGAMENWGLTTYRESALLFDAEKSSASSKLGITMTVAHELAHQWFGNLVTMEWWNDLWLNEGFAKFMEFVSVSVTHPELKVGDYFFGKCFDAMEVDALNSSHPVSTPVENPAQIREMFDDVSYDKGACILNMLREYLSADAFKSGIVQYLQKHSYKNTKNEDLWDSMASICPTDGVKGMDGFCSRSQHSSSSSHWHQEGVDVKTMMNTWTLQKGFPLITITVRGRNVHMKQEHYMKGSDGAPDTGYLWHVPLTFITSKSDMVHRFLLKTKTDVLILPEEVEWIKFNVGMNGYYIVHYEDDGWDSLTGLLKGTHTAVSSNDRASLINNAFQLVSIGKLSIEKALDLSLYLKHETEIMPVFQGLNELIPMYKLMEKRDMNEVETQFKAFLIRLLRDLIDKQTWTDEGSVSERMLRSQLLLLACVHNYQPCVQRAEGYFRKWKESNGNLSLPVDVTLAVFAVGAQSTEGWDFLYSKYQFSLSSTEKSQIEFALCRTQNKEKLQWLLDESFKGDKIKTQEFPQILTLIGRNPVGYPLAWQFLRKNWNKLVQKFELGSSSIAHMVMGTTNQFSTRTRLEEVKGFFSSLKENGSQLRCVQQTIETIEENIGWMDKNFDKIRVWLQSEKLERM

SEQ ID NO: 15281 - protein, 577 aa, Homo sapiens
MLRRGHLAFRDVAIEFPQEEWKCLDPAQRTLYREVMVENYRNLVFLGICLPDLSVISMLEQRRDPRNLQSEVKIANNPGGRECIKGVNAESSSKLGSNAGNKSLKNQLGLTFQLHLSELQLFQAERNISGCKHVEKPINNSLVSPLQKIYSSVKSHILNKYRNDFDDSPFLPQEQKAQIREKPCECNEHGKAFRVSSRLANNQVIHTADNPYKCNECDKVFSNSSNLVQHQRIHTGEKPYKCHECGKLFNRISLLARHQRIHTGEKPYKCHECGKVFTQNSHLANHHRIHTGEKPYKCNECGKVFNRNAHLARHQKIHSGEKPYKCKECGKAFSGGSGLTAHLVIHTGEKLYKCNKCGKVFNRNAHLTRHQRIHTGEKPYECKECGKVFRHKFCLTNHHRMHTGEQPYKCNECGKAFRDCSGLTAHLLIHTGEKPYKCKECAKVFRHRLSLSNHQRFHTGEKPYRCDECGKDFTRNSNLANHHRIHTGEKPYKCSECHKVFSHNSHLARHRQIHTGEKSYKCNECGKVFSHKLYLKKHERIHTGEKPYRCHECGKDFTRNSNLANHHRIHTGEKPYR

SEQ ID NO: 15282 - protein, 149 aa, Homo sapiens
VLCGYVSEFEGLQNKINYGHLFKEHLDIAIKLLPEEPFLYYLKGRYCYTVSKLSWIEKKMAATLFGKIPSSTVQEALHNFLKAEELCPGYSNPNYMYLAKCYTDLEENQNALKFCNLALLLPTVTKEDKEAQKEMQKIMTSLKRLRKTK

SEQ ID NO: 15283 - protein, 228 aa, Homo sapiens
MFSEELWLENEKKCAVVRKSKQGRKRQELLAVAFGVKVGVKGGFLWPPLKLFACSQISSLVRRAALTHNDNHFNYEKTHNFKVHTFRGPHWCEYCANFMWGLIAQGVRCSGLKSEGLYRVSGFTEHIEDVKMAFDREISNADERLEAVHEVLMLLPPAHYETLRYLMIHLKKVTMNEKDNFMNAENLGIVFGPTLMRPPEDSTLTTLHDMRYQKLIVQILIENEDVLF

SEQ ID NO: 15284 - protein, 559 aa, Homo sapiens
TVRIWDFGSGQEMKVLPEGKDWKEDEHCLRRLIFLKAQEKHQQLVLALERNGTIKMIQGKEDDIYLMVIWELPDVVPFLQDGKHAVHLRMSTRDRNMAIPFPDVELIVERNFSQPTDNPTMDLLRVNCIDLLQVEGYNLIAAGTLNGVIILWNFVTSTVKKVYRPEDCFTVNPDLHPKHFKINDILFLFRTPECARRSSQDSICSSSQCESSKGPQSSKGSKQSIHDSEVKGEQTDVMVGKQQPMDKKHPGIANLPEAQPPILVTAHEDGHLRLWTLEGRLLKDMLPFTKHSAISLTSLYTDSCTRILLAGNVEGHVILCNISSFLDPPHDEKKFKQLLSWRAHSLEIIQVIYVEEKQVVLTASIDGSVRLWHALNGHYCGYFGQRRLFELSQTRDFILPCDVTEYPIEIKEESKFTEKQKYEYPLIFDREKWRKMSSVSLLFKRTPPKAFEVEQDFKFFKSLSSPKIRRYPLEGFVTENREAGIVFGSLPIYSISSPTSLRFLPLIGVEAQKDSSDGITGKKKGGHVQREKAPRRRSLKKNLVPQINLASSFFPAIPK

SEQ ID NO: 15285 - protein, 674 aa, Homo sapiens
KAEGPGSQLQKLLPSFLVREQDWDQHLDKLHMLQQKRILESPLLRASKENDLSVLRQLLLDCTCDVRQRGALGETALHIAALYDNLEAALVLMEAAPELVFEPTTCEAFAGQTALHIAVVNQNVNLVRALLTRRASVSARATGTAFRHSPRNLIYFGEHPLSFAACVNSEEIVRLLIEHGADIRAQDSLGNTVLHILILQPNKTFACQMYNLLLSYDGHGDHLQPLDLVPNHQGLTPFKLAGVEGNTVARQILEQTPVKELVSFKWNKYGRPYFCILAALYLLYMICFTTCCVYRPLKFRGGNRTHSRDITILQQKLLQEAYETREDIIRLVGELVSIVGAVIILLLEIPDIFRVGASRYFGKTILGGPFHVIIITYASLVLVTMVMRLTNTNGEVVPMSFALVLGWCSVMYFTRGFQMLGPFTIMIQKMIFGDLMRFCWLMAVVILGFASAFYIIFQTEDPTSLGQFYDYPMALFTTFELFLTVIDAPANYDVDLPFMFSIVNFAFTIIATLLMLNLFIAMMGDTHWRVAQERDELWRAQVVATTVMLERKLPRCLWPRSGICGCEFGLGDRWFLRVENHNDQNPLRVLRYVEVFKNSDKEDDQEHPSEKQPSGAESGTLARASLALPTSSLSRTASQSSSHRGWEILRQNTLGHLNLGLNLSEGDGEEVYHF

SEQ ID NO: 15286 - protein, 1338 aa, Homo sapiens
MGAGGRRMRGAPARLLLPLLPWLLLLLAPEARGAPGCPLSIRSCKCSGERPKGLSGGVPGPARRRVVCSGGDLPEPPEPGLLPNGTVTLLLSNNKITGLRNGSFLGLSLLEKLDLRNNIISTVQPGAFLGLGELKRLDLSNNRIGCLTSETFQGLPRLLRLNISGNIFSSLQPGVFDELPALKVVDLGTEFLTCDCHLRWLLPWAQNRSLQLSEHTLCAYPSALHAQALGSLQEAQLCCEGALELHTHHLIPSLRQVVFQGDRLPFQCSASYLGNDTRIRWYHNRAPVEGDEQAGILLAESLIHDCTFITSELTLSHIGVWASGEWECTVSMAQGNASKKVEIVVLETSASYCPAERVANNRGDFRWPRTLAGITAYQSCLQYPFTSVPLGGGAPGTRASRRCDRAGRWEPGDYSHCLYTNDITRVLYTFVLMPINASNALTLAHQLRVYTAEAASFSDMMDVVYVAQMIQKFLGYVDQIKELVEVMVDMASNLMLVDEHLLWLAQREDKACSRIVGALERIGGAALSPHAQHISVNARNVALEAYLIKPHSYVGLTCTAFQRREGGVPGTRPGSPGQNPPPEPEPPADQQLRFRCTTGRPNVSLSSFHIKNSVALASIQLPPSLFSSLPAALAPPVPPDCTLQLLVFRNGRLFHSHSNTSRPGAAGPGKRRGVATPVIFAGTSGCGVGNLTEPVAVSLRHWAEGAEPVAAWWSQEGPGEAGGWTSEGCQLRSSQPNVSALHCQHLGNVAVLMELSAFPREVGGAGAGLHPVVYPCTALLLLCLFATIITYILNHSSIRVSRKGWHMLLNLCFHIAMTSAVFAGGITLTNYQMVCQAVGITLHYSSLSTLLWMGVKARVLHKELTWRAPPPQEGDPALPTPSPMLRFYLIAGGIPLIICGITAAVNIHNYRDHSPYCWLVWRPSLGAFYIPVALILLITWIYFLCAGLRLRGPLAQNPKAGNSRASLEAGEELRGSTRLRGSGPLLSDSGSLLATGSARVGTPGPPEDGDSLYSPGVQLGALVTTHFLYLAMWACGALAVSQRWLPRVVCSCLYGVAASALGLFVFTHHCARRRDVRASWRACCPPASPAAPHAPPRALPAAAEDGSPVFGEGPPSLKSSPSGSSGHPLALGPCKLTNLQLAQSQVCEAGAAAGGEGEPEPAGTRGNLAHRHPNNVHHGRRAHKSRAKGHRAGEACGKNRLKALRGGAAGALELLSSESGSLHNSPTDSYLGSSRNSPGAGLQLEGEPMLTPSEGSDTSAAPLSEAGRAGQRRSASRDSLKGGGALEKESHRRSYPLNAASLNGAPKGGKYDDVTLMGAEVASGGCMKTGLWKSETTV

SEQ ID NO: 15287 - protein, 318 aa, Homo sapiens
MRGAGESGKSTIVKQMKIIHEDGYSEEECRQYRAVVYSNTIQSIMAIVKAMGNLQIDFADPSRADDARQLFALSCTAEEQGVLPDDLSGVIRRLWADHGVQACFGRSREYQLNDSAAYYLNDLERIAQSDYIPTQQDVLRTRVKTTGIVETHFTFKDLHFKMFDVGGQRSERKKWIHCFEGVTAIIFCVALSAYDLVLAEDEEMNRMHESMKLFDSICNNKWFTDTSIILFLNKKDLFEEKITHSPLTICFPEYTGANKYDEAASYIQSKFEDLNKRKDTKEIYTHFTCATDTKNVQFVFDAVTDVIIKNNLKDCGLF

SEQ ID NO: 15288 - protein, 231 aa, Homo sapiens
RPCCIGTKGRCEITSREYCDFMRGYFHEEATLCSQVHCMDDVCGLLPFLNPEMTVLRDLEKLAGWHRIAIIYLLSGVTGNLASAIFLPYRAEVGPAGSQFGILACLFVELFQSWQILARPWRAFFKLLAVVLFLFTFGLLPWIDNFAHISGFISGLFLSFAFLPYISFGKFDLYRKRCQIIIFQVVFLGLLAGLVVLFYVYPVRCEWCEFLTCIPFTDKFCEKYELDAQLH

SEQ ID NO: 15289 - protein, 400 aa, Homo sapiens
MRRLTRRLVLPVFGVLWITVLLFFWVTKRKLEVPTGPEVQTPKPSDADWDDLWDQFDERRYLNAKKWRVGDDPYKLYAFNQRESERISSNRAIPDTRHLSVLNRTPTHLIREIILVDDFSNDPDDCKQLIKLPKVKCLRNNERQGLVRSRIRGADIAQGTTLTFLDSHCEVNRDWLQPLLHRVKEDYTRVVCPVIDIINLDTFTYIESASELRGGFDWSLHFQWEQLSPEQKARRLDPTEPIRTPIIAGGLFVIDKAWFDYLGKYDMDMDIWGGENFEISFRVWMCGGSLEIVPCSRVGHVFRKKHPYVFPDGNANTYIKNTKRTAEVWMDEYKQYYYAARPFALERPFGNVESRLDLRKNLRCQSFKWYLENIYPELSIPKESSIQKGNIRQRQKCLES

SEQ ID NO: 15290 - protein, 198 aa, Homo sapiens
MTVSVTGEPPSTVEEEGIPKETDIEIIPEIPETLEPLSLPDVLRISAVLEDTTDQLSILNYIMPVQYEGRQSICVKSREMNLEGTNLDKLPMASTITKIPSPLITEEGPNLPEIRHRGRFAVEFNKMQDLVFKKPTRQTIMTTETLKKIQIDRQFFSDVIADTIKELQDSATYNSLLQALSKERENKMHFYDIIAREE

SEQ ID NO: 15291 - protein, 352 aa, Homo sapiens
MARHGLPLLPLLSLLVGAWLKLGNGQATSMVQLQGGRFLMGTNSPDSRDGDGPVREATVKPFAIDIFPVTNKDFRDFVREKKYRTEAEMFGWSFVFEDFVSDELRNKATQPMKSVLWWLPVEKAFWRQPAGPGSGIRERLEHPVLHVSWNDARAYCAWRGKRLPTEEEWEFAARGGLKGQVYPWGNWFQPNRTNLWQGKFPKGDKAEDGFHGVSPVNAFPAQNNYGLYDLLGNVWEWTASPYQAAEQDMRVLRGASWIDTADGSANHRARVTTRVLLCCPGWSAVAQSQLTTASNCQALAILPPQLLKYLGLQDGQHSRFSLRQPRFPLCCRRRPAARGAVSSRVVTRRKAF

SEQ ID NO: 15292 - protein, 1242 aa, Homo sapiens
MLQQVPENINFPAEEEKILEFWTEFNCFQECLKQSKHKPKFTFYDGPPFATGLPHYGHILAGTIKDIVTRYAHQSGFHVDRRFGWDCHGLPVEYEIDKTLGIRGPEDVAKMGITEYNNQCRAIVMRYSAEWKSTVSRLGRWIDFDNDYKTLYPQFMESVWWVFKQLYDKGLVYRGVKVMPFSTACNTPLSNFESHQNYKDVQDPSVFVTFPLEEDETVSLVAWTTTPWTLPSNLAVCVNPEMQYVKIKDVARGRLLILMEARLSALYKLESDYEILERFPGAYLKGKKYRPLFDYFLKCKENGAFTVLVDNYVKEEEGTGVVHQAPYFGAEDYRVCMDFNIIRKDSLPVCPVDASGCFTTEVTDFAGQYVKDADKSIIRTLKEQGRLLVATTFTHSYPFCWRSDTPLIYKAVPSWFVRVENMVDQLLRNNDLCYWVPELVREKRFGNWLKDARDWTISRNRYWGTPIPLWVSDDFEEVVCIGSVAELEELSGAKISDLHRESVDHLTIPSRCGKGSLHRISEVFDCWFESGSMPYAQVHYPFENKREFEDAFPADFIAEGIDQTRGWFYTLLVLATALFGQPPFKNVIVNGLVLASDGQKMSKRKKNYPDPVSIIQKYGADALRLYLINSPVVRAENLRFKEEGVRDVLKDVLLPWYNAYRFLIQNVLRLQKEEEIEFLYNENTVRESPNITDRWILSFMQSLIGFFETEMAAYRLYTVVPRLVKFVDILTNWYVRMNRRRLKGENGMEDCVMALETLFSVLLSLCRLMAPYTPFLTELMYQNLKVLIDPVSVQDKDTLSIHYLMLPRVREELIDKKTESAVSQMQSVIELGRVIRDRKTIPIKYPLKEIVVIHQDPEALKDIKSLEKYIIEELNVRKVTLSTDKNKYGIRLRAEPDHMVLGKRLKGAFKAVMTSIKQLSSEELEQFQKTGTIVVEGHELHDEDIRLMYTFDQATGGTAQFEAHSDAQALVLLDVTPDQSMVDEGMAREVINRIQKLRKKCNLVPTDEITVYYKAKSEGTYLNSVIESHTEFIFTTIKAPLKPYPVSPSDKVLIQEKTQLKGSELEITLTRGSSLPGPACAYVNLNICANGSEQGGVLLLENPKGDNRLDLLKLKSVVTSIFGVKNTELAVFHDETEIQNQTDLLSLSGKTLCVTAGSAPSLINSSSTLLCQYINLQLLNAKPQECLMGTVGTLLLENPLGQNGLTHQGLLYEAAKVFGLRSRKLKLFLNETQTQEITEDIP

SEQ ID NO: 15293 - protein, 505 aa, Homo sapiens
MAQSVLVPPGPDSFRFFTRESLAAIEQRIAEEKAKRPKQERKDEDDENGPKPNSDLEAGKSLPFIYGDIPPEMVSVPLEDLDPYYINKKTFIVLNKGKAISRFSATPALYILTPFNPIRKLAIKILVHSLFNMLIMCTILTNCVFMTMSNPPDWTKNVEYTFTGIYTFESLIKILARGFCLEDFTFLRDPWNWLDFTVITFAYVTEFVDLGNVSALRTFRVLRALKTISVIPGLKTIVGALIQSVKKLSDVMILTVFCLSVFALIGLQLFMGNLRNKCLQWPPDNSSFEINITSFFNNSLDGNGTTFNRTVSIFNWDEYIEDKSHFYFLEGQNDALLCGNSSDAGQCPEGYICVKAGRNPNYGYTSFDTFSWAFLSLFRLMTQDFWENLYQLTLRAAGKTYMIFFVLVIFLGSFYLINLILAVVAMAYEEQNQATLEEAEQKEAEFQQMLEQLKKQQEEAQAAAAAASAESRDFSGAGGIGVFSESSSVASKLSSKSEKELKNRR

SEQ ID NO: 15294 - protein, 494 aa, Homo sapiens
MAAAAECDVVMAATEPELLDDQEAKREAETFKEQGNAYYAKKDYNEAYNYYTKAIDMCPKNASYYGNRAATLMMLGRFREALGDAQQSVRLDDSFVRGHLREGKCHLSLGNAMAACRSFQRALELDHKNAQAQQEFKNANAVMEYEKIAETDFEKRDFRKVVFCMDRALEFAPACHRFKILKAECLAMLGRYPEAQSVASDILRMDSTNADALYVRGLCLYYEDCIEKAVQFFVQALRMAPDHEKACIACRNAKALKAKKEDGNKAFKEGNYKLAYELYTEALGIDPNNIKTNAKLYCNRGTVNSKLRKLDDAIEDCTNAVKLDDTYIKAYLRRAQCYMDTEQYEEAVRDYEKVYQTEKTKEHKQLLKNAQLELKKSKRKDYYKILGVDKNASEDEIKKAYRKRALMHHPDRHSGASAEVQKEEEKKFKEVGEAFTILSDPKKKTRYDSGQDLDEEGMNMGDFDPNNIFKAFFGGPGGFSFEASGPGNFFFQFG

SEQ ID NO: 15295 - protein, 101 aa, Homo sapiens
MAGPGSTGGQIGAAALAGGARSKVAPSVDFDHSCSDSVEYLTLNFGPFETVHRWRRLPPCDEFVGARYGAASTQWWPIKMPFMYLVETMGRPCSMTSCGSM

SEQ ID NO: 15296 - protein, 849 aa, Homo sapiens
MKMHSTERIPLFGPYPSLLKKIERETWRESGVSLIATVTRLMERLLDYRDCMKMGEVDGKKIGCTVSLLNFYKTELNKEEMYIRYIHKLYDLHLKAQNFTEAAYTLLLYDELLEWSDRPLREFLTYPMQTEWQRKEHLHLTIIQNFDRGKCWENGIILCRKIAEQYESYYDYRNLSKMRMMEASLYDKIMDQQRLEPEFFRVGFYGKKFPFFLRNKEFVCRGHDYERLEAFQQRMLNEFPHAIAMQHANQPDETIFQAEAQYLQIYAVTPIPESQEVLQREGVPDNIKSFYKVNHIWKFRYDRPFHKGTKDKENEFKSLWVERTSLYLVQSLPGISRWFEVEKREVVEMSPLENAIEVLENKNQQLKTLISQCQTRQMQNINPLTMCLNGVIDAAVNGGVSRYQEAFFVKEYILSHPEDGEKIARLRELMLEQAQILEFGLAVHEKFVPQDMRPLHKKLVDQFFVMKSSLGIQEFSACMQASPVHFPNGSPRVCRNSAPASVSPDGTRVIPRRSPLSYPAVNRYSSSSLSSQASAEVSNITGQSESSDEVFNMQPSPSTSSLSSTHSASPNVTSSAPSSARASPLLSDKHKHSRENSCLSPRERPCSAIYPTPVEPSQRMLFNHIGDGALPRSDPNLSAPEKAVNPTPSSWSLDSGKEAKNMSDSGKLISPPVPPRPTQTASPARHTTSVSPSPAGRSPLKGSVQSFTPSPVEYHSPGLISNSPVLSGSYSSGISSLSRCSTSETSGFENQVNEQSAPLPVPVPVPVPSYGGEEPVRKESKTPPPYSVYERTLRRPVPLPHSLSIPVTSEPPALPPKPLAARSSHLENGARRTDPGPRPRPLPRKVSQL

SEQ ID NO: 15297 - protein, 242 aa, Homo sapiens
AEGPSPPARWHRRLPGLWAAALLLLGLPRLSVRADGKFFVLESQNGSQGLQLEAARLSCKSRGAHLASADELRRVVQDCSFAVCTTGWLADGTLGTTVCSKGSGEQQIMRAVDVRIESNPVPGGTYSALCIKDEDEAEAHIDYEDNFPDDRSVSFRELMEDSRTEADEDRGQGDSSEEAPKQDRLVSISVGRENIARDKVFVPTTGLPGAGSSVPADSPGSRLLQKHLFWFPAEAFHKPGLE

SEQ ID NO: 15298 - protein, 591 aa, Homo sapiens
MTLTLSVLICLGLSVGPRTCVQAGTLPKPTLWAEPASVIARGKPVTLWCQGPLETEEYRLDKEGLPWARKRQNPLEPGAKAKFHIPSTVYDSAGRYRCYYETPAGWSEPSDPLELVATGFYAEPTLLALPSPVVASGGNVTLQCDTLDGLLTFVLVEEEQKLPRTLYSQKLPKGPSQALFPVGPVTPSCRWRFRCYYYYRKNPQVWSNPSDLLEILVPGVSRKPSLLIPQGSVVARGGSLTLQCRSDVGYDIFVLYKEGEHDLVQGSGQQPQAGLSQANFTLGPVSRSHGGQYRCYGAHNLSPRWSAPSDPLDILIAGLIPDIPALSVQPGPKVASGENVTLLCQSWHQIDTFFLTKEGAAHPPLCLKSKYQSYRHQAEFSMSPVTSAQGGTYRCYSAIRSYPYLLSSPSYPQELVVSGPSGDPSLSPTGSTPTPAGPEDQPLTPTGLDPQSGLGRHLGVVTGVSVAFVLLLFLLLFLLLRHRHQSKHRTSAHFYRPAGAAGPEPKDQGLQKRASPVADIQEEILNAAVKDTQPKDGVEMDAPAAASEAPQDVTYAQLHSLTLRREATEPPPSQEREPPAEPSIYAPLAIH

SEQ ID NO: 15299 - protein, 1657 aa, Homo sapiens
MGLQARRWASGSRGAAGPRRGVLQLLPLPLPLPLLLLLLLRPGAGRAAAQGEAEAPTLYLWKTGPWGRCMGDECGPGGIQTRAVWCAHVEGWTTLHTNCKQAERPNNQQNCFKVCDWHKELYDWRLGPWNQCQPVISKSLEKPLECIKGEEGIQVREIACIQKDKDIPAEDIICEYFEPKPLLEQACLIPCQQDCIVSEFSAWSECSKTCGSGLQHRTRHVVAPPQFGGSGCPNLTEFQVCQSSPCEAEELRYSLHVGPWSTCSMPHSRQVRQARRRGKNKEREKDRSKGVKDPEARELIKKKRNRNRQNRQENKYWDIQIGYQTREVMCINKTGKAADLSFCQQEKLPMTFQSCVITKECQVSEWSEWSPCSKTCHDMVSPAGTRVRTRTIRQFPIGSEKECPEFEEKEPCLSQGDGVVPCATYGWRTTEWTECRVDPLLSQQDKRRGNQTALCGGGIQTREVYCVQANENLLSQLSTHKNKEASKPMDLKLCTGPIPNTTQLCHIPCPTECEVSPWSAWGPCTYENCNDQQGKKGFKLRKRRITNEPTGGSGVTGNCPHLLEAIPCEEPACYDWKAVRLGNCEPDNGKECGPGTQVQEVVCINSDGEEVDRQLCRDAIFPIPVACDAPCPKDCVLSTWSTWSSCSHTCSGKTTEGKQIRARSILAYAGEEGGIRCPNSSALQEVRSCNEHPCTVYHWQTGPWGQCIEDTSVSSFNTTTTWNGEASCSVGMQTRKVICVRVNVGQVGPKKCPESLRPETVRPCLLPCKKDCIVTPYSDWTSCPSSCKEGDSSIRKQSRHRVIIQLPANGGRDCTDPLYEEKACEAPQACQSYRWKTHKWRRCQLVPWSVQQDSPGAQEGCGPGRQARAITCRKQDGGQAGIHECLQYAGPVPALTQACQIPCQDDCQLTSWSKFSSCNGDCGAVRTRKRTLVGKSKKKEKCKNSHLYPLIETQYCPCDKYNAQPVGNWSDCILPEGKVEVLLGMKVQGDIKECGQGYRYQAMACYDQNGRLVETSRCNSHGYIEEACIIPCPSDCKLSEWSNWSRCSKSCGSGVKVRSKWLREKPYNGGRPCPKLDHVNQAQVYEVVPCHSDCNQYLWVTEPWSICKVTFVNMRENCGEGVQTRKVRCMQNTADGPSEHVEDYLCDPEEMPLGSRVCKLPCPEDCVISEWGPWTQCVLPCNQSSFRQRSADPIRQPADEGRSCPNAVEKEPCNLNKNCYHYDYNVTDWSTCQLSEKAVCGNGIKTRMLDCVRSDGKSVDLKYCEALGLEKNWQMNTSCMVECPVNCQLSDWSPWSECSQTCGLTGKMIRRRTVTQPFQGDGRPCPSLMDQSKPCPVKPCYRWQYGQWSPCQVQEAQCGEGTRTRNISCVVSDGSADDFSKVVDEEFCADIELIIDGNKNMVLEESCSQPCPGDCYLKDWSSWSLCQLTCVNGEDLGFGGIQVRSRPVIIQELENQHLCPEQMLETKSCYDGQCYEYKWMASAWKGSSRTVWCQRSDGINVTGGCLVMSQPDADRSCNPPCSQPHSYCSETKTCHCEEGYTEVMSSNSTLEQCTLIPVVVLPTMEDKRGDVKTSRAVHPTQPSSNPAGRGRTWFLQPFGPDGRLKTWVYGVAAGAFVLLIFIVSMIYLACKKPKKPQRRQNNRLKPLTLAYDGDADM

SEQ ID NO: 15300 - protein, 161 aa, Homo sapiens
MDSFDLALLQEWDLESLCVYEPDRNALRRKERERRNQETQQDDGTFNSSYSLFSEPYKTNKGDELSNRIQNTLGNYDEMKDFLTDRSNQSHLVGVPKPGVPQTPVNKIDEHFVADSRAQNQPSSICSTTTSTPAAVPVQQSKRGTMGWQKAGHPPSDGQQR

SEQ ID NO: 15301 - protein, 1312 aa, Homo sapiens
MGDPAPARSLDDIDLSALRDPAGIFELVEVVGNGTYGQVYKGRHVKTGQLAAIKVMDVTEDEEEEIKQEINMLKKYSHHRNIATYYGAFIKKSPPGNDDQLWLVMEFCGAGSVTDLVKNTKGNALKEDCIAYICREILRGLAHLHAHKVIHRDIKGQNVLLTENAEVKLVDFGVSAQLDRTVGRRNTFIGTPYWMAPEVIACDENPDATYDYRSDIWSLGITAIEMAEGAPPLCDMHPMRALFLIPRNPPPRLKSKKWSKKFIDFIDTCLIKTYLSRPPTEQLLKFPFIRDQPTERQVRIQLKDHIDRSRKKRGEKEETEYEYSGSEEEDDSHGEEGEPSSIMNVPGESTLRREFLRLQQENKSNSEALKQQQQLQQQQQRDPEAHIKHLLHQRQRRIEEQKEERRRVEEQQRREREQRKLQEKEQQRRLEDMQALRREEERRQAEREQEYKRKQLEEQRQSERLQRQLQQEHAYLKSLQQQQQQQQLQKQQQQQLLPGDRKPLYHYGRGMNPADKPAWAREVEERTRMNKQQNSPLAKSKPGSTGPEPPIPQASPGPPGPLSQTPPMQRPVEPQEGPHKSLQDQPTRNLAAFPASHDPDPAIPAPTATPSARGAVIRQNSDPTSEGPGPSPNPPAWVRPDNEAPPKVPQRTSSIATALNTSGAGGSRPAQAVRARPRSNSAWQIYLQRRAERGTPKPPGPPAQPPGPPNASSNPDLRRSDPGWERSDSVLPASHGHLPQAGSLERNRVGVSSKPDSSPVLSPGNKAKPDDHRSRPGRPADFVLLKERTLDEAPRPPKKAMDYSSSSEEVESSEDDEEEGEGGPAEGSRDTPGGRSDGDTDSVSTMVVHDVEEITGTQPPYGGGTMVVQRTPEEERNLLHADSNGYTNLPDVVQPSHSPTENSKGQSPPSKDGSGDYQSRGLVKAPGKSSFTMFVDLGIYQPGGSGDSIPITALVGGEGTRLDQLQYDVRKGSVVNVNPTNTRAHSETPEIRKYKKRFNSEILCAALWGVNLLVGTENGLMLLDRSGQGKVYGLIGRRRFQQMDVLEGLNLLITISGKRNKLRVYYLSWLRNKILHNDPEVEKKQGWTTVGDMEGCGHYRVVKYERIKFLVIALKSSVEVYAWAPKPYHKFMAFKSFADLPHRPLLVDLTVEEGQRLKVIYGSSAGFHAVDVDSGNSYDIYIPVHIQSQITPHAIIFLPNTDGMEMLLCYEDEGVYVNTYGRIIKDVVLQWGEMPTSVAYICSNQIMGWGEKAIEIRSVETGHLDGVFMHKRAQRLKFLCERNDKVFFASVRSGGSSQVYFMTLNRNCIMNW

SEQ ID NO: 15302 - protein, 932 aa, Homo sapiens
MKQLPAATVRLLSSSQIITSVVSVVKELIENSLDAGATSVDVKLENYGFDKIEVRDNGEGIKAVDAPVMAMKYYTSKINSHEDLENLTTYGFRGEALGSICCIAEVLITTRTAADNFSTQYVLDGSGHILSQKPSHLGQGTTVTALRLFKNLPVRKQFYSTAKKCKDEIKKIQDLLMSFGILKPDLRIVFVHNKAVIWQKSRVSDHKMALMSVLGTAVMNNMESFQYHSEESQIYLSGFLPKCDADHSFTSLSTPERSFIFINSRPVHQKDILKLIRHHYNLKCLKESTRLYPVFFLKIDVPTADVDVNLTPDKSQVLLQNKESVLIALENLMTTCYGPLPSTNSYENNKTDVSAADIVLSKTAETDVLFNKVESSGKNYSNVDTSVIPFQNDMHNDESGKNTDDCLNHQISIGDFGYGHCSSEISNIDKNTKNAFQDISMSNVSWENSQTEYSKTCFISSVKHTQSENGNKDHIDESGENEEEAGLENSSEISADEWSRGNILKNSVGENIEPVKILVPEKSLPCKVSNNNYPIPEQMNLNEDSCNKKSNVIDNKSGKVTAYDLLSNRVIKKPMSASALFVQDHRPQFLIENPKTSLEDATLQIEELWKTLSEEEKLKYEEKATKDLERYNSQMKRAIEQESQMSLKDGRKKIKPTSAWNLAQKHKLKTSLSNQPKLDELLQSQIEKRRSQNIKMVQIPFSMKNLKINFKKQNKVDLEEKDEPCLIHNLRFPDAWLMTSKTEVMLLNPYRVEEALLFKRLLENHKLPAEPLEKPIMLTESLFNGSHYLDVLYKMTADDQRYSGSTYLSDPRLTANGFKIKLIPGVSITENYLEIEGMANCLPFYGVADLKEILNAILNRNAKEVYECRPRKVISYLEGEAVRLSRQLPMYLSKEDIQDIIYRMKHQFGNEIKECVHGRPFFHHLTYLPETT

SEQ ID NO: 15303 - protein, 664 aa, Homo sapiens
MGDDGSPPAKKMITDIHANGKTINKVPTVKKEHLDDYGEAPVETDGEHVKRTCTSVPETLHLNPSLKHTLAQFHLSSQSSLGGPAAFSARHSQESMSPTVFLPLPSPQVLPGPLLIPSDSSTELTQTVLEGESISCFQVGGEKRLCLPQVLNSVLREFTLQQINTVCDELYIYCSRCTSDQLHILKVLGILPFNAPSCGLITLTDAQRLCNALLRPRTFPQNGSVLPAKSSLAQLKETGSAFEVEHECLGKCQGLFAPQFYVQPDAPCIQCLECCGMFAPQTFVMHSHRSPDKRTCHWGFESAKWHCYLHVNQKYLGTPEEKKLKIILEEMKEKFSMRSGKRNQSKTDAPSGMELQSWYPVIKQEGDHVSQTHSFLHPSYYLYMCDKVVAPNVSLTSAVSQSKELTKTEASKSISRQSEKAHSSGKLQKTVSYPDVSLEEQEKMDLKTSRELCSRLDASISNNSTSKRKSESATCNLVRDINKVGIGLVAAASSPLLVKDVICEDDKGKIMEEVMRTYLKQQEKLNLILQKKQQLQMEVKMLSSSKSMKELTEEQQNLQKELESLQNEHAQRMEEFYVEQKDLEKKLEQIMKQKCTCDSNLEKDKEAEYAGQLAELRQRLDHAEADRQELQDELRQEREARQKLEMMIKELKLQILKSSKTAKE

SEQ ID NO: 15304 - protein, 339 aa, Homo sapiens
MYSTTYEERNITGTRVKVPVGQEVEGMNILGLVVFAIVFGVALRKLGPEGELLIRFFNSFNEATMVLVSWIMWYAPVGIMFLVAGKIVEMEDVGLLFARLGKYILCCLLGHAIHGLLVLPLIYFLFTRKNPYRFLWGIVTPLATAFGTSSSSATLPLMMKCVEENNGVAKHISRFILPIGATVNMDGAALFQCVAAVFIAQLSQQSLDFVKIITILVTATASSVGAAGIPAGGVLTLAIILEAVNLPVDHISLILAVDWLVDRSCTVLNVEGDALGAGLLQNYVDRTESRSTEPELIQVKSELPLDPLPVPTEEGNPLLKHYRGPAGDATVASEKESVM

SEQ ID NO: 15305 - protein, 697 aa, Homo sapiens
MDYRGGDGTSMDYRGREAPHMNYRDRDAHAVDFRGRDAPPSDFRGRGTYDLDFRGRDGSHADFRGRDLSDLDFRAREQSRSDFRNRDVSDLDFRDKDGTQVDFRGRGSGTTDLDFRDRDTPHSDFRGRHRSRTDQDFRGREMGSCMEFKDREMPPVDPNILDYIQPSTQDREHSGMNVNRREESTHDHTIERPAFGIQKGEFEHSETREGETQGVAFEHESPADFQNSQSPVQDQDKSQLSGREEQSSDAGLFKEEGGLDFLGRQDTDYRSMEYRDVDHRLPGSQMFGYGQSKSFPEGKTARDAQRDLQDQDYRTGPSEEKPSRLIRLSGVPEDATKEEILNAFRTPDGMPVKNLQLKEYNTGYDYGYVCVEFSLLEDAIGCMEANQGTLMIQDKEVTLEYVSSLDFWYCKRCKANIGGHRSSCSFCKNPREVTEAKQELITYPQPQKTSIPAPLEKQPNQPLRPADKEPEPRKREEGQESRLGHQKREAERYLPPSRREGPTFRRDRERESWSGETRQDGESKTIMLKRIYRSTPPEVIVEVLEPYVRLTTANVRIIKNRTGPMGHTYGFIDLDSHAEALRVVKILQNLDPPFSIDGKMVAVNLATGKRRNDSGDHSDHMHYYQGKKYFRDRRGGGRNSDWSSDTNRQGQQSSSDCYIYDSATGYYYDPLAGTYYDPNTQVSLGLFFFFFFFYLCQ

SEQ ID NO: 15306 - protein, 1895 aa, Homo sapiens
MGPGCDLLLRTAATITAAAIMSDTDSDEDSAGGGPFSLAGFLFGNINGAGQLEGESVLDDECKKHLAGLGALGLGSLITELTANEELTGTDGALVNDEGWVRSTEDAVDYSDINEVAEDESRRYQQTMGSLQPLCHSDYDEDDYDADCEDIDCKLMPPPPPPPGPMKKDKDQDSITGVSENGEGIILPSIIAPSSLASEKVDFSSSSDSESEMGPQEATQAESEDGKLTLPLAGIMQHDATKLLPSVTELFPEFRPGKVLRFLRLFGPGKNVPSVWRSARRKRKKKHRELIQEEQIQEVECSVESEVSQKSLWNYDYAPPPPPEQCLSDDEITMMAPVESKFSQSTGDIDKVTDTKPRVAEWRYGPARLWYDMLGVPEDGSGFDYGFKLRKTEHEPVIKSRMIEEFRKLEENNGTDLLADENFLMVTQLHWEDDIIWDGEDVKHKGTKPQRASLAGWLPSSMTRNAMAYNVQQGFAATLDDDKPWYSIFPIDNEDLVYGRWEDNIIWDAQAMPRLLEPPVLTLDPNDENLILEIPDEKEEATSNSPSKESKKESSLKKSRILLGKTGVIKEEPQQNMSQPEVKDPWNLSNDEYYYPKQQGLRGTFGGNIIQHSIPAVELRQPFFPTHMGPIKLRQFHRPPLKKYSFGALSQPGPHSVQPLLKHIKKKAKMREQERQASGGGEMFFMRTPQDLTGKDGDLILAEYSEENGPLMMQVGMATKIKNYYKRKPGKDPGAPDCKYGETVYCHTSPFLGSLHPGQLLQAFENNLFRAPIYLHKMPETDFLIIRTRQGYYIRELVDIFVVGQQCPLFEVPGPNSKRANTHIRDFLQVFIYRLFWKSKDRPRRIRMEDIKKAFPSHSESSIRKRLKLCADFKRTGMDSNWWVLKSDFRLPTEEEIRAMVSPEQCCAYYSMIAAEQRLKDAGYGEKSFFAPEEENEEDFQMKIDDEVRTAPWNTTRAFIAAMKGKCLLEVTGVADPTGCGEGFSYVKIPNKPTQQKDDKEPQPVKKTVTGTDADLRRLSLKNAKQLLRKFGVPEEEIKKLSRWEVIDVVRTMSTEQARSGEGPMSKFARGSRFSVAEHQERYKEECQRIFDLQNKVLSSTEVLSTDTDSSSAEDSDFEEMGKNIENMLQNKKTSSQLSREREEQERKELQRMLLAAGSAASGNNHRDDDTASVTSLNSSATGRCLKIYRTFRDEEGKEYVRCETVRKPAVIDAYVRIRTTKDEEFIRKFALFDEQHREEMRKERRRIQEQLRRLKRNQEKEKLKGPPEKKPKKMKERPDLKLKCGACGAIGHMRTNKFCPLYYQTNAPPSNPVAMTEEQEEELEKTVIHNDNEELIKVEGTKIVLGKQLIESADEVRRKSLVLKFPKQQLPPKKKRRVGTTVHCDYLNRPHKSIHRRRTDPMVTLSSILESIINDMRDLPNTYPFHTPVNAKVVKDYYKIITRPMDLQTLRENVRKRLYPSREEFREHLELIVKNSATYNGPKHSLTQISQSMLDLCDEKLKEKEDKLARLEKAINPLLDDDDQVAFSFILDNIVTQKMMAVPDSWPFHHPVNKKFVPDYYKVIVNPMDLETIRKNISKHKYQSRESFLDDVNLILANSVKYNGPESQYTKTAQEIVNVCYQTLTEYDEHLTQLEKDICTAKEAALEEAELESLDPMTPGPYTPQAKPPDLYDTNTSLSMSRDASVFQDESNMSVLDIPSATPEKQVTQEGEDGDGDLADEEEGTVQQPQASVLYEDLLMSEGEDDEEDAGSDEEGDNPFSAIQLSESGSDSDVGSGGIRPKQPRMLQENTRMDMENEESMMSYEGDGGEASHGLEDSNISYGSYEEPDPKSNTQDTSFSSIGGYEVSEEEEDEEEEEQRSGPSVLSQVHLSEDEEDSEDFHSIAGDSDLDSDE

SEQ ID NO: 15307 - protein, 832 aa, Homo sapiens
METKENRWVPVTVLPGCVGCRTVAALASWTVRDVKERIFAETGFPVSEQRLWRGGRELSDWIKIGDLTSKNCHLFVNLQSKGLKGGGRFGQTTPPLVDFLKDILRRYPEGGQILKELIQNAEDAGATEVKFLYDETQYGTETLWSKDMAPYQGPALYVYNNAVFTPEDWHGIQEIARSRKKDDPLKVGRFGIGFNSVYHITDVPCIFSGDQIGMLDPHQTLFGPHESGQCWNLKDDSKEISELSDQFAPFVGIFGSTKETFINGNFPGTFFRFPLRLQPSQLSSNLYNKQKVLELFESFRADADTVLLFLKSVQDVSLYVREADGTEKLVFRVTSSESKALKHERPNSIKILGTAISNYCKKTPSNNITCVTYHVNIVLEEESTKDAQKTSWLVCNSVGGRGISSKLDSLADELKFVPIIGIAMPLSSRDDEAKGATSDFSGKAFCFLPLPPGEESSTGLPVHISGFFGLTDNRRSIKWRELDQWRDPAALWNEFLVMNVVPKAYATLILDSIKRLEMEKSSDFPLSVDVIYKLWPEASKVKVHWQPVLEPLFSELLQNAVIYSISCDWVRLEQVYFSELDENLEYTKTVLNYLQSSGKQIAKVPGNVDAAVQLTAASGTTPVRKVTPAWVRQVLRKCAHLGCAEEKLHLLEFVLSDQAYSELLGLELLPLQNGNFVPFSSSVSDQDVIYITSAEYPRSLFPSLEGRFILDNLKPHLVAALKEAAQTRGRPCTQLQLLNPERFARLIKEVMNTFWPGRELIVQWYPFDENRNHPSVSWLKMVWKNLYIHFSEDLTLFDEMPLIPRTILEEGFLFDEDSNGKLKMVAVLITSC

SEQ ID NO: 15308 - protein, 381 aa, Homo sapiens
MGGFLPKAEGPGSQLQKLLPSFLVREQDWDQHLDKLHMLQQKRILESPLLRASKENDLSVLRQLLLDCTCDVRQRGALGETALHIAALYDNLEAALVLMEAAPELVFEPTTCEAFAGQTALHIAVVNQNVNLVRALLTRRASVSARATGTAFRHSPRNLIYFGEHPLSFAACVNSEEIVRLLIEHGADIRAQDSLGNTVLHILILQPNKTFACQMYNLLLSYDGHGDHLQPLDLVPNHQGLTPFKLAGVEGNTVMFQHLMQKRRHIQWTYGPLTSILYDLTEIDSWGEELSFLELVVSSDKREARQILEQTPVKELVSFKWNKYGRPYFCILAALYLLYMICFTTCCVYRPLKFRGGNRTHSRDITILQQKLLQVILLRRG

SEQ ID NO: 15309 - protein, 501 aa, Homo sapiens
MMRNKDKSQEEDSSLHSNASSHSASEEASGSDSGSQSESEQGSDPGSGHGSESNSSSESSESQSESESESAGSKSQPVLPEAKEKPASKKERIADVKKMWEEYPDVYGVRRSNRSRQEPSRFNIKEEASSGSESGSPKRRGQRQLKKQEKWKQEPSEDEQEQGTSAESEPEQKKVKARRPVPRRTVPKPRVKKQPKTQRGKRKKQDSSDEDDDDDEAPKRQTRRRAAKNVSYKEDDDFETDSDDLIEMTGEGVDEQQDNSETIEKVLDSRLGKKGATGASTTVYAIEANGDPSGDFDTEKDEGEIQYLIKWKGWSYIHSTWESEESLQQQKVKGLKKLENFKKKEDEIKQWLGKVSPEDVEYFNCQQELASELNKQYQIVERVIAVKTSKSTLGQTDFPAHSRKPAPSNEPEYLCKWMGLPYSECSWEDEALIGKKFQNCIDSFHSRNNSKTIPTRECKALKQRPRFVALKKQPAYLGGENLELRDYQLEGLNWLAHSWCK

SEQ ID NO: 15310 - protein, 169 aa, Homo sapiens
MEAALLGLCNWSTLGVCAALKLPQISAVLAARSARGLSLPSLLLELAGFLVFLRYQCYYGYPPLTYLEYPILIAQDVILLLCIFHFNGNVKQATPYIAVLVSSWFILALQKWIIDLAMNLCTFISAASKFAQLQCLWKTRDSGTVSALTWSLSSYTCARSRSLSQAGVQ

SEQ ID NO: 15311 - protein, 246 aa, Homo sapiens
MSQRQVLQVFEQYQKARTQFVQMVAELATRPQNIETLQNAGEPGARTPVAPRALSPRRLRPAALPVELLGSRSVGTGVRKSIHSFQRVFGGQAERVKLPDGCGRCALSLFPSSLHTGVMSLLRTLLLDVVPTIQQTAALALGRLANYNDDLAEAVVKCDILPQLVYSLAEQNRFYKKAAAFVLRAVGKHSPQLAQAIVDCGALDTLVICLEDFDPGVKEAAAWALRYIARHNAELSQAVVDAGAVP

SEQ ID NO: 15312 - protein, 1206 aa, Homo sapiens
MEADGAGEQMRPLLTRGPDEEAVVDLGKTSSTVNTKFEKEELESHRAVYIGVHVPFSKESRRRHRHRGHKHHHRRRKDKESDKEDGRESPSYDTPSQRVQFILGTEDDDEEHIPHDLFTEMDELCYRDGEEYEWKETARWLKFEEDVEDGGDRWSKPYVATLSLHSLFELRSCILNGTVMLDMRASTLDEIADMVLDNMIASGQLDESIRENVREALLKRHHHQNEKRFTSRIPLVRSFADIGEGLSASRHSLRTGLSASNLSLRGESPLSLLLGHLLPSSRAGTPAGSRCTTPVPTPQNSPPSSPSISRLTSRSSQESQRQAPELLVSPASDDIPTVVIHPPEEDLEAALKGEEQKNEENVDLTPGILASPQSAPGNLDNSKSGEIKGNGSGGSRENSTVDFSKVDMNFMRKIPTGAEASNVLVGEVDFLERPIIAFVRLAPAVLLTGLTEVPVPTRFLFLLLGPAGKAPQYHEIGRSIATLMTDEIFHDVAYKAKDRNDLLSGIDEFLDQVTVLPPGEWDPSIRIEPPKSVPSQEKRKIPVFHNGSTPTLGETPKEAAHHAGPELQRTGRLFGGLILDIKRKAPFFLSDFKDALSLQCLASILFLYCACMSPVITFGGLLGEATEGRISAIESLFGASLTGIAYSLFAGQPLTILGSTGPVLVFEKILYKFCRDYQLSYLSLRTSIGLWTSFLCIVLVATDASSLVCYITRFTEEAFAALICIIFIYEALEKLFDLGETYAFNMHNNLDKLTSYSCVCTEPPNPSNETLAQWKKDNITAHNISWRNLTVSECKKLRGVFLGSACGHHGPYIPDVLFWCVILFFTTFFLSSFLKQFKTKRYFPTKVRSTISDFAVFLTIVIMVTIDYLVGVPSPKLHVPEKFEPTHPERGWIISPLGDNPWWTLLIAAIPALLCTILIFMDQQITAVIINRKEHKLKKGAGYHLDLLMVGVMLGVCSVMGLPWFVAATVLSISHVNSLKVESECSAPGEQPKFLGIREQRVTGLMIFILMGLSVFMTSVLKFIPMPVLYGVFLYMGVSSLKGIQLFDRIKLFGMPAKHQPDLIYLRYVPLWKVHIFTVIQLTCLVLLWVIKVSAAAVVFPMMVLALVFVRKLMDLCFTKRELSWLDDLMPESKKKKEDDKKKKEKEEAERMLQDDDDTVHLPFEGGSLLQIPVKALKYSPDKPVSVKISFEDEPRKKYVDAETSL

SEQ ID NO: 15313 - protein, 179 aa, Homo sapiens
MAFRDVAVDFTQDEWRLLSPAQRTLYREVMLENYSNLVSLGISFSKPELITQLEQGKETWREEKKCSPATCPADPEPELYLDPFCPPGFSSQKFPMQHVLCNHPPWIFTCLCAEGNIQPGDPGPGDQEKQQQASEGRPWSDQAEGPEGEGAMPLFGRTKKRTLGAFSRPPQRQPVSSRN

SEQ ID NO: 15314 - protein, 360 aa, Homo sapiens
MAELQQLQEFEIPTGREALRGNHSALLRVADYCEDNYVQATDKRKALEETMAFTTQALASVAYQVGNLAGHTLRMLDLQGAALRQVEARMVNMHMEKVARREIGTLATVQRLPPGQKVIAPENLPPLTPYCRRPLNFGCLDDIGHGIKDLSTQLSRTGTLSRKSIKAPATPASATLGRPPRIPEPVHLPVVPDGRLSAASSAFSLASAGSAEGVGGAPTPKGQAAPPAPPLPSSLDPPPPPAAVEVFQRPPTLEELSPPPPDEELPLPLDLPPPPPLDGDELGLPPPPPGFGPDEPSWVPASYLEKVVTLYPYTSQKDNELSFSEGTVICVTRRYSDGWCEGVSSEGTGFFPGNYVEPSC

SEQ ID NO: 15315 - protein, 633 aa, Homo sapiens
SKAHASYYGRMNVREVLREDGHLSVNGEALCDDCKGKRHLDAHTAAHSQSPRLPGRAGTLWHIWACAGYFLLQILRRIGAVGQAVSRTAWSALWLAVVAPGKAASGVFWWLGIGWYQFVTLISWLNVFLLTRCLRNICKFLVLLIPLFLLLAGLSLRGQGNFFSFLPVLNWASMHRTQRVDDPQDVFKPTTSRLKQPLQGDSEAFPWHWMSGVEQQVASLSGQCHHHGENLRELTTLLQKLQARVDQMEGGAAGPSASVRDAVGQPPRETDFMAFHQEHEVRMSHLEDILGKLREKSEAIQKELEQTKQKTISAVGEQLLPTVEHLQLELDQLKSELSSWRHVKTGCETVDAVQERVDVQVREMVKLLFSEDQQGGSLEQLLQRFSSQFVSKGDLQTMLRDLQLQILRNVTHHVSVTKQLPTSEAVVSAVSEAGASGITEAQARAIVNSALKLYSQDKTGMVDFALESGGGSILSTRCSETYETKTALMSLFGIPLWYFSQSPRVVIQPDIYPGNCWAFKGSQGYLVVRLSMMIHPAAFTLEHIPKTLSPTGNISSAPKDFAVYGLENEYQEEGQLLGQFTYDQDGESLQMFQALKRPDDTAFQIVELRIFSNWGHPEYTCLYRFRVHGEPVK

SEQ ID NO: 15316 - protein, 685 aa, Homo sapiens
LGDDGGFVNRFTVNSDDFGIKQAKSKRKLQNQVLDSKNFKSVKRKLHNDWVMKIRYISALNCFGSCSLDSNHSLVLESLKRLEDNLPVREFSMPRGANTFCYCVKANVIVTGGDDKVIRLWHPNISTKPVGKLVGHMFSIAEIVTNEKDQHVVSLSSAKVFRVWDIQTLSLLQVFHDSQGGPGDMQIYSMIYDANHGMLITGSSVMDMYPLTRMIQDTKQVPHTHEREINVMLYNKYFHQVLTICSESIIRVWELETGLQVYQILEPHGFNTEVTSAAVDESGFLFATGAYNGTVRIWDFGSGQEMKVLPEGKDWKEDEHCLRRLIFLKAQEKHQQLVLALERNGTIKMIQGKEDDIYLMVIWELPDVVPFLQDGKHAVHLRMSTRDRNMAIPFPDVELIVERNFSQPTDNPTMDLLRVNCIDLLQVEGYNLIAAGTLNEGHVILCNISSFLDPPHDEKKFKQLLSWRAHSLEIIQVIYVEEKQVVLTASIDGSVRLWHALNGHYCGYFGQRRLFELSQTRDFILPCDVTEYPIEIKEESKFTEKQKYEYPLIFDREKWRKMSSVSLLFKRTPPKAFEVEQDFKFFKSLSSPKIRRYPLEGFVTENREAGIVFGSLPIYSISSPTSLRFLPLIGVEAQKDSSDGITGKKKGGHVQREKAPRRRSLKKNLVPQINLASSFFPAIPK

SEQ ID NO: 15317 - protein, 1934 aa, Homo sapiens
MPGARRRRRGAAMEGKPRAGVALAPGPSGRRPSARCARRRRPGLLLPGLWLLLLARPASCAPDELSPEQHNLSLYSMELVLKKSTGHSAAQVALTETAPGSQHSSPLHVTAPPSATTFDTAFFNQGKQTKSTADPSIFVATYVSVTSKEVAVNDDEMDNFLPDTHWTTPRMVSPIQYITVSPPGLPREALEPMLTPSLPMVSLQDEEVTSGWQNTTRQPAAYAESASHFHTFRSAFRTSEGIVPTPGRNLVLYPTDAYSHLSSRTLPEIVASLTEGVETTLFLSSRSLMPQPLGDGITIPLPSLGEVSQPPEEVWATSADRYTDVTTVLSQSLEETISPRTYPTVTASHAALAFSRTHSPLLSTPLAFASSASPTDVSSNPFLPSDSSKTSELHSNSALPGPVDNTHILSPVSSFRPYTWCAACTVPSPQQVLATSLMEKDVGSGDGAETLCMTVLEESSISLMSSVVADFSEFEEDPQVFNTLFPSRPIVPLSSRSMEISETSVGISAEVDMSSVTTTQVPPAHGRLSVPASLDPTAGSLSVAETQVTPSSVTTAFFSVITSILLDSSFSVIANKNTPSLAVRDPSVFTPYSLVPSVESSLFSDQERSSFSEHKPRGALDFASSFFSTPPLELSGSISSPSEAPASLSLMPSDLSPFTSQSFSPLVETFTLFDSSDLQSSQLSLPSSTNLEFSQLQPSSELPLNTIMLLPSRSEVSPWSSFPSDSLEFVEASTVSLTDSEAHFTSAFIETTSYLESSLISHESAVTALVPPGSESFDILTAGIQATSPLTTVHTTPILTESSLFSTLTPPDDQISALDGHVSVLASFSKAIPTGTVLITDAYLPSGSSFVSEATPFPLPTELTVVGPSLTPTEVPLNTSTEVSTTSTGAATGGPLDSTLMGDAASQSPPESSAAPPLPSLRPVTAFTLEATVDTPTLATAKPPYVCDITVPDAYLITTVLARRAVQEYIITAIKEVLRIHFNRAVELKVYELFTDFTFLVTSGPFVYTAISVINVLINSKLVRDQTPLILSVKPSFLVPESRFQVQTVLQFVPPSVDTGFCNFTQRIEKGLMTALFEVRKHHQGTYNLTVQILNITISSSRVTPRRGPVNIIFAVKSTQGFLNGSEVSELLRNLSVVEFSFYLGYPVLQIAEPFQYPQLNLSQLLKSSWVRTVLLGVMEKQLQNEVFQAEMERKLAQLLSEVSTRRRMWRRATVAAGNSVVQVVNVSRLEGDDNPVQLIYFVEDQDGERLSAVKSSDLINKMDLQRAAIILGYRIQGVIAQPVDRVKRPSPESQSNNLWVIVGVVIPVLVVMVIVVILYWKLCRTDKLDFQPDTVANIQQRQKLQIPSVKGFDFAKQHLGQHNKDDILIIHEPAPLPGPLKDHTTPSENGDVPSPKSKIPSKNVRHRGRVSPSDADSTVSEESSERDAGDKTPGAVNDGRSHRAPQSGPPLPSSGNEQHSSASIFEHVDRISRPPEASRRVPSKIQLIAMQPIPAPPVQRPSPADRVAESNKINKEIQTALRHKSEIEHHRNKIRLRAKRRGHYEFPVVDDLSSGDTKERHRVYRRAQMQIDKILDPTASVPSVFIEPRKSSRIKRSPKPRRKHQVNGCPADAEKDRLITTDSDGTYRRPPGVHNSAYIGCPSDPDLPADVQTPSSVELGRYPALPFPASQYIPPQPSIEEARQTMHSLLDDAFALVAPSSQPASTAGVGPGVPPGLPANSTPSQEERRATQWGSFYSPAQTANNPCSRYEDYGMTPPTGPLPRPGFGPGLLQSTELVPPDPQQPQASAEAPFAARGIYSEEMPSVARPRPVGGTTGSQIQHLTQVGIASRIGAQPVEIPPSRGSQYGGPGWPSYGEDEAGRREAVPRTSGREPSAPSGNLPHRGLQGPGLGYPTSSTEDLQPGHSSASLIKAIREELLRLSQKQSTVQNFHS

SEQ ID NO: 15318 - protein, 649 aa, Homo sapiens
MEQLSDEEIDHGAEEDSDKEDQDLDKMFGAWLGELDKLTQSLDSDKPMEPVKRSPLRQETNMANFSYRFSIYNLNEALNQGETVDLDALMADLCSIEQELSSIGSGNSKRQITETKATQKLPVSRHTLKHGTLKGLSSSSNRIAKPSHASYSLDDVTAQLEQASLSMDEAAQQSVLEDTKPLVTNQHRRTASAGTVSDAEVHSISNSSHSSITSAASSMDSLDIDKVTRPQELDLTHQGQPITEHAISLRCSSKQAKRHIDFTEEQAELTPHSYLDRETSLLLRNIAGKPSHLLTKEEQAAKLKAEKIRVALEKIKEAQVKKLVIRVHMSDDSSKTMMVDERQTVRQVLDNLMDKSHCGYSLDWSLVETVSELQMERIFEDHENLVENLLNWTRDSQNKLIFMERIEKYALFKNPQNYLLGKKETAEMADRNKEVLLEECFCGSSVTVPEIEGVLWLKDDGKKSWKKRYFLLRASGIYYVPKGKAKVSRDLVCFLQLDHVNVYYGQDYRNKYKAPTDYCLVLKHPQIQKKSQYIKYLCCDDVRTLHQWVNGIRIAKYGKQLYMNYQEALKRTESAYDWTSLSSSSIKSGSSSSSIPESQSNHSNQSDSGVSDTQPAGHVRSQSIVSSVFSEAWKRGTQLEESSKVTASF

SEQ ID NO: 15319 - protein, 461 aa, Homo sapiens
MKMASFLAFLLLNFRVCLLLLQLLMPHSAQFSVLGPSGPILAMVGEDADLPCHLFPTMSAETMELKWVSSSLRQVVNVYADGKEVEDRQSAPYRGRTSILRDGITAGKAALRIHNVTASDSGKYLCYFQDGDFYEKALVELKVADGVGLYAVAASVIMRGSSGEGVSCTIRSSLLGLEKTASISIADPFFRSAQRWIAALAGTLPVLLLLLGGAGYFLWQQQEEKKTQFRKKKREQELREMAWSTMKQEQSTRVKLLEELRWRSIQYASRGERHSAYNEWKKALFKPADVILDPKTANPILLVSEDQRSVQRAKEPQDLPDNPERFNWHYCVLGCESFISGRHYWEVEVGDRKEWHIGVCSKNVQRKGWVKMTPENGFWTMGLTDGNKYRTLTEPRTNLKLPKPPKKVGVFLDYETGDISFYNAVDGSHIHTFLDVSFSEALYPVFRILTLEPTALTICPA

SEQ ID NO: 15320 - protein, 214 aa, Homo sapiens
MMSSAAFPRWLSMGVPRTPSRTVLFERERTGLTYRVPSLLPVPPGPTLLAFVEQRLSPDDSHAHRLVLRRGTLAGGSVRTGPHSLWVPATVCSCPQAACWYPPTPTAWTAESVLARSAGPALTPSPSTAMTTAAPGAVEASCPTCAQASASWQRWTVGRPAASSTAMPGAHWAAVCRRSALTRAPPSCPQSAWLPCPRLPGAARAASWASQPPP

SEQ ID NO: 15321 - protein, 1130 aa, Homo sapiens
MAAAGQLCLLYLSAGLLSRLGAAFNLDTREDNVIRKYGDPGSLFGFSLAMHWQLQPEDKRLLLVGAPRAEALPLQRANRTGGLYSCDITARGPCTRIEFDNDADPTSESKEDQWMGVTVQSQGPGGKVVTCAHRYEKRQHVNTKQESRDIFGRCYVLSQNLRIEDDMDGGDWSFCDGRLRGHEKFGSCQQGVAATFTKDFHYIVFGAPGTYNWKGIVRVEQKNNTFFDMNIFEDGPYEVGGETEHDESLVPVPANSYLGLLFLTSVSYTDPDQFVYKTRPPREQPDTFPDVMMNSYLGFSLDSGKGIVSKDEITFVSGAPRANHSGAVVLLKRDMKSAHLLPEHIFDGEGLASSFGYDVAVVDLNKDGWQDIVIGAPQYFDRDGEVGGAVYVYMNQQGRWNNVKPIRLNGTKDSMFGIAVKNIGDINQDGYPDIAVGAPYDDLGKVFIYHGSANGINTKPTQVLKGISPYFGYSIAGNMDLDRNSYPDVAVGSLSDSVTIFRSRPVINIQKTITVTPNRIDLRQKTACGAPSGICLQVKSCFEYTANPAGYNPSISIVGTLEAEKERRKSGLSSRVQFRNQGSEPKYTQELTLKRQKQKVCMEETLWLQDNIRDKLRPIPITASVEIQEPSSRRRVNSLPEVLPILNSDEPKTAHIDVHFLKEGCGDDNVCNSNLKLEYKFCTREGNQDKFSYLPIQKGVPELVLKDQKDIALEITVTNSPSNPRNPTKDGDDAHEAKLIATFPDTLTYSAYRELRAFPEKQLSCVANQNGSQADCELGNPFKRNSNVTFYLVLSTTEVTFDTPDLDINLKLETTSNQDNLAPITAKAKVVIELLLSVSGVAKPSQVYFGGTVVGEQAMKSEDEVGSLIEYEFRVINLGKPLTNLGTATLNIQWPKEISNGKWLLYLVKVESKGLEKVTCEPQKEINSLNLTESHNSRKKREITEKQIDDNRKFSLFAERKYQTLNCSVNVNCVNIRCPLRGLDSKASLILRSRLWNSTFLEEYSKLNYLDILMRAFIDVTAAAENIRLPNAGTQVRVTVFPSKTVAQYSGVPWWIILVAILAGILMLALLVFILWKCGFFKRSRYDDSVPRYHAVRIRKEEREIKDEKYIDNLEKKQWITKWNENESYS

SEQ ID NO: 15322 - protein, 375 aa, Homo sapiens
METSRSPSPQFAPQKLTDKPPLLIQDEDSTRIERVMDNNTTVKMVPIKIVHSESQPEKESRQSLACPAEPPALPHGLEKDQIKTLSTSEQFYSRFCLYTRQGAEPEAPHRAQPAEPQPLGTQVPPEKDRCTSPPGLSYMKAKEKTVEDLKSEELAREIVGKDKSLADILDPSVKIKTTMDLMEGIFPKDEHLLEEAQQRRKLLPKIPSPRSTEERKEEPSVPAAVSLATNSTYYSTSAPKAELLIKMKDLQEQQEHEEDSGSDLDHDLSVKKQELIESISRKLQVLREARESLLEDVQANTVLGAEVEAIVKGVCKPSEFDKFRMFIGDLDKVVNLLLSLSGRLARVENALNNLDDGASPGDRQSLLEKQRVLIQ

SEQ ID NO: 15323 - protein, 555 aa, Homo sapiens
FLLVFSCLVLSVLSTIQEHQELANECLLILEFVMIVVFGLEYIVRVWSAGCCCRYRGWQGRFRFARKPFCVIDFIVFVASVAVIAAGTQGNIFATSALRSMRFLQILRMVRMDRRGGTWKLLGSVVYAHSKELITAWYIGFLVLIFASFLVYLAEKDANSDFSSYADSLWWGTITLTTIGYGDKTPHTWLGRVLAAGFALLGISFFALPAGILGSGFALKVQEQHRQKHFEKRRMPAANLIQAAWRLYSTDMSRAYLTATWYYYDSILPSFSQMFNNKRSFFRIHASWRPSSRMGIKDRIRMGSSQRRTGPSKQHLAPPTMPTSPSSEQVGEATSPTKVQKSWSFNDRTRFRASLRLKPRTSAEDAPSEEVAEEKSYQCELTVDDIMPAVKTVIRSIRILKFLVAKRKFKETLRPYDVKDVIEQYSAGHLDMLGRIKSLQTRVDQIVGRGPGDRKAREKGDKGPSDAEVVDEISMMGRVVKVEKQVQSIEHKLDLLLGFYSRCLRSGTSASLGAVQVPLFDPDITSDYHSPVDHEDISVSAQTLSISRSVSTNMD

SEQ ID NO: 15324 - protein, 150 aa, Homo sapiens
MSNPSAPPPYEDRNPLYPGPPPPGGYGQPSVLPGGYPAYPGYPQPGYGHPAGYPQPMPPTHPMPMNYGPGHGYDGEERAVSDSFGPGEWDDRKVRHTFIRKVYSIISVQLLITVAIIAIFTFVEPVSAFVRRNVAVYYVSYAVFVVTYLI

SEQ ID NO: 15325 - protein, 614 aa, Homo sapiens
MGGVHVAYRGGAGVAGAVWTVMAATVATAAAVAPAPAPGTDSASSVHWFRKGLRLHDNPALLAAVRGARCVRCVYILDPWFAASSSVGINRWRFLLQSLEDLDTSLRKLNSRLFVVRGQPADVFPRLFKEWGVTRLTFEYDSEPFGKERDAAIMKMAKEAGVEVVTENSHTLYDLDRIIELNGQKPPLTYKRFQAIISRMELPKKPVGLVTSQQMESCRAEIQENHDETYGVPSLEELGFPTEGLGPAVWQGGETEALARLDKHLERKAWVANYERPRMNANSLLASPTGLSPYLRFGCLSCRLFYYRLWDLYKKVKRNSTPPLSLFGQLLWREFFYTAATNNPRFDRMEGNPICIQIPWDRNPEALAKWAEGKTGFPWIDAIMTQLRQEGWIHHLARHAVACFLTRGDLWVSWESGVRVFDELLLDADFSVNAGSWMWLSCSAFFQQFFHCYCPVGFGRRTDPSGDYIRRYLPKLKAFPSRYIYEPWNAPESIQKAAKCIIGVDYPRPIVNHAETSRLNIERMKQIYQQLSRYRGLCLLASVPSCVEDLSHPVAEPSSSQAGSMSSAGPRPLPSGPASPKRKLEAAEEPPGEELSKRARVAELPTPELPSKDA

SEQ ID NO: 15326 - protein, 161 aa, Homo sapiens
MPLRDETLREVWASDSGHEEESLSPEAPRRPKQRPAPAQRLRKKRTEAPESPCPTGSKPRKPGEFLPAEEEEEEEDEEDEEEEAEEKKEKILLPPKKPLREKSSADLKERRAKAQGPRGDLGSPDPPPKPLRVRNKEAPAGEGTKMRKTKKKGSGEADKDP

SEQ ID NO: 15327 - protein, 121 aa, Homo sapiens
MRFMTLLFLTALAGALVCAYDPEAASAPGSGNPCHEASAAQKENAGEDPGLARQAPKPRKQRSSLLEKGLDGAKKAVGGLGKLGKDAVEDLESVGKGGEERLVFGAPVNLTSIPLTSVSRP

SEQ ID NO: 15328 - protein, 160 aa, Homo sapiens
RFNAMLAALTPSRLAVAFQAMGAMKLGLTIAIRYSHRYAGALLDEDVFQGKELVNSRSLQALVAGLKAYSTWENIRCLQDCRECTGGMGYMMENRISGLKCDTDVFATFEGDDVVMLQVVGRELLAQYTKQYEEKPLFGLLQNWAESVGDKLRTSFLAFN

SEQ ID NO: 15329 - protein, 274 aa, Homo sapiens
MRRLTVDDFEIGRPLGKGKFGNVYLARLKESHFIVALKVLFKSQIEKEGLEHQLRREIEIQAHLQHPNILRLYNYFHDARRVYLILEYAPRGELYKELQKSEKLDEQRTATIIEELADALTYCHDKKVIHRDIKPENLLLGFRGEVKIADFGWSVHPLPERKTMCGTLDYLPPEMIEGRTYDEKVDLWCIGVLCYELLVGYPPFESASHSETYRRILKVDVRFPLSMPLGARDLISRLLRYQPLERLPLAQILKHPWVQAHSRRVLPPCAQMAS

SEQ ID NO: 15330 - protein, 103 aa, Homo sapiens
PNRIIEIANKTPKISQLYKQASGTMVYGLFMLQKKSVHKKNTIYEIQDNTGSMDVVGSGKWHNIKCEKGDKLRLFCLQLRTVDRKLKLVIKAKKNKEGPMNVN

SEQ ID NO: 15331 - protein, 1210 aa, Homo sapiens
MEADGAGEQMRPLLTRVTSRGPDEEAVVDLGKTSSTVNTKFEKEELESHRAVYIGVHVPFSKESRRRHRHRGHKHHHRRRKDKESDKEDGRESPSYDTPSQRVQFILGTEDDDEEHIPHDLFTEMDELCYRDGEEYEWKETARWLKFEEDVEDGGDRWSKPYVATLSLHSLFELRSCILNGTVMLDMRASTLDEIADMVLDNMIASGQLDESIRENVREALLKRHHHQNEKRFTSRIPLVRSFADIGEGLSASRHSLRTGLSASNLSLRGESPLSLLLGHLLPSSRAGTPAGSRCTTPVPTPQNSPPSSPSISRLTSRSSQESQRQAPELLVSPASDDIPTVVIHPPEEDLEAALKGEEQKNEENVDLTPGILASPQSAPGNLDNSKSGEIKGNGSGGSRENSTVDFSKVDMNFMRKIPTGAEASNVLVGEVDFLERPIIAFVRLAPAVLLTGLTEVPVPTRFLFLLLGPAGKAPQYHEIGRSIATLMTDEIFHDVAYKAKDRNDLLSGIDEFLDQVTVLPPGEWDPSIRIEPPKSVPSQEKRKIPVFHNGSTPTLGETPKEAAHHAGPELQRTGRLFGGLILDIKRKAPFFLSDFKDALSLQCLASILFLYCACMSPVITFGGLLGEATEGRISAIESLFGASLTGIAYSLFAGQPLTILGSTGPVLVFEKILYKFCRDYQLSYLSLRTSIGLWTSFLCIVLVATDASSLVCYITRFTEEAFAALICIIFIYEALEKLFDLGETYAFNMHNNLDKLTSYSCVCTEPPNPSNETLAQWKKDNITAHNISWRNLTVSECKKLRGVFLGSACGHHGPYIPDVLFWCVILFFTTFFLSSFLKQFKTKRYFPTKVRSTISDFAVFLTIVIMVTIDYLVGVPSPKLHVPEKFEPTHPERGWIISPLGDNPWWTLLIAAIPALLCTILIFMDQQITAVIINRKEHKLKKGAGYHLDLLMVGVMLGVCSVMGLPWFVAATVLSISHVNSLKVESECSAPGEQPKFLGIREQRVTGLMIFILMGLSVFMTSVLKFIPMPVLYGVFLYMGVSSLKGIQLFDRIKLFGMPAKHQPDLIYLRYVPLWKVHIFTVIQLTCLVLLWVIKVSAAAVVFPMMVLALVFVRKLMDLCFTKRELSWLDDLMPESKKKKEDDKKKKEKEEAERMLQDDDDTVHLPFEGGSLLQIPVKALKYSPDKPVSVKISFEDEPRKKYVDAETSL

SEQ ID NO: 15332 - protein, 206 aa, Homo sapiens
MDEADMPGGLCLGNRQGHSWPDTHDEGVVESGIHGAGPNQPVGGQDFWAQQPGEDRPGFFSQNSCGFTSAEESVCLLSDLHYKLIMNQTSQKKDSLSMSSFQSVKSISNSGKARPQPGSFNKQDSKADVSQKADLEEEPLLHNSKLDKVPGVQGQASPPHLGSAKCSSASCGIPTSCRPKSCGTSSPSWKGARGPRQPRRKLAFPG

SEQ ID NO: 15333 - protein, 514 aa, Homo sapiens
MGDWNLLGDTLEEVHIHSTMIGKIWLTILFIFRMLVLGVAAEDVWNDEQSGFICNTEQPGCRNVCYDQAFPISLIRYWVLQVIFVSSPSLVYMGHALYRLRVLEEERQRMKAQLRVELEEVEFEMPRDRRRLEQELCQLEKRKLNKAPLRGTLLCTYVIHIFTRSVVEVGFMIGQYLLYGFHLEPLFKCHGHPCPNIIDCFVSRPTEKTIFLLFMQSIATISLFLNILEIFHLGFKKIKRGLWGKYKLKKEHNEFHANKAKQNVAKYQSTSANSLKRLPSAPDYNLLVEKQTHTAVYPSLNSSSVFQPNPDNHSVNDEKCILDEQETVLSNEISTLSTSCSHFQHISSNNNKDTHKIFGKELNGNQLMEKRETEGKDSKRNYYSRGHRSIPGVAIDGENNMRQSPQTVFSLPANCDWKPRWLRATWGSSTEHENRGSPPKVPGSKATASSLLLILQRPTSSQPRLKETPKIKAEAKIYDSKHPPRLLQSTVSTFSGREPRSPAPMGHHSFRGPR

SEQ ID NO: 15334 - protein, 2439 aa, Homo sapiens
MVQRWLLLSCCGALLSAGLANTSYTSPGLQRLKDSPQTAPDKGQCSTWGAGHFSTFDHHVYDFSGTCNYIFAATCKDAFPTFSVQLRRGPDGSISRIIVELGASVVTVSEAIISVKDIGVISLPYTSNGLQITPFGQSVRLVAKQLELELEVVWGPDSHLMVLVERKYMGQMCGLCGNFDGKVTNEFVSEEGKFLEPHKFAALQKLDDPGEICTFQDIPSTHVRQAQHARICTQLLTLVAPECSVSKEPFVLSCQADVAAAPQPGPQNSSCATLSEYSRQCSMVGQPVRRWRSPGLCSVGQCPANQVYQECGSACVKTCSNPQHSCSSSCTFGCFCPEGTVLNDLSNNHTCVPVTQCPCVLHGAMYAPGEVTIAACQTCRCTLGRWVCTERPCPGHCSLEGGSFVTTFDARPYRFHGTCTYILLQSPQLPEDGALMAVYDKSGVSHSETSLVAVVYLSRQDKIVISQDEVVTNNGEAKWLPYKTRNITVFRQTSTHLQMATSFGLELVVQLRPIFQAYVTVGPQFRGQTRGLCGNFNGDTTDDFTTSMGIAEGTASLFVDSWRAGNCPAALERETDPCSMSQLNKVCAETHCSMLLRTGTVFERCHATVNPAPFYKRCVYQACNYEETFPHICAALGDYVHACSLRGVLLWGWRSSVDNCTIPCTGNTTFSYNSQACERTCLSLSDRATECHHSAVPVDGCNCPDGTYLNQKGECVRKAQCPCILEGYKFILAEQSTVINGITCHCINGRLSCPQRPQMFLASCQAPKTFKSCSQSSENKFGAACAPTCQMLATGVACVPTKCEPGCVCAEGLYENADGQCVPPEECPCEFSGVSYPGGAELHTDCRTCSCSRGRWACQQGTHCPSTCTLYGEGHVITFDGQRFVFDGNCEYILATDVCGVNDSQPTFKILTENVICGNSGVTCSRAIKIFLGGLSVVLADRNYTVTGEEPHVQLGVTPGALSLVVDISIPGRYNLTLIWNRHMTILIRIARASQDPLCGLCGNFNGNMKDDFETRSRYVASSELELVNSWKESPLCGDVSFVTDPCSLNAFRRSWAERKCSVINSQTFATCHSKVYHLPYYEACVRDACGCDSGGDCECLCDAVAAYAQACLDKGVCVDWRTPAFCPIYCGFYNTHTQDGHGEYQYTQEANCTWHYQPCLCPSQPQSVPGSNIEGCYNCSQDEYFDHEEGVCVPCMPPTTPQPPTTPQLPTTGSRPTQVWPMTGTSTTIGLLSSTGPSPSSNHTPASPTQTPLLPATLTSSKPTASSGEPPRPTTAVTPQATSGLPPTATLRSTATKPTVTQATTRATASTASPATTSTAQSTTRTTMTLPTPATSGTSPTLPKSTNQELPGTTATQTTGPRPTPASTTGPTTPQPGQPTRPTATETTQTRTTTEYTTPQTPHTTHSPPTAGSPVPSTGPVTATSFHATTTYPTPSHPETTLPTHVPPFSTSLVTPSTHTVITPTHAQMATSASNHSAPTGTIPPPTTLKATGSTHTAPPITPTTSGTSQAHSSFSTNKTPTSLHSHTSSTHHPEVTPTSTTTITPNPTSTRTRTPVAHTNSATSSRPPPPFTTHSPPTGSSPFSSTGPMTATSFKTTTTYPTPSHPQTTLPTHVPPFSTSLVTPSTHTVITPTHAQMATSASIHSMPTGTIPPPTTLKATGSTHTAPTMTLTTSGTSQALSSLNTAKTSTSLHSHTSSTHHAEATSTSTTNITPNPTSTGTPPMTVTTSGTSQSRSSFSTAKTSTSLHSHTSSTHHPEVTSTSTTSITPNHTSTGTRTPVAHTTSATSSRLPTPFTTHSPPTGTTPISSTGPVTATSFQTTTTYPTPSHPHTTLPTHVPSFSTSLVTPSTHTVIIPTHTQMATSASIHSMPTGTIPPPTTIKATGSTHTAPPMTPTTSGTSQSPSSFSTAKTSTSLPYHTSSTHHPEVTPTSTTNITPKHTSTGTRTPVAHTTSASSSRLPTPFTTHSPPTGSSPFSSTGPMTATSFQTTTTYPTPSHPQTTLPTHVPPFSTSLVTPSTHTVIITTHTQMATSASIHSTPTGTVPPPTTLKATGSTHTAPPMTVTTSGTSQTHSSFSTATASSSFISSSSWLPQNSSSRPPSSPITTQLPHLSSATTPVSTTNQLSSSFSPSPSAPSTVSSYVPSSHSSPQTSSPSVGTSSSFVSAPVHSTTLSSGSHSSLSTHPTTASVSASPLFPSSPAASTTIRATLPHTISSPFTLSALLPISTVTVSPTPSSHLASSTIAFPSTPRTTASTHTAPAFSSQSTTSRSTSLTTRVPTSGFVSLTSGVTGIPTSPVTNLTTRHPGPTLSPTTRFLTSSLTAHGSTPASAPVSSLGTPTPTSPGVCSVREQQEEITFKGCMANVTVTRCEGACISAASFNIITQQVDARCSCCRPLHSYEQQLELPCPDPSTPGRRLVLTLQVFSHCVCSSVACGD

SEQ ID NO: 15335 - protein, 339 aa, Homo sapiens
MTEGVKTLGWTKQKGGCHWGRSEGAGESGKSTIVKQMKIIHEDGYSEEECRQYRAVVYSNTIQSIMAIVKAMGNLQIDFADPSRADDARQLFALSCTAEEQGVLPDDLSGVIRRLWADHGVQACFGRSREYQLNDSAAYYLNDLERIAQSDYIPTQQDVLRTRVKTTGIVETHFTFKDLHFKMFDVGGQRSERKKWIHCFEGVTAIIFCVALSAYDLVLAEDEEMNRMHESMKLFDSICNNKWFTDTSIILFLNKKDLFEEKITHSPLTICFPEYTGANKYDEAASYIQSKFEDLNKRKDTKEIYTHFTCATDTKNVQFVFDAVTDVIIKNNLKDCGLF

SEQ ID NO: 15336 - protein, 483 aa, Homo sapiens
MAIRAQHSNAAQTQTGEANRGWTGQESLSDSDPEMWELLQREKDRQCRGLELIASENFCSRAALEALGSCLNNKYSEGYPGKRYYGGAEVVDEIELLCQRRALEAFDLDPAQWGVNVQPYSGSPANLAVYTALLQPHDRIMGLDLPDGGHLTHGYMSDVKRISATSIFFESMPYKLNPKTGLIDYNQLALTARLFRPRLIIAGTSAYARLIDYARMREVCDEVKAHLLADMAHISGLVAAKVIPSPFKHADIVTTTTHKTLRGARSGLIFYRKGVKAVDPKTGREIPYTFEDRINFAVFPSLQGGPHNHAIAAVAVALKQACTPMFREYSLQVLKNARAMADALLERGYSLVSGGTDNHLVLVDLRPKGLDGARAERVLELVSITANKNTCPGDRSAITPGGLRLGAPALTSRQFREDDFRRVVDFIDEGVNIGLEVKSKTAKLQDFKSFLLKDSETSQRLANLRQRVEQFARAFPMPGFDEH

SEQ ID NO: 15337 - protein, 2101 aa, Homo sapiens [sequence omitted]

SEQ ID NO: 15338 - protein, 1451 aa, Homo sapiens
MAEARKRRELLPLIYHHLLRAGYVRAAREVKEQSGQKCFLAQPVTLLDIYTHWQQTSELGRKRKAEEDAALQAKKTRVSDPISTSESSEEEEEAEAETAKATPRLASTNSSVLGADLPSSMKEKAKAETEKAGKTGNSMPHPATGKTVANLLSGKSPRKSAEPSANTTLVSETEEEGSVPAFGAAAKPGMVSAGQADSSSEDTSSSSDETDVEGKPSVKPAQVKASSVSTKESPARKAAPAPGKVGDVTPQVKGGALPPAKRAKKPEEESESSEEGSESEEEAPAGTRSQVKASEKILQVRAASAPAKGTPGKGATPAPPGKAGAVASQTKAGKPEEDSESSSEESSDSEEETPAAKALLQAKASGKTSQVGAASAPAKESPRKGAAPAPPGKTGPAVAKAQAGKREEDSQSSSEESDSEEEAPAQAKPSGKAPQVRAASAPAKESPRKGAAPAPPRKTGPAAAQVQVGKQEEDSRSSSEESDSDREALAAMNAAQVKPLGKSPQVKPASTMGMGPLGKGAGPVPPGKVGPATPSAQVGKWEEDSESSSEESSDSSDGEVPTAVAPAQEKSLGNILQAKPTSSPAKGPPQKAGPVAVQVKAEKPMDNSESSEESSDSADSEEAPAAMTAAQAKPALKIPQTKACPKKTNTTASAKVAPVRVGTQAPRKAGTATSPAGSSPAVAGGTQRPAEDSSSSEESDSEEEKTGLAVTVGQAKSVGKGLQVKAASVPVKGSLGQGTAPVLPGKTGPTVTQVKAEKQEDSESSEEESDSEEAAASPAQVKTSVKKTQAKANPAAARAPSAKGTISAPGKVVTAAAQAKQRSPSKVKPPVRNPQNSTVLARGPASVPSVGKAVATAAQAQTGPEEDSGSSEEESDSEEEAETLAQVKPSGKTHQIRAALAPAKESPRKGAAPTPPGKTGPSAAQAGKQDDSGSSSEESDSDGEAPAAVTSAQVIKPPLIFVDPNRSPAGPAATPAQAQAASTPRKARASESTARSSSSESEDEDVIPATQCLTPGIRTNVVTMPTAHPRIAPKASMAGASSSKESSRISDGKKQEGPATQVDSAVGTLPATSPQSTSVQAKGTNKLRKPKLPEVQQATKAPESSDDSEDSSDSSSGSEEDGEGPQGAKSAHTLVGPTPSRTETLVEETAAESSEDDVVAPSQSLLSGYMTPGLTPANSQASKATPKLDSSPSVSSTLAAKDDPDGKQEAKPQQAAGMLSPKTGGKEAASGTTPQKSRKPKKGAGNPQASTLALQSNITQCLLGQPWPLNEAQVQASVVKVLTELLEQERKKVVDTTKESSRKGWESRKRKLSGDQPAARTPRSKKKKKLGAGEGGEASVSPEKTSTTSKGKAKRDKASGDVKEKKGKGSLGSQGAKDEPEEELQKGMGTVEGGDQSNPKSKKEKKKSDKRKKDKEKKEKKKKAKKASTKDSESPSQKKKKKKKKTAEQTV

SEQ ID NO: 15339 - protein, 206 aa, Homo sapiens
MRTSMKKVGMHHLSSSGGSYYLILDDAPPGTQEYIMLRQDSIQSAELKKKESPFRAKCHEIFCCPLKQVHHKENTEPEEPQLKGIVTKLYSRQGYHLQLQADGTIDGTKDEDSTYTLFNLIPVGLRVVAIQGVQTKLYLAMNSEGYLYTSELFTPECKFKESVFENYYVTYSSMIYRQQQSGRGWYLGLNKEGEIMKGNHVKKNKP

SEQ ID NO: 15340 - protein, 176 aa, Homo sapiens
MARRHCFSYWLLVCWLVVTVAEALSTFYLQQHINLHMDKKRYLRLLEIHKIMRTLPTARSLHSPLHLPRGVRSQGPSPSQRHPGVPSIFFHEGPESILGFQTDLSSLQGVTTVFHSSHFIGHTVTLLIGISPEEDSREEAHLRKAEREEKPKHTEAKKSLSFRKKQQKDFCFIFRN

SEQ ID NO: 15341 - protein, 1192 aa, Homo sapiens
MAACGRVRRMFRLSAALHLLLLFAAGAEKLPGQGVHSQGQGPGANFVSFVGQAGGGGPAGQQLPQLPQSSQLQQQQQQQQQQQQPQPPQPPFPAGGPPARRGGAGAGGGWKLAEEESCREDVTRVCPKHTWSNNLAVLECLQDVRELLWNYKLNLTTDPKFESVAREVCKSTITEIKECADEPVGKGYMVSCLVDHRGNITEYQCHQYITKMTAIIFSDYRLICGFMDDCKNDINILKCGSIRLGEKDAHSQGEVVSCLEKGLVKEAEEREPKIQVSELCKKAILRVAELSSDDFHLDRHLYFACRDDRERFCENTQAGEGRVYKCLFNHKFEESMSEKCREALTTRQKLIAQDYKVSYSLAKSCKSDLKKYRCNVENLPRSREARLSYLLMCLESAVHRGRQVSSECQGEMLDYRRMLMEDFSLSPEIILSCRGEIEHHCSGLHRKGRTLHCLMKVVRGEKGNLGMNCQQALQTLIQETDPGADYRIDRALNEACESVIQTACKHIRSGDPMILSCLMEHLYTEKMVEDCEHRLLELQYFISRDWKLDPVLYRKCQGDASRLCHTHGWNETSEFMPQGAVFSCLYRHAYRTEEQGRRLSRECRAEVQRILHQRAMDVKLDPALQDKCLIDLGKWCSEKTETGQELECLQDHLDDLVVECRDIVGNLTELESEDIQIEALLMRACEPIIQNFCHDVADNQIDSGDLMECLIQNKHQKDMNEKCAIGVTHFQLVQMKDFRFSYKFKMACKEDVLKLCPNIKKKVDVVICLSTTVRNDTLQEAKEHRVSLKCRRQLRVEELEMTEDIRLEPDLYEACKSDIKNFCSAVQYGNAQIIECLKENKKQLSTRCHQKVFKLQETEMMDPELDYTLMRVCKQMIKRFCPEADSKTMLQCLKQNKNSELMDPKCKQMITKRQITQNTDYRLNPMLRKACKADIPKFCHGILTKAKDDSELEGQVISCLKLRYADQRLSSDCEDQIRIIIQESALDYRLDPQLQLHCSDEISSLCAEEAAAQEQTGQVEECLKVNLLKIKTELCKKEVLNMLKESKADIFVDPVLHTACALDIKHHCAAITPGRGRQMSCLMEALEDKRVRLQPECKKRLNDRIEMWSYAAKVAPADGFSDLAMQVMTSPSKNYILSVISGSICILFLIGLMCGRITKRVTRELKDRLQYRSETMAYKGLVWSQDVTGSPA

SEQ ID NO: 15342 - protein, 970 aa, Homo sapiens
DAVPRPGAGTGQGLGAAGGGSPPRALAALEPRLDLLLGARRLPGGLGWGPALLLQPPASSLPGAFSCASGEYLEMKNQVCSKCGEGTYSLGSGIKFDEWDELPAGFSNIATFMDTVVGPSDSRPDGCNNSSWIPRGNYIESNRDDCTVSLIYAVHLKKSGYVFFEYQYVDNNIFFEFFIQNDQCQEMDTTTDKWVKLTDNGEWGSHSVMLKSGTNILYWRTTGILMGSKAVKPVLVKNITIEGVAYTSECFPCKPGTFSNKPGSFNCQVCPRNTYSEKGAKECIRCKDDSQFSEEGSSECTERPPCTTKDYFQIHTPCDEEGKTQIMYKWIEPKICREDLTDAIRLPPSGEKKDCPPCNPGFYNNGSSSCHPCPPGTFSDGTKECRPCPAGTEPALGFEYKWWNVLPGNMKTSCFNVGNSKCDGMNGWEVAGDHIQSGAGGSDNDYLILNLHIPGFKPPTSMTGATGSELGRITFVFETLCSADCVLYFMVDINRKSTNVVESWGGTKEKQAYTHIIFKNATFTFTWAFQRTNQGQDNRRFINDMVKIYSITATNAVDGVASSCRACALGSEQSGSSCVPCPPGHYIEKETNQCKECPPDTYLSIHQVYGKEACIPCGPGSKNNQDHSVCYSDCFFYHEKENQSLHYDFSNLSSVGSLMNGPSFTSKGTKYFHFFNISLCGHEGKKMALCTNNITDFTVKEIVAGSDDYTNLVGAFVCQSTIIPSESKGFRAALSSQSIILADTFIGVTVETTLKNINIKEDMFPVPTSQIPDVHFFYKSSTATTSCINGRSTAVKMRCNPTKSGAGVISVPSKCPAGTCDGCTFYFLWESAEACPLCTEHDFHEIEGACKRGFQETLYVWNEPKWCIKGISLPEKKLATCETVDFWLKVGAGVGAFTAVLLVALTCYFWKKNQKLEYKYSKLVMTTNSKECELPAADSCAIMEGEDNEEEVVYSNKQSLLGKLKSLATK

SEQ ID NO: 15343 - protein, 1120 aa, Homo sapiens
MRPLHYAAWQGRLEPVRLLLRASAAVNAASLDGQIPLHLAAQYGHYEVSEMLLQHQSNPCLVNKAKKTPLDLACEFGRLKVAQLLLNSHLCVALLEGEAKDPCDPNYTTPLHLAAKNGHREVIRQLLRAGIEINRQTKTGTALHEAALYGKTEVVRLLLEGGVDVNIRNTYNQTALDIVNQFTTSQASREIKQLLREASGILKVRALKDFWNLHDPTALNVRAGDVITVLEQHPDGRWKGHIHESQRGTDRIGYFPPGIVEVVSKRVGIPAARLPSAPTPLRPGFSRTPQPPAEEPPHPLTYSQLPRVGLSPDSPAGDRNSVGSEGSVGSIRSAGSGQSSEGTNGHGPGLLIENAQPLPSAGEDQVLPGLHPPSLADNLSHRPLANCRSGEQIFTQDVRPEQLLEGKDAQAIHNWLSEFQLEGYTAHFLQAGYDVPTISRMTPEDLTAIGVTKPGHRKKIASEIAQLSIAEWLPSYIPTDLLEWLCALGLPQYHKQLVSSGYDSMGLVADLTWEELQEIGVNKLGHQKKLMLGVKRLAELRRGLLQGEALSEGGRRLAKGPELMAIEGLENGEGPATAGPRLLTFQGSELSPELQAAMAGGGPEPLPLPPARSPSQESIGARSRGSGHSQEQPAPQPSGGDPSPPQERNLPEGTERPPKLCSSLPGQGPPPYVFMYPQGSPSSPAPGPPPGAPWAFSYLAGPPATPPDPPRPKRRSHSLSRPGPTEGDAEGEAEGPVGSTLGSYATLTRRPGRSALVRTSPSVTPTPARGTPRSQSFALRARRKGPPPPPPKRLSSVSGPSPEPPPLDESPGPKEGATGPRRRTLSEPAGPSEPPGPPAPAGPASDTEEEEPGPEGTPPSRGSSGEGLPFAEEGNLTIKQRPKPAGPPPRETPVPPGLDFNLTESDTVKRRPKCREREPLQTALLAFGVASATPGPAAPLPSPTPGESPPASSLPQPEPSSLPAQGVPTPLAPSPAMQPPVPPCPGPGLESSAASRWNGETEPPAAPAALLKVPGAGTAPKPVSVACTQLAFSGPKLAPRLGPRPVPPPRPESTGTVGPGQAQQRLEQTSSSLAAALRAAEKSIGTKEQEGTPSASTKHILDDISTMFDALADQLDAMLD

SEQ ID NO: 15344 - protein, 404 aa, Homo sapiens
MEETIKDPPTSAVLLDHCHFSQVIFNSVEKFYIPGGDVTCHYTFTQHFIPRRKDWIGIFRVGWKTTREYYTFMWVTLPIDLNNKSAKQQEVQFKAYYLPKDDEYYQFCYVDEDGVVRGASIPFQFRPENEEDILVVTTQEELETLQSINKKLELKVKEQKDYWETELLQLKEQNQKMSSENEKMGIRVDQLQAQLSTQEKEMEKLVQGDQDKTEQLEQLKKENDHLFLSLTEQRKDQKKLEQTVEQMKQNETTAMKKQQELMDENFDLSKRLSENEIICNALQRQKERLEGENDLLKRENSRLLSYMGLDFNSLPYQVPTSDEGGARQNPGLAYGNPYSGIQESSSPSPLSIKKCPICKADDICDHTLEQQQMQPLCFNCPICDKIFPATEKQIFEDHVFCHSL

SEQ ID NO: 15345 - protein, 310 aa, Homo sapiens
GSTGTRVHVFQFTRPPRETPTLTHETFKALKPGLSAYADDVEKSAQGIRELLDVAKQDIPFDFWKATPLVLKATAGLRLLPGEKAQKLLQKVKKVFKASPFLVGDDCVSIMNGTDEGVSAWITINFLTGSLKTPGGSSVGMLDLGGGSTQIAFLPRVEGTLQASPPGYLTALRMFNRTYKLYSYSYLGLGLMSARLAILGGVEGQPAASLHELCAARVSEVLQNRVHRTEEVKHVDFYAFSYYYDLAAGVGLIDAEKGGSLVVGDFEIAAKYVCRTLETQPQSSPFSCMDLTYVSLLLQEFGFPRSKVLK

SEQ ID NO: 15346 - protein, 377 aa, Homo sapiens
MTLLAWCTRGANPAAMNASAASLNDSQVVVVAAEGAAAAATAAGGPDTGEWGPPAAAALGAGGGANGSLELSSQLSAGPPGLLLPAVNPWDVLLCVSGTVIAGENALVVALIASTPALRTPMFVLVGSLATADLLAGCGLILHFVFQYLVPSETVSLLTVGFLVASFAASVSSLLAITVDRYLSLYNALTYYSRRTLLGVHLLLAATWTVSLGLGLLPVLGWNCLAERAACSVVRPLARSHVALLSAAFFMVFGIMLHLYVRICQVVWRHAHQIALQQHCLAPPHLAATRKGVGTLAVVLGTFGASWLPFAIYCVVGSHEDPAVYTYATLLPATYNSMINPIIYAFRNQEIQRALWLLLCGCFQSKVPFRSRSPSEV

SEQ ID NO: 15347 - protein, 540 aa, Homo sapiens
MKIAHRGPDAFRFENVNGYTNCCFGFHRLAVVDPLFGMQPIRVKKYPYLWLCYNGEIYNHKKMQQHFEFEYQTKVDGEIILHLYDKGGIEQTICMLDGVFAFVLLDTANKKVFLGRDTYGVRPLFKAMTEDGFLAVCSEAKGLVTLKHSATPFLKVEPFLPGHYEVLDLKPNGKVASVEMVKYHHCRDVPLHALYDNVEKLFPGFEIETVKNNLRILFNNAVKKRLMTDRRIGCLLSGGLDSSLVAATLLKQLKEAQVQYPLQTFAIGMEDSPDLLAARKVADHIGSEHYEVLFNSEEGIQALDEVIFSLETYDITTVRASVGMYLISKYIRKNTDSVVIFSGEGSDELTQGYIYFHKAPSPEKAEEESERLLRELYLFDVLRADRTTAAHGLELRVPFLDHRFSSYYLSLPPEMRIPKNGIEKHLLRETFEDSNLIPKEILWRPKEAFSDGITSVKNSWFKILQEYVEHQVDDAMMANAAQKFPFNTPKTKEGYYYRQVFERHYPGRADWLSHYWMPKWINATDPSARTLTHYKSAVKA

SEQ ID NO: 15348 - protein, 302 aa, Homo sapiens
IKQTKDAQGPDDAKMNEKLYTVCDVAMNIIMSKSTTYSLESPKDPVLPARFFTQPDKNFSNTKNYLPPEMKSFFTPGKPKTTNVLGAVNKPLSSAGKQSQTKSSRMETVSNASSSSNPSSPGRIKGRLDSSEMDHSENEDYTMSSPLPGKKSDKRDDSDLSELEKPRGRKKTPVTEQEEKLGMDDLTKLVQEQKPKGSQRSRKRGHTASESDEQQWPEEKRLKEDILENEDEQNSPPKKGKRGRPPKPLGGGTPKEEPTMKTSKKGSKKKSGPPAPEEEEEEERQSGNTEQKSKSKQHRVSR

SEQ ID NO: 15349 - protein, 226 aa, Homo sapiens
MDRSAEFRKWKAQCLSKADLSRKGSVDEDVVELVQFLNMRDQFFTTSSCAGRILLLDRGINGFEVQKQNCCWLLVTHKLCVKDDVHSMAIDSGFRNSGITVGKRGKTMLAVRSTHGLEVPLSHKGKLMVTEEYIDFLLNVANQKMEENKKRIERFYNCLQHALERETMTNLHPKIKEKNNSSYIHKKKRNPEKTRAQCITKESDEELENDDDDDLGINVTIFPEDY

SEQ ID NO: 15350 - protein, 1150 aa, Homo sapiens
MFQRSNQDLKLGPYRKFSALSYGASALPGPDMSMKPSAAPSPSPALPFLPPTSDPPDHPPREPPPQPIMPSVFSPDNPLMLSAFPSSLLVTGDGGPCLSGAGAGKVIVKVKTEGGSAEPSQTQNFILTQTALNSTAPGTPCGGLEGPAPPFVTASNVKTILPSKAVGVSQEGPPGLPPQPPPPVAQLVPIVPLEKAWPGPHGTTGEGGPVATLSKPSLGDRSKISKDVYENFRQWQRYKALARRHLSQSPDTEALSCFLIPVLRSLARLKPTMTLEEGLPLAVQEWEHTSNFDRMIFYEMAERFMEFEAEEMQIQNTQLMNGSQGLSPATPLKLDPLGPLASEVCQQPVYIPKKAASKTRAPRRRQRKAQRPPAPEAPKEIPPEAVKEYVDIMEWLVGTHLATGESDGKQEEEGQQQEEEGMYPDPGLLSYINELCSQKVFVSKVEAVIHPQFLADLLSPEKQRDPLALIEELEQEEGLTLAQLVQKRLMALEEEEDAEAPPSFSGAQLDSSPSGSVEDEDGDGRLRPSPGLQGAGGAACLGKVSSSGKRAREVHGGQEQALDSPRGMHRDGNTLPSPSSWDLQPELAAPQGTPGPLGVERRGSGKVINQVSLHQDGHLGGAGPPGHCLVADRTSEALPLCWQGGFQPESTPSLDAGLAELAPLQGQGLEKQVLGLQKGQQTGGRGVLPQGKEPLAVPWEGSSGAMWGDDRGTPMAQSYDQNPSPRAAGERDDVCLSPGVWLSSEMDAVGLELPVQIEEVIESFQVEKCVTEYQEGCQGLGSRGNISLGPGETLVPGDTESSVIPCGGTVAAAALEKRNYCSLPGPLRANSPPLRSKENQEQSCETVGHPSDLWAEGCFPLLESGDSTLGSSKETLPPTCQGNLLIMGTEDASSLPEASQEAGSRGNSFSPLLETIEPVNILDVKDDCGLQLRVSEDTCPLNVHSYDPQGEGRVDPDLSKPKNLAPLQESQESYTTGTPKATSSHQGLGSTLPRRGTRNAIVPRETSVSKTHRSADRAKGKEKKKKEAEEEDEELSNFAYLLASKLSLSPREHPLSPHHASGGQGSQRASHLLPAGAKGPSKLPYPVAKSGKRALAGGPAPTEKTPHSGAQLGVPREKPLALGVVRPSQPRKRRCDSFVTGRRKKRRRSQ

SEQ ID NO: 15351 - protein, 697 aa, Homo sapiens
MQEGLHRMTWDCIAIGSHENSVQGTVAFEDVAVNFSQEEWSLLSEVQRCLYHDVMLENWVLISSLGCWCGSEDEEAPSKKSISIQRVSQVSTPGAGVSPKKAHSCEMCGAILGDILHLADHQGTHHKQKLHRCEAWGNKLYDSSNRPHQNQYLGEKPYRSSVEEALFVKRCKFHVSEESSIFIQSGKDFLPSSGLLLQEATHTGEKSNSKPECESPFQWGDTHYSCGECMKHSSTKHVFVQQQRLPSREECYCWECGKSFSKYDSVSNHQRVHTGKRPYECGECGKSFSHKGSLVQHQRVHTGKRPYECGECGKSFSHKGSLVQHQRVHTGERPYECGECGKSFSQNGTLIKHQRVHTGERPYECEECGKCFTQKGNLIQHQRGHTSERPYECEECGKCFSQKGTLTEHHRVHTRERPYECGECGKSFSRKGHLRNHQRGHTGERPYECGECGKSFSRKGNLIQHQRSHTGERPYECRECRKLFRGKSHLIEHQRVHTGERPYECNECGKSFQDSSGFRVHQRVHTGEKPFECSECGKSFPQSCSLLRHRRVHTGERPYECGECGKSFHQSSSLLRHQKTHTAERPYECRECGKFFSSLLEHRRVHTGERPYECRECGKTFTRRSAHFKHQRLHTRGKPYECSECGKSFAETFSLTEHRRVHTGERPYECSECGKSFHRSSSLLRHQRVHTERSPYK

SEQ ID NO: 15352 - protein, 2111 aa, Homo sapiens
MLRVFILYAENVHTPDTDISDAYCSAVFAGVKKRTKVIKNSVNPVWNEGFEWDLKGIPLDQGSELHVVVKDHETMGRNRFLGEAKVPLREVLATPSLSASFNAPLLDTKKQPTGASLVLQVSYTPLPGAVPLFPPPTPLEPSPTLPDLDVVAGGGQSRAETWSLLSDSTMDTRYSGKKWPAPTDTGGEEDTEDQGLTGDEAEPFLDQSGGPGAPTTPRKLPSRPPPHYPGIKRKRSAPTSRKLLSDKPQDFQIRVQVIEGRQLPGVNIKPVVKVTAAGQTKRTRIHKGNSPLFNETLFFNLFDSPGELFDEPIFITVVDSRSLRTDALLGEFRMDVGTIYREPRHAYLRKWLLLSDPDDFSAGARGYLKTSLCVLGPGDEAPLERKDPSEDKEDIESNLLRPTGVALRGAHFCLKVFRAEDLPQMDDAVMDNVKQIFGFESNKKNLVDPFVEVSFAGKMLCSKILEKTANPQWNQNITLPAMFPSMCEKMRIRIIDWDRLTHNDIVATTYLSMSKISAPGGEIEEEPAGAVKPSKASDLDDYLGFLPTFGPCYINLYGSPREFTGFPDPYTELNTGKGEGVAYRGRLLLSLETKLVEHSEQKVEDLPADDILRVEKYLRRRKYSLFAAFYSATMLQDVDDAIQFEVSIGNYGNKFDMTCLPLASTTQYSRAVFDGCHYYYLPWGNVKPVVVLSSYWEDISHRIETQNQLLGIADRLEAGLEQVHLALKAQCSTEDVDSLVAQLTDELIAGCSQPLGDIHETPSATHLDQYLYQLRTHHLSQITEAALALKLGHSELPAALEQAEDWLLRLRALAEEPQNSLPDIVIWMLQGDKRVAYQRVPAHQVLFSRRGANYCGKNCGKLQTIFLKYPMEKVPGARMPVQIRVKLWFGLSVDEKEFNQFAEGKLSVFAETYENETKLALVGNWGTTGLTYPKFSDVTGKIKLPKDSFRPSAGWTWAGDWFVCPEKTLLHDMDAGHLSFVEEVFENQTRLPGGQWIYMSDNYTDVNGEKVLPKDDIECPLGWKWEDEEWSTDLNRAVDEQGWEYSITIPPERKPKHWVPAEKMYYTHRRRRWVRLRRRDLSQMEALKRHRQAEAEGEGWEYASLFGWKFHLEYRKTDAFRRRRWRRRMEPLEKTGPAAVFALEGALGGVMDDKSEDSMSVSTLSFGVNRPTISCIFDYGNRYHLRCYMYQARDLAAMDKDSFSDPYAIVSFLHQSQKTVVVKNTLNPTWDQTLIFYEIEIFGEPATVAEQPPSIVVELYDHDTYGADEFMGRCICQPSLERMPRLAWFPLTRGSQPSGELLASFELIQREKPAIHHIPGFEVQETSRILDESEDTDLPYPPPQREANIYMVPQNIKPALQRTAIEILAWGLRNMKSYQLANISSPSLVVECGGQTVQSCVIRNLRKNPNFDICTLFMEVMLPREELYCPPITVKVIDNRQFGRRPVVGQCTIRSLESFLCDPYSAESPSPQGGPDDVSLLSPGEDVLIDIDDKEPLIPIQEEEFIDWWSKFFASIGEREKCGSYLEKDFDTLKVYDTQLENVEAFEGLSDFCNTFKLYRGKTQEETEDPSVIGEFKGLFKIYPLPEDPAIPMPPRQFHQLAAQGPQECLVRIYIVRAFGLQPKDPNGKCDPYIKISIGKKSVSDQDNYIPCTLEPVFGKMFELTCTLPLEKDLKITLYDYDLLSKDEKIGETVVDLENRLLSKFGARCGLPQTYCVSGPNQWRDQLRPSQLLHLFCQQHRVKAPVYRTDRVMFQDKEYSIEEIEAGRIPNPHLGPVEERLALHVLQQQGLVPEHVESRPLYSPLQPDIEQGKLQMWVDLFPKALGRPGPPFNITPRRARRFFLRCIIWNTRDVILDDLSLTGEKMSDIYVKGWMIGFEEHKQKTDVHYRSLGGEGNFNWRFIFPFDYLPAEQVCTIAKKDAFWRLDKTESKIPARVVFQIWDNDKFSFDDFLGSLQLDLNRMPKPAKTAKKCSLDQLDDAFHPEWFVSLFEQKTVKGWWPCVAEEGEKKILAGKLEMTLEIVAESEHEERPAGQGRDEPNMNPKLEDPRRPDTSFLWFTSPYKTMKFILWRRFRWAIILFIILFILLLFLAIFIYAFPNYAAMKLVKPFS

SEQ ID NO: 15353 - protein, 1329 aa, Homo sapiens
QGYKLIAWEPEQEEEVTMVTARPNFQDSIHVGFVSGLKKFTEYFTSVLCFTTPGDGPRSTPQLVRTHEDVPGPVGHLSFSEILDTSLKVSWQEPGEKNGILTGYRISWEEYNRTNTRVTHYLPNVTLEYRVTGLTALTTYTIEVAAMTSKGQGQVSASTISSGVPPELPGPPTNLGISNIGPRSVTLQFRPGYDGKTSISRWLVEAQVGVVGEGEEWLLIHQLSNEPDARSMEVPDLNPFTCYSFRMRQVNIVGTSPPSQPSRKIQTLQAPPDMAPANVSLRTASETSLWLRWMPLPEMEYNGNPESVGYKIKYSRSDGHGKTLSHVVQDRVERDYTIEDLEEWTEYRVQVQAFNAIGSGPWSQTVVGRTRESVPSSGPTNVSALATTSSSMLVRWSEVPEADRNGLVLGYKVMYKEKDSDTQPRFWLVEGNSSRSAQLTGLGKYVLYEVQVLAFTRIGDGSPSHPPILERTLDDVPGPPMGILFPEVRTTSVRLIWQPPAAPNGIILAYQITHRLNTTTANTATVEVLAPSARQYTATGLKPESVYLFRITAQTRKGWGEAAEALVVTTEKRDRPQPPSRPMVQQEDVRARSVLLSWEPGSDGLSPVRYYTIQTRELPSGRWALHSASVSHNASSFIVDRLKPFTSYKFRVKATNDIGDSEFSEESESLTTLQAAPDEAPTILSVTPHTTTSVLIRWQPPAEDKINGILLGFRIRYRELLYEGLRGFTLRGINNPGATWAELTYLNKHRRYEIRMSVYNAVGEGPSSPPQEVFVGEAVPTAAPRNVVVHGATATQLDVTWEPPPLDSQNGDIQGYKIYFWEAQRGNLTERVKTLFLAENSVKLKNLTGYTAYMVSVAAFNAAGDGPRSTPTQGQTQQAAPSAPSSVKFSELTTTSVNVSWEAPQFPNGILEGYRLVYEPCSPVDGVSKIVTVDVKGNSPLWLKVKDLAEGVTYRFRIRAKTFTYGPEIEANVTTGPGEGAPGPPGVPIIVRYSSAIAIHWSSGDPGKGPITRYVIEARPSDEGLWDILIKDIPKEVSSYTFSMDILKPGVSYDFRVIAVNDYGFGTPSSPSQSVPAQKANPFYEEWWFLVVIALVGLIFILLLVFVLIIRGQSKKYAKKTDSGNSAKSGALGHSEMMSLDESSFPALELNNRRLSVKNSFCRKNGLYTRSPPRPSPGSLHYSDEDVTKYNDLIPAESSSLTEKPSEISDSQGSDSEYEVDSNHQKAHSFVNHYISDPTYYNSWRRQQKGISRAQAYSYTESDSGEPDHTTVTNSTSTQQGSLFRPKASRTPTPQNPPNPPSQQSTLYRPPSSLAPGSRAPIAGFSSFV

SEQ ID NO: 15354 - protein, 510 aa, Homo sapiens
MDSRVSGTTSNGETKPVYPVMEKKEEDGTLERGHWNNKMEFVLSVAGEIIGLGNVWRFPYLCYKNGGEHCMEFQKTNGSLNGTSENATSPVIEFWERRVLKISDGIQHLGALRWELALCLLLAWVICYFCIWKGVKSTGKVVYFTATFPYLMLVVLLIRGVTLPGAAQGIQFYLYPNLTRLWDPQVWMDAGTQIFFSFAICLGCLTALGSYNKYHNNCYRDCIALCFLNSGTSFVAGFAIFSILGFMSQEQGVPISEVAESGPGLAFIAYPRAVVMLPFSPLWACCFFFMVVLLGLDSQFVCVESLVTALVDMYPHVFRKKNRREVLILGVSVVSFLVGLIMLTEGGMYVFQLFDYYAASGMCLLFVAIFESLCVAWVYGAKRFYDNIEDMIGYRPWPLIKYCWLFLTPAVCTATFLFSLIKYTPLTYNKKYTYPWWGDALGWLLALSSMVCIPAWSLYRLGTLKGPFRERIRQLMCPAEDLPQRNPAGPSAPATPRTSLLRLTELESHC

SEQ ID NO: 15355 - protein, 543 aa, Homo sapiens
MLGFLSRGPSMKLCMGLACVLSLWNTVSGIKGEAKKEKGMTFLPTTGKWVIRAPFQLTCLEIKMLRRKKMGHSRAALNPDLLLSGLREEERKEKGVAFLATTELPARSIDLSALNLTELVNGMLSRALKDSKKFFSLLSVTSYSSFAFHKFSVAVYNISNLKTVDPAKFPTRYCYCLNNRTNDLSDFTALLVDIIGNSTSYLTEIFKSTSILSVNQSNESDCIFICVMTGKSGRNLSDFWEIEEKYPIINYTFTSGLSGVLGAATRGTARTSKPTTKSQKTLPSTSPGHWTQSTPWASALRSSPWTETAAPSETEETLNTGRPPELPARATATWFSASHTLPALATRRVARTQWLTADRQTWASISSVPWAQTISEKKPGGSLWETRSSPPTTAGTEEAMNTTSLLAPAAEIMATPGSPSQASPTLGAFTHGTQTPSPTKATAPRYPQTGDLSAEWPFTAGEEPVLVPRPHQVSRCPQPLFKVGAMAAAPLTLAIQRLNPCLMELCQFFQQCLCMSQRSPRTEDMSSFINPYQSSTSKISWKT

SEQ ID NO: 15356 - protein, 315 aa, Homo sapiens
MKVLLLTGLGALFFAYYWDDNFDPASLQGARVLLTGANAGVGEELAYHYARLGSHLVLTAHTEALLQKVVGNCRKLGAPKVFYIAADMASPEAPESVVQFALDKLGGLDYLVLNHIGGAPAGTRARSPQATRWLMQVNFVSYVQLTSRALPSLTDSKGSLVVVSSLLGRVPTSFSTPYSAAKFALDGFFGSLRRELDVQDVNVAITMCVLGLRDRASAAEAVRSSTSRPRQPEHRGVPLQSQTAMFLPPTVPGARTLTETPLRGWPQPKMKSSRQKSKTEKNDGHLEPVTAWEVQVPRVRRLCRGLARPHLFGHD

SEQ ID NO: 15357 - protein, 752 aa, Homo sapiens
MARHLLLPLVMLVISPIPGAFQDSALSPTQEEPEDLDCGRPEPSARIVGGSNAQPGTWPWQVSLHHGGGHICGGSLIAPSWVLSAAHCFMTNGTLEPAAEWSVLLGVHSQDGPLDGAHTRAVAAIVVPANYSQVELGADLALLRLASPASLGPAVWPVCLPRASHRFVHGTACWATGWGDVQEADPLPLPWVLQEVELRLLGEATCQCLYSQPGPFNLTLQILPGMLCAGYPEGRRDTCQGDSGGPLVCEEGGRWFQAGITSFGFGCGRRNRPGVFTAVATYEAWIREQVMGSEPGPAFPTQPQKTQSDPQEPREENCTIALPECGKAPRPGAWPWEAQVMVPGSRPCHGALVSESWVLAPASCFLDPNSSDSPPRDLDAWRVLLPSRPRAERVARLVQHENASWDNASDLALLQLRTPVNLSAASRPVCLPHPEHYFLPGSRCRLARWGRGEPALGPGALLEAELLGGWWCHCLYGRQGAAVPLPGDPPHALCPAYQEKEEVGSCWNDSRWSLLCQEEGTWFLAGIRDFPSGCLRPRAFFPLQTHGPWISHVTRGAYLEDQLAWDWGPDGEETETQTCPPHTEHGACGLRLEAAPVGVLWPWLAEVHVAGDRVCTGILLAPGWVLAATHCVLRPGSTTVPYIEVYLGRAGASSLPQGHQMTSAPPLLCQMTEGSWILVGMAVQGSRELFAAIGPEEAWISQTVGEANFLPPSGSPHWPTGGSNLCPPELAKASGSPHAVYFLLLLTLLIQS

SEQ ID NO: 15358 - protein, 290 aa, Homo sapiens
MATANQTAQQPSSPAMRRLTVDDFEIGRPLGKGKFGNVYLARLKESHFIVALKVLFKSQIEKEGLEHQLRREIEIQAHLQHPNILRLYNYFHDARRVYLILEYAPRGELYKELQKSEKLDEQRTATIIEELADALTYCHDKKVIHRDIKPENLLLGFRGEVKIADFGWSVHTPSLRRKTMCGTLDYLPPEMIEGRTYDEKVDLWCIGVLCYELLVGYPPFESASHSETYRRILKVDVRFPLSMPLGARDLISRLLRYQPLERLPLAQILKHPWVQAHSRRVLPPCAQMAS

SEQ ID NO: 15359 - protein, 897 aa, Homo sapiens
MDWQPDEQGLQQVLQLLKDSQSPNTATQRIVQDKLKQLNQFPDFNNYLIFVLTRLKSEDEPTRSLSGLILKNNVKAHYQSFPPPVADFIKQECLNNIGDASSLIRATIGILITTIASKGELQMWPELLPQLCNLLNSEDYNTCEGAFGALQKICEDSSELLDSDALNRPLNIMIPKFLQFFKHCSPKIRSHAIACVNQFIMDRAQALMDNIDTFIEHLFALAVDDDPEVRKNVCRALVMLLEVRIDRLIPHMHSIIQYMLQRTQDHDENVALEACEFWLTLAEQPICKEVLASHLVQLIPILVNGMKYSEIDIILLKGDVEEDEAVPDSEQDIKPRFHKSRTVTLPHEAERPDGSEDAEDDDDDDALSDWNLRKCSAAALDVLANVFREELLPHLLPLLKGLLFHPEWVVKESGILVLGAIAEGCMQGMVPYLPELIPHLIQCLSDKKALVRSIACWTLSRYAHWVVSQPPDMHLKPLMTELLKRILDGNKRVQEAACSAFATLEEEACTELVPYLSYILDTLVFAFGKYQHKNLLILYDAIGTLADSVGHHLNQPEYIQKLMPPLIQKWNELKDEDKDLFPLLECLSSVATALQSGFLPYCEPVYQRCVTLVQKTLAQAMMYTQHPEQYEAPDKDFMIVALDLLSGLAEGLGGHVEQLVARSNIMTLLFQCMQDSMPEVRQSSFALLGDLTKACFIHVKPCIAEFMPILGTNLNPEFISVCNNATWAIGEICMQMGAEMQPYVQMVLNNLVEIINRPNTPKTLLENTGRLTSPSAIPAITIGRLGYVCPQEVAPMLQQFIRPWCTSLRNIRDNEEKDSAFRGICMMIGVNPGGVVQDFIFFCDAVASWVSPKDDLRDMFYKILHGFKDQVGEDNWQQFSEQFPPLLKERLAAFYGV

SEQ ID NO: 15360 - protein, 1013 aa, Homo sapiens
MDLFRMRCYLASLQGGELPNPKSLLAAASRPSKLALGRLGILSVSSFHALVCSRDDSALRKRTLSLTQRGRNKKGIFSSLKGLDTLARKGKEKRPSITQVDELLHIYGSTVDGVPRDNAWEIQTYVHFQDNHGVTVGIKPEHRVEDILTLACKMRQLEPSHYGLQLRKLVDDNVEYCIPAPYEYMQQQVYDEIEVFPLNVYDVQLTKTGSVCDFGFAVTAQVDERQHLSRIFISDVLPDGLAYGEGLRKGNEIMTLNGEAVSDLDLKQMEALFSEKSVGLTLIARPPDTKATLCTSWSDSDLFSRDQKSLLPPPNQSQLLEEFLDNFKKNTANDFSNVPDITTGLKRSQTDGTLDQVSHREKMEQTFRSAEQITALCRSFNDSQANGMEGPRENQDPPPRSLARHLSDADRLRKVIQELVDTEKSYVKDLSCLFELYLEPLQNETFLTQDEMESLFGSLPEMLEFQKVFLETLEDGISASSDFNTLETPSQFRKLLFSLGGSFLYYADHFKLYSGFCANHIKVQKVLERAKTDKAFKAFLDARNPTKQHSSTLESYLIKPVQRVLKYPLLLKELVSLTDQESEEHYHLTEALKAMEKVASHINEMQKIYEDYGTVFDQLVAEQSGTEKEVTELSMGELLMHSTVSWLNPFLSLGKARKDLELTVFVFKRAVILVYKENCKLKKKLPSNSRPAHNSTDLDPFKFRWLIPISALQVRLGNPAGTENNSIWELIHTKSEIEGRPETIFQLCCSDSESKTNIVKVIRSILRENFRRHIKCELPLEKTCKDRLVPLKNRVPVSAKLASSRSLKVLKNSSSNEWTGETGKGTLLDSDEGSLSSGTQSSGCPTAEGRQDSKSTSPGKYPHPGLADFADNLIKESDILSDEDDDHRQTVKQGSPTKDIEIQFQRLRISEDPDVHPEAEQQPGPESGEGQKGGEQPKLVRGHFCPIKRKANSTKRDRGTLLKAQIRHQSLDSQSENATIDLNSVLEREFSVQSLTSVVSEECFYETESHGKS

SEQ ID NO: 15361 - protein, 525 aa, Homo sapiens
MGWLFLKVLLAGVSFSGFLYPLVDFCISGKTRGQKPNFVIILADDMGWGDLGANWAETKDTANLDKMASEGMRFVDFHAAASTCSPSRASLLTGRLGLRNGVTRNFAVTSVGGLPLNETTLAEVLQQAGYVTGIIGKWHLGHHGSYHPNFRGFDYYFGIPYSHDMGCTDTPGYNHPPCPACPQGDGPSRNLQRDCYTDVALPLYENLNIVEQPVNLSSLAQKYAEKATQFIQRASTSGRPFLLYVALAHMHVPLPVTQLPAAPRGRSLYGAGLWEMDSLVGQIKDKVDHTVKENTFLWFTGDNGPWAQKCELAGSVGPFTGFWQTRQGGSPAKQTTWEGGHRVPALAYWPGRVPVNVTSTALLSVLDIFPTVVALAQASLPQGRRFDGVDVSEVLFGRSQPGHRVLFHPNSGAAGEFGALQTVRLERYKAFYITGGARACDGSTGPELQHKFPLIFNLEDDTAEAVPLERGGAEYQAVLPEVRKVLADVLQDIANDNISSADYTQDPSVTPCCNPYQIACRCQAA

SEQ ID NO: 15362 - protein, 830 aa, Homo sapiens
MTPSLSAEENRMYNKMWHQTQEALGALLDKEPQKMIEPQRNQVFIFQTLATFYVKYVQIFRNLENVYDQFVHPQKRILIRKVLDGVMGRILELKNEMVELELTEFHYFDDILQDLKLAPQQLDIPIPKYFLKEKLEVIKGREKILAQILADSGIDTSDMKYPVKSIPFDEAVKLIQIAERARQGRLRALFMKQIYLQEYRAKQSKMLGKKVTDTWAAALRIQKVWRRFHQRKETEKLREEEMIFLGMNPPPLFNEVSATVIQAEKVDRLRNEVQIKHEEDYREALVTIKNDLKLIEGVDIKENLQDQIRHWFIECRNLTGTFPDYPDVEEGGSAIIFSDKTIQQVIEDIIANQEEEEKNKKKKKKKEKQPKKAKKQKKGTKEKNKEEDEKWKMSPSLFLPAMKEGCNAYKEIWMKKDESWNFSQDYDPELIKEEKRKELQSEIRIQVDELMRQELKNLKLAVDRERERPVKAGKKKDKKKGKKGKKKEKKAKKDKDLTADRTIESLYKELVEEGLLIQALKVNLSDYIGEYSYLGTTLRQVSIEPMPSLLDVRQLITLYGIWPLGSAAVHEKAPLVKSLLLAGPSGVGKKMLVHAICTETGANLFNLSSSNIAGKYPGKNGLQMMLHAVFKVARQLQPSVVWIEDTEKTFYKKVPNAEKMNEPKRLKKHLPQILKLLKPDDRILIVGTTRRPFDAELQSFCKVYQKIILVPRPDYASRYVLWKQIIERNGGVLTSALNVSCLAKVTDGFTQGHIVEVVKGVLTDQRIRRQIHKPLTAVEFITAITSMNPVYKEEEESFKNWYAKTPLGKKRALAITGGSTEKAKDKGKRK

SEQ ID NO: 15363 - protein, 445 aa, Homo sapiens
MSLVEAISLWNEGVLAADKKDWKGALDAFSAVQDPHSRICFNIGCMYTILKNMTEAEKAFTRSINRDKHLAVAYFQRGMLYYQTEKYDLAIKDLKEALIQLRGNQLIDYKILGLQFKLFACEVVASVVDQDSFSGFAPLQPQAAEPPPRPKTPEIFRALEGEAHRVLFGFVPETKEELQVMPGNIVFVLKKGNDNWATVMFNGQKGLVPCNYLEPVELRIHPQQQPQEESSPQSDIPAPPSSKAPGRPQLSPGQKQKEEPKEVKLSVPMPYTLKVHYKYTVVMKTQPGLPYSQVRDMVSKKLELRLEHTKLSYRPRDSNELVPLSEDSMKDAWGQVKNYCLTLWCENTVGDQGFPDEPKESEKADANNQTTEPQLKKGSQVEALFSYEATQPEDLEFQEGDIILVLSKVNEEWLEGECKGKVGIFPKVFVEDCATTDLESTRREV

SEQ ID NO: 15364 - protein, 1590 aa, Homo sapiens [sequence omitted]

SEQ ID NO: 15365 - protein, 1152 aa, Homo sapiens
MSTLLDIKSSVLRQVQVCPSFRRRTEQDPGSASADPQEPATGAWKPGDGVEFFAHMRLMLKKGEGRQGLPCLEVPLRSGSPAPPEPVDPSLGLRALAPEEVEMLYEEALYTVLYRAGTMGPDQVDDEEALLSYLQQVFGTSLEEHTEAIERVRKAKAPTYALKVSVMRAKNLLAKDPNGFSDPYCMLGILPASDATREPRAQKEQRFGFRKGSKRGGPLPAKCIQVTEVKSSTLNPVWKEHFLFEIEDVSTDQLHLDIWDHDDDVSLVEACRKLNEVIGLKGMGRYFKQIVKSARANGTAGPTEDHTDDFLGCLNIPVREVPVAGVDRWFKLEPRSSASRVQGHCHLVLKLITTQRDTAMSQRGRSGFLSHLLLLSHLLRLEHSAEEPNSSSWRGELSTPAATILCLHGAQSNLSPLQLAVLHWQVSSRHHQTCTLDYSYLLGLLEDMQAHWEEAPSLPQEQEESLADSLSAFSEFGLQLLRQLRDYFPATNSTAVHRLELLLKCLGKLQLFQPSFEICPFESELNMDIAAALKRGNREWYDRILNDKSPREQPGPQRLPGLVVLADAVYDDLQFCYSVYASLFHSILNVDVFTLTFRQLERLVAEEAWVLTEELSPKMTLEVASGLFELYLTLADLQRFWDSIPGRDSRSLALAGIHAPFLPAVKLWFQVLRDQAKWRLQGAVDMDTLEPVDASSRHSSSAATAGLCLSHIQELWVRLAWPDPAQAQGLGTQLGQDVCEATLFYTELLRKKVDTQPGAAGEAVSEALCVVLNNVELVRKAAGQALKGLAWPEGATGPEGVLPRPLLSCTQALDDDLQREAHTVTAHLTSKMVGDIRKYVQHISLSPDSIQNDEAVAPLMKYLDEKLALLNASLVKGNLSRVLEALWELLLQAILQALGANRDVSADFYSRFHFTLEALVSFFHAEGQGLPLESLRDGSYKRLKEELRLHKCSTRECIEQFYLDKLKQRTLEQNRFGRLSVRCHYEAAEQRLAVEVLHAADLLPLDANGLSDPFVIVELGPPHLFPLVRSQRTQVKTRTLHPVYDELFYFSVPAEACRRRAACVLFTVMDHDWLSTNDFAGEAALGLGGVTGVARPQVGGGARAGQPVTLHLCRPRAQVRSALRRLEGRTSKEAQEFVKKLKELEKCMEADP

SEQ ID NO: 15366 - protein, 2485 aa, Homo sapiens
MHVSLAEALEVRGGPLQEEEIWAVLNQSAESLQELFRKVSLADPAALGFIISPWSLLLLPSGSVSFTDENISNQDLRAFTAPEVLQNQSLTSLSDVEKIHIYSLGMTLYWGADYEVPQSQPIKLGDHLNSILLGMCEDVIYARVSVRTVLDACSAHIRNSNCAPSFSYVKHLVKLVLGNLSGTDQLSCNSEQKPDRSQAIRDRLRGKGLPTGRSSTSDVLDIQKPPLSHQTFLNKGLSKSMGFLSIKDTQDENYFKDILSDNSGREDSENTFSPYQFKTSGPEKKPIPGIDVLSKKKIWASSMDLLCTADRDFSSGETATYRRCHPEAVTVRTSTTPRKKEARYSDGSIALDIFGPQKMDPIYHTRELPTSSAISSALDRIRERQKKLQVLREAMNVEEPVRRYKTYHGDVFSTSSESPSIISSESDFRQVRRSEASKRFESSSGLPGVDETLSQGQSQRPSRQYETPFEGNLINQEIMLKRQEEELMQLQAKMALRQSRLSLYPGDTIKASMLDITRDPLREIALETAMTQRKLRNFFGPEFVKMTIEPFISLDLPRSILTKKGKNEDNRRKVNIMLLNGQRLELTCDTKTICKDVFDMVVAHIGLVEHHLFALATLKDNEYFFVDPDLKLTKVAPEGWKEEPKKKTKATVNFTLFFRIKFFMDDVSLIQHTLTCHQYYLQLRKDILEERMHCDDETSLLLASLALQAEYGDYQPEVHGVSYFRMEHYLPARVMEKLDLSYIKEELPKLHNTYVGASEKETELEFLKVCQRLTEYGVHFHRVHPEKKSQTGILLGVCSKGVLVFEVHNGVRTLVLRFPWRETKKISFSKKKITLQNTSDGIKHGFQTDNSKICQYLLHLCSYQHKFQLQMRARQSNQDAQDIERASFRSLNLQAESVRGFNMGRAISTGSLASSTLNKLAVRPLSVQAEILKRLSCSELSLYQPLQNSSKEKNDKASWEEKPREMSKSYHDLSQASLYPHRKNVIVNMEPPPQTVAELVGKPSHQMSRSDAESLAGVTKLNNSKSVASLNRSPERRKHESDSSSIEDPGQAYVLGMTMHSSGNSSSQVPLKENDVLHKRWSIVSSPEREITLVNLKKDAKYGLGFQIIGGEKMGRLDLGIFISSVAPGGPADLDGCLKPGDRLISVNSVSLEGVSHHAAIEILQNAPEDVTLVISQPKEKISKVPSTPVHLTNEMKNYMKKSSYMQDSAIDSSSKDHHWSRGTLRHISENSFGPSGGLREGSLSSQDSRTESASLSQSQVNGFFASHLGDQTWQESQHGSPSPSVISKATEKETFTDSNQSKTKKPGISDVTDYSDRGDSDMDEATYSSSQDHQTPKQESSSSVNTSNKMNFKTFSSSPPKPGDIFEVELAKNDNSLGISVTGGVNTSVRHGGIYVKAVIPQGAAESDGRIHKGDRVLAVNGVSLEGATHKQAVETLRNTGQVVHLLLEKGQSPTSKEHVPVTPQCTLSDQNAQGQGPEKVKKTTQVKDYSFVTEENTFEVKLFKNSSGLGFSFSREDNLIPEQINASIVRVKKLFPGQPAAESGKIDVGDVILKVNGASLKGLSQQEVISALRGTAPEVFLLLCRPPPGVLPEIDTALLTPLQSPAQVLPNSSKDSSQPSCVEQSTSSDENEMSDKSKKQCKSPSRRDSYSDSSGSGEDDLVTAPANISNSTWSSALHQTLSNMVSQAQSHHEAPKSQEDTICTMFYYPQKIPNKPEFEDSNPSPLPPDMAPGQSYQPQSESASSSSMDKYHIHHISEPTRQENWTPLKNDLENHLEDFELEVELLITLIKSEKGSLGFTVTKGNQRIGCYVHDVIQDPAKSDGRLKPGDRLIKVNDTDVTNMTHTDAVNLLRAASKTVRLVIGRVLELPRIPMLPHLLPDITLTCNKEELGFSLCGGHDSLYQVVYISDINPRSVAAIEGNLQLLDVIHYVNGVSTQGMTLEEVNRALDMSLPSLVLKATRNDLPVVPSSKRSAVSAPKSTKGNGSYSVGSCSQPALTPNDSFSTVAGEEINEISYPKGKCSTYQIKGSPNLTLPKESYIQEDDIYDDSQEAEVIQSLLDVVDEEAQNLLNENNAAGYSCGPGTLKMNGKLSEERTEDTDCDGSPLPEYFTEATKMNGCEEYCEEKVKSESLIQKPQEKKTDDDEITWGNDELPIERTNHEDSDKDHSFLTNDELAVLPVVKVLPSGKYTGANLKSVIRVLRGLLDQGIPSKELENLQELKPLDQCLIGQTKENRRKNRYKNILPYDATRVPLGDEGGYINASFIKIPVGKEEFVYIACQGPLPTTVGDFWQMIWEQKSTVIAMMTQEVEGEKIKCQRYWPNILGKTTMVSNRLRLALVRMQQLKGFVVRAMTLEDIQTREVRHISHLNFTAWPDHDTPSQPDDLLTFISYMRHIHRSGPIITHCSAGIGRSGTLICIDVVLGLISQDLDFDISDLVRCMRLQRHGMVQTEDQYIFCYQVILYVLTRLQAEEEQKQQPQLLK

SEQ ID NO: 15367 - protein, 142 aa, Homo sapiens
GEKDTSLYRPALEELRRQIRSSTTSMTSVPKPLKFLRPHYGKLKEIYENMAPGENKRFAADIISVLAMTMSGERECLKYRLVGSQEELASWGHEYVREVLPLKLCSLNRLGLSVGIWQEKWLRSGRSWMTQRRSSGSLCSLW

SEQ ID NO: 15368 - protein, 407 aa, Homo sapiens
MAAVGRVGSFGSSPPGLSSTYTGGPLGNEIASGNGGAAAGDDEDGQNLWSCILSEVSTRSRSKLPAGKNVLLLVIRDFQEYVEPGEDFPASPQRRNTASQEDKDDSVVLPLGADTLTHNLGIPVLVVCTKCDAISVLEKEHDYRDEHFDFIQSHIRKFCLQYGAALIYTSVKENKNIDLVYKYIVQKLYGFPYKIPAVVVEKDAVFIPAGWDNDKKIGILHENFQTLKAEDNFEDIITKPPVRKFVHEKEIMAEDDQVFLMKLQSLLAKQPPTAAGRPVDASPRVPGGSPRTPNRSVSSNVASVSPIPAGSKKIDPNMKAGATSEGVLANFFNSLLSKKTGSPGGPGVSGGSPAGGAGGGSSGLPPSTKKSGQKPVLDVHAELDRITRKPVTVSPTTPTSPTEGEAS

SEQ ID NO: 15369 - protein, 184 aa, Homo sapiens
MNGDLELDHDAPPENHTICVKYITSFTAAFSFSLETQLTIGYGTMFPSGDCPSAIALLAIQMLLGLMLEAFITGAFVAKIARPKNRAFSIRFTDTAVVAHMDGKPNLIFQVANTRPSPLTSVRVSAVLYQERENGKLYQTSVDFHLDGISSDECPFFIFPLTYYHSITPSSPLATLLQHENPSH

SEQ ID NO: 15370 - protein, 662 aa, Homo sapiens
MPRGCHLGTPSWSRRNTPRTGQLERGPQQGRTGHVRPGRSAGGSLLQQESVQQGCSPVGSCPCQQYARSQQPQETAKNDAQSRSWAGLNAGVSLKNTKISSSEWPLRLLSEGADVNAKHRLGWTALMVAAINRNNSVVQVLLAAGADPNLGDDFSSVYKTAKEQGIHSLEDGGQDGASRHITNQWTSALEFRRWLGLPAGVLITREDDFNNRLNNRASFKGCTALHYAVLADDYRTVKELLDGGANPLQRNEMGHTPLDYAREGEVMKLLRTSEAKYQEKQRKREAEERRRFPLEQRLKEHIIGQESAIATVGAAIRRKENGWYDEEHPLVFLFLGSSGIGKTELAKQTAKYMHKDAKKGFIRLDMSEFQERHEVAKFIGSPPGYVGHEEGGQLTKKLKQCPNAVVLFDEVDKAHPDVLTIMLQLFDEGRLTDGKGKTIDCKDAIFIMTSNVASDEIAQHALQLRQEALEMSRNRIAENLGDVQISDKITISKNFKENVIRPILKAHFRRDEFLGRINEIVYFLPFCHSELIQLVNKELNFWAKRAKQRHNITLLWDREVADVLVDGYNVHYGARSIKHEVERRVVNQLAAAYEQDLLPGGCTLRITVEDSDKQLLKSPELPSPQAEKRLPKLRLEIIDKDSKTRRLDIRAPLHPEKVCNTI

SEQ ID NO: 15371 - protein, 361 aa, Homo sapiens
MYPEALPVGILSNPDTFKRRSGSYSNDKPEVWFAAGSGSPNQKLSSSCVGRACGEMDTPPLSDSESESDESLVTDRELQDAFSRGLLKPGLNVVLEGPKKAVNDVNGLKQCLAEFKRDLEWVERLDVTLGPVPEIGGSEAPAPQNKDQKAVDPEDDFQREMSFYRQAQAAVLAVLPRLHQLKVPTKRPTDYFAEMAKSDLQMQKIRQKLQTKQAAMERSEKAKQLRALRKYGKKVQTEVLQKRQQEKAHMMNAIKKYQKGFSDKLDFLEGDQKPLAQRKKAGAKGQQMRKGPSAKRRYKNQKFGFGGKKKGSKWNTRESYDDVSSFRAKTAHGRGLKRPGKKGSNKRPGKRTREKMKNRTH

SEQ ID NO: 15372 - protein, 125 aa, Homo sapiens
MAGWIQAQQLQGDALRQMQVLYGQHFPIEVRHYLAQWIESQPWDAIDLDNPQDRAQATQLLEGLVQELQKKAEHQVGEDGFLLKIKLGHYATQLQKTYDRCPLELVRCIRHILYNEQRLVREANN

SEQ ID NO: 15373 - protein, 659 aa, Homo sapiens
MTASPDYLVVLFGITAGATGAKLGSDEKELILLFWKVVDLANKKVGQLHEVLVRPDQLELTEDCKEETKIDVESLSSASQLDQALRQFNQSVSNELNIGVGTSFCLCTDGQLHVRQILHPEASKKNVLLPECFYSFFDLRKEFKKCCPGSPDIDKLDVATMTEYLNFEKSSSVSRYGASQVEDMGNIILAMISEPYNHRFSDPERVNYKFESGTCSKMELIDDNTVVRARGLPWQSSDQDIARFFKGLNIAKGGAALCLNAQGRRNGEALVRFVSEEHRDLALQRHKHHMGTRYIEVYKATGEDFLKIAGGTSNEVAQFLSKENQVIVRMRGLPFTATAEEVVAFFGQHCPITGGKEGILFVTYPDGRPTGDAFVLFACEEYAQNALRKHKDLLGKRYIELFRSTAAEVQQVLNRFSSAPLIPLPTPPIIPVLPQQFVPPTNVRDCIRLRGLPYAATIEDILDFLGEFATDIRTHGVHMVLNHQGRPSGDAFIQMKSADRAFMAAQKCHKKNMKDRYVEVFQCSAEEMNFVLMGGTLNRNGLSPPPCLSPPSYTFPAPAAVIPTEAAIYQPSVILNPRALQPSTAYYPAGTQLFMNYTAYYPSPPGSPNSLGYFPTAANLSGVPPQPGTVVRMQGLAYNTGVKEILNFFQGYQCLKDVW

SEQ ID NO: 15374 - protein, 409 aa, Homo sapiens
MKDTQDIQEASKAMQNKVHEQEDKNEKQKQREDKLGVYSLVHFSPKMLGSVATTLPLSSSNSSGMPLGYYLSSPQISRVTISTTGQLTSKATVGSCSRVENSLDASPFSVPKKQDESPMIGDGEDYFLSLFGDSKKLTAHSNYTQKTLKYFSMILEEVGQFTSSSLGDVEIAEVNVKGLFVKLINSSLDKEMAIGDHILQQNVNGQTISLYRFLPNIVMQANSTVTVWAAASEAKHQPPSDFLWKEQDKFRASPDCITILCKPNGQAIAWYTPIHWKQAWEKLDADVEFNRCSVVSPTFRKRVFQWTASTATITKEKQDQPKKDISNYQVEQAQVLLKREKEIPPTVFPNRSPWCQNPYVSAHPYCPLIEPHNTSTAGGRLDRQPRTRSTRPNRASGSKKKKTSESQKQ

SEQ ID NO: 15375 - protein, 538 aa, Homo sapiens
MAAETLLSSLLGLLLLGLLLPASLTGGVGSLNLEELSEMRYGIEILPLPVMGGQTKDWWTYEFCYGRHIQQYHMEDSEIKGEVLYLGYYQSAFDWDDETAKASKQHRLKRYHSQTYGNGSKCDLNGRPREAEVRFLCDEGAGISGDYIDRVDEPLSCSYVLTIRTPRLCPHPLLRPPPSAAPQAILCHPSLQPEEYMAYVQRQADSKQYGDKIIEELQDLGPQVWSETKSGVAPQKMAGASPTKDDSKDSDFWKMLNEPEDQAPGGEEVPAEEQDPSPEAADSASGAPNDFQNNVQVKVIRSPADLIRFIEELKGGTKKGKPNIGQEQPVDDAAEVPQREPEKERGDPERQREMEEEEDEDEDEDEDEDERQLLGEFEKELEGILLPSDRDRLRSETEKELDPDGLKKESERDRAMLALTSTLNKLIKRLEEKQSPELVKKHKKKRVVPKKPPPSPQPTGKIEIKIVRPWAEGTEEGARWLTDEDTRNLKEIFFNILVPGAEEAQKERQRQKELESNYRRVWGSPGGEGTGDLDEFDF

SEQ ID NO: 15376 - protein, 725 aa, Homo sapiens
MDTEFGASSFFHSPASCHESHSSLSPESSAPQHSSPSRSALKLLTSVEVDNIEPSAFHRQGLPKAPGWTEKNSHHSWEPLDAPEGKLQGSRCDNSSCSKLPPQEGRGIAQEQLFQEKKDPANPSPVMPGIATSERGDEHSLGCSPSNSSAQPSLPLYRTCHPIMPVASSFVLHCPDPVQKTNQCLQGQSLKTSLTLKVDRGSEETYRPEFPSTKGLVRSLAEQFQRMQGVSMRDSTGFKDRSLSGSLRKNSSPSDSKPPFSQGQEKGHWPWAKQQSSLEGGDRPLSWEESTEHSSLALNSGLPNGETSSGGQPRLAEPDIYQEKLSQVRDVRSKDLGSSTDLGTSLPLDSWVNITRFCDSQLKHGAPRPGMKSSPHDSHTCVTYPERNHILLHPHWNQDTEQETSELESLYQASLQASQAGCSGWGQQDTAWHPLSQTGSADGMGRRLHSAHDPGLSKTSTAEMEHGLHEARTVRTSQDSSNVRKPLETGHRCSSSSSLPVIHDPSVFLLGPQLYLPQPQFLSPDVLMPTMAGEPNRLPGTSRSVQQFLAMCDRGETSQGAKYTGRTLNYQSLPHRSRTDNSWAPWSETNQHIGTRFLTTPGCNPQLTYTATLPERSKGLQVPHTQSWSDLFHSPSHPPIVHPVYPPSSSLHVPLRSAWNSDPVPGSRTPGPRRVDMPPDDDWRQSSYASHSGHRRTVGEGFLFVLSDAPRREQIRARVLQHSQW

SEQ ID NO: 15377 - protein, 58 aa, Homo sapiens
MEGGRRARVVIESKRNFFLGAFPTPFPAEHVELGRLGDSETAMVPGKGGADGLQQKSL

SEQ ID NO: 15378 - protein, 1131 aa, Homo sapiens
MEADGAGEQMRPLLTRGPDEEAVVDLGKTSSTVNTKFEKEELESHRAVYIGVHVPFSKESRRRHRHRGHKHHHRRRKDKESDKEDGRESPSYDTPSQRVQFILGTEDDDEEHIPHDLFTEMDELCYRDGEEYEWKETARWLKFEEDVEDGGDRWSKPYVATLSLHSLFELRSCILNGTVMLDMRASTLDEIADMVLDNMIASGQLDESIRENVREALLKRHHHQNEKRFTSRIPLVRSFADIGKKHSDPHLLERNGILASPQSAPGNLDNSKSGEIKGNGSGGSRENSTVDFSKVDMNFMRKIPTGAEASNVLVGEVDFLERPIIAFVRLAPAVLLTGLTEVPVPTRFLFLLLGPAGKAPQYHEIGRSIATLMTDEIFHDVAYKAKDRNDLLSGIDEFLDQVTVLPPGEWDPSIRIEPPKSVPSQEKRKIPVFHNGSTPTLGETPKEAAHHAGPELQRTGRLFGGLILDIKRKAPFFLSDFKDALSLQCLASILFLYCACMSPVITFGGLLGEATEGRISAIESLFGASLTGIAYSLFAGQPLTILGSTGPVLVFEKILYKFCRDYQLSYLSLRTSIGLWTSFLCIVLVATDASSLVCYITRFTEEAFAALICIIFIYEALEKLFDLGETYAFNMHNNLDKLTSYSCVCTEPPNPSNETLAQWKKDNITAHNISWRNLTVSECKKLRGVFLGSACGHHGPYIPDVLFWCVILFFTTFFLSSFLKQFKTKRYFPTKVRSTISDFAVFLTIVIMVTIDYLVGVPSPKLHVPEKFEPTHPERGWIISPLGDNPWWTLLIAAIPALLCTILIFMDQQITAVIINRKEHKLKKGAGYHLDLLMVGVMLGVCSVMGLPWFVAATVLSISHVNSLKVESECSAPGEQPKFLGIREQRVTGLMIFILMGLSVFMTSVLKFIPMPVLYGVFLYMGVSSLKGIQLFDRIKLFGMPAKHQPDLIYLRYVPLWKVHIFTVIQLTCLVLLWVIKVSAAAVVFPMMVLALVFVRKLMDLCFTKRELSWLDDLMPESKKKKEDDKKKKEKEEAERMLQDDDDTVHLPFEGGSLLQIPVKALKYSVDPSIVNISDEMAKTAQWKALSMNTENAKVTRSNMSPDKPVSVKISFEDEPRKKYVDAETSL

SEQ ID NO: 15379 - protein, 1153 aa, Homo sapiens
MAVPARTCGASRPGPARTARPWPGCGPHPGPGTRRPTSGPPRPLWLLLPLLPLLAAPGASAYSFPQQHTMQHWARRLEQEVDGVMRIFGGVQQLREIYKDNRNLFEVQENEPQKLVEKVAGDIESLLDRKVQALKRLADAAENFQKAHRWQDNIKEEDIVYYDAKADAELDDPESEDVERGSKASTLRLDFIEDPNFKNKVNYSYAAVQIPTDIYKGSTVILNELNWTEALENVFMENRRQDPTLLWQVFGSATGVTRYYPATPWRAPKKIDLYDVRRRPWYIQGASSPKDMVIIVDVSGSVSGLTLKLMKTSVCEMLDTLSDDDYVNVASFNEKAQPVSCFTHLVQANVRNKKVFKEAVQGMVAKGTTGYKAGFEYAFDQLQNSNITRANCNKMIMMFTDGGEDRVQDVFEKYNWPNRTVRVFTFSVGQHNYDVTPLQWMACANKGYYFEIPSIGAIRINTQEYLDVLGRPMVLAGKEAKQVQWTNVYEDALGLGLVVTGTLPVFNLTQDGPGEKKNQLILGVMGIDVALNDIKRLTPNYTLGANGYVFAIDLNGYVLLHPNLKPQTTNFREPVTLDFLDAELEDENKEEIRRSMIDGNKGHKQIRTLVKSLDERYIDEVTRNYTWVPIRSTNYSLGLVLPPYSTFYLQANLSDQILQVKLPISKLKDFEFLLPSSFESEGHVFIAPREYCKDLNASDNNTEFLKNFIELMEKVTPDSKQCNNFLLHNLILDTGITQQLVERVWRDQDLNTYSLLAVFAATDGGITRVFPNKAAEDWTENPEPFNASFYRRSLDNHGYVFKPPHQDALLRPLELENDTVGILVSTAVELSLGRRTLRPAVVGVKLDLEAWAEKFKVLASNRTHQDQPQKQCGPNSHCEMDCEVNNEDLLCVLIDDGGFLVLSNQNHQWDQVGRFFSEVDANLMLALYNNSFYTRKESYDYQAACAPQPPGNLGAAPRGVFVPTVADFLNLAWWTSAAAWSLFQQLLYGLIYHSWFQADPAEAEGSPETRESSCVMKQTQYYFGSVNASYNAIIDCGNCSRLFHAQRLTNTNLLFVVAEKPLCSQCEAGRLLQKETHCPADGPEQCELVQRPRYRRGPHICFDYNATEDTSDCGRGASFPPSLGVLVSLQLLLLLGLPPRPQPQVLVHASRRL

SEQ ID NO: 15380 - protein, 126 aa, Homo sapiens
MMGSPVSHLLAGFCVWVVLGWVGGSVPNLGPAEQEQNHYLAQLFGLYGENGTLTAGGLARLLHSLGLGRVQGLRLGQHGPLTGRAASPAADNSTHRPQNPELSVDVWAGMPLGPSGWGDLEESKAP

SEQ ID NO: 15381 - protein, 654 aa, Homo sapiens
MAMRELVEAECGGANPLMKLAGHFTQDKALRQEGLRPGPWPPGAPASEAVSVLEVESPGAASEAASKPLGVASEDELVAEFLQDQNAPLVSRAPQTFKMDDLLAEMQQIEQSNFRQAPQRAPGVADLALSENWAQEFLAAGDAVDVTQDYNETDWSQEFISEVTDPLSVSPARWAEEYLEQSEEKLWLGEPEGTATDRWYDEYHPEEDLQHTASDFVAKVDDPKLANSEFLKFVRQIGEGQVSLESGAGSGRAQAEQWAAEFIQQQGTSDAWVDQFTRPVNTSALDMEFERAKSAIESDVDFWDKLQAELEEMAKRDAEAHPWLSDYDDLTSATYDKGYQFEEENPLRDHPQPFEEGLRRLQEGDLPNAVLLFEAAVQQDPKHMEAWQYLGTTQAENEQELLAISALRRCLELKPDNQTALMALAVSFTNESLQRQACETLRDWLRYTPAYAHLVTPAEEGAGGAGLGPSKRILGSLLSDSLFLEVKELFLAAVRLDPTSIDPDVQCGLGVLFNLSGEYDKAVDCFTAALSVRPNDYLLWNKLGATLANGNQSEEAVAAYRRALELQPGYIRSRYNLGISCINLGAHREAVEHFLEALNMQRKSRGPRGEGGAMSENIWSTLRLALSMLGQSDAYGAADARDLSTLLTMFGLPQ

SEQ ID NO: 15382 - protein, 511 aa, Homo sapiens
MAWSQNNAKFAVCTVDRVVLLYDEHGERRDKFSTKPADMKYGRKSYMVKGMAFSPDSTKIAIGQTDNIIYVYKIGEDWGDKKVICNKFIQTSAVTCLQWPAEYIIVFGLAEGKVRLANTKTNKSSTIYGTESYVVSLTTNCSGKGILSGHADGTIVRYFFDDEGSGESQGKLVNHPCPPYALAWATNSIVAAGCDRKIVAYGKEGHMLQTFDYSRDPQEREFTTAVSSPGGQSVVLGSYDRLRVFNWIPRRSIWEEAKPKEITNLYTITALAWKRDGSRLCVGTLCGGVEQFDCCLRRSIYKNKFELTYVGPSQVIVKNLSSGTRVVLKSHYGYEVEEVKILGKERYLVAHTSETLLLGDLNTNRLSEIAWQGSGGNEKYFFENENVCMIFNAGELTLVEYGNNDTLGSVRTEFMNPHLISVRINERCQRGTEDNKKLAYLIDIKTIAIVDLIGGYNIGTVSHESRVDWLELNETGHKLLFRDRKLRVRRATKALGIGWPTEGVRQAATRD

SEQ ID NO: 15383 - protein, 653 aa, Homo sapiens
SGSPLNLNSMVSNINQPLEITAISSPETSLKSSPVPYQDHDQPPVLKKERPLSQTNGAHYSPLTSDEEPGSEDEPSSARIERKIATISLESKSPPKTLENGGGLAGRKPAPAGEPVNSSKWKSTFSPISDIGLAKSADSPLQASSALSQNSLFTFRPALEEPSADAKLAAHPRKGFPGSLSGADGLSPGTNPANGCTFGGGLAADLSLHSFSDGASLPHKGPEAAGLSSPLSFPSQRGKEGSDANPFLSKRQLDGLAGLKGEGSRGKEAGEGGLPLCGPTDKTPLLSGKAAKARDREVDLKNGHNLFISAAAVPPGSLLSGPGLAPAASSAGGAASSAQTHRSFLGPFPPGPQFALGPMSLQANLGSVAGSSVLQSLFSSVPAAAGLVHVSSAATRLTNSHAMGSFSGVAGGTVGEGHRAQGHQSITFSRGGHLLGVAARALARLWELVLGVFNHAVPSASAHPFGARVGRGAACGSATLGPSPLQAAASASASSFQAPASVETRPPPPPPPPPPPLPPPAHLGRSPAGPPVLHAPPPPNAALPPPPTLLASNPEPALLQSLASLPPNQAFLPPTSAASLPPANASLSIKLTSLPHKGARPSFTVHHQPLPRLALAQAAPGIPQASATGPSAVWVSLGMPPPYAAHLSGVKPR

SEQ ID NO: 15384 - protein, 237 aa, Homo sapiens
MVESLHGLDSRKGVLCLPDSLNLHRDPQRSNKPGELPMFSQSELRTIEQSLLATRVGSIAELSDLVSRAMHHLQPLNAKHHGNGTPLHHKQGALYWEPEALYTLCYFMHCPQMEWENPNVEPSKVNLQVERPFLVLPPLMEWIRVAVAHAGHRRSFSMDSDDVRQAARLLLPGVDCEPRQLRADDCFCASRKLDAVAIEAKFKQDLGFRMLNCGRTDLVKQAVSLLGPDGINTMSEQ

SEQ ID NO: 15385 - protein, 91 aa, Homo sapiens
MGETEKRIETHRIRCLSKLKMFLLAITCAFVSKTLSGSYMNSMLTQIERQFNIPTSLVGFINGSFEIGNLLLIIFVSYFGTKLHRPIMIGI

SEQ ID NO: 15386 - protein, 306 aa, Homo sapiens
MPSTQLLAAAAAAATAPGPTPPPLAPGSLRSPVPCPVPRLPRCHPVLTRHLVLRVQRENPGVLMGGRYTPPDCTPAQTVAVIIPFRHREHHLRYWLHYLHPILRRQRLRYGVYVINQHGEDTFNRAKLLNVGFLEALKEDAAYDCFIFSDVDLVPMDDRNLYRCGDQPRHFAIAMDKFGFRLPYAGYFGGVSGLSKAQFLRINGFPNEYWGWGGEDDDIFNRISLTGMKISRPDIRIGRYRMIKHDRDKHNEPNPQRFTKIQNTKLTMKRDGIGSVRYQVLEVSRQPLFTNITVDIGRPPSWPPRG

SEQ ID NO: 15387 - protein, 163 aa, Homo sapiens
MDDDIAALVVDNGSGMCKAGFAGDDAPRAVFPSIVGRPRHQGVMVGMGQKDSYVGDEAQSKRGILTLKYPIEHGIVTNWDDMEKIWHHTFYNELRVAPEEHPVLLTEAPLNPKANREKMTQIMFETFNTPAMYVAIQAVLSLYASGRTTGIVMDSGDGVTHTV

SEQ ID NO: 15388 - protein, 944 aa, Homo sapiens
MTVSGPGTPEPRPATPGASSVEQLRKEGNELFKCGDYGGALAAYTQALGLDATPQDQAVLHRNRAACHLKLEDYDKAETEASKAIEKDGGDVKALYRRSQALEKLGRLDQAVLDLQRCVSLEPKNKVFQEALRNIGGQIQEKVRYMSSTDAKVEQMFQILLDPEEKGTEKKQKASQNLVVLAREDAGAEKIFRSNGVQLLQRLLDMGETDLMLAALRTLVGICSEHQSRTVATLSILGTRRVVSILGVESQAVSLAACHLLQVMFDALKEGVKKGFRGKEGAIIVDPARELKVLISNLLDLLTEVGVSGQGRDNALTLLIKAVPRKSLKDPNNSLTLWVIDQGLKKILEVGGSLQDPPGELAVTANSRMSASILLSKLFDDLKCDAERENFHRLCENYIKSWFEGQGLAGKLRAIQTVSCLLQGPCDAGNRALELSGVMESVIALCASEQEEEQLVAVEALIHAAGKAKRASFITANGVSLLKDLYKCSEKDSIRIRALVGLCKLGSAGGTDFSMKQFAEGSTLKLAKQCRKWLCNDQIDAGTRRWAVEGLAYLTFDADVKEEFVEDAAALKALFQLSRLEERSVLFAVASALVNCTNSYDYEEPDPKMVELAKYAKQHVPEQHPKDKPSFVRARVKKLLAAGVVSAMVCMVKTESPVLTSSCRELLSRVFLALVEEVEDRGTVVAQGGGRALIPLALEGTDVGQTKAAQALAKLTITSNPEMTFPGERIYEVVRPLVSLLHLNCSGLQNFEALMALTNLAGISERLRQKILKEKAVPMIEGYMFEEHEMIRRAATECMCNLAMSKEVQDLFEAQGNDRLKLLVLYSGEDDELLQRAAAGGLAMLTSMRPTLCSRIPQVTTHWLEILQALLLSSNQELQHRGAVVVLNMVEASREIASTLMESEMMEILSVLAKGDHSPVTRAAAACLDKAVEYGLIQPNQDGE

SEQ ID NO: 15389 - protein, 1069 aa, Homo sapiens
MVVPEKEQSWIPKIFKKKTCTTFIVDSTDPGGTLCQCGRPRTAHPAVAMEDAFGAAVVTVWDSDAHTTEKPTDAYGELDFTGAGRKHSNFLRLSDRTDPAAVYSLVTRTWGFRAPNLVVSVLGGSGGPVLQTWLQDLLRRGLVRAAQSTGAWIVTGGLHTGIGRHVGVAVRDHQMASTGGTKVVAMGVAPWGVVRNRDTLINPKGSFPARYRWRGDPEDGVQFPLDYNYSAFFLVDDGTHGCLGGENRFRLRLESYISQQKTGVGGTGIDIPVLLLLIDGDEKMLTRIENATQAQLPCLLVAGSGGAADCLAETLEDTLAPGSGGARQGEARDRIRRFFPKGDLEVLQAQVERIMTRKELLTVYSSEDGSEEFETIVLKALVKACGSSEASAYLDELRLAVAWNRVDIAQSELFRGDIQWRSFHLEASLMDALLNDRPEFVRLLISHGLSLGHFLTPMRLAQLYSAAPSNSLIRNLLDQASHSAGTKAPALKGGAAELRPPDVGHVLRMLLGKMCAPRYPSGGAWDPHPGQGFGESMYLLSDKATSPLSLDAGLGQAPWSDLLLWALLLNRAQMAMYFWEMGSNAVSSALGACLLLRVMARLEPDAEEAARRKDLAFKFEGMGVDLFGECYRSSEVRAARLLLRRCPLWGDATCLQLAMQADARAFFAQDGVQSLLTQKWWGDMASTTPIWALVLAFFCPPLIYTRLITFRKSEEEPTREELEFDMDSVINGEGPVGLTPGLYHLGRTVLCIDFMVFTVRLLHIFTVNKQLGPKIVIVSKMMKDVFFFLFFLGVWLVAYGVATEGLLRPRDSDFPSILRRVFYRPYLQIFGQIPQEDMDVALMEHSNCSSEPGFWAHPPGAQAGTCVSQYANWLVVLLLVIFLLVANILLVNLLIAMFSYTFGKVQGNSDLYWKAQRYRLIREFHSRPALAPPFIVISHLRLLLRQLCRRPRSPQPSSPALEHFRVYLSKEAERKLLTWESVHKENFLLARARDKRESDSERLKRTSQKVDLALKQLGHIREYEQRLKVLEREVQQCSRVLGWVAEALSRSALLPPGGPPPPDLPGSKD

SEQ ID NO: 15390 - protein, 320 aa, Homo sapiens
MYHCHSGSKPTEKGANEYAYAKWKLCSASAICFIFMIAEVVGGHIAGSLAVVTDAAHLLIDLTSFLLSLFSLWLSSKPPSKRLTFGWHRAEILGALLSILCIWVVTGVLVYLACERLLYPDYQIQATVMIIVSSCAVAANIVLTVVLHQRCLGHNHKEVQANASVRAAFVHALGDLFQSISVLISALIIYFKPEYKIADPICTFIFSILVLASTITILKDFSILLMEGVPKSLNYSGVKELILAVDGVLSVHSLHIWSLTMNQVILSAHVATAASRDSQVVRREIAKALSKSFTMHSLTIQMESPVDQDPDCLFCEDPCD

SEQ ID NO: 15391 - protein, 227 aa, Homo sapiens
MLQSMLISGQSIPDELVIKLMLEKLNSPEVCHFGYIITEIPSLSQDAMTTLQQIELIKNLNLKPDVIINIKCPDYDLCQRISGQRQHNNTGYIYSRDQWDPEVIENHRKKKKEAQKDGKGEEEEEEEEQEEEEAFIAEMQMVAEILHHLVQRPEDYLENVENIVKLYKETILQTLEEVMAEHNPQYLIELNGNKPAEELFMIVMDRLKYLNLKRAAILTKLQGAEEE

SEQ ID NO: 15392 - protein, 536 aa, Homo sapiens
MLGGSGSHGRRSLAALSQIAYQRNDDDEEEAARERRRRARQERLRQKQEEESLGQVTDQVEVNAQNSVPDEEAKTTTTNTQVEGDDEAAFLERLARREERRQKRLQEALERQKEFDPTITDASLSLPSRRMQNDTAENETTEKEEKSESRQERYEIEETETVTKSYQKNDWRDAEENKKEDKEKEEEEEEKPKRGSIGENQIKDEKIKKDKEPKEEVKSFMDRKKGFTEVKSQNGEFMTHKLKHTENTFSRPGGRASVDTKEAEGAPQVEAGKRLEELRRRRGETESEEFEKLKQKQQEAALELEELKKKREERRKVLEEEEQRRKQEEADRKLREEEEKRRLKEEIERRRAEAAEKRQKMPEDGLSDDKKPFKCFTPKGSSLKIEERAEFLNKSVQKSSGVKSTHQAAIVSKIDSRLEQYTSAIEGTKSAKPTKPAASDLPVPAEGVRNIKSMWEKGNVFSSPTAAGTPNKETAGLKVGVSSRINEWLTKTPDGNKSPAPKPSLTFCSSLFGLWLIGNLLLLPSFLPLLPEWVFL

SEQ ID NO: 15393 - protein, 476 aa, Homo sapiens
MSGARCRTLYPFSGERHGQGLRFAAGELITLLQVPDGGWWEGEKEDGLRGWFPASYVQLLEKPGMVPPPPGEESQTVILPPGWQSYLSPQGRRYYVNTTTNETTWERPSSSPGIPASPGSHRSSLPPTVNGYHASGTPAHPPETAHMSVRKSTGDSQNLGSSSPSKKQSKENTITINCVTFPHPDTMPEQQLLKPTEWSYCDYFWADKKDPQGNGTVAGFELLLQKQLKGKQMQKEMSEFIRERIKIEEDYAKNLAKLSQNSLASQEEGSLGEAWAQVKKSLADEAEVHLKFSAKLHSEVEKPLMNFRENFKKDMKKCDHHIADLRKQLASRYASVEKARKALTERQRDLEMKTQQLEIKLSNKTEEDIKKARRKSTQAGDDLMRCVDLYNQAQSKWFEEMVTTTLELERLEVERVEMIRQHLCQYTQLRHETDMFNQSTVEPVDQLLRKVDPAKDRELWVREHKTGNIRPVDMEI

SEQ ID NO: 15394 - protein, 123 aa, Homo sapiens
MIDAATLKSRKMLEEIMKYEASILTHDSSIRYLQEIYNSNNQKIVNLKEKVAQLEAQCQEPCKDTVQIHDITGKDCQDIANKGAKQSGLYFIKPLKANQQFLVYCEIDGSGNGWTVFQKRLDG

SEQ ID NO: 15395 - protein, 685 aa, Homo sapiens
MEKRLGVKPNPASWILSGYYWQTSAKWLRSLYLFYTCFCFSVLWLSTDASESRCQQGKTQFGVGLRSGGENHLWLLEGTPSLQSCWAACCQDSACHVFWWLEGMCIQADCSRPQSCRAFRTHSSNSMLVFLKKFQTADDLGFLPEDDVPHLLGLGWNWASWRQSPPRAALRPAVSSSDQQSLIRKLQKRGSPSDVVTPIVTQHSKVNDSNELGGLTTSGSAEVHKAITISSPLTTDLTAELSGGPKNVSVQPEISEGLATTPSTQQVKSSEKTQIAVPQPVAPSYSYATPTPQASFQSTSAPYPVIKELVVSAGESVQITLPKNEVQLNAYVLQEPPKGETYTYDWQLITHPRDYSGEMEGKHSQILKLSKLTPGLYEFKVIVEGQNAHGEGYVNVTVKPEPRKNRPPIAIVSPQFQEISLPTTSTVIDGSQSTDDDKIVQYHWEELKGPLREEKISEDTAILKLSKLVPGNYTFSLTVVDSDGATNSTTANLTVNKAVDYPPVANAGPNQVITLPQNSITLFGNQSTDDHGITSYEWSLSPSSKGKVVEMQGVRTPTLQLSAMQEGDYTYQLTVTDTIGQQATAQVTVIVQPENNKPPQADAGPDKELTLPVDSTTLDGSKSSDDQKIISYLWEKTQGPDGVQLENANSSVATVTGLQVGTYVFTLTVKDERNLQSQSSVNVIV

SEQ ID NO: 15396 - protein, 49 aa, Homo sapiens
MYPNPLIYCTCWDPWNLGPRKLIKTPQLPRKNSTGSSKLTPLVPAPKNH

SEQ ID NO: 15397 - protein, 549 aa, Homo sapiens
MSQGSVSFKDVTVDFTQEEWQQLDPAQKALYRDVMLENYCHFVSVGFHMAKPDMIRKLEQGEELWTQRIFPSYSYLEEDGKTEDVLVKFKEYQDRHSRPLIFINHKKLIKERSNIYGKTFTLGKNRISKTILCEYKPDGKVLKNISELVIRNISPIKEKFGDSTGWEKSLLNTKHEKIHPAVNLHKQTERVLSGKQELIQHQKVQAPEQPFDHNECEKSFLMKGMLFTHTRAHRGERTFEYNKDGIAFIEKSSLSVHPSNLMEKKPSAYNKYGKFLCRKPVFIMPQRPQTEEKPFHCPYCGNNFRRKSYLIEHQRIHTGEKPYVCNQCGKAFRQKTALTLHEKTHIEGKPFICIDCGKSFRQKATLTRHHKTHTGEKAYECPQCGSAFRKKSYLIDHQRTHTGEKPYQCNECGKAFIQKTTLTVHQRTHTGEKPYICNECGKSFCQKTTLTLHQRIHTGEKPYICNECGKSFRQKAILTVHHRIHTGEKSNGCPQCGKAFSRKSNLIRHQKTHTGEKPYECKQCGKFFSCKSNLIVHQKTHKVETTGIQ

SEQ ID NO: 15398 - protein, 2297 aa, Homo sapiens
MADLSLADALTEPSPDIEGEIKRDFIATLEAEAFDDVVGETVGKTDYIPLLDVDEKTGNSESKKKPCSETSQIEDLPLPPHPASLSFHLPLDTPSSKPTLLANGGHGVEGSDTTGSPTEFLEEKMAYQEYPNSQNWPEDTNFCFQPEQVVDPIQTDPFKMYHDDDLADLVFPSSATADTSIFAGQNDPLKDSYGMSPCNTAVVPQGWSVEALNSPHSESFVSPEAVAEPPQPTAVPLELAKEIEMASEERPPAQALEIMMGLKTTDMAPSKETEMALAKDMALATKTEVALAKDMESPTKLDVTLAKDMQPSMESDMALVKDMELPTEKEVALVKDVRWPTETDVSSAKNVVLPTETEVAPAKDVTLLKETERASPIKMDLAPSKDMGPPKENKKETERASPIKMDLAPSKDMGPPKENKIVPAKDLVLLSEIEVAQANDIISSTEISSAEKVALSSETEVALARDMTLPPETNVILTKDKALPLEAEVAPVKDMAQLPETEIAPAKDVAPSTVKEVGLLKDMSPLSETEMALGKDVTPPPETEVVLIKNVCLPPEMEVALTEDQVPALKTEAPLAKDGVLTLANNVTPAKDVPPLSETEATPVPIKDMEIAQTQKGISEDSHLESLQDVGQSAAPTFMISPETVTGTGKKCSLPAEEDSVLEKLGERKPCNSQPSELSSETSANFMYCGTPPTQAKQVCRPSDRRSTRPKPARVPPELLGGSPPWKTLDHRLGHCSLSESGWVSGSSSCGGPGNQRKSIHVDSLEPQRDLGREAWDIESTPIMMKKKKKKPKQKRYSQPRAGGPSDDDNADKPKGHPFAADTQKSGVLPSQPTTMGTEYGLVSGENLKRECLVNSSAARLVAENFVSESLRIPLYPSEEAPKTAISSQSKLRVEEESKSNKSVLQNQDKKLLKQHEYKPQPAPHLKTPVDKSQSVGPLNLKGPLAEVSAYNVETPLDIRLKEGCSPFLDQEVMGVVSKPTAAKEIPNLVPTLIASNPLECNLKEGNNESKMTKLQNVKLKEFPEGAEEDKELKKEAFPNERQEISIFTSEQLQGQVLVQVPGVENEPFKRMAGDGKSRKGRGSSGKMRTDSGKVKAKSELPFLLDSQKDGRAVLIPSEPVSKTEGMTTQDKSEELGLNSSKQPGTKADLTEAVVMGEPKEMTQPKVAGTMQALIPLESGSGMTQTSGVSTETGDVVKDMGVNNQSKEGRCPWKDHEAAPWISEKPKKRGNEGKSKKFKNNYSTQPARMERKEEILNPPFEGKDGDTGSIPHKSKEIGFTFPKMHDSSFSHTPDTPTVEAVDRKGGNFQVNFVELGTLGENKISTVKASTVTEPPAKVTDVSCQEQIQGAGFVPSVVSEENKTDAANRYTAVADKPSKRSNDGKSKKVKNSSPEKHILENKIDATKIHVPMETTGDQGIEGMAYMDENRNITFTCPRTPSELINKSSPLEVLESAACEKLPTPTPQVVKEGDSFPDTLAKNGQEIAPAQISKSLMVDNYTKDGVPGQERPKGPSAVVPSTSTGGVALPITTAIETVNIHGDHSLKNKAELADSMKNEAGIDEGHVIGESESVHSGASKHSVEKVTELAKGHLLPGVPVEDQSLPGEARALEGYADRGNFPAHPVNEEKETKEGSVAVQIPDLLEDKAQKLSFCEDQNAQDRNSKGSDSLNKKVDLTLLSPKSENDKLKEISLACKITELESVSLPTPEIQSDFLHSKVEAPPSEVADTLVIMTASKGVRLPEPKDKILETPQKMTEKSESKTPGEGKKEDKSRMAEPMKGYMRPTKSRGLTPLLPKSTIQEQERHKQLKSAGIARPEEGRPVVSGTGNDITTPPNKELPPSPEKKTKPLATTQPAKTSTSKAKTQPTSLPKQPAPTTIGGLNKKPMSLASGLVPAAPPKRPAVASARPSILPSKDVKPKPIADAKAPEKRASPSKPASAPASRSGSKSTQTVAKTTTAAAVASTGPSSRSPSTLLPKKPTAIKTEGKPAEVKKMTAKSVPADLSRPKSTSTSSMKKTTTLSGTAPAAGVVPSRVKATPMPSRPSTTPFIDKKPTSAKPSSTTPRLSRLATNTSAPDLKNVRSKVGSTENIKHQPGGGRAKVEKKTEAAATTRKPESNAVTKTAGPIASAQKQPAGKVQIVSKKVSYSHIQSKCGSKDNIKHVPGGGNVQIQNKKVDISKVSSKCGSKANIKHKPGGGDVKIESQKLNFKEKAQAKVGSLDNVGHLPAGGAVKTEGGGSEAPLCPGPPAGEEPAISEAAPEAGAPTSASGLNGHPTLSGGGDQREAQTLDSQIQETSI

SEQ ID NO: 15399 - protein, 909 aa, Homo sapiens
MDMFPLTWVFLALYFSRHQVRGQPDPPCGGRLNSKDAGYITSPGYPQDYPSHQNCEWIVYAPEPNQKIVLNFNPHFEIEKHDCKYDFIEIRDGDSESADLLGKHCGNIAPPTIISSGSMLYIKFTSDYARQGAGFSLRYEIFKTGSEDCSKNFTSPNGTIESPGFPEKYPHNLDCTFTILAKPKMEIILQFLIFDLEHDPLQVGEGDCKYDWLDIWDGIPHVGPLIGKYCGTKTPSELRSSTGILSLTFHTDMAVAKDGFSARYYLVHQEPLENFQCNVPLGMESGRIANEQISASSTYSDGRWTPQQSRLHGDDNGWTPNLDSNKEYLQVDLRFLTMLTAIATQGAISRETQNGYYVKSYKLEVSTNGEDWMVYRHGKNHKVFQANNDATEVVLNKLHAPLLTRFVRIRPQTWHSGIALRLELFGCRVTDAPCSNMLGMLSGLIADSQISASSTQEYLWSPSAARLVSSRSGWFPRIPQAQPGEEWLQVDLGTPKTVKGVIIQGARGGDSITAVEARAFVRKFKVSYSLNGKDWEYIQDPRTQQPKLFEGNMHYDTPDIRRFDPIPAQYVRVYPERWSPAGIGMRLEVLGCDWTDSKPTVETLGPTVKSEETTTPYPTEEEATECGENCSFEDDKDLQLPSGFNCNFDFLEEPCGWMYDHAKWLRTTWASSSSPNDRTFPDDRNFLRLQSDSQREGQYARLISPPVHLPRSPVCMEFQYQATGGRGVALQVVREASQESKLLWVIREDQGGEWKHGRIILPSYDMEYQIVFEGVIGKGRSGEIAIDDIRISTDVPLENCMEPISAFADEYEVDWSNSSSATSGSGAPSTDKEKSWLYTLDPILITIIAMSSLGVLLGATCAGLLLYCTCSYSGLSSRSCTTLENYNFELYDGLKHKVKMNHQKCCSEA

SEQ ID NO: 15400 - protein, 264 aa, Homo sapiens
QFIAESGGPFIDQVYVLQSYAEGWKEGTWEEKVDERPCIDQLLYSQDKHEYYRDGGLVSPKCRLPLKALTLPGLLWKSCQLTASMCPVPGQLALKHGRGWFWGYEETRGLNVSCLSVQGSASIVAPLLLRNTSARSVMLDRAENLLHDHYGGKEYWDTRRSMVFARHLREVGDEFRSRHLNSTDDADRIPFQEDWMKMKVKLGSALGGPYLGVHLRRKDFIWGHRQDVPSLEGAVRKIRSLMKTHRLDKVFVATDAVRKEYEEL

SEQ ID NO: 15401 - protein, 711 aa, Homo sapiens
MFKFLSFRVRSIQEEVSIKEIAITHHVKEGHEKADPSQFELLKVLGQGSFGKVFLVKKISGSDARQLYAMKVLKKATLKVRDRVRTKMERDILVEVNHPFIVKLHYAFQTEGKLYLILDFLRGGDLFTRLSKEVMFTEEDVKFYLAELALALDHLHSLGIIYRDLKPENILLDEEGHIKLTDFGLSKESIDHEKKAYSFCGTVEYMAPEVVNRRGHTQSADWWSFGVLMFEMLTGTLPFQGKDRKETMTMILKAKLGMPQFLSPEAQSLLRMLFKRNPANRLGAGPDGVEEIKRHSFFSTIDWNKLYRREIHPPFKPATGRPEDTFYFDPEFTAKTPKDSPGIPPSANAHQLFRGFSFVAITSDDESQAMQTVGVHSIVQQLHRNSIQFTDGYEVKEDIGVGSYSVCKRCIHKATNMEFAVKIIDKSKRDPTEEIEILLRYGQHPNIITLKDVYDDGKYVYVVTELMKGGELLDKILRQKFFSEREASAVLFTITKTVEYLHAQGVVHRDLKPSNILYVDESGNPESIRICDFGFAKQLRAENGLLMTPCYTANFVAPEVLKRQGYDAACDIWSLGVLLYTMLTGYTPFANGPDDTPEEILARIGSGKFSLSGGYWNSVSDTAKDLVSKMLHVDPHQRLTAALVLRHPWIVHWDQLPQYQLNRQDAPHLVKGAMAATYSALNRNQSPVLEPVGRSTLAQRRGIKKITSTAL

SEQ ID NO: 15402 - protein, 1513 aa, Homo sapiens
MMIPSQISYPASQGAYYIPGQGRSTYVVPTQQYPVQPGAPGFYPGASPTEFGTYAGAYYPAQGVQQFPTGVAPTPVLMNQPPQIAPKRERKTIRIRDPNQGGKDITEEIMSGARTASTPTPPQTGGGLEPQANGETPQVAVIVRPDDRSQGAIIADRPGLPGPEHSPSESQPSSPSPTPSPSPVLEPGSEPNLAVLSIPGDTMTTIQMSVEESTPISRETGEPYRLSPEPTPLAEPILEVEVTLSKPVPESEFSSSPLQAPTPLASHTVEIHEPNGMVPSEDLEPEVESSPELAPPPACPSESPVPIAPTAQPEELLNGAPSPPAVDLSPVSEPEEQAKEVTASMAPPTIPSATPATAPSATSPAQEEEMEEEEEEEEGEAGEAGEAESEKGGEELLPPESTPIPANLSQNLEAAAATQVAVSVPKRRRKIKELNKKEAVGDLLDAFKEANPAVPEVENQPPAGSNPGPESEGSGVPPRPEEADETWDSKEDKIHNAENIQPGEQKYEYKSDQWKPLNLEEKKRYDREFLLGFQFIFASMQKPEGLPHISDVVLDKANKTPLRPLDPTRLQGINCGPDFTPSFANLGRTTLSTRGPPRGGPGGELPRGPQAGLGPRRSQQGPRKEPRKIIATVLMTEDIKLNKAEKAWKPSSKRTAADKDRGEEDADGSKTQDLFRRVRSILNKLTPQMFQQLMKQVTQLAIDTEERLKGVIDLIFEKAISEPNFSVAYANMCRCLMALKVPTTEKPTVTVNFRKLLLNRCQKEFEKDKDDDEVFEKKQKEMDEAATAEERGRLKEELEEARDIARRRSLGNIKFIGELFKLKMLTEAIMHDCVVKLLKNHDEESLECLCRLLTTIGKDLDFEKAKPRMDQYFNQMEKIIKEKKTSSRIRFMLQDVLDLRGSNWVPRRGDQGPKTIDQIHKEAEMEEHREHIKVQQLMAKGSDKRRGGPPGPPISRGLPLVDDGGWNTVPISKGSRPIDTSRLTKITKPGSIDSNNQLFAPGGRLSWGKGSSGGSGAKPSDAASEAARPATSTLNRFSALQQAVPTESTDNRRVVQRSSLSRERGEKAGDRGDRLERSERGGDRGDRLDRARTPATKRSFSKEVEERSRERPSQPEGLRKAASLTEDRDRGRDAVKREAALPPVSPLKAALSEEELEKKSKAIIEEYLHLNDMKEAVQCVQELASPSLLFIFVRHGVESTLERSAIAREHMGQLLHQLLCAGHLSTAQYYQGLYEILELAEDMEIDIPHVWLYLAELVTPILQEGGVPMGELFREITKPLRPLGKAASLLLEILGLLCKSMGPKKVGTLWREAGLSWKEFLPEGQDIGAFVAEQKVEYTLGEESEAPGQRALPSEELNRQLEKLLKEGSSNQRVFDWIEANLSEQQIVSNTLVRALMTAVCYSAIIFETPLRVDVAVLKARAKLLQKYLCDEQKELQALYALQALVVTLEQPPNLLRMFFDALYDEDVVKEDAFYSWESSKDPAEQQGKGVALKSVTAFFKWLREAEEESDHN

SEQ ID NO: 15403 - protein, 206 aa, Homo sapiens
MGPWGEPELLVWRPEAVASEPPVPVGLEVKLGALVLLLVLTLLCSLVPICVLRRPGANHEGSASRQKALSLVSCFAGGVFLATCLLDLLPDYLAAIDEALAALHVTLQFPLQEFILAMGFFLVLVMEQITLAYKEQSGPSPLEETRALLGTVNGGPQHWHDGPGVPQASGAPATPSALRACVLVFSLALHSVFEGLAVGLQRDRAR

SEQ ID NO: 15404 - protein, 1481 aa, Homo sapiens
MPNSERHGGKKDGSGGASGTLQPSSGGGSSNSRERHRLVSKHKRHKSKHSKDMGLVTPEAASLGTVIKPLVEYDDISSDSDTFSDDMAFKLDRRENDERRGSDRSDRLHKHRHHQHRRSRDLLKAKQTEKEKSQEVSSKSGSMKDRISGSSKRSNEETDDYGKAQVAKSSSKESRSSKLHKEKTRKERELKSGHKDRSKSHRKRETPKSYKTVDSPKRRSRSPHRKWSDSSKQDDSPSGASYGQDYDLSPSRSHTSSNYDSYKKSPGSTSRRQSVSPPYKEPSAYQSSTRSPSPYSRRQRSVSPYSRRRSSSYERSGSYSGRSPSPYGRRRSSSPFLSKRSLSRSPLPSRKSMKSRSRSPAYSRHSSSHSKKKRSSSRSRHSSISPVRLPLNSSLGAELSRKKKERAAAAAAAKMDGKESKGSPVFLPRKENSSVEAKDSGLESKKLPRSVKLEKSAPDTELVNVTHLNTEVKNSSDTGKVKLDENSEKHLVKDLKAQGTRDSKPIALKEEIVTPKETETSEKETPPPLPTIASPPPPLPTTTPPPQTPPLPPLPPIPALPQQPPLPPSQPAFSQVPASSTSTLPPSTHSKTSAVSSQANSQPPVQVSVKTQVSVTAAIPHLKTSTLPPLPLPPLLPGDDDMDSPKETLPSKPVKKEKEQRTRHLLTDLPLPPELPGGDLSPPDSPEPKAITPPQQPYKKRPKICCPRYGERRQTESDWGKRCVDKFDIIGIIGEGTYGQVYKAKDKDTGELVALKKVRLDNEKEGFPITAIREIKILRQLIHRSVVNMKEIVTDKQDALDFKKDKGAFYLVFEYMDHDLMGLLESGLVHFSEDHIKSFMKQLMEGLEYCHKKNFLHRDIKCSNILLNNSGQIKLADFGLARLYNSEESRPYTNKVITLWYRPPELLLGEERYTPAIDVWSCGCILGELFTKKPIFQANLELAQLELISRLCGSPCPAVWPDVIKLPYFNTMKPKKQYRRRLREEFSFIPSAALDLLDHMLTLDPSKRCTAEQTLQSDFLKDVELSKMAPPDLPHWQDCHELWSKKRRRQRQSGVVVEEPPPSKTSRKETTSGTSTEPVKNSSPAPPQPAPGKVESGAGDAIGLADITQQLNQSELAVLLNLLQSQTDLSIPQMAQLLNIHSNPEMQQQLEALNQSISALTEATSQQQDSETMAPEESLKEAPSAPVILPSAEQTTLEASSTPADMQNILAVLLSQLMKTQEPAGSLEENNSDKNSGPQGPRRTPTMPQEEAAEKRPPEPPGPPPPPPPPPLVEGDLSSAPQELNPAVTAALLQLLSQPEAEPPGHLPHEHQALRPMEYSTRPRPNRTYGNTDGPETGFSAIDTDERNSGPALTESLVQTLVKNRTFSGSLSHLGESSSYQGTGSVQFPGDQDLRFARVPLALHPVVGQPFLKAEGSSNSVVHAETKLQNYGELGPGTTGASSSGAGLHWGGPTQSSAYGKLYRGPTRVPPRGGRGRGVPY

SEQ ID NO: 15405 - protein, 844 aa, Homo sapiens
MENVFTVSSDPHPSPAAPPSLSLPLSSSSTSSGTKKQKRTPTYQRSMSFDPNLLHNNGHNGYPNGTSAALRETGVIEKLLTSYGFIQCSERQARLFFHCSQYNGNLQDLKVGDDVEFEVSSDRRTGKPIAVKLVKIKQEILPEERMNGQVVCAVPHNLESKSPAAPGQSPTGSVCYERNGEVFYLTYTPEDVEGNVQLETGDKINFVIDNNKHTGAVSARNIMLLKKKQARCQGVVCAMKEAFGFIERGDVVKEIFFHYSEFKGDLETLQPGDDVEFTIKDRNGKEVATDVRLLPQGTVIFEDISIEHFEGTVTKVIPKVPSKNQNDPLPGRIKVDFVIPKELPFGDKDTKSKVTLLEGDHVRFNISTDRRDKLERATNIEVLSNTFQFTNEAREMGVIAAMRDGFGFIKCVDRDVRMFFHFSEILDGNQLHIADEVEFTVVPDMLSAQRNHAIRIKKLPKGTVSFHSHSDHRFLGTVEKEATFSNPKTTSPNKGKEKEAEDGIIAYDDCGVKLTIAFQAKDVEGSTSPQIGDKVEFSISDKQRPGQQVATCVRLLGRNSNSKRLLGYVATLKDNFGFIETANHDKEIFFHYSEFSGDVDSLELGDMVEYSLSKGKGNKVSAEKVNKTHSVNGITEEADPTIYSGKVIRPLRSVDPTQTEYQGMIEIVEEGDMKGEVYPFGIVGMANKGDCLQKGESVKFQLCVLGQNAQTMAYNITPLRRATVECVKDQFGFINYEVGDSKKLFFHVKEVQDGIELQAGDEVEFSVILNQRTGKCSACNVWRVCEGPKAVAAPRPDRLVNRLKNITLDDASAPRLMVLRQPRGPDNSMGFGAERKIRQAGVID

SEQ ID NO: 15406 - protein, 439 aa, Homo sapiens
MDVTDYKGETVFHYAVQGDNSQVLQLLGRNAVAGLNQVNNQGLTPLHLACQLGKQEMVRVLLLCNARCNIMGPNGYPIHSAMKFSQKGCAEMIISMDSSQIHSKDPRYGASPLHWAKNAEMARMLLKRGCNVNSTSSAGNTALHVAVMRNRFDCAIVLLTHGANADARGEHGNTPLHLAMSKDNVEMIKALIVFGAEVDTPNDFGETPTFLASKIGRQLQDLMHISRARKPAFILGSMRDEKRTHDHLLCLDGGGVKGLIIIQLLIAIEKASGVATKDLFDWVAGTSTGGILALAILHSKSMAYMRGMYFRMKDEVFRGSRPYESGPLEEFLKREFGEHTKMTDVRKPKVMLTGTLSDRQPAELHLFRNYDAPETVREPRFNQNVNLRPPAQPSDQLVWRAARSSGAAPTYFRPNGRFLDGGLLANNPTLDAMTEIHEY

SEQ ID NO: 15407 - protein, 580 aa, Homo sapiens
MRALTVQRVKFAMDLPLLKRAGQDLAEKTKNFVSRSLVIGEVLSMADMATGVKCGIIYWLFGGAIRNLGSPEHVTKWFQPLQEQKYTGMFAMTERGHGSNARGIQTEATFDLSAQEFVIDTPCENAEKMYIGNAMYGNYAAVFAQLIIDGRSQGPHCFIVPVRDENGSLYPGVTAIDMMYKEGLHGVDNGILIFDKVRIPRENLLDKFGSVAPDGQYHSPIRNKSARFNAMLAALTPSRLAVAFQAMGAMKLGLTIAIRYSHSRRQFGPKTKEEVKIIEHQTQTLRLMPHLATALALTFVSRYAGALLDEDVFQGKELVNSRSLQALVAGLKAYSTWENIRCLQDCRECTGGMVVGRELLAQYTKQYEEKPLFGLLQNWAESVGDKLRTSFLAFNMDTVDDLAFLLKAVKFRERVLQRGLVARIYYKVKTKKEDFFHAWNSCLHHVASLSLAHTHRVTLEQFSLAVKSCPDQEDQTLLMKFCLLYGTKLVFQERAWYLEHKYLTPMASTRIRNQLLDLCDSVKDDARRVISTFNIPHTYLHAPIAGISNPRAAWAFYPAPLQPRPREEARSRRPKLGAKL

SEQ ID NO: 15408 - protein, 1099 aa, Homo sapiens
MNLQAQPKAQNKRKRCLFGGQEPAPKEQPPPLQPPQQSIRVKEEQYLGHEGPGGAVSTSQPVELPPPSSLALLNSVVYGPERTSAAMLSQQVASVKWPNSVMAPGRGPERGGGGGVSDSSWQQQPGQPPPHSTWNCHSLSLYSATKGSPHPGVGVPTYYNHPEALKREKAGGPQLDRYVRPMMPQKVQLEVGRPQAPLNSFHAAKKPPNQSLPLQPFQLAFGHQVNRQVFRQGPPPPNPVAAFPPQKQQQQQQPQQQQQQQQAALPQMPLFENFYSMPQQPSQQPQDFGLQPAGPLGQSHLAHHSMAPYPFPPNPDMNPELRKALLQDSAPQPALPQVQIPFPRRSRRLSKEGILPPSALDGAGTQPGQEATGNLFLHHWPLQQPPPGSLGQPHPEALGFPLELRESQLLPDGERLAPNGREREAPAMGSEEGMRAVSTGDCGQVLRGGVIQSTRRRRRASQEANLLTLAQKAVELASLQNAKDGSGSEEKRKSVLASTTKCGVEFSEPSLATKRAREDSGMVPLIIPVSVPVRTVDPTEAAQAGGLDEDGKGPEQNPAEHKPSVIVTRRRSTRIPGTDAQAQAEDMNVKLEGEPSVRKPKQRPRPEPLIIPTKAGTFIAPPVYSNITPYQSHLRSPVRLADHPSERSFELPPYTPPPILSPVREGSGLYFNAIISTSTIPAPPPITPKSAHRTLLRTNSAEVTPPVLSVMGEATPVSIEPRINVGSRFQAEIPLMRDRALAAADPHKADLVWQPWEDLESSREKQRQVEDLLTAACSSIFPGAGTNQELALHCLHESRGDILETLNKLLLKKPLRPHNHPLATYHYTGSDQWKMAERKLFNKGIAIYKKDFFLVQKLIQTKTVAQCVEFYYTYKKQVKIGRNGTLTFGDVDTSDEKSAQEEVEVDIKTSQKFPRVPLPRRESPSEERLEPKREVKEPRKEGEEEVPEIQEKEEQEEGRERSRRAAAVKATQTLQANESASDILILRSHESNAPGSAGGQASEKPREGTGKSRRALPFSEKKKKTETFSKTQNQENTFPCKKCGRVFYKVKSRSAHMKSHAEQEKKAAALRLKEKEAAAAAAAAHQQALREESGAGDKG

SEQ ID NO: 15409 - protein, 1572 aa, Homo sapiens
MLLHLCSVKNLYQNRFLGLAAMASPSRNSQSRRRCKEPLRYSYNPDQFHNMDLRGGPHDGVTIPRSTSDTDLVTSDSRSTLMVSSSYYSIGHSQDLVIHWDIKEEVDAGDWIGMYLIDEVLSENFLDYKNRGVNGSHRGQIIWKIDASSYFVEPETKICFKYYHGVSGALRATTPSVTVKNSAAPIFKSIGADETVQGQGSRRLISFSLSDFQAMGLKKGMFFNPDPYLKISIQPGKHSIFPALPHHGQERRSKIIGNTVNPIWQAEQFSFVSLPTDVLEIEVKDKFAKSRPIIKRFLGKLSMPVQRLLERHAIGDRVVSYTLGRRLPTDHVSGQLQFRFEITSSIHPDDEEISLSTEPESAQIQDSPMNNLMESGSGEPRSEAPESSESWKPEQLGEGSVPDGPGNQSIELSRPAEEAAVITEAGDQGMVSVGPEGAGELLAQVQKDIQPAPSAEELAEQLDLGEEASALLLEDGEAPASTKEEPLEEEATTQSRAGREEEEKEQEEEGDVSTLEQGEGRLQLRASVKRKSRPCSLPVSELETVIASACGDPETPRTHYIRIHTLLHSMPSAQGGSAAEEEDGAEEESTLKDSSEKDGLSEVDTVAADPSALEEDREEPEGATPGTAHPGHSGGHFPSLANGAAQDGDTHPSTGSESDSSPRQGGDHSCEGCDASCCSPSCYSSSCYSTSCYSSSCYSASCYSPSCYNGNRFASHTRFSSVDSAKISESTVFSSQDDEEEENSAFESVPDSMQSPELDPESTNGAGPWQDELAAPSGHVERSPEGLESPVAGPSNRREDWEARIDSHGRVFYVDHVNRTTTWQRPTAAATPDGMRRSGSIQQMEQLNRRYQNIQRTIATERSEEDSGSQSCEQAPAGGGGGGGSDSEAESSQSSLDLRREGSLSPVNSQKITLLLQSPAVKFITNPEFFTVLHANYSAYRVFTSSTCLKHMILKVRRDARNFERYQHNRDLVNFINMFADTRLELPRGWEIKTDQQGKSFFVDHNSRATTFIDPRIPLQNGRLPNHLTHRQHLQRLRSYSAGEASEVSRNRGASLLARPGHSLVAAIRSQHQHESLPLAYNDKIVAFLRQPNIFEMLQERQPSLARNHTLREKIHYIRTEGNHGLEKLSCDADLVILLSLFEEEIMSYVPLQAAFHPGYSFSPRCSPCSSPQNSPGLQRASARAPSPYRRDFEAKLRNFYRKLEAKGFGQGPGKIKLIIRRDHLLEGTFNQVMAYSRKELQRNKLYVTFVGEEGLDYSGPSREFFFLLSQELFNPYYGLFEYSANDTYTVQISPMSAFVENHLEWFRFSGRILGLALIHQYLLDAFFTRPFYKALLRLPCDLSDLEYLDEEFHQSLQWMKDNNITDILDLTFTVNEEVFGQVTERELKSGGANTQVTEKNKKEYIERMVKWRVERGVVQQTEALVRGFYEVVDSRLVSVFDARELELVIAGTAEIDLNDWRNNTEYRGGYHDGHLVIRWFWAAVERFNNEQRLRLLQFVTGTSSVPYEGFAALRGSNGLRRFCIEKWGKITSLPRAHTCFNRLDLPPYPSYSMLYEKLLTAVEETSTFGLE

SEQ ID NO: 15410 - protein, 302 aa, Homo sapiens
MQDAENVAVPEAAEERAEPGQQQPAAEPPPAEGLLRPAGPGAPEAAGTEASSEEVGIAEAGPESEGEAPGEQARDERSDSRAQAVSEDAGGNEGRAAEAEPRALENGDADEPSFSDPEDFVDDVSEEELLGDVLKDRPQEADGIDSVIVVDNVPQVGPDRLEKLKNVIHKIFSKFGKITNDFYPEEDGKTKGYIFLEYASPAHAVDAVKNADGYKLDKQHTFRVNLFTDFDKYMTISDEWDIPEKQPFKDLGNLRYWLEEAECRDQYSVIFESGDRTSIFWNDVKDPVSIEERARWTETYVR

SEQ ID NO: 15411 - protein, 757 aa, Homo sapiens
MLRACQLSGVTAAAQSCLCGKFVLRPLRPCRRYSTSGSSGLTTGKIAGAGLLFVGGGIGGTILYAKWDSHFRESVEKTIPYSDKLFEMVLGPAAYNVPLPKKSIQSGPLKISSVSEVMKESKQPASQLQKQKGDTPASATAPTEAAQIISAAGDTLSVPAPAVQPEESLKTDHPEIGEGKPTPALSEASSSSIRERPPEEVAARLAQQEKQEQVKIESLAKSLEDALRQTASVTLQAIAAQNAAVQAVNAHSNILKAAMDNSEIAGEKKSAQWRTVEGALKERRKAVDEAADALLKAKEELEKMKSVIENAKKKEVAGAKPHITAAEGKLHNMIVDLDNVVKKVQAAQSEAKVVSQYHELVVQARDDFKRELDSITPEVLPGWKGMSVSDLADKLSTDDLNSLIAHAHRRIDQLNRELAEQKATEKQHITLALEKQKLEEKRAFDSAVAKALEHHRSEIQAEQDRKIEEVRDAMENEMRTQLRRQAAAHTDHLRDVLRVQEQELKSEFEQNLSEKLSEQELQFRRLSQEQVDNFTLDINTAYARLRGIEQAVQSHAVAEEEARKAHQLWLSVEALKYSMKTSSAETPTIPLGSAVEAIKANCSDNEFTQALTAAIPPESLTRGVYSEETLRARFYAVQKLARRVAMIDETRNSLYQYFLSYLQSLLLFPPQQLKPPPELCPEDINTFKLLSYASYCIEHGDLELAAKFVNQLKGESRRVAQDWLKEARMTLETKQIVEILTAYASAVGIGTTQVQPE

SEQ ID NO: 15412 - protein, 473 aa, Homo sapiens
MATKTTCMSSQGSDDEQIKRENIRSLTMSGHVGFESLPDQLVNRSIQQGFCFNILCVGETGIGKSTLIDTLFNTNFEDYESSHFCPNVKLKAQTYELQESNVQLKLTIVNTVGFGDQINKEESYQPIVDYIDAQFEAYLQEELKIKRSLFTYHDSRIHVCLYFISPTGHSLKTLDLLTMKNLDSKVNIIPVIAKADTVSKTELQKFKIKLMSELVSNGVQIYQFPTDDDTIAKVNAAMNGQLPFAVVGSMDEVKVGNKMVKARQYPWGVVQVENENHCDFVKLREMLICTNMEDLREQTHTRHYELYRRCKLEEMGFTDVGPENKPVSVQETYEAKRHEFHGERQRKEEEMKQMFVQRVKEKEAILKEAERELQAKFEHLKRLHQEERMKLEEKRRLLEEEIIAFSKKKATSEIFHSQSFLATGSNLRKDKDRKKEPGCRFELLCIDVRACETNGGRKDAEKGREGHSARGQP

SEQ ID NO: 15413 - protein, 1945 aa, Homo sapiens
MAQKGQLSDDEKFLFVDKNFINSPVAQADWAAKRLVWVPSEKQGFEAASIKEEKGDEVVVELVENGKKVTVGKDDIQKMNPPKFSKVEDMAELTCLNEASVLHNLRERYFSGLIYTYSGLFCVVVNPYKHLPIYSEKIVDMYKGKKRHEMPPHIYAIADTAYRSMLQDREDQSILCTGESGAGKTENTKKVIQYLAVVASSHKGKKDTSITQGPSFAYGELEKQLLQANPILEAFGNAKTVKNDNSSRFGKFIRINFDVTGYIVGANIETYLLEKSRAIRQARDERTFHIFYYMIAGAKEKMRSDLLLEGFNNYTFLSNGFVPIPAAQDDEMFQETVEAMAIMGFSEEEQLSILKVVSSVLQLGNIVFKKERNTDQASMPDNTAAQKVCHLMGINVTDFTRSILTPRIKVGRDVVQKAQTKEQADFAVEALAKATYERLFRWILTRVNKALDKTHRQGASFLGILDIAGFEIFEVNSFEQLCINYTNEKLQQLFNHTMFILEQEEYQREGIEWNFIDFGLDLQPCIELIERPNNPPGVLALLDEECWFPKATDKSFVEKLCTEQGSHPKFQKPKQLKDKTEFSIIHYAGKVDYNASAWLTKNMDPLNDNVTSLLNASSDKFVADLWKDVDRIVGLDQMAKMTESSLPSASKTKKGMFRTVGQLYKEQLGKLMTTLRNTTPNFVRCIIPNHEKRSGKLDAFLVLEQLRCNGVLEGIRICRQGFPNRIVFQEFRQRYEILAANAIPKGFMDGKQACILMIKALELDPNLYRIGQSKIFFRTGVLAHLEEERDLKITDVIMAFQAMCRGYLARKAFAKRQQQLTAMKVIQRNCAAYLKLRNWQWWRLFTKVKPLLQVTRQEEEMQAKEDELQKTKERQQKAENELKELEQKHSQLTEEKNLLQEQLQAETELYAEAEEMRVRLAAKKQELEEILHEMEARLEEEEDRGQQLQAERKKMAQQMLDLEEQLEEEEAARQKLQLEKVTAEAKIKKLEDEILVMDDQNNKLSKERKLLEERISDLTTNLAEEEEKAKNLTKLKNKHESMISELEVRLKKEEKSRQELEKLKRKLEGDASDFHEQIADLQAQIAELKMQLAKKEEELQAALARLDDEIAQKNNALKKIRELEGHISDLQEDLDSERAARNKAEKQKRDLGEELEALKTELEDTLDSTATQQELRAKREQEVTVLKKALDEETRSHEAQVQEMRQKHAQAVEELTEQLEQFKRAKANLDKNKQTLEKENADLAGELRVLGQAKQEVEHKKKKLEAQVQELQSKCSDGERARAELNDKVHKLQNEVESVTGMLNEAEGKAIKLAKDVASLSSQLQDTQELLQEETRQKLNVSTKLRQLEEERNSLQDQLDEEMEAKQNLERHISTLNIQLSDSKKKLQDFASTVEALEEGKKRFQKEIENLTQQYEEKAAAYDKLEKTKNRLQQELDDLVVDLDNQRQLVSNLEKKQRKFDQLLAEEKNISSKYADERDRAEAEAREKETKALSLARALEEALEAKEELERTNKMLKAEMEDLVSSKDDVGKNVHELEKSKRALETQMEEMKTQLEELEDELQATEDAKLRLEVNMQALKGQFERDLQARDEQNEEKRRQLQRQLHEYETELEDERKQRALAAAAKKKLEGDLKDLELQADSAIKGREEAIKQLRKLQAQMKDFQRELEDARASRDEIFATAKENEKKAKSLEADLMQLQEDLAAAERARKQADLEKEELAEELASSLSGRNALQDEKRRLEARIAQLEEELEEEQGNMEAMSDRVRKATQQAEQLSNELATERSTAQKNESARQQLERQNKELRSKLHEMEGAVKSKFKSTIAALEAKIAQLEEQVEQEAREKQAATKSLKQKDKKLKEILLQVEDERKMAEQYKEQAEKGNARVKQLKRQLEEAEEESQRINANRRKLQRELDEATESNEAMGREVNALKSKLRGPPPQETSQ

SEQ ID NO: 15414 - protein, 714 aa, Homo sapiens
MVRWLSAKLGPTVASRHVARNLLRLLTSCYVGPTRQQFTVSSGESPPLSAGNIYQKRPVLGDIVSGPVLSCLLHIARLYGEPVLTYQYLPYISYLVAPGSASGPSRLNSRKEAGLLAAVTLTQKIIVYLSDTTLMDILPRISHEVLLPVLSFLTSLVTGFPSGAQARTILCVKTISLIALICLRIGQEMVQQHLSEPVATFFQVFSQLHELRQQDLKLDPAGRGEGQLPQVVFSDGQQRPVDPALLDELQKVFTLEMAYTIYVPFSCLLGDIIRKIIPNHELVGELAALYLESISPSSRNPASVEPTMPGTGPEWDPHGGGCPQDDGHSGTFGSVLVGNRIQIPNDSRPENPGPLGPISGVGGGGLGSGSDDNALKQELPRSVHGLSGNWLAYWQYEIGVSQQDAHFHFHQIRLQSFPGHSGAVKCVAPLSSEDFFLSGSKDRTVRLWPLYNYGDGTSETAPRLVYTQHRKSVFFVGQLEAPQHVVSCDGAVHVWDPFTGKTLRTVEPLDSRVPLTAVAVMPAPHTSITMASSDSTLRFVDCRKPGLQHEFRLGGGLNPGLVRALAISPSGRSVVAGFSSGFMVLLDTRTGLVLRGWPAHEGDILQIKAVEGSVLVSSSSDHSLTVWKELEQKPTHHYKSASDPIHTFDLYGSEVVTGTVSNKIGVCSLLEPPSQATTKLSSENFRGTLTSLALLPTKRHLLLGSDNGVIRLLA

SEQ ID NO: 15415 - protein, 1211 aa, Homo sapiens
MQLKIMPKKKRLSAGRVPLILFLCQMISALEVPLDPKLLEDLVQPPTITQQSPKDYIIDPRENIVIQCEAKGKPPPSFSWTRNGTHFDIDKDPLVTMKPGTGTLIINIMSEGKAETYEGVYQCTARNERGAAVSNNIVVRPSRSPLWTKEKLEPITLQSGQSLVLPCRPPIGLPPPIIFWMDNSFQRLPQSERVSQGLNGDLYFSNVLPEDTREDYICYARFNHTQTIQQKQPISVKVISVDELNDTIAANLSDTEFYGAKSSRERPPTFLTPEGNASNKEELRGNVLSLECIAEGLPTPIIYWAKEDGMLPKNRTVYKNFEKTLQIIHVSEADSGNYQCIAKNALGAIHHTISVRVKAAPYWITAPQNLVLSPGEDGTLICRANGNPKPRISWLTNGVPIEIAPDDPSRKIDGDTIIFSNVQERSSAVYQCNASNEYGYLLANAFVNVLAEPPRILTPANTLYQVIANRPALLDCAFFGSPLPTIEWFKGAKGSALHEDIYVLHENGTLEIPVAQKDSTGTYTCVARNKLGMAKNEVHLEIKDPTWIVKQPEYAVVQRGSMVSFECKVKHDHTLSLTVLWLKDNRELPSDERFTVDKDHLVVADVSDDDSGTYTCVANTTLDSVSASAVLSVVAPTPTPAPVYDVPNPPFDLELTDQLDKSVQLSWTPGDDNNSPITKFIIEYEDAMHKPGLWHHQTEVSGTQTTAQLKLSPYVNYSFRVMAVNSIGKSLPSEASEQYLTKASEPDKNPTAVEGLGSEPDNLVITWKPLNGFESNGPGLQYKVSWRQKDGDDEWTSVVVANVSKYIVSGTPTFVPYLIKVQALNDMGFAPEPAVVMGHSGEDLPMVAPGNVRVNVVNSTLAEVHWDPVPLKSIRGHLQGYRIYYWKTQSSSKRNRRHIEKKILTFQGSKTHGMLPGLEPFSHYTLNVRVVNGKGEGPASPDRVFNTPEGVPSAPSSLKIVNPTLDSLTLEWDPPSHPNGILTEYTLKYQPINSTHELGPLVDLKIPANKTRWTLKNLNFSTRYKFYFYAQTSAGSGSQITEEAVTTVDEAGILPPDVGAGKAMASRQVDIATQGWFIGLMCAVALLILILLIVCFIRRNKGGKYPVKEKEDAHADPEIQPMKEDDGTFGEYSDAEDHKPLKKGSRTPSDRTVKKEDSDDSLVDYGEGVNGQFNEDGSFIGQYSGKKEKEPAEGNESSEAPSPVNAMNSFV

SEQ ID NO: 15416 - protein, 436 aa, Homo sapiens
MDAMKRGLCCVLLLCGAVFVSPSQEIHARFRRGARSYQVICRDEKTQMIYQQHQSWLRPVLRSNRVEYCWCNSGRAQCHSVPVKRNSDCYFGNGSAYRGTHSLTESGASCLPWNSMILIGKVYTAQNPSAQALGLGKHNYCRNPDGDAKPWCHVLKNRRLTWEYCDVPSCSTCGLRQYSQPQFRIKGGLFADIASHPWQAAIFAKHRRSPGERFLCGGILISSCWILSAAHCFQERFPPHHLTVILGRTYRVVPGEEEQKFEVEKYIVHKEFDDDTYDNDIALLQLKSDSSRCAQESSVVRTVCLPPADLQLPDWTECELSGYGKHEALSPFYSERLKEAHVRLYPSSRCTSQHLLNRTVTDNMLCAGDTRSGGPQANLHDACQGDSGGPLVCLNDGRMTLVGIISWGLGCGQKDVPGVYTKVTNYLDWIRDNMRP

SEQ ID NO: 15417 - protein, 738 aa, Homo sapiens
MEIPNPPTSKCITYWKRKVKSEYMRLRQLKRLQANMGAKALYVANFAKVQEKTQILNEEWKKLRVQPVQSMKPCTIESIFPGFASQHMLMRSLNTVALVPIMYSWSPLQQNFMVEDETVLCNIPYMGDEVKEEDETFIEELINNYDGKVHGEEEMIPGSVLISDAVFLELVDALNQYSDEEEEGHNDTSDGKQDDSKEDLPVTRKRKRHAIEGNKKSSKKQFPNDMIFSAIASMFPENGVPDDMKERYRELTEMSDPNALPPQCTPNIDGPNAKSVQREQSLHSFHTLFCRRCFKYDCFLHPFHATPNVYKRKNKEIKIEPEPCGTDCFLLLEGAKEYAMLHNPRSKCSGRRRRRHHIVSASCSNASASAVAETKEGDSDRDTGNDWASSSSEANSRCQTPTKQKASPAPPQLCVVEAPSEPVEWTGAEESLFRVFHGTYFNNFCSIARLLGTKTCKQVFQFAVKESLILKLPTDELMNPSQKKKRKHRLWAAHCRKIQLKKDNSSTQVYNYQPCDHPDRPCDSTCPCIMTQNFCEKFCQCNPDCQNRFPGCRCKTQCNTKQCPCYLAVRECDPDLCLTCGASEHWDCKVVSCKNCSIQRGLKKHLLLAPSDVAGWGTFIKESVQKNEFISEYCGELISQDEADRRGKVYDKYMSSFLFNLNNDFVVDATRKGNKIRFANHSVNPNCYAKVVMVNGDHRIGIFAKRAIQAGEELFFDYRYSQADALKYVGIERETDVL

SEQ ID NO: 15418 - protein, 2003 aa, Homo sapiens
MAAVTMSVPGRKAPPRPGPVPEAAQPFLFTPRGPSAGGGPGSGTSPQVEWTARRLVWVPSELHGFEAAALRDEGEEEAEVELAESGRRLRLPRDQIQRMNPPKFSKAEDMAELTCLNEASVLHNLRERYYSGLIYTYSGLFCVVINPYKQLPIYTEAIVEMYRGKKRHEVPPHVYAVTEGAYRSMLQDREDQSILCTGESGAGKTENTKKVIQYLAHVASSPKGRKEPGVPASVSTVSYGELERQLLQANPILEAFGNAKTVKNDNSSRFGKFIRINFDVAGYIVGANIETYLLEKSRAIRQAKDECSFHIFYQLLGGAGEQLKADLLLEPCSHYRFLTNGPSSSPGQERELFQETLESLRVLGFSHEEIISMLRMVSAVLQFGNIALKRERNTDQATMPDNTAAQKLCRLLGLGVTDFSRALLTPRIKVGRDYVQKAQTKEQADFALEALAKATYERLFRWLVLRLNRALDRSPRQGASFLGILDIAGFEIFQLNSFEQLCINYTNEKLQQLFNHTMFVLEQEEYQREGIPWTFLDFGLDLQPCIDLIERPANPPGLLALLDEECWFPKATDKSFVEKVAQEQGGHPKFQRPRHLRDQADFSVLHYAGKVDYKANEWLMKNMDPLNDNVAALLHQSTDRLTAEIWKDVEGIVGLEQVSSLGDGPPGGRPRRGMFRTVGQLYKESLSRLMATLSNTNPSFVRCIVPNHEKRAGKLEPRLVLDQLRCNGVLEGIRICRQGFPNRILFQEFRQRYEILTPNAIPKGFMDGKQACEKMIQALELDPNLYRVGQSKIFFRAGVLAQLEEERDLKVTDIIVSFQAAARGYLARRAFQKRQQQQSALRVMQRNCAAYLKLRHWQWWRLFTKVKPLLQVTRQDEVLQARAQELQKVQELQQQSAREVGELQGRVAQLEEERARLAEQLRAEAELCAEAEETRGRLAARKQELELVVSELEARVGEEEECSRQMQTEKKRLQQHIQELEAHLEAEEGARQKLQLEKVTTEAKMKKFEEDLLLLEDQNSKLSKERKLLEDRLAEFSSQAAEEEEKVKSLNKLRLKYEATIADMEDRLRKEEKGRQELEKLKRRLDGESSELQEQMVEQQQRAEELRAQLGRKEEELQAALARAEDEGGARAQLLKSLREAQAALAEAQEDLESERVARTKAEKQRRDLGEELEALRGELEDTLDSTNAQQELRSKREQEVTELKKTLEEETRIHEAAVQELRQRHGQALGELAEQLEQARRGKGAWEKTRLALEAEVSELRAELSSLQTARQEGEQRRRRLELQLQEVQGRAGDGERARAEAAEKLQRAQAELENVSGALNEAESKTIRLSKELSSTEAQLHDAQELLQEETRAKLALGSRVRAMEAEAAGLREQLEEEAAARERAGRELQTAQAQLSEWRRRQEEEAGALEAGEEARRRAAREAEALTQRLAEKTETVDRLERGRRRLQQELDDATMDLEQQRQLVSTLEKKQRKFDQLLAEEKAAVLRAVEERERAEAEGREREARALSLTRALEEEQEAREELERQNRALRAELEALLSSKDDVGKSVHELERACRVAEQAANDLRAQVTELEDELTAAEDAKLRLEVTVQALKTQHERDLQGRDEAGEERRRQLAKQLRDAEVERDEERKQRTLAVAARKKLEGELEELKAQMASAGQGKEEAVKQLRKMQAQMKELWREVEETRTSREEIFSQNRESEKRLKGLEAEVLRLQEELAASDRARRQAQQDRDEMADEVANGNLSKAAILEEKRQLEGRLGQLEEELEEEQSNSELLNDRYRKLLLQVESLTTELSAERSFSAKAESGRQQLERQIQELRGRLGEEDAGARARHKMTIAALESKLAQAEEQLEQETRERILSGKLVRRAEKRLKEVVLQVEEERRVADQLRDQLEKGNLRVKQLKRQLEEAEEEASRAQAGRRRLQRELEDVTESAESMNREVTTLRNRLRRGPLTFTTRTVRQVFRLEEGVASDEEAEEAQPGSGPSPEPEGSPPAHPQ

SEQ ID NO: 15419 - protein, 938 aa, Homo sapiens
MAKAGRAGGPPPGGGAPWHLRNVLSDSVESSDDEFFDARGEGTAPCTSSILQEKQRELYRVSLRRQRFPAQGSIEIHEDSEEGCPQRSCKTHVLLLVLHGGNILDTGAGDPSCKAADIHTFSSVLEKVTRAHFPAALGHILIKFVPCPAICSEAFSLVSHLNPYSHDEGCLSSSQDHVPLAALPLLAISSPQYQDAVATVIERANQVYREFLKSSDGIGFSGQVCLIGDCVGGLLAFDAICYSAGPSGDSPASSSRKGSISSTQDTPVAVEEDCSLASSKRLSKSNIDISSGLEDEEPKRPLPRKQSDSSTYDCEAITQHHAFLSSIHSSVLKDESETPAAGGPQLPEVSLGRFDFDVSDFFLFGSPLGLVLAMRRTVLPGLDGFQVRPACSQVYSFFHCADPSASRLEPLLEPKFHLVPPVSVPRYQRFPLGDGQSLLLADALHTHSPLFLEGSSRDSPPLLDAPASPPQASRFQRPGRRMSEGSSHSESSESSDSMAPVGASRITAKWWGSKRIDYALYCPDVLTAFPTVALPHLFHASYWESTDVVAFILRQVMRYESVNIKESARLDPAALSPANPREKWLRKRTQVKLRNVTANHRANDVIAAEDGPQVLVGRFMYGPLDMVALTGEKVDILVMAEPSSGRWVHLDTEITNSSGRITYNVPRPRRLGVGVYPVKMVVRGDQTCAMSYLTVLPRGMECVVFSIDGSFAASVSIMGSDPKVRPGAVDVVRHWQDLGYMILYITGRPDMQKQRVVSWLSQHNFPQGMIFFSDGLVHDPLRQKAIFLRNLMQECFIKISAAYGSTKDISVYSVLGLPASQIFIVGRPTKKYQTQCQFLSEGYAAHLAALEASHRSRPKKNNSRMILRKGSFGLHAQPEFLRKRNHLRRTMSVQQPDPPAANPKPERAQSQPESDKDHERPLPALSWARGPPKFESVP

SEQ ID NO: 15420 - protein, 688 aa, Homo sapiens
MPVPWFLLSLALGRSPVVLSLERLVGPQDATHCSPGLSCRLWDSDILCLPGDIVPAPGPVLAPTHLQTELVLRCQKETDCDLCLRVAVHLAVHGHWEEPEDEEKFGGAADSGVEEPRNASLQAQVVLSFQAYPTARCVLLEVQVPAALVQFGQSVGSVVYDCFEAALGSEVRIWSYTQPRYEKELNHTQQLPALPWLNVSADGDNVHLVLNVSEEQHFGLSLYWNQVQGPPKPRWHKNLTGPQIITLNHTDLVPCLCIQVWPLEPDSVRTNICPFREDPRAHQNLWQAARLQLLTLQSWLLDAPCSLPAEAALCWRAPGGDPCQPLVPPLSWENVTVDVNSSEKLQLQECLWADSLGPLKDDVLLLETRGPQDNRSLCALEPSGCTSLPSKASTRAARLGEYLLQDLQSGQCLQLWDDDLGALWACPMDKYIHKRWALVWLACLLFAAALSLILLLKKDHAKGWLRLLKQDVRSGAAARGRAALLLYSADDSGFERLVGALASALCQLPLRVAVDLWSRRELSAQGPVAWFHAQRRQTLQEGGVVVLLFSPGAVALCSEWLQDGVSGPGAHGPHDAFRASLSCVLPDFLQGRAPGSYVGACFDRLLHPDAVPALFRTVPVFTLPSQLPDFLGALQQPRAPRSGRLQERAEQVSRALQPALDSYFHPPGTPAPGRGVGPGAGPGAGDGT

SEQ ID NO: 15421 - protein, 639 aa, Homo sapiens
MLHPTDKKMDGGSGRELASAPEVPHKPAVEAHQAPEAALQYKETVPPGNGAPDVFQTLQHTLSSLEAAAAAWRHQPPSHSGPMEFEGTSEGGAGSLGKQEGAGSCQREAARLAERNAWLRLALSSREDELVRTQASLEAIRAEKETLQKEVQELQDSLLRLEPCPHLSHNQAGGSGSGSSSSEADREPWETQDSFSLAHPLLRRLRSHSSTQILGSLPNQPLSPEMHIMEAQMEQLRGSIEKLKCFNRLLSAVLQGYKGRCEGLSMQLGQREAEATALHLALQYSEHCEEAYRVLLALREADSGAGDEAPMSDLQAAEKEAWRLLAQEEAAMDAGAQQNPQPSPEGSSVDKPTPQEVAFQLRSYVQRLQERRSLMKILSEPGPTLAPMPTVPRAEAMVQAILGTQAGPALPRLEKTQIQQDLVAAREALADLMLRLQLVRREKRGLELREAALRALGPAHVLLLEQLRWERAELQAGGANSSGGHSSGGGSSGDEEEWYQGLPAVPGGTSGIDGGQVGRAWDPEKLAQELAASLTRTLDLQEQLQSLRRELEQVAQKGRARRSQSAELNRDLCKAHSALVLAFRGAHRKQEEQRRKLEQQMALMEAQQAEEVAVLEATARALGKPRPPLPPPQLGDTFL

SEQ ID NO: 15422 - protein, 1227 aa, Homo sapiens
MNDTVNKTDQVDCSDLSEHNGLDREESMEVEAPVANKSGSGTSSGSHSSTAPSSSSSSSSSSGGGGSSSTGTSAITTSLPQLGDLTTLGNFSVINSNVIIENLQSTKVAVAQFSQEARCGGASGGKLAVPALMEQLLALQQQQIHQLQLIEQIRHQILLLASQNADLPTSSSPSQGTLRTSANPLSTLSSHLSQQLAAAAGLAQSLASQSASISGVKQLPPIQLPQSSSGNTIIPSNSGSSPNMNILAAAVTTPSSEKVASSAGASHVSNPAVSSSSSPAFAISSLLSPASNPLLPQQASANSVFPSPLPNIGTTAEDLNSLSALAQQRKSKPPNVTAFEAKSTSDEAFFKHKCRFCAKVFGSDSALQIHLRSHTGERPFKCNICGNRFSTKGNLKVHFQRHKEKYPHIQMNPYPVPEHLDNIPTSTGIPYGMSIPPEKPVTSWLDTKPVLPTLTTSVGLPLPPTLPSLIPFIKTEEPAPIPISHSATSPPGSVKSDSGGPESATRNLGGLPEEAEGSTLPPSGGKSEESGMVTNSVPTASSSVLSSPAADCGPAGSATTFTNPLLPLMSEQFKAKFPFGGLLDSAQASETSKLQQLVENIDKKATDPNECIICHRVLSCQSALKMHYRTHTGERPFKCKICGRAFTTKGNLKTHYSVHRAMPPLRVQHSCPICQKKFTNAVVLQQHIRMHMGGQIPNTPVPDSYSESMESDTGSFDEKNFDDLDNFSDENMEDCPEGSIPDTPKSADASQDSLSSSPLPLEMSSIAALENQMKMINAGLAEQLQASLKSVENGSIEGDVLTNDSSSVGGDMESQSAGSPAISESTSSMQALSPSNSTQEFHKSPSIEEKPQRAVPSEFANGLSPTPVNGGALDLTSSHAEKIIKEDSLGILFPFRDRGKFKNTACDICGKTFACQSALDIHYRSHTKERPFICTVCNRGFSTKGNLKQHMLTHQMRDLPSQLFEPSSNLGPNQNSAVIPANSLSSLIKTEVNGFVHVSPQDSKDTPTSHVPSGPLSSSATSPVLLPALPRRTPKQHYCNTCGKTFSSSSALQIHERTHTGEKPFACTICGRAFTTKGNLKVHMGTHMWNSTPARRGRRLSVDGPMTFLGGNPVKFPEMFQKDLAARSGSGDPSSFWNQYAAALSNGLAMKANEISVIQNGGIPPIPGSLGSGNSSPVSGLTGNLERLQNSEPNAPLAGLEKMASSENGTNFRFTRFVEDSKEIVTS

SEQ ID NO: 15423 - protein, 1032 aa, Homo sapiens
MELLPPLPQSFLLLLLLPAKPAAGEDWQCPRTPYAASRDFDVKYVVPSFSAGGLVQAMVTYEGDRNESAVFVAIRNRLHVLGPDLKSVQSLATGPAGDPGCQTCAACGPGPHGPPGDTDTKVLVLDPALPALVSCGSSLQGRCFLHDLEPQGTAVHLAAPACLFSAHHNRPDDCPDCVASPLGTRVTVVEQGQASYFYVASSLDAAVAASFSPRSVSIRRLKADASGFAPGFVALSVLPKHLVSYSIEYVHSFHTGAFVYFLTVQPASVTDDPSALHTRLARLSATEPELGDYRELVLDCRFAPKRRRRGAPEGGQPYPVLRVAHSAPVGAQLATELSIAEGQEVLFGVFVTGKDGGPGVGPNSVVCAFPIDLLDTLIDEGVERCCESPVHPGLRRGLDFFQSPSFCPNPPGLEALSPNTSCRHFPLLVSSSFSRVDLFNGLLGPVQVTALYVTRLDNVTVAHMGTMDGRILQVELVRSLNYLLYVSNFSLGDSGQPVQRDVSRLGDHLLFASGDQVFQVPIQGPGCRHFLTCGRCLRAWHFMGCGWCGNMCGQQKECPGSWQQDHCPPKLTEFHPHSGPLRGSTRLTLCGSNFYLHPSGLVPEGTHQVTVGQSPCRPLPKDSSKLRPVPRKDFVEEFECELEPLGTQAVGPTNVSLTVTNMPPGKHFRVDGTSVLRGFSFMEPVLIAVQPLFGPRAGGTCLTLEGQSLSVGTSRAVLVNGTECLLARVSEGQLLCATPPGATVASVPLSLQVGGAQVPGSWTFQYREDPVVLSISPNCGYINSHITICGQHLTSAWHLVLSFHDGLRAVESRCERQLPEQQLCRLPEYVVRDPQGWVAGNLSARGDGAAGFTLPGFRFLPPPHPPSANLVPLKPEEHAIKFEYIGLGAVADCVGINVTVGGESCQHEFRGDMVVCPLPPSLQLGQDGAPLQVCVDGECHILGRVVRPGPDGVPQSTLLGILLPLLLLVAALATALVFSYWWRRKQLAPHSLSPQHSLPLMVWIPPLVSMEHPSPIVKMNPVCHCCGKSPSS

SEQ ID NO: 15424 - protein, 273 aa, Homo sapiens
MKDMPLRIHVLLGLAITTLVQAVDKKVDCPRLCTCEIRPWFTPRSIYMEASTVDCNDLGLLTFPARLPANTQILLLQTNNIAKIEYSTDFPVNLTGLDLSQNNLSSVTNINVKKMPQLLSVYLEENKLTELPEKCLSELSNLQELYINHNLLSTISPGAFIGLHNLLRLHLNSNRLQMINSKWFDALPNLEILMIGENPIIRIKDMNFKPLINLRSLVIAGINLTEIPDNALVGLENLESISFYDNRLIKVPHVALQKVVNLKFLDLNKNPIN

SEQ ID NO: 15425 - protein, 571 aa, Homo sapiens
MYLVSGGLNNTVNIWDLKSKRVHRSLKDHKDQVTCVTYNWNDCYIASGSLSGEIILHSVTTNLSSTPFGHGSNQSVRHLKYSLFKKSLLGSVSDNGIVTLWDVNSQSPYHNFDSVHKAPASGICFSPVNELLFVTIGLDKRIILYDTSSKKLVKTLVADTPLTAVDFMPDGATLAIGSSRGKIYQYDLRMLKSPVKTISAHKTSVQCIAFQYSTVLTKSSLNKGCSNKPTTVNKRSVNVNAASGGVQNSGIVREAPATSIATVLPQPMTSAMGKGTVAVQEKAGLPRSINTDTLSKETDSGKNQDFSSFDDTGKSSLGDMFSPIRDDAVVNKGSDESIGKGDGFDFLPQLNSVFPPRKNPVTSSTSVLHSSPLNVFMGSPGKEENENRDLTAESKKIYMGKQESKDSFKQLAKLVTSGAESGNLNTSPSSNQTRNSEKFEKPENEIEAQLICEPPINGSSTPNPKIASSVTAGVASSLSEKIADSIGNNRQNAPLTSIQIRFIQNMIQETLDDFREACHRDIVNLQVEMIKQFHMQLNEMHSLLERYSVNEGLVAEIERLREENKRLRAHF

SEQ ID NO: 15426 - protein, 372 aa, Homo sapiens
VVPEKKVPLVVPKKPEAPPAKVPEVPKEVVPEKKVAVPKKPEVPPAKVPEVPKKPVLEEKPAVPVPERAESPPPEVYEEPEEIAPEEEIAPEEEKPVPVAEEEEPEVPPPAVPEEPKKIIPEKKVPVIKKPEAPPPKEPEMPKKVVPVKKVPTVKKPETPAAKVPEVPKKLVPVKKEPVPVTKKPEVLPEKVPKVPEKIIPEKEVSVPIPAEPEVPPAEVEETPEEIIYEEKASITIGRKETPPVEEREIEKYIKPEEPEPEPQPEEIPVKEPEPEKVIEKPKLKPRPPPPPPAPPKEDVKEKIFQLKAIPKKKVPEKPQVPEKVELTPLKVPEPPPPKPVEEVEVPTVTKRERKIPEPTKVPEIKPAIPLP

SEQ ID NO: 15427 - protein, 337 aa, Homo sapiens
MAAPEPLRPRLCRLVRGEQGYGFHLHGEKGRRGQFIRRVEPGSPAEAAALRAGDRLVEVNGVNVEGETHHQVVQRIKAVEGQTRLLVVDQETDEELRRRQLTCTEEMAQRGLPPAHDPWEPKPDWAHTGSHSSEAGKKDVSGPLRELRPRLCHLRKGPQGYGFNLHSDKSRPGQYIRSVDPGSPAARSGLRAQDRLIEVNGQNVEGLRHAEVVASIKAREDEARLLVVDPETDEHFKRLRVTPTEEHVEGPLPSPVTNGTSPAQLNGGSACSSRSDLPGSDKDTEDGSAWKQDPFQESGLHLSPTAAEAKEKARAMRVNKRAPQMDWNRKREIFSNF

SEQ ID NO: 15428 - protein, 594 aa, Homo sapiens
DKDLPVEKYFVERQPVSEPPADQVASDMPHSPTLRVDRKRKVSGDSSHTETTAEEVPEDPLLKAKRRRVSKGLHPKKQRHLLHLRERWEQQVSAADGKPGRQSRKEVTQATQPEAIPQGTNITEEKPGRKRAEAKGNRSWSEESLKPSDNEQGLPVFSGSPPMKSLSSTSAGGKKQAQPSCAPASRPPAKQQKIKENQKTDVLCADEEEDCQAASLLQKYTDNSEKPSGKRLCKTKHLIPQESRRGLPLTGEYYVENADGKVTVRRFRKRPEPSSDYDLSPAKQEPKPFDRLQQLLPASQSTQLPCSSSPQETTQSRPMPPEARRLIVNKNAGETLLQRAARLGYEEVVLYCLENKICDVNHRDNAGYCALHEACARGWLNIVRHLLEYGADVNCSAQDGTRPLHDAVENDHLEIVRLLLSYGADPTLATYSGRTIMKMTHSELMEKFLTDYLNDLQGRNDDDASGTWDFYGSSVCEPDDESGYDVLANPPGPEDQDDDDDAYSDVFEFEFSETPLLPCYNIQVSVAQGPRNWLLLSDVLKKLKMSSRIFRCNFPNVEIVTIAEAEFYRQVSASLLFSCSKDLEAFNPERSPLK

SEQ ID NO: 15429 - protein, 449 aa, Homo sapiens
WNMHEDRRNEPIIISDDDEQPCPGSDTSSAHYIILSDSLKEEVAHRDKKRCSKVVSFSKPIEKEETVGIFSPLSVKLNIVISPYHFDNSWKAFLGELTLQLLPAQSLIENFSERSITLMSSESSNQFLIYVHSKGEDVEKQKKEPMSICDKGILVESSFSGEMLEDLGWLQKKRRIKLYQKPEGNHIIKVGIYLLEAGLAKLDFLSDANSRMKKFNQLMKKVMEKLHNSIIPDVLEEDEDDPESEPEGQDIDELYHFVKQTHQQETQSIQVDVQHPALIPVLRPYQREAVNWMLQQECFRSSPATESALHFLWREIVTSEGLKLYYNPYTGCIIREYPNSGPQLLGGILADEMGLGKTVEVLALILTHTRQDVKQDALTLPEGKVVNYFIPSHYFGGKLKKTEIQNIEFEPKEKVQCPPYPFTFSYTCDDTDSCERNEWKKRSVHPFHL

SEQ ID NO: 15430 - protein, 1258 aa, Homo sapiens
MEKYVRLQKIGEGSFGKAILVKSTEDGRQYVIKEINISRMSSKEREESRREVAVLANMKHPNIVQYRESFEENGSLYIVMDYCEGGDLFKRINAQKGVLFQEDQILDWFVQICLALKHVHDRKILHRDIKSQNIFLTKDGTVQLGDFGIARVLNSTVELARTCIGTPYYLSPEICENKPYNNKSDIWALGCVLYELCTLKHAFEAGSMKNLVLKIISGSFPPVSLHYSYDLRSLVSQLFKRNPRDRPSVNSILEKGFIAKRIEKFLSPQLIAEEFCLKTFSKFGSQPIPAKRPASGQNSISVMPAQKITKPAAKYGIPLAYKKYGDKKLHEKKPLQKHKQAHQTPEKRVNTGEERRKISEEAARKRRLEFIEKEKKQKDQIISLMKAEQMKRQEKERLERINRAREQGWRNVLSAGGSGEVKAPFLGSGGTIAPSSFSSRGQYEHYHAIFDQMQQQRAEDNEAKWKREIYGRGLPERGILPGVRPGFPYGAAGHHHFPDADDIRKTLKRLKAVSKQANANRQKGQLAVERAKQVEEFLQRKREAMQNKARAEGHMVYLARLRQIRLQNFNERQQIKAKLRGEKKEANHSEGQEGSEEADMRRKKIESLKAHANARAAVLKEQLERKRKEAYEREKKVWEEHLVAKGVKSSDVSPPLGQHETGGSPSKQQMRSVISVTSALKEVGVDSSLTDTRETSEEMQKTNNAISSKREILRRLNENLKAQEDEKGKQNLSDTFEINVHEDAKEHEKEKSVSSDRKKWEAGGQLVIPLDELTLDTSFSTTERHTVGEVIKLGPNGSPRRAWGKSPTDSVLKILGEAELQLQTELLENTTIRSEISPEGEKYKPLITGEKKVQCISHEINPSAIVDSPVETKSPEFSEASPQMSLKLEGNLEEPDDLETEILQEPSGTNKDESLPCTITDVWISEEKETKETQSADRITIQENEVSEDGVSSTVDQLSDIHIEPGTNDSQHSKCDVDKSVQPEPFFHKVVHSEHLNLVPQVQSVQCSPEESFAFRSHSHLPPKNKNKNSLLIGLSTGLFDANNPKMLRTCSLPDLSKLFRTLMDVPTVGDVRQDNLEIDEIEDENIKEGPSDSEDIVFEETDTDLQELQASMEQLLREQPGEEYSEEEESVLKNSDVEPTANGTDVADEDDNPSSESALNEEWHSDNSDGEIASECECDSVFNHLEELRLHLEQEMGFEKFFEVYEKIKAIHEDEDENIEICSKIVQNILGNEHQHLYAKILHLVMADGAYQEDNDE

SEQ ID NO: 15431 - protein, 746 aa, Homo sapiens
MITYKNFTHPSGVGERCDTPANLLAKGCQLNFIENPVSQVEILKNKPLSVGRQKNSSDIVQIAPQSLILKLRPGGAQTLQVHVRQTEDYPVDLYYLMDLSASMDDDLNTIKELGSRLSKEMSKLTSNFRLGFGSFVEKPVSPFVKTTPEEIANPCSSIPYFCLPTFGFKHILPLTNDAERFNEIVKNQKISANIDTPEGGFDAIMQAAVCKEKIGWRNDSLHLLVFVSDADSHFGMDSKLAGIVIPNDGLCHLDSKNEYSMSTVLEYPTIGQLIDKLVQNNVLLIFAVTQEQVHLYENYAKLIPGATVGLLQKDSGNILQLIISAYEELRSEVELEVLGDTEGLNLSFTAICNNGTLFQHQKKCSHMKVGDTASFSVTVNIPHCERRSRHIIIKPVGLGDALELLVSPECNCDCQKEVEVNSSKCHHGNGSFQCGVCACHPGHMGPRCECGEDMLSTDSCKEAPDHPSCSGRGDCYCGQCICHLSPYGNIYGPYCQCDNFSCVRHKGLLCGGNGDCDCGECVCRSGWTGEYCNCTTSTDSCVSEDGVLCSGRGDCVCGKCVCTNPGASGPTCERCPTCGDPCNSKRSCIECHLSAAGQAREECVDKCKLAGATISEEEDFSKDGSVSCSLQGENECLITFLITTDNEGKTIIHSINEKDCPKPPNIPMIMLGVSLAILLIGVVLLCIWKLLVSFHDRKEVAKFEAERSKAKWQTGTNPLYRGSTSTFKNVTYKHREKQKVDLSTDC

SEQ ID NO: 15432 - protein, 1200 aa, Homo sapiens
MLGESDERCTNAGSGCRRSSPGTSAQQLDATFSTNASLEIFELDLSDPSLDMKSCATFSSSHRYHKLIWGPYKMDSKGDVSGVLIAGGENGNIILYDPSKIIAGDKEVVIAQNDKHTGPVRALDVNIFQTNLVASGANESEIYIWDLNNFATPMTPGAKTQPPEDISCIAWNRQVQHILASASPSGRATVWDLRKNEPIIKVSDHSNRMHCSGLAWHPDVATQMVLASEDDRLPVIQMWDLRFASSPLRVLENHARGILAIAWSMADPELLLSCGKDAKILCSNPNTGEVLYELPTNTQWCFDIQWCPRNPAVLSAASFDGRISVYSIMGGSTDGLRQKQVDKLSSSFGNLDPFGTGQPLPPLQIPQQTAQHSIVLPLKKPPKWIRRPVGASFSFGGKLVTFENVRMPSHQGAEQQQQQHHVFISQVVTEKEFLSRSDQLQQAVQSQGFINYCQKKIDASQTEFEKNVWSFLKVNFEDDSRGKYLELLGYRKEDLGKKIALALNKVDGANVALKDSDQVAQSDGEESPAAEEQLLGEHIKEEKEESEFLPSSGGTFNISVSGDIDGLITQALLTGNFESAVDLCLHDNRMADAIILAIAGGQELLARTQKKYFAKSQSKITRLITAVVMKNWKEIVESCDLKNWREALAAVLTYAKPDEFSALCDLLGTRLENEGDSLLQTQACLCYICAGNVEKLVACWTKAQDGSHPLSLQDLIEKVVILRKAVQLTQAMDTSTVGVLLAAKMSQYANLLAAQGSIAAALAFLPDNTNQPNIMQLRDRLCRAQGEPVAGHESPKIPYEKQQLPKGRPGPVAGHHQMPRVQTQQYYPHGENPPPPGFIMHGNVNPNAAGQLPTSPGHMHTQVPPYPQPQPYQPAQPYPFGTGGSAMYRPQQPVAPPTSNAYPNTPYISSASSYTGQSQLYAAQHQASSPTSSPATSFPPPPSSGASFQHGGPGAPPSSSAYALPPGTTGPQNGWNDPPALNRVPKKKKMPENFMPPVPITSPIMNPLGDPQSQMLQQQPSAPVPLSSQSSFPQPHLPGGQPFHGVQQPLGQTGMPPSFSKPNIEGAPGAPIGNTFQHVQSLPTKKITKKPIPDEHLILKTTFEDLIQRCLSSATDPQTKRKLDDASKRLEFLYDKLREQTLSPTITSGLHNIARSIETRNYSEGLTMHTHIVSTSNFSETSAFMPVLKVVLTQANKLGV

SEQ ID NO: 15433 - protein, 1444 aa, Homo sapiens
MDDRCYPVIFPDERNFRPFTSDSLAAIEKRIAIQKEKKKSKDQTGEVPQPRPQLDLKASRKLPKLYGDIPRELIGKPLEDLDPFYRNHKTFMVLNRKRTIYRFSAKHALFIFGPFNSIRSLAIRVSVHSLFSMFIIGTVIINCVFMATGPAKNSNSNNTDIAECVFTGIYIFEALIKILARGFILDEFSFLRDPWNWLDSIVIGIAIVSYIPGITIKLLPLRTFRVFRALKAISVVSRLKVIVGALLRSVKKLVNVIILTFFCLSIFALVGQQLFMGSLNLKCISRDCKNISNPEAYDHCFEKKENSPEFKMCGIWMGNSACSIQYECKHTKINPDYNYTNFDNFGWSFLAMFRLMTQDSWEKLYQQTLRTTGLYSVFFFIVVIFLGSFYLINLTLAVVTMAYEEQNKNVAAEIEAKEKMFQEAQQLLKEEKEALVAMGIDRSSLTSLETSYFTPKKRKLFGNKKRKSFFLRESGKDQPPGSDSDEDCQKKPQLLEQTKRLSQNLSLDHFDEHGDPLQRQRALSAVSILTITMKEQEKSQEPCLPCGENLASKYLVWNCCPQWLCVKKVLRTVMTDPFTELAITICIIINTVFLAMEHHKMEASFEKMLNIGNLVFTSIFIAEMCLKIIALDPYHYFRRGWNIFDSIVALLSFADVMNCVLQKRSWPFLRSFRVLRVFKLAKSWPTLNTLIKIIGNSVGALGSLTVVLVIVIFIFSVVGMQLFGRSFNSQKSPKLCNPTGPTVSCLRHWHMGDFWHSFLVVFRILCGEWIENMWECMQEANASSSLCVIVFILITVIGKLVVLNLFIALLLNSFSNEERNGNLEGEARKTKVQLALDRFRRAFCFVRHTLEHFCHKWCRKQNLPQQKEVAGGCAAQSKDIIPLVMEMKRGSETQEELGILTSVPKTLGVRHDWTWLAPLAEEEDDVEFSGEDNAQRITQPEPEQQAYELHQENKKPTSQRVQSVEIDMFSEDEPHLTIQDPRKKSDVTSILSECSTIDLQDGFGWLPEMVPKKQPERCLPKGFGCCFPCCSVDKRKPPWVIWWNLRKTCYQIVKHSWFESFIIFVILLSSGALIFEDVHLENQPKIQELLNCTDIIFTHIFILEMVLKWVAFGFGKYFTSAWCCLDFIIVIVSVTTLINLMELKSFRTLRALRPLRALSQFEGMKVVVNALIGAIPAILNVLLVCLIFWLVFCILGVYFFSGKFGKCINGTDSVINYTIITNKSQCESGNFSWINQKVNFDNVGNAYLALLQVATFKGWMDIIYAAVDSTEKEQQPEFESNSLGYIYFVVFIIFGSFFTLNLFIGVIIDNFNQQQKKLGGQDIFMTEEQKKYYNAMKKLGSKKPQKPIPRPLNKCQGLVFDIVTSQIFDIIIISLIILNMISMMAESYNQPKAMKSILDHLNWVFVVIFTLECLIKIFALRQYYFTNGWNLFDCVVVLLSIVSK

SEQ ID NO: 15434 - protein, 701 aa, Homo sapiens
MAVSAGSARTSPSSGFLMVLDIPQERGLSSLDRKYLDGLDVCRFPLLDALRPLPLDWMYLVYTIMFLGALGMMLGLCYRISCVLFLLPYWYVFLLDKTSWNNHSYLYGLLAFQLTFMDANHYWSVDGLLNAHRRNAHVPLWNYAVLRGQIFIVYFIAGVKKLDADWVEGYSMEYLSRHWLFSPFKLLLSEELTSLLVVHWGGLLLDLSAGFLLFFDVSRSIGLFFVSYFHCMNSQLFSIGMFSYVMLASSPLFCSPEWPRKLVSYCPRRLQQLLPLKAAPQPSVSCVYKRSRGKSGQKPGLRHQLGAAFTLLYLLEQLFLPYSHFLTQGYNNWTNGLYGYSWDMMVHSRSHQHVKITYRDGRTGELGYLNPGVFTQSRRWKDHADMLKQYATCLSRLLPKYNVTEPQIYFDIWVSINDRFQQRIFDPRVDIVQAAWSPFQRTSWVQPLLMDLSPWRAKLQEIKSSLDNHTEVVFIADFPGLHLENFVSEDLGNTSIQLLQGEVTVELVAEQKNQTLREGEKMQLPAGEYHKVYTTSPSPSCYMYVYVNTTELALEQDLAYLQELKEKVENGSETGPLPPELQPLLEGEVKGGPEPTPLVQTFLRRQQRLQEIERRRNTPFHERFFRFLLRKLYVFRRSFLMTCISLRNLILGRPSLEQLAQEVTYANLRPFEAVGELNPSNTDSSHSNPPESNPDPVHSEF

SEQ ID NO: 15435 - protein, 246 aa, Homo sapiens
MARGSVSDEEMMELREAFAKVDTDGNGYISFNELNDLFKAACLPLPGYRVREITENLMATGDLDQDGRISFDEFIKIFHGLKSTDVAKTFRKAINKKEGICAIGGTSEQSSVGTQHSYSEEEKYAFVNWINKALENDPDCRHVIPMNPNTNDLFNAVGDGIVLCKMINLSVPDTIDERTINKKKLTPFTIQENLNLALNSASAIGCHVVNIGAEDLKEGKPYLVLGLLWQVIKIGLFADIELSRNE

SEQ ID NO: 15436 - protein, 283 aa, Homo sapiens
MAHRGAHFAFRSRWQKTDDELCRHSMSFILHKAIRNDFFQSYLYLLEKIPLVKLYALTSQVINGEMQFYARAKLFYQEVPATEEGMMGNFIELSSPDIQASQKFLRKFVGGPGRAGTDCALDCGSGIGRVSKHVLLPVFNSVELVDMMESFLLEAQNYLQVKGDKVESYHCYSLQEFTPPFRRYDVIWIQWVSGHLTDKDLLAFLSRCRDGLKENGIIILKDNVAREGCILDLSDSSVTRDMDILRSLIRKSGLVVLGQEKQDGFPEQCIPVWMFALHSDRHS

SEQ ID NO: 15437 - protein, 295 aa, Homo sapiens
MSRESDVEAQQSHGSSACSQPHGSVTQSQGSSSQSQGISSSSTSTMPNSSQSSHSSSGTLSSLETVSTQELYSIPEDQEPEDQEPEEPTPAPWARLWALQDGFANLETESGHVTQSDLELLLSSDPPASASQSAGIRECVNDNYWFGRDKSCEYCFDEPLLKRTDKYRTYSKKHFRIFREVGPKNSYIAYIEDHSGNGTFVNTELVGKGKRRPLNNNSEIALSLSRNKVFVFFDLTVDDQSVYPKALRDEYIMSKTLGSGACGEVKLAFERKTCKKVAIKIISKRKFAIGSAREA

SEQ ID NO: 15438 - protein, 897 aa, Homo sapiens
LEESGEIKDMLLECFININYIKKEEGRRFLSCLFNWNINFIKMIHGTIKNQLQGLQKSLMVYIAEIYFRAWKKASGKILEAIENDCIQDFMFHGIHLPRRSPVHSKVREVLSYFHHQKKVRQGVEEMLYRLYKPILWRGLKARNSEVRSNAALLFVEAFPIRDPNLHAIEMDSEIQKQFEELYSLLEDPYPMVRSTGILGVCKITSKYWEMMPPTILIDLLKKVTGELAFDTSSADVRCSVFKCLPMILDNKLSHPLLEQLLPALRYSLHDNSEKVRVAFVDMLLKIKAVRAAKFWKICPMEHILVRLETDSRPVSRRLVSLIFNSFLPVNQPEEVWCERCVTLVQMNHAAARRFYQYAHEHTACTNIAKLIHVIRHCLNACIQRAVREPPEDEEEEDGREKENVTVLDKTLSVNDVACMAGLLEIIVILWKSIDRSMENNKEAKLYTINKFASVLPEYLKVFKDDRCKIPLFMLMSFMPASAVPPFSCGVISTLRSREEGAVDKSYCTLLDCLCSWGQVGHILELVDNWLPTEHAQAKSNTASKGRVQIHDTRPVKPELALVYIEYLLTHPKNRECLLSAPRKKLNHLLKALETSKADLESLLQTPGGKPRGFSEAAAPRAFGLHCRLSIHLQHKFCSEGKVYLSMLEDTGFWLESKILSFIQDQEEDYLKLHRVIYQQIIQTYLTVCKDVVMVGLGDHQFQMQLLQRSLGIMQTVKGFFYVSLLLDILKEITGSSLIQKTDSDEEVAMLLDTVQKVFQKMLECIARSFRKQPEEGLRVSDVEELTPPEHLSDLPPFSRCLIGIIIKSSNVVRSFLDELKACVASNDIEGIVCLTAAVHIILVINAGKHKSSKVREVAATVHRKLKTFMEITLEEDSIERFLYESSSRTLGELLNS

SEQ ID NO: 15439 - protein, 752 aa, Homo sapiens
MSTRTPLPTVNERDTENHTSHGDGRQEVTSRTSRSGARCRNSIASCADEQPHIGNYRLLKTIGKGNFAKVKLARHILTGREVAIKIIDKTQLNPTSLQKLFREVRIMKILNHPNIVKLFEVIETEKTLYLIMEYASGGEVFDYLVAHGRMKEKEARSKFRQGCQAGQTIKVQVSFDLLSLMFTFIVSAVQYCHQKRIVHRDLKAENLLLDADMNIKIADFGFSNEFTVGGKLDTFCGSPPYAAPELFQGKKYDGPEVDVWSLGVILYTLVSGSLPFDGQNLKELRERVLRGKYRIPFYMSTDCENLLKRFLVLNPIKRGTLEQIMKDRWINAGHEEDELKPFVEPELDISDQKRIDIMVGMGYSQEEIQESLSKMKYDEITATYLLLGRKSSELDASDSSSSSNLSLAKVRPSSDLNNSTGQSPHHKVQRSVSSSQKQRRYSDHAGPAIPSVVAYPKRSQTSTADSDLKEDGISSRKSSGSAVGGKGIAPASPMLGNASNPNKADIPERKKSSTVPSSNTASGGMTRRNTYVCSERTTADRHSVIQNGKENSTIPDQRTPVASTHSISSAATPDRIRFPRGTASRSTFHGQPRERRTATYNGPPASPSLSHEATPLSQTRSRGSTNLFSKLTSKLTRSRNVSAEQKDENKEAKPRSLRFTWSMKTTSSMDPGDMMREIRKVLDANNCDYEQRERFLLFCVHGDGHAENLVQWEMEVCKLPRLSLNGVRFKRISGTSIAFKNIASKIANELKL

SEQ ID NO: 15440 - protein, 296 aa, Homo sapiens
MPQHGPWQTRMRKISNHGSLRVAKVAYPLGLCVGVFIYVAYIKWHRATATQAFFSITRAAPGARWGQQAHSPLGTAADGHEVFYGIMFDAGSTGTRVHVFQFTRPPRETPTLTHETFKALKPGLSAYADDVEKSAQGIRELLDVAKQDIPFDFWKATPLVLKATAGLRLLPGEKAQKLLQKVKKVFKASPFLVGDDCVSIMNGTDEGVSAWITINFLTGSLKTPGGSSVGMLDLGGGSTQIAFLPRVEGTLQASPPGYLTALRMFNRTYKLYSYSYLGLGLMSARLAILGGVEGQP

SEQ ID NO: 15441 - protein, 489 aa, Homo sapiens
PSVRTSTETTGGSAQAGQAGGSVQAGQAGGSVQAGPVSSGLALRKLGDRVQLLNLLVTRLRQKVLREPLEPAALQRELPREVDQVHLEVLELRKQVAELGKHLRIAQHGGAEPSGRKQPPASDAVALGREGLTKRGPMEAEDQGELFLHLRSVARAPQTLSMHRLQRKLKEAARKIISLRLEKEQLIEMGNRLRAELGRPERWLLHHALPPAPEARKPGEEPRRPLDRSPPLGQVQPHFTSQDAKSAEDEAPSRHLGKHQPRSAQVGSRLDALQGPKTQHSIHTVTCKSPRQKEDRSPKPPQAPQHPEEHGRQSHSSSSFASGTLQDMWRLLDLGSSPSGVTSQGDSTPEMGSHYVTQAGLELLGSSSPAALASQSAEMTGVGPTPSLAWSGALHPNMNQEASLVRSTWAPGMRGGMNGGSSSVCKNMQRGPHWSPSQQPCSGIRTVLLSRKERTLLSCFSLPAPVVLVPLLLSGQAVTERAGHAGDIL

SEQ ID NO: 15442 - protein, 457 aa, Homo sapiens
MENLSLSIEDVQPRSPGRSSLDDSGERDEKLSKSISFTSESISRVSETESFDGNSSKGGLGKEESQNEKQTKKSLLPTLEKKLTRVPSKSLDLNKNEYLSLDKSSTSDSVDEENVPEKDLHGRLFINRIFHISADRMFELLFTSSRFMQKFASSRNIIDVVSTPWTAELGGDQLRTMTYTIVLNSPLTGKCTAATEKQTLYKESREARFYLVDSEVLTHDVPYHDYFYTVNRYCIIRSSKQKCRLRVSTDLKYRKQPWGLVKSLIEKNSWSSLEDYFKQLESDLLIEESVLNQAIEDPGKLTGLRRRRRTFNRTAETVPKLSSQHSSGDVGLGAKGDITGKKKEMENYNVTLIVVMSIFVLLLVLLNVTLFLKLSKIEHAAQSFYRLRLQEEKSLNLASDMVSRAETIQKNKDQAHRLKGVLRDSIVMLEQLKSSLIMLQKTFDLLNKNKTGMAVES

SEQ ID NO: 15443 - protein, 258 aa, Homo sapiens
MMVLQVSAAPRTVALTALLMVLLTSVVQGRATPENYLFQGRQECYAFNGTQRFLERYIYNREEFARFDSDVGEFRAVTELGRPAAEYWNSQKDILEEKRAVPDRMCRHNYELGGPMTLQRRVQPRVNVSPSKKGPLQHHNLLVCHVTDFYPGSIQVRWFLNGQEETAGVVSTNLIRNGDWTFQILVMLEMTPQQGDVYTCQVEHTSLDSPVTVEWKAQSDSARSKTLTGAGGFVLGLIICGVGIFMHRRSKKVQRGSA

SEQ ID NO: 15444 - protein, 80 aa, Homo sapiens
MKKKLVVLGLLAVVLVLVIVGLCLWLPSASKEPDNHVYTRAAVAADAKQCSKIGRDALRDGGSAVDAAIAALLCVGLMNA

SEQ ID NO: 15445 - protein, 549 aa, Homo sapiens
MTPLVSRLSRLWAIMRKPRAAVGSGHRKQAASQEGRQKHAKNNSQAKPSACDACAGMIAECPGAPAGLARQPEEVVLQASVSSYHLFRDVAEVTAFRGSLLSWYDQEKRDLPWRRRAEDEMDLDRRAYAVWVSEVMLQQTQVATVINYYTGWMQKWPTLQDLASASLEEVNQLWAGLGYYSRGRRLQEGARKVVEELGGHMPRTAETLQQLLPGVGRYTAGAIASIAFGQATGVVDGNVARVLCRVRAIGADPSSTLVSQQLWGLAQQLVDPARPGDFNQAAMELGATVCTPQRPLCSQCPVESLCRARQRVEQEQLLASGSLSGSPDVEECAPNTGQCHLCLPPSEPWDQTLGVVNFPRKASRKPPREESSATCVLEQPGALGAQILLVQRPNSGLLAGLWEFPSVTWEPSEQLQRKALLQELQRWAGPLPATHLRHLGEVVHTFSHIKLTYQVYGLALEGQTPVTTVPPGARWLTQEEFHTAAVSTAMKKVFRVYQGQQPGTCMGSKRSQVSSPCSRKKPRMGQQVLDNFFRSHISTDAHSLNSAAQ

SEQ ID NO: 15446 - protein, 370 aa, Homo sapiens
MGDRRFIDFQFQDSNSSLRPRLGNATANNTCIVDDSFKYNLNGAVYSVVFILGLITNSVSLFVFCFRMKMRSETAIFITNLAVSDLLFVCTLPFKIFYNFNRHWPFGDTLCKISGTAFLTNIYGSMLFLTCISVDRFLAIVYPFRSRTIRTRRNSAIVCAGVWILVLSGGISASLFSTTNVNNATTTCFEGFSKRVWKTYLSKITIFIEVVGFIIPLILNVSCSSVVLRTLRKPATLSQIGTNKKKVLKMITVHMAVFVVCFVPYNSVLFLYALVRSQAITNCFLERFAKIMYPITLCLATLNCCFDPFIYYFTLESFQKSFYINAHIRMESLFKTETPLTTKPSLPAIQEEVSDQTTNNGGELMLESTF

SEQ ID NO: 15447 - protein, 1043 aa, Homo sapiens
MMCTMQAHITQALSNPGDVIKPMFVINEMRRIARHFRFGNQEDAHEFLQYTVDAMQKACLNGSNKLDRHTQATTLVCQIFGGYLRSRVKCLNCKGVSDTFDPYLDITLEIKAAQSVNKALEQFVKPEQLDGENSYKCSKCKKMVPASKRFTIHRSSNVLTLSLKRFANFTGGKIAKDVKYPEYLDIRPYMSQPNGEPIVYVLYAVLVHTGFNCHAGHYFCYIKASNGLWYQMNDSIVSTSDIRSVLSQQAYVLFYIRSHDVKNGGELTHPTHSPGQSSPRPVISQRVVTNKQAAPGFIGPQLPSHMIKNPPHLNGTGPLKDTPSSSMSSPNGNSSVNRASPVNASASVQNWSVNRSSVIPEHPKKQKITISIHNKLPVRQCQSQPNLHSNSLENPTKPVPSSTITNSAVQSTSNASTMSVSSKVTKPIPRSESCSQPVMNGKSKLNSSVLVPYGAESSEDSDEESKGLGKENGIGTIVSSHSPGQDAEDEEATPHELQEPMTLNGANSADSDSDPKENGLAPDGASCQGQPALHSENPFAKANGLPGKLMPAPLLSLPEDKILETFRLSNKLKGSTDEMSAPGAERGPPEDRDAEPQPGSPAAESLEEPDAAAGLSSTKKAPPPRDPGTPATKEGAWEAMAVAPEEPPPSAGEDIVGDTAPPDLCDPGSLTGDASPLSQDAKGMIAEGPRDSALAEAPEGLSPAPPARSEEPCEQPLLVHPSGDHARDAQDPSQSLGAPEAAERPPAPVLDMAPAGHPEGDAEPSPGERVEDAAAPKAPGPSPAKEKIGSLRKVDRGHYRSRRERSSSGEPARESRSKTEGHRHRRRRTCPRERDRQDRHAPEHHPGHGDRLSPGERRSLGRCSHHHSRHRSGVELDWVRHHYTEGERGWGREKFYPDRPRWDRCRYYHDRYALYAARDWKPFHGGREHERAGLHERPHKDHNRGRRGCEPARERERHRPSSPRAGAPHALAPHPDRFSHDRTALVAGDNCNLSDRFHEHENGKSRKRRHDSVENSDSHVEKKARRSEQKDPLEEPKAKKHKK

SEQ ID NO: 15448 - protein, 187 aa, Homo sapiens
MAQRTGLEDPERYLFVDRAVIYNPATQADWTAKKLVWIPSERHGFEAASIKEERGDEVMVELAENGKKAMVNKDDIQKMNPPKFSKVEDMAELTCLNEASVLHNLKDRYYSGLIYTYSGLFCVVINPYKNLPIYSENIIEMYRGKKRHEMPPHIYAISESAYRCMLQDREDQSILCTGESGAGKTEN

SEQ ID NO: 15449 - protein, 160 aa, Homo sapiens
ARNIKVSDPKLFEMIKIFSLSPNFRAEKCLRDHLVQPLRSNGEPEPLRFTGEYCLLRTLKQCQTLREALIAAGKEIIWHGRTKEEPAHYCSICEVEVFDLLFVTNESNSRKTYIVHCQDCARKTSGNLENFVVLEQYKMEDLMQVYDQFTLAPPLPSASS

SEQ ID NO: 15450 - protein, 529 aa, Homo sapiens
GQDEVSAREQHFHSQVRESTICFLLFAILYVVSYFIITRYKRKSDEQEDEDAIVNRISLFLSTFTLAVSAGAVLLLPFSIISNEILLSFPQNYYIQWLNGSLIHGLWNLASLFSNLCLFVLMPFAFFFLESEGFAGLKKGIRARILETLVMLLLLALLILGIVWVASALIDNDAASMESLYDLWEFYLPYLYSCISLMGCLLLLLCTPVGLSRMFTVMGQLLVKPTILEDLDEQIYIITLEEEALQRRLNVGMLCAGNPEVATGRQVPEEQAGQLLLGKWIQEGGDMIANPRLSSSVEYNIMELEQELENVKTLKTKLERRKKASAWERNLVYPAVMVLLLIETSISVLLVACNILCLLVDETAMPKGTRGPGIGNASLSTFGFVGAALEIILIFYLMVSSVVGFYSLRFFGNFTPKKDDTTMTKIIGNCVSILVLSSALPVMSRTLGITRFDLLGDFGRFNWLGNFYIVLSYNLLFAIVTTLCLVRKFTSAVREELFKALGLHKLHLPNTSRDSETAKPSVNGHQKAL

SEQ ID NO: 15451 - protein, 284 aa, Homo sapiens
FGHSSFDQAEISHSESEHLPARDSPSLSENPTTDEDDSEYEDCPEEEEDDWQTCSEEDGPKEEDCSQDWKESSTADSEARSRKTPQKRQIHNFSHLVSKQELLELFKELHTGRKVKDGQLTVGLVGYPNVGKSSTINTIMGNKKVSVSATPGHTKHFQTLYVEPGLCLCDCPGLVMPSFVSTKAEMTCSGILPIDQMRDHVPPVSLIITPREDEDPHRPPTSEELLTAYGYMRGFMTAHGQPDQPRSARYILKDYVSGKLLYCHPPPGRDPVTFQHQHQRLLEN

SEQ ID NO: 15452 - protein, 285 aa, Homo sapiens
MWVTKLLPALLLQHVLLHLLLLPIAIPYAEGQRKRRNTIHEFKKSAKTTLIKIDPALKIKTKKVNTADQCANRCTRNKGLPFTCKAFVFDKARKQCLWFPFNSMSSGVKKEFGHEFDLYENKDYIRNCIIGKGRSYKGTVSITKSGIKCQPWSSMIPHEHSYRGKDLQENYCRNPRGEEGGPWCFTSNPEVRYEVCDIPQCSEVECMTCNGESYRGLMDHTESGKICQRWDHQTPHRHKFLPERYPDKGFDDNYCRNPDGQPRPWCYTLDPHTRWEYCAIKTCET

SEQ ID NO: 15453 - protein, 260 aa, Homo sapiens
FCRDRMILLKMEQEIIDFIADNNNHYKKFPQMSSYQRMLVHRVAAYFGLDHNVDQTGKSVIINKTSSTRIQFAPRKAFLWKTVGSWKTVTYAMRPIRKDSSFGWGNRDGSGRTSGSRQSSSENELKWSDHQRAWSSTDSDSSNRNLKPAMTKTASFGGITVLTRGDSTSSTRSTGKLSKAGSESSSSAGSSGSLSRTHPPLQSTPLVSGVAAGSPGCVPYPENGIGGQVAPSSTSYILLPLEAATGIPPGSILLNPHTGE

SEQ ID NO: 15454 - protein, 372 aa, Homo sapiens
LDNLKKLRMLDLRHNKLREIPSVVYRLDSLTTLYLRFNRITTVEKDIKNLSKLSMLSIRENKIKQLPAEIGNLSSLSRLGLRYNRLSAIPRSLAKCSALEELNLENNNISTLPESLLSSLVKLNSLTLARNCFQLYPVGGPSQFSTIYSLNMEHNRINKIPFGIFSRAKVLSKLNMKDNQLTSLPLDFGTWTSMVELNLATNQLTKIPEDVSGLVSLEVLILSNNLLKKLPHGLGNLRKLRELDLEENKLESLPNEIAYLKDLQKLVLTNNQLTTLPRGIGHLTNLTHLGLGENLLTHLPEEIGTLENLEELYLNDNPNLHSLPFELALCSKLSIMSIENCPLSHLPPQIVAGGPSFIIQFLKMQGPYRAMV

SEQ ID NO: 15455 - protein, 524 aa, Homo sapiens
LDSSLISFGPCQTPTLGFCVERHDKIQSFKPETYWVLQAKVNTDKDRSLLLDWDRVRVFDREIAQMFLNMTKLEKEAQVEATSRKEKAKQRPLALNTVEMLRVASSSLGMGPQHAMQTAERLYTQGYISYPRTETTHYPENFDLKGSLRQQANHPYWADTVKRLLAEGINRPRKGHDAGDHPPITPMKSATEAELGGDAWRLYEYITRHFIATVSHDCKYLQSTISFRIGPELFTCSGKTVLSPGFTEVMPWQSVPLEESLPTCQRGDAFPVGEVKMLEKQTNPPDYLTEAELITLMEKHGIGTDASIPVHINNICQRNYVTVESGRRLKPTNLGIVLVHGYYKIDAELVLPTIRSAVEKQLNLIAQGKADYRQVLGHTLDVFKRKFHYFVDSIAGMDELMEVSFSPLAATGKPLSRCGKCHRFMKYIQAKPSRLHCSHCDETYTLPQNGTIKLYKELRCPLDDFELVLWSSGSRGKSYPLCPYCYNHPPFRDMKKGECSHSLLSTGSCSLFSVPTPALHQAGL

SEQ ID NO: 15456 - protein, 1283 aa, Homo sapiens
MGNLEIVLTGHNADLSFLQWIREVTGYVLVAMNEFSTLPLPNLRVVRGTQVYDGKFAIFVMLNYNTNSSHALRQLRLTQLTEILSGGVYIEKNDKLCHMDTIDWRDIVRDRDAEIVVKDNGRSCPPCHEVCKGRCWGPGSEDCQTLTKTICAPQCNGHCFGPNPNQCCHDECAGGCSGPQDTDCFACRHFNDSGACVPRCPQPLVYNKLTFQLEPNPHTKYQYGGVCVASCPHNFVVDQTSCVRACPPDKMEVDKNGLKMCEPCGGLCPKACEGTGSGSRFQTVDSSNIDGFVNCTKILGNLDFLITGLNGDPWHKIPALDPEKLNVFRTVREITGYLNIQSWPPHMHNFSVFSNLTTIGGRSLYNRGFSLLIMKNLNVTSLGFRSLKEISAGRIYISANRQLCYHHSLNWTKVLRGPTEERLDIKHNRPRRDCVAEGKVCDPLCSSGGCWGPGPGQCLSCRNYSRGGVCVTHCNFLNGEPREFAHEAECFSCHPECQPMEGTATCNGSGSDTCAQCAHFRDGPHCVSSCPHGVLGAKGPIYKYPDVQNECRPCHENCTQGCKGPELQDCLGQTLVLIGKTHLTMALTVIAGLVVIFMMLGGTFLYWRGRRIQNKRAMRRYLERGESIEPLDPSEKANKVLARIFKETELRKLKVLGSGVFGTVHKGVWIPEGESIKIPVCIKVIEDKSGRQSFQAVTDHMLAIGSLDHAHIVRLLGLCPGSSLQLVTQYLPLGSLLDHVRQHRGALGPQLLLNWGVQIAKGMYYLEEHGMVHRNLAARNVLLKSPSQVQVADFGVADLLPPDDKQLLYSEAKTPIKWMALESIHFGKYTHQSDVWSYGVTVWELMTFGAEPYAGLRLAEVPDLLEKGERLAQPQICTIDVYMVMVKCWMIDENIRPTFKELANEFTRMARDPPRYLVIKRESGPGIAPGPEPHGLTNKKLEEVELEPELDLDLDLEAEEDNLATTTLGSALSLPVGTLNRPRGSQSLLSPSSGYMPMNQGNLGESCQESAVSGSSERCPRPVSLHPMPRGCLASESSEGHVTGSEAELQEKVSMCRSRSRSRSPRPRGDSAYHSQRHSLLTPVTPLSPPGLEEEDVNGYVMPDTHLKGTPSSREGTLSSVGLSSVLGTEEEDEDEEYEYMNRRRRHSPPHPPRPSSLEELGYEYMDVGSDLSASLGSTQSCPLHPVPIMPTAGTTPDEDYEYMNRQRDGGGPGGDYAAMGACPASEQGYEEMRAFQGPGHQAPHVHYARLKTLRSLEATDSAFDNPDYWHSRLFPKANAQRT

SEQ ID NO: 15457 - protein, 670 aa, Homo sapiens
MAHHLPAAMESHQDFRSIKAKFQASQPEPSDLPKKPPKPEFGKLKKFSQPELSEHPKKAPLPEFGAVSLKPPPPEVTDLPKKPPPPEVTDLPKKPPPPEVTDLPKKPPPPEVTDLPKKPSKLELSDLSKKFPQLGATPFPRKPLQPEVGEAPLKASLPEPGAPARKPLQPDELSHPARPPSEPKSGAFPRKLWQPEAGEATPRSPQPELSTFPKKPAQPEFNVYPKKPPQPQVGGLPKKSVPQPEFSEAAQTPLWKPQSSEPKRDSSAFPKKASQPPLSDFPKKPPQPELGDLTRTSSEPEVSVLPKRPRPAEFKALSKKPPQPELGGLPRTSSEPEFNSLPRKLLQPERRGPPRKFSQPEPSAVLKRHPQPEFFGDLPRKPPLPSSASESSLPAAVAGFSSRHPLSPGFGAAGTPRWRSGGLVHSGGARPGLRPSHPPRRRPLPPASSLGHPPAKPPLPPGPVDMQSFRRPSAASIDLRRTRSAAGLHFQDRQPEDIPQVPDEIYELYDDVEPRDDSSPSPKGRDEAPSVQQAARRPPQDPALRKEKDPQPQQLPPMDPKLLKQLRKAEKAEREFRKKFKFEGEIVVHTKMMIDPNAKTRRGGGKHLGIRRGEILEVIEFTSNEEMLCRDPKGKYGYVPRTALLPLETEVYDDVDFCDPLENQPLPLGR

SEQ ID NO: 15458 - protein, 310 aa, Homo sapiens
MAMEIDSRPGGLPGSSCNLGAAREHMQAVTRNYITHPRVTYRTVCSVNGPLVVLDRVKFAQYAEIVHFTLPDGTQRSGQVLEVAGTKAIVQVFEGTSGIDARKTTCEFTGDILRTPVSEDMLGRVFNGSGKPIDKGPVVMAEDFLDINGQPINPHSRIYPEEMIQTGISPIDVMNSIARGQKIPIFSAAGLPHNEIAAQICRQAGLVKKSKAVLDYHDDNFAIVFAAMGVRRLSRLVNMETARFFKSDFEQNGTMGNVCLFLNLANDPTIERIITPRLALTTAEFLAYQCEKHVLVILTDMSSYAEALRE

SEQ ID NO: 15459 - protein, 2466 aa, Homo sapiens
MHVSLAEALEVRGGPLQEEEIWAVLNQSAESLQELFRKVSLADPAALGFIISPWSLLLLPSGSVSFTDENISNQDLRAFTAPEVLQNQSLTSLSDVEKIHIYSLGMTLYWGADYEVPQSQPIKLGDHLNSILLGMCEDVIYARVSVRTVLDACSAHIRNSNCAPSFSYVKHLVKLVLGNLSGTDQLSCNSEQKPDRSQAIRDRLRGKGLPTGRSSTSDVLDIQKPPLSHQTFLNKGLSKSMGFLSIKDTQDENYFKDILSDNSGREDSENTFSPYQFKTSGPEKKPIPGIDVLSKKKIWASSMDLLCTADRDFSSGETATYRRCHPEAVTVRTSTTPRKKEARYSDGSIALDIFGPQKMDPIYHTRELPTSSAISSALDRIRERQKKLQVLREAMNVEEPVRRYKTYHGDVFSTSSESPSIISSESDFRQVRRSEASKRFESSSGLPGVDETLSQGQSQRPSRQYETPFEGNLINQEIMLKRQEEELMQLQAKMALRQSRLSLYPGDTIKASMLDITRDPLREIALETAMTQRKLRNFFGPEFVKMTIEPFISLDLPRSILTKKGKNEDNRRKVNIMLLNGQRLELTCDTKTICKDVFDMVVAHIGLVEHHLFALATLKDNEYFFVDPDLKLTKVAPEGWKEEPKKKTKATVNFTLFFRIKFFMDDVSLIQHTLTCHQYYLQLRKDILEERMHCDDETSLLLASLALQAEYGDYQPEVHGVSYFRMEHYLPARVMEKLDLSYIKEELPKLHNTYVGASEKETELEFLKVCQRLTEYGVHFHRVHPEKKSQTGILLGVCSKGVLVFEVHNGVRTLVLRFPWRETKKISFSKKKITLQNTSDGIKHGFQTDNSKICQYLLHLCSYQHKFQLQMRARQSNQDAQDIERASFRSLNLQAESVRGFNMGRAISTGSLASSTLNKLAVRPLSVQAEILKRLSCSELSLYQPLQNSSKEKNDKASWEEKPREMSKSYHDLSQASLYPHRKNVIVNMEPPPQTVAELVGKPSHQMSRSDAESLAGVTKLNNSKSVASLNRSPERRKHESDSSSIEDPGQAYVLDVLHKRWSIVSSPEREITLVNLKKDAKYGLGFQIIGGEKMGRLDLGIFISSVAPGGPADLDGCLKPGDRLISVNSVSLEGVSHHAAIEILQNAPEDVTLVISQPKEKISKVPSTPVHLTNEMKNYMKKSSYMQDSAIDSSSKDHHWSRGTLRHISENSFGPSGGLREGSLSSQDSRTESASLSQSQVNGFFASHLGDQTWQESQHGSPSPSVISKATEKETFTDSNQSKTKKPGISDVTDYSDRGDSDMDEATYSSSQDHQTPKQESSSSVNTSNKMNFKTFSSSPPKPGDIFEVELAKNDNSLGISVTGGVNTSVRHGGIYVKAVIPQGAAESDGRIHKGDRVLAVNGVSLEGATHKQAVETLRNTGQVVHLLLEKGQSPTSKEHVPVTPQCTLSDQNAQGQGPEKVKKTTQVKDYSFVTEENTFEVKLFKNSSGLGFSFSREDNLIPEQINASIVRVKKLFPGQPAAESGKIDVGDVILKVNGASLKGLSQQEVISALRGTAPEVFLLLCRPPPGVLPEIDTALLTPLQSPAQVLPNSSKDSSQPSCVEQSTSSDENEMSDKSKKQCKSPSRRDSYSDSSGSGEDDLVTAPANISNSTWSSALHQTLSNMVSQAQSHHEAPKSQEDTICTMFYYPQKIPNKPEFEDSNPSPLPPDMAPGQSYQPQSESASSSSMDKYHIHHISEPTRQENWTPLKNDLENHLEDFELEVELLITLIKSEKGSLGFTVTKGNQRIGCYVHDVIQDPAKSDGRLKPGDRLIKVNDTDVTNMTHTDAVNLLRAASKTVRLVIGRVLELPRIPMLPHLLPDITLTCNKEELGFSLCGGHDSLYQVVYISDINPRSVAAIEGNLQLLDVIHYVNGVSTQGMTLEEVNRALDMSLPSLVLKATRNDLPVVPSSKRSAVSAPKSTKGNGSYSVGSCSQPALTPNDSFSTVAGEEINEISYPKGKCSTYQIKGSPNLTLPKESYIQEDDIYDDSQEAEVIQSLLDVVDEEAQNLLNENNAAGYSCGPGTLKMNGKLSEERTEDTDCDGSPLPEYFTEATKMNGCEEYCEEKVKSESLIQKPQEKKTDDDEITWGNDELPIERTNHEDSDKDHSFLTNDELAVLPVVKVLPSGKYTGANLKSVIRVLRGLLDQGIPSKELENLQELKPLDQCLIGQTKENRRKNRYKNILPYDATRVPLGDEGGYINASFIKIPVGKEEFVYIACQGPLPTTVGDFWQMIWEQKSTVIAMMTQEVEGEKIKCQRYWPNILGKTTMVSNRLRLALVRMQQLKGFVVRAMTLEDIQTREVRHISHLNFTAWPDHDTPSQPDDLLTFISYMRHIHRSGPIITHCSAGIGRSGTLICIDVVLGLISQDLDFDISDLVRCMRLQRHGMVQTEDQYIFCYQVILYVLTRLQAEEEQKQQPQLLK

SEQ ID NO: 15460 - protein, 860 aa, Homo sapiens
SEEAEVDVRERETQRDREPKRARDLTLRDSCTDNSMQFGTRTTTAEPGFMGTWQNADTNLLFRMSQQAIRCTLVNCTCECFQPGKINLRTCDQCKHGWVAHALDKLSTQHLYHPTQVEIVQSNVVFDISSLMLYGTQAVPVRLKILLDRLFSVLKQEEVLHILHGLGWTLRDYVRGYILQDAAGKVLDRWAIMSREEEIITLQQFLRFGETKSIVELMAIQEKEGQAVAVPSSKTDSDIRTFIESNNRTRSPSLLAHLENSNPSSIHHFENIPNSLAFLLPFQYINPVSAPLLGLPPNGLLLEQPGLRLREPSLSTQNEYNESSESEVSPTPYKNDQTPNRNALTSITNVEPKTEPACVSPIQNSAPVSDLTKTEHPKSSFRIHRMRRMGSASRKGRVFCNACGKTFYDKGTLKIHYNAVHLKIKHRCTIEGCNMVFSSLRSRNRHSANPNPRLHMPMLRNNRDKDLIRATSGAATPVIASTKSNLALTSPGRPPMGFTTPPLDPVLQNPLPSQLVFSGLKTVQPVPPFYRSLLTPGEMVSPPTSLPTSPIIPTSGTIEQHPPPPSEPVVPAVMMATHEPSADLAPKKKPRKSSMPVKIEKEIIDTADEFDDEDDDPNDGGAVVNDMSHDNHCHSQEEMSPGMSVKDFSKHNRTRCISRTEIRRADSMTSEDQEPERDYENESESSEPKLGEESMEGDEHIHSEVSEKVLMNSERPDENHSEPSHQDVIKVKEEFTDPTYDMFYMSQYGLYNGGGASMAALHESFTSSLNYGSPQKFSPEGDLCSSPDPKICYVCKKSFKSSYSVKLHYRNVHLKEMHVCTVAGCNAAFPSRRSRDRNRNLRMERTIGPGHRDSLHLLPT

SEQ ID NO: 15461 - protein, 317 aa, Homo sapiens
MVGEMETKEKPKPTPDYLMQLMNDKKLMSSLPNFCGIFNHLERLLDEEISRVRKDMYNDTLNGSTEKRSAELPDAVGPIVQLQEKLYVPVKEYPDFNFVGRILGPRGLTAKQLEAETGCKIMVRGKGSMRDKKKEEQNRGKPNWEHLNEDLHVLITVEDAQNRAEIKLKRAVEEVKKLLVPAAEGEDSLKKMQLMELAILNGTYRDANIKSPTAQAAPRIITGPAPVLPPAALRTPTPAGPTIMPLIRQIQTAVMPNGTPHPTAAIVPPGPEAGLIYTPYEYPYTLAPATSILEYPIEPSGVLEWIEMPVMPDISAH

SEQ ID NO: 15462 - protein, 544 aa, Homo sapiens
MLLPLLLSSLLGGSQAMDGRFWIRVQESVMVPEGLCISVPCSFSYPRQDWTGSTPAYGYWFKAVTETTKGAPVATNHQSREVEMSTRGRFQLTGDPAKGNCSLVIRDAQMQDESQYFFRVERGSYVRYNFMNDGFFLKVTVLSFTPRPQDHNTDLTCHVDFSRKGVSAQRTVRLRVAYAPRDLVISISRDNTPALEPQPQGNVPYLEAQKGQFLRLLCAADSQPPATLSWVLQNRVLSSSHPWGPRPLGLELPGVKAGDSGRYTCRAENRLGSQQRALDLSVQYPPENLRVMVSQANRTVLENLGNGTSLPVLEGQSLCLVCVTHSSPPARLSWTQRGQVLSPSQPSDPGVLELPRVQVEHEGEFTCHARHPLGSQHVSLSLSVHYKKGLISTAFSNGAFLGIGITALLFLCLALIIMKILPKRRTQTETPRPRFSRHSTILDYINVVPTAGPLAQKRNQKATPNSPRTPLPPGAPSPESKKNQKKQYQLPSFPEPKSSTQAPESQESQEELHYATLNFPGVRPRPEARMPKGTQADYAEVKFQ

SEQ ID NO: 15463 - protein, 92 aa, Homo sapiens
MALWMRLLPLLALLALWGPDPAAAFVNQHLCGSHLVEALYLVCGERGFFYTPKTRREAEDLQAGELLQLDAARRQPHTRRLLHRERWNKALE

SEQ ID NO: 15464 - protein, 138 aa, Homo sapiens
MAAIRKKLVIVGDGACGKTCLLIVFSKDQFPEVYVPTVFENYVADIEVDGKQVELALWDTAGQEDYDRLRPLSYPDTDVILMCFSIDSPDSLENIPEKWTPEVKHFCPNVPIILVGNKKDLRNDEHTRRELAKMKQEP

SEQ ID NO: 15465 - protein, 281 aa, Homo sapiens
MKRLVCVLLVCSSAVAQLHKDPTLDHHWHLWKKTYGKQYKEKNEEAVRRLIWEKNLKFVMLHNLEHSMGMHSYDLGMNHLGDMGSCGACWAFSAVGALEAQLKLKTGKLVSLSAQNLVDCSTEKYGNKGCNGGFMTTAFQYIIDNKGIDSDASYPYKAMDQKCQYDSKYRAATCSKYTELPYGREDVLKEAVANKGPVSVGVDARHPSFFLYRSGVYYEPSCTQNVNHGVLVVGYGDLNGKEYWLVKNSWGHNFGEEGYIRMARNKGNHCGIASFPSYPEI

SEQ ID NO: 15466 - protein, 121 aa, Homo sapiens
MGRPLLLPLLLLLQPPAFLQPGGSTGSGPSYLYGVTQPKHLSASMGGSVEIPFSFYYPWELAIVPNVRISWRRGHFHGQSFYSTRPPSIHKDYVNRLFLNWTEGQESGFLRISNLRKEDQS

SEQ ID NO: 15467 - protein, 524 aa, Homo sapiens
YALRDRQGNAIGVTACDIDGDGREEIYFLNTNNAFSGVATYTDKLFKFRNNRWEDILSDEVNVARGVASLFAGRSVACVDRKGSGRYSIYIANYAYGNVGPDALIEMDPEASDLSRGILALRDVAAEAGVSKYTGGRGVSVGPILSSSASDIFCDNENGPNFLFHNRGDGTFVDAAASAGVDDPHQHGRGVALADFNRDGKVDIVYGNWNGPHRLYLQMSTHGKVRFRDIASPKFSMPSPVRTVITADFDNDQELEIFFNNIAYRSSSANRLFRVIRREHGDPLIEELNPGDALEPEGRGTGGVVTDFDGDGMLDLILSHGESMAQPLSVFRGNQGFNNNWLRVVPRTRFGAFARGAKVVLYTKKSGAHLRIIDGGSGYLCEMEPVAHFGLGKDEASSVEVTWPDGKMVSRNVASGEMNSVLEILYPRDEDTLQDPAPLETPMNASSSHSCALETSPYVSTPMEATGAGPTRSAVGATSPTRMAQPAWGLSASHRAPAPPPPPLLLPLPLLLPLLELPLLHRSS

SEQ ID NO: 15468 - protein, 780 aa, Homo sapiens
MDNFAEGDFTVADYALLEDCPHVDDCVFAAEFMSNDYVRVTQLYCDGVGVQYKDYIQSERNLEFDICSIWCSKPISVLQDYCDAIKINIFWPLLFQHQNSSVISRLHPCVDANNSRASEINLKKLQHLELMEDIVDLAKKVANDSFLIGGLLRIGCKIENKILAMEEALNWIKYAGDVTILTKLGSIDNCWPMLSIFFTEYKYHITKIVMEDCNLLEELKTQSCMDCIEEGELMKMKGNEEFSKERFDIAIIYYTRAIEYRPENYLLYGNRALCFLRTGQFRNALGDGKRATILKNTWPKGHYRYCDALSMLGEYDWALQANIKAQKLCKNDPEGIKDLIQQHVKLQKQIEDLQGRTANKDPIKAFYENRAYTPRSLSAPIFTTSLNFVEKERDFRKINHEMANGGNQNLKVADEALKVDDCDCHPEFSPPSSQPPKHKGKQKSRNNESEKFSSSSPLTLPADLKNILEKQFSKSSRAAHQDFANIMKMLRSLIQDGYMALLEQRCRSAAQAFTELLNGLDPQKIKQLNLAMINYVLVVYGLAISLLGIGQPEELSEAENQFKRIIEHYPSEGLDCLAYCGIGKVYLKKNRFLEALNHFEKARTLIYRLPGVLTWPTSNVIIEESQPQKIKMLLEKFVEECKFPPVPDAICCYQKCHGYSKIQIYITDPDFKGFIRISCCQYCKIEFHMNCWKKLKTTTFNDKIDKDFLQGICLTPDCEGVISKIIIFSSGGEVKCEFEHKVIKEKVPPRPILKQKCSSLEKLRLKEDKKLKRKIQKKEA

SEQ ID NO: 15469 - protein, 2031 aa, Homo sapiens
MTHLNSLDVQLAQELGDFTDDDLDVVFTPKECRTLQPSLPEEGVELDPHVRDCVQTYIREWLIVNRKNQGSPEICGFKKTGSRKDFHKTLPKQTFESETLECSEPAAQAGPRHLNVLCDVSGKGPVTACDFDLRSLQPDKRLENLLQQVSAEDFEKQNEEARRTNRQAELFALYPSVDEEDAVEIRPVPECPKEHLGNRILVKLLTLKFEIEIEPLFASIALYDVKERKKISENFHCDLNSDQFKGFLRAHTPSVAASSQARSAVFSVTYPSSDIYLVVKIEKVLQQGEIGDCAEPYTVIKESDGGKSKEKIEKLKLQAESFCQRLGKYRMPFAWAPISLSSFFNVSTLEREVTDVDSVVGRSSVGERRTLAQSRRLSERALSLEENGVGSNFKTSTLSVSSFFKQEGDRLSDEDLFKFLADYKRSSSLQRRVKSIPGLLRLEISTAPEIINCCLTPEMLPVKPFPENRTRPHKEILEFPTREVYVPHTVYRNLLYVYPQRLNFVNKLASARNITIKIQFMCGEDASNAMPVIFGKSSGPEFLQEVYTAVTYHNKSPDFYEEVKIKLPAKLTVNHHLLFTFYHISCQQKQGASVETLLGYSWLPILLNERLQTGSYCLPVALEKLPPNYSMHSAEKVPLQNPPIKWAEGHKGVFNIEVQAVSSVHTQDNHLEKFFTLCHSLESQVTFPIRVLDQKISEMALEHELKLSIICLNSSRLEPLVLFLHLVLDKLFQLSVQPMVIAGQTANFSQFAFESVVAIANSLHNSKDLSKDQHGRNCLLASYVHYVFRLPEVQRDVPKSGAPTALLDPRSYHTYGRTSAAAVSSKLLQARVMSSSNPDLAGTHSAADEEVKNIMSSKIADRNCSRMSYYCSGSSDAPSSPAAPRPASKKHFHEELALQMVVSTGMVRETVFKYAWFFFELLVKSMAQHVHNMDKRDSFRRTRFSDRFMDDITTIVNVVTSEIAALLVKPQKENEQAEKMNISLAFFLYDLLSLMDRGFVFNLIRHYCSQLSAKLSNLPTLISMRLEFLRILCSHEHYLNLNLFFMNADTAPTSPCPSISSQNSSSCSSFQDQKIASMFDLTSEYRQQHFLTGLLFTELAAALDAEGEGISKVQRKAVSAIHSLLSSHDLDPRCVKPEVKVKIAALYLPLVGIILDALPQLCDFTVADTRRYRTSGSDEEQEGAGAINQNVALAIAGNNFNLKTSGIVLSSLPYKQYNMLNADTTRNLMICFLWIMKNADQSLIRKWIADLPSTQLNRILDLLFICVLCFEYKGKQSSDKVSTQVLQKSRDVKARLEEALLRGEGARGEMMRRRAPGNDRFPGLNENLRWKKEQTHWRQANEKLDKTKAELDQEALISGNLATEAHLIILDMQENIIQASSALDCKDSLLGGVLRVLVNSLNCDQSTTYLTHCFATLRALIAKFGDLLFEEEVEQCFDLCHQVLHHCSSSMDVTRSQACATLYLLMRFSFGATSNFARVKMQVTMSLASLVGRAPDFNEEHLRRSLRTILAYSEEDTAMQMTPFPTQVEELLCNLNSILYDTVKMREFQEDPEMLMDLMYRIAKSYQASPDLRLTWLQNMAEKHTKKKCYTEAAMCLVHAAALVAEYLSMLEDHSYLPVGSVSFQNISSNVLEESVVSEDTLSPDEDGVCAGQYFTESGLVGLLEQAAELFSTGGLYETVNEVYKLVIPILEAHREFRKLTLTHSKLQRAFDSIVNKDHKRMFGTYFRVGFFGSKFGDLDEQEFVYKEPAITKLPEISHRLEAFYGQCFGAEFVEVIKDSTPVDKTKLDPNKAYIQITFVEPYFDEYEMKDRVTYFEKNFNLRRFMYTTPFTLEGRPRGELHEQYRRNTVLTTMHAFPYIKTRISVIQKEEFVLTPIEVAIEDMKKKTLQLAVAINQEPPDAKMLQMVLQGSVGATVNQGPLEVAQVFLAEIPADPKLYRHHNKLRLCFKEFIMRCGEAVEKNKRLITADQREYQQELKKNYNKLKENLRPMIERKIPELYKPIFRVESQKRDSFHRSSFRKCETQLSQGS

SEQ ID NO: 15470 - protein, 478 aa, Homo sapiens
MQQHFEFEYQTKVDGEIILHLYDKGGIEQTICMLDGVFAFVLLDTANKKVFLGRDTYGVRPLFKAMTEDGFLAVCSEAKGLVTLKHSATPFLKVEPFLPGHYEVLDLKPNGKVASVEMVKYHHCRDVPLHALYDNVEKLFPGFEIETVKNNLRILFNNAVKKRLMTDRRIGCLLSGGLDSSLVAATLLKQLKEAQVQYPLQTFAIGMEDSPDLLAARKVADHIGSEHYEVLFNSEEGIQALDEVIFSLETYDITTVRASVGMYLISKYIRKNTDSVVIFSGEGSDELTQGYIYFHKAPSPEKAEEESERLLRELYLFDVLRADRTTAAHGLELRVPFLDHRFSSYYLSLPPEMRIPKNGIEKHLLRETFEDSNLIPKEILWRPKEAFSDGITSVKNSWFKILQEYVEHQVDDAMMANAAQKFPFNTPKTKEGYYYRQVFERHYPGRADWLSHYWMPKWINATDPSARTLTHYKSAVKA

SEQ ID NO: 15471 - protein, 944 aa, Homo sapiens
MALLGKRCDVPTNGCGPDRWNSAFTRKDEIITSLVSALDSMCSALSKLNAEVACVAVHDESAFVVGTEKGRMFLNARKELQSDFLRFCRGPPWKDPEAEHPKKVQRGEGGGRSLPRSSLEHGSDVYLLRKMVEEVFDVLYSEALGRASVVPLPYERLLREPGLLAVQGLPEGLAFRRPAEYDPKALMAILEHSHRIRFKLKRPLEDGGRDSKALVELNGVSLIPKGSRDCGLHGQAPKVPPQDLPPTATSSSMASFLYSTALPNHAIRELKQEAPSCPLAPSDLGLSRPMPEPKATGAQDFSDCCGQKPTGPGGPLIQNVHASKRILFSIVHDKSEKWDAFIKETEDINTLRECVQILFNSRYAEALGLDHMVPVPYRKIACDPEAVEIVGIPDKIPFKRPCTYGVPKLKRILEERHSIHFIIKRMFDERIFTGNKFTKDTTKLEPASPPEDTSAEVSRATVLDLAGNARSDKGSMSEDCGPGTSGELGGLRPIKIEPEDLDIIQVTVPDPSPTSEEMTDSMPGHLPSEDSGYGMEMLTDKGLSEDARPEERPVEDSHGDVIRPLRKQVELLFNTRYAKAIGISEPVKVPYSKFLMHPEELFVVGLPEGISLRRPNCFGIAKLRKILEASNSIQFVIKRPELLTEGVKEPIMDSQERDSGDPLVDESLKRQGFQENYDARLSRIDIANTLREQVQDLFNKKYGEALGIKYPVQVPYKRIKSNPGSVIIEGLPPGIPFRKPCTFGSQNLERILAVADKIKFTVTRPFQGLIPKPDEDDANRLGEKVILREQVKELFNEKYGEALGLNRPVLVPYKLIRDSPDAVEVTGLPDDIPFRNPNTYDIHRLEKILKAREHVRMVIINQLQPFAEICNDAKVPAKDSSIPKRKRKRVSEGNSVSSSSSSSSSSSSNPDSVASANQISLVQWPMYMVDYAGLNVQLPGPLNY

SEQ ID NO: 15472 - protein, 106 aa, Homo sapiens
MQIFVKTLTGKTITLEVEPSDTIENVKAKIQDKEGIPPDQQRLIFAGKQLEDGRTLSDYNIQKESTLHLVLRLRGGAKKRKKKSYTTPKKNKHKRKKVKLAVLKYY

SEQ ID NO: 15473 - protein, 145 aa, Homo sapiens
MHVMAASMARGGVSARVLLQAARGTWWNRPGGTSGSGEGVALGTTRKFQATGSRPAGEEDAGGPERPGDVVNVVFVDRSGQRIPVSGRVGDNVLHLAQRHGVDLEGACEASLACSTCHVYVSEDHLDLLPPPEERRTRGWAARLC

SEQ ID NO: 15474 - protein, 516 aa, Homo sapiens
MSVLGGAPGHNPDRRTKMVSIHSLSELERLKLQETAYHELVARHFLSEFKPDRALPIDRPNTLDKWFLILRGQQRAVSHKTFGISLEEVLVNEFTRRKHLELTATMQVEEATGQAAGRRRGNVVRRVFGRIRRFFSRRRNEPTLPREFTRRGRRGAVSVDSLAELEDGALLLQTLQLSKISFPIGQRLLGSKRKMSLNPIAKQIPQVVEACCQFIEKHGLSAVGIFTLEYSVQRVRQLREEFDQGLDVVLDDNQNVHDVAALLKEFFRDMKDSLLPDDLYMSFLLTATLKPQDQLSALQLLVYLMPPCHSDTLERLLKALHKITENCEDSIGIDGQLVPGNRMTSTNLALVFGSALLKKGKFGKRESRKTKLGIDHYVASVNVVRAMIDNWDVLFQVPPHIQRQVAKRVWKSSPEALDFIRRRNLRKIQSARIKMEEDALLSDPVETSAEARAAVLAQSKPSDEGSSEEPAVPSGTARSHDDEEGAGNPPIPEQDRPLLRVPREKEAKTGVSYFFP

SEQ ID NO: 15475 - protein, 610 aa, Homo sapiens
MDDDKPFQPKNISKMAELFMECEEEELEPWQKKVEETQDEDDDELIFVGEISSSKPAISNILNRGHSSSSSKGIKSEPHSPGIPEIFRTASQRCRDPPSNPVAASPRFHLVSKSSQSSVTVENASKPDFTKNSQVGSDNSSILLFDSTQESLPPSQDIPAIFREGMKNTSYVLKHPSTSKVNSVTPKKPKTSEDVPQINPSTSLPLIGSPPVTSSQVMLSKGTNTSSPYDAGADYLRACPKCNVQFNLLDPLKYHMKHCCPDMITKFLGVIVKSERPCDEDKTDSETGKLIMLVNEFYYGRHEGVTEKEPKTYTTFKCFSCSKVLKNNIRFMNHMKHHLELEKQNNESWENHTTCQHCYRQYPTPFQLQCHIESTHTPHEFSTICKICELSFETEHILLQHMKDTHKPGEMPYVCQKKGVHRCPKCRLQFLTSKEKAEHKAQHRTFIKPKELEGLPPGAKVTIRASLGPLQSKLPTAPFGCAPGTSFLQVTPPTSQNTTARNPRKSNASRSKTSKLHATTSTASKVNTSKPRGRIAKSKAKPSYKQKRQRNRKNKMSLALKNIRCRRGIHKCIECHSKIKDFASHFSIYIHCSFCKYNTNCNKAFVNHMM

SEQ ID NO: 15476 - protein, 671 aa, Homo sapiens
MRPPVTKASSFSGISILTRGDSIGSSKGGSAGRISRPGMALGAPEVCNQVTSSQSVRGLLPCTAQQQQQQQQQQLPALPPTPQQQPPLNNHMISQPVPALQPSPQPVQFSPSSCPQVLLPVSPPQQYNMADDLSNPFGQMSLSRQGSTEAADPSAALFQTPLISQHPQQTSFIMASTGQPLPTSNYSTSSHAPPTQQVLPPQGYMQPPQQIQVSYYPPGQYPNSNQQYRPLSHPVAYSPQRGQQLPQPSQQPGLQPMMPNQQQAAYQGMIGVQQPQNQGLLSSQRSSMGGQMQGLVVQYTPLPSYQVPVGSDSQNVVQPPFQQPMLVPVSQSVQGGLPAAGVPVYYSMIPPAQQNGTSPSVGFLQPPGSEQYQMPQSPSPCSPPQMPQQYSGVSPSGPGVVVMQLNVPNGPQPPQNPSMVQWSHCKYYSMDQRGQKPGDLYSPDSSPQANTQMSSSPVTSPTQSPAPSPVTSLSSVCTGLSPLPVLTQFPRPGGPAQGDGRYSLLGQPLQYNLSICPPLLHGQSTYTVHQGQSGLKHGNRGKRQALKSASTDLGTADVVLGRVLEVTDLPEGITRTEADKLFTQLAMSGAKIQWLKDAQGLPGGGGGDNSGTAENGRHSDLAALYTIVAVFPSPLAAQNASLRLNNSVSRFKLRMAKKNYDLRILERASSQ

SEQ ID NO: 15477 - protein, 400 aa, Homo sapiens
KNSKGKITVVQDTPEILRVKENQKNFSSVLYKEDVSPGTAIGKTPEMMRVKQTQDHISSVKYKEAIGQGTPIPDLPEVKRVKETQKHISSVMYKENLGTGIPTTVTPEIERVKRNQENFSSVLYKENLGKGIPTPITPEMERVKRNQENFSSILYKENLSKGTPLPVTPEMERVKLNQENFSSVLYKENLGTGIPIPITPEMQRVKHNQENLSSVLYKENMGKGTPLPVTPEMERVKHNQENISSVLYKENMGKGTPLPVTPEMERVKHNQENISSVLYKENMGKGTPLAVTPEMERVKHNQENISSVLYKENVGKATATPVTPEMQRVKRNQENISSVLYKENLGKATPTPFTPEMERVKRNQENFSSVLYKENMRKATPTPVTPEMERAKRNQENISS

SEQ ID NO: 15478 - protein, 1099 aa, Homo sapiens
MCPSEMGTLWHHWSPVLISLAALFSKVTEGRGILESIQRFSLLPTYLPVTYHINNADVSFFLKEANQDIMRNSSLQSRVESFLIYKSRRLPVLNASYGPFSIEQVVPQDLMLPSNPFGFTNKFSLNWKLKAHILRDKVYLSRPKVQVLFHIMGRDWDDRSAGEKLPCLRVFAFRETREVRGSCRLQGDLGLCVAELELLSSWFSPPTVVAGRRKSVDQPEGTPVELYYTVHPGGERGDCVREDARRSNGIRTGHSDIDESGPPLQRIGSIFLYQTHRKPSLRELRLDNSVAIHYIPKTVRKGDVLTFPVSISRNSTEDRFTLRAKVKKGVNIIGVRASSPSIWDVKERTDYTGKYAPAVIVCQKKAAGSENSADGASYEVMQIDVEVEEPGDLPATQLVTWQVEYPGEITSDLGVSKIYVSPKDLIGVVPLAMEAEILNTAILTGKTVAVPVKVVSVEDDGTVTELLESVECRSSDEDVIKVSDRCDYVFVNGKEMKGKVNVVVNFTYQHLSSPLEMTVWVPRLPLQIEVSDTELNQIKGWRVPIVSSRRPAGDSEEEEDDERRGRGCTLQYQHAMVRVLTQFVAEAAGPGGHLAHLLGSDWQVDITELINDFMQVEEPRIAKLQGGQILMGQELGMTTIQILSPLSDTILAEKTITVLDEKVTITDLGVQLVTGLSLSLQLSPGSNRAIFATAVAQELLQRPKQEAAISCWVQFSDGSVTPLDIYDGKDFSLMATSLDEKVVSIHQDPKFKWPIIAAETEGQGTLVKVEMVISESCQKSKRKSVLAVGTANIKVKFGQNDANPNTSDSRHTGAGVHMENNVSDRRPKKPSQEWGSQEGQYYGSSSMGLMEGRGTTTDRSILQKKKGQESLLDDNSHLQTIPSDLTSFPAQVDLPRSNGEMDGNDLMQASKGLSDLEIGMYALLGVFCLAILVFLINCVTFALKYRHKQVPFEEQEGMSHSHDWVGLSNRTELLENHINFASSQDEQITAIDRGMDFEESKYLLSTNSQKSINGQLFKPLGPIIIDGKDQKSEPPTSPTSKRKRVKFTTFTAVSSDDEYPTRNSIVMSSEDDIKWVCQDLDPGDCKELHNYMERLHENV

SEQ ID NO: 15479 - protein, 46 aa, Homo sapiens
MSSVAVLTQESFAEHRSGLVPQQIKVATLNSEEESDPPTYKDAFPP

SEQ ID NO: 15480 - protein, 1198 aa, Homo sapiens
MPRRRPPASGAAQFPERIATRSPDPIPLCTFQRQVSEMAEDGSEEIMFIWCEDCSQYHDSECPELGPVVMVKDSFVLSRARSSLPPNLEIRRLEDGAEGVFAITQLVKRTQFGPFESRRVAKWEKESAFPLKVFQKDGHPVCFDTSNEDDCNWMMLVRPAAEAEHQNLTAYQHGSDVYFTTSRDIPPGTELRVWYAAFYAKKMDKPMLKQAGSGVHAAGTPENSAPVESEPSQWACKVCSATFLELQLLNEHLLGHLEQAKSLPPGSQSEAAAPEKEQDTPRGEPPAVPESENVATKEQKKKPRRGRKPKVSKAEQPLVIVEDKEPTEQVAEIITEVPPDEPVSATPDERIMELVLGKLATTTTDTSSVPKFTHHQNNTITLKRSLILSSRHGIRRKLIKQLGEHKRVYQCNICSKIFQNSSNLSRHVRSHGDKLFKCEECAKLFSRKESLKQHVSYKHSRNEVDGEYRYRCGTCEKTFRIESALEFHNCRTGLIAHPGEGGPGGSRLRDLPDDKTFQCEMCFRFFSTNSNLSKHKKKHGDKKFACEVCSKMFYRKDVMLDHQRRHLEGVRRVKREDLEAGGENLVRYKKEPSGCPVCGKVFSCRSNMNKHLLTHGDKKYTCEICGRKFFRVDVLRDHIHVHFKDIALMDDHQREEFIGKIGISSEENDDNSDESADSEPHKYSCKRCQLTFGRGKEYLKHIMEVHKEKGYGCSICNRRFALKATYHAHMVIHRENLPDPNVQKYIHPCEICGRIFNSIGNLERHKLIHTGVKSHACEQCGKSFARKDMLKEHMRVHDNVREYLCAECGKGMKTKHALRHHMKLHKGIKEYECKECHRRFAQKVNMLKHCKRHTGIKDFMCELCGKTFSERNTMETHKLIHTVGKQWTCSVCDKKYVTEYMLQKHVQLTHDKVEAQSCQLCGTKVSTRASMSRHMRRKHPEVLAVRIDDLDHLPETTTIDASSIGIVQPELTLEQEDLAEGKHGKAAKRSHKRKQKPEEEAGAPVPEDATFSEYSEKETEFTGSVGDETNSAVQSIQQVVVTLGDPNVTTPSSSVGLTNITVTPITTAAATQFTNLQPVAVGHLTTPERQLQLDNSILTVTFDTVSGSAMLHNRQNDVQIHPQPEASNPQSVAHFINLTTLVNSITPLGSQLSDQHPLTWRAVPQTDVLPPSQPQAPPQQAAQPQVQAEQQQQQMYSY

SEQ ID NO: 15481 - protein, 445 aa, Homo sapiens
MARGLQVPLPRLATGLLLLLSVQPWAESGKVLVVPTDGSPWLSMREALRELHARGHQAVVLTPEVNMHIKEEKFFTLTAYAVPWTQKEFDRVTLGYTQGFFETEHLLKRYSRSMAIMNNVSLALHRCCVELLHNEALIRHLNATSFDVVLTDPVNLCGAVLAKYLSIPAVFFWRYIPCDLDFKGTQCPNPSSYIPKLLTTNSDHMTFLQRVKNMLYPLALSYICHTFSAPYASLASELFQREVSVVDLVSYASVWLFRGDFVMDYPRPIMPNMVFIGGINCANGKPLSQEFEAYINASGEHGIVVFSLGSMVSEIPEKKAMAIADALGKIPQTVLWRYTGTRPSNLANNTILVKWLPQNDLLGHPMTRAFITHAGSHGVYESICNGVPMVMMPLFGDQMDNAKRMETKGAGVTLNVLEMTSEDLENALKAVINDKRKKQQSGRQM

SEQ ID NO: 15482 - protein, 1069 aa, Homo sapiens
MHSMISSVDVKSEVPVGLEPISPLDLRTDLRMMMPVVDPVVREKQLQQELLLIQQQQQIQKQLLIAEFQKQHENLTRQHQAQLQEHIKLQQELLAIKQQQELLEKEQKLEQQRQEQEVERHRREQQLPPLRGKDRGRERAVASTEVKQKLQEFLLSKSATKDTPTNGKNHSVSRHPKLWYTAAHHTSLDQSSPPLSGTSPSYKYTLPGAQDAKDDFPLRKTASEPNLKVRSRLKQKVAERRSSPLLRRKDGNVVTSFKKRMFEVTESSVSSSSPGSGPSSPNNGPTGSVTENETSVLPPTPHAEQMVSQQRILIHEDSMNLLSLYTSPSLPNITLGLPAVPSQLNASNSLKEKQKCETQTLRQGVPLPGQYGGSIPASSSHPHVTLEGKPPNSSHQALLQHLLLKEQMRQQKLLVAGGVPLHPQSPLATKERISPGIRGTHKLPRHRPLNRTQSAPLPQSTLAQLVIQQQHQQFLEKQKQYQQQIHMNKLLSKSIEQLKQPGSHLEEAEEELQGDQAMQEDRAPSSGNSTRSDSSACVDDTLGQVGAVKVKEEPVDSDEDAQIQEMESGEQAAFMQQPFLEPTHTRALSVRQAPLAAVGMDGLEKHRLVSRTHSSPAASVLPHPAMDRPLQPGSATGIAYDPLMLKHQCVCGNSTTHPEHAGRIQSIWSRLQETGLLNKCERIQGRKASLEEIQLVHSEHHSLLYGTNPLDGQKLDPRILLGDDSQKFFSSLPCGGLGVDSDTIWNELHSSGAARMAVGCVIELASKVASGELKNGFAVVRPPGHHAEESTAMGFCFFNSVAITAKYLRDQLNISKILIVDLDVHHGNGTQQAFYADPSILYISLHRYDEGNFFPGSGAPNEVGTGLGEGYNINIAWTGGLDPPMGDVEYLEAFRTIVKPVAKEFDPDMVLVSAGFDALEGHTPPLGGYKVTAKCFGHLTKQLMTLADGRVVLALEGGHDLTAICDASEACVNALLGNELEPLAEDILHQSPNMNAVISLQKIIEIQSKYWKSVRMVAVPRGCALAGAQLQEETETVSALASLTVDVEQPFAQEDSRTAGEPMEEEPAL

SEQ ID NO: 15483 - protein, 190 aa, Homo sapiens
MQPRTPLVLCVLLSQVLLLTSAEDLDCTPGFQQKVFHINQPAEFIEDQSILNLTFSDCKGNDKLRYEVSSPYFKVNSDGGLVALRNITAVGKTLFVHARTPHAEDMAELVIVGGKDIQGSLQDIFKFARTSPVPRQKRSIVVSPILIPENQRQPFPRDVGKRTHNPINSELLLNEGITADLNPCITILAI

SEQ ID NO: 15484 - protein, 569 aa, Homo sapiens
MEPWSSRWKTKRWLWDFTVTTLALTFLFQAREVRGAAPVDVLKALDFHNSPEGISKTTGFCTNRKNSKGSDTAYRVSKQAQLSAPTKQLFPGGTFPEDFSILFTVKPKKGIQSFLLSIYNEHGIQQIGVEVGRSPVFLFEDHTGKPAPEDYPLFRTVNIADGKWHRVAISVEKKTVTMIVDCKKKTTKPLDRSERAIVDTNGITVFGTRILDEEVFEGDIQQFLITGDPKAAYDYCEHYSPDCDSSAPKAAQAQEPQIDEKKKSNFKKKMRTVATKSKEKSKKFTPPKSEKFSSKKKKSYQASAKAKLGVKANIVDDFQEYNYGTMESYQTEAPRHVSGTNEPNPVEEIFTEEYLTGEDYDSQRKNSEDTLYENKEIDGRDSDLLVDGDLGEYDFYEYKEYEDKPTSPPNEEFGPGVPAETDITETSINGHGAYGEKGQKGEPAVVEPGMLVEGPPGPAGPAGIMGPPGLQGPTGPPGDPGDRGPPGRPGLPGADGLPGPPGTMLMLPFRYGGDGSKGPTISAQEAQAQAILQQARIALRGPPGPMGLTGRPGPVGGPGSSGAKGESGD

SEQ ID NO: 15485 - protein, 740 aa, Homo sapiens
MAKRKEENFSSPKNAKRPRQEELEDFDKDGDEDECKGTTLTAAEVGIIESIHLKNFMCHSMLGPFKFGSNVNFVVGNNGSWSAVVRSRLNATSASQVQAILLFQPCGKSAVLTALIVGLGGRAVATNRGSSLKGFVKDGQNSADISITLRNRGDDAFKASVYGNSILIQQHISIDGSRSYKLKSATGSVVSTRKEELIAILDHFNIQVDNPVSVLTQEMSKQFLQSKNEGDKYKFFMKATQLEQMKEDYSYIMETKERTKEQIHQGEERLTELKRQCVEKEERFQSIAGLSTMKTNLESLKHEMAWAVVNEIEKQLNAIRDNIKIGEDRAARLDRKMEEQQVRLNEAEQKYKDIQDKLEKISEETNARAPECMALKADVVAKKRAYNEAEVLYNRSLNEYKALKKDDEQLCKRIEELKKSTDQSLEPERLERQKKISWLKERVKAFQNQENSVNQEIEQFQQAIEKDKEEHGKIKREELDVKHALSYNQRQLKELKDSKTDRLKRFGPNVPALLEAIDDAYRQGHFTYKPVGPLGACIHLRDPELALAIESCLKGLLQAYCCHNHADERVLQALMKRFYLPGTSRPPIIVSEFRNEIYDVRHRAAYHPDFPTVLTALEIDNAVVANSLIDMRGIETVLLIKNNSVARAVMQSQKPPKNCREAFTADGDQVFAGRYYSSENTRPKFLSRDVDSEISDLENEVENKTAQILNLQQHLSALEKDIKHNEELLKRCQLHYKELK

SEQ ID NO: 15486 - protein, 520 aa, Homo sapiens
MWGDSRPANRTGPFRGSQEERFAPGWNRDYPPPPLKSHAQERHSGNFPGRDSLPFDFQGHSGPPFANVEEHSFSYGARDGPHGDYRGGEGPGHDFRGGDFSSSDFQSRDSSQLDFRGRDIHSGDFRDREGPPMDYRGGDGTSMDYRGREAPHMNYRDRDAHAVDFRGRDAPPSDFRGRGTYDLDFRGRDGSHADFRGRDLSDLDFRAREQSRSDFRNRDVSDLDFRDKDGTQVDFRGRGSGTTDLDFRDRDTPHSDFRGRHRSRTDQDFRGREMGSCMEFKDREMPPVDPNILDYIQPSTQDREHSGMNVNRREESTHDHTIERPAFGIQKGEFEHSETREGETQGVAFEHESPADFQNSQSPVQDQDKSQLSGREEQSSDAGLFKEEGGLDFLGRQDTDYRSMEYRDVDHRLPGSQMFGYGQSKSFPEGKTARDAQRDLQDQDYRTGPSEEKPSRLIRLSGVPEDATKEEILNAFRTPDGMPVKNLQLKEYNTGNSNDPGQRSYPGVCIKPGFLVLQTM

SEQ ID NO: 15487 - protein, 674 aa, Homo sapiens
MAPFPEEVDVFTAPHWRMKQLVGLYCDKSLYATFKEFKMHEQIENEYIIGLLQQRSQTIYNVHSDNKLSEMLSLFEKGLKNVKNEYEQLNYAKQLKERLEAFTRDFLPHMKEEEEVFQPMLMEYFTYEELKDIKKKVIAQHCSQKDTAELLRGLSLWNHAEERQKFFKYSVDEKSDKEAEVSEHSTGITHLPPEVMLSIFSYLNPQELCRCSQVSMKWSQLTKTGSLWKHLYPVHWARGDWYSGPATELDTEPDDEWVKNRKDESRAFHEWDEDADIDESEESAEESIAISIAQMEKRLLHGLIHNVLPYVGTSVKTLVLAYSSAVSSKMVRQILELCPNLEHLDLTQTDISDSAFDSWSWLGCCQSLRHLDLSGCEKITDVALEKISRALGILTSHQSGFLKTSTSKITSTAWKNKDITMQSTKQYACLHDLTNKGIGEEIDNEHPWTKPVSSENFTSPYVWMLDAEDLADIEDTVEWRHRNVESLCVMETASNFSCSTSGCFSKDIVGLRTSVCWQQHCASPAFAYCGHSFCCTGTALRTMSSLPESSAMCRKAARTRLPRGKDLIYFGSEKSDQETGRVLLFLSLSGCYQITDHGLRVLTLGGGLPYLEHLNLSGCLTITGAGLQDLVSACPSLNDEYFYYCDNINGPHADTASGCQNLQCGFRACCRSGE

SEQ ID NO: 15488 - protein, 487 aa, Homo sapiens
MPGLSCGGGRRLAGFSAFSGGGRFEALQRTGPREEENSTGAGEKGTGKSTQKPLHYKSCLFHRVVKDFMVQGGDFSEGNGRGGESIYGGFFEDESFAVKHNKEFLLSMANRGKDTNGSQFFITTKPTPHLDGHHVVFGQVISGQEVVREIENQKTDAASKPFAEVRILSCGELIPKSKVKKEEKKRHKSSSSSSSSSSDSDSSSDSQSSSDSSDSESATEEKSKKRKKKHRKNSRKHKKEKKKRKKSKKSESEAENLEAQPQSTVRPEEIPPIPENRFLMRKSPPKADEKERKNRERERERECNPPNSQPASYQRRLLVTRSGRKIKGRGPRRYRTPSRSRSRDRFRRSETPPHWRQEMQRAQRMRVSSGERWIKGDKSELNEIKENQRSPVRVKERKITDHRNVSESPNRKNEKEKKVKDHKSNSKERDIRRNSEKDDKYKNKVKKRAKSKSRSKSKEKSKSKERDSKHNRNEEKRMRSRSKGRDH

SEQ ID NO: 15489 - protein, 796 aa, Homo sapiens
MAETKDVFGQEPHPVEDDLYKERTRKRRKSDRDQRFRAFPSMEQSALKEYEKLESRTRRVLSNTYQKLIQSVFLDDSIPNGVKYLINRLLALIEKPTVDPIYIALFGSTGAGKSSLINAIIQQAMFLPVSGESICTSCIVQVSSGCCVQYEAKIHLLSDQEWREELKNLTKLLHRTEELSREEADAWNRDEAVEEATWKLQMIYGNGAESKNYEELLRAKPKRKIPTSRVITLKAEEAEELSIKLDPYIRTQRRDWDGEAAEMRIWPLIKHVEVTLPKSDLIPEGVVLVDIPGTGDFNSKRDEMWKKTIDKCSVIWVISDIERVSGGQAHEDLLNESIKACQRGFCRDVALVVTKMDKLHLPEYLRERKAGNQAIQSQREAVLERNEMIKLQRTRILKEKLKRKLPADFKVLEASDLVYTVSAQEYWQQALLTEEETEIPKLREYIRKSLLDKKKRTVTKYVTEAFGLLLLTDSFNSTQNLPNEHLHMSVLRRFAEEKVELLEKAIAQCFACMEQPLQEGVRTARTSYRCILRACLVRSKGNQGFHQTLKAVCLKNGIYASRTLARIDLNEALTQPVYDQIDPVFGSIFRTGKPTGSALMPHIDAFKQSLQEKMTEIGIRSGWKYDSCKKNFLIQEISAILGGLEDHILRRKRRIYESLTASVQSDLKLCYEEAAQITGKKACERMKDAIRRGVDRQVAEGMFERAQERMQHQFQQLKTGIVEKVKGSITTMLALASSQGDGLYKELADVGSEYKEMEKLHRSLREVAENARLRKGMQEFLLRASPSKAGPPGTSL

SEQ ID NO: 15490 - protein, 195 aa, Homo sapiens
GSWFPSAPGLSTTVLLNNNQIKRIPSGAFEDLENLKYLYLYKNEIQSIDRQAFKGLASLEQLYLHFNQIETLDPDSFQHLPKLERLFLHNNRITHLVPGTFNHLESMKRLRLDSNTLHCDCEILWLADLLKTYAESGNAQAAAICEYPRRIQGRSVATITPEELNCERPRITSEPQDADVTSGNTVYFTCRAEGN

SEQ ID NO: 15491 - protein, 279 aa, Homo sapiens
MSLHQFLLEPITCHAWNRDRTQIALSPNNHEVHIYKKNGSQWVKAHELKEHNGHITGIDWAPKSDRIVTCGADRNAYVWSQKDGVWKPTLVILRINRAATFVKWSPLENKFAVGSGARLISVCYFESENDWWVSKHIKKPIRSTVLSLDWHPNNVLLAAGSCDFKCRVFSAYIKEVDEKPASTPWGSKMPFGQLMSEFGGSGTGGWVHGVSFSASGSRLAWVSHDSTVSVADASKSVQVSTLKTEFLPLLSVSFVSENSSCFRAMTAAQCSLTTMTAAA

SEQ ID NO: 15492 - protein, 1721 aa, Homo sapiens
MSVSRTMEDSCELDLVYVTERIIAVSFPSTANEENFRSNLREVAQMLKSKHGGNYLLFNLSERRPDITKLHAKVLEFGWPDLHTPALEKICSICKAMDTWLNADPHNVVVLHNKGNRGRIGVVIAAYMHYSNISASADQALDRFAMKRFYEDKIVPIGQPSQRRYVHYFSGLLSGSIKMNNKPLFLHHVIMHGIPNFESKGGCRPFLRIYQAMQPVYTSGIYNIPGDSQTSVCITIEPGLLLKGDILLKCYHKKFRSPARDVIFRVQFHTCAIHDLGVVFGKEDLDDAFKDDRFPEYGKVEFVFSYGPEKIQGMEHLENGPSVSVDYNTSDPLIRWDSYDNFSGHRDDGMEEVVGHTQGPLDGSLYAKVKKKDSLHGSTGAVNATRPTLSATPNHVEHTLSVSSDSGNSTASTKTDKTDEPVPGASSATAALSPQEKRELDRLLSGFGLEREKQGAMYHTQHLRSRPAGGSAVPSSGRHVVPAQVHVNGGALASERETDILDDELPNQDGHSAGSMGTLSSLDGVTNTSEGGYPEALSPLTNGLDKSYPMEPMVNGGGYPYESASRAGPAHAGHTAPMRPSYSAQEGLAGYQREGPHPAWPQPVTTSHYAHDPSGMFRSQSFSEAEPQLPPAPVRGGSSREAVQRGLNSWQQQQQQQQQPRPPPRQQERAHLESLVASRPSPQPLAETPIPSLPEFPRAASQQEIEQSIETLNMLMLDLEPASAAAPLHKSQSVPGAWPGASPLSSQPLSGSSRQSHPLTQSRSGYIPSGHSLGTPEPAPRASLESVPPGRSYSPYDYQPCLAGPNQDFHSKSPASSSLPAFLPTTHSPPGPQQPPASLPGLTAQPLLSPKEATSDPSRTPEEEPLNLEGLVAHRVAGVQAREKQPAEPPAPLRRRAASDGQYENQSPEATSPRSPGVRSPVQCVSPELALTIALNPGGRPKEPHLHSYKEAFEEMEGTSPSSPPPSGVRSPPGLAKTPLSALGLKPHNPADILLHPTGVTRRRIQPEPRSYVESVARTAVAGPRAQDSEPKSFSAPATQAYGHEIPLRNGTLGGSFVSPSPLSTSSPILSADSTSVGSFPSGESSDQGPRTPTQPLLESGFRSGSLGQPSPSAQRNYQSSSPLPTVGSSYSSPDYSLQHFSSSPESQARAQFSVAGVHTVPGSPQARHRTVGTNTPPSPGFGWRAINPSMAAPSSPSLSHHQMMGPPGTGFHGSTVSSPQSSAATTPGSPSLCRHPAGVYQVSGLHNKVATTPGSPSLGRHPGAHQGNLASGLHSNAIASPGSPSLGRHLGGSGSVVPGSPCLDRHVAYGGYSTPEDRRPTLSRQSSASGYQAPSTPSFPVSPAYYPGLSSPATSPSPDSAAFRQGSPTPALPEKRRMSVGDRAGSLPNYATINGKVSSPVASGMSSPSGGSTVSFSHTLPDFSKYSMPDNSPETRAKVKFVQDTSKYWYKPEISREQAIALLKDQEPGAFIIRDSHSFRGAYGLAMKVSSPPPTIMQQNKKDMTHELVRHFLIETGPRGVKLKGCPNEPNFGSLSALVYQHSIIPLALPCKLVIPNRDPTDESKDSSGPANSTADLLKQGAACNVLFVNSVDMESLTGPQAISKATSETLAADPTPAATIVHFKVSAQGITLTDNQRKLFFRRHYPLNTVTFCDLDPQERKWMKTEGGAPAKLFGFVARKQGSTTDNACHLFAELDPNQPASAIVNFVSKVMLNAGQKR

SEQ ID NO: 15493 - protein, 46 aa, Homo sapiens
MSNPSAPPPYEDRNPLYPGPPPPGGYGQPSVLPGGYPAYPGYPQPG

SEQ ID NO: 15494 - protein, 234 aa, Homo sapiens
MVSGNNSDGAHCMGPGLRGKETTLVTPQDSPGKCPINGRSEEATADGHTNGRTKKFMSSPLTFHSDDKSGSVVIFGGIDSSYYTGSLNWVPVTVEGYWQITVDSITMNGETIACAEGCQAIVDTGTSLLTGPTSPIANIQSDIGASENSDGDMVVSCSAISSLPDIVFTINGVQYPVPPSAYILQSEGSCISGFQGMNVPTESGELWILGDVFIRQYFTVFDRANNQVGLAPVA

SEQ ID NO: 15495 - protein, 100 aa, Homo sapiens
MASEDIAKLAETLAKTQVAGGQLSFKGKSLKLNTAEDAKDVIKEIEDFDSLEALRLEGNTVGVEAARVIAKALEKKSELKRCHWSDMFTGRLRTEIPPAL

SEQ ID NO: 15496 - protein, 154 aa, Homo sapiens
MMVQGQEYEAGGSVIHPLNLHMKRFVKDLGLSAVQASGGLLGIYNGETLVFEESNWFIINVIKLVWRYGFQSLRMHMWVEDVLDKFMRIYRYQSHDYAFSSVEKLLHALGGDDFLGMLNRTLLETLQKAGFSEKFLNEMIAPVMRVNYGQSTDI

SEQ ID NO: 15497 - protein, 175 aa, Homo sapiens
MEYLVKWKGWSQKYSTWEPEENILDARLLAAFEEREREMELYGPKKRGPKPKTFLLKAQAKAKAKTYEFRSDSARGIRIPYPGRSPQDLASTSRAREGLRNMGLSPPASSTSTSSTCRAEAPRDRDRDRDRDRERDRERERERERERERERERERGTSRVDDKPSSPGDSSKKRG

SEQ ID NO: 15498 - protein, 280 aa, Homo sapiens
FLHNWSKGNFSNEELSDLELLFRFYLFGLTREIQDHASQDYSKYPFEVQVKAGCELHSGKSPEGFFQVAFNGLDLLSFQNTTWVPSPGCGSLAQSVCHLLNHQYEGVTETVYNLIRSTCPRFLLGLLDAGKMYVHRQVRPEAWLSSRPSLGSGQLLLVCHASGFYPKPVWVTWMRNEQEQLGTKHGDILPNADGTWYLQVILEVASEEPAGLSCRVRHSSLGGQDIILYWAHIRTSCETLPPDSPIVLRTQQPRSLVQYSDAIPSTLHLNCFSFCIINIC

SEQ ID NO: 15499 - protein, 508 aa, Homo sapiens
MATSLLGEEPRLGSTPLAMLAATCNKIGSPSPSPSSLSDSSSSFGKGFHPWKRSSSSSSASCNVVGSSLSSFGVSGASRNGGSSSAAAAAAAAAAAAAALVSDSFSCGGSPGSSAFSLTSSSAAAAAAAAAAAASSSPFANDYSVFQAPGVSGGSGGGGGGGGGGSSAHSQDGSHQPVFISKVHTSVDGLQGIYPRVGMAHPYESWFKPSHPGLGAAGEVGSAGASSWWDVGAGWIDVQNPNSAAALPGSLHPAAGGLQTSLHSPLGGYNSDYSGLSHSAFSSGASSHLLSPAGQHLMDGFKPVLPGSYPDSAPSPLAGAGGSMLSAGPSAPLGGSPRSSARRYSGRATCDCPNCQEAERLGPAGASLRRKGLHSCHIPGCGKVYGKTSHLKAHLRWHTGERPFVCNWLFCGKRFTRSDELQRHLRTHTGEKRFACPVCNKRFMRSDHLSKHVKTHSGGGGGGGSAGSGSGGKKGSDTDSEHSAAGSPPCHSPELLQPPEPGHRNGLE

SEQ ID NO: 15500 - protein, 797 aa, Homo sapiens
MKALFAQNQLDTQKPLVTESVKRAVVSTARDTWEVYFSRIFPATGSVGTGVQLLAVSHVGIKLLRMVKGGQEAGGQLRVLRAYSFADILFVTMPSQNMLEFNLASEKVILFSARAHQVKTLVDDFILELKKDSDYVVAVRNFLPEDPALLAFHKGDIIHLQPLEPPRVGYSAGCVVRRKVVYLEELRRRGPDFGWRFGTIHGRVGRFPSELVQPAAAPDFLQLPTEPGRGRAAAVAAAVASAAAAQEVGRRREGPPVRARSADHGEDALALPPYTMLEFAQKYFRDPQRRPQDGLRLKSKEPRESRTLEDMLCFTKTPLQESLIELSDSSLSKMATDMFLAVMRFMGDAPLKGQSDLDVLCNLLKLCGDHEVMRDECYCQVVKQITDNTSSKQDSCQRGWRLLYIVTAYHSCSEVLHPHLTRFLQDVSRTPGLPFQGIAKACEQNLQKTLRFGGRLELPSSIELRAMLAGRSSKRQLFLLPGGLERHLKIKTCTVALDVVEEICAEMALTRPEAFNEYVIFVVTNRGQHVCPLSRRAYILDVASEMEQVDGGYMLWFRRVLWDQPLKFENELYVTMHYNQVLPDYLKGLFSSVPASRPSEQLLQQVSKLASLQHRAKDHFYLPSVREVQEYIPAQLYRTTAGSTWLNLVSQHRQQTQALSPHQARAQFLGLLSALPMFGSSFFFIQSCSNIAVPAPCILAINHNGLNFLSTETHELMVKFPLKEIQSTRTQRPTANSSYPYVEIALGDVAAQRTLQLQLEQVRAGEVLDGRGLSLSPAGTGTVSCGGRARGEPAQCP

SEQ ID NO: 15501 - protein, 249 aa, Homo sapiens
MAAVEACGGSPVTRGIVRSQGGSLCLATVICDLFLCAYCHNRVRQRLLLREQFGEELEPRLAPWMPSFIIHSNPIWLGALLWLRELCPGVNNQPYLCESGHCCGETGCCTYYYELWWFWLLWTVLILFSCCCAFRHRRAKLRLQQQQRQREINLLAYHGACHGAGPFPTGSLLDLRFLSTFKPPAYEDVVHRPGTPPPPYTVAPGRPLTASSEQTCCSSSSSCPAHFEGTNVEGVSSHQSAPPHQEGEP

SEQ ID NO: 15502 - protein, 587 aa, Homo sapiens
MQKPPLLLRRPLPPKFTKLSLHEKKTHTAKTGKIESLHVAFTEDETTSIKMDRTRFPDVLRNQSLTPINIQNIFLDHCVQERVTAISSPQKSTKHVREQIPDTATGSIFFPHCNSASTRIFGKQTNKMESSRKFKTMKDVYTEKRLENILILSSKFSKPKSTPGSVIAQKLEKMHPKHQPLPESPGYTYQHISRDLSATVPSPPPMTVSMKPEGQWPEHFKSTATLTLRVTEFPGFVSLPTPVLPRKPHRQSVIETLVTENGNIESVPKQIPPRPPEGLTKTEKIESEIHVVRGEGFKTVAATRYETITAMTNLAIVNCQVYGRNALNLKGFFILNCPDLTPLAFQLIYLNLSFNDLHYFPTEILCLKNLQILKLRNNPIKEIPSEIQQLEFLRIFTIAFNLITVLPIGLFSLSYLEELDVSYNELTFIPNEIQKLRSLEKLTVDGNELSFFPHGILKLNLTKIQFENNFTHPCFWRDNYLNNPQQLTQIISLFIVQNKLHKFYDKIPVEVQKLLKCTSRCEWCHGPKFGEGFRVIRSCDIFGASQLPVMFYVCSPSCYRRIKESSFVLDGSPSRRIALDVELSKEL

SEQ ID NO: 15503 - protein, 415 aa, Homo sapiens
MAAMETETAPLTLESLPTDPLLLILSFLDYRDLINCCYVSRRLSQLSSHDPLWRRHCKKYWLISEEEKTQKNQCWKSLFIDTYSDVGRYIDHYAAIKKAWDDLKKYLEPRCPRMVLSLKEGAREEDLDAVEAQIGCKLPDDYRCSYRIHNGQKLVVPGLLGSMALSNHYRSEDLLDVDTAAGGFQQRQGLKYCLPLTFCIHTGLSQYIAVEAAEGRNKNEVFYQCPDQMARNPAAIDMFIIGATFTDWFTSYVKNVVSGGFPIIRDQIFRYVHDPECVATTGDITVSVSTSFLPELSSVHPPHYFFTYRIRIEMSKDALPEKACQLDSRYWRITNAKGDVEEVQGPGVVGEFPIISPGRVYEYTSCTTFSTTSGYMEGYYTFHFLYFKDKIFNVAIPRFHMACPTFRVSIARLVS

SEQ ID NO: 15504 - protein, 201 aa, Homo sapiens
AAAAAAVMAPPGCPGSCPNFAVVCSFLERYGPLLDLPELPFPELERVLQAPPPDVGNGEVPKELVELHLKLMRKIGKSVTADRWEKYLIKYLCECQFDDNLKFKNIINEEDADTMRLQPIGRDKDGLMYWYQLDQDHNVRMYIEEQDDQDGSSWKCIVRNRNELAETLALLKAQIDPVLLKNSSQQDNSSRESPSLEDEET

SEQ ID NO: 15505 - protein, 98 aa, Homo sapiens
EDMRKTFREQGLRNGSSILIQDSHDDNSLLTKEEKWVTSMNEIDWLHVKNLCQLESEEKQVKISATVNTMVFDIRIKAIKELKLMKELGNHLHFLFGS

SEQ ID NO: 15506 - protein, 1237 aa, Homo sapiens
MPEGAQGLSLSKPSPSLGCGRRGEVCDCGTVCETRTGSARPSRLERVAREIVETERAYVRDLRSIVEDYLGPLLDGGVLGLSVEQVGTLFANIEDIYEFSSELLEDLENSSSAGGIAECFVQRSEDFDIYTLYCMNYPSSLALLRELSLSPPAALWLQERQAQLRHSLPLQSFLLKPVQRILKYHLLLQELGKHWAEGPGTGGREMVEEAIVSMTAVAWYINDMKRKQEHAARLQEVQRRLGGWTGPELSAFGELVLEGAFRGGGGGGPRLRGGERLLFLFSRMLLVAKRRGLEYTYKGHIFCCNLSVSESPRDPLGFKVSDLTIPKHRHLLQAKNQEEKRLWIHCLQRLFFENHPASIPAKAKQVLLENSLHCAPKSKPVLEPLTPPLGSPRPRDARSFTPGRRNTAPSPGPSVIRRGRRQSEPVKDPYVMFPQNAKPGFKHAGSEGELYPPESQPPVSGSAPPEDLEDAGPPTLDPSGTSITEEILELLNQRGLRDPGPSTHDIPKFPGDSQVPGDSETLTFQALPSRDSSEEEEEEEEGLEMDERGPSPLHVLEGLESSIAAEMPSIPCLTKIPDVPNLPEIPSRCEIPEGSRLPSLSDISDVFEMPCLPAIPSVPNTPSLSSTPTLSCDSWLQGPLQEPAEAPATRRELFSGSNPGKLGEPPSGGKAGPEEDEEGVSFTDFQPQDVTQHQGFPDELAFRSCSEIRSAWQALEQGQLARPGFPEPLLILEDSDLGGDSGSGKAGAPSSERTASRVRELARLYSERIQQMQRAETRASANAPRRRPRVLAQPQPSPCLPQEQAEPGLLPAFGHVLVCELAFPLTCAQESVPLGPAVWVQAAIPLSKQGGSPDGQGLHVSNLPKQDLPGIHVSAATLLPEQGGSRHVQAPAATPLPKQEGPLHLQVPALTTFSDQGHPEIQVPATTPLPEHRSHMVIPAPSTAFCPEQGHCADIHVPTTPALPKEICSDFTVSVTTPVPKQEGHLDSESPTNIPLTKQGGSRDVQGPDPVCSQPIQPLSWHGSSLDPQGPGDTLPPLPCHLPDLQIPGTSPLPAHGSHLDHRIPANAPLSLSQELPDTQVPATTPLPLPQVLTDIWVQALPTSPKQGSLPDIQGPAAAPPLPEPSLTDTQVQKLTPSLEQKSLIDAHVPAATPLPERGGSLDIQGLSPTPVQTTMVLSKPGGSLASHVARNLWAFTGPRGLLMPPSTCEPGHEASLKQGFQPDAIDPQNLTWKSRH

SEQ ID NO: 15507 - protein, 568 aa, Homo sapiens
MGRHCGYLALVSALACGADWVFLPESPPEEGWEEQMCVKLSENRARKKRLNIIIVAEGAIDTQNKPITSEKIKELVVTQLGYDTRVTILGHVQRGGTPSAFDRILASRMGVEAVIALLEATPDTPACVVSLNGNHAVRLPLMECVQMTQDVQKAMDERRFQDAVRLRGRSFAGNLNTYKRLAIKLPDDQIPKTNCNVAVINVGAPAAGMNAAVRSAVRVGIADGHRMLAIYDGFDGFAKGQIKEIGWTDVGGWTGQGGSILGTKRVLPGKYLEEIATQMRTHSINALLIIGGFEAYLGLLELSAAREKHEEFCVPMVMVPATVSNNVPGSDFSIGADTALNTITDTCDRIKQSASGTKRRVFIIETMGGYCGYLANMGGLAAGADAAYIFEEPFDIRDLQSNVEHLTEKMKTTIQRGLVLRNESCSENYTTDFIYQLYSEEGKGVFDCRKNVLGHMQQGGAPSPFDRNFGTKISARAMEWITAKLKEARGRGKKFTTDDSICVLGISKRNVIFQPVAELKKQTDFEHRIPKEQWWLKLRPLMKILAKYKASYDVSDSGQLEHVQPWSV

SEQ ID NO: 15508 - protein, 597 aa, Homo sapiens
MERGLPLLCAVLALVLAPAGAFRNDKCGDTIKIESPGYLTSPGYPHSYHPSEKCEWLIQAPDPYQRIMINFNPHFDLEDRDCKYDYVEVFDGENENGHFRGKFCGKIAPPPVVSSGPFLFIKFVSDYETHGAGFSIRYEIFKRGPECSQNYTTPSGVIKSPGFPEKYPNSLECTYIVFVPKMSEIILEFESFDLEPDSNPPGGMFCRYDRLEIWDGFPDVGPHIGRYCGQKTPGRIRSSSGILSMVFYTDSAIAKEGFSANYSVLQSSVSEDFKCMEALGMESGEIHSDQITASSQYSTNWSAERSRLNYPENGWTPGEDSYREWIQVDLGLLRFVTAVGTQGAISKETKKKYYVKTYKIDVSSNGEDWITIKEGNKPVLFQGNTNPTDVVVAVFPKPLITRFVRIKPATWETGISMRFEVYGCKITDYPCSGMLGMVSGLISDSQITSSNQGDRNWMPENIRLVTSRSGWALPPAPHSYINEWLQIDLGEEKIVRGIIIQGGKHRENKVFMRKFKIGYSNNGSDWKMIMDDSKRKAKVRAGDWEEVIPYVLDFNQGPLAFSRGRASYFLPAMTLEEVCDGVSKTLDSRKTGIWHEK

SEQ ID NO: 15509 - protein, 527 aa, Homo sapiens
MEMQQNIENYRATAGVEALQLVDREAKPHMESYNAGVKHYEADDFEMAIRHFEQALREYFVEDTECRTLCEGPQRFEEYEYLGYKAGLYEAIADHYMQVLVCQHECVRELATRPGRLSPIENFLPLHYDYLQFAYYRVGEYVKALECAKAYLLCHPDDEDVLDNVDYYESLLDDSIDPASIEAREDLTMFVKRHKLESELIKSAAEGLGFSYTEPNYWIRYGGRQDENRVPSGVNVEGAEVHGFSMGKKLSPKIDRDLREGGPLLYENITFVYNSEQLNGTQRVLLDNVLSEEQCRELHSVASGIMLVGDGYRGKTSPHTPNEKFEGATVLKALKSGYEGRVPLKSARLFYDISEKARRIVESYFMLNSTLYFSYTHMVCRTALSGQQDRRNDLSHPIHADNCLLDPEANECWKEPPAYTFRDYSALLYMNDDFEGGEFIFTEMDAKTVTASIKPKCGRMISFSSGGENPHGVKAVTKGKRCAVALWFTLDPLYRELERIQADEVIAILDQEQQGKHELNINPKDEL

SEQ ID NO: 15510 - protein, 1552 aa, Homo sapiens
EPVTYYGIQYRAAGTEGPFQEVDGVATTRYSIGGLSPFSEYAFRVLAVNSIGRGPPSEAVRARTGEQAPSSPPRRVQARMLSASTMLVQWEPPEEPNGLVRGYRVYYTPDSRRPPNAWHKHNTDAGLLTTVGSLLPGITYSLRVLAFTAVGDGPPSPTIQVKTQQGVPAQPADFQAEVESDTRIQLSWLLPPQERIIMYELVYWAAEDEDQQHKVTFDPTSSYTLEDLKPDTLYRFQLAARSDMGVGVFTPTIEARTAQSTPSAPPQKVMCVSMGSTTVRVSWVPPPADSRNGVITQYSVAYEAVDGEDRGRHVVDGISREHSSWDLVGLEKWTEYRVWVRAHTDVGPGPESSPVLVRTDEDVPSGPPRKVEVEPLNSTAVHVYWKLPVPSKQHGQIRGYQVTYVRLENGEPRGLPIIQDVMLAEAQETTISGLTPETTYSVTVAAYTTKGDGARSKPKIVTTTVPGRPTMMISTTAMNTALLQWHPPKELPGELLGYRLQYCRADEARPNTIDFGKDDQHFTVTGLHKGTTYIFRLAAKNRAGLGEEFEKEIRTPEDLPSGFPQNLHVTGLTTSTTELAWDPPVLAERNGRIISYTVVFRDINSQQELQNITTDTRFTLTGLKPDTTYDIKVRAWTSKGSGPLSPSIQSRTMPVEQVFAKNFRVAAAMKTSVLLSWEVPDSYKSAVPFKILYNGQSVEVDGHSMRKLIADLQPNTEYSFVLMNRGSSAGGLQHLVSIRTAPDLLPHKPLPASAYIEDGRFDLSMPHVQDPSLVRWFYIVVVPIDRVGGSMLTPRWSTPEELELDELLEAIEQGGEEQRRRRRQAERLKPYVAAQLDVLPETFTLGDKKNYRGFYNRPLSPDLSYQCFVLASLKEPMDQKRYASSPYSDEIVVQVTPAQQQEEPEMLWVTGPVLAVILIILIVIAILLFKRKRTHSPSSKDEQSIGLKDSLLAHSSDPVEMRRLNYQTPGMRDHPPIPITDLADNIERLKANDGLKFSQEYESIDPGQQFTWENSNLEVNKPKNRYANVIAYDHSRVILTSIDGVPGSDYINANYIDGYRKQNAYIATQGPLPETMGDFWRMVWEQRTATVVMMTRLEEKSRVKCDQYWPARGTETCGLIQVTLLDTVELATYTVRTFALHKSGSSEKRELRQFQFMAWPDHGVPEYPTPILAFLRRVKACNPLDAGPMVVHCSAGVGRTGCFIVIDAMLERMKHEKTVDIYGHVTCMRSQRNYMVQTEDQYVFIHEALLEAATCGHTEVPARNLYAHIQKLGQVPPGESVTAMELEFKLLASSKAHTSRFISANLPCNKFKNRLVNIMPYELTRVCLQPIRGVEGSDYINASFLDGYRQQKAYIATQGPLAESTEDFWRMLWEHNSTIIVMLTKLREMGREKCHQYWPAERSARYQYFVVDPMAEYNMPQYILREFKVTDARDGQSRTIRQFQFTDWPEQGVPKTGEGFIDFIGQVHKTKEQFGQDGPITVHCSAGVGRTGVFITLSIVLERMRYEGVVDMFQTVKTLRTQRPAMVQTEDQYQLCYRAALEYLGSFDHYAT

SEQ ID NO: 15511 - protein, 389 aa, Homo sapiens
MEVVEAAAAQLETLKFNGTDFGVGEGPAAPSPGSAPVPGTQPPLQSFEGSPDAGQTVEVKPAGEQPLQPVLNAVAAGTPAPQPQPPAESPACGDCVTSPGAAEPARAPDSLETSDSDSDSDSETDSDSSSSSSSSSSSSSSSSSSCISLPPVLSDGDDDLQIEKENKNFPLKTKDELLLNELPSVEELTIILPEDIELKPLGMVSSIIEQLVIIESMTNLPPVNEETVIFKSDRQAAGKIFEIFGPVAHPFYVLRFNSSDHIESKGIKIKETMYFAPSMKDFTQYIFTEKLKQDKGSDASWKNDQEPPPEALDFSDDEKEKEAKQRKKSQIQGRKKLKSEFNEPGTGISHRYCGLGSRPLQSSESHKLFGFQMHIKVTFTCYFSLLSMQ

SEQ ID NO: 15512 - protein, 114 aa, Homo sapiens
MLREEATKKSKEKEPGMALPQGRLTFRDVAIEFSLEEWKCLNPAQRALYRAVMLENYRNLEFVDSSLKSMMEFSSTRHSITGEVIHTGTLQRHKSHHIGDFCFPEMKKDIHHFE

SEQ ID NO: 15513 - protein, 383 aa, Homo sapiens
MAEPRQEFEVMEDHAGTYGLGDRKDQGGYTMHQDQEGDTDAGLKAEEAGIGDTPSLEDEAAGHVTQARMVSKSKDGTGSDDKKAKGADGKTKIATPRGAAPPGQKGQANATRIPAKTPPAPKTPPSSGEPPKSGDRSGYSSPGSPGTPGSRSRTPSLPTPPTREPKKVAVVRTPPKSPSSAKSRLQTAPVPMPDLKNVKSKIGSTENLKHQPGGGKVQIINKKLDLSNVQSKCGSKDNIKHVPGGGSVQIVYKPVDLSKVTSKCGSLGNIHHKPGGGQVEVKSEKLDFKDRVQSKIGSLDNITHVPGGGNKKIETHKLTFRENAKAKTDHGAEIVYKSPVVSGDTSPRHLSNVSSTGSIDMVDSPQLATLADEVSASLAKQGL

SEQ ID NO: 15514 - protein, 1032 aa, Homo sapiens
MAETNNECSIKVLCRFRPLNQAEILRGDKFIPIFQGDDSVVIGGKPYVFDRVFPPNTTQEQVYHACAMQIVKDVLAGYNGTIFAYGQTSSGKTHTMEGKLHDPQLMGIIPRIARDIFNHIYSMDENLEFHIKVSYFEIYLDKIRDLLDVTKTNLSVHEDKNRVPFVKGCTERFVSSPEEILDVIDEGKSNRHVAVTNMNEHSSRSHSIFLINIKQENMETEQKLSGKLYLVDLAGSEKVSKTGAEGAVLDEAKNINKSLSALGNVISALAEGTKSYVPYRDSKMTRILQDSLGGNCRTTMFICCSPSSYNDAETKSTLMFGQRAKTIKNTASVNLELTAEQWKKKYEKEKEKTKAQKETIAKLEAELSRWRNGENVPETERLAGEEAALGAELCEETPVNDNSSIVVRIAPEERQKYEEEIRRLYKQLDDKDDEINQQSQLIEKLKQQMLDQEELLVSTRGDNEKVQRELSHLQSENDAAKDEVKEVLQALEELAVNYDQKSQEVEEKSQQNQLLVDELSQKVATMLSLESELQRLQEVSGHQRKRIAEVLNGLMKDLSEFSVIVGNGEIKLPVEISGAIEEEFTVARLYISKIKSEVKSVVKRCRQLENLQVECHRKMEVTGRELSSCQLLISQHEAKIRSLTEYMQSVELKKRHLEESYDSLSDELAKLQAQETVHEVALKDKEPDTQDADEVKKALELQMESHREAHHRQLARLRDEINEKQKTIDELKDLNQKLQLELEKLQADYEKLKSEEHEKSTKLQELTFLYERHEQSKQDLKGLEETVARELQTLHNLRKLFVQDVTTRVKKSAEMEPEDSGGIHSQKQKISFLENNLEQLTKVHKQLVRDNADLRCELPKLEKRLRATAERVKALEGALKEAKEGAMKDKRRYQQEVDRIKEAVRYKSSGKRGHSAQIAKPVRPGHYPASSPTNPYGTRSPECISYTNSLFQNYQNLYLQATPSSTSDMYFANSCTSSGATSSGGPLASYQKANMDNGNATDINDNRSDLPCGYEAEDQAKLFPLHQETAAS

SEQ ID NO: 15515 - protein, 561 aa, Homo sapiens
MVGQILKRDVIMDHHVSTIKPRRIQNQNVIHRLERRRISSGKAGTHWHQVRVFHQNVFPNFTVVNVEKPPCFLRKFSPDGRYFIAFSSDQTSLEIYEYQGCQAAEDLLQGYEGEILSNGNDQRSVNIRGRLFERFFVLLHITNVAANGEHLNRECSLFTDDCRCVIVGSAAYLPDEPHPPFFEVYRNSESVTPNPRSPLEDYSLHIIDLHTGRLCDTRTFKCDKVVLSHNQGLYLYKNILAILSVQQQTIHVFQVTPEGTFIDVRTIGRFCYEDDLLTVSAVFPEVQRDSQTGMANPFRDPFINSLKHRLLVYLWRRAEQDGSAMAKRRFFQYFDQLRQLRMWKMQLLDENHLFIKYTSEDVVTLRVTDPSQASFFVVYNMVTTEVIAVFENTSDELLELFENFCDLFRNATLHSEVQFPCSASSNNFARQIQRRFKDTIINAKYGGHTEAVRRLLGQLPISAQSYSGSPYLDLSLFSYDDKWVSVMERPKTCGDHPIRFYARDSGLLKFEIQAGLLGRPINHTVRRLVAFTFHPFEPFAISVQRTNAEYVVNFHMRHCCT

SEQ ID NO: 15516 - protein, 447 aa, Homo sapiens
MIPTFTALLCLGLSLGPRTHMQAGPLPKPTLWAEPGSVISWGNSVTIWCQGTLEAREYRLDKEESPAPWDRQNPLEPKNKARFSIPSMTEDYAGRYRCYYRSPVGWSQPSDPLELVMTGAYSKPTLSALPSPLVTSGKSVTLLCQSRSPMDTFLLIKERAAHPLLHLRSEHGAQQHQAEFPMSPVTSVHGGTYRCFSSHGFSHYLLSHPSDPLELIVSGSLEGPRPSPTRSVSTAAGPEDQPLMPTGSVPHSGLRRHWEVLIGVLVVSILLLSLLLFLLLQHWRQGKHRTLAQRQADFQRPPGAAEPEPKDGGLQRRSSPAADVQGENFCAAVKNTQPEDGVEMDTRSPHDEDPQAVTYAKVKHSRPRREMASPPSPLSGEFLDTKDRQAEEDRQMDTEAAASEAPQDVTYARLHSFTLRQKATEPPPSQEGASPAEPSVYATLAIH

SEQ ID NO: 15517 - protein, 117 aa, Homo sapiens
MGIKTALPAAELGLYSLVLSGALAYAGRGLLEASQDGAHRKAFRESVRPGWEYIGRKMDVADFEWVMWFTSFRNVIIFALSGHVLFAKLCTMVAPKLRSWMYAVYGALAVMGTMGPW

SEQ ID NO: 15518 - protein, 210 aa, Homo sapiens
MGPIIVPPGGHSVPSTPPVVTIAPTKTVNGVWRSESRQDAGSRSSSGGRERLIVEPPLPQEKAGGPAIPSHLLSTPYPFGLSPSSVVQDSRFPPLNLQRPVHHVVPPSTVTEDYLRSFRPYHTTDDLRMSSLPPLGLDPATAAAYYHPSYLAPHPFPHPAFRMDDSYCLSALRSPFYPIPTPGSLPPLHPSAMHLHLSGVRYPPELSHSS

SEQ ID NO: 15519 - protein, 244 aa, Homo sapiens
MKSYAGFLTVNKTYNSNLFFWFFPAQIQPEDAPVVLWLQGGPGGSSMFGLFVEHGPYVVTSNMTLRDRDFPWTTTLSMLYIDNPVGTGFSFTDDTHGYAVNEDDVARDLYSALIQFFQIFPEYKNNDFYVTGESYAGKYVPAIAHLIHSLNPVREVKINLNGIAIGDGYSDPESIIGGYAEFLYQIGLLDEKQKKYFQKQCHECIEHIRKQNWFEAFEILDKLLDGDLTSDPSYFQNVTGCSNY

SEQ ID NO: 15520 - protein, 468 aa, Homo sapiens
FELFKLEIRTLAQALSTVEEKKQEEAKMKKKTFKGLIRIFRKGVIAVLAANRLKILGQSCASLFTWMESFKEGIGMLVCTGEPQDKHKFPKHQKEQLRCLQALSWLTSSDLLAAIISSMAELQDVIGKADPNSRICGHLLIGAAKNSFAKLMDKISLVMECIPLHSSRSITYVEKDSLVQRLAHGLHKVNTLALKYGLRGHVPITKSTASLQKQILGFTQRLHAAEVERRSLRLEVTEFKRSVNEMKKELDKAQGLQMQLNEFKQSKLITHEKFESACEELNNALLREEQAQMLLNEQAQQLQELNYKLELHSSEEADKNQTLGEAVKSLSEAKMELRRKDQSLRQLNRHLTQLEQDKRRLEENIHDAESALRMAAKDKECVANHMRAVENTLHKVRDQISLSWSAASRNDFTLQLPKLHLETFAMEGLKGGPEVVACQVRVQWCDHSSLQSQMPGLKQSSCLSLLST

SEQ ID NO: 15521 - protein, 729 aa, Homo sapiens
MVAVGGCRCQPGYQPARGDKACQACPRGLYKASAGNAPCSPCPARSHAPNPAAPVCPCLEGFYRASSDPPEAPCTGPPSAPQELWFEVQGSALMLHWRLPRELGGRGDLLFNVVCKECEGRQEPASGGGGTCHRCRDEVHFDPRQRGLTESRVLVGGLRAHVPYILEVQAVNGVSELSPDPPQAAAINVSTSHEVPSAVPVVHQVSRASNSITVSWPQPDQTNGNILDYQLRYYDQAEDESHSFTLTSETNTATVTQLSPGHIYGFQVRARTAAGHGPYGGKVYFQTLPQGELSSQLPERLSLVIGSILGALAFLLLAAITVLAVVFQRKRRGTGYTEQLQQYSSPGLGVKYYIDPSTYEDPCQAIRELAREVDPAYIKIEEVIGTGSFGEVRQGRLQPRGRREQTVAIQALWAGGAESLQMTFLGRAAVLGQFQHPNILRLEGVVTKSRPLMVLTEFMELGPLDSFLRQREGQFSSLQLVAMQRGVAAAMQYLSSFAFVHRSLSAHSVLVNSHLVCKVARLGHSPQGPSCLLRWAAPEVIAHGKHTTSSDVWSFGILMWEVMSYGERPYWDMSEQEVLNAIEQEFRLPPPPGCPPGLHLLMLDTWQKDRARRPHFDQLVAAFDKMIRKPDTLQAGGDPGERPSQALLTPVALDFPCLDSPQAWLSAIGLECYQDNFSKFGLCTFSDVAQLSLEDLPALGITLAGHQKKLLHHIQLLQQHLRQQGSVEV

SEQ ID NO: 15522 - protein, 663 aa, Homo sapiens
MAAKEKLEAVLNVALRVPSIMLLDVLYRWDVSSFFQQIQRSSLSNNPLFQYKYLALNMHYVGYILSVVLLTLPRQHLVQLYLYFLTALLLYAGHQISRDYVRSELEFAYEGPMYLEPLSMNRFTTALIGQLVVCTLCSCVMKTKQIWLFSAHMLPLLARLCLVPLETIVIINKFAMIFTGLEVLYFLGSNLLVPYNLAKSAYRELVQVVEVYGLLALGMSLWNQLVVPVLFMVFWLVLFALQIYSYFSTRDQPASRERLLFLFLTSIAECCSTPYSLLGLVFTVSFVALGVLTLCKFYLQGYRAFMNDPAMNRGMTEGVTLLILAVQTGLIELQVVHRAFLLSIILFIVVASILQSMLEIADPIVLALGASRDKSLWKHFRAVSLCLFLLVFPAYMAYMICQFFHMDFWLLIIISSSILTSLQVLGTLFIYVLFMVEEFRKEPVENMDDVIYYVNGTYRLLEFLVALCVVAYGVSETIFGEWTVMGSMIIFIHSYYNVWLRAQLGWKSFLLRRDAVNKIKSLPIATKEQLEKHNDICAICYQDMKSAVITPCSHFFHAGCLKKWLYVQETCPLCHCHLKNSSQLPGLGTEPVLQPHAGAEQNVMFQEGTEPPGQEHTPGTRIQEGSRDNNEYIARRPDNQEGAFDPKEYPHSAKDEAHPVESA

SEQ ID NO: 15523 - protein, 269 aa, Homo sapiens
MPKEQLELLKKESQNLENNFRQILFLIEQIDVLKALLRDMKDGMDNNHNWNTHGDPVEDPDHTEEVSNLVNYVLKKLREDQVEMADYALKSAGASIIEAGTSESYKNNKAKLYWHGIGFLNHEMPPDIILQPDVYPGKCWAFPGSQGHTLIKLATKIIPTAVTMEHISEKVSPSGNISSAPKEFSVYVQRYMCRFVIQAGITKKCEGEEIFLGQFIYNKTGTTVQTFELQHAVSEYLLCVKLNIFSNWGHPKYTCLYRFRVHGTPGKHI

SEQ ID NO: 15524 - protein, 248 aa, Homo sapiens
MVAGSDAGRALGVLSVVCLLHCFGFISCFSQQIYGVVYGNVTFHVPSNVPLKEVLWKKQKDKVAELENSEFRAFSSFKNRVYLDTVSGSLTIYNLTSSDEDEYEMESPNITDTMKFFLYVLESLPSPTLTCALTNGSIEVQCMIPEHYNSHRGLIMYSWDCPMEQCKRNSTSIYFKMENDLPQKIQCTLSNPLFNTTSSIILTTCIPSSGHSRHRYALIPIPLAVITTCIVLYMNGILKCDRKPDRTK

SEQ ID NO: 15525 - protein, 447 aa, Homo sapiens
LRRTAPREHSYVLSAAKKSTGSPTQETQAPFIAKRVEVVEEDGPSEKSQDPPALARSTPGSNRSSPGNKDKEAPCSRELQRDLAGEEAFRAPNTDAARSSAQLSDGNVGSGATGSRPEGLAAVDIGSERGSSSATSVSAVPADRKSNSTAAQEDAKADPKGALADYEGKDVATRVGEAWQERPGAPRGGQGDPAVPAQQPADPSTPERQSSPSGSEQLVRRESCGSSVLTDFEGKDVATKVGEAWQDRPGAPRGGQGDPAVPTQQPADPSTPEQQNSPSGSEQFVRRESCTSRVRSPSSCMVTVTVTATSEQPHIYIPAPASELDSSSTTKGILFVKEYVNASEVSSGKPVSARYSNVSSIEDSFAMEKKPPCGSTPYSERTTGGICTYCNREIRDCPKITLEHLGICCHEYCFKCGICSKPMGDLLDQIFIHRDTIHCGKCYEKLF

SEQ ID NO: 15526 - protein, 215 aa, Homo sapiens
NCTKNGIVKEAQQNGKPHFYDKLIVESFEEAPLHVMVFTYMGYGIGTLFGYLRDFLRNWGIEKCNAAVERKEQKDFVPLYQDFENFYTRNLYMRIRDNWNRPICSAPGPLFDLMERVSDDYNWTFRFTGRVIKDVINMGSYNFLGLAAKYDESMRTIKDVLEVYGTGVASTRHEMGEFTSSWQNALCVGGVLQADSVPQGPPWSWKMGRHSSLLE

SEQ ID NO: 15527 - protein, 931 aa, Homo sapiens
MKKMSRNVLLQMEEEEDDDDGDIGDVPASRRPFLTPHTHLPSSLVLENLGQTIVPDLGSLESQHDFRTPEFEEFNGKPDSLFFNDGQRRIDFVLVYEDESRKETNKKGTNEKQRRKRQAYESNLICHGLQLEATRSVLDDKLVFVKVHAPWEVLCTYAEIMHIKLPLKPNDLKNRSSAFGTLNWFTKVLSVDESIIKPEQEFFTAPFEKNRMNDFYIVDRDAFFNPATRSRIVYFILSRVKYQVINNVSKFGINRLVNSGIYKAAFPLHDCKFRRQSEDPSCPNERYLLYREWAHPRSIYKKQPLDLIRKYYGEKIGIYFAWLGYYTQMLLLAAVVGVACFLYGYLNQDNCTWSKEVCHPDIGGKIIMCPQCDRLCPFWKLNITCESSKKLCIFDSFGTLVFAVFMGVWVTLFLEFWKRRQAELEYEWDTVELQQEEQARPEYEARCTHVVINEITQEEERIPFTAWGKCIRITLCASAVFFWILLIIASVIGIIVYRLSVFIVFSAKLPKNINGTDPIQKYLTPQTATSITASIISFIIIMILNTIYEKVAIMITNFELPRTQTDYENSLTMKMFLFQFVNYYSSCFYIAFFKGKFVGYPGDPVYWLGKYRNEECDPGGCLLELTTQLTIIMGGKAIWNNIQEVLLPWIMNLIGRFHRVSGSEKITPRWEQDYHLQPMGKLGLFYEYLEMIIQFGFVTLFVASFPLAPLLALVNNILEIRVDAWKLTTQFRRLVPEKAQDIGAWQPIMQGIAILAVVTNAMIIAFTSDMIPRLVYYWSFSVPPYGDHTSYTMEGYINNTLSIFKVADFKNKSKGNPYSDLGNHTTCRYRDFRYPPGHPQEYKHNIYYWHVIAAKLAFIIVMEHVIYSVKFFISYAIPDVSKRTKSKIQREKYLTQKLLHENHLKDMTKNMGVIAERMIEAVDNNLRPKSE

SEQ ID NO: 15528 - protein, 421 aa, Homo sapiens
MRVDRESRFLRGTGTGEAVAVEEPLLLAELKPGRPHQFDWKSSCETWSVAFSPDGSWFAWSQGHCIVKLIPWPLEEQFIPKGFEAKSRSSKNETKGRGSPKEKTLDCGQIVWGLAFSPWPSPPSRKLWARHHPQVPDVSCLVLATGLNDGQIKIWEVQTGLLLLNLSGHQDVVRDLSFTPSGSLILVSASRDKTLRIWDLNKHGKQIQVLSGHLQWVYCCSISPDCSMLCSAAGEKSVFLWSMRSYTLIRKLEGHQSSVVSCDFSPDSALLVTASYDTNVIMWDPYTGERLRSLHHTQVDPAMDDSDVHISSLRSVCFSPEGLYLATVADDRLLRIWALELKTPIAFAPMTNGLCCTFFPHGGVIATGTRDGHVQFWTAPRVLSSLKHLCRKALRSFLTTYQVLALPIPKKMKEFLTYRTF

SEQ ID NO: 15529 - protein, 948 aa, Homo sapiens
VAQEWLNSPNRENFYQLQVRKFPADYIKYWEFAVYLEECELAKQLYPKENDLVFLAPERINEEKKDTERNDIQDLHEYHSGYVHKFRRTSVMRNGKTECYLSIQTQENFPANLNELVNCIVISSLVTTQRKLKAMSLLGSRNQLARAVLNPNPMDFCTKDLLTTTSERIIAYLRDFNEDQKKAIETAYAMVKHSPSVAKICLIHGPPGTGKSKTIVGLLYRLLTENQRKGHSDENSNAKIKQNRVLVCAPSNAAVDELMKKIILEFKEKCKDKKNPLGNCGDINLVRLGPEKSINSEVLKFSLDSQVNHRMKKELPSHVQAMHKRKEFLDYQLDELSRQRALCRGGREIQRQELDENISKVSKERQELASKIKEVQGRPQKTQSIIILESHIICCTLSTSGGLLLESAFRGQGGVPFSCVIVDEAGQSCEIETLTPLIHRCNKLILVGDPKQLPPTVISMKAQEYGYDQSMMARFCRLLEENVEHNMISRLPILQLTVQYRMHPDICLFPSNYVYNRNLKTNRQTEAIRCSSDWPFQPYLVFDVGDGSERRDNDSYINVQEIKLVMEIIKLIKDKRKDVSFRNIGIITHYKAQKTMIQKDLDKEFDRKGPAEVDTVDAFQGRQKDCVIVTCVRANSIQGSIGFLASLQRLNVTITRAKYSLFILGHLRTLMQLLPRSFCVHVNHSPFFSPEPKYLHWALKENQHWNQLIQDAQKRGAIIKTCDKNYRHDAVKILKLKPVLQRSLTHPPTIAPEGSRPQGGLPSSKLDSGFAKTSVAASLYHTPSDSKEITLTVTSKDPERPPVHDQLQDPRLLKRMGIEVKGGIFLWDPQPSSPQHPGATPPTGEPGFPVVHQDLSHIQQPAAVVAALSSHKPPVRGEPPAASPEASTCQSKCDDPEEELCHRREARAFSEGEQEKCGSETHHTRRNSRWDKRTLEQEDSSSKKRKLL

SEQ ID NO: 15530 - protein, 754 aa, Homo sapiens
MASVPALQLTPANPPPPEVSNPKKPGRVTNQLQYLHKVVMKALWKHQFAWPFRQPVDAVKLGLPDYHKIIKQPMDMGTIKRRLENNYYWAASECMQDFNTMFTNCYIYNKPTDDIVLMAQTLEKIFLQKVASMPQEEQELVVTIPKNSHKKGAKLAALQGSVTSAHQVPAVSSVSHTALYTPPPEIPTTVLNIPHPSVISSPLLKSLHSAGPPLLAVTAAPPAQPLAKKKGVKRKADTTTPTPTAILAPGSPASPPGSLEPKAARLPPMRRESGRPIKPPRKDLPDSQQQHQSSKKGKLSEQLKHCNGILKELLSKKHAAYAWPFYKPVDASALGLHDYHDIIKHPMDLSTVKRKMENRDYRDAQEFAADVRLMFSNCYKYNPPDHDVVAMARKLQDVFEFRYAKMPDEPLEPGPLPVSTAMPPGLAKSSSESSSEESSSESSSEEEEEEDEEDEEEEESESSDSEEERAHRLAELQEQLRAVHEQLAALSQGPISKPKRKREKKEKKKKRKAEKHRGRAGADEDDKGPRAPRPPQPKKSKKASGSGGGSAALGPSGFGPSGGSGTKLPKKATKTAPPALPTGYDSEEEEESRPMSYDEKRQLSLDINKLPGEKLGRVVHIIQAREPSLRDSNPEEIEIDFETLKPSTLRELERYVLSCLRKKPRKPYTIKKPVGKTKEELALEKKRELEKRLQDVSGQLNSTKKPPKKANEKTESSSAQQVAVSRLSASSSSSDSSSSSSSSSSSDTSDSDSG

SEQ ID NO: 15531 - protein, 661 aa, Homo sapiens
MNTGRDSQSPDSAWRSYNDGNQETLNGDATYSSLAAKGFRSVRPNLQDKRSPTQSQITVNGNSGGAVSPMSYYQRPFSPSAYSLPASLNSSIVMQHGTSLDSTDTYPQHAQSLDGTTSSSIPLYRSSEEEKRVTVIKAPHYPGIGPVDESGIPTAIRTTVDRPKDWYKTMFKQIHMVHKPDDDTDMYNTPYTYNAGLYNPPYSAQSHPAAKTQTYRPLSKSHSDNSPNAFKDASSPVPPPHVPPPVPPLRPRDRSSTEKHDWDPPDRKVDTRKFRSEPRSIFEYEPGKSSILQHERPPPKKPLDYVQDHSSGVFNEASLYQSSIDRSLERPMSSASMASDFRKRRKSEPAVGPPRGLGDQSASRTSPGRVDLPGSSTTLTKSFTSSSPSSPSRAKDRESPRSYSSTLTDMGRSAPRERRGTPEKEKLPAKAVYDFKAQTSKELSFKKGDTVYILRKIDQNWYEGEHHGRVGIFPISYVEKLTPPEKAQPARPPPPAQPGEIGEAIAKYNFNADTNVELSLRKGDRVILLKRVDQNWYEGKIPGTNRQGIFPVSYVEVVKKNTKGAEDYPDPPIPHSYSSDRIHSLSSNKPQRPVFTHENIQGGGEPFQALYNYTPRNEDELELRESDVIDVMEKCDDGWFVGTSRRTKFFGTFPGNYVKRL

SEQ ID NO: 15532 - protein, 2137 aa, Homo sapiens
MMMMMMMKKMQHQRQQQADHANEANYARGTRLPLSGEGPTSQPNSSKQTVLSWQAAIDAARQAKAAQTMSTSAPPPVGSLSQRKRQQYAKSKKQGNSSNSRPARALFCLSLNNPIRRACISIVEWKPFDIFILLAIFANCVALAIYIPFPEDDSNSTNHNLEKVEYAFLIIFTVETFLKIIAYGLLLHPNAYVRNGWNLLDFVIVIVGLFSVILEQLTKETEGGNHSSGKSGGFDVKALRAFRVLRPLRLVSGVPSLQVVLNSIIKAMVPLLHIALLVLFVIIIYAIIGLELFIGKMHKTCFFADSDIVAEEDPAPCAFSGNGRQCTANGTECRSGWVGPNGGITNFDNFAFAMLTVFQCITMEGWTDVLYWMNDAMGFELPWVYFVSLVIFGSFFVLNLVLGVLSGEFSKEREKAKARGDFQKLREKQQLEEDLKGYLDWITQAEDIDPENEEEGGEEGKRNTSMPTSETESVNTENVSGEGENRGCCGSLCQAISKSKLSRRWRRWNRFNRRRCRAAVKSVTFYWLVIVLVFLNTLTISSEHYNQPDWLTQIQDIANKVLLALFTCEMLVKMYSLGLQAYFVSLFNRFDCFVVCGGITETILVELEIMSPLGISVFRCVRLLRIFKVTRHWTSLSNLVASLLNSMKSIASLLLLLFLFIIIFSLLGMQLFGGKFNFDETQTKRSTFDNFPQALLTVFQILTGEDWNAVMYDGIMAYGGPSSSGMIVCIYFIILFICGNYILLNVFLAIAVDNLADAESLNTAQKEEAEEKERKKIARKESLENKKNNKPEVNQIANSDNKVTIDDYREEDEDKDPYPPCDVPVGEEEEEEEEDEPEVPAGPRPRRISELNMKEKIAPIPEGSAFFILSKTNPIRVGCHKLINHHIFTNLILVFIMLSSAALAAEDPIRSHSFRNTILGYFDYAFTAIFTVEILLKMTTFGAFLHKGAFCRNYFNLLDMLVVGVSLVSFGIQSSAISVVKILRVLRVLRPLRAINRAKGLKHVVQCVFVAIRTIGNIMIVTTLLQFMFACIGVQLFKGKFYRCTDEAKSNPEECRGLFILYKDGDVDSPVVRERIWQNSDFNFDNVLSAMMALFTVSTFEGWPALLYKAIDSNGENIGPIYNHRVEISIFFIIYIIIVAFFMMNIFVGFVIVTFQEQGEKEYKNCELDKNQRQCVEYALKARPLRRYIPKNPYQYKFWYVVNSSPFEYMMFVLIMLNTLCLAMQHYEQSKMFNDAMDILNMVFTGVFTVEMVLKVIAFKPKGYFSDAWNTFDSLIVIGSIIDVALSEADNSEESNRISITFFRLFRVMRLVKLLSRGEGIRTLLWTFIKSFQALPYVALLIAMLFFIYAVIGMQMFGKVAMRDNNQINRNNNFQTFPQAVLLLFRCATGEAWQEIMLACLPGKLCDPESDYNPGEEYTCGSNFAIVYFISFYMLCAFLIINLFVAVIMDNFDYLTRDWSILGPHHLDEFKRIWSEYDPEAKGRIKHLDVVTLLRRIQPPLGFGKLCPHRVACKRLVAMNMPLNSDGTVMFNATLFALVRTALKIKTEGNLEQANEELRAVIKKIWKKTSMKLLDQVVPPAGDDEVTVGKFYATFLIQDYFRKFKKRKEQGLVGKYPAKNTTIALQAGLRTLHDIGPEIRRAISCDLQDDEPEETKREEEDDVFKRNGALLGNHVNHVNSDRRDSLQQTNTTHRPLHVQRPSIPPASDTEKPLFPPAGNSVCHNHHNHNSIGKQVPTSTNANLNNANMSKAAHGKRPSIGNLEHVSENGHHSSHKHDREPQRRSSVKRSDSGDEQLPTICREDPEIHGYFRDPHCLGEQEYFSSEECYEDDSSPTWSRQNYGYYSRYPGRNIDSERPRGYHHPQGFLEDDDSPVCYDSRRSPRRRLLPPTPASHRRSSFNFECLRRQSSQEEVPSSPIFPHRTALPLHLMQQQIMAVAGLDSSKAQKYSPSHSTRSWATPPATPPYRDWTPCYTPLIQVEQSEALDQVNGSLPSLHRSSWYTDEPDISYRTFTPASLTVPSSFRNKNSDKQRSADSLVEAVLISEGLGRYARDPKFVSATKHEIADACDLTIDEMESAASTLLNGNVRPRANGDVGPLSHRQDYELQDFGPGYSDEEPDPGRDEEDLADEMICITTL

SEQ ID NO: 15533 - protein, 292 aa, Homo sapiens
MGDWGFLEKLLDQVQEHSTVVGKIWLTVLFIFRILILGLAGESVWGDEQSDFECNTAQPGCTNVCYDQAFPISHIRYWVLQFLFVSTPTLVYLGHVIYLSRREERLRQKEGELRALPAKDPQVERALAAVERQMAKISVAEDGRLRIRGALMGTYVASVLCKSVLEAGFLYGQWRLYGWTMEPVFVCQRAPCPYLVDCFVSRPTEKTIFIIFMLVVGLISLVLNLLELVHLLCRCLSRGMRARQGQDAPPTQGTSSDPYTDQVFFYLPVGQGPSSPPCPTYNGLSSSEQNWA

SEQ ID NO: 15534 - protein, 652 aa, Homo sapiens
MTFYVGLQAEDGHWTGDYGGPLFLLPGLLITCHVARIPLPAGYREEIVRYLRSVQLPDGGWGLHIEDKSTVFGTALNYVSLRILGVGPDDPDLVRARNILHKKGGAVAIPSWGKFWLAVLNVYSWEGLNTLFPEMWLFPDWAPAHPSTLWCHCRQVYLPMSYCYAVRLSAAEDPLVQSLRQELYVEDFASIDWLAQRNNVAPDELYTPHSWLLRVVYALLNLYEHHHSAHLRQRAVQKLYEHIVADDRFTKSISIGPISKTINMLVRWYVDGPASTAFQEHVSRIPDYLWMGLDGMKMQGTNGSQIWDTAFAIQALLEAGGHHRPEFSSCLQKAHEFLRLSQVPDNPPDYQKYYRQMRKGGFSFSTLDCGWIVSDCTAEALKAVLLLQEKCPHVTEHIPRERLCDAVAVLLNMRNPDGGFATYETKRGGHLLELLNPSEVFGDIMIDYTYVECTSAVMQALKYFHKRFPEHRAAEIRETLTQGLEFCRRQQRADGSWEGSWGVCFTYGTWFGLEAFACMGQTYRDGTACAEVSRACDFLLSRQMADGGWGEDFESCEERRYLQSAQSQIHNTCWAMMGLMAVRHPDIEAQERGVRCLLEKQLPNGDWPQENIAGVFNKSCAISYTSYRNIFPIWALGRFSQLYPERALAGHP

SEQ ID NO: 15535 - protein, 302 aa, Homo sapiens
MATGADVRDILELGGPEGDAASGTISKKDIINPDKKKSKKSSETLTFKRPEGMHREVYALLYSDKKDAPPLLPSDTGQGYRTVKAKLGSKKVRPWKWMPFTNPARKDGAMFFHWRRAAEEGKDYPFARFNKTVQVPVYSEQEYQLYLHDDAWTKAETDHLFDLSRRFDLRFVVIHDRYDHQQFKKRSVEDLKERYYHICAKLANVRAVPGTDLKIPVFDAGHERRRKEQLERLYNRTPEQVAEEEYLLQELRKIEARKKEREKRSQDLQKLITAADTTAEQRRTERKAPKKKLPQKKEAEKP

SEQ ID NO: 15536 - protein, 1302 aa, Homo sapiens
MTEVQAMVEFSVELNKFYNVDLFQRGKTFQILYKNEEVVLNDVMIFKVKMLLDERKIEETLEEMNFLLSLDLHFTDGDYSADDLNALQLISSRTLKLHFSPHRGLHHHVNVMFDYFHLSVVSVTVHASLVALHQPLISFPRPVKTTWLNRNAPAQNKDSVIPTLESVVFGINYTKQLSPDGCSFIIADSFLHHAYRFHYTLCATLLLAFKGLHSYFITVTEEIPSCQKLELAKANMQLLYERLLRRKQLRTQKDNHLEEMDVEARLTELCEEVKKIENPDELAELINMNLAQLCSLLMALWGQFLEVITLHEELRILLAQEHHTLRVRRFSEAFFCFEHPREAAIAYQELHAQSHLQMCTAIKNTSFCSSLPPLPIECSELDGDLNSLPIIFEDRYLDSVTEGKLDISQDDSEITQMEHNLASRRSSDDCHDHQTTPSLGVRTIEIKPSNKDPFSGENITVKLGPWTELRQEEILVDNLLPNFESLESNGKSKSIEITFEKEALQEAKCLSIGESLTKLRSNLPAPSTKEYHVVVSGDTIKLPDISATYASSRFSDSGVESEPSSFATHPNTDLVFETVQGQGPCNSERLFPQLLMKPDYNVKFSLGNHCTESTSAISEIQSSLTSINSLPSDDELSPDENSKKSVVPECHLNDSKTVLNLGTTDLPKCDDTKKSSITLQQQSVVFSGNLDNETVAIHSLNSSIKDPLQFVFSDEETSSDVKSSCSSKPNLDTMCKGFQSPDKSNNSTGTAITLNSKLICLGTPCVISGSISSNTDVSEDRTMKKNSDVLNLTQMYSEIPTVESETHLGTSDPFSASTDIVKQGLVENYFGSQSSTDISDTCAVSYSNALSPQKETSEKEISNLQQEQDKEDEEEEQDQQMVQNGYYEETDYSALDGTINAHYTSRDELMEERLTKSEKINSDYLRDGINMPTVCTSGCLSFPSAPRESPCNVKYSSKSKFDAITKQPSSTSYNFTSSISWYESSPKPQIQAFLQAKEELKLLKLPGFMYSEVPLLASSVPYFSVEEEDGSEDGVHLIVCVHGLDGNSADLRLVKTYIELGLPGGRIDFLMSERNQNDTFADFDSMTDRLLDEIIQYIQIYSLTVSKISFIGHSLGNLIIRSVLTRPRFKYYLNKLHTFLSLSGPHLGTLYNSSALVNTGLWFMQKWKKSGSLLQLTCRDHSDPRQTFLYKLSNKAGLHYFKNVVLVGSLQDRYVPYHSARIEMCKTALKDKQSGQIYSEMIHNLLRPVLQSKDCNLVRYNVINALPNTADSLIGRAAHIAVLDSEIFLEKFFLVAALKYFQ

SEQ ID NO: 15537 - protein, 452 aa, Homo sapiens
MFDIEYFRKDPRPFFKFAKEIYPGQFQPSLCHKFIALSDKEGKLLRNYTQNIDTLEQVAGIQRIIQCHGSFATASCLICKYKVDCEAVRGDIFNQVVPRCPRCPADEPLAIMKPEIVFFGENLPEQFHRAMKYDKDEVDLLIVIGSSLKVRPVALIPSSIPHEVPQILINREPLPHLHFDVELLGDCDVIINELCHRLGGEYAKLCCNPVKLSEITEKPPRTQKELAYLSELPPTPLHVSEDSSSPERTSPPDSSVIVTLLDQAAKSNDDLDVSESKGCMEEKPQEVQTSRNVESIAEQMENPDLKNVGSSTGEKNERTSVAGTVRKCWPNRVAKEQISRRLDGNQYLFLPPNRYIFHGAEVYSDSEDDVLSSSSCGSNSDSGTCQSPSLEEPMEDESEIEEFYNGLEDEPDVPERAGGAGFGTDGDDQEAINEAISVKQEVTDMNYPSNKS

SEQ ID NO: 15538 - protein, 90 aa, Homo sapiens
MPGRAPLRTVPGALGAWLLGGLWAWTLCGLCSLGAVGAPRPCQAPQQWEGRQVMYQQSSGRNSRALLSYDGLNQRVRVLDERKALIPCKR

SEQ ID NO: 15539 - protein, 177 aa, Homo sapiens
MSSGLRAADFPRWKRHISEQLRRRDRLQRQAFEEIILQYNKLLEKSDLHSVLAQKLQAEKHDVPNRHEIRRRQARLQKELAEAAKEPLPVEQDDDIEVIVDETSDHTEETSPVRAISRAATKRLSQPAGGLLDSITNIFGLSESPLLGHHSSSDAARRRSVSSFPVPQDNVDTHPGS

SEQ ID NO: 15540 - protein, 294 aa, Homo sapiens
MASPGKPGADEAQEEEGELEGGSAGPRAAILEQAEELFLLCDKEAKGFITKHDLQGLQSDLPLTPEQLEAVFESLDRAHTGFLTAREFCLGLGMFVGVASAQGANPCRTPEETFESGGLDVQGTAGSLDEEEEEEERFHTVLEQLGVAPVLGKQRAVRTLWARLQRERPELLGSFEDVLIRASACLEEAARERDGLEQALRRRESEHEREVRALYEETEQLREQSRRPPSQNFARGERRSRLELELQSREQDLERAGLRQRERRGRRLQEHAERESQPATATGAAQGAEYTAAG

SEQ ID NO: 15541 - protein, 125 aa, Homo sapiens
MDDDIAALVVDNGSGMCKAGFAGDDAPRAVFPSIVGRPRHQGVMVGMGQKDSYVGDEAQSKRGILTLKYPIEHGIVTNWDDMEKIWHHTFYNELRVAPEEHPVLLTEAPLNPKANREKMTQDSLL

SEQ ID NO: 15542 - protein, 421 aa, Homo sapiens
MTKLSAQVKGSLNITTPGLQIWRIEAMQMVPVPSSTFGSFFDGDCYIILAIHKTASSLSYDIHYWIGQDSSLDEQGAAAIYTTQMDDFLKGRAVQHREVQGNESEAFRGYFKQGLVIRKGGVASGMKHVETNSYDVQRLLHVKGKRNVVAGEVEMSWKSFNRGDVFLLDLGKLIIQWNGPESTRMERLRGMTLAKEIRDQERGGRTYVGVVDGENELASPKLMEVMNHVLGKRRELKAAVPDTVVEPALKAALKLYHVSDSEGNLVVREVATRPLTQDLLSHEDCYILDQGGLKIYVWKGKKANEQEKKGAMSHALNFIKAKQYPPSTQVEVQNDGAESAVFQQLFQKWTASNRTSGLGKTHTVGSVGEGQAGAVREPGSRSWARRATWSTTHPPSLTCIFNEDFYAGSGLVLADGDVDKL

SEQ ID NO: 15543 - protein, 1049 aa, Homo sapiens
MACIHYLRENREKFEAFIEGSFEEYLKRLENPQEWVGQVEISALSLMYRKDFIIYREPNVSPSQVTENNFPEKVLLCFSNGNHYDIVYPIKYKESSAMCQSLLYELLYEKVFKTDVSKIVMELDTLEVADEDNSEISDSEDDSCKSKTAAAAADVNGFKPLSGNEQLKNNGNSTSLPLSRKVLKSLNPAVYRNVEYEIWLKSKQAQQKRDYSIAAGLQYEVGDKCQVRLDHNGKFLNADVQGIHSENGPVLVEELGKKHTSKNLKAPPPESWNTVSGKKMKKPSTSGQNFHSDVDYRGPKNPSKPIKAPSALPPRLQHPSGVRQHAFSSHSSGSQSQKFSSEHKNLSRTPSQIIRKPDRERVEDFDHTSRESNYFGLSPEERREKQAIEESRLLYEIQNRDEQAFPALSSSSVNQSASQSSNPCVQRKSSHVGDRKGSRRRMDTEERKDKDSIHGHSQLDKRPEPSTLENITDDKYATVSSPSKSKKLECPSPAEQKPAEHVSLSNPAPLLVSPEVHLTPAVPSLPATVPAWPSEPTTFGPTGVPAPIPVLSVTQTLTTGPDSAVSQAHLTPSPVPVSIQAVNQPLMPLPQTLSLYQDPLYPGFPCNEKGDRAIVPPYSLCQTGEDLPKDKNILRFFFNLGVKAYSCPMWAPHSYLYPLHQAYLAACRMYPKVPVPVYPHNPWFQEAPAAQNESDCTCTDAHFPMQTEASVNGQMPQPEIGPPTFSSPLVIPPSQVSESHGQLSYQADLESETPGQLLHADYEESLSGKNMFPQPSFGPNPFLGPVPIAPPFFPHVWYGYPFQGFIENPVMRQNIVLPSDEKGELDLSLENLDLSKDCGSVSTVDEFPEARGEHVHSLPEASVSSKPDEGRTEQSSQTRKADTALASIPPVAEGKAHPPTQILNRERETVPVELEPKRTIQSLKEKTEKVKDPKTAADVVSPGANSVDSRVQRPKEESSEDENEVSNILRSGRSKQFYNQTYGSRKYKSDWGYSGRGGYQHVRSEESWKGQPSRSRDEGYQYHRNVRGRPFRGDRRRSGMGDGHRGQHT

SEQ ID NO: 15544 - protein, 144 aa, Homo sapiens
MSSPLQRAVGDTKRALSASSSSSASLPFDDRDSNHTSEGNGDSLLADEDTDFEDSLNRNVKKRAAKRPPKTTPVAKHPKKGSRVVHRHSRKQSEPPANDLFNAVKAAKSDMQSLVDEWLDSYKQDQDAGFLELVNFFIQSCGCK

SEQ ID NO: 15545 - protein, 250 aa, Homo sapiens
MASRYDRAITVFSPDGHLFQVEYAQEAVKKGSTAVGIRGTNIVVLGVEKKSVAKLQDERTVRKICALDDHVCMAFAGLTADARVVINRARVECQSHKLTVEDPVTVEYITRFIATLKQKYTQSNGRRPFGISALIVGFDDDGISRLYQTDPSGTYHAWKANAIGRSAKTVREFLEKNYTEDAIASDSEAIKLAIKALLEVVQSGGKNIELAIIRRNQPLKMFSAKEVELYVTEIEKEKEEAEKKKSKKSV

SEQ ID NO: 15546 - protein, 1390 aa, Homo sapiens
MDGASAEQDGLQEDRSHSGPSSLPEAPLKPPGPLVPPDQQDKVQCAEVNRASTEGESPDGPGQGGLCQNGPTPPFPDPPSSLDPTTSPVGPDASPGVAGFHDNLRKSQGTSAEGSVRKEALQSLRLSLPMQETQLCSTDSPLPLEKEEQVRLQARKWLEEQLKQYRVKRQQERSSQPATKTRLFSTLDPELMLNPENLPRASTLAMTKEYSFLRTSVPRGPKVGSLGLPAHPREKKTSKSSKIRSLADYRTEDSNAGNSGGNVPAPDSTKGSLKQNRSSAASVVSEISLSPDTDDRLENTSLAGDSVSEVDGNDSDSSSYSSASTRGTYGILSKTVGTQDTPYMVNGQEIPADTLGQFPSIKDVLQAAAAEHQDQGQEVNGEVRSRRDSICSSVSLESSAAETQEEMLQVLKEKMRLEGQLEALSLEASQALKEKAELQAQLAALSTKLQAQVECSHSSQQRQDSLSSEVDTLKQSCWDLERAMTDLQNMLEAKNASLASSNNDLQVAEEQYQRLMAKVEDMQRSMLSKDNTVHDLRQQMTALQSQLQQVQLERTTLTSKLKASQAEISSLQSVRQWYQQQLALAQEARVRLQGEMAHIQVGQMTQAGLLEHLKLENVSLSQQLTETQHRSMKEKGRIAAQLQGIEADMLDQEAAFMQIQEAKTMVEEDLQRRLEEFEGERERLQRMADSAASLEQQLEQVKLTLLQRDQQLEALQQEHLDLMKQLTLTQEALQSREQSLDALQTHYDELQARLGELQGEAASREDTICLLQNEKIILEAALQAAKSGKEELDRGARRLEEGTEETSETLEKLREELAIKSGQVEHLQQETAALKKQMQKIKEQFLQQKVMVEAYRRDATSKDQLISELKATRKRLDSELKELRQELMQVHGEKRTAEAELSRLHREVAQVRQHMADLEGHLQSAQKERDEMETHLQSLQFDKEQMVAVTEANEALKKQIEELQQEARKAITEQKQKMRRLGSDLTSAQKEMKTKHKAYENAVGILSRRLQEALAAKEAADAELGQLRAQGGSSDSSLALHERIQALEAELQAVSHSKTLLEKELQEVIALTSQELEESREKVLELEDELQESRGFRKKIKRLEESNKKLALELEHEKGKLTGLGQSNAALREHNSILETALAKREADLVQLNLQVQAVLQRKEEEDRQMKHLVQALQASLEKEKEKVNSLKEQVAAAKVEAGHNRRHFKAASLELSEVKKELQAKEHLVQKLQAEADDLQIREGKHSQEIAQFQAELAEARAQLQLLQKQLDEQLSKQPVGNQEMENLKWEVDQKEREIQSLKQQLDLTEQQGRKELEGLQQLLQNVKSELEMAQEDLSMTQKDKFMLQAKVSELKNNMKTLLQQNQQLKLDLRRGAAKTVLRPASLPG

SEQ ID NO: 15547 - protein, 267 aa, Homo sapiens
MSAGPQAMLGRRVVLWATSSSMFLFGIAAAFAVDYYTFMAARFFLAMVASGYLVVGFVYVMEFIGMKSRTWASVHLHSFFAVGTLLVALTGYLVRTWWLYQMILSTVTVPFILCCWVLPETPFWLLSEGRYEEAQKIVDIMAKWNRASSCKLSELLSLDLQGPVSNSPTEVQKHNLSYLFYNWSITKRTLTVWLIWFTGSLGFYSFSLNSVNLGGNEYLNLFLLGVVEIPAYTFVCIAMDKVGRRTVLAYSLFCSALACGVVMVIPQ

SEQ ID NO: 15548 - protein, 228 aa, Homo sapiens
MGLLLPFSDCFREPCNQNAQTNAASFDQDQLYTWAAVSQPTHSLDYSEGQFPRRVPSMGPPSKPPDEEHRLEDAETEDDGESQSAVSETPQKRSDAVQKEVVDMKSEGQATVIQQLEQTIEDLRTKIAELERQYPALDTEVASGHQGLENGVTASGDVCLEALRLEEKEVRHHRILEAKSIQTSPTEEGGVLTLPPVDGLPGRPPCPPGAESGPQTKFCSEISLIVSP

SEQ ID NO: 15549 - protein, 737 aa, Homo sapiens
MAHRKLESVGSGMLDHRVRPGPVPHSQEPESEDMELPLEGYVPEGLELAALRPESPAPEEQECHNHSPDGDSSSDYVNNTSEEEDYDEGLPEEEEGITYYIRYCPEDDSYLEGMDCNGEEYLAHSAHPVDTDECQEAVEEWTDSAGPHPHGHEAEGSQDYPDGQLPIPEDEPSVLEAHDQEEDGHYCASKEGYQDYYPEEANGNTGASPYRLRRGDGDLEDQEEDIDQIVAEIKMSLSMTSITSASEASPEHGPEPGPEDSVEACPPIKASCSPSRHEARPKSLNLLPEAKHPGDPQRGFKPKTRTPEERLKWPHEQVCNGLEQPRKQQRSDLNGPVDNNNIPETKKVASFPSFVAVPGPCEPEDLIDGIIFAANYLGSTQLLSERNPSKNIRMMQAQEAVSRVKNSEGDAQTLTEVDLFISTQRIKVLNADTQETMMDHALRTISYIADIGNIVVLMARRRMPRSASQDCIETTPGAQEGKKQYKMICHVFESEDAQLIAQSIGQAFSVAYQEFLRANGINPEDLSQKEYSDIINTQEMYNDDLIHFSNSENCKELQLEKHKGEILGVVVVESGWGSILPTVILANMMNGGPAARSGKLSIGDQIMSINGTSLVGLPLATCQGIIKGLKNQTQVKLNIVSCPPVTTVLIKRPDLKYQLGFSVQNGIICSLMRGGIAERGGVRVGHRIIEINGQSVVATAHEKIVQALSNSVGEIHMKTMPAAMFRLLTGQETPLYI

SEQ ID NO: 15550 - protein, 136 aa, Homo sapiens
MGETEKRIETHRIRCLSKLKMFLLAITCAFVSKTLSGSYMNSMLTQIERQFNIPTSLVGFINGSFEIGNLLLIIFVSYFGTKLHRPIMIGIGCVVMGLGCFLKSLPHFLMNQYEYESTVSVSGNLSSNSFLCMENG

SEQ ID NO: 15551 - protein, 474 aa, Homo sapiens
MTTFKEAVTFKDVAVFFTEEELGLLDPAQRKLYQDVMLENFTNLLSVGHQPFHPFHFLREEKFWMMETATQREGNSGGKTIAEAGPHEDCPCQQIWEQTASDLTQSQDSIINNSHFFEQGDVPSQVEAGLSIIHTGQKPSQNGKCKQSFSDVAIFDPPQQFHSGEKSHTCNECGKSFCYISALRIHQRVHLREKLSKCDMRGKEFSQSSCLQTRERVHTGEKPFKCEQCGKGFRCRAILQVHCKLHTGEKPYICEKCGRAFIHDFQLQKHQIIHTGEKPFKCEICGKSFCLRSSLNRHCMVHTAEKLYKSEECGKGFTDSLDLHKHQIIHTGQKPYNCKECGKSFRWSSYLLIHQRIHSGEKPYRCEECGKGYISKSGLNLHQRVHTGERPYNCKECGKSFSRASSILNHKKLHCRKKPFKCEDCGKRLVHRSFCKDQQGDHNGENSSKCEDCGKRYKRRLNLDIILSLFLNDM

SEQ ID NO: 15552 - protein, 822 aa, Homo sapiens
MSYVECKCLQLENKNTWEVPFEEISELQWLGSGAQGAVFLGKFRAEEVAIKKVREQNETDIKHLRKLKHPNIIAFKGVCTQAPCYCIIMEYCAHGQLYEVLRAGRKITPRLLVDWSTGIASGMNYLHLHKIIHRDLKSPNVLVTHTDAVKISDFGTSKELSDKSTKMSFAGTVAWMAPEVIRNEPVSEKVDIWSFGVVLWELLTGEIPYKDVDSSAIIWGVGSNSLHLPVPSTCPDGFKILMKQTWQSKPRNRPSFRQTLMHLDIASADVLATPQETYFKSQAEWREEVKKHFEKIKSEGTCIHRLDEELIRRRREELRHALDIREHYERKLERANNLYMELSAIMLQLEMREKELIKREQAVEKKYPGTYKRHPVRPIIHPNAMEKLMKRKGVPHKSGMQTKRPDLLRSEGIPTTEVAPTASPLSGSPKMSTSSSKSRYRSKPRHRRGNSRGSHSDFAAILKNQPAQENSPHPTYLHQAQSQYPSLHHHNSLQQQYQQPPPAMSQSHHPRLNMHGQDIATCANNLRYFGPAAALRSPLSNHAQRQLPGSSPDLISTAMAADCWRSSEPDKGQAGPWGCCQADAYDPCLQCRPEQYGSLDIPSAEPVGRSPDLSKSPAHNPLLENAQSSEKTEENEFSGCRSESSLGTSHLGTPPALPRKTRPLQKSGDDSSEEEEGEVDSEVEFPRRQRPHRCISSCQSYSTFSSENFSVSDGEEGNTSDHSNSPDELADKLEDRLAEKLDDLLSQTPEIPIDISSHSDGLSDKECAVRRVKTQMSLGKLCVEERGYENPMQFEESDCDSSDGECSDATVRTNKHYSSATW

SEQ ID NO: 15553 - protein, 1337 aa, Homo sapiens
MMQGNTCHRMSFHPGRGCPRGRGGHGARPSAPSFRPQNLRLLHPQQPPVQYQYEPPSAPSTTFSNSPAPNFLPPRPDFVPFPPPMPPSAQGPLPPCPIRPPFPNHQMRHPFPVPPCFPPMPPPMPCPNNPPVPGAPPGQGTFPFMMPPPSMPHPPPPPVMPQQVNYQYPPGYSHHNFPPPSFNSFQNNPSSFLPSANNSSSPHFRHLPPYPLPKAPSERRSPERLKHYDDHRHRDHSHGRGERHRSLDRRERGRSPDRRRQDSRYRSDYDRGRTPSRHRSYERSRERERERHRHRDNRRSPSLERSYKKEYKRSGSRSPSREKKRARWEEEKDRWSDNQSSGKDKNYTSIKEKEPEETMPDKNEEEEEELLKPVWIRCTHSENYYSSDPMDQVGDSTVVGTSRLRDLYDKFEEELGSRQEKAKAARPPWEPPKTKLDEDLESSSESECESDEDSTCSSSSDSEVFDVIAEIKRKKAHPDRLHDELWYNDPGQMNDGPLCKCSAKARRTGIRHSIYPGEEAIKPCRPMTNNAGRLFHYRITVSPPTNFLTDRPTVIEYDDHEYIFEGFSMFAHAPLTNIPLCKVIRFNIDYTIHFIEEMMPENFCVKGLELFSLFLFRDILELYDWNLKGPLFEDSPPCCPRFHFMPRFVRFLPDGGKEVLSMHQILLYLLRCSKALVPEEEIANMLQWEELEWQKYAEECKGMIVTNPGTKPSSVRIDQLDREQFNPDVITFPIIVHFGIRPAQLSYAGDPQYQKLWKSYVKLRHLLANSPKVKQTDKQKLAQREEALQKIRQKNTMRREVTVELSSQGFWKTGIRSDVCQHAMMLPVLTHHIRYHQCLMHLDKLIGYTFQDRCLLQLAMTHPSHHLNFGMNPDHARNSLSNCGIRQPKYGDRKVHHMHMRKKGINTLINIMSRLGQDDPTPSRINHNERLEFLGDAVVEFLTSVHLYYLFPSLEEGGLATYRTAIVQNQHLAMLAKKLELDRFMLYAHGPDLCRESDLRHAMANCFEALIGAVYLEGSLEEAKQLFGRLLFNDPDLREVWLNYPLHPLQLQEPNTDRQLIETSPVLQKLTEFEEAIGVIFTHVRLLARAFTLRTVGFNHLTLGHNQRMEFLGDSIMQLVATEYLFIHFPDHHEGHLTLLRSSLVNNRTQAKVAEELGMQEYAITNDKTKRPVALRTKTLADLLESFIAALYIDKDLEYVHTFMNVCFFPRLKEFILNQDWNDPKSQLQQCCLTLRTEGKEPDIPLYKTLQTVGPSHARTYTVAVYFKGERIGCGKGPSIQQAEMGAAMDALEKYNFPQMAHQKRFIERKYRQELKEMRWEREHQEREPDETEDIKK

SEQ ID NO: 15554 - protein, 738 aa, Homo sapiens
MAEAHQAVAFQFTVTPDGVDFRLSREALKHVYLSGINSWKKRLIRIKNGILRGVYPGSPTSWLVVIMATVGSSFCNVDISLGLVSCIQRCLPQGCGPYQTPQTRALLSMAIFSTGVWVTGIFFFRQTLKLLLCYHGWMFEMHGKTSNLTRIWAYLESVRPLLDDEEYYRMELLAKEFQDKTAPRLQKYLVLKSWWASNYVSDWWEEYIYLRGRSPLMVNSNYYVMDLVLIKNTDVQAARLGNIIHAMIMYRRKLDREEIKPVMALGIVPMCSYQMERMFNTTRIPGKDTDVLQHLSDSRHVAVYHKGRFFKLWLYEGARLLKPQDLEMQFQRILDDPSPPQPGEEKLAALTAGGRVEWAQARQAFFSSGKNKAALEAIERAAFFVALDEESYSYDPEDEASLSLYGKALLHGNCYNRWFDKSFTLISFKNGQLGLNAEHAWADAPIIGHLWEFVLGTDSFHLGYTETGHCLGKPNPALAPPTRLQWDIPKQCQAVIESSYQVAKALADDVELYCFQFLPFGKGLIKKCRTSPDAFVQIALQLAHFRDRGKFCLTYEASMTRMFREGRTETVRSCTSESTAFVQAMMEGSHTKADLRDLFQKAAKKHQNMYRLAMTGAGIDRHLFCLYLVSKYLGVSSPFLAEVLSEPWRLSTSQIPQSQIRMFDPEQHPNHLGAGGGFGPVADDGYGVSYMIAGENTIFFHISSKFSSSETNAQRFGNHIRKALLDIADLFQVPKAYS

SEQ ID NO: 15555 - protein, 483 aa, Homo sapiens
MAATEISVLSEQFTKIKELELMPEKGLKEEEKDGVCREKDHRSPSELEAERTSGAFQDSVLEEEVELVLAPSEESEKYILTLQTVHFTSEAVELQDMSLLSIQQQEGVQVVVQQPGPGLLWLEEGPRQSLQQCVAISIQQELYSPQEMEVLQFHALEENVMVASEDSKLAVSLAETTGLIKLEEEQEKNQLLAERTKEQLFFVETMSGDERSDEIVLTVSNSNVEEQEDQPTAGQADAEKAKSTKNQRKTKGAKGTFHCDVCMFTSSRMSSFNRHMKTHTSEKPHLCHLCLKTFRTVTLLRNHVNTHTGTRPYKCNDCNMAFVTSGELVRHRRYKHTHEKPFKCSMCKYASVEERHMTAHIRTHTGEKPFTCLSCNKCFRQKQLLNAHFRKYHDANFIPTVYKCSKCGKGFSRWILWVGNSEVAELGGPGSGPLLRLQSGCPPGLHHPKAGLGPEDPLPGQLRHTTAGTGLSSLLQGPLCRAA

SEQ ID NO: 15556 - protein, 152 aa, Homo sapiens
MSRPLLITFTPATDPSDLWKDGQQQPQPEKPESTLDGAAARAFYEALIGDESSAPDSQRSQTEPARERKRKKRRIMKAPAAEAVAEGASGRHGQGRSLEAEDKMTHRILRAAQEGDLPELRRLLEPHEAGGAGGNINARDAFWWTPLMCAAR

SEQ ID NO: 15557 - protein, 230 aa, Homo sapiens
MTLQWAAVATFLYAEIGLILIFCLPFIPPQRWQKIFSFNVWGKIATFWNKAFLTIIILLIVLFLDAVREVRKYSSVHTIEKSSTSRPDAYEHTQMKLFRSQRNLYISGFSLFFWLVLRRLVTLITQLAKELSNKGVLKTQAENTNKAAKKFMEENEKLKRILKSHGKDEECVLEAENKKLVEDQEKLKTELRKTSDALSKAQNDVMEMKMQSERLSKEYDQLLKEHSELQ

SEQ ID NO: 15558 - protein, 747 aa, Homo sapiens
ACSNPSQQVRSRPWSRHHSKASWAEFSILRELLAQDVLCDVSKPYRLATPVYASLTPRSRPRPPKDSQASPGRPSSVEEVRIAASPKSTGPRPSLRPLRLEVKREVRRPARLQQQEEEDEEEEEEEEEEEKEEEEEWGRKRPGRGLPWTKLGRKLESSVCPVRRSRRLNPELGPWLTFADEPLVPSEPQGALPSLCLAPKAYDVERELGSPTDEDSGQDQQLLRGPQIPALESPCESGCGDMDEDPSCPQLPPRDSPRCLMLALSQSDPTFGKKSFEQTLTVELCGTAGLTPPTTPPYKPTEEDPFKPDIKHSLGKEIALSLPSPEGLSLKATPGAAHKLPKKHPERSELLSHLRHATAQPASQAGQKRPFSCSFGDHDYCQVLRPEGVLQRKVLRSWEPSGVHLEDWPQQGAPWAEAQAPGREEDRSCDAGAPPKDSTLLRDHEIRASLTKHFGLLETALEEEDLASCKSPEYDTVFEDSSSSSGESSFLPEEEEEEGEEEEEDDEEEDSGVSPTCSDHCPYQSPPSKANRQLCSRSRSSSGSSPCHSWSPATRRNFRCESRGPCSDRTPSIRHARKRREKAIGEGRVVYIQNLSSDMSSRELKRRFEVFGEIEECEVLTRNRRGEKYGFITYRCSEHAALSLTKGAALRKRNEPSFQLSYGGLRHFCWPRYTDYGWQAVPTVQRSSQLPKALGCSHSTVPTHSGRFFNHPVFVSCSLPSPLPCLFTPMPRFQFRRGPSCVREKQV

SEQ ID NO: 15559 - protein, 1062 aa, Homo sapiens
MVSSAQMGFNLQALLEQLSQDELSKFKYLITTFSLAHELQKIPHKEVDKADGKQLVEILTTHCDSYWVEMASLQVFEKMHRMDLSERAKDEVREAALKSFNKRKPLSLGITRKERPPLDVDEMLERFKTEAQAFTETKGNVICLGKEVFKGKKPDKDNRCRYILKTKFREMWKSWPGDSKEVQVMAERYKMLIPFSNPRVLPGPFSYTVVLYGPAGLGKTTLAQKLMLDWAEDNLIHKFKYAFYLSCRELSRLGPCSFAELVFRDWPELQDDIPHILAQARKILFVIDGFDELGAAPGALIEDICGDWEKKKPVPVLLGSLLNRVMLPKAALLVTTRPRALRDLRILAEEPIYIRVEGFLEEDRRAYFLRHFGDEDQAMRAFELMRSNAALFQLGSAPAVCWIVCTTLKLQMEKGEDPVPTCLTRTGLFLRFLCSRFPQGAQLRGALRTLSLLAAQGLWAQTSVLHREDLERLGVQESDLRLFLDGDILRQDRVSKGCYSFIHLSFQQFLTALFYTLEKEEEEDRDGHTWDIGDVQKLLSGVERLRNPDLIQAGYYSFGLANEKRAKELEATFGCRMSPDIKQELLRCDISCKGGHSTVTDLQELLGCLYESQEEELVKEVMAQFKEISLHLNAVDVVPSSFCVKHCRNLQKMSLQVIKENLPENVTASESDAEVERSQDDQHMLPFWTDLCSIFGSNKDLMGLAINDSFLSASLVRILCEQIASDTCHLQRVVFKNISPADAHRNLCLALRGHKTVTYLTLQGNDQDDMFPALCEVLRHPECNLRYLGLVSCSATTQQWADLSLALEVNQSLTCVNLSDNELLDEGAKLLYTTLRHPKCFLQRLSLENCHLTEANCKDLAAVLVVSRELTHLCLAKNPIGNTGVKFLCEGLRYPECKLQTLVLWNCDITSDGCCDLTKLLQEKSSLLCLDLGLNHIGVKGMKFLCEALRKPLCNLRCLWLWGCSIPPFSCEDLCSALSCNQSLVTLDLGQNPLGSSGVKMLFETLTCSSGTLRTLRLKIDDFNDELNKLLEEIEEKNPQLIIDTEKHHPWAERPSSHDFMI

SEQ ID NO: 15560 - protein, 500 aa, Homo sapiens
MSIDHEQPWQQPVPAGERPAAGPGGLAAAAAGKPAAESTAHAPAPADHDPRARAALPAPKRLHSADGQRRGHWGQPGLCPAPISAHLPPDQVLLFSWRASDEDAADAGVTSHCLQPGHRNMFPPNLVEACFKQFKTQYSTRVVTRTMVRTENGSEPGASMPPPFSVENGTSFLENVTRALGTLQEMLSFEETVPVPGSANGINALGLVVFSVAFGLVIGGMKHKGRVLRDFFDSLNEAIMRLVGIIIWYAPVGILFLIAGKILEMEDMAVLGGQLGMYTLTVIVGLFLHAGIVLPLIYFLVTHRNPFPFIGGMLQALITAMGTSSSSATLPITFRCLEEGLGVDRRITRFVLPVGATVNMDGTALYEALAAIFIAQVNNYELNLGQITTISITATAASVGAAGIPQAGLVTMVIVLTSVGLPTEDITLIIAVDWFLDRLRTMTNVLGDSIGAAVIEHLSQRELELQEAELTLPSLGKPYKSLMAQEKGASRGRGGNESAM

SEQ ID NO: 15561 - protein, 688 aa, Homo sapiens
GAERYSDRGIIPRTLSYIFEQLQKDSSKIYTTHISYLEIYNECGYDLLDPRHEASSLEDLPKVTILEDPDQNIHLKNLTLHQATTEEEALNLLFLGDTNRMIAETPMNQASTRSHCIFTIHLSSKEPGSATVRHAKLHLVDLAGSERVAKTGVGGHLLTEAKYINLSLHYLEQVIIALSEKHRSHIPYRNSMMTSVLRDSLGGNCMTTMIATLSLEKRNLDESISTCRFAQRVALIKNEAVLNEEINPRLVIKRLQKEIQELKDELAMVTGEQRTEALTEAELLQLEKLITSFLEDQDSDSRLEVGADMRKVHHCFHHLKKLLNDKKILENNTVSSESKDQDCQEPLKEEEYRKLRDILKQRDNEINILVNMLKKEKKKAQEALHLAGMDRREFRQSQSPPFRLGNPEEGQRMRLSSAPSQAQDFSILGKRSSLLHKKIGMREEMSLGCQEAFEIFKRDHADSVTIDDNKQILKQRFSEAKALGESINEARSKIGHLKEEITQRHIQQVALGISENMAVPLMPDQQEEKLRSQLEEEKRRYKTMFTRLKALKVEIEHLQLLMDKAKVKLQKEFEVWWAEEATNLQVNSPAVNSLDHTKPFLQTSDSQHEWSQLLSNKSDVNARKILPSPCPSPHSQKQSSTSTPLEDSIPKRPVSSIPLTGDSQTDSDIIAFIKARQSILQKQCLGSN

SEQ ID NO: 15562 - protein, 1390 aa, Homo sapiens
WKSDPKAKSVQSSNSTTENNNGLGNWRNVSGQDRIGPGSGFSNFNPNSNPSAWPALVQEGTSRKGALETDNSNSSAQVSTVGQTSREQQSKMENAGVNFVVSGREQAQIHNTDGPKNGNTNSLNLSSPNPMENKGMPFGMGLGNTSRSTDAPSQSTGDRKTGSVGSWGAARGPSGTDTVSGQSNSGNNGNNGKEREDSWKGASVQKSTGSKNDSWDNNNRSTGGSWNFGPQDSNDNKWGEGNKMTSGVSQGEWKQPTGSDELKIGEWSGPNQPNSSTGAWDNQKGHPLPENQGNAQAPCWGRSSSSTGSEVGGQSTGSNHKAGSSDSHNSGRRSYRPTHPDCQAVLQTLLSRTDLDPRVLSNTGWGQTQIKQDTVWDIEEVPRPEGKSDKGTEGWESAATQTKNSGGWGDAPSQSNQMKSGWGELSASTEWKDPKNTGGWNDYKNNNSSNWGGGRPDEKTPSSWNENPSKDQGWGGGRQPNQGWSSGKNGWGEEVDQTKNSNWESSASKPVSGWGEGGQNEIGTWGNGGNASLASKGGWEDCKRSPAWNETGRQPNSWNKQHQQQQPPQQPPPPQPEASGSWGGPPPPPPGNVRPSNSSWSSGPQPATPKDEEPSGWEEPSPQSISRKMDIDDGTSAWGDPNSYNYKNVNLWDKNSQGGPAPREPNLPTPMTSKSASVWSKSTPPAPDNGTSAWGEPNESSPGWGEMDDTGASTTGWGNTPANAPNAMKPNSKSMQDGWGESDGPVTGARHPSWEEEEDGGVWNTTGSQGSASSHNSASWGQGGKKQMKCSLKGGNNDSWMNPLAKQFSNMGLLSQTEDNPSSKMDLSVGSLSDKKFDVDKRAMNLGDFNDIMRKDRSGFRPPNSKDMGTTDSGPYFEKGGSHGLFGNSTAQSRGLHTPVQPLNSSPSLRAQVPPQFISPQVSASMLKQFPNSGLSPGLFNVGPQLSPQQIAMLSQLPQIPQFQLACQLLLQQQQQQQLLQNQRKISQAVRQQQEQQLARMVSALQQQQQQQQRQPGMKHSPSHPVGPKPHLDNMVPNALNVGLPDLQTKGPIPGYGSGFSSGGMDYGMVGGKEAGTESRFKQWTSMMEGLPSVATQEANMHKNGAIVAPGKTRGGSPYNQFDIIPGDTLGGHTGPAGDSWLPAKSPPTNKIGSKSSNASWPPEFQPGVPWKGIQNIDPESDPYVTPGSVLGGTATSPIVDTDHQLLRDNTTGSNSSLNTSLPSPGAWPYSASDNSFTNVHSTSAKFPDYKSTWSPDPIGHNPTHLSNKMWKNHISSRNTTPLPRPPPGLTNPKPSSPWSSTAPRSVRGWGTQDSRLASASTWSDGGSVRPSYWLVLHNLTPQIDGSTLRTICMQHGPLLTFHLNLTQGTALIRYSTKQEAAKAQTALHM

SEQ ID NO: 15563 - protein, 511 aa, Homo sapiens
MYCAYTIPGMGGNSLMYYYNGKAVYAPSASTADYNRDSPGYPSSKPATSTFPSSFFMQDGHHSSDPWSSSSGMNQPGYAGMLGNSSHIPQSSSYCSLHPHERLSYPSHSSADINSSLPPMSTFHRSGTNHYSTSSCTPPANGTDSIMANRGSGAAGSSQTGDALGKALASIYSPDHTNNSFSSNPSTPVGSPPSLSAGTAVWSRNGGQASSSPNYEGPLHSLQSRIEDRLERLDDAIHVLRNHAVGPSTAMPGGHGDMHGIIGPSHNGAMGGLGSGYGTGLLSANRHSLMVGTHREDGVALRGSHSLLPNQVPVPQLPVQSATSPDLNPPQDPYRGMPPGLQGQSVSSGSSEIKSDDEGDENLQDTKSSEDKKLDDDKKDIKSITRSRSSNNDDEDLTPEQKAEREKERRMANNARERLRVRDINEAFKELGRMVQLHLKSDKPQTKLLILHQAVAVILSLEQQVRERNLNPKAACLKRREEEKVSSEPPPLSLAGPHPGMGDASNHMGQM

SEQ ID NO: 15564 - protein, 379 aa, Homo sapiens
METEQPEETFPNTETNGEFGKRPAEDMEEEQAFKRSRNTDEMVELRILLQSKNAGAVIGKGGKNIKALRTDYNASVSVPDSSGPERILSISADIETIGEILKKIIPTLEEYQHYKGSDFDCELRLLIHQSLAGGIIGVKGAKIKELRENTQTTIKLFQECCPHSTDRVVLIGGKPDRVVECIKIILDLISESPIKGRAQPYDPNFYDETYDYGGFTMMFDDRRGRPVGFPMRGRGGFDRMPPGRGGRPMPPSRRDYDDMSPRRGPPPPPPGRGGRGGSRARNLPLPPPPPPRGGDLMAYDRRGRPGDRYDGMVGFSADETWDSAIDTWSPSEWQMAYEPQGGSGYDYSYAGGRGSYGDLGGPIITTQVTIPKDLAGSII

SEQ ID NO: 15565 - protein, 843 aa, Homo sapiens
FDVGSEKTRIGLAQYSGDPRIEWHLNAFSTKDEVIEAVRNLPYKGGNTLTGLALNYIFENSFKPEAGSRTGVSKIGILITDGKSQDDIIPPSRNLRESGVELFAIGVKNADVNELQEIASEPDSTHVYNVAEFDLMHTVVESLTRTLCSRVEEQDREIKASAHAITGPPTELITSEVTARSFMVNWTHAPGNVEKYRVVYYPTRGGKPDEVVVDGTVSSTVLKNLMSLTEYQIAVFAIYAHTASEGLRGTETTLALPMASDLLLYDVTENSMRVKWDAVPGASGYLILYAPLTEGLAGDEKEMKIGETHTDIELSGLLPNTEYTVTVYAMFGEEASDPVTGQETTLALSPPRNLRISNVGSNSARLTWDPTSRQINGYRIVYNNADGTEINEVEVDPITTFPLKGLTPLTEYTIAIFSIYDEGQSEPLTGVFTTEEVPAQQYLEIDEVTTDSFRVTWHPLSADEGLHKLMWIPVYGGKTEEVVLKEEQDSHVIEGLEPGTEYEVSLLAVLDDGSESEVVTAVGTTLDSFWTEPATTIVPTTSVTSVFQTGIRNLVVGDETTSSLRVKWDISDSDVQQFRVTYMTAQGDPEEEVIGTVMVPGSQNNLLLKPLLPDTEYKVTVTPIYTDGEGVSVSAPGKTLPSSGPQNLRVSEEWYNRLRITWDPPSSPVKGYRIVYKPVSVPGPTLETFVGADINTILITNLLSGMDYNVKIFASQASGFSDALTGMVKTLFLGVTNLQAKHVEMTSLCAHWQVHRHATAYRVVIESLQDRQKQESTVGGGTTRHCFYGLQPDSEYKISVYTKLQEIEGPSVSIMEKTQSLPTRPPTFPPTIPPAKEGKRIIE

SEQ ID NO: 15566 - protein, 636 aa, Homo sapiens
MFRKKKKKRPEISAPQNFQHRVHTSFDPKEGKFVGLPPQWQNILDTLRRPKPVVDPSRITRVQLQPMKTVVRGSAMPVDGYISGLLNDIQKLSVISSNTLRGRSPTSRRRAQSLGLLGDEHWATDPDMYLQSPQSERTDPHGLYLSCNGGTPAGHKQMPWPEPQSPRVLPNGLAAKAQSLGPAEFQGASQRCLQLGACLQSSPPGASPPTGTNRHGMKAAKHGSEEARPQSCLVGSATGRPGGEGSPSPKTRESSLKRRLFRSMFLSTAATAPPSSSKPGPPPQSKPNSSFRPPQKDNPPSLVAKAQSLPSDQPVGTFSPLTTSDTSSPQKSLRTAPATGQLPGRSSPAGSPRTWHAQISTSNLYLPQDPTVAKGALAGEDTGVVTHEQFKAALRMVVDQGDPRLLLDSYVKIGEGSTGIVCLAREKHSGRQVAVKMMDLRKQQRRELLFNEVVIMRDYQHFNVVEMYKSYLVGEELWVLMEFLQGGALTDIVSQVRLNEEQIATVCEAVLQALAYLHAQGVIHRDIKSDSILLTLDGRVKLSDFGFCAQISKDVPKRKSLVGTPYWMAPEVISRSLYATEVSPVLRDFLERMLVRDPQERATAQELLDHPFLLQTGLPECLVPLIQLYRKQTSTC

SEQ ID NO: 15567 - protein, 3507 aa, Homo sapiens
MGRRSQWIWAMRCQMLVPVLSLHIGLARALGCGCIASKIECLIRCNAPFPLLDAVGSVASQELQSLTGTVGVTSGAAAYPRWNLARARAPPHLPGTQDPLRRVRDPTPIVASSPGRRRGSWSGGYGQEASEPGVVGLCCAVLPIHPSLALAGVGGPDLRRFQEGPQRPSDHGAAEKHMETFIPIDLTTENQEMDKEETKTKPRLLRYEEKKYEDVKPLETQPAEIAEKETLEYKTVRTFSESLKSEKTEEPKDDDVIRNIIRLREKLGWQTILPQHSLKYGSSKIAIQKITLKKPLEDDGEFVYCLPRKSPKSLYNPYDLQVVSAHTAKHCKEFWVITASFISKLDSSRTYSLDEFCEEQLQQATQALKQLEDIRNKAISEMKSTFLKVAEKNEIKEYFESKLSEDDTTHFKLPKYRRLLETFFKFVMLVDYIFQELIRQLMNTAVTLLLELFNGSAGMPFSVEKKNENLIRTFKDNSFPTGKTTNDCEELVDNSKLHAISVQKSEVKTDTDINEILNSVEVGKDLRKTYAPIFEVNLCLRIPAESDSSENSKENFHESDQCPEECVMFEDEMSENKDNCVKKHSSEELLPKAKKSKEISYNLEDIISATITPLCQDPQLSIFIDLVSIMDLPNKTGSIIHYKEQTRWPDCHILFETDPAYQNIIVNLLTIIGNSMGLVNAYSHKFIKYCTMTEKAKIMSMKISSMGELTSKEFEAILNRFRNYFRHIVNMAIEKRIGIFNVVVESSLQQLECDPTEIEEFLEHFIFLNAISSKISKLEKEFLTMSQLYSVAKHHQIHISEEQIAIFQVLLLKFSQLKSSMKLSKINKDTAITKFRDNLEACISGLHVDVGNLKAKIRTPLLLCAGTQVSTAMEMIQTLSGEAASLTNKAKAYSHYQDCFSDSQSHMHSVNVEEITQIVLSEISDIEGDLTLRKKLWEAQEEWKRASWEWRNSSLQSIDVESVQRNVSKLMHIISVLEKEIYSIFIIPSIDDISAQLEESQVILATIKGSPHIGPIKSQIMFYNDCVKSFVSSYSREKLEKVHAGLMCHLEEVADLVVLDTSNSRTKAILGALLILYVHCRDIVINLLLKNIFNAEDFEWTRHLQYKWNEKQKLCYVSQGNASFTYGYEYLGCTSRLVITPLTDRCWLTLMEALHLNLGGCPAGPAGTGKTETVKDLAKCALFAFKCNTALIKLPNSLIVLTCFGLEKTVLVMNTVMSFRFVLEGKEIRINMSCAVFITMNPRYGGGVELPDNLKSLFRPVAMMVPHYQMIAEIILFSFGFKSANSLSGKLTNLYELARKQLSQQDHYNFGLRSLKIVLIMAGTKKREFKCDTSDSLSEADETLIVIEAIREASLPKCPPEDVPLFENIIGDIFPEVTVLKVNQLALEKVIYTATQQLGLQNWSSQKEKIIQFYNQLQVCVGVMLVGPTGGGKTTVRRILEKALTLLPIADFLSVAERKSASKISERKGKVDICVLNPKCVTLSELYGQLDPNTMEWTDGLLSATIRSYVYFNTPKNTKKDIDLRLKSRISDLSNVFKLDSSDTTETDDNIFEEIEKVVKIPENHNFDWQWIILDGPVDTFWVENLNSVLDDTRTLCLANSERIALTNKIRVIFEVDNLSQASPATVSRCAMVYMDPVDLGWEPYVKSWLLKTSKIISQSGVDCLEFMIKNSVTDGLQFIRNRQKFQPYPMEDITVVITLCRILDAFFDFMGKNGGFEQSDDLNDTSSKEANSQRESVTFKDIEKRDENTWYPEKNPDKLTKIIQKLFVFAFTWAFGGALNREDEHRENIPFCPSLEPDSLAKVTYDFDKLVHELFGNSSQVGINLPTGECSIFGYFVDIEQCEFIPWSDLVPNDQTLIQRDNPTKKPEVRTNKKLLKNNDHKGVVVSTINFSTNVTAAKTKEMILKKLIRRTKDTLGAPKNNRILIFIDDMNMPVSDMYGAQPPLELIRQLLDLGGVYDTEKNTWKNIQDLSIVAACVPVVNDISPRLLKHFSMLVLPHPSQDILCTIFQIGIDGCGKKTCATLACYLTDNKLYRVPISHKCAYIEFKEVFKKVFIHAGLKGKPTVLMVPNLNIEQDSFLEDLNYIISSGRIPDLFENVELDSIAMKIRYLTEQSGHMDNRQSLLSFFQKRIYKNLHIFVIMSPEGPSFRQNCRVYPSMISSCTIDWYERWPEEALLIVANSFLKEKVNFENRENLKEKLAPTCVQIHKSMKDLNRKYFEETGRFYYTTPNSYLQFMETFAHILRAREEEMQTKRDRFHMGLSTILEATTLVTEMQEELLILGPQVEQKTKETETLMEKLRKDSQVVEKVQMLVKQDEEIVAEEVRIVEDYAQKTANELKSVLPAFDKAIVALNALDKADVAELRVYTRPPFLVLTVMNAVCILLQKKPNWATAKLLLSETGFLKKLINLDKDSIPDKVFVKLKKIVTLPDFNPHKISLVSVACCSLCQWVIALNNYHEVQKVVGPKQIQVAEAQNVLKIARQRLAEKQRGLQLISRWHNQGLPHGQYSVENAILIKNGQQWPLLIDPHRQAHKWIRQMEGSRLQKLSIEDSNYTKKIENAMKTGGSVLLQSCQASTWRKKLYLSTEIDNPHFLPSVYNFVTMINFTVTFQGLQDQLLSTVVTHEVPHLEDQRSKLLESISLDAITLEELEEKTLNLLQKALGSILDDDKIVDTLRKSKMTSNEISKRIEATKKAESEIQAIRKNYLPIATRGALLYFLVADLTQINYMYQFSLDWFHQVFVSSVVSKSKEQEHSFKREKVSPKEVHEFISISKEPNLENEKNLLDKHIKSAIDMLTKSIFKVVSSALFNEDKLCFSFRLCTVIMQNNANGNLIQDDIGFLPEEEWNIFLYSGILINIKSALSQSRLTSTFEIGESQHLQWLSDSRWRQCQYVSTHLEPFSLLCKSLLSNVSQWDTFKNSKAVYSLISTPFSSENASLEENTKPPEEKHTFCLLLRAINHTGTDLGPVGRGQWLTSTACDRHTDVCSFSFALNDGVPDVEHVQDIFYGHCVDKYHVKVLRPESLNNSVRKFITEKMGNKYLQRTGVNLKDAYKGSNARTPLILIQTHGSASIKDYIHIIQSLPDDDLPEVLGIHPEAIRSCWETQGEKFIENLIAMQPKTTTANLMIRPEQSKDELVMEILSDLLKRLPLTVEKEEIAVGTPSTLKSMMSSSIWESLSKNLKDHDPLIHCVLLTFLKQEIKRFDKLLFVIHKSLKDLQLAIKGEIILTQELEEIFNSFLNMRVPTLWQKHAYRSCKPLSSWIDDLIQRLNFFNTWAKVAYTAIQRRYMRFVTVWKQSIPSTSQKCKHPEDSENNFFEGFPSRYWLPAFFFPQAFLAAVLQDYGRSRGIAVDALTFTHHVISNTTDKDEKFSVFMPKKLNIVRRAFKGSASSHTGVYIFGLFIEGARWNREQKILEDSLPLEMCCDFPDIYFLPTKISTKTPNASNQTDSELYAFECPVYQTPERSRILATTGLPTNFLTSVYLSTKKPPSHWITMRVALLCEKNEK

SEQ ID NO: 15568 - protein, 265 aa, Homo sapiens
MEKWILKKIKYLQSGGLSASYYSYKVDSFRERITSEAEDLVANFFPKKLLELDSFLKEPILNIHDLTQIHSDMNLPVPDPILLTNSHDGLDGPTYKKRRLDECEEAFQGTKVFVMPNGMLKSNQQLVDIIEKVKPEIRLLIEKCNTVKMWVQLLIPRIEDGNNFGVSIQEETVAELRTVESEAASYLDQISRYYITRAKLVSKIAKYPHVEDYRRTVTEIDEKEYISLRLIISELRNQYVTLHDMILKNIEKIKRPRSSNAETLY

SEQ ID NO: 15569 - protein, 7968 aa, Homo sapiens
MDQPQFSGAPRFLTRPKAFVVSVGKDATLSCQIVGNPTPQVSWEKDQQPVAAGARFRLAQDGDLYRLTILDLALGDSGQYVCRARNAIGEAFAAVGLQVDAEAACAEQAPHFLLRPTSIRVREGSEATFRCRVGGSPRPAVSWSKDGRRLGEPDGPRVRVEELGEASALRIRAARPRDGGTYEVRAENPLGAASAAAALVVDSDAADTASRPGTSTAALLAHLQRRREAMRAEGAPASPPSTGTRTCTVTEGKHARLSCYVTGEPKPETVWKKDGQLVTEGRRHVVYEDAQENFVLKILFCKQSDRGLYTCTASNLVGQTYSSVLVVVREPAVPFKKRLQDLEVREKESATFLCEVPQPSTEAAWFKEETRLWASAKYGIEEEGTERRLTVRNVSADDDAVYICETPEGSRTVAELAVQGNLLRKLPRKTAVRVGDTAMFCVELAVPVGPVHWLRNQEEVVAGGRVAISAEGTRHTLTISQCCLEDVGQVAFMAGDCQTSTQFCVSAPRKPPLQPPVDPVVKARMESSVILSWSPPPHGERPVTIDGYLVEKKKLGTYTWIRCHEAEWVATPELTVADVAEEGNFQFRVSALNSFGQSPYLEFPGTVHLAPKLAVRTPLKAVQAVEGGEVTFSVDLTVASAGEWFLDGQALKASSVYEIHCDRTRHTLTIREVPASLHGAQLKFVANGIESSIRMEVRAAPGLTANKPPAAAAREVLARLHEEAQLLAELSDQAAAVTWLKDGRTLSPGPKYEVQASAGRRVLLVRDVARDDAGLYECVSRGGRIAYQLSVQGLARFLHKDMAGSCVDAVAGGPAQFECETSEAHVHVHWYKDGMELGHSGERFLQEDVGTRHRLVAATVTRQDEGTYSCRVGEDSVDFRLRVSEPKVVFAKEQLARRKLQAEAGASATLSCEVAQAQTEVTWYKDGKKLSSSSKVCMEATGCTRRLVVQQAGQADAGEYSCEAGGQRLSFHLDVKEPKVVFAKDQVAHSEVQAEAGASATLSCEVAQAQTEVMWYKDGKKLSSSLKVHVEAKGCRRRLVVQQAGKTDAGDYSCEARGQRVSFRLHITEPKMMFAKEQSVHNEVQAEAGASAMLSCEVAQAQTEVTWYKDGKKLSSSSKVGMEVKGCTRRLVLPQAGKADAGEYSCEAGGQRVSFHLHITEPKGVFAKEQSVHNEVQAEAGTTAMLSCEVAQPQTEVTWYKDGKKLSSSSKVRMEVKGCTRRLVVQQVGKADAGEYSCEAGGQRVSFQLHITEPKAVFAKEQLVHNEVRTEAGASATLSCEVAQAQTEVTWYKDGKKLSSSSKVRIEAAGCMRQLVVQQAGQADAGEYTCEAGGQRLSFHLDVSEPKAVFAKEQLAHRKVQAEAGAIATLSCEVAQAQTEVTWYKDGKKLSSSSKVRMEAVGCTRRLVVQQACQADTGEYSCEAGGQRLSFSLDVAEPKVVFAKEQPVHREVQAQAGASTTLSCEVAQAQTEVMWYKDGKKLSFSSKVRMEAVGCTRRLVVQQAGQAVAGEYSCEAGSQRLSFHLHVAEPKAVFAKEQPASREVQAEAGTSATLSCEVAQAQTEVTWYKDGKKLSSSSKVRMEAVGCTRRLVVQEAGQADAGEYSCKAGDQRLSFHLHVAEPKVVFAKEQPAHREVQAEAGASATLSCEVAQAQTEVTWYKDGKKLSSSSKVRVEAVGCTRRLVVQQAGQAEAGEYSCEAGGQQLSFRLQVAELEPQISERPCRREPLVVKEHEDIILTATLATPSAATVTWLKDGVEIRRSKRHETASQGDTHTLTVHGAQVLDSAIYSCRVGAEGQDFPVQVEEVAAKFCRLLEPVCGELGGTVTLACELSPACAEVVWRCGNTQLRVGKRFQMVAEGPVRSLTVLGLRAEDAGEYVCESRDDHTSAQLTVSVPRVVKFMSGLSTVVAEEGGEATFQCVVSPSDVAVVWFRDGALLQPSEKFAISQSGASHSLTISDLVLEDAGQITVEAEGASSSAALRVREAPVLFKKKLEPQTVEERSSVTLEVELTRPWPELRWTRNATALAPGKNVEIHAEGARHRLVLHNVGFADRGFFGCETPDDKTQAKLTVEMRQVRLVRGLQAVEAREQGTATMEVQLSHADVDGSWTRDGLRFQQGPTCHLAVRGPMHTLTLSGLRPEDSGLMVFKAEGVHTSARLVVTELPVSFSRPLQDVVTTEKEKVTLECELSRPNVDVRWLKDGVELRAGKTMAIAAQGACRSLTIYRCEFADQGVYVCDAHDAQSSASVKVQGRTYTLIYRRVLAEDAGEIQFVAENAESRAQLRVKELPVTLVRPLRDKIAMEKHRGVLECQVSRASAQVRWFKGSQELQPGPKYELVSDGLYRKLIISDVHAEDEDTYTCDAGDVKTSAQFFVEEQSITIVRGLQDVTVMEPAPAWFECETSIPSVRPPKWLLGKTVLQAGGNVGLEQEGTVHRLMLRRTCSTMTGPVHFTVGKSRSSARLVVSDIPVVLTRPLEPKTGRELQSVVLSCDFRPAPKAVQWYKDDTPLSPSEKFKMSLEGQMAELRILRLMPADAGVYRCQAGSAHSSTEVTVEAREVTVTGPLQDAEATEEGWASFSCELSHEDEEVEWSLNGMPLYNDSFHEISHKGRRHTLVLKSIQRADAGIVRASSLKVSTSARLEVRVKPVVFLKALDDLSAEERGTLALQCEVSDPEAHVVWRKDGVQLGPSDKYDFLHTAGTRGLVVHDVSPEDAGLYTCHVGSEETRARVRVHDLHVGITKRLKTMEVLEGESCSFECVLSHESASDPAMWTVGGKTVGSSSRFQATRQGRKYILVVREAAPSDAGEVVFSVRGLTSKASLIVRERPAAIIKPLEDQWVAPGEDVELRCELSRAGTPVHWLKDRKAIRKSQKYDVVCEGTMAMLVIRGASLKDAGEYTCEVEASKSTASLHVEEKANCFTEELTNLQVEEKGTAVFTCKTEHPAATVTWRKGLLELRASGKHQPSQEGLTLRLTISALEKADSDTYTCDIGQAQSRAQLLVQGRRVHIIEDLEDVDVQEGSSATFRCRISPANYEPVHWFLDKTPLHANELNEIDAQPGGYHVLTLRQLALKDSGTIYFEAGDQRASAALRVTEKPSVFSRELTDATITEGEDLTLVCETSTCDIPVCWTKDGKTLRGSARCQLSHEGHRAQLLITGATLQDSGRYKCEAGGACSSSIVRVHARPVRFQEALKDLEVLEGGAATLRCVLSSVAAPVKWCYGNNVLRPGDKYSLRQEGAMLELVVRNLRPQDSGRYSCSFGDQTTSATLTVTALPAQFIGKLRNKEATEGATATLRCELSKAAPVEWRKGSETLRDGDRYCLRQDGAMCELQIRGLAMVDAAEYSCVCGEERTSASLTIRPMPAHFIGRLRHQESIEGATATLRCELSKAAPVEWRKGRESLRDGDRHSLRQDGAVCELQICGLAVADAGEYSCVCGEERTSATLTVKALPAKFTEGLRNEEAVEGATAMLWCELSKVAPVEWRKGPENLRDGDRYILRQEGTRCELQICGLAMADAGEYLCVCGQERTSATLTIRALPARFIEDVKNQEAREGATAVLQCELNSAAPVEWRKGSETLRDGDRYSLRQDGTKCELQIRGLAMADTGEYSCVCGQERTSAMLTVRALPIKFTEGLRNEEATEGATAVLRCELSKMAPVEWWKGHETLRDGDRHSLRQDGARCELQIRGLVAEDAGEYLCMCGKERTSAMLTVRAMPSKFIEGLRNEEATEGDTATLWCELSKAAPVEWRKGHETLRDGDRHSLRQDGSRCELQIRGLAVVDAGEYSCVCGQERTSATLTVRALPARFIEDVKNQEAREGATAVLQCELSKAAPVEWRKGSETLRGGDRYSLRQDGTRCELQIHGLSVADTGEYSCVCGQERTSATLTVRAPQPVFREPLQSLQAEEGSTATLQCELSEPTATVVWSKGGLQLQANGRREPRLQGCTAELVLQDLQREDTGEYTCTCGSQATSATLTVTAAPVRFLRELQHQEVDEGGTAHLCCELSRAGASVEWRKGSLQLFPCAKYQMVQDGAAAELLVRGVEQEDAGDYTCDTGHTQSMASLSVRVPRPKFKTRLQSLEQETGDIARLCCQLSDAESGAVVQWLKEGVELHAGPKYEMRSQGATRELLIHQLEAKDTGEYACVTGGQKTAASLRVTEPEVTIVRGLVDAEVTADEDVEFSCEVSRAGATGVQWCLQGLPLQSNEVTEVAVRDGRIHTLRLKGVTPEDAGTVSFHLGNHASSAQLTVRAPEVTILEPLQDVQLSEGQDASFQCRLSRASGQEARWALGGVPLQANEMNDITVEQGTLHLLTLHKVTLEDAGTVSFHVGTCSSEAQLKVTAKNTVVRGLENVEALEGGEALFECQLSQPEVAAHTWLLDDEPVHTSENAEVVFFENGLRHLLLLKNLRPQDSCRVTFLAGDMVTSAFLTVRGWRLEILEPLKNAAVRAGAQACFTCTLSEAVPVGEASWYINGAAVQPDDSDWTVTADGSHHALLLRSAQPHHAGEVTFACRDAVASARLTVLGLPDPPEDAEVVARSSHTVTLSWAAPMSDGGGGLCGYRVEVKEGATGQWRLCHELVPGPECVVDGLAPGETYRFRVAAVGPVGAGEPVHLPQTVRLAEPPKPVPPQPSAPESRQVAAGEDVSLELEVVAEAGEVIWHKGMERIQPGGRFEVVSQGRQQMLVIKGFTAEDQGEYHCGLAQGSICPAAATFQVALSPASVDEAPQPSLPPEAAQEGDLHLLWEALARKRRMSREPTLDSISELPEEDGRSQRLPQEAEEVAPDLSEGYSTADELARTGDADLSHTSSDDESRAGTPSLVTYLKKAGRPGTSPLASKVGAPAAPSVKPQQQQEPLAAVRPPLGDLSTKDLGDPSMDKAAVKIQAAFKGYKVRKEMKQQEGPMFSHTFGDTEAQVGDALRLECVVASKADVRARWLKDGVELTDGRHHHIDQLGDGTCSLLITGLDRADAGCYTCQVSNKFGQVTHSACVVVSGSESEAESSSGGELDDAFRRAARRLHRLFRTKSPAEVSDEELFLSADEGPAEPEEPADWQTYREDEHFICIRFEALTEARQAVTRFQEMFATLGIGVEIKLVEQGPRRVEMCISKETPAPVVPPEPLPSLLTSDAAPVFLTELQNQEVQDGYPVSFDCVVTGQPMPSVRWFKDGKLLEEDDHYMINEDQQGGHQLIITAVVPADMGVYRCLAENSMGVSSTKAELRVDLTSTDYDTAADATESSSYFSAQGYLSSREQEGTESTTDEGQLPQVVEELRDLQVAPGTRLAKFQLKVKGYPAPRLYWFKDGQPLTASAHIRMTDKKILHTLEIISVTREDSGQYAAYISNAMGAAYSSARLLVRGPDEPEEKPASDVHEQLVPPRMLERFTPKKVKKGSSITFSVKVEGRPVPTVHWLREEAERGVLWIGPDTPGYTVASSAQQHSLVLLDVGRQHQGTYTCIASNAAGQALCSASLHVSGLPKVEEQEKVKEALISTFLQGTTQAISAQGLETASFADLGGQRKEEPLAAKEALGHLSLAEVGTEEFLQKLTSQITEMVSAKITQAKLQVPGGDSDEDSKTPSASPRHGRSRPSSSIQESSSESEDGDARGEIFDIYVVTADYLPLGAEQDAITLREGQYVEVLDAAHPLRWLVRTKPTKSSPSRQGWVSPAYLDRRLKLSPEWGAAEAPEFPGEAVSEDEYKARLSSVIQELLSSEQAFVEELQFLQSHHLQHLERCPHVPIAVAGQKAVIFRNVRDIGRFHSSFLQELQQCDTDDDVAMCFIKNQAAFEQYLEFLVGRVQAESVVVSTAIQEFYKKYAEEALLAGDPSQPPPPPLQHYLEQPVERVQRYQALLKELIRNKARNRQNCALLEQAYAVVSALPQRAENKLHVSLMENYPGTLQALGEPIRQGHFIVWEGAPGARMPWKGHNRHVFLFRNHLVICKPRRDSRTDTVSYVFRNMMKLSSIDLNDQVEGDDRAFEVWQEREDSVRKYLLQARTAIIKSSWVKEICGIQQRLALPVWRPPDFEEELADCTAELGETVKLACRVTGTPKPVISWYKDGKAVQVDPHHILIEDPDGSCALILDSLTGVDSGQYMCFAASAAGNCSTLGKILVQVPPRFVNKVRASPFVEGEDAQFTCTIEGAPYPQIRWYKDGALLTTGNKFQTLSEPRSGLLVLVIRAASKEDLGLYECELVNRLGSARASAELRIQSPMLQAQEQCHREQLVAAVEDTTLERADQEVTSVLKRLLGPKAPGPSTGDLTGPGPCPRGAPALQETGSQPPVTGTSEAPAVPPRVPQPLLHEGPEQEPEAIARAQEWTVPIRMEGAAWPGAGTGELLWDVHSHVVRETTQRTYTYQAIDTHTARPPSMQVTIEDVQAQTGGTAQFEAIIEGDPQPSVTWYKDSVQLVDSTRLSQQQEGTTYSLVLRHVASKDAGVYTCLAQNTGGQVLCKAELLVLGGDNEPDSEKQSHRRKLHSFYEVKEEIGRGVFGFVKRVQHKGNKILCAAKFIPLRSRTRAQAYRERDILAALSHPLVTGLLDQFETRKTLILILELCSSEELLDRLYRKGVVTEAEVKVYIQQLVEGLHYLHSHGVLHLDIKPSNILMVHPAREDIKICDFGFAQNITPAELQFSQYGSPEFVSPEIIQQNPVSEASDIWAMGVISYLSLTCSSPFAGESDRATLLNVLEGRVSWSSPMAAHLSEDAKDFIKATLQRAPQARPSAAQCLSHPWFLKSMPAEEAHFINTKQLKFLLARSRWQRSLMSYKSILVMRSIPELLRGPPDSPSLGVARHLCRDTGGSSSSSSSSDNELAPFARAKSLPPSPVTHSPLLHPRGFLRPSASLPEEAEASERSTEAPAPPASPEGAGPPAAQGCVPRHSVIRSLFYHQAGESPEHGALAPGSRRHPARRRHLLKGGYIAGALPGLREPLMEHRVLEEEAAREEQATLLAKAPSFETALRLPASGTHLAPGHSHSLEHDSPSTPRPSSEACGEAQRLPSAPSGGAPIRDMGHPQGSKQLPSTGGHPGTAQPERPSPDSPWGQPAPFCHPKQGSAPQEGCSPHPAVAPCPPGSFPPGSCKEAPLVPSSPFLGQPQAPPAPAKASPPLDSKMGPGDISLPGRPKPGPCSSPGSASQASSSQVSSLRVGSSQVGTEPGPSLDAEGWTQEAEDLSDSTPTLQRPQEQATMRKFSLGGRGGYAGVAGYGTFAFGGDAGGMLGQGPMWARIAWAVSQSEEEEQEEARAESQSEEQQEARAESPLPQVSARPVPEVGRAPTRSSPEPTPWEDIGQVSLVQIRDLSGDAEAADTISLDISEVDPAYLNLSDLYDIKYLPFEFMIFRKVPKSAQPEPPSPMAEEELAEFPEPTWPWPGELGPHAGLEITEESEDVDALLAEAAVGRKRKWSSPSRSLFHFPGRHLPLDEPAELGLRERVKASVEHISRILKGRPEGLEKEGPPRKKPGLASFRLSGLKSWDRAPTFLRELSDETVVLGQSVTLACQVSAQPAAQATWSKDGAPLESSSRVLISATLKNFQLLTILVVVAEDLGVYTCSVSNALGTVTTTGVLRKAERPSSSPCPDIGEVYADGVLLVWKPVESYGPVTYIVQCSLEGGSWTTLASDIFDCCYLTSKLSRGGTYTFRTACVSKAGMGPYSSPSEQVLLGGPSHLASEEESQGRSAQPLPSTKTFAFQTQIQRGRFSVVRQCWEKASGRALAAKIIPYHPKDKTAVLREYEALKGLRHPHLAQLHAAYLSPRHLVLILELCSGPELLPCLAERASYSESEVKDYLWQMLSATQYLHNQHILHLDLRSENMIITEYNLLKVVDLGNAQSLSQEKVLPSDKFKDYLETMAPELLEGQGAVPQTDIWAIGVTAFIMLSAEYPVSSEGARDLQRGLRKGLVRLSRCYAGLSGGAVAFLRSTLCAQPWGRPCASSCLQCPWLTEEGPACSRPAPVTFPTARLRVFVRNREKRRALLYKRHNLAQVR

SEQ ID NO: 15570 - protein, 890 aa, Homo sapiens
MHLRAHRTRRGKVSPTAKTKSLLHFIVLCVAGVVVHAQEQGIDILHQLGLGGKDVRHSSPATAVPSASTPLPQGVHLTESGVIFKNDAYIETPFVKILPVNLGQPFTILTGLQSHRVNNAFLFSIRNKNRLQLGVQLLPKKLVVHIRGKQPAVFNYSVHDEQWHSFAITIRNQSVSMFVECGKKYFSTETIPEVQTFDSNSVFTLGSMNNNSIHFEGIVCQLDIIPSAEASADYCRYVKQQCRQADKYQPETSIPCTTLIPTKIPEHSPPPKLFAEKVLSEDTFTEGKSIPNIIKNDSETVYKRQEHQISRSQLSSLQSGNVSAVDLTNHGIQAKEMITEEDTQTNFSLSVTTHRISEAKMNTKEKFSSLLNMSDNITQHDDRVTGLSLFKKMPSILPQIKQDTITNLKKAITANLHTNELMEMQPILNTSLHRVTNEPSVDNHLDLRKEGEFYPDATYPIENSYETELYDYYYYEDLNTMLEMEYLRGPKGDTGPPGPPGPAGIPGPSGKRGPRGIPGPHGNPGLPGLPGPKGPKGDPGFSPGQPVPGEKGDQGLSGLMGPPGMQGDKGLKGHPGLPGLPGEQGIPGFAGNIGSPGYPGRQGLAGPEGNPGPKGAQGFIGSPGEAGQLGPEGERGIPGIRGKKGFKGRQGFPGDFGDRGPAGLDGSPGLVGGTGPPGFPGLRGSVGPVGPIGPAGIPGPMGLSGNKGLPGIKGDKGEQGTAGELGEPGYPGDKGAVGLPGPPGMRGKSGPSGQTGDPGLQGPSGPPGPEGFPGDIGIPGQNGPEGPKGLLGNRGPPGPPGLKGTQGEEGPIGAFGELGPRGKPGQKGYAGEPGPEGLKGEVGDQGNIGKIGETMESCSVTQAGAQWHDLGSLHPLPPGFKRFSCLSLPG

SEQ ID NO: 15571 - protein, 525 aa, Homo sapiens
MRRSEVLAEESIVCLQKALNHLREIWELIGIPEDQRLQRTEVVKKHIKEEGETTILQLEKDLRTQVELMRKQKKERKQELKLLQEQDQELCEILCMPHYDIDSASVPSLEELNQFRQHVTTLRETKASRREEFVSIKRQIILCMEALDHTPDTSFERDVVCEDEDAFCLSLENIATLQKLLRQLEMQKSQNEAVCEGLRTQIRELWDRLQIPEEEREAVATIMSGSKAKVRKALQLEVDRLEELKMQNMKKVIEAIRVELVQYWDQCFYSQEQRQAFAPFCAEDYTESLLQLHDAEIVRLKNYYEVHKELFEGVQKWEETWRLFLEFERKASDPNRFTNRGGNLLKEEKQRAKLQKMLPKLEEELKARIELWEQEHSKAFMVNGQKFMEYVAEQWEMHRLEKERAKQERQLKNKKQTETEMLYGSAPRTPSKRRGLAPNTPGKARKLNTTTMSNATANSSIRPIFGGTVYHSPVSRLPPSGSKPVAASTCSGKKTPRTGRHGANKENLELNGSILSARTFKGFQI

SEQ ID NO: 15572 - protein, 391 aa, Homo sapiens
MESETEPEPVTLLVKSPNQRHRDLELSGDRGWSVGHLKAHLSRVYPERPRPEDQRLIYSGKLLLDHQCLRDLLPKQEKRHVLHLVCNVKSPSKMPEINAKVAESTEEPAGSNRGQYPEDSSSDGLRQREVLRNLSSPGWENISRPEAAQQAFQGLGPGFSGYTPYGWLQLSWFQQIYARQYYMQYLAATAASGAFVPPPSAQEIPVVSAPAPAPIHNQFPAENQPANQNAAPQVVVNPGANQNLRMNAQGGPIVEEDDEINRDWLDWTYSAATFSVFLSILYFYSSLSRFLMVMGATVVMYLHHVGWFPFRPRPVQNFPNDGPPPDVVNQDPNNNLQEGTDPETEDPNHLPPDRDVLDGEQTSPSFMSTAWLVFKTFFASLLPEGPPAIAN

SEQ ID NO: 15573 - protein, 483 aa, Homo sapiens
MPTVDDILEQVGESGWFQKQAFLILCLLSAAFAPICVGIVFLGFTPDHHCQSPGVAELSQRCGWSPAEELNYTVPGLGPAGEAFLGQCRRYEVDWNQSALSCVDPLASLATNRSHLPLGPCQDGWVYDTPGSSIVTEFNLVCADSWKLDLFQSCLNAGFLFGSLGVGYFADRFGRKLCLLGTVLVNAVSGVLMAFSPNYMSMLLFRLLQGLVSKGNWMAGYTLITEFVGSGSRRTVAIMYQMAFTVGLVALTGLAYALPHWRWLQLAVSLPTFLFLLYYWCVPESPRWLLSQKRNTEAIKIMDHIAQKNGKLPPADLKMLSLEEDVTEKLSPSFADLFRTPRLRKRTFILMYLWFTDSVLYQGLILHMGATSGNLYLDFLYSALVEIPGAFIALITIDRVGRIYPMAMSNLLAGAACLVMIFISPDLHWLNIIIMCVGRMGITIAIQMICLVNAELYPTFVRKAKPKENTIYLKVQTSEPSGT

SEQ ID NO: 15574 - protein, 806 aa, Homo sapiens
NGGGGSATARGGEYRLPGEGNAGLLGLGPEAAAPGKRIRKPSLLYEGFESPTMASVPALQLTPANPPPPEVSNPKKPGRVTNQLQYLHKVVMKALWKHQFAWPFRQPVDAVKLGLPDYHKIIKQPMDMGTIKRRLENNYYWAASECMQDFNTMFTNCYIYNKPTDDIVLMAQTLEKIFLQKVASMPQEEQELVVTIPKNSHKKGAKLAALQGSVTSAHQVPAVSSVSHTALYTPPPEIPTTVLNIPHPSVISSPLLKSLHSAGPPLLAVTAAPPAQPLAKKKGVKRKADTTTPTPTAILAPGSPASPPGSLEPKAARLPPMRRESGRPIKPPRKDLPDSQQQHQSSKKGKLSEQLKHCNGILKELLSKKHAAYAWPFYKPVDASALGLHDYHDIIKHPMDLSTVKRKMENRDYRDAQEFAADVRLMFSNCYKYNPPDHDVVAMARKLQDVFEFRYAKMPDEPLEPGPLPVSTAMPPGLAKSSSESSSEESSSESSSEEEEEEDEEDEEEEESESSDSEEERAHRLAELQEQLRAVHEQLAALSQGPISKPKRKREKKEKKKKRKAEKHRGRAGADEDDKGPRAPRPPQPKKSKKASGSGGGSAALGPSGFGPSGGSGTKLPKKATKTAPPALPTGYDSEEEEESRPMSYDEKRQLSLDINKLPGEKLGRVVHIIQAREPSLRDSNPEEIEIDFETLKPSTLRELERYVLSCLRKKPRKPYTIKKPVGKTKEELALEKKRELEKRLQDVSGQLNSTKKPPKKANEKTESSSAQQVAVSRLSASSSSSDSSSSSSSSSSSDTSDSDSG

SEQ ID NO: 15575 - protein, 183 aa, Homo sapiens
MGTPKEKNEAISKKIPEFEVENSPLSDVAKNTESSAFGGSLPAKKSDPFQKEQDHLVEEVARAVLSDSPQLSEGKEIKLEELIDSLGSNPFLTRNQIPRTPENLITEIRSSWRKAIEMEENRTKEPIQMDAEHREVLPESLPVLHNQREFSMADFLLETTVSDFGQSHLTEEKVISDCECVPQ

SEQ ID NO: 15576 - protein, 242 aa, Homo sapiens
VLRVLSPDLVRRLLNLAVRAFQVPKGESLNFPESTPGYGHTVPLSDGGKAFCIIYSVIGIPFTLLFLTAVVQRITVHVTRRPVLYFHIRWGFSKQVVAIVHAVLLGFVTVSCFFFIPAAVFSVLEDDWNFLESFYFCFISLSTIGLGDYVPGEGYNQKFRELYKIGITCYLLLGLIAMLVVLETFCELHELKKFRKMFYVKKDKDEDQVHIIEHDQLSFSSITDQAAGMKEDQKQNEPFVAT

SEQ ID NO: 15577 - protein, 468 aa, Homo sapiens
MAQLRRGHLTFRDVAIEFSQEEWKCLDPVQKALYRDVMLENYRNLVSLGICLPDLSIISMMKQRTEPWTVENEMKVAKNPDRWEGIKDINTGRSCAVRSKAGNKPITNQLGLTFQLPLPELEIFQGEGKIYECNQVQKFISHSSSVSPLQRIYSGVKTHIFNKHRNDFVDFPLLSQEQKAHIRRKPYECNEQGKVFRVSSSLPNHQVIHTADKPNRCHECGKTVRDKSGLAEHWRIRTGEKPYKCKECGKLFNRIAYLARHEKVHTGESPYKCNECGKVFSRITYLVRHQKIHTREKPHKCNKCGKVYSSSSYLAQHWRIHTGEKLYKCNKCGKEFSGHSSLTTHLLIHTGEKPYKCKECDKAFRHKFSLTVHQRNHNGEKPYKCHECGKVFTQVSHLARHQKIHTGEKPYKCNECGKVFTQNSHLANHQRIHTGEKPYKCHVCGKVFRHSSWFVQHQRSVHERVLTN

SEQ ID NO: 15578 - protein, 857 aa, Homo sapiens
MTLQELVHKAASCYMDRVAVCFDECNNQLPVYYTYKTVVNAASELSNFLLLHCDFQGIREIGLYCQPGIDLPSWILGILQVPAAYVPIEPDSPPSLSTHFMKKCNLKYILVEKKQINKFKSFHETLLNYDTFTVEHNDLVLFRLHWKNTEVNLMLNDGKEKYEKEKIKSISSEHVNEEKAEEHMDLRLKHCLAYVLHTSGTTGIPKIVRVPHKCIVPNIQHFRVLFDITQEDVLFLASPLTFDPSVVEIFLALSSGASLLIVPTSVKLLPSKLASVLFSHHRVTVLQATPTLLRRFGSQLIKSTVLSATTSLRVLALGGEAFPSLTVLRSWRGEGNKTQIFNVYGITEVSSWATIYRIPEKTLNSTLKCELPVQLGFPLLGTVVEVRDTNGFTIQEGSGQVFLGGRNRVCFLDDEVTVPLGTMRATGDFVTVKDGEIFFLGRKDSQIKRHGKRLNIELVQQVAEELQQVESCAVTWYNQEKLILFMVSKDASVKEYIFKELQKYLPSHAVPDELVLIDSLPFTSHGKIDVSELNKIYLNYINLKSENKLSGKEDLWEKLQYLWKSTLNLPEDLLRVPDESLFLNSGGDSLKSIRLLSEIEKLVGTSVPGLLEIILSSSILEIYNHILQTVVPDEDVTFRKSCATKRKLSDINQEEASGTSLHQKAIMTFTCHNEINAFVVLSRGSQILSLNSTRFLTKLGHCSSACPSDSVSQTNIQNLKGLNSPVLIGKSKDPSCVAKVSEEGKPAIGTQKMELHVRWRSDTGKCVDASPLVVIPTFDKSSTTVYIGSHSHRMKAVDFYSGKVKWEQILGDRIESSACVSKCGNFIVVGLAVLYQWTNLFIPVYLTIRAKNIFWFP

SEQ ID NO: 15579 - protein, 1181 aa, Homo sapiens
MEHFLLEVAAAPLRLIAAKNEKSRSELGRFLAKQVWTPQDRQCVLSTLAQLLLDKDCTVLVGRQLRPLLLDLLERNAEAIKAGGQINHDLHERLCVSMSKLIGNHPDVLPFALRYFKDTSPVFQRLFLESSDANPVRYGRRRMKLRDLMEAAFKFLQQEQSVFRELWDWSVCVPLLRSHDTLVRWYTANCLALVTCMNEEHKLSFLKKIFNSDELIHFRLRLLEEAQLQDLEKALVLANPEVSLWRKQKELQYLQGHLVSSDLSPRVTAVCGVVLPGQLPAPGELGGNRSSSREQELALRSYVLVESVCKSLQTLAMAVASQNAVLLEGPIGCGKTSLVEYLAAVTGRTKPPQLLKVQLGDQTDSKMLLGMYRCTDVPGEFVWQPGTLTQAATMGHWILLEDIDYAPLDVVLQSRYPSLLAVVDHLLDIYIQLTGEKHHSWSDSSVGCEQAPEEVSEARRENKRPTLEGRELSLRDLLNWCNRIAHSFDSSSLSASLNIFQEALDCFTAMLSEHTSKLKMAEVIGSKLNISRKKAEFFCQLYKPEIVINELDLQVGRVRLLRKQSEAVHLQREKFTFAATRPSSVLIEQLAVCVSKGEPVLLVGETGTGKTSTIQYLAHITGHRLRVVNMNQQSDTADLLGGYKPVDHKLIWLPLREAFEELFAQTFSKKQNFTFLGHIQTCYRQKRWHDLLRLMQHVHKSAVNKDGKDSETGLLIKEKWEAFGLRLNHAQQQMKMTENTLLFAFVEGTLAQAVKKGEWILLDEINLAAPEILECLSGLLEGSSGSLVLLDRGDTEPLVRHPDFRLFACMNPATDVGKRNLPPGIRNRFTELYVEELESKEDLQVLIVDYLKGLSVNKNTVQGIINFYTALRKESGTKLVDGTGHRPHYSLRTLCRALRFAASNPCGNIQRSLYEGFCLGFLTQLDRASHPIVQKLICQHIVPGNVKSLLKQPIPEPKGGRLIQVEGYWIAVGDKEPTIDETYILTSSVKLNLRDIVRVVSAGTYPVLIQGETSVGKTSLIQWLAAATGNHCVRINNHEHTDIQEYIGCYTSDSSGKLVFKEGVLIDAMRKGYWIILDELNLAPTDVLEALNRLLDDNRELLVTETQEVVKAHPRFMLFATQNPPGLYGGRKVLSRAFRNRFVELHFDELPSSELETILHKRCSLPPSYCSKLVKVMLDLQ

SEQ ID NO: 15580 - protein, 1612 aa, Homo sapiens
MRKRWACWSGSDAPGGCGGGCGRRRRRSRRKRAASEERRMAFSKGFRIYHKLDPPPFSLIVETRHKEECLMFESGAVAVLSSAEKEAIKGTYSKVLDAYGLLGVLRLNLGDTMLHYLVLVTGCMSVGKIQESEVFRVTSTEFISLRIDSSDEDRISEVRKVLNSGNFYFAWSASGISLDLSLNAHRSMQEQTTDNRFFWNQSLHLHLKHYGVNCDDWLLRLMCGGVEIRTIYAAHKQAKACLISRLSCERAGTRFNVRGTNDDGHVANFVETEQVVYLDDSVSSFIQIRGSVPLFWEQPGLQVGSHRVRMSRGFEANAPAFDRHFRTLKNLYGKQIIVNLLGSKEGEHMLSKAFQSHLKASEHAADIQMVNFDYHQMVKGGKAEKLHSVLKPQVQKFLDYGFFYFNGSEVQRCQSGTVRTNCLDCLDRTNSVQAFLGLEMLAKQLEALGLAEKPQLVTRFQEVFRSMWSVNGDSISKIYAGTGALEGKAKLKDGARSVTRTIQNNFFDSSKQEAIDVLLLGNTLNSDLADKARALLTTGSLRVSEQTLQSASSKVLKSMCENFYKYSKPKKIRVCVGTWNVNGGKQFRSIAFKNQTLTDWLLDAPKLAGIQEFQDKRSKPTDIFAIGFEEMVELNAGNIVSASTTNQKLWAVELQKTISRDNKYVLLASEQLVGVCLFVFIRPQHAPFIRDVAVDTVKTGMGGATGNKGAVAIRMLFHTTSLCFVCSHFAAGQSQVKERNEDFIEIARKLSFPMGRMLFSHDYVFWCGDFNYRIDLPNEEVKELIRQQNWDSLIAGDQLINQKNAGQVFRGFLEGKVTFAPTYKYDLFSDDYDTSEKCRTPAWTDRVLWRRRKWPFDRSAEDLDLLNASFQDESKILYTWTPGTLLHYGRAELKTSDHRPVVALIDIDIFEVEAEERQNIYKEVIAVQGPPDGTVLVSIKSSLPENNFFDDALIDELLQQFASFGEVILIRFVEDKMWVTFLEGSSALNVLSLNGKELLNRTITIALKSPDWIKNLEEEMSLEKISIALPSSTSSTLLGEDAEVAADFDMEGDVDDYSAEVEELLPQHLQPSSSSGLGTSPSSSPRTSPCQSPTISEGPVPSLPIRPSRAPSRTPGPPSAQSSPIDAQPATPLPQKDPAQPLEPKRPPPPRPVAPPTRPAPPQRPPPPSGARSPAPTRKEFGGIGAPPSPGVARREMEAPKSPGTTRKDNIGRSQPSPQAGLAGPGPAGYSTARPTIPPRAGVISAPQSHARASAGRLTPESQSKTSETSKGSTFLPEPLKPQAAFPPQSSLPPPAQRLQEPLVPVAAPMPQSGPQPNLETPPQPPPRSRSSHSLPSEASSQPQVKTNGISDGKRESPLKIDPFEDLSFNLLAVSKAQLSVQTSPVPTPDPKRLIQLPSATQSNVLSSVSCMPTMPPIPARSQSQENMRSSPNPFITGLTRTNPFSDRTAAPGNPFRAKSEESEATSWFSKEEPVTISPFPSLQPLGHNKSRASSSLDGFKDSFDLQGQSTLKISNPKGWVTFEEEEDFGVKGKSKSACSDLLGNQPSSFSGSNLTLNDDWNKGTNVSFCVLPSRRPPPPPVPLLPPGTSPPVDPFTTLASKASPTLDFTER

SEQ ID NO: 15581 - protein, 1170 aa, Homo sapiens
VYKGRHVKTGQLAAIKVMDVTEDEEEEIKLEINMLKKYSHHRNIATYYGAFIKKSPPGHDDQLWLVMEFCGAGSITDLVKNTKGNTLKEDWIAYISREILRGLAHLHIHHVIHRDIKGQNVLLTENAEVKLVDFGVSAQLDRTVGRRNTFIGTPYWMAPEVIACDENPDATYDYRSDLWSCGITAIEMAEGAPPLCDMHPMRALFLIPRNPPPRLKSKKWSKKFFSFIEGCLVKNYMQRPSTEQLLKHPFIRDQPNERQVRIQLKDHIDRTRKKRGEKDETEYEYSGSEEEEEEVPEQEGEPSSIVNVPGESTLRRDFLRLQQENKERSEALRRQQLLQEQQLREQEEYKRQLLAERQKRIEQQKEQRRRLEEQQRREREARRQQEREQRRREQEEKRRLEELERRRKEEEERRRAEEEKRRVEREQEYIRRQLEEEQRHLEVLQQQLLQEQAMLLHDHRRPHPQHSQQPPPPQQERSKPSFHAPEPKAHYEPADRAREVEDRFRKTNHSSPEAQSKQTGRVLEPPVPSRSESFSNGNSESVHPALQRPAEPQVPVRTTSRSPVLSRRDSPLQGSGQQNSQAGQRNSTSIEPRLLWERVEKLVPRPGSGSSSGSSNSGSQPGSHPGSQSGSGERFRVRSSSKSEGSPSQRLENAVKKPEDKKEVFRPLKPADLTALAKELRAVEDVRPPHKVTDYSSSSEESGTTDEEDDDVEQEGADESTSGPEDTRAASSLNLSNGETESVKTMIVHDDVESEPAMTPSKEGTLIVRQTQSASSTLQKHKSSSSFTPFIDPRLLQISPSSGTTVTSVVGFSCDGMRPEAIRQDPTRKGSVVNVNPTNTRPQSDTPEIRKYKKRFNSEILCAALWGVNLLVGTESGLMLLDRSGQGKVYPLINRRRFQQMDVLEGLNVLVTISGKKDKLRVYYLSWLRNKILHNDPEVEKKQGWTTVGDLEGCVHYKVVKYERIKFLVIALKSSVEVYAWAPKPYHKFMAFKSFGELVHKPLLVDLTVEEGQRLKVIYGSCAGFHAVDVDSGSVYDIYLPTHIQCSIKPHAIIILPNTDGMELLVCYEDEGVYVNTYGRITKDVVLQWGEMPTSVAYIRSNQTMGWGEKAIEIRSVETGHLDGVFMHKRAQRLKFLCERNDKVFFASVRSGGSSQVYFMTLGRTSLLSW

SEQ ID NO: 15582 - protein, 539 aa, Homo sapiens
MKPAAREARLPPRSPGLRWALPLLLLLLRLGQILCAGGTPSPIPDPSVATVATGENGITQISSTAESFHKQNGTGTPQVETNTSEDGESSGANDSLRTPEQGSNGTDGASQKTPSSTGPSPVFDIKAVSISPTNVILTWKSNDTAASEYKYVVKHKMENEKTITVVHQPWCNITGLRPATSYVFSITPGIGNETWGDPRVIKVITEPIPVSDLRVALTGVRKAALSWSNGNGTASCRVLLESIGSHEELTQDSRLQVNISGLKPGVQYNINPYLLQSNKTKGDPLGTEGGLDASNTERSRAGSPTAPVHDESLVGPVDPSSGQQSRDTEVLLVGLEPGTRYNATVYSQAANGTEGQPQAIEFRTNAIQVFDVTAVNISATSLTLIWKVSDNESSSNYTYKIHVAGETDSSNLNVSEPRAVIPGLRSSTFYNITVCPVLGDIEGTPGFLQVHTPPVPVSDFRVTVVSTTEIGLAWSSHDAESFQMHITQEGAGNSRVEITTNQSIIIGGLFPGTKYCFEIVPKGPNGTEGASRTVCNRTG

SEQ ID NO: 15583 - protein, 632 aa, Homo sapiens
MAANVGSMFQYWKRFDLQQLQRELDATATVLANRQDESEQSRKRLIEQSREFKKNTPEDLRKQVAPLLKSFQGEIDALSKRSKEAEAAFLNVYKRLIDVPEVTIKALKEKIREYEQTLKNQAETIALEKEQKLQNDFAEKERKLQETQMSTTSKLEEAEHKVQSLQTALEKTRTELFDLKTKYDEETTAKADEIEMIMTDLERANQRAEVAQREAETLREQLSSANHSLQLASQIQKAPDVEQAIEVLTRSSLEVELAAKEREIAQLVEDVQRLQASLTKLRENSASQISQLEQQLSAKNSTLKQLEEKLKGQADYEEVKKELNILKSMEFAPSEGAGTQDAAKPLEVLLLEKNRSLQSENAALRISNSDLSGRCAELQVRITEAVATATEQRELIARLEQDLSIIQSIQRPDAEGAAEHRLEKIPEPIKEATALFYGPAAPASGALPEGQVDSLLSIISSQRERFRARNQELEAENRLAQHTLQALQSELDSLRADNIKLFEKIKFLQSYPGRGSGSDDTELRYSSQYEERLDPFSSFSKRERQRKYLSLSPWDKATLSMGRLVLSNKMARTIGFFYTLFLHCLVFLVLYKLAWSESMERDCATFCAKKFADHLHKFHENDNGAAAGDLWQ

SEQ ID NO: 15584 - protein, 2243 aa, Homo sapiens
MDEEEDGAGAEESGQPRSFMRLNDLSGAGGRPGPGSAEKDPGSADSEAEGLPYPALAPVVFFYLSQDSRPRSWCLRTVCNPWFERISMLVILLNCVTLGMFRPCEDIACDSQRCRILQAFDDFIFAFFAVEMVVKMVALGIFGKKCYLGDTWNRLDFFIVIAGMLEYSLDLQNVSFSAVRTVRVLRPLRAINRVPSMRILVTLLLDTLPMLGNVLLLCFFVFFIFGIVGVQLWAGLLRNRCFLPENFSLPLSVDLERYYQTENEDESPFICSQPRENGMRSCRSVPTLRGDGGGGPPCGLDYEAYNSSSNTTCVNWNQYYTNCSAGEHNPFKGAINFDNIGYAWIAIFQVITLEGWVDIMYFVMDAHSFYNFIYFILLIIVGSFFMINLCLVVIATQFSETKQRESQLMREQRVRFLSNASTLASFSEPGSCYEELLKYLVYILRKAARRLAQVSRAAGVRVGLLSSPAPLGGQETQPSSSCSRSHRRLSVHHLVHHHHHHHHHYHLGNGTLRAPRASPEIQDRDANGSRRLMLPPPSTPALSGAPPGGAESVHSFYHADCHLEPVRCQAPPPRSPSEASGRTVGSGKVYPTVHTSPPPETLKEKALVEVAASSGPPTLTSLNIPPGPYSSMHKLLETQSTGACQSSCKISSPCLKADSGACGPDSCPYCARAGAGEVELADREMPDSDSEAVYEFTQDAQHSDLRDPHSRRQRSLGPDAEPSSVLAFWRLICDTFRKIVDSKYFGRGIMIAILVNTLSMGIEYHEQPEELTNALEISNIVFTSLFALEMLLKLLVYGPFGYIKNPYNIFDGVIVVISVWEIVGQQGGGLSVLRTFRLMRVLKLVRFLPALQRQLVVLMKTMDNVATFCMLLMLFIFIFSILGMHLFGCKFASERDGDTLPDRKNFDSLLWAIVTVFQILTQEDWNKVLYNGMASTSSWAALYFIALMTFGNYVLFNLLVAILVEGFQAEGDANKSESEPDFFSPSLDGDGDRKKCLALVSLGEHPELRKSLLPPLIIHTAATPMSLPKSTSTGLGEALGPASRRTSSSGSAEPGAAHEMKSPPSARSSPHSPWSAASSWTSRRSSRNSLGRAPSLKRRSPSGERRSLLSGEGQESQDEEESSEEERASPAGSDHRHRGSLEREAKSSFDLPDTLQVPGLHRTASGRGSASEHQDCNGKSASGRLARALRPDDPPLDGDDADDEGNLSKGERVRAWIRARLPACCLERDSWSAYIFPPQSRFRLLCHRIITHKMFDHVVLVIIFLNCITIAMERPKIDPHSAERIFLTLSNYIFTAVFLAEMTVKVVALGWCFGEQAYLRSSWNVLDGLLVLISVIDILVSMVSDSGTKILGMLRVLRLLRTLRPLRVISRAQGLKLVVETLMSSLKPIGNIVVICCAFFIIFGILGVQLFKGKFFVCQGEDTRNITNKSDCAEASYRWVRHKYNFDNLGQALMSLFVLASKDGWVDIMYDGLDAVGVDQQPIMNHNPWMLLYFISFLLIVAFFVLNMFVGVVVENFHKCRQHQEEEEARRREEKRLRRLEKKRRKAQCKPYYSDYSRFRLLVHHLCTSHYLDLFITGVIGLNVVTMAMEHYQQPQILDEALKICNYIFTVIFVLESVFKLVAFGFRRFFQDRWNQLDLAIVLLSIMGITLEEIEVNASLPINPTIIRIMRVLRIARVLKLLKMAVGMRALLDTVMQALPQVGNLGLLFMLLFFIFAALGVELFGDLECDETHPCEGLGRHATFRNFGMAFLTLFRVSTGDNWNGIMKDTLRDCDQESTCYNTVISPIYFVSFVLTAQFVLVNVVIAVLMKHLEESNKEAKEEAELEAELELEMKTLSPQPHSPLGSPFLWPGVEGPDSPDSPKPGALHPAAHARSASHFSLEHPTMQPHPTELPGPDLLTVRKSGVSRTHSLPNDSYMCRHGSTAEGPLGHRGWGLPKAQSGSVLSVHSQPADTSYILQLPKDAPHLLQPHSAPTWGTIPKLPPPGRSPLAQRPLRRQAAIRTDSLDVQGLGSREDLLAEVSGPSPPLARAYSFWGQSSTQAQQHSRSHSKISKHMTPPAPCPGPEPNWGKGPPETRSSLELDTELSWISGDLLPPGGQEEPPSPRDLKKCYSVEAQSCQRRPTSWLDEQRRHSIAVSCLDSGSQPHLGTDPSNLGGQPLGGPGSRPKKKLSPPSITIDPPESQGPRTPPSPGICLRRRAPSSDSKDPLASGPPDSMAASPSPKKDVLSLSGLSSDPADLDP

SEQ ID NO: 15585 - protein, 416 aa, Homo sapiens
NFLYPQVEDMQWAHREHTHPASVCSLPCKPGERKKTVKGVPCCWHCERCEGYNYQVDELSCELCPLDQRPNMNRTGCQLIPIIKLEWHSPWAVVPVFVAILGIIATTFVIVTFVRYNDTPIVRASGRELSYVLLTGIFLCYSITFLMIAAPDTIICSFRRVFLGLGMCFSYAALLTKTNRIHRIFEQGKKSVTAPKFISPASQLVITFSLISVQLLGVFVWFVVDPPHIIIDYGEQRTLDPEKARGVLKCDISDLSLICSLGYSILLMVTCTVYAIKTRGVPETFNEAKPIGFTMYTTCIIWLAFIPIFFGTAQSAEKMYIQTTTLTVSMSLSASVSLGMLYMPKVYIIIFHPEQNVQKRKRSFKAVVTAATMQSKLIQKGNDRPNGEVKSELCESLETNTSSTKTTYISYSNHSI

SEQ ID NO: 15586 - protein, 162 aa, Homo sapiens
MAGPVKDREAFQRLNFLYQAAHCVLAQDPENQALARFYCYTERTIAKRLVLRRPLSSSAPRDPSVKRTLCRGCSSLLVPGLTCTQRQRRCRGQRWTVQTCLTCQRSQRFLNDPGHLLWGDRPEAQLGSQADSKPLQPLPNTAHSISDRLPEEKMQTQGSSNQ

SEQ ID NO: 15587 - protein, 1225 aa, Homo sapiens
MDRGPAAVACTLLLALVACLAPASGQECDSAHFRCGSGHCIPADWRCDGTKDCSDDADEIGCAVVTCQQGYFKCQSEGQCIPNSWVCDQDQDCDDGSDERQDCSQSTCSSHQITCSNGQCIPSEYRCDHVRDCPDGADENDCQYPTCEQLTCDNGACYNTSQKCDWKVDCRDSSDEINCTEICLHNEFSCGNGECIPRAYVCDHDNDCQDGSDEHACNYPTCGGYQFTCPSGRCIYQNWVCDGEDDCKDNGDEDGCESGPHDVHKCSPREWSCPESGRCISIYKVCDGILDCPGREDENNTSTGKYCSMTLCSALNCQYQCHETPYGGACFCPPGYIINHNDSRTCVEFDDCQIWGICDQKCESRPGRHLCHCEEGYILERGQYCKANDSFGEASIIFSNGRDLLIGDIHGRSFRILVESQNRGVAVGVAFHYHLQRVFWTDTVQNKVFSVDINGLNIQEVLNVSVETPENLAVDWVNNKIYLVETKVNRIDMVNLDGSYRVTLITENLGHPRGIAVDPTVGKTVVHGGSLIPHPFGVSLFEGQVFFTDWTKMAVLKANKFTETNPQVYYQASLRPYGVTVYHSLRQPYATNPCKDNNGGCEQVCVLSHRTDNDGLGFRCKCTFGFQLDTDERHCIGREILAANRVENVESLAFDWISKNLYWTDSHYKSISVMRLADKTRRTVVQYLNNPRSVVVHPFAGYLFFTDWFRPAKIMRAWSDGSHLLPVINTTLGWPNGLAIDWAASRLYWVDAYFDKIEHSTFDGLDRRRLGHIEQMTHPFGLAIFGEHLFFTDWRLGAIIRVRKADGGEMTVIRSGIAYILHLKSYDVNIQTGSNACNQPTHPNGDCSHFCFPVPNFQRVCGCPYGMRLASNHLTCEGDPTNEPPTEQCGLFSFPCKNGRCVPNYYLCDGVDDCHDNSDEQLCGTLNNTCSSSAFTCGHGECIPAHWRCDKRNDCVDGSDEHNCPTHAPASCLDTQYTCDNHQCISKNWVCDTDNDCGDGSDEKNCNSTETCQPSQFNCPNHRCIDLSFVCDGDKDCVDGSDEVGCVLNCTASQFKCASGDKCIGVTNRCDGVFDCSDNSDEAGCPTRPPGMCHSDEFQCQEDGICIPNFWECDGHPDCLYGSDEHNACVPKTCPSSYFHCDNGNCIHRAWLCDRDNDCGDMSDEKDCPTQPFRCPSWQWQCLGHNICVNLSVVCDGIFDCPNGTDESPLCSKFPDHSLLAINSF

SEQ ID NO: 15588 - protein, 295 aa, Homo sapiens
SQGLEKPLQVASATVSAGLWLLYPKPLFEDTPYILEPGEYPTSEAWGTSDPSVGSLKPMRLAVVYEAPGFQGRSWEVSRDIYNLQQPEDSQSPHLASVGSLRVLGGCWVGYEKEGFRGHQYLLEEGEYPDWSHWGGYDELLTSLRVIRTDFGDPAVVLFEAMDFEGHGVEVSKALPDVELVQHGPSTQAIHVLSGVWVAYQEVGFSGEQYVLEKGVYRNCEDWGAGNSTLASLQPVLQVGEHDLHFVSKIQLFSRPDFLGDHFSFEDDQAALPASFRPQSCRVHGGSWILFDETN

SEQ ID NO: 15589 - protein, 535 aa, Homo sapiens
MAGNCGARGALSAHTLLFDLPPALLGELCAVLDSCDGALGWRGLGAVLSPSEKSYQEGGFPNILFKETANVTVDNVLIPEHNEKGILLKSSISFQNIIEGTRNFHKDFLIGEGEIFEVYRVEIQNLTYAVKLFKQEKKMQCKKHWKRFLSELEVLLLFHHPNILELAAYFTETEKFCLIYPYMRNGTLFDRLQCVGDTAPLPWHIRIGILIGISKAIHYLHNVQPCSVICGSISSANILLDDQFQPKLTDFAMAHFRSHLEHQSCTINMTSSSSKHLWYMPEEYIRQGKLSIKTDVYSFGIVIMEVLTGCRVVLDDPKHIQLRDLLRELMEKRGLDSCLSFLDKKVPPCPRNFSAKLFCLAGRCAATRAKLRPSMDEVLNTLESTQASLYFAEDPPTSLKSFRCPSPLFLENVPSIPVEDDESQNNNLLPSDEGLRIDRMTQKTPFECSQSEVMFLSLDKKPESKRNEEACNMPSSSCEESWFPKYIVPSQDLRPYKVNIDPSSEAPGHSCRSRPVESSCSSKFSWDEYEQYKKE

SEQ ID NO: 15590 - protein, 754 aa, Homo sapiens
MLVAGLLLWASLLTGAWPSFPTQDHLPATPRVRLSFKELKATGTAHFFNFLLNTTDYRILLKDEDHDRMYVGSKDYVLSLDLHDINREPLIIHWAASPQRIEECVLSGKDVNGECGNFVRLIQPWNRTHLYVCGTGAYNPMCTYVNRGRRAQDYIFYLEPERLESGKGKCPYDPKLDTASALINEELYAGVYIDFMGTDAAIFRTLGKQTAMRTDQYNSRWLNDPSFIHAELIPDSAERNDDKLYFFFRERSAEAPQSPAVYARIGRICLNDDGGHCCLVNKWSTFLKARLVCSVPGEDGIETHFDELQDVFVQQTQDVRNPVIYAVFTSSGSVFRGSAVCVYSMADIRMVFNGPFAHKEGPNYQWMPFSGKMPYPRPGTCPGGTFTPSMKSTKDYPDEVINFMRSHPLMYQAVYPLQRRPLVVRTGAPYRLTTIAVDQVDAADGRYEVLFLGTDRGTVQKVIVLPKDDQELEELMLEEVEVFKDPAPVKTMTISSKRQQLYVASAVGVTHLSLHRCQAYGAACADCCLARDPYCAWDGQACSRYTASSKRRSRRQDVRHGNPIRQCRGFNSNANKNAVESVQYGVAGSAAFLECQPRSPQATVKWLFQRDPGDRRREIRAEDRFLRTEQGLLLRALQLSDRGLYSCTATENNFKHVVTRVQLHVLGRDAVHAALFPPLSMSAPPPPGAGPPTPPYQELAQLLAQPEVGLIHQYCQGYWRHVPPSPREAPGAPRSPEPQDQKKPRNRRHHPPDT

SEQ ID NO: 15591 - protein, 822 aa, Homo sapiens [sequence omitted]

SEQ ID NO: 15592 - protein, 53 aa, Homo sapiens
MSSVAVLTQESFAEHRSGLVPQQIKVATLNSEEESDPPTYKDAFPPLPEKAAC

SEQ ID NO: 15593 - protein, 235 aa, Homo sapiens
SDEESIRAHVMASHHSKRRGRASSESQIFELNKHISAVECLLTYLENTVVPPLAKGLGAGVRTEADVEEEALRRKLEELTSNVSDQETSSEEEEAKDEKAEPNRDKSVGPLPQADPEVSDIESRIAALRAAGLTVKPSGKPRRKSNLPIFLPRVAGKLGKRPEDPNADPSSEAKAMAVPYLLRRKFSNSLKSQGKDDDSFDRKSVYRGSLTQRNPNARKGMASHTFAKPVVAHQS

SEQ ID NO: 15594 - protein, 876 aa, Homo sapiens
RFRKGNFGTRDAETDGPEKGDQKGKASPFEEDQNRDLKQGDDDDSKINGRGLPNGMDADCKDFNRTPGSRQASPTEVVERLGPNTNPSEGLGPLPNPTANKPLVEEFSNPETQNLDAMEQVGLESLQFDYPGNQVPMDSSGATVGLFDYNSQQQLFQRTNALTVQQLTAAQQQQYALAAAQQPHIAGVFSAGLAPAAFVPNPYIISAAPPGTDPYTAAGLAAAATLAGPAVVPPQYYGVPWGVYPANLFQQQAAAAANNTASQQAASQAQPGQQQVLRAGAGQRPLTPNQGQQGQQAESLAAAAAANPTLAFGQGLATGMPGYQVLAPTAYYDQTGALVVGPGARTGLGAPVRLMAPTPVLISSAAAQAAAAAAAGGTASSLTGSTNGLFRPIGTQPPQQQQQQPSTNLQSNSFYGSSSLTNSSQSSSLFSHGPGQPGSTSLGFGSGNSLGAAIGSALSGFGSSGGLTNGSGRYISAAPGAEAKYRSASSTSSLFSSSSQLFPPSRLRYNRSDIMPSGRSRLLEDFRNNRFPNLQLRDLIGHIVEFSQDQHGSRFIQQKLERATPAERQMVFNEILQAAYQLMTDVFGNYVIQKFFEFGSLDQKLALATRIRGHVLPLALQMYGCRVIQKALESISSDQQSEMVKELDGHVLKCVKDQNGNHVVQKCIECVQPQSLQFIIDAFKGQVFVLSTHPYGCRVIQRILEHCTAEQTLPILEELHQHTEQLVQDQYGNYVIQHVLEHGRPEDKSKIVSEIRGKVLALSQHKFASNVVEKCVTHASRAERALLIDEVCCQNDGPHSALYTMMKDQYANYVVQKMIDMAEPAQRKIIMHKIRPHITTLRKYTYGKHILAKLEKYYLKNSPDLGPIGGPPNGML

SEQ ID NO: 15595 - protein, 710 aa, Homo sapiens
GDVGAAAATAHNGFSCSNCSMLSERKDVLTAHPAAPGPVSRVYSRDRNQKCGASFYVNRILWLARYTASSFSSFLVQLFQVVLMKLSYESENYKLKTHESKDCESESYKSKSHESKAHASYYGRMNVREVLREDGHLSVNGEALCYFLLQILRRIGAVGQAVSRTAWSALWLAVVAPGKAASGVFWWLGIGWYQFVTLISWLNVFLLTRCLRNICKFLVLLIPLFLLLAGLSLRGQGNFFSFLPVLNWASMHRTQRVDDPQDVFKPTTSRLKQPLQGDSEAFPWHWMSGVEQQVASLSGQCHHHGENLRELTTLLQKLQARVDQMEGGAAGPSASVRDAVGQPPRETDFMAFHQEHEVRMSHLEDILGKLREKSEAIQKELEQTKQKTISAVGEQLLPTVEHLQLELDQLKSELSSWRHVKTGCETVDAVQERVDVQVREMVKLLFSEDQQGGSLEQLLQRFSSQFVSKGDLQTMLRDLQLQILRNVTHHVSVTKQLPTSEAVVSAVSEAGASGITEAQARAIVNSALKLYSQDKTGMVDFALESGGGSILSTRCSETYETKTALMSLFGIPLWYFSQSPRVVIQPDIYPGNCWAFKGSQGYLVVRLSMMIHPAAFTLEHIPKTLSPTGNISSAPKDFAVYGLENEYQEEGQLLGQFTYDQDGESLQMFQALKRPDDTAFQIVELRIFSNWGHPEYTCLYRFRVHGEPVK

SEQ ID NO: 15596 - protein, 97 aa, Homo sapiens
MEVTTRLTWNDENHLRKLLGNVSLSLLYKSSVHGGSIEDMVERCSRQGCTITMAYIDYNMIVAFMLGNYINLHESSTEPNDSLWFSLQKKNDTTEIE

SEQ ID NO: 15597 - protein, 165 aa, Homo sapiens
MAGAIASRMSFSSLKRKQPKTFTVRIVTMDAEMEFNCEMKWKGKDLFDLVCRTLGLRETWFFGLQYTIKDTVAWLKMDKKVLDHDVSKEEPVTFHFLAKFYPENAEEELVQEITQHLFFLQVKKQILDEKIYCPPEASVLLASYAVQAKLTLQSAKSRVAFFEEL

SEQ ID NO: 15598 - protein, 832 aa, Homo sapiens
MQEPGQIVETYTEEDPEGAMSVVSVETSDDGTTRRTETTVKKVVKTVTTRTVQPVAMGPDGLPVDASSVSNNYIQTLGRDFRKNGNGGPGPYVGQAGTATLPRNFHYPPDGYSRHYEDGYPGGSDNYGSLSRVTRIEERYRPSMEGYRAPSRQDVYGPQPQVRVGGSSVDLHRFHPEPYGLEDDQRSMGYDDLDYGMMSDYGTARRTGTPSDPRRRLRSYEDMIGEEVPSDQYYWAPLAQHERGSLASLDSLRKGGPPPPNWRQPELPEVIAMLGFRLDAVKSNAAAYLQHLCYRNDKVKTDVRKLKGIPVLVGLLDHPKKEVHLGACGALKNISFGRDQDNKIAIKNCDGVPALVRLLRKARDMDLTEVITGTLWNLSSHDSIKMEIVDHALHALTDEVIIPHSGWEREPNEDCKPRHIEWESVLTNTAGCLRNVSSERSEARRKLRECDGLVDALIFIVQAEIGQKDSDSKLVENCVCLLRNLSYQVHREIPQAERYQEAAPNVANNTGPHAASCFGAKKGKGKKPIEDPANDTVDFPKRTSPARGYELLFQPEVVRIYISLLKESKTPAILEASAGAIQNLCAGRWTYGRYIRSALRQEKALSAIADLLTNEHERVVKAASGALRNLAVDARNKELIGKHAIPNLVKNLPGGQQNSSWNFSEDTVISILNTINEVIAENLEAAKKLRETQGIEKLVLINKSGNRSEKEVRAAALVLQTIWGYKELRKPLEKEGWKKSDFQVNLNNASRSQSSHSYDDSTLPLIDRNQKSDKKPDREEIQMSNMGSNTKSLDNNYSTPNERGDHNRTLDRSGDLGDMEPLKGTTPLMQKI

SEQ ID NO: 15599 - protein, 1820 aa, Homo sapiens
MEPPQETNRPFSTLDNRSGQVQVLSATPLLQRNPYSSPDIMHIKGSEASSVPYALNQGTTALPKNKNQEGTGHRLLNMLRKTLKESDSEELEITQETPNLVPFGDVVGCLGIHIKNCRHFMPKISLQHYANLFIRISINKAVKCTKMCSLLSKNDEKNTVIKFDEVKYFSVQVPRRYDDKRNNILLELIQYDNREKRAFLLGSVQIHLYEVIQKGCFIEEVQVLHGNIFVCRLEVEFMFSYGNFGYGFSHQLKPLQKITEPSMFMNLAPPPERTDPVTKVITPQTVEYPAFLSPDLNVTVGTPAVQSSNQPSVVRLEKLQQQPRERLEKMKKEYRNLNTWIDKANYLESILMPKLEHKDSEETNIDEASENTKSNHPEEELENIVGVDIPLVNEEAETTANELLDNDSEKGLTIPTLNQSDQDNSTADASKNDESTPSPTEVHSLCTISNQETIKAGRIPPLGERQSESMPDRKMKNVFFPLEVKLKDNYPSILKADSSLSEVAFSPKEYNSPSFRPEYIEFKPKFQFQKFNKNGFDPFLRNINKMSVRKRKDQDIYKYRNILGAEVIEHEDQDPPYPAQSKTAGPANTTWAHDPNIFTTKMLETENKLAPDPTINTIKGLDTKNSLKENLPNVSLPSIKGESSRAGNVQANTCHLSKSLNFTPHIEYLKQSMILKSILSENLQDLSDKLFSKPEVSMNSEAREKSSSPLLSIHDKSSSSMEDNVLEKKQDLNNWLSEKDILNSKTTLSQIIKNIPADSFSEGSQIIENIPADSLLEGGQVIKNIPEYSLSEGGQIIKNIPADSFLESGPGQSPEVEEHVSKKHFEADERDFPIKKNSSTKKKHLISEVPNSKSGSSGTVHDYIMRQIFTAPIFSELEIEVKEPSETPMNLENQLPTPWKRSLSSHILFHEENADEIELPQPRSATSQIIQAFPIDTLLESGIIKVIELDKEHHKSSLLGTGITSPKGNLKDSQEYYSEIRSETEPLSEQSIPIIPKDTTSVSRAEFIQEDQNMFPQDSSYYSIANKELYLPRNGQRLCKDKNDLSSTLESLTNSLMDKLSESDEIMLKSFLKNIFNVFFKYNHSERRGQPEKELERLIQPSFTSDTEHLEELQEDFDKADKLDRKPILSPKLRVFLEELSESEVKHLKSELSKQIQHYLVERLSESGHITKEDLPKIYQNLYLMNEKAEQKGPNSFQGKYSETVKEIMSFVNNFNHHFIDKHLEIKLRSFLKEILQNYFLKNISESSLFNETASETIYPNISSLRTKSVSISFHELEQDISKGSFGRRFEINMKYPLSKSLQNYLIALSENELLHLKADLSKHLQSLFIEKLSKSGLMTKKQLEGINQHINLLNSSSIPLKYIKTHLPFRDDCHFVEKHSEKQNKYSRIVQQTTLQTVSEDKLREAELIREKEKKYFPLQNLKGNSSLIKEQKSYYTKEEAKTPSLIKVQPSSNENIQASPLSKSSEILTDILLKKLRKEHVFTQLPQAENSVHKTEIQDPYSWGGKSKITQSKAWCEKTLKMKSLDRKEHVNIYKWTVQEKPEAVLTSYPRIPNARMPREDEYLNRITFPSWQSSTLTHFNTETGEKSKLEDQYCQTLKGNNNNNKKHLVTFAQYKKEIQTLYIKPDEICSEKCAKFPEIQSFQYKVVEDEKNLKPHLFPELFKIEDLKPKVRKERDRVAQPKKSFNKIVRILPTTLPTTRIHLKKSVPRTLLHWTARRTIHDCSDKFEDLHDMTSFTHLKKVKSRSRLLGKSSDDIHNHARHSARPYTAPEVNKQRESYSGKFTSRRMVSSGLVHINDKTSDYEMHKMRPKKIKRGY

SEQ ID NO: 15600 - protein, 230 aa, Homo sapiens
MGSKRRRATSPSSSVSGDFDDGHHSVSTPGPSRKRRRLSNLPTVDPIAVCHELYNTIRDYKDEQGRLLCELFIRAPKRRNQPDYYEVVSQPIDLMKIQQKLKMEEYDDVNLLTADFQLLFNNAKSYYKPDSPEYKAACKLWDLYLRTRNEFVQKGEADDEDDDEDGQDNQGTVTEGSSPAYLKEILEQLLEAIVVATNPSGRLISELFQKLPSKVQYPDYYAIIKEPIDL

SEQ ID NO: 15601 - protein, 903 aa, Homo sapiens
NMYRLPATQEVVTQLQSQILELQGELKEFKTCNKQLHQKLILAEAVMEGRPTPDKTLLNDSEICPPDDLASLPSCKENPEDVLSPTSVATYLSSKSQPSAKVSVMGTDQSESINTSNETEYLKQKIHDLETELEGYQNFIFQLQKHSQCSEAIITVLCGTEGAQDGLSKPKNGSDGEEMTFSSLHQVRYVKHVKILGPLAPEMIDSRVLENLKQQLEEQEYKLQKEQNLNMQLFSEIHNLQNKFRDLSPPRYDSLVQSQARELSLQRQQIKDGHGICVISRQHMNTMIKAFEELLQASDVDYCVAEGFQEQLNQCAELLEKLEKLFLNGKSVGVEMNTQNELMERIEEDNLTYQHLLPESPEPSASHALSDYETSEKSFFSRDQKQDNETEKTSVMVNSFSQDLLMEHIQEIRTLRKRLEESIKTNEKLRKQLERQGSEFVQGSTSIFASGSELHSSLTSEIHFLRKQNQALNAMLIKGSRDKQKENDKLRESLSRKTVSLEHLQREYASVKEENERLQKEGSEKERHNQQLIQEVRCSGQELSRVQEEVKLRQQLLSQNDKLLQSLRVELKAYEKLDEEHRRLREASGEGWKGQDPFRDLHSLLMEIQALRLQLERSIETSSTLQSRLKEQLARGAEKAQEGALTLAVQAVSIPEVPLQPDKHDGDKYPMESDNSFDLFDSSQAVTPKSVSETPPLSGNDTDSLSCDSGSSATSTPCVSRLVTGHHLWASKNGRHVLGLIEDYEALLKQISQGQRLLAEMDIQTQEAPSSTSQELGTKGPHPAPLSKFVSSVSTAKLTLEEAYRRLKLLWRVSLPEDGQCPLHCEQIGEMKAEVTKLHKKLFEQEKKLQNTMKLLQLSKRQEKVIFDQLVVTHKILRKARGNLELRPGGAHPGTCSPSRPGS

SEQ ID NO: 15602 - protein, 1412 aa, Homo sapiens
MAEARKRRELLPLIYHHLLRAGYVRAAREVKEQSGQKCFLAQPVTLLDIYTHWQQTSELGRKRKAEEDAALQAKKTRVSDPISTSESSEEEEEAEAETAKATPRLASTNSSVLGADLPSSMKEKAKAETEKAGKTGNSMPHPATGKTVANLLSGKSPRKSAEPSANTTLVSETEEEGSVPAFGAAAKPGMVSAGQADSSSEDTSSSSDETDVEVKASEKILQVRAASAPAKGTPGKGATPAPPGKAGAVASQTKAGKPEEDSESSSEESSDSEEETPAAKALLQAKASGKTSQVGAASAPAKESPRKGAAPAPPGKTGPAVAKAQAGKREEDSQSSSEESDSEEEAPAQAKPSGKAPQVRAASAPAKESPRKGAAPAPPRKTGPAAAQVQVGKQEEDSRSSSEESDSDREALAAMNAAQVKPLGKSPQVKPASTMGMGPLGKGAGPVPPGKVGPATPSAQVGKWEEDSESSSEESSDSSDGEVPTAVAPAQEKSLGNILQAKPTSSPAKGPPQKAGPVAVQVKAEKPMDNSESSEESSDSADSEEAPAAMTAAQAKPALKIPQTKACPKKTNTTASAKVAPVRVGTQAPRKAGTATSPAGSSPAVAGGTQRPAEDSSSSEESDSEEEKTGLAVTVGQAKSVGKGLQVKAASVPVKGSLGQGTAPVLPGKTGPTVTQVKAEKQEDSESSEEESDSEEAAASPAQVKTSVKKTQAKANPAAARAPSAKGTISAPGKVVTAAAQAKQRSPSKVKPPVRNPQNSTVLARGPASVPSVGKAVATAAQAQTGPEEDSGSSEEESDSEEEAETLAQVKPSGKTHQIRAALAPAKESPRKGAAPTPPGKTGPSAAQAGKQDDSGSSSEESDSDGEAPAAVTSAQVIKPPLIFVDPNRSPAGPAATPAQAQAASTPRKARASESTARSSSSESEDEDVIPATQCLTPGIRTNVVTMPTAHPRIAPKASMAGASSSKESSRISDGKKQEGPATQVSKKNPASLPLTQAALKVLAQKASEAQPPVARTQPSSGVDSAVGTLPATSPQSTSVQAKGTNKLRKPKLPEVQQATKAPESSDDSEDSSDSSSGSEEDGEGPQGAKSAHTLVGPTPSRTETLVEETAAESSEDDVVAPSQSLLSGYMTPGLTPANSQASKATPKLDSSPSVSSTLAAKDDPDGKQEAKPQQAAGMLSPKTGGKEAASGTTPQKSRKPKKGAGNPQASTLALQSNITQCLLGQPWPLNEAQVQASVVKVLTELLEQERKKVVDTTKESSRKGWESRKRKLSGDQPAARTPRSKKKKKLGAGEGGEASVSPEKTSTTSKGKAKRDKASGDVKEKKGKGSLGSQGAKDEPEEELQKGMGTVEGGDQSNPKSKKEKKKSDKRKKDKEKKEKKKKAKKASTKDSESPSQKKKKKKKKTAEQTV

SEQ ID NO: 15603 - protein, 379 aa, Homo sapiens
MQSFLTLLKEHEDTCAPPAELVTLAGRLCRDFQDDLAQLQPLVTAILDSQLRLHLLDNADVALACARVLDQQEQQQAACRLLEGCQVPGGSQELVQLWNDIHYRLVMRRLGVAALTPVQKFRCRKRNPPPPSLCPEGLKSRNFPREVREKLHNFAVGVNTNPSKAERENLALETSLTPEQVYNWFANYRRRQRALPQHMKPAQQATAEDPGARERGPDLLQPSGNPRVDSGFVDRPQWSEEREEKGPPQSPQTTQGPWEPLALAPDFPADETVSKPLDVSGHPQSVQLEEGLGTSSGRTELRVGSFLVTQPPLQAPEFILTQSPPELAPAPSAFPGPVSAMELSQALPSSQVQCSDSQASGDAFWGARMLLEFSGSSLG

SEQ ID NO: 15604 - protein, 110 aa, Homo sapiens
MSDKSELKAELERKKQRLAQIREEKKRKEEERKKKETDQKKEAVAPVQEESDLEKKRREAEALLQSMGLTPESPIVPPPMSPSSKSVSTPSEAGSQDSGDGAVGSRTLHW

SEQ ID NO: 15605 - protein, 723 aa, Homo sapiens
MAAAATMAAAARELVLRAGTSDMEEEEGPLAGGPGLQEPLQLGELDITSDEFILDEVDVHIQANLEDELVKEALKTGVDLRHYSKQVELELQQIEQKSIRDYIQESENIASLHNQITACDAVLERMEQMLGAFQSDLSSISSEIRTLQEQSGAMNIRLRNRQAVRGKLGELVDGLVVPSALVTAILEAPVTEPRFLEQLQELDAKAAAVREQEARGTAACADVRGVLDRLRVKAVTKIREFILQKIYSFRKPMTNYQIPQTALLKYRFFYQFLLGNERATAKEIRDEYVETLSKIYLSYYRSYLGRLMKVQYEEVAEKDDLMGVEDTAKKGFFSKPSLRSRNTIFTLGTRGSVISPTELEAPILVPHTAQRGEQRYPFEALFRSQHYALLDNSCREYLFICEFFVVSGPAAHDLFHAVMGRTLSMTLKHLDSYLADCYDAIAVFLCIHIVLRFRNIAAKRDVPALDRYWEQVLALLWPRFELILEMNVQSVRSTDPQRLGGLDTRPHYITRRYAEFSSALVSINQTIPNERTMQLLGQLQVEVENFVLRVAAEFSSRKEQLVFLINNYDMMLGVLMERAADDSKEVESFQQLLNARTQEFIEELLSPPFGGLVAFVKEAEALIERGQAERLRGEEARVTQLIRGFGSSWKSSVESLSQDVMRSFTNFRNGTSIIQGALTQLIQLYHRFHRVLSQPQLRALPARAELINIHHLMVELKKHKPNF

SEQ ID NO: 15606 - protein, 532 aa, Homo sapiens
MDQFGDILEGEVDHSFFDSDFEEGKKCETNSVFDKQNDDPKERIDKDTKNVNSNTGMQTTENYLTEKGNERNVKFPPEHPVENDVTQTVSSFSLPASSRSKKLCDVTTGLKIHVSIPNRIPKIVKEGEDDYYTDGEESSDDGKKYHVKSKSAKPSTNVKKSIRKKYCKVSSSSSSSLSSSSSGSGTDCLDAGSDSHLSDSSPSSKSSKKHVSGITLLSPKHKYKSGIKSTETQPSSTTPKCGHYPEESEDTVTDVSPLSTPDISPLQSFELGIANDQKVKIKKQENVSQEIYEDVEDLKNNSKYLKAAKKGKEKHEPDVSSKSSSVLDSSLDHRHKQKVLHDTMDLNHLLKAFLQLDKKGPQKHHFDQPSVAPGKNYSFTREEVRQIDRENQRLLKELSRQAEKPGSKSTIPRSADHPPKLYHSALNRQKEQQRIERENLALLKRLEAVKPTVGMKRSEQLMDYHRNMGYLNSSPLSRRARSTLGQYSPLRASRTSSATSGLSCRSERSAVDPSSGHPRRRPKPPNVRTAWL

SEQ ID NO: 15607 - protein, 567 aa, Homo sapiens
MADERKDEAKAPHWTSAPLTEASAHSHPPEIKDQGGAGEGLVRSANGFPYREDEEGAFGEHGSQGTYSNTKENGINGELTSADRETAEEVSARIVQVVTAEAVAVLKGEQEKEAQHKDQTAALPLAAEETANLPPSPPPSPASEQTVTVEEEEETLESRMAEEEKPAALPEKECGAAKSSDQPKGLSKGQMESSAEAQIVPEESAPAGAPHEKSVKEVKEVSPEVKTPSSAGEDLLTASKMEFHDQQELTPSTAEPSDQKEKESEKQSKPGEDLKHAALVSQPETTKTYPDKKDMQGTEEEKAPLALFGHTLVASLEDMKQKTEPSLVVPGIDLPKEPPTPKEQKDWFIEMPTEAKKDEWGLVAPISPGPLTPMREKDVFDDIPKWEGKQFDSPMPSPFQGGSFTLPLDVMKNEIVTETSPFAPAFLQPDDKKSLQQTSGPATAKDSFKIEEPHEAKPDKMAEAPPSEAMTLPKDAHIPVVEEHVMGKVLEEEKEAINQETVQQRDTFTPSGQEPILTEKETELKLEEKTTISDKEAVPKESKPPKPADEEIGIIQTSTEHTFSEQK

SEQ ID NO: 15608 - protein, 863 aa, Homo sapiens
MVQKESQATLEERESELSSNPAASAGASLEPPAAPAPGEDNPAGAGGAAVAGAAGGARRFLCGVVEGFYGRPWVMEQRKELFRRLQKWELNTYLYAPKDDYKHRMFWREMYSVEEAEQLMTLISAAREYEIEFIYAISPGLDITFSNPKEVSTLKRKLDQVSQFGCRSFALLFDDIDHNMCAADKEVFSSFAHAQVSITNEIYQYLGEPETFLFCPTEYCGTFCYPNVSQSPYLRTVGEKLLPGIEVLWTGPKVVSKEIPVESIEEVSKIIKRAPVIWDNIHANDYDQKRLFLGPYKGRSTELIPRLKGVLTNPNCEFEANYVAIHTLATWYKSNMNGVRKDVVMSRQVAHSGAKASVVDGTPLVAAPSLNATTVVTTVYQEPIMSQGAALSGEPTTLTKEEEKKQPDEEPMDMVVEKQEETDHKNDNQILSEIVEAKMAEELKPMDTDKESIAESKSPEMSMQEDCISDIAPMQTDEQTNKEQFVPGPNEKPLYTAEPVTLEDLQLLADLFYLPYEHGPKGAQMLREFQWLRANSSVVSVNCKGKDSEKIEEWRSRAAKFEEMCGLVMGMFTRLSNCANRTILYDMYSYVWDIKSIMSMVKSFVQWLGCRSHSSAQFLIGDQEPWAFRGGLAGEFQRLLPIDGANDLFFQPPPLTPTSKVYTIRPYFPKDEASVYKICREMYDDGVGLPFQSQPDLIGDKLVGGLLSLSLDYCFVLEDEDGICGYALGTVDVTPFIKKCKISWIPFMQEKYTKPNGDKELSEAEKIMLSFHEEQEVLPETFLANFPSLIKMDIHKKVTDPSVAKSMMACLLSSLKANGSRGAFCEVRPDDKRILEFYSKLGCFEIAKMEGFPKDVVILGRSL

SEQ ID NO: 15609 - protein, 90 aa, Homo sapiens
MRYSLSPDNHLEDGIMNMANFLRGFEEKGIKNDRPEDQLSKEKKKILFSFCEVCNIQLNSAAQAQVHSNGKSHRKRVKQLSDGQPPPPAQ

SEQ ID NO: 15610 - protein, 680 aa, Homo sapiens
MFSCVKPYEDQNYSALRRDCRRRKVLFEDPLFPATDDSLYYKGTPGPAVRWKRPKYSGHSLAPHRPGWGDARRMENVPRPGSSGCPSSSLRARDLGICEDPRLFVDGISSHDLHQGQVGNCWFVAACSSLASRESLWQKVIPDWKEQEWDPEKPNAYAGIFHFHFWRFGEWVDVVIDDRLPTVNNQLIYCHSNSRNEFWCALVEKAYAKLAGCYQALDGGNTADALVDFTGGVSEPIDLTEGDFANDETKRNQLFERMLKVHSRGGLISASIKAVTAADMEARLACGLVKGHAYAVTDVRKVRLGHGLLAFFKSEKLDMIRLRNPWGEREWNGPWSDTSEEWQKVSKSEREKMGVTVQDDGEFWMTFEDVCRYFTDIIKCRVINTSHLSIHKTWEEARLHGAWTLHEDPRQNRGGGCINHKDTFFQNPQYIFEVKKPEDEVLICIQQRPKRSTRREGKGENLAIGFDIYKVEENRQYRMHSLQHKAASSIYINSRSVFLRTDQPEGRYVIIPTTFEPGHTGEFLLRVFTDVPSNCRELRLDEPPHTCWSSLCGYPQLVTQVHVLGAAGLKDSPTGANSYVIIKCEGDKVRSAVQKGTSTPEYNVKGIFYRKKLSQPITVQVWNHRVLKDEFLGQVHLKADPDNLQALHTLHLRDRNSRQPSNLPGTVAVHILSSTSLMAV

SEQ ID NO: 15611 - protein, 779 aa, Homo sapiens
MRTLEDSSGTVLHRLIQEQLRYGNLTETRTLLAIQQQALRGGAGTGGTGSPQASLEILAPEDSQVLQQATRQEPQGQEHQGGENHLAENTLYRLCPQPSKGEELPTYEEAKAHSQYYAAQQAGTRPHAGDRDPRGAPGGSRRQDEALRELRHGHVRSLSERLLQLSLERNGARAPSHMSSSHSFPQLARNQQGPPLRGPPAEGPESRGPPPQYPHVVLAHETTTAVTDPRYRARGSPHFQHAEVRILQAQVPPVFLQQQQQYQYLQQSQEHPPPPHPAALGHGPLSSLSPPAVEGPVSAQASSATSGSAHLAQMEAVLRENARLQRDNERLQRELESSAEKAGRIEKLESEIQRLSEAHESLTRASSKREALEKTMRNKMDSEMRRLQDFNRDLRERLESANRRLASKTQEAQAGSQDMVAKLLAQSYEQQQEQEKLEREMALLRGAIEDQRRRAELLEQALGNAQGRAARAEEELRKKQAYVEKVERLQQALGQLQAACEKREQLELRLRTRLEQELKALRAQQRQAGAPGGSSGSGGSPELSALRLSEQLREKEEQILALEADMTKWEQKYLEERAMRQFAMDAAATAAAQRDTTLIRHSPQPSPSSSFNEGLLTGGHRHQEMESRLKVLHAQILEKDAVIKVLQQRSRRDPGKAIQGSLRPAKSVPSVFAAAAAGTQGWQGLSSSERQTADAPARLTTDRAPTEEPVVTAPPAAHAKHGSRDGSTQTEGPPDSTSTCLPPEPDSLLGCSSSQRAASLDSVATSRVQDLSDMVEILI

SEQ ID NO: 15612 - protein, 1448 aa, Homo sapiens
MRILKRFLACIQLLCVCRLDWANGYYRQQRKLVEEIGWSYTGALNQKNWGKKYPTCNSPKQSPINIDEDLTQVNVNLKKLKFQGWDKTSLENTFIHNTGKTVEINLTNDYRVSGGVSEMVFKASKITFHWGKCNMSSDGSEHSLEGQKFPLEMQIYCFDADRFSSFEEAVKGKGKLRALSILFEVGTEENLDFKAIIDGVESVSRFGKQAALDPFILLNLLPNSTDKYYIYNGSLTSPPCTDTVDWIVFKDTVSISESQLAVFCEVLTMQQSGYVMLMDYLQNNFREQQYKFSRQVFSSYTGKEEIHEAVCSSEPENVQADPENYTSLLVTWERPRVVYDTMIEKFAVLYQQLDGEDQTKHEFLTDGYQDLGAILNNLLPNMSYVLQIVAICTNGLYGKYSDQLIVDMPTDNPELDLFPELIGTEEIIKEEEEGKDIEEGAIVNPGRDSATNQIRKKEPQISTTTHYNRIGTKYNEAKTNRSPTRGSEFSGKGDVPNTSLNSTSQPVTKLATEKDISLTSQTVTELPPHTVEGTSASLNDGSKTVLRSPHMNLSGTAESLNTVSITEYEEESLLTSFKLDTGAEDSSGSSPATSAIPFISENISQGYIFSSENPETITYDVLIPESARNASEDSTSSGSEESLKDPSMEGNVWFPSSTDITAQPDVGSGRESFLQTNYTEIRVDESEKTTKSFSAGPVMSQGPSVTDLEMPHYSTFAYFPTEVTPHAFTPSSRQQDLVSTVNVVYSQTTQPVYNEASNSSHESRIGLAEGLESEKKAVIPLVIVSALTFICLVVLVGILIYWRKCFQTAHFYLEDSTSPRVISTPPTPIFPISDDVGAIPIKHFPKHVADLHASSGFTEEFEEVQSCTVDLGITADSSNHPDNKHKNRYINIVAYDHSRVKLAQLAEKDGKLTDYINANYVDGYNRPKAYIAAQGPLKSTAEDFWRMIWEHNVEVIVMITNLVEKGRRKCDQYWPADGSEEYGNFLVTQKSVQVLAYYTVRNFTLRNTKIKKGSQKGRPSGRVVTQYHYTQWPDMGVPEYSLPVLTFVRKAAYAKRHAVGPVVVHCSAGVGRTGTYIVLDSMLQQIQHEGTVNIFGFLKHIRSQRNYLVQTEEQYVFIHDTLVEAILSKETEVLDSHIHAYVNALLIPGPAGKTKLEKQFQLLSQSNIQQSDYSAALKQCNREKNRTSSIIPVERSRVGISSLSGEGTDYINASYIMGYYQSNEFIITQHPLLHTIKDFWRMIWDHNAQLVVMIPDGQNMAEDEFVYWPNKDEPINCESFKVTLMAEEHKCLSNEEKLIIQDFILEATQDDYVLEVRHFQCPKWPNPDSPISKTFELISVIKEEAANRDGPMIVHDEHGGVTAGTFCALTTLMHQLEKENSVDVYQVAKMINLMRPGVFADIEQYQFLYKVILSLVSTRQEENPSTSLDSNGAALPDGNIAESLESLV

SEQ ID NO: 15613 - protein, 792 aa, Homo sapiens
MEKQKPFALFVPPRSSSSQVSAVKPQTLGGDSTFFKSFNKCTEDDFEFPFAKTNLSKNGENIDSDPALQKVNFLPVLEQVGNSDCHYQEGLKDSDLENSEGLSRVYSKLYKEAEKIKKWKVSTEAELRQKESKLQENRKIIEAQRKAIQELQFGNEKVSLKLEEGIQENKDLIKENNATRHLCNLLKETCARSAEKTKKYEYEREETRQVYMDLNNNIEKMITAFEELRVQAENSRLEMHFKLKEDYEKIQHLEQEYKKEINDKEKQVSLLLIQITEKENKMKDLTFLLEESRDKVNQLEEKTKLQSENLKQSIEKQHHLTKELEDIKVSLQRSVSTQKALEEDLQIATKTICQLTEEKETQMEESNKARAAHSFVVTEFETTVCSLEELLRTEQQRLEKNEDQLKILTMELQKKSSELEEMTKLTNNKEVELEELKKVLGEKETLLYENKQFEKIAEELKGTEQELIGLLQAREKEVHDLEIQLTAITTSEQYYSKEVKDLKTELENEKLKNTELTSHCNKLSLENKELTQETSDMTLELKNQQEDINNNKKQEERMLKQIENLQETETQLRNELEYVREELKQKRDEVKCKLDKSEENCNNLRKQVENKNKYIEELQQENKALKKKGTAESKQLNVYEIKVNKLELELESAKQKFGEITDTYQKEIEDKKISEENLLEEVEKAKVIADEAVKLQKEIDKRCQHKIAEMVALMEKHKHQYDKIIEERDSELGLYKSKEQEQSSLRASLEIELSNLKAELLSVKKQLEIEREEKEKLKREAKENTATLKEKK

SEQ ID NO: 15614 - protein, 141 aa, Homo sapiens
MDLIDILWRQDIDLGVSREVFDFSQRRKEYELEKQKKLEKERQEQLQKEQEKAFFAQLQLDEETGEFLPIQPAQHIQSETSGSANYSQVAHIPKSDALYFDDCMQLLAQTFPFVDDNEVRYKITWLIEKLHHNYKITIYSM

SEQ ID NO: 15615 - protein, 144 aa, Homo sapiens
MCEEETTALVCDNGSGLCKAGFAGDDAPRAVFPSIVGRPRHQGVMVGMGQKDSYVGDEAQSKRGILTLKYPIEHGIITNWDDMEKIWHHSFYNELRVAPEEHPTLLTEAPLNPKANREKMTQVRSQEDLNTGIRMQHGCLARYF

SEQ ID NO: 15616 - protein, 189 aa, Homo sapiens
MGPPSLVLCLLSATVFSLLGGSSAFLSHHRLKGRFQRDRRNIRPNIILVLTDDQDVELGSMQVMNKTRRIMEQGGAHFINAFVTTPMCCPSRSSILTGKYVHNHNTYTNNENCSSPSWQAQHESRTFAVYLNSTGYRTAFFGKYLNEYNGSYVPPGWKEWVGLLKNSRFYNYTLCRNGVKEKHGSDYSK

SEQ ID NO: 15617 - protein, 349 aa, Homo sapiens
MKGTGIMDCAPKALLARALYDNCPDCSDELAFSRGDILTILEQHVPESEGWWKCLLHGRQGLAPANRLQILTEVAADRPCPPFLRGLEEAPASSEETYQVPTLPRPPTPGPVYEQMRSWAEGPQPPTAQVYEFPDPPTSARIICEKTLSFPKQAILTLPRPVRASLPTLPSQVYDVPTQHRGPVVLKEPEKQQLYDIPASPKKAGLHPPDSQASNPGPLIPQPSSQQTPERKPRLSEHCRLYFGALFKAISAFHGSLSSSQPAEIITQSKLVIMVGQKLVDTLCMETQERDVRNEILRGSSHLCSLLKDVALATKNAVLTYPSPAALGHLQAEAEKLEQHTRQFRGTLG

SEQ ID NO: 15618 - protein, 325 aa, Homo sapiens
MQETPSSANGPSREGSRLPPAREGHPVYPQLRPGYIPIPVLHEGAENRQVHPFHVYPQPGMQRFRTEAAAAAPQRSQSPLRGMPETTQPDKQCGQVAAAAAAQPPASHGPERSQSPAASDCSSSSSSASLPSSGRSSLGSHQLPRGYISIPVIHEQNVTRPAAQPSFHQAQKTHYPAQQGEYQTHQPVYHKIQGDDWEPRPLRAASPFRSSVQGASSREGSPARSSTPLHSPSPIRVHTVVDRPQPMTHRETAPVSQPENKPESKPGPVGPELPPGHIPIQVIRKEVDSKPVSQKPPPPSEKVEVKVPPAPVPCPPPSPGPSAVP

SEQ ID NO: 15619 - protein, 908 aa, Homo sapiens
MGDLKSGFEEVDGVRLGYLIIKGKQMFALSQVFTDLLKNIPRTTVHKRMDHLKVKKHHCDLEELRKLKAINSIAFHAAKCTLISREDVEALYTSCKTERVLKTKRRRVGRALATKAPPPERAAAASPRPGFWKDKHQLWRGLSGAARPLPISAQSQRPGAAAARPAAHLPQIFSKYPGSHYPEIVRSPCKPPLNYETAPLQGNYVAFPSDPAYFRSLLCSKHPAAAAAAAAAAAAAAAAAAAAAYYQVSAAGPQPKAAAGAGGPGSLSYRCKRKRGGAKDCLLAPHAGARRLLLLPRSYKAKAAAAAAAAAAAAAAAAGATCLERFHLVNGFCPPPHHHHHHHHHHHHHHHRAQPPQQSHHPPHHHRPQPHLGSFPESCSSDSESSSYSDHAANDSDFGSSLSSSSNSVSSEEEEEEGEEEEEEEEEEGGSGASDSSEVSSEEEDSSTESDSSSGSSQVSVQSIRFRRTSFCKPPSVQAQANFLYHLASAAAATKPAAFEDAGRLPDLKSSVKAESPAEWNLQSWAPKASPVYCPASLGSCFAEIRNDRVSEITFPHSEISNAVKRTDLTINCLAEGASSPSPKTNNAFPQQRILREARKCLQTTPTTHCADNNTIAARFLNNDSSGAEANSEKYSKILHCPEFATDLPSSQTDPEVNAAGAAATKAENPCTDTGDKTLPFLHNIKIKVEDSSANEEYEPHLFTNKLKCECNDTKGEFYSVTESKEEDALLTTAKEGFACPEKETPSLNPLAQSQGLSCTLGSPKPEDGEYKFGARVRKNYRTLVLGKRPVLQTPPVKPNLKSARSPRPTGKTETNEGTLDDFTVINRRKKVASNVASAVKRPFHFMANFPCPPSLIIGRDGDLWPAYSLNTTKDSQTPHKAHPIWKWQLGGSAIPLPPSHKFRKFNS

SEQ ID NO: 15620 - protein, 282 aa, Homo sapiens
MSLFGLLLLTSALAGQRQGTQAESNLSSKFQFSSNKEQNGVQDPQHERIITVSTNGSIHSPRFPHTYPRNTVLVWRLVAVEENVWIQLTFDERFGLEDPEDDICKYDFVEVEEPSDGTILGRWCGSGTVPGKQISKGNQIRIRFVSDEYFPSEPGFCIHYNIVMPQFTEAVSPSVLPPSALPLDLLNNAITAFSTLEDLIRYLEPERWQLDLEDLYRPTWQLLGKAFVFGRKSRVVDLNLLTEEVLQLRPKTGVRGLHKSLTDVALEHHEECDCVCRGSTGG

SEQ ID NO: 15621 - protein, 608 aa, Homo sapiens
MPFWPIRCLKRSRRMPRGGAGEREKVPANPEALLLMASSQRDMEDWVQAIRRVIWAPLGGGIFGQRLEETVHHERKYGPRLAPLLVEQCVDFIRERGLTEEGLFRMPGQANLVRDLQDSFDCGEKPLFDSTTDVHTVASLLKLYLRELPEPVVPFARYEDFLSCAQLLTKDEGEGTLELAKQVSNLPQANYNLLRYICKFLDEVQAYSNVNKMSVQNLATVFGPNILRPQVEDPVTIMEGTSLVQHLMTVLIRKHSQLFTAPVPEGPTSPRGGLQCAVGWGSEEVTRDSQGEPGGPGLPAHRTSSLDGAAVAVLSRTAPTGPGSRCSPGKKVQTLPSWKSSFRQPRSLSGSPKGGGSSLEVPIISSGGNWLMNGLSSLRGHRRASSGDRLKDSGSVQRLSTYDNVPAPGLVPGIPSVASMAWSGASSSESSVGGSLSSCTACRASDSSARSSLHTDWALEPSPLPSSSEDPKSLDLDHSMDEAGAGASNSEPSEPDSPTREHARRSEALQGLVTELRAELCRQRTEYERSVKRIEEGSADLRKRMSRLEEELDQEKKKYIMLEIKLRNSERAREDAERRNQLLQREMEEFFSTLGSLTVGAKGARAPK

SEQ ID NO: 15622 - protein, 945 aa, Homo sapiens
MEMKLPGQEGFEASSAPRNIPSGELDSNPDPGTGPSPDGPSDTESKELGVPKDPLLFIQLNELLGWPQALEWRETGRWVLFEEKLEVAAGRWSAPHVPTLALPSLQKLRSLLAEGLVLLDCPAQSLLELVEQVTRVESLSPELRGQLQALLLQRPQHYNQTTGTRPCWGSTHPRKASDNEEAPLREQCQNPLRQKLPPGAEAGTVLAGELGFLAQPLGAFVRLRNPVVLGSLTEVSLPSRFFCLLLGPCMLGKGYHEMGRAAAVLLSDPQFQWSVRRASNLHDLLAALDAFLEEVTVLPPGRWDPTARIPPPKCLPSQHKRLPSQQREIRGPAVPRLTSAEDRHRHGPHAHSPELQRTGRKVPWYPSDFLDALHLQCFSAVLYIYLATVTNAITFGGLLGDATDGAQGVLESFLGTAVAGAAFCLMAGQPLTILSSTGPVLVFERLLFSFSRDYSLDYLPFRLWVGIWVATFCLVLVATEASVLVRYFTRFTEEGFCALISLIFIYDAVGKMLNLTHTYPIQKPGSSAYGCLCQYPGPGGNESQWIRTRPKDRDDIDLGLINASLLPPPECTRQGGHPRGPGCHTVPDIAFFSLLLFLTSFFFAMALKCVKTSRFFPSVVRKGLSDFSSVLAILLGCGLDAFLGLATPKLMVPREFKPTLPGRGWLVSPFGANPWWWSVAAALPALLLSILIFMDQQITAVILNRMEYRLQKGAGFHLDLFCVAVLMLLTSALGLPWYVSATVISLAHMDSLRRESRACAPGERPNFLGIREQRLTGLVVFILTGASIFLAPVLKFIPMPVLYGIFLYMGVAALSSIQFTNRVKLLLMPAKHQPDLLLLRHVPLTRVHLFTAIQLACLGLLWIIKSTPAAIIFPLMLLGLVGVRKALERVFSPQELLWLDELMPEEERSIPEKGLEPEHSFSGSDSEDSELMYQPKAPEINISVN

SEQ ID NO: 15623 - protein, 676 aa, Homo sapiens
MAKINTQYSHPSRTHLKVKTSDRDLNRAENGLSRAHSSSEETSSVLQPGIAMETRGLADSGQGSFTGQGIARLSRLIFLLRRWAARHVHHQDQGPDSFPDRFRGAELKEVSSQESNAQANVGSQEPADRGRRKKTKKKDAIVVDPSSNLYYRWLTAIALPVFYNWYLLICRACFDELQSEYLMLWLVLDYSADVLYVLDVLVRARTGFLEQGLMVSDTNRLWQHYKTTTQFKLDVLSLVPTDLAYLKVGTNYPEVRFNRLLKFSRLFEFFDRTETRTNYPNMFRIGNLVLYILIIIHWNACIYFAISKFIGFGTDSWVYPNISIPEHGRLSRKYIYSLYWSTLTLTTIGETPPPVKDEEYLFVVVDFLVGVLIFATIVGNVGSMISNMNASRAEFQAKIDSIKQYMQFRKVTKDLETRVIRWFDYLWANKKTVDEKEVLKSLPDKLKAEIAINVHLDTLKKVRIFQDCEAGLLVELVLKLRPTVFSPGDYICKKGDIGKEMYIINEGKLAVVADDGVTQFVVLSDGSYFGEISILNIKGSKSGNRRTANIRSIGYSDLFCLSKDDLMEALTEYPEAKKALEEKGRQILMKDNLIDEELARAGADPKDLEEKVEQLGSSLDTLQTRFARLLAEYNATQMKMKQRLSQLESQVKGGGDKPLADGEVPGDATKTEDKQQ

SEQ ID NO: 15624 - protein, 196 aa, Homo sapiens
SSRSNSFGERPGGGGGARRVRALVSHSEGANHTLLRFSAGDVVEVLVPEAQNGWLYGKLEGSSASGWFPEAYVKALEEGPVNPMTPVTPMTSMTSMSPMTPMNPGNELPSRSYPLRGSHSLDDLLDRPGNSIAPSEYWDGQSRSRTPSRVPSRAPSPAPPPLPSSRRSSMGSTAVATDVKGHKSFCHCQASSHHHQ

SEQ ID NO: 15625 - protein, 404 aa, Homo sapiens
MADKVLKEKRKLFIRSMGEGTINGLLDELLQTRVLNKEEMEKVKRENATVMDKTRALIDSVIPKGAQACQICITYICEEDSYLAGTLGLSADQTSGNYLNMQDSQGVLSSFPAPQAVQDNPAMPTSSGSEGNVKLCSLEEAQRIWKQKSAEIYPIMDKSSRTRLALIICNEEFDSIPRRTGAEVDITGMTMLLQNLGYSVDVKKNLTASDMTTELEAFAHRPEHKTSDSTFLVFMSHGIREGICGKKHSEQVPDILQLNAIFNMLNTKNCPSLKDKPKVIIIQACRGDSPGVVWFKDSVGVSGNLSLPTTEEFEDDAIKKAHIEKDFIAFCSSTPDNVSWRHPTMGSVFIGRLIEHMQEYACSCDVEEIFRKVRFSFEQPDGRAQMPTTERVTLTRCFYLFPGH

SEQ ID NO: 15626 - protein, 779 aa, Homo sapiens
MTPEFDEEVVFENSPLYQYLQDLGHTDFEICSSLSPKTEKCTTEGQQKPPTRVLPKQGILLKVAETIKSWIFFSQCNKKDDLLHKLDIGFRLDSLHTILQQEVLLQEDVELIELLDPSILSAGQSQQQENGHLPTLCSLATPNIWDLSMLFAFISLLVMLPTWWIVSSWLVWGVILFVYLVIRALRLWRTAKLQVTLKKYSVHLEDMATNSRAFTNLVRKALRLIQETEVISRGFTLVSAACPFNKAGQHPSQHLIGLRKAVYRTLRANFQAARLATLYMLKNYPLNSESDNVTNYICVVPFKELGLGLSEEQISEEEAHNFTDGFSLPALKVLFQLWVAQSSEFFRRLALLLSTANSPPGPLLTPALLPHRILSDVTQGLPHAHSACLEELKRSYEFYRYFETQHQSVPQCLSKTQQKSRELNNVHTAVRSLQLHLKALLNEVIILEDELEKLVCTKETQELVSEAYPILEQKLKLIQPHVQASNNCWEEAISQVDKLLRRNTDKKGKPEIACENPHCTVVPLKQPTLHIADKDPIPEEQELEAYVDDIDIDSDFRKDDFYYLSQEDKERQKREHEESKRVLQELKSVLGFKASEAERQKWKQLLFSDHAVLKSLSPVDPVEPISNSEPSMNSDMGKVSKNDTEEESNKSATTDNEISRTEYLCENSLEGKNKDNSSNEVFPQGAEERMCYQCESEDEPQADGSGLTTAPPTPRDSLQPSIKQRLARLQLSPDFTFTAGLAAEVAARSLSFTTMQEQTFGGEEEEQIIEENKNEIEEK

SEQ ID NO: 15627 - protein, 158 aa, Homo sapiens
MGGPVREPALSVALWLSWGAALGAVACAMALLTQQTELQSLRREVSRLQGTGGPSQNGEGYPWQSLPEQSSDALEAWENGERSRKRRAVLTQKQKKQHSVLHLVPINATSKDDSDVTEVMWQPALRRGRGLQAQGYGVRIQDAGVYLLYSQVLFQDVT

SEQ ID NO: 15628 - protein, 272 aa, Homo sapiens
MAVFVVLLALVAGVLGNEFSILKSPGSVVFRNGNWPIPGERIPDVAALSMGFSVKEDLSWPGLAVGNLFHRPRATVMVMVKGVNKLALPPGSVISYPLENVDLLFLSELQVLHDISSLLSRHKHLAKDHSPDLYSLELAGLDEIGKRYGEDSEQFRDASKILVDALQKFADDMYSLYGGNAVVELVTVKSFDTSLIRKTRTILEAKQAKNPASPYNLAYKYNFEYSVVFNMVLWIMIALALAVIITSYNIWNMDPGYDSIIYRMTNQKIRMD

SEQ ID NO: 15629 - protein, 412 aa, Homo sapiens
MVPPPPGEESQTVILPPGWQSYLSPQGRRYYVNTTTNETTWERPSSSPGIPASPGSHRSSLPPTVNGYHASGTPAHPPETAHMSVRKSTGDSQNLGSSSPSKKQSKENTITINCVTFPHPDTMPEQQLLKPTEWSYCDYFWADKKDPQGNGTVAGFELLLQKQLKGKQMQKEMSEFIRERIKIEEDYAKNLAKLSQNSLASQEEGSLGEAWAQVKKSLADEAEVHLKFSAKLHSEVEKPLMNFRENFKKDMKKCDHHIADLRKQLASRYASVEKARKALTERQRDLEMKTQQLEIKLSNKTEEDIKKARRKSTQAGDDLMRCVDLYNQAQSKWFEEMVTTTLELERLEVERVEMIRQHLCQYTQLRHETDMFNQSTVEPVDQLLRKVDPAKDRELWVREHKTGNIRPVDMEI

SEQ ID NO: 15630 - protein, 549 aa, Homo sapiens
MPLQGSVSFKDVTVDFTQEEWQQLDPAQKALYRDVMLENYCHFVSVGFHMAKPDMIRKLEQGEELWTQRIFPSYSYLEDGKTEDVLVKFKEYQDRHSRPLIFINHKKLIKERSNIYGKTFTLGKNRISKTILCEYKPDGKVLKNISELVIRNISPIKEKFGDSTGWEKSLLNTKHEKIHPAVNLHKQTERVLSGKQELIQHQKVQAPEQPFDHNECEKSFLMKGMLFTHTRAHRGERTFEYNKDGIAFIEKSSLSVHPSNLMEKKPSAYNKYGKFLCRKPVFIMPQRPQTEEKPFHCPYCGNNFRRKSYLIEHQRIHTGEKPYVCNQCGKAFRQKTALTLHEKTHIEGKPFICIDCGKSFRQKATLTRHHKTHTGEKAYECPQCGSAFRKKSYLIDHQRTHTGEKPYQCNECGKAFIQKTTLTVHQRTHTGEKPYICNECGKSFCQKTTLTLHQRIHTGEKPYICNECGKSFRQKAILTVHHRIHTGEKSNGCPQCGKAFSRKSNLIRHQKTHTGEKPYECKQCGKFFSCKSNLIVHQKTHKVETTGIQ

SEQ ID NO: 15631 - protein, 482 aa, Homo sapiens
MTGAYPKPTLSAQPSPVVTSGGRVTLQCESQVAFGGFILCKEGEDEHPQCLNSQPHARGSSRAIFSVGPVSPNRRWSHRCYGYDLNSPYVWSSPSDLLELLVPGVSKKPSLSVQPGPVMAPGESLTLQCVSDVGYDRFVLYKEGERDLRQLPGRQPQAGLSQANFTLGPVSRSYGGQYRCYGAHNLSSECSAPSDPLDILITGQIRGTPFISVQPGPTVASGENVTLLCQSWRQFHTFLLTKAGAADAPLRLRSIHEYPKYQAEFPMSPVTSAHAGTYRCYGSLNSDPYLLSHPSEPLELVVSGPSMGSSPPPTGPISTPAGPEDQPLTPTGSDPQSGLGRHLGVVIGILVAVVLLLLLLLLLFLILRHRRQGKHWTSTQRKADFQHPAGAVGPEPTDRGLQWRSSPAADAQEENLYAAVKDTQPEDGVEMDTRAAASEAPQDVTYAQLHSLTLRRKATEPPPSQEREPPAEPSIYATLAIH

SEQ ID NO: 15632 - protein, 460 aa, Homo sapiens
MAQFYYKRNVNAPYRDRIPLRIVRAESELSPSEKAYLNAVEKGDYASVKKSLEEAEIYFKININCIDPLGRTALLIAIENENLELIELLLSFNVYVGDALLHAIRKEVVGAVELLLNHKKPSGEKQVPPILLDKQFSEFTPDITPIILAAHTNNYEIIKLLVQKGVSVPRPHEVRCNCVECVSSSDVDSLRHSRSRLNIYKALASPSLIALSSEDPFLTAFQLSWELQELSKVENEFKSEYEELSRQCKQFAKDLLDQTRSSRELEIILNYRDDNSLIEEQSGNDLARLKLAIKYRQKEFVAQPNCQQLLASRWYDEFPGWRRRHWAVKMVTCFIIGLLFPVFSVCYLIAPKSPLGLFIRKPFIKFICHTASYLTFLFLLLLASQHIDRSDLNRQGPPPTIVEWMILPWVLGFIWGEIKQMWDGGLQDYIHDWWNLMDFVMNSLYLATISLKIVAFVKVI

SEQ ID NO: 15633 - protein, 106 aa, Homo sapiens
MSNPSAPPPYEDRNPLYPGPPPPGGYGQPSVLPGGYPAYPGYPQPGYGHPAGYPQPMPPTHPMPMNYGPGHGYDGEERAVSDSFGPGEWDDRKVRHTFIRKVYSII

SEQ ID NO: 15634 - protein, 877 aa, Homo sapiens
MSYTLDSLGNPSAYRRVTETRSSFSRVSGSPSSGFRSQSWSRGSPSTVSSSYKRSMLAPRLAYSSAMLSSAESSLDFSQSSSLLNGGSGPGGDYKLSRSNEKEQLQGLNDRFAGYIEKVHYLEQQNKEIEAEIQALRQKQASHAQLGDAYDQEIRELRATLEMVNHEKAQVQLDSDHLEEDIHRLKERFEEEARLRDDTEAAIRALRKDIEEASLVKVELDKKVQSLQDEVAFLRSNHEEEVADLLAQIQASHITVERKDYLKTDISTALKEIRSQLESHSDQNMHQAEEWFKCRYAKLTEAAEQNKEAIRSAKEEIAEYRRQLQSKSIELESVRGTKESLERQLSDIEERHNHDLSSYQDTIQQLENELRGTKWEMARHLREYQDLLNVKMALDIEIAAYRKLLEGEETRFSTFAGSITGPLYTHRPPITISSKIQKPKVEAPKLKVQHKFVEEIIEETKVEDEKSEMEEALTAITEELAVSMKEEKKEAAEEKEEEPEAEEEEVAAKKSPVKATAPEVKEEEGEKEEEEGQEEEEEEDEGAKSDQAEEGGSEKEGSSEKEEGEQEEGETEAEAEGEEAEAKEEKKVEEKSEEVATKEELVADAKVEKPEKAKSPVPKSPVEEKGKSPVSKSPVEEKAKSPVPKSPVEEAKSKAEVGKGEQKEEEEKEVKEAPKEEKVEKKEEKPKDVPEKKKAESPVKEEAVAEVVTITKSVKVHLEKETKEEGKPLQQEKEKEKAGGEGGSEEEGSDKGAKGSRKEDIAVNGEVEGKEEVEQETKEKGSGREEEKGVVTNGLDLSPADEKKGGDKSEEKVVVTKTVEKITSEGGDGATKYITKSVTVTQKVEEHEETFEEKLVSTKKVEKVTSHAIVKEVTQSD

SEQ ID NO: 15635 - protein, 752 aa, Homo sapiens
MRRREGHGTDSEMGQGPVRESQSSDPPALQFRISEYKPLNMAGVEQPPSPELRQEGVTEYEDGGAPAGDGEAGPQQAEDHPQNPPEDPNQDPPEDDSTCQCQACGPHQAAGPDLGSSNDGCPQLFQERSVIVENSSGSTSASELLKPMKKRKRREYQSPSEEESEPEAMEKQEEGKDPEGQPTASTPESEEWSSSQPATGEKKECWSWESYLEEQKAITAPVSLFQDSQAVTHNKNGFKLGMKLEGIDPQHPSMYFILTVAEVCGYRLRLHFDGYSECHDFWVNANSPDIHPAGWFEKTGHKLQPPKGYKEEEFSWSQYLRSTRAQAAPKHLFVSQSHSPPPLGFQVGMKLEAVDRMNPSLVCVASVTDVVDSRFLVHFDNWDDTYDYWCDPSSPYIHPVGWCQKQGKPLTPPQDYPDPDNFCWEKYLEETGASAVPTWAFKVRPPHSFLVNMKLEAVDRRNPALIRVASVEDVEDHRIKIHFDGWSHGYDFWIDADHPDIHPAGWCSKTGHPLQPPLGPREPSSASPGGCPPLSYRSLPHTRTSKYSFHHRKCPTPGCDGSGHVTGKFTAHHCLSGCPLAERNQSRLKAELSDSEASARKKNLSGFSPRKKPRHHGRIGRPPKYRKIPQEDFQTLTPDVVHQSLFMSALSAHPDRSLSVCWEQHCKLLPGVAGISASTVAKWTIDEVFGFVQTLTGCEDQARLFKDEMIDGEAFLLLTQADIVKIMSVKLGPALKIYNAILMFKNADDTLK

SEQ ID NO: 15636 - protein, 208 aa, Homo sapiens
MKGALMEIIQLASLDSDPWVLMVADILKSFPDTGSLNLELEEQNPNVQDILGELREKVGECEASAMLPLECQYLNKNALTTLAGPLTPPVKHFQLKRKPKSATLRAELLQKSTETAQQLKRSAGVPFHAKGRGLLRKMDTTTPLKGIPKQAPFRSPTAPSVFSPTGNRTPIPPSRTLLRKERGVKLLDISELDMVGAGREAKRRRKTL

SEQ ID NO: 15637 - protein, 1025 aa, Homo sapiens
MAGTYSSTLKTLEDLTLDSGYGAGDSCRSLSLSSSKSNSQALNSSAQQHRGAAWWCYSGSMNSRHNSWDTVNTVLPEDPEVADLFSRCPRLPELEEFPWTEGDVARVLRKGAGGRRLPQFSAEAVRRLAGLLRRALIRVAREAQRLSVLHAKCTRFEVQSAVRLVHSWALAESCALAAVKALSLYSMSAGDGLRRGKSARCGLTFSVGRFFRWMVDTRISVRIHEYAAISLTACMENLVEEIRARVMASHSPDGGGAGGGEVSAEALEMVINNDAELWGVLQPYEHLICGKNANGVLSLPAYFSPYNGGSLGHDERADAYAQLELRTLEQSLLATCVGSISELSDLVSRAMHHMQGRHPLCPGASPARQARQPPQPITWSPDALHTLYYFLRCPQMESMENPNLDPPRMTLNNERPFMLLPPLMEWMRVAITYAEHRRSLTVDSGDIRQAARLLLPGLDCEPRQLKPEHCFSSFRRLDARAATEKFNQDLGFRMLNCGRTDLINQAIEALGPDGVNTMDDQGMTPLMYACAAGDEAMVQMLIDAGANLDIQVPSNSPRHPSIHPDSRHWTSLTFAVLHGHISVVQLLLDAGAHVEGSAVNGGEDSYAETPLQLASAAGNYELVSLLLSRGADPLLSMLEAHGMGSSLHEDMNCFSHSAAHGHRNVLRKLLTQPQQAKADVLSLEEILAEGVEESDASSQGSGSEGPVRLSRTRTKALQEAMYYSAEHGYVDITMELRALGVPWKLHIWIESLRTSFSQSRYSVVQSLLRDFSSIREEEYNEELVTEGLQLMFDILKTSKNDSVIQQLATIFTHCYGSSPIPSIPEIRKTLPARLDPHFLNNKEMSDVTFLVEGKLFYAHKVLLVTASNRFKTLMTNKSEQDGDSSKTIEISDMKYHIFQMMMQYLYYGGTESMEIPTTDILELLSAASLFQLDALQRHCEILCSQTLSMESAVNTYKYAKIHNAPELALFCEGFFLKHMKALLEQDAFRQLIYGRSSKVQGLDPLQDLQNTLAERVHSVYITSRV

SEQ ID NO: 15638 - protein, 510 aa, Homo sapiens
MTPILTVLICLGLSLGPRTHVQAGHLPKPTLWAEPGSVITQGSPVTLRCQGGQETQEYRLYREKKTAPWITRIPQELVKKGQFPIPSITWEHTGRYRCYYGSDTAGRSESSDPLELVVTGAYIKPTLSAQPSPVVNSGGNVTLQCDSQVAFDGFILCKEGEDEHPQCLNSQPHARGSSRAIFSVGPVSPSRRWWYRCYAYDSNSPYEWSLPSDLLELLVLGVSKKPSLSVQPGPIVAPEETLTLQCGSDAGYNRFVLYKDGERDFLQLAGAQPQAGLSQANFTLGPVSRSYGGQYRCYGAHNLSSEWSAPSDPLDILIAGQFYDRVSLSVQPGPTVASGENVTLLCQSQGWMQTFLLTKEGAADDPWRLRSTYQSQKYQAEFPMGPVTSAHAGTYRCYGSQSSKPYLLTHPSDPLELVVSGPSGGPSSPTTGPTSTSGPEDQPLTPTGSDPQSGLGRHLGVVIGILVAVILLLLLLLLLFLILRHRRQGKHWTSSPAQLPMPRKKTSMLP

SEQ ID NO: 15639 - protein, 557 aa, Homo sapiens
MEMQDLTSPHSRLSGSSESPSGPKLGNSHINSNSMTPNGTEVKTEPMSSSETASTTADGSLNNFSGSAIGSSSFSPRPTHQFSPPQIYPSNRPYPHILPTPSSQTMAAYGQTQFTTGMQQATAYATYPQPGQPYGISSYGIKTEGGLSQSQSPGQTGFLSYGTSFSTPQPGQAPYSYQMQGSSFTTSSGIYTGNNSLTNSSGFNSSQQDYPSYPSFGQGQYAQYYNSSPYPAHYMTSSNTSPTTPSTNATYQLQEPPSGITSQAVTDPTAEYSTIHSPSTPIKDSDSDRLRRGSDGKSRGRGRRNNNPSPPPDSDLERVFIWDLDETIIVFHSLLTGSYANRYGRECDQVHIDDVSSDDNGQDLSTYNFGTDGFPAAATSANLCLATGVRGGVDWMRKLAFRYRRVKEIYNTYKNNVGGLLGPAKREAWLQLRAEIEALTDSWLTLALKALSLIHSRTNCVNILVTTTQLIPALAKVLLYGLGIVFPIENIYSATKIGKESCFERIIQRFGRKVVYVVIGDGVEEEQGAKKHAMPFWRISSHSDLMALHHALELEYL

SEQ ID NO: 15640 - protein, 200 aa, Homo sapiens
YRVSKQAQLSAPTKQLFPGGTFPEDFSILFTVKPKKGIQSFLLSIYNEHGIQQIGVEVGRSPVFLFEDHTGKPAPEDYPLFRTVNIADGKWHRVAISVEKKTVTMIVDCKKKTTKPLDRSERAIVDTNGITVFGTRILDEEVFEGDIQQFLITGDPKAAYDYCEHYSPDCDSSAPKAAQAQEPQIDEVRSTRPEKVFVFQ

SEQ ID NO: 15641 - protein, 395 aa, Homo sapiens
MKEDGGAEFSARSRKRKANVTVFLQDPDEEMAKIDRTARDQCGSQPWDNNAVCADPCSLIPTPDKEDDDRVYPNSTCKPRIIAPSRGSPLPVLSWANREEVWKIMLNKEKTYLRDQHFLEQHPLLQPKMRAILLDWLMEVCEVYKLHRETFYLAQDFFDRYMATQENVVKTLLQLIGISSLFIAAKLEEIYPPKLHQFAYVTDGACSGDEILTMELMIMKALKWRLSPLTIVSWLNVYMQVAYLNDLHEVLLPQYPQQIFIQIAELLDLCVLDVDCLEFPYGILAASALYHFSSSELMQKVSGYQWCDIENCVKWMVPFAMVIRETGSSKLKHFRGVADEDAHNIQTHRDSLDLLDKARAKKAMLSEQNRASPLPSGLLTPPQSGKKQSSGPEMA

SEQ ID NO: 15642 - protein, 1911 aa, Homo sapiens [sequence omitted]

SEQ ID NO: 15643 - protein, 1334 aa, Homo sapiens
MALSPGANLVFHEDPKMTPSPPSCGAPGLGSGTIPQPHPDMAQVPMLNLLPSPGLALVPDLNDSLSPVSGEASGLVSENTPRPDDSRAIAPASLQITSSCSGEALDLDSKDVSRPDSQGRLCPASNPILSPSSTEAPRLSSGNHPQSNSEDAFKCLSSKIFKLGQRNSNPSRHELNPFIRHHSREGLVLGHCISRPSSKALLIPTSNSSLDLDSNPLLNMGSRNTSKLNLNVAPDSHGTLIPDTNETITLASHNISESVSKGAFSTTWSTSSKETMNVASSGHSRSDLSVTITQASYVTLIPGSSYGISLHSSTHEPNSTISPPSCMTLILGSNETLSLDSSLLFSDTSTLTLSSQQDDAKDNSIHTVPLEENLESWSEMASIKVGQFPLGFPISNPAGKDAVTLQGIPEGAFDEVTSCLVKVPEKTEGGNNMALVENVTTLQKSQDLLEAEGEKKTMIKKIMRQIQEEPLDSLSSSVRKQAMEILTQLSHTQPTLGMRERSELVNVCVHSVFSLPSVQAMQEKDEAKAETIQALYHQTLEALQTLLKALFIEDPTPAGLKSILEALGPWMNSGKAHERARAVNTNVSVLNHMLLTLPFFMPLGFPALGLLLGRLILHIGDPDEEIGCEALDGIIILYTILELQKRARDKEETNKKELYESNKHFLGPYNPVSPCQNILRVIEEFGDFLGPQQIKDLLLAALEGLKGSSEAPGKDSREMMQLASEVMLSSVLEWYRHRALEVIPEIMQGIYMQLSHIQEPRARQVALLPVSLLASSFMTEVVVALLMCPLPLNSNGAEMWRQLILCKPSCDVRDLLDLLLGSLKEKPVTKEGRASIVPLAAASGLCELLSVNSCMGRVRRIYPQLLLALLIQVHYHIGLNLPGCVAPPKDTKKGAQPSPFVPVRWVVKVVKTLLLRMGCSYETTFLEDQGGWELMEQVESHHRGVALLARAMVQYSCQELCRILYLLIPLLERGDEKHRITATAFFVELLQMEQVRRIPEEYSLGRMAEGLSHHDPIMKVLSIRGLVILARRSEKTAKVKALLPSMVKGLKNMDGMLVVEAVHNLKAVFKGRDQKLMDSAVYVEMLQILLPHFSDAREVVRSSCINLYGKVVQKLRAPRTQAMEEQLVSTLVPLLLTMQEGNSKVSQKCVKTLLRCSYFMAWELPKRAYSRKPWDNQQQTVAKICKCLVNTHRDSAFIFLSQSLEYAKNSRASLRKCSVMFIGSLVPCMESIMTEDRLNEVKAATPRGQRFHLLCPPLYSQPLEQAGSAERAKNLKRSPYLCRERHQKLIPGRILTWLVSSQLFLMRSVLQKNRPRPIKMRAMITLKKKTTRKL

SEQ ID NO: 15644 - protein, 614 aa, Homo sapiens
MMAADIPRVTTPLSSLVQVPQEEDRQEEEVTTMILEDDSWVQEAVLQEDGPESEPFPQSAGKGGPQEEVTRGPQGALGRLRELCRRWLRPEVHTKEQMLTMLPKEIQAWLQEHRPESSEEAAALVEDLTQTLQDSDFEIQSENGENCNQDMFENESRKIFSEMPEGESAQHSDGESDFERDAGIQRLQGHSPGEDHGEVVSQDREVGQLIGLQGTYLGEKPYECPQCGKTFSRKSHLITHERTHTGEKYYKCDECGKSFSDGSNFSRHQTTHTGEKPYKCRDCGKSFSRSANLITHQRIHTGEKPFQCAECGKSFSRSPNLIAHQRTHTGEKPYSCPECGKSFGNRSSLNTHQGIHTGEKPYECKECGESFSYNSNLIRHQRIHTGEKPYKCTDCGQRFSQSSALITHRRTHTGEKPYQCSECGKSFSRSSNLATHRRTHMVEKPYKCGVCGKSFSQSSSLIAHQGMHTGEKPYECLTCGESFSWSSNLLKHQRIHTGEKPYKCSECGKCFSQRSQLVVHQRTHTGEKPYKCLMCGKSFSRGSILVMHQRAHLGDKPYRCPECGKGFSWNSVLIIHQRIHTGEKPYKCPECGKGFSNSSNFITHQRTHMKEKLY

SEQ ID NO: 15645 - protein, 414 aa, Homo sapiens
LLDASEKLKLTYEEKCEIEESQLKFLRNDLAEYQRTCEDLKEQLKHKEFLLAANTCNRVGGLCLKCAQHEAVLSQTHTNVHMQTIERLVKERDDLMSALVSVRSSLADTQQREASAYEQVKQVLQISEEANFEKTKALIQCDQLRKELERQAERLEKELASQQEKRAIEKDMMKKEITKEREYMGSKMLILSQNIAQLEAQVEKVTKEKISAINQLEEIQSQLASREMDVTKVCGEMRYQLNKTNMEKDEAEKEHREFRAKTNRDLEIKDQEIEKLRIELDESKQHLEQEQQKAALAREECLRLTELLGESEHQLHLTRSEIAQLSQEKRYTYDKLGKLQRRNEELEEQCVQHGRVHETMKQRLRQLDKHSQATAQQLVQLLSKQNQLLLERQSLSEEVDRLRTQLPSMPQSDC

SEQ ID NO: 15646 - protein, 345 aa, Homo sapiens
MEDYSKYNAYTDFSSCRLECSGAILAHCNLHLLGSSISPASASRVAGTTGLLNHQWLKETDVPQKSRQLYAIIAEYGSRLYKYQARLRMPKEQLELLKKESQNLENNFRQILFLIEQIDVLKALLRDMKDGMDNNHNWNTHGDPVEDPDHTEEVSNLVNYVLKKLREDQVEMADYALKSAGASIIEAGTSESYKNNKAKLYWHGIGFLNHEMPPDIILQPDVYPGKCWAFPGSQGHTLIKLATKIIPTAVTMEHISEKVSPSGNISSAPKEFSVYGITKKCEGEEIFLGQFIYNKTGTTVQTFELQHAVSEYLLCVKLNIFSNWGHPKYTCLYRFRVHGTPGKHI

SEQ ID NO: 15647 - protein, 1214 aa, Homo sapiens
MGVDFDVKTFCHNLRATKPPYECPVETCRKVYKSYSGIEYHLYHYDHDNPPPPQQTPLRKHKKKGRQSRPANKQSPSPSEVSQSPGREVMSYAQAQRMVEVDLHGRVHRISIFDNLDVVSEDEEAPEEAPENGSNKENTETPAATPKSGKHKNKEKRKDSNHHHHHNVSASTTPKLPEVVYRELEQDTPDAPPRPTSYYRYIEKSAEELDEEVEYDMDEEDYIWLDIMNERRKTEGVSPIPQEIFEYLMDRLEKESYFESHNKGDPNALVDEDAVCCICNDGECQNSNVILFCDMCNLAVHQECYGVPYIPEGQWLCRRCLQSPSRAVDCALCPNKGGAFKQTDDGRWAHVVCALWIPEVCFANTVFLEPIDSIEHIPPARWKLTCYICKQRGSGACIQCHKANCYTAFHVTCAQQAGLYMKMEPVRETGANGTSFSVRKTAYCDIHTPPGSARRLPALSHSEGEEDEDEEEDEGKGWSSEKVKKAKAKSRIKMKKARKILAEKRAAAPVVSVPCIPPHRLSKITNRLTIQRKSQFMQRLHSYWTLKRQSRNGVPLLRRLQTHLQSQRNCDQVGRDSEDKNWALKEQLKSWQRLRHDLERARLLVELIRKREKLKRETIKVQQIAMEMQLTPFLILLRKTLEQLQEKDTGNIFSEPVPLSEVPDYLDHIKKPMDFFTMKQNLEAYRYLNFDDFEEDFNLIVSNCLKYNAKDTIFYRAAVRLREQGGAVLRQARRQAEKMGIDFETGMHIPHSLAGDEATHHTEDAAEEERLVLLENQKHLPVEEQLKLLLERLDEVNASKQSVGRSRRAKMIKKEMTALRRKLAHQRETGRDGPERHGPSSRGSLTPHPAACDKDGQTDSAAEESSSQETSKGLGPNMSSTPAHEVGRRTSVLFSKKNPKTAGPPKRPGRPPKNRESQMTPSHGGSPVGPPQLPIMSSLRQRKRGRSPRPSSSSDSDSDKSTEDPPMDLPANGFSGGNQPVKKSFLVYRNDCSLPRSSSDSESSSSSSSSAASDRTSTTPSKQGRGKPSFSRGTFPEDSSEDTSGTENEAYSVGTGRGVGHSMVRKSLGRGAGWLSEDEDSPLDALDLVWAKCRGYPSYPALIIDPKMPREGMFHHGVPIPVPPLEVLKLGEQMTQEAREHLYLVLFFDNKRTWQWLPRTKLVPLGVNQDLDKEKMLEGRKSNIRKSVQIAYHRALQHRSKVQGEQSSETSDSD

SEQ ID NO: 15648 - protein, 575 aa, Homo sapiens
MSSDEEKYSLPVVQNDSSRGSSVSSNLQEEYEELLHYAIVTPNIEPCASQSSHPKGELVPDVRISTIHDILHSQGNNSEVRETAIEVGKGCDFHISSHSKTDESSPVLSPRKPSHPVMDFFSSHLLADSSSPATNSSHTDAHEILVSDFLVSDENLQKMENVLDLWSSGLKTNIISELSKWRLNFIDWHRMEMRKEKEKHAAHLKQLCNQINELKELQKTFEISIGRKDEVISSLSHAIGKQKEKIELMRTFFHWRIGHVRARQDVYEGKLADQYYQRTLLKKVWKVWRSVVQKQWKDVVERACQARAEEVCIQISNDYEAKVAMLSGALENAKAEIQRMQHEKEHFEDSMKKAFMRGVCALNLEAMTIFQNRNDAGIDSTNNKKEEYGPGVQGKEHSAHLDPSAPPMPLPVTSPLLPSPPAAVGGASATAVPSAASMTSTRAASASSVHVPVSALGAGSAATAASEEMYVPRVVTSAQQKAGRTITARITGRCDFASKNRISSSLAIMGVSPPMSSVVVEKHHPVTVQTIPQATAAKYPRTIHPESSTSASRSLGTRSAHTQSLTSVHSIKVVD

SEQ ID NO: 15649 - protein, 2016 aa, Homo sapiens
MANFLLPRGTSSFRRFTRESLAAIEKRMAEKQARGSTTLQESREGLPEEEAPRPQLDLQASKKLPDLYGNPPQELIGEPLEDLDPFYSTQKTFIVLNKGKTIFRFSATNALYVLSPFHPIRRAAVKILVHSLFNMLIMCTILTNCVFMAQHDPPPWTKYVEYTFTAIYTFESLVKILARGFCLHAFTFLRDPWNWLDFSVIIMAYVSENIKLGNLSALRTFRVLRALKTISVIPGLKTIVGALIQSVKKLADVMVLTVFCLSVFALIGLQLFMGNLRHKCVRNFTALNGTNGSVEADGLVWESLDLYLSDPENYLLKNGTSDVLLCGNSSDAGTCPEGYRCLKAGENPDHGYTSFDSFAWAFLALFRLMTQDCWERLYQQTLRSAGKIYMIFFMLVIFLGSFYLVNLILAVVAMAYEEQNQATIAETEEKEKRFQEAMEMLKKEHEALTIRGVDTVSRSSLEMSPLAPVNSHERRSKRRKRMSSGTEECGEDRLPKSDSEDGPRAMNHLSLTRGLSRTSMKPRSSRGSIFTFRRRDLGSEADFADDENSTAGESESHHTSLLVPWPLRRTSAQGQPSPGTSAPGHALHGKKNSTVDCNGVVSLLGAGDPEATSPGSHLLRPVMLEHPPDTTTPSEEPGGPQMLTSQAPCVDGFEEPGARQRALSAVSVLTSALEELEESRHKCPPCWNRLAQRYLIWECCPLWMSIKQGVKLVVMDPFTDLTITMCIVLNTLFMALEHYNMTSEFEEMLQVGNLVFTGIFTAEMTFKIIALDPYYYFQQGWNIFDSIIVILSLMELGLSRMSNLSVLRSFRLLRVFKLAKSWPTLNTLIKIIGNSVGALGNLTLVLAIIVFIFAVVGMQLFGKNYSELRDSDSGLLPRWHMMDFFHAFLIIFRILCGEWIETMWDCMEVSGQSLCLLVFLLVMVIGNLVVLNLFLALLLSSFSADNLTAPDEDREMNNLQLALARIQRGLRFVKRTTWDFCCGLLRQRPQKPAALAAQGQLPSCIATPYSPPPPETEKVPPTRKETRFEEGEQPGQGTPGDPEPVCVPIAVAESDTDDQEEDEENSLGTEEESSKQQESQPVSGGPEAPPDSRTWSQVSATASSEAEASASQADWRQQWKAEPQAPGCGETPEDSCSEGSTADMTNTAELLEQIPDLGQDVKDPEDCFTEGCVRRCPCCAVDTTQAPGKVWWRLRKTCYHIVEHSWFETFIIFMILLSSGALAFEDIYLEERKTIKVLLEYADKMFTYVFVLEMLLKWVAYGFKKYFTNAWCWLDFLIVDVSLVSLVANTLGFAEMGPIKSLRTLRALRPLRALSRFEGMRVVVNALVGAIPSIMNVLLVCLIFWLIFSIMGVNLFAGKFGRCINQTEGDLPLNYTIVNNKSQCESLNLTGELYWTKVKVNFDNVGAGYLALLQVATFKGWMDIMYAAVDSRGYEEQPQWEYNLYMYIYFVIFIIFGSFFTLNLFIGVIIDNFNQQKKKLGGQDIFMTEEQKKYYNAMKKLGSKKPQKPIPRPLNKYQGFIFDIVTKQAFDVTIMFLICLNMVTMMVETDDQSPEKINILAKINLLFVAIFTGECIVKLAALRHYYFTNSWNIFDFVVVILSIVGTVLSDIIQKYFFSPTLFRVIRLARIGRILRLIRGAKGIRTLLFALMMSLPALFNIGLLLFLVMFIYSIFGMANFAYVKWEAGIDDMFNFQTFANSMLCLFQITTSAGWDGLLSPILNTGPPYCDPTLPNSNGSRGDCGSPAVGILFFTTYIIISFLIVVNMYIAIILENFSVATEESTEPLSEDDFDMFYEIWEKFDPEATQFIEYSVLSDFADALSEPLRIAKPNQISLINMDLPMVSGDRIHCMDILFAFTKRVLGESGEMDALKIQMEEKFMAANPSKISYEPITTTLRRKHEEVSAMVIQRAFRRHLLQRSLKHASFLFRQQAGSGLSEEDAPEREGLIAYVMSENFSRPLGPPSSSSISSTSFPPSYDSVTRATSDNLQVRGSDYSHSEDLADFPPSPDRDRESIV

SEQ ID NO: 15650 - protein, 151 aa, Homo sapiens
MAATALLEAGLARVLFYPTLLYTLFRGKVPGRAHRDWYHRIDPTVLLGALPLRSLTRQVSRAGEPGPLPRPRRSVPVGPLGSPPSLLSHLFASAAGTGRERARGDHHERGVRDEVPVQLFTGAQMESRGGCKSHRQDPVIHPHQAWPAGCS

SEQ ID NO: 15651 - protein, 378 aa, Homo sapiens
MSKTMAMNLLEDWCRGMEVDIHRSLLVTGIPEDCGQAEIEETLNGVLSPLGPYRVLNKIFVREENVKAALIEVGEGVNLSTIPREFPGRGGVWRVVCRDPTQDAEFLKNLNEFLDAEGRTWEDVVRLLQLNHPTLSQNQHQPPENWAEALGVLLGAVVQIIFCMDAEIRSREEARAQEAAEFEEMAAWALAAGRKVKKEPGLAAEVGSALKAETPNNWNATEDQHEPTKPLVRRAGAKSRSRRKKQKKNSRQEAVPWKKPKGINSNSTANLEDPEVGDAESMAISEPIKGSRKPCVNKEELALKKPMAKCAWKGPREPPQDARAEAESPGGASESDQDGGHESPPKKKAVAWVSAKNPAPMRKKKKNPERFDLGDHPY

SEQ ID NO: 15652 - protein, 158 aa, Homo sapiens
CQRIEKQRASDTMVQERKNEKPVRIFNTNSSFQDQAPTCCQEDLSSASPLRIWSKFYRSDPRIALGKYSPLEKEILRLGGIHTIAARRLLAYKQEEECRMLKELQLLSPDYKQAMEYKKKHSSPCAICVPLEKIWTAKVIAPLEAFKMPQREQNSLVT

SEQ ID NO: 15653 - protein, 1295 aa, Homo sapiens
LERRKRLEQQRKDYAAPIPTVPLEFLPEVIELSSGEEDTLHIVDSSESVSEDDEEEEKGGTHVNDVLNQRDALGRVLVNLNHPPEEENVFLAPQLARAVKPHQIGGIRFLYDNLVESLERFKTSSGFGCILAHSMGLGKTLQVISFIDVLFRHTPAKTVLAIVPVNTLQNWLAEFNMWLPPPEALPADNKPEEVQPRFFKVHILNDEHKTMASRAKVMADWVSEGGVLLMGYEMYRLLTLKKSFATGRPKKTKKRSHPVIIDLDEEDRQQEFRREFEKALCRPGPDVVICDEGHRIKNCQASTSQALKNIRSRRRVVLTGYPLQNNLIEYWCMVDFVRPDFLGTRQEFSNMFERPILNGQCIDSTPQDVRLMRYRSHVLHSLLEGFVQRRGHTVLKIHLPAKEENVILVRLSKIQRDLYTQFMDRFRDCGSSGWLGLNPLKAFCVCCKIWNHPDVLYEALQKESLANEQDLDVEELGSAGTSARCPPQGTKGKGEDSTLASSMGEATNSKFLQGVGFNPFQERGNNIVTYEWAKDLLTNYQTGVLENSPKMVLLFHLIEESVKLGDKILVFSQSLSTLALIEEFLGKREVPCPPGTEGQGAQKWVRNISYFRLDGSTPAFERERLINQFNDPSNLTTWLFLLSTRAGCLGVNLIGANRVVVFDASWNPCHDAQAVCRVYRYGQKKPCYIYRLVADYTLEKKIYDRQISKQGMSDRVVDDLNPMLNFTRKEVENLLHFVEKEPAPQVSLNVKGIKESVLQLACLKYPHLITKEPFEHESLLLNRKDHKLTKAEKKAAKKSYEEDKRTSVPYTRPSYAQYYPASDQSLTSIPAFSQRNWQPTLKGDEKPVASVRPVQSTPIPMMPRHVPLGGSVSSASSTNPSMNFPINYLQRAGVLVQKVVTTTDIVIPGLNSSTDVQARINAGESIHIIRGTKGTYIRTSDGRIFAVRATGKPKVPEDGRMAASGSQGPSCESTSNGRHSASSPKAPDPEGLARPVSPDSPEIISELQQYADVAAARESRQSSPSTNAALPGPPAQLMDSSAVPGTALGTEPRLGGHCLNSSLLVTGQPCGDRHPVLDLRGHKRKLATPPAAQESSRRRSRKGHLPAPVQPYEHGYPVSGGFAMPPVSLNHNLTTPFTSQAGENSLFMGSTPSYYQLSNLLADARLVFPVTTDPLVPAGPVSSSSTATSVTASNPSFMLNPSVPGILPSYSLPFSQPLLSEPRMFAPFPSPVLPSNLSRGMSIYPGYMSPHAGYPAGGLLRSQVPPFDSHEVAEVGFSSNDDEDKDDDVIEVTGK

SEQ ID NO: 15654 - protein, 822 aa, Homo sapiens
MVSWGRFICLVVVTMATLSLARPSFSLVEDTTLEPEEPPTKYQISQPEVYVAAPGESLEVRCLLKDAAVISWTKDGVHLGPNNRTVLIGEYLQIKGATPRDSGLYACTASRTVDSETWYFMVNVTDAISSGDDEDDTDGAEDFVSENSNNKRAPYWTNTEKMEKRLHAVPAANTVKFRCPAGGNPMPTMRWLKNGKEFKQEHRIGGYKVRNQHWSLIMESVVPSDKGNYTCVVENEYGSINHTYHLDVVERSPHRPILQAGLPANASTVVGGDVEFVCKVYSDAQPHIQWIKHVEKNGSKYGPDGLPYLKVLKHSGINSSNAEVLALFNVTEADAGEYICKVSNYIGQANQSAWLTVLPKQQAPGREKEITASPDYLEIAIYCIGVFLIACMVVTVILCRMKNTTKKPDFSSQPAVHKLTKRIPLRRQVTVSAESSSSMNSNTPLVRITTRLSSTADTPMLAGVSEYELPEDPKWEFPRDKLTLGKPLGEGCFGQVVMAEAVGIDKDKPKEAVTVAVKMLKDDATEKDLSDLVSEMEMMKMIGKHKNIINLLGACTQDGPLYVIVEYASKGNLREYLRARRPPGMEYSYDINRVPEEQMTFKDLVSCTYQLARGMEYLASQKCIHRDLAARNVLVTENNVMKIADFGLARDINNIDYYKKTTNGRLPVKWMAPEALFDRVYTHQSDVWSFGVLMWEIFTLGGSPYPGIPVEELFKLLKEGHRMDKPANCTNELYMMMRDCWHAVPSQRPTFKQLVEDLDRILTLTTNEEYLDLSQPLEQYSPSYPDTRSSCSSGDDSVFSPDPMPYEPCLPQYPHINGSVKT

SEQ ID NO: 15655 - protein, 836 aa, Homo sapiens
MAAETQTLNFGPEWLRALSSGGSITSPPLSPALPKYKLADYRYGREEMLALFLKDNKIPSDLLDKEFLPILQEEPLPPLALVPFTEEEQRNFSMSVNSAAVLRLTGRGGGGTVVGAPRGRSSSRGRGRGRGECGFYQRSFDEVEGVFGRGGGREMHRSQSWEERGDRRFEKPGRKDVGRPNFEEGGPTSVGRKHEFIRSESENWRIFREEQNGEDEDGGWRLAGSRRDGERWRPHSPGWREHMERRRRFEFDFRDRDDERGYRRVRSGSGSIDDDRDSLPEWCLEDAEEEMGTFDSSGAFLSLKKVQKEPIPEEQEMDFRPVDEGEECSDSEGSHNEEAKEPDKTNKKEGEKTDRVGVEASEETPQTSSSSARPGTPSDHQSQEASQFERKDEPKTEQTEKAEEETRMENSLPAKVPSRGDEMVADVQQPLSQIPSDTASPLLILPPPVPNPSPTLRPVETPVVGAPGMGSVSTEPDDEEGLKHLEQQAEKMVAYLQDSALDDERLASKLQEHRAKGVSIPLMHEAMQKWYYKDPQGEIQGPFNNQEMAEWFQAGYFTMSLLVKRACDESFQPLGDIMKMWGRVPFSPGPAPPPHMGELDQERLTRQQELTALYQMQHLQYQQFLIQQQYAQVLAQQQKAALSSQQQQQLALLLQQFQTLKMRISDQNIIPSVTRSVSVPDTGSIWELQPTASQPTVWEGGSVWDLPLDTTTPGPALEQLQQLEKAKAAKLEQERREAEMRAKREEEERKRQEELRRQQEEILRRQQEEERKRREEEELARRKQEEALRRQREQEIALRRQREEEERQQQEEALRRLEERRREEEERRKQEELLRK

SEQ ID NO: 15656 - protein, 558 aa, Homo sapiens
MATTATCTRFTDDYQLFEELGKGAFSVVRRCVKKTSTQEYAAKIINTKKLSARDHQKLEREARICRLLKHPNIVRLHDSISEEGFHYLVFDLVTGGELFEDIVAREYYSEADASHCIHQILESVNHIHQHDIVHRDLKPENLLLASKCKGAAVKLADFGLAIEVQGEQQAWFGFAGTPGYLSPEVLRKDPYGKPVDIWACGVILYILLVGYPPFWDEDQHKLYQQIKAGAYDFPSPEWDTVTPEAKNLINQMLTINPAKRITADQALKHPWVCQRSTVASMMHRQETVECLRKFNARRKLKGAILTTMLVSRNFSAAKSLLNKKSDGGVKKRKSSSSVHLMPQSNNKNSLVSPAQEPAPLQTAMEPQTTVVHNATDGIKGSTESCNTTTEDEDLKGRVPEGRSSRDRTAPSAGMQPQPSLCSSAMRKQEIIKITEQLIEAINNGDFEAYTKICDPGLTSFEPEALGNLVEGMDFHKFYFENLLSKNSKPIHTTILNPHVHVIGEDAACIAYIRLTQYIDGQGRPRTSQSEETRVWHRRDGKWLNVHYHCSGAPAAPLQ

SEQ ID NO: 15657 - protein, 1676 aa, Homo sapiens
MFRQFYLWTCLASGIILGSLFEICLGQYDDDCKLARGGPPATIVAIDEESRNGTILVDNMLIKGTAGGPDPTIELSLKDNVDYWVLMDPVKQMLFLNSTGRVLDRDPPMNIHSIVVQVQCINKKVGTIIYHEVRIVVRDRNDNSPTFKHESYYATVNELTPVGTTIFTGFSGDNGATDIDDGPNGQIEYVIQYNPDDPTSNDTFEIPLMLTGNIVLRKRLNYEDKTRYFVIIQANDRAQNLNERRTTTTTLTVDVLDGDDLGPMFLPCVLVPNTRDCRPLTYQAAIPELRTPEELNPIIVTPPIQAIDQDRNIQPPSDRPGILYSILVGTPEDYPRFFHMHPRTAELSLLEPVNRDFHQKFDLVIKAEQDNGHPLPAFAGLHIEILDENNQSPYFTMPSYQGYILESAPVGATISDSLNLTSPLRIVALDKDIEDTKDPELHLFLNDYTSVFTVTQTGITRYLTLLQPVDREEQQTYTFSITAFDGVQESEPVIVNIQVMDANDNTPTFPEISYDVYVYTDMRPGDSVIQLTAVDADEGSNGEITYEILVGAQGDFIINKTTGLITIAPGVEMIVGRTYALTVQAADNAPPAERRNSICTVYIEVLPPNNQSPPRFPQLMYSLEISEAMRVGAVLLNLQATDREGDSITYAIENGDPQRVFNLSETTGILTLGKALDRESTDRYILIITASDGRPDGTSTATVNIVVTDVNDNAPVFDPYLPRNLSVVEEEANAFVGQVKATDPDAGINGQVHYSLGNFNNLFRITSNGSIYTAVKLNREVRDYYELVVVATDGAVHPRHSTLTLAIKVLDIDDNSPVFTNSTYTVLVEENLPAGTTILQIEAKDVDLGANVSYRIRSPEVKHFFALHPFTGELSLLRSLDYEAFPDQEASITFLVEAFDIYGTMPPGIATVTVIVKDMNDYPPVFSKRIYKGMVAPDAVKGTPITTVYAEDADPPGLPASRVRYRVDDVQFPYPASIFEVEEDSGRVITRVNLNEEPTTIFKLVVVAFDDGEPVMSSSATVKILVLHPGEIPRFTQEEYRPPPVSELATKGTMVGVISAAAINQSIVYSIVSGNEEDTFGINNITGVIYVNGPLDYETRTSYVLRVQADSLEVVLANLRVPSKSNTAKVYIEIQDENNHPPVFQKKFYIGGVSEDARMFTSVLRVKATDKDTGNYSVMAYRLIIPPIKEGKEGFVVETYTGLIKTAMLFHNMRRSYFKFQVIATDDYGKGLSGKADVLVSVVNQLDMQVIVSNVPPTLVEKKIEDLTEILDRYVQEQIPGAKVVVESIGARRHGDAFSLEDYTKCDLTVYAIDPQTNRAIDRNELFKFLDGKLLDINKDFQPYYGEGGRILEIRTPEAVTSIKKRGESLGYTEGALLALAFIIILCCIPAILVVLVSYRQVFKGRQAECTKTARIQAALPAAKPAVPAPAPVAAPPPPPPPPPGAHLYEELGDSSMYEMPQYGSRRRLLPPAGQEEYGEVVGEAEEEYEEEEWARKRMIKLVVDREYETSSTGEDSAPECQRNRLHHPSIHSNINGNIYIAQNGSVVRTRRACLTDNLKVASPVRLGGPFKKLDKLAVTHEENVPLNTLSKGPFSTEKMNARPTLVTFAPCPVGTDNTAVKPLRNRLKSTVEQESMIDSKNIKEALEFHSDHTQSDDEELWMGPWNNLHIPMTKL

SEQ ID NO: 15658 - protein, 545 aa, Homo sapiens
MGSSATEIEELENTTFKYLTGEQTEKMWQRLKGILRCLVKQLERGDVNVVDLKKNIEYAASVLEAVYIDETRRLLDTEDELSDIQTDSVPSEVRDWLASTFTRKMGMTKKKPEEKPKFRSIVHAVQAGIFVERMYRKTYHMVGLAYPAAVIVTLKDVDKWSFDVFALNEASGEHSLKFMIYELFTRYDLINRFKIPVSCLITFAEALEVGYSKYKNPYHNLIHAADVTQTVHYIMLHTGIMHWLTELEILAMVFAAAIHDYEHTGTTNNFHIQTRSDVAILYNDRSVLENHHVSAAYRLMQEEEMNILINLSKDDWRDLRNLVIEMVLSTDMSGHFQQIKNIRNSLQQPEGIDRAKTMSLILHAADISHPAKSWKLHYRWTMALMEEFFLQGDKEAELGLPFSPLCDRKSTMVAQSQIGFIDFIVEPTFSLLTDSTEKIVIPLIEEASKAETSSYVASSSTTIVGLHIADALRRSNTKGSMSDGSYSPDYSLAAVDLKSFKNNLVDIIQQNKERWKELAAQGESDLHKNSEDLVNAEEKHDETHS

SEQ ID NO: 15659 - protein, 1011 aa, Homo sapiens
MHSMISSVDVKSEVPVGLEPISPLDLRTDLRMMMPVVDPVVREKQLQQELLLIQQQQQIQKQLLIAEFQKQHENLTRQHQAQLQEHIKELLAIKQQQELLEKEQKLEQQRQEQEVERHRREQQLPPLRGKDRGRERAVASTEVKQKLQEFLLSKSATKDTPTNGKNHSVSRHPKLWYTAAHHTSLDQSSPPLSGTSPSYKYTLPGAQDAKDDFPLRKTASEPNLKVRSRLKQKVAERRSSPLLRRKDGNVVTSFKKRMFEVTESSVSSSSPGSGPSSPNNGPTGSVTENETSVLPPTPHAEQMVSQQRILIHEDSMNLLSLYTSPSLPNITLGLPAVPSQLNASNSLKEKQKCETQTLRQGVPLPGQYGGSIPASSSHPHVTLEGKPPNSSHQALLQHLLLKEQMRQQKLLVAGGVPLHPQSPLATKERISPGIRGTHKLPRHRPLNRTQSAPLPQSTLAQLVIQQQHQQFLEKQKQYQQQIHMNKLLSKSIEQLKQPGSHLEEAEEELQGDQAMQEDRAPSSGNSTRSDSSACVDDTLGQVGAVKVKEEPVDSDEDAQIQEMESGEQAAFMQQPFLEPTHTRALSVRQAPLAAVGMDGLEKHRLVSRTHSSPAASVLPHPAMDRPLQPGSATGIAYDPLMLKHQCVCGNSTTHPEHAGRIQSIWSRLQETGLLNKCERIQGRKASLEEIQLVHSEHHSLLYGTNPLDGQKLDPRILLGDDSQKFFSSLPCGGLGVDSDTIWNELHSSGAARMAVGCVIELASKVASGELKNGFAVVRPPGHHAEESTAMGFCFFNSVAITAKYLRDQLNISKILIVDLDVHHGNGTQQAFYADPSILYISLHRYDEGNFFPGSGAPNEVGTGLGEGYNINIAWTGGLDPPMGDVEYLEAFRTIVKPVAKEFDPDMVLVSAGFDALEGHTPPLGGYKVTAKCFGHLTKQLMTLADGRVVLALEGGHDLTAICDASEACVNALLGNELEPLAEDILHQSPNMNAVISLQKIIEIQSMSLKFS

SEQ ID NO: 15660 - protein, 433 aa, Homo sapiens
MRRAPLRGSSAPLPTPSQTQAVCPWTPSCLGTHRSPLEVRLGAVPRSAWGPLANPPGVFSPSGSLLSGASAEQTYGEVNQLGGVFVNGRPLPNAIRLRIVELAQLGIRPCDISRQLRVSHGCVSKILARYNETGSILPGAIGGSKPRVTTPNVVKHIRDYKQGDPGIFAWEIRDRLLADGVCDKYNVPSVSSISRILRNKIGSLAQPGPYEASKQPPSQPTLPYNHIYQYPYPSPVSPTGAKMGSHPGVPGTAGHVSIPRSWPSAHSVSNILGIRTFMEQTGALAGSEGTAYSPKMEDWAGVNRTAFPATPAVNGLEKPALEADIKYTQSASTLSAVGGFLPACAYPASNQHGVYSAPGGGYLAPGPPWPPAQGPPLAPPGAGVAVHGGELAAAMTFKHPSREVADRKPPSSGSKAPDALSSLHGLPIPASTS

SEQ ID NO: 15661 - protein, 207 aa, Homo sapiens
MSSPLASLSKTRKVPLPSEPMNPGRRGIRIYGDVPASHDSELMAFMTRKLWDLEQQVKAQTDEILSKDQKIAALEDLVQTLRPHPAEATLQRQEELETMCVQLQRQVREMERFLSDYGLQWVGEPMDQEDSESKTVSEHGERDWMTAKKFWKPGDSLAPPEVDFDRLLASLQDLSELVVEGDTQVTPVPGGARLRTLEPIPLKLYRN

SEQ ID NO: 15662 - protein, 493 aa, Homo sapiens
MDQDYERRLLRQIVIQNENTMPRVTEMRRTLTPASSPVSSPSKHGDRFIPSRAGANWSVNFHRINENEKSPSQNRKAKDATSDNGKDGLAYSALLKNELLGAGIEKVQDPQTEDRRLQPSTPEKKGLFTYSLSTKRSSPDDGNDVSPYSLSPVSNKSQKLLRSPRKPTRKISKIPFKVLDAPELQDDFYLNLVDWSSLNVLSVGLGTCVYLWSACTSQVTRLCDLSVEGDSVTSVGWSERGNLVAVGTHKGFVQIWDAAAGKKLSMLEGHTARVGALAWNAEQLSSGSRDRMILQRDIRTPPLQSERRLQGHRQEVCGLKWSTDHQLLASGGNDNKLLVWNHSSLSPVQQYTEHLAAVKAIAWSPHQHGLLASGGGTADRCIRFWNTLTGQPLQCIDTGSQVCNLAWSKHANELVSTHGYSQNQILVWKYPSLTQVAKLTGHSYRVLYLAMSPDGEAIVTGAGDETLRFWNVFSKTRSTKESVSVLNLFTRIR

SEQ ID NO: 15663 - protein, 367 aa, Homo sapiens
MALPRCTWPNYVWRAVMACLVHRGLGAPLTLCMLGCLLQAGHVLSQKLDDVDPLVATNFGKIRGIKKELNNEILGPVIQFLGVPYAAPPTGERRFQPPEPPSPWSDIRNATQFAPVCPQNIIDGRLPEVMLPVWFTNNLDVVSSYVQDQSEDCLYLNIYVPTEDVKRISKECARKPGKKICRKGGPLTKKQTDDLGDNDGAEDEDIRDSGGPKPVMVYIHGGSYMEGTGNLYDGSVLASYGNVIVITVNYRLGVLGFLSTGDQAAKGNYGLLDLIQALRWTSENIGFFGGDPLRITVFGSGAGGSCVNLLTLSHYSEGNRWSNSTKGLFQRAIAQSGTALSSWAVSFQPAKYARMLATKVGCNVSDT

SEQ ID NO: 15664 - protein, 359 aa, Homo sapiens
MRPPQCLLHTPSLASPLLLLLLWLLGGGVGAEGREDAELLVTVRGGRLRGIRLKTPGGPVSAFLGIPFAEPPMGPRRFLPPEPKQPWSGVVDATTFQSVCYQYVDTLYPGFEGTEMWNPNRELSEDCLYLNVWTPYPRPTSPTPVLVWIYGGGFYSGASSLDVYDGRFLVQAERTVLVSMNYRVGAFGFLALPGSREAPGNVGLLDQRLALQWVQENVAAFGGDPTSVTLFGESAGAASVGMHLLSPPSRGLFHRAVLQSGAPNGPWATVGMGEARRRATQLAHLVGCPPGGTGGNDTELVACLRTRPAQVLVNHEWHVLPQESVFRFSFVPVVDGDFLSDTPEALINAGDFHGLQGSQ

SEQ ID NO: 15665 - protein, 410 aa, Homo sapiens
MAAPSPSGGGGSGGGSGSGTPGPVGSPAPGHPAVSSMQGFQINFCEKAQSKRKALKLNFANPPFKSTARFTLNPNPTGVQNPHIERLRTHSIESSGKLKISPEQHWDFTAEDLKDLGEIGRGAYGSVNKMVHKPSGQIMAVKRIRSTVDEKEQKQLLMDLDVVMRSSDCPYIVQFYGALFREGDCWICMELMSTSFDKFYKYVYSVLDDVIPEEILGKITLATVKALNHLKENLKIIHRDIKPSNILLDRSGNIKLCDFGISGQLVDSIAKTRDAGCRPYMAPERIDPSASRQGYDVRSDVWSLGITLYELATGRFPYPKWNSVFDQLTQVVKGDPPQLSNSEEREFSPSFINFVNLCLTKDESKRPKYKELLKHPFILMYEERAVEVACYVCKILDQMPATPSSPMYVD

SEQ ID NO: 15666 - protein, 2041 aa, Homo sapiens
PMELRHLLRPRPGLDSEPGGAEAGKARHAGAVIRTLSGMARHQGPARALRYFDLTPSMAGIMVPPVQRWPGPGFTFHAWLCLHPMDTAPTPAPTRPLQRKQLYSFFTSSGSGFEAFFTAAGTLVVAVCTRKEYLTMSLPEVSFADSAWHCVAIVHVPGRRPFSQNLVHVYKDGHLVKTAPLRCPSLSEPFSSCCIGSAGYRTTTTTTGLPTPPVPATLAYTHPALTRSQSVPASTGLGWGSGLVAPLQEGSIDSTLAGTQDTRWGSPTSLEGELGAVAIFHEALQATALRTLCTLGPNETAPFKPEGELHELSTRLLLHYSPQACKNNICLDLSPSHGLDGRLTGHRVETWDVKDVVNCVGGMGALLPLLERVAAQPKEAEAGPAETHDLVGPELTSGHNTQGLVLPLGKSSEERMERNAVAAFLLMLRNFLQGHMVNQESLVQCQGPAIIGALLRKVPSWAMDMNVLMSAQLLMEQVAAEGSGPLLYLLYQHLLFNFHLWTLSDFAVRLGHIQYMSSIVREHRQKLRKKYGVQFILDALRTHYSPQRERPLAADDLRTVQTSLLGLAREFLVRSLSADDVQVTQTMLSFLAATGDDGQILRRLQQNERLPERSRQRLRLRECGLQGLVACLPEGTVSPQLCQGLYKLFLGAGSGNTAGGGGSSGTLTPASQPGTPSPLDGPRPFPAAPGRHSSSLSNVLEDGSLPEPTISGDDTSNTSNPQQTSEEELCNLLTNVLFSVTWRGVEGSDEAAWRERGQVFSVLTQLGASATLVRPPDCIKRSLLEMMLESALTDIKEAPVGVLASLTQQALWLLRLLQDFLCAEGHGNQELWSEKLFEGVCSLLDRLGAWPHLANGTADLREMAQIGLRLVLGYILLEDPQLHAQAYVRLHMLLQTAVPARREEACYVLSKLEAALGRVLNTSSLESATDEAGSPLAAAAAAAAAERCSWLVPLVRTLLDRAYEPLGLQWGLPSLPPTNGSPTFFEDFQAFCATPEWRHFIDKQVQPTMSQFEMDTYAKSHDLMSGFWNACYDMLMSSGQRRQWERAQSRRAFQELVLEPAQRRARLEGLRYTAVLKQQATQHSMALLHWGALWRQLASPCGAWALRDTPIPRWKLSSAETYSRMRLKLVPNHHFDPHLEASALRDNLGEVPLTPTEEASLPLAVTKEAKVSTPPELLQEDQLGEDELAELETPMEAAELDEQREKLVLSAECQLVTVVAVVPGLLEVTTQNVYFYDGSTERVETEEGIGYDFRRPLAQLREVHLRRFNLRRSALELFFIDQANYFLNFPCKVGTTPVSSPSQTPRPQPGPIPPHTQVRNQVYSWLLRLRPPSQGYLSSRSPQEMLRASGLTQKWVQREISNFEYLMQLNTIAGRTYNDLSQYPVFPWVLQDYVSPTLDLSNPAVFRDLSKPIGVVNPKHAQLVREKYESFEDPAGTIDKFHYGTHYSNAAGVMHYLIRVEPFTSLHVQLQSGRFDCSDRQFHSVAAAWQARLESPADVKELIPEFFYFPDFLENQNGFDLGCLQLTNEKVGDVVLPPWASSPEDFIQQHRQALESEYVSAHLHEWIDLIFGYKQRGPAAEEALNVFYYCTYEGAVDLDHVTDERERKALEGIISNFGQTPCQLLKEPHPTRLSAEEAAHRLARLDTNSPSIFQHLDELKAFFAEVVSDGVPLVLALVPHRQPHSFITQGSPDLLVTVSASGLLGTHSWLPYDRNISNYFSFSKDPTMGSHKTQRLLSGPWVPGSGVSGQALAVAPDGKLLFSGGHWDGSLRVTALPRGKLLSQLSCHLDVVTCLALDTCGIYLISGSRDTTCMVWRLLHQGGLSVGLAPKPVQVLYGHGAAVSCVAISTELDMAVSGSEDGTVIIHTVRRGQFVAALRPLGATFPGPIFHLALGSEGQIVVQSSAWERPGAQVTYSLHLYSVNGKLRASLPLAEQPTALTVTEDFVLLGTAQCALHILQLNTLLPAAPPLPMKVAIRSVAVTKERSHVLVGLEDGKLIVVVAGQPSEVRSSQFARKLWRSSRRISQVSSGETEYNPTEAR

SEQ ID NO: 15667 - protein, 672 aa, Homo sapiens
MASKTKASEALKVVARCRPLSRKEEAAGHEQILTMDVKLGQVTLRNPRAAPGELPKTFTFDAVYDASSKQADLYDETVRPLIDSVLQGFNGTVFAYGQTGTGKTYTMQGTWVEPELRGVIPNAFEHIFTHISRSQNQQYLVRASYLEIYQEEIRDLLSKEPGKRLELKENPETGVYIKDLSSFVTKNVKEIEHVMNLGNQTRAVGSTHMNEVSSRSHAIFIITVECSERGSDGQDHIRVGKLNLVDLAGSERQNKAGPNTAGGAATPSSGGGGGGGGSGGGAGGERPKEASKINLSLSALGNVIAALAGNRSTHIPYRDSKLTRLLQDSLGGNAKTIMVATLGPASHSYDESLSTLRFANRAKNIKNKPRVNEDPKDTLLREFQEEIARLKAQLEKRGMLGKRPRRKSSRRKKAVSAPPGYPEGPVIEAWVAEEEDDNNNNHRPPQPILESALEKNMENYLQEQKERLEEEKAAIQDDRSLVSEEKQKLLEEKEKMLEDLRREQQATELLAAKYKAMESKLLIGGRNIMDHTNEQQKMLELKRQEIAEQKRREREMQQEMMLRDEETMELRGTYTSLQQEVEVKTKKLKKLYAKLQAVKAEIQDQHDEYIRVRQDLEEAQNEQTRELKLKYLIIENFIPPEEKNKIMNRLFLDCEEEQWKFQPLVPAGVYFM

SEQ ID NO: 15668 - protein, 1524 aa, Homo sapiens
LMQEVDRQRALQQRMEMEQHGMVGSEISSSRTSVSQIPFYSSDLPCDFMQPLGPLQQSPQHQQQMGQVLQQQNIQQGSINSPSTQTFMQTNERRQVGPPSFVPDSPSIPVGSPNFSSVKQGHGNLSGTSFQQSPVRPSFTPALPAAPPVANSSLPCGQDSTITHGHSYPGSTQSLIQLYSDIIPEEKGKKKRTRKKKRDDDAESTKAPSTPHSDITAPPTPGISETTSTPAVSTPSELPQQADQESVEPVGPSTPNMAAGQLCTELENKLPNSDFSQATPNQQTYANSEVDKLSMETPAKTEEIKLEKAETESCPGQEEPKLEEQNGSKVEGNAVACPVSSAQSPPHSAGAPAAKGDSGNELLKHLLKNKKSSSLLNQKPEGSICSEDDCTKDNKLVEKQNPAEGLQTLGAQMQGGFGCGNQLPKTDGGSETKKQRSKRTQRTGEKAAPRSKKRKKDEEEKQAMYSSTDTFTHLKQQLSLLPLMEPIIGVNFAHFLPYGSGQFNSGNRLLGTFGSATLEGVSDYYSQLIYKKMANGFATTEELAGKAGVLVSHEVTKTLGPKPFQLPFRPQDDLLARALAQGPKTVDVPASLPTPPHNNQEELRIQDHCGDRDTPDSFVPSSSPESVVGVEVSRYPDLSLVKEEPPEPVPSPIIPILPSTAGKSSESRRNDIKTEPGTLYFASPFGPSPNGPRSGLISVAITLHPTAAENISSVVAAFSDLLHVRIPNSYEVSSAPDVPSMGLVSSHRINPGLEYRQHLLLRGPPPGSANPPRLVSSYRLKQPNVPFPPTSNGLSGYKDSSHGIAESAALRPQWCCHCKVVILGSGVRKSFKDLTLLNKDSRESTKRVEKDIVFCSNNCFILYSSTAQAKNSENKESIPSLPQSPMRETPSKAFHQYSNNISTLDVHCLPQLPEKASPPASPPIAFPPAFEAAQVEAKPDELKVTVKLKPRLRAVHGGFEDCRPLNKKWRGMKWKKWSIHIVIPKGTFKPPCEDEIDEFLKKLGTSLKPDPVPKDYRKCCFCHEEGDGLTDGPARLLNLDLDLWVHLNCALWSTEVYETQAGALINVELALRRGLQMKCVFCHKTGATSGCHRFRCTNIYHFTCAIKAQCMFFKDKTMLCPMHKPKGIHEQELSYFAVFRRVYVQRDEVRQIASIVQRGERDHTFRVGSLIFHTIGQLLPQQMQAFHSPKALFPVGYEASRLYWSTRYANRRCRYLCSIEEKDGRPVFVIRIVEQGHEDLVLSDISPKGVWDKILEPVACVRKKSEMLQLFPAYLKGEDLFGLTVSAVARIAESLPGVEACENYTFRYGRNPLMELPLAVNPTGCARSEPKMSAHVKRPHTLNSTSTSKSFQSTVTGELNAPYSKQFVHSKSSQYRKMKTEWKSNVYLARSRIQGLGLYAARDIEKHTMVIEYIGTIIRNEVANRKEKLYESQNRGVYMFRMDNDHVIDATLTGGPARYINHSCAPNCVAEVVTFERGHKIIISSSRRIQKGEELCYDYKFDFEDDQHKIPCHCGAVNCRKWMN

SEQ ID NO: 15669 - protein, 2330 aa, Homo sapiens
MLRGPGPGLLLLAVQCLGTAVPSTGASKSKRQAQQMVQPQSPVAVSQSKPGCYDNGKHYQINQQWERTYLGNALVCTCYGGSRGFNCESKPEAEETCFDKYTGNTYRVGDTYERPKDSMIWDCTCIGAGRGRISCTIANRCHEGGQSYKIGDTWRRPHETGGYMLECVCLGNGKGEWTCKPIAEKCFDHAAGTSYVVGETWEKPYQGWMMVDCTCLGEGSGRITCTSRNRCNDQDTRTSYRIGDTWSKKDNRGNLLQCICTGNGRGEWKCERHTSVQTTSSGSGPFTDVRAAVYQPQPHPQPPPYGHCVTDSGVVYSVGMQWLKTQGNKQMLCTCLGNGVSCQETAVTQTYGGNSNGEPCVLPFTYNGRTFYSCTTEGRQDGHLWCSTTSNYEQDQKYSFCTDHTVLVQTRGGNSNGALCHFPFLYNNHNYTDCTSEGRRDNMKWCGTTQNYDADQKFGFCPMAAHEEICTTNEGVMYRIGDQWDKQHDMGHMMRCTCVGNGRGEWTCIAYSQLRDQCIVDDITYNVNDTFHKRHEEGHMLNCTCFGQGRGRWKCDPVDQCQDSETGTFYQIGDSWEKYVHGVRYQCYCYGRGIGEWHCQPLQTYPSSSGPVEVFITETPSQPNSHPIQWNAPQPSHISKYILRWRPKNSVGRWKEATIPGHLNSYTIKGLKPGVVYEGQLISIQQYGHQEVTRFDFTTTSTSTPVTSNTVTGETTPFSPLVATSESVTEITASSFVVSWVSASDTVSGFRVEYELSEEGDEPQYLDLPSTATSVNIPDLLPGRKYIVNVYQISEDGEQSLILSTSQTTAPDAPPDTTVDQVDDTSIVVRWSRPQAPITGYRIVYSPSVEGSSTELNLPETANSVTLSDLQPGVQYNITIYAVEENQESTPVVIQQETTGTPRSDTVPSPRDLQFVEVTDVKVTIMWTPPESAVTGYRVDVIPVNLPGEHGQRLPISRNTFAEVTGLSPGVTYYFKVFAVSHGRESKPLTAQQTTKLDAPTNLQFVNETDSTVLVRWTPPRAQITGYRLTVGLTRRGQPRQYNVGPSVSKYPLRNLQPASEYTVSLVAIKGNQESPKATGVFTTLQPGSSIPPYNTEVTETTIVITWTPAPRIGFKLGVRPSQGGEAPREVTSDSGSIVVSGLTPGVEYVYTIQVLRDGQERDAPIVNKVVTPLSPPTNLHLEANPDTGVLTVSWERSTTPDITGYRITTTPTNGQQGNSLEEVVHADQSSCTFDNLSPGLEYNVSVYTVKDDKESVPISDTIIPAVPPPTDLRFTNIGPDTMRVTWAPPPSIDLTNFLVRYSPVKNEEDVAELSISPSDNAVVLTNLLPGTEYVVSVSSVYEQHESTPLRGRQKTGLDSPTGIDFSDITANSFTVHWIAPRATITGYRIRHHPEHFSGRPREDRVPHSRNSITLTNLTPGTEYVVSIVALNGREESPLLIGQQSTVSDVPRDLEVVAATPTSLLISWDAPAVTVRYYRITYGETGGNSPVQEFTVPGSKSTATISGLKPGVDYTITVYAVTGRGDSPASSKPISINYRTEIDKPSQMQVTDVQDNSISVKWLPSSSPVTGYRVTTTPKNGPGPTKTKTAGPDQTEMTIEGLQPTVEYVVSVYAQNPSGESQPLVQTAVTNIDRPKGLAFTDVDVDSIKIAWESPQGQVSRYRVTYSSPEDGIHELFPAPDGEEDTAELQGLRPGSEYTVSVVALHDDMESQPLIGTQSTAIPAPTDLKFTQVTPTSLSAQWTPPNVQLTGYRVRVTPKEKTGPMKEINLAPDSSSVVVSGLMVATKYEVSVYALKDTLTSRPAQGVVTTLENVSPPRRARVTDATETTITISWRTKTETITGFQVDAVPANGQTPIQRTIKPDVRSYTITGLQPGTDYKIYLYTLNDNARSSPVVIDASTAIDAPSNLRFLATTPNSLLVSWQPPRARITGYIIKYEKPGSPPREVVPRPRPGVTEATITGLEPGTEYTIYVIALKNNQKSEPLIGRKKTVQKTPFVTHPGYDTGNGIQLPGTSGQQPSVGQQMIFEEHGFRRTTPPTTATPIRHRPRPYPPNVGQEALSQTTISWAPFQDTSEYIISCHPVGTDEEPLQFRVPGTSTSATLTGLTRGATYNVIVEALKDQQRHKVREEVVTVGNSVNEGLNQPTDDSCFDPYTVSHYAVGDEWERMSESGFKLLCQCLGFGSGHFRCDSSRWCHDNGVNYKIGEKWDRQGENGQMMSCTCLGNGKGEFKCDPHEATCYDDGKTYHVGEQWQKEYLGAICSCTCFGGQRGWRCDNCRRPGGEPSPEGTTGQSYNQYSQRYHQRTNTNVNCPIECFMPLDVQADREDSRE

SEQ ID NO: 15670 - protein, 219 aa, Homo sapiens
MKVLWAALLVTFLAGCQAKVEQAVETEPEPELRQQTEWQSGQRWELALGRFWDYLRWVQTLSEQVQEELLSSQVTQELRALMDETMKELKAYKSELEEQLTPVAEETRARLSKELQAAQARLGADMEDVCGRLVQYRGEVQAMLGQSTEELRVRLASHLRKLRKRLLRDADDLQKRLAVYQAGAREGAERGLSAIRERLGPLVEQGRVRAATVGSLAGQ

SEQ ID NO: 15671 - protein, 241 aa, Homo sapiens
MGGTTSTRRVTFEADENENITVVKGIRLSENVIDRMKESSPSGSKSQRYSGAYGASVSDEELKRRVAEELALEQAKKESEDQKREETSETALRKFCVQSFSSNFLESQNMYTLLLKQAKELDRERAAANEQLTRAILRERICSEEERAKAKHLARQLEEKDRVLKKQDAFYKEQLARLEERSSEFYRVTTEQYQKAAEEVEAKFKFGEMKYHKTGLFILLPLVPVWLLVGELVTSPSFQAT

SEQ ID NO: 15672 - protein, 181 aa, Homo sapiens
MRVVRGLSEPGRARRRGARARGAMEAALLGLCNWSTLGVCAALKLPQISAVLAARSARGLSLPSLLLELAGFLVFLRYQCYYGYPPLTYLEYPILIAQDVILLLCIFHFNGNVKQATPYIAVLVSSWFILALQKWIIDLAMNLCTFISAASKFAQLQCLWKTRDSGTVSALTWSLSSYTCA

SEQ ID NO: 15673 - protein, 1033 aa, Homo sapiens
MDEEENHYVSQLREVYSSCDTTGTGFLDRQELTQLCLKLHLEQQLPVLLQTLLGNDHFARVNFEEFKEGFVAVLSSNAGVRPSDEDSSSLESAASSAIPPKYVNGSKWYGRRSRPELCDAATEARRVPEQQTQASLKSHLWRSASLESVESPKSDEEAESTKEAQNELFEAQGQLQTWDSEDFGSPQKSCSPSFDTPESQIRGVWEELGVGSSGHLSEQELAVVCQSVGLQGLEKEELEDLFNKLDQDGDGKVSLEEFQLGLFSHEPALLLESSTRVKPSKAWSHYQVPEESGCHTTTTSSLVSLCSSLRLFSSIDDGSGFAFPDQVLAMWTQEGIQNGREILQSLDFSVDEKVNLLELTWALDNELMTVDSAVQQAALACYHQELSYQQGQVEQLARERDKARQDLERAEKRNLEFVKEMDDCHSTLEQLTEKKIKHLEQGYRERLSLLRSEVEAERELFWEQAHRQRAALEWDVGRLQAEEAGLREKLTLALKENSRLQKEIVEVVEKLSDSERLALKLQKDLEFVLKDKLEPQSAELLAQEERFAAVLKEYELKCRDLQDRNDELQAELEGLWARLPKNRHSPSWSPDGRRRQLPGLGPAGISFLGNSAPVSIETELMMEQVKEHYQDLRTQLETKVNYYEREIAALKRNFEKERKDMEQARRREVSVLEGQKADLEELHEKSQEVIWGLQEQLQDTARGPEPEQMGLAPCCTQALCGLALRHHSHLQQIRLEFHRLSEENTLLKNDLGRVRQELEAAESTHDAQRKEIEVLKKDKEKACSEMEVLNRQNQNYKDQLSQLNVRVLQLGQEASTHQAQNEEHRVTIQMLTQSLEEVVRSGQQQSDQIQKLRVELECLNQEHQSLQLPWSELTQTLEESQDQVQGAHLRLRQAQAQHLQEVRLVPQDRVAELHRLLSLQGEQARRRLDAQREEHEKQLKATEERVEEAEMILKNMEMLLQEKVDKLKEQFEKNTKSDLLLKELYVENAHLVRALQATEEKQRGAEKQSRLLEEKVRALNKLVSRIAPAALSV

SEQ ID NO: 15674 - protein, 961 aa, Homo sapiens
MWGSDRLAGAGGGGAAVTVAFTNARDCFLHLPRRLVAQLHLLQNQAIEVVWSHQPAFLSWVEGRHFSDQGENVAEINRQVGQKLGLSNGGQIPDDLRKRLNIEMHAVVRITPVEVTPKIPRSLKLQPRENLPKDISEEDIKTVFYSWLQQSTTTMLPLVISEEEFIKLETKDGLKEFSLSIVHSWEKEKDKNIFLLSPNLLQKTTIQVLLDPMVKEENSEEIDFILPFLKLSSLGGVNSLGVSSLEHITHSLLGRPLSRQLMSLVAGLRNGALLLTGGKGSGKSTLAKAICKEAFDKLDAHVERVDCKALRGKRLENIQKTLEVAFSEAVWMQPSVVLLDDLDLIAGLPAVPEHEHSPDAVQSQRLAHALNDMIKEFISMGSLVALIATSQSQQSLHPLLVSAQGVHIFQCVQHIQPPNQEQRCEILCNVIKNKLDCDINKFTDLDLQHVAKETGGFVARDFTVLVDRAIHSRLSRQSISTREKLVLTTLDFQKALRGFLPASLRSVNLHKPRDLGWDKIGGLHEVRQILMDTIQLPAKYPELFANLPIRQRTGILLYGPPGTGKTLLAGVIARESRMNFISVKGPELLSKYIGASEQAVRDIFIRAQAAKPCILFFDEFESIAPRRGHDNTGVTDRVVNQLLTQLDGVEGLQGVYVLAATSRPDLIDPALLRPGRLDKCVYCPPPDQVSRLEILNVLSDSLPLADDVDLQHVASVTDSFTGADLKALLYNAQLEALHGMLLSSGLQDGSSSSDSDLSLSSMVFLNHSSGSDDSAGDGECGLDQSLVSLEMSEILPDESKFNMYRLYFGSSYESELGNGTSSDLSSQCLSAPSSMTQDLPGVPGKDQLFSQPPVLRTASQEGCQELTQEQRDQLRADISIIKGRYRSQSGEDESMNQPGPIKTRLAISQSHLMTALGHTRPSISEDDWKNFAELYESFQNPKRRKNQSGTMFRPGQKVTLA

SEQ ID NO: 15675 - protein, 411 aa, Homo sapiens
MTSTNSVKLEMQSDEECDRKPLSREDEIRGHDEGSSLEEPLIESSEVADNRKVQELQGEGGIRLPNGERPFHCNQCGASFTQKGNLLRHIKLHSGEKPFKCPFCSYACRRRDALTGHLRTHSVPPMEDCKEQEPIMDNNISLVPFERPAVIEKLTGNMGKRKSSTPQKFVGEKLMRFSYPDIHFDMNLTYEKEAELMQSHMMDQAINNAITYLGAEALHPLMQHPPSTIAEVAPVISSAYSQVYHPNRIERPISRETADSHENNMDGPISLIRPKSRPQEREASPSNSCLDSTDSESSHDDHQSYQGHPALNPKRKQSPAYMKEDVKALDTTKAPKGSLKDIYKVFNGEGEQIRAFKCEHCRVLFLDHVMYTIHMGCHGYRDPLECNICGYRSQDRYEFSSHIVRGEHTFH

SEQ ID NO: 15676 - protein, 527 aa, Homo sapiens
MAKERCLKKSFQDSLEDIKKRMKEKRNKNLAEIGKRRSFIAAPCQIITNTSTLLKNYQDNNKMLVLALENEKSKVKEAQDIILQLRKECYYLTCQLYALKGKLTSQQTVEPAQNQEICSSGMDPNSDDSSRNLFVKDLPQIPLEETELPGQGESFQIEDQIPTIPQDTLGVDFDSGEAKSTDNVLPRTVSVRSSLKKHCNSICQFDSLDDFETSHLAGKSFEFERVGFLDPLVNMHIPENVQHNACQWSKDQVNLSPKLIQPGTFTKTKEDILESKSEQTKSKQRDTQERKREEKRKANRRKSKRMSKYKENKSENKKTVPQKKMHKSVSSNDAYNFNLEEGVHLTPFRQKVSNDSNREENNESEVSLCESSGSGDDSDDLYLPTCKYIQNPTSNSDRPVTRPLAKRALKYTDEKETEGSKPTKTPTTTPPETQQSPHLSLKDITNVSLYPVVKIRRLSLSPKKNKASPAVALPKRRCTASVNYKEPTLASKLRRGDPFTDLCFLNSPIFKQKKDLRRSKKSMKQIQ

SEQ ID NO: 15677 - protein, 601 aa, Homo sapiens
MGPLEFRDVAIEFSLEEWHCLDTAQQNLYRDVMLENYRHLVFLGIVVTKPDLITCLEQGKKPFTVKRHEMIAKSPVMCFHFAQDLCPEQSLKDSFQKVIVTRYEKREYGNLELKKGCESVDEGKVHKRGYNGLNQCLTATQSKVFQCDTYVKVSHIFSNSNRHKIRDTGKKPFKCIECGKAFNQSSTLATHKKIHTGEITCKCEECGKAFNRSSHLTSHKRIHTGEKRYKCEDCGKELKYSSTLTAHKRIHTGEKRYKCEDCGKELKYSSTLTAHKRIHTGEKPYKCDKCGRAFISSSILYVHKISHTEEKPYKCEECGKAFKLSSILSTHKRIHTGEKPYKCEECGKAFRRSLVLRTHKRIHTGEKPYKCDKCGKAFISSSLLYKHKISHSEKKPYKCEECGKAFKRSSTLTIHKISHTEEKPYKCQECDKVFKRSSALSTHKIIHSGEKPYKCEECGKAFKRSSNLTTHKISHTEEKLYKCQECDKAFKYSSALSTHKIIHSGENPYKCEECGKAFKRSSVLSKHKIIHTGAKPYKCEECGKAFKRSSQLTSHKISHTGEKPYKCEECGKAFNLSSDLNTHKRIHIGQKAYIVKNMANL

SEQ ID NO: 15678 - protein, 244 aa, Homo sapiens
MGALGLEGRGGRLQGRGSLLLAVAGATSLVTLLLAVPITVLAVLALVPQDQGGLVTETADPGAQAQQGLGFQKLPEEEPETDLSPGLPAAHLIGAPLKGQGLGWETTKEQAFLTSGTQFSDAEGLALPQDGLYYLYCLVGYRGRAPPGGGDPQGRSVTLRSSLYRAGGAYGPGTPELLLEGAETVTPVLDPARRQGYGPLWYTSVGFGGLVQLRRGERVYVNISHPDMVDFARGKTFFGAVMVG

SEQ ID NO: 15679 - protein, 73 aa, Homo sapiens
MDVTSQARGVGLEMYPGTAQPAAPNTTSPELNLSHPLLGTALANGTGELSEHQQYVIGLFLSCLYTIFLFPIG

SEQ ID NO: 15680 - protein, 406 aa, Homo sapiens
MDSSAAPTNASNCTDALAYSSCSPAPSPGSWVNLSHLDGNLSDPCGPNRTDLGGRDSLCPPTGSPSMITAITIMALYSIVCVVGLFGNFLVMYVIVRYTKMKTATNIYIFNLALADALATSTLPFQSVNYLMGTWPFGTILCKIVISIDYYNMFTSIFTLCTMSVDRYIAVCHPVKALDFRTPRNAKIINVCNWILSSAIGLPVMFMATTKYRQGSIDCTLTFSHPTWYWENLLKICVFIFAFIMPVLIITVCYGLMILRLKSVRMLSGSKEKDRNLRRITRMVLVVVAVFIVCWTPIHIYVIIKALVTIPETTFQTVSWHFCIALGYTNSCLNPVLYAFLDENFKRCFREFCIPTSSNIEQQNSTRIRQNTRDHPSTANTVDRTNHQKIDLFQKSSLLNCEHTKG

SEQ ID NO: 15681 - protein, 331 aa, Homo sapiens
MAVAMVKLCERAGLPLLAAPLLRSLLPRAPQPGPAQPRSVQGQRCPARHPPGNLVCERGAGVNGVTAGAGGRLRGLHRGGRALGCSAHRPLHSARVRPPAHLAAPPGSSARGCRLTELGYALNEWLQDIRKNQLPGLLGGVGPMHSVVQLFQGFRDLLWLPIEQYRKDGRLMRGLQRGAASFGSSTASAALELSNRLVQAIQATAETVYDILSPAAPVSRSLQDKRSARRLRRGQQPADLREGVAKAYDTVREGILDTAQTICDVASRGHEQKGLTGAVGGVIRQLPPTVVKPLILATEATSSLLGGMRNQIVPDAHKDHALKWRSDSAQD

SEQ ID NO: 15682 - protein, 1575 aa, Homo sapiens
MRTTKVYKLVIHKKGFGGSDDELVVNPKVFPHIKLGDIVEIAHPNDEYSPLLLQVKSLKEDLQKETISVDQTVTQVFRLRPYQDVYVNVVDPKVSTCAYITQKVEFAGIRAQAGELWVKNEKVMCGYISEDTRVVFRSTSAMVYIFIQMSCEMWDFDIYGDLYFEKAVNGFLADLFTKWKEKNCSHEVTVVLFSRTFYDAKSVDEFPEINRASIRQDHKGRFYEDFYKVVVQNERREEWTSLLVTIKKLFIQYPVLVRLEQAEGFPQGDNSTSAQGNYLEAINLSFNVFDKHYINRNFDRTGQMSVVITPGVGVFEVDRLLMILTKQRMIDNGIGVDLVCMGEQPLHAVPLFKLHNRSAPRDSRLGDDYNIPHWINHSFYTSKSQLFCNSFTPRIKLAGKKPASEKAKNGRDTSLGSPKESENALPIQVDYDAYDAQVFRLPGPSRAQCLTTCRSVRERESHSRKSASSCDVSSSPSLPSRTLPTEEVRSQASDDSSLGKSANILMIPHPHLHQYEVSSSLGYTSTRDVLENMMEPPQRDSSAPGRFHVGSAESMLHVRPGGYTPQRALINPFAPSRMPMKLTSNRRRWMHTFPVGPSGEAIQIHHQTRQNMAELQGSGQRDPTHSSAELLELAYHEAAGRHSNSRQPGDGMSFLNFSGTEELSVGLLSNSGAGMNPRTQNKDSLEDSVSTSPDPILTLSAPPVVPGFCCTVGVDWKSLTTPACLPLTTDYFPDRQGLQNDYTEGCYDLLPEADIDRRDEDGVQMTAQQVFEEFICQRLMQGYQIIVQPKTQKPNPAVPPPLSSSPLYSRGLVSRNRPEEEDQYWLSMGRTFHKVTLKDKMITVTRYLPKYPYESAQIHYTYSLCPSHSDSEFVSCWVEFSHERLEEYKWNYLDQYICSAGSEDFSLIESLKFWRTRFLLLPACVTATKRITEGEAHCDIYGDRPRADEDEWQLLDGFVRFVEGLNRIRRRHRSDRMMRKGTAMKGLQMTGPISTHSLESTAPPVGKKGTSALSALLEMEASQKCLGEQQAAVHGGKSSAQSAESSSVAMTPTYMDSPRKDGAFFMEFVRSPRTASSAFYPQVSVDQTATPMLDGTSLGICTGQSMDRGNSQTFGNSQNIGEQGYSSTNSSDSSSQQLVASSLTSSSTLTEILEAMKHPSTGVQLLSEQKGLSPYCFISAEVVHWLVNHVEGIQTQAMAIDIMQKMLEEQLITHASGEAWRTFIYGFYFYKIVTDKEPDRVAMQQPATTWHTAGVDDFASFQRKWFEVAFVAEELVHSEIPAFLLPWLPSRPASYASRHSSFSRSFGGRSQAAALLAATVPEQRTVTLDVDVNNRTDRLEWCSCYYHGNFSLNAAFEIKLHWMAVTAAVLFEMVQGWHRKATSCGFLLVPVLEGPFALPSYLYGDPLRAQLFIPLNISCLLKEGSEHLFDSFEPETYWDRMHLFQEAIAHRFGFVQDKYSASAFNFPAENKPQYIHVTGTVFLQLPYSKRKFSGQQRRRRNSTSSTNQNMFCEERVGYNWAYNTMLTKTWRSSATGDEKFADRLLKDFTDFCINRDNRLVTFWTSCLEKMHASAP

SEQ ID NO: 15683 - protein, 855 aa, Homo sapiens
MAAAATLRLSAQGTVTFEDVAVNFTWEEWNLLSEAQRCLYRDVTLENLALISSLGCWCGVEDEAAPSKQSIYIQRETQVRTPMAGVSPKKAHPCEMCGPILGDILHVADHQGTHHKQKLHRCEAWGNKLYDSGNFHQHQNEHIGEKPYRGSVEEALFAKRCKLHVSGESSVFSESGKDFLPRSGLLQQEASHTGEKSNSKTECVSPIQCGGAHYSCGESMKHFSTKHILSQHQRLLTREECYVCCECGKSFSKYASLSNHQRVHTEKKHECGECGKSFSKYVSFSNHQRVHTEKKHECGECGKSFSKYVSFSNHQRVHTGKRPYECGECGKSFSKYASFSNHQRVHTEKKHYECGECGKSFSKYVSFSNHQRVHTGKRPYECGECGKSFSKYASFSNHQRVHTDKKHYECGECGKSFSQKSSLIQHQRFHTGEKPYGCEECGKSFSSEGHLRSHQRVHAGERPFKCGECVKSFSHKRSLVHHQRVHSGERPYQCGECGKSFSQKGNLVLHQRVHTGARPYECGECGKSFSSKGHLRNHQQIHTGDRLYECGECGKSFSHKGTLILHQRVHPRERSYGCGECGKSFSSIGHLRSHQRVHTGERPYECGECGKSFSHKRSLVHHQRMHTGERPYKCGDCGKSFNEKGHLRNHQRVHTTERPFKCGECGKCFSHKGNLILHQHGHTGERPYVCRECGKLFKKKSHLLVHQRIHNGEKPYACEACQKFFRNKYQLIAHQRVHTGERPYECNDCGKSFTHSSTFCVHKRIHTGEKPYECSECGKSFAESSSFTKHKRVHTGEKPYECSECGKSFAESSSLTKHKRVHTGEKPYKCEKCGKLFNKKSHLLVHQSSHWRKAI

SEQ ID NO: 15684 - protein, 810 aa, Homo sapiens
EEPILKPGCKEYFWLLCKLVDNIHIKDASQTTLLDLDALARHLADCIRSREILDHQDGNVEDDGLTGLLRLATSVVKHKPPFKFSREGQEFLRDIFNLLFLLPSLKDRQQPKCKSHSSRAAAYDLLVEMVKGSVENYRLIHNWVMAQHMQSHAPYKWDYWPHEDVRAECRFVGLTNLGATCYLASTIQQLYMIPEARQAVFTAKYSEDMKHKTTLLELQKMFTYLMESECKAYNPRPFCKTYTMDKQPLNTGEQKDMTEFFTDLITKIEEMSPELKNTVKSLFGGVITNNVVSLDCEHVSQTAEEFYTVRCQVADMKNIYESLDEVTIKDTLEGDNMYTCSHCGKKVRAEKRACFKKLPRILSFNTMRYTFNMVTMMKEKVNTHFSFPLRLDMTPYTEDFLMGKSERKEGFKEVSDHSKDSESYEYDLIGVTVHTGTADGGHYYSFIRDIVNPHAYKNNKWYLFNDAEVKPFDSAQLASECFGGEMTTKTYDSVTDKFMDFSFEKTHSAYMLFYKRMEPEEENGREYKFDVSSELLEWIWHDNMQFLQDKNIFEHTYFGFMWQLCSCIPSTLPDPKAVSLMTAKLSTSFVLETFIHSKEKPTMLQWIELLTKQFNNSQAACEWFLDRMADDDWWPMQILIKCPNQIVRQMFQRLCIHVIQRLRPVHAHLYLQPGMEDGSDDMDTSVEDIGGRSCVTRFVRTLLLIMEHGVKPHSKHLTEYFAFLYEFAKMGEEESQFLLSLQAISTMVHFYMGTKGPENPQVEVLSEEEGEEEEEEEDILSLAEEKYRPAALEKMIALVALLVEQSRSER

SEQ ID NO: 15685 - protein, 486 aa, Homo sapiens
MYIKMATLANGQADNASLSTNGLGSSPGSAGHMNGLSHSPGNPSTIPMKDHDAIKLFIGQIPRNLDEKDLKPLFEEFGKIYELTVLKDRFTGMHKGCAFLTYCERESALKAQSALHEQKTLPGMNRPIQVKPADSESRGGSSCLRQPPSQDRKLFVGMLNKQQSEDDVRRLFEAFGNIEECTILRGPDGNSKGCAFVKYSSHAEAQAAINALHGSQTMPGASSSLVVKFADTDKERTMRRMQQMAGQMGMFNPMAIPFGAYGAYAQALMQQQAALMASVAQGGYLNPMAAFAAAQMQQMAALNMNGLAAAPMTPTSGGSTPPGITAPAVPSIPSPIGVNGFTGLPPQANGQPAAEAVFANGIHPYPAQSPTAADPLQQAYAGVQQYAGPAAYPAAYGQISQAFPQPPPMIPQQQREGPEGCNLFIYHLPQEFGDAELMQMFLPFGFVSFDNPASAQTAIQAMNGFQIGMKRLKVQLKRPKDANRPY

SEQ ID NO: 15686 - protein, 1146 aa, Homo sapiens
MRSLRKKREKPRPEQWKGLPGPPRAPEPEDVAVPGGVDLLTLPQLCFPGGVCVATEPKEDCVHFLVLTDVCGNRTYGVVAQYYRPLHDEYCFYNGKTHRECPGCFVPFAVCVVSRFPYYNSLKDCLSCLLALLKPCKDFEVDSHIKDFAAKLSLIPSPPPGPLHLVFNMKSLQIVLPARADPESPILDLDLHLPLLCFRPEKVLQILTCILTEQRIVFFSSDWALLTLVTECFMAYLYPLQWQHPFVPILSDQMLDFVMAPTSFLMGCHLDHFEEVSKEADGLVLINIDHGSITYSKSTDDNVDIPDVPLLAAQTFIQRDVKNHLNYEHRVFNSEEFLKTRAPGDHQFYKQVLDTYMFHSFLKARLNRRMDAFAQMDLDTQSEEDRINGMLLSPRRPTVEKRASRKSSHLHVTHRRMVVSMPNLQDIAMPELAPRNSSLRLTDTAGCRGSSAVLNVTPKSPYTFKIPEIHFPLESKCVQAYHAHFVSMLSEAMCFLAPDNSLLLARYLYLRGLVYLMQGQLLNALLDFQNLYKTDIRIFPTDLVKRTVESMSAPEWEGAEQAPELMRLISEILDKPHEASKLDDHVKKFKLPKKHMQLGDFMKRVQESGIVKDASIIHRLFEALTVGQEKQIDPETFKDFYNCWKETEAEAQEVSLPWLVMEHLDKNECVCKLSSSVKTNLGVGKIAMTQKRLFLLTEGRPGYLEISTFRNIEEVRRTTTTFLLRRIPTLKIRVASKKEVFEANLKTECDLWHLMVKEMWAGKKLADDHKDPHYVQQALTNVLLMDAVVGTLQSPGAIYAASKLSYFDKMSNEMPMTLPETTLETLKHKINPSAGEAFPQAVDVLLYTPGHLDPAEKVEDAHPKLWCALSEGKVTVFNASSWTIHQHSFKVGTAKVNCMVMADQNQVWVGSEDSVIYIINVHSMSCNKQLTAHCSSVTDLIVQDGQEAPSNVYSCSMDGMVLVWNVSTLQVTSRFQLPRGGLTSIRLHGGRLWCCTGNSIMVMKMNGSLHQELKIEENFKDTSTSFLAFQLLPEEEQLWAACAGRSEVYIWSLKDLAQPPQRVPLEDCSEINCMIRVKKQVWVGSRGLGQGTPKGKIYVIDAERKTVEKELVAHMDTVRTLCSAEDRYVLSGSGREEGKVAIWKGE

SEQ ID NO: 15687 - protein, 1871 aa, Homo sapiens
MENEIFTPLLEQFMTSPLVTWVKTFGPLAAGNGTNLDEYVALVDGVFLNQVMLQINPKLESQRVNKKVNNDASLRMHNLSILVRQIKFYYQETLQQLIMMSLPNVLIIGKNPFSEQGTEEVKKLLLLLLGCAVQCQKKEEFIERIQGLDFDTKAAVAAHIQEVTHNQENVFDLQWMEVTDMSQEDIEPLLKNMALHLKRLIDERDEHSETIIELSEERDGLHFLPHASSSAQSPCGSPGMKRTESRQHLSVELADAKAKIRRLRQELEEKTEQLLDCKQELEQMEIELKRLQQENMNLLSDARSARMYRDELDALREKAVRVDKLESEVSRYKERLHDIEFYKARVEELKEDNQVLLETKTMLEDQLEGTRARSDKLHELEKENLQLKAKLHDMEMERDMDRKKIEELMEENMTLEMAQKQSMDESLHLGWELEQISRTSELSEAPQKSLGHEVNELTSSRLLKLEMENQSLTKTVEELRTTVDSVEGNASKILKMEKENQRLSKKVEILENEIVQEKQSLQNCQNLSKDLMKEKAQLEKTIETLRENSERQIKILEQENEHLNQTVSSLRQRSQISAEARVKDIEKENKILHESIKETSSKLSKIEFEKRQIKKELEHYKEKGERAEELENELHHLEKENELLQKKITNLKITCEKIEALEQENSELERENRKLKKTLDSFKNLTFQLESLEKENSQLDEENLELRRNVESLKCASMKMAQLQLENKELESEKEQLKKGLELLKASFKKTERLEVSYQGLDIENQRLQKTLENSNKKIQQLESELQDLEMENQTLQKNLEELKISSKRLEQLEKENKSLEQETSQLEKDKKQLEKENKRLRQQAEIKDTTLEENNVKIGNLEKENKTLSKEIGIYKESCVRLKELEKENKELVKRATIDIKTLVTLREDLVSEKLKTQQMNNDLEKLTHELEKIGLNKERLLHDEQSTDDSRYKLLESKLESTLKKSLEIKEEKIAALEARLEESTNYNQQLRQELKTVKKNYEALKQRQDEERMVQSSPPISGEDNKWERESQETTRELLKVKDRLIEVERNNATLQAEKQALKTQLKQLETQNNNLQAQILALQRQTVSLQEQNTTLQTQNAKLQVENSTLNSQSTSLMNQNAQLLIQQSSLENENESVIKEREDLKSLYDSLIKDHEKLELLHERQASEYESLISKHGTLKSAHKNLEVEHRDLEDRYNQLLKQKGQLEDLEKMLKVEQEKMLLENKNHETVAAEYKKLCGENDRLNHTYSQLLKETEVLQTDHKNLKSLLNNSKLEQTRLEAEFSKLKEQYQQLDITSTKLNNQCELLSQLKGNLEEENRHLLDQIQTLMLQNRTLLEQNMESKDLFHVEQRQYIDKLNELRRQKEKLEEKIMDQYKFYDPSPPRRRGNWITLKMRKLIKSKKDINRERQKSLTLTPTRSDSSEGFLQLPHQDSQDSSSVGSNSLEDGQTLGTKKSSMVALKRLPFLRNRPKDKDKMKACYRRSMSMNDLVQSMVLAGQWTGSTENLEVPDDISTGKRRKELGAMAFSTTAINFSTVNSSAGFRSKQLVNNKDTTSFEDISPQGVSDDSSTGSRVHASRPASLDSGRTSTSNSNNNASLHEVKAGAVNNQSRPQSHSSGEFSLLHDHEAWSSSGSSPIQYLKRQTRSSPVLQHKISETLESRHHKIKTGSPGSEVVTLQQFLEESNKLTSVQIKSSSQENLLDEVMKSLSVSSDFLGKDKPVSCGLARSVSGKTPGDFYDRRTTKPEFLRPGPRKTEDTYFISSAGKPTPGTQGKIKLVKESSLSRQSKDSNPYATLPRASSVISTAEGTTRRTSIHDFLTKDSRLPISVDSPPAAADSNTTAASNVDKVQESRNSKSRSREQQSS

SEQ ID NO: 15688 - protein, 900 aa, Homo sapiens
MATCAVEVFGLLEDEENSRIVRVRVIAGIGLAKKDILGASDPYVRVTLYDPMNGVLTSVQTKTIKKSLNPKWNEEILFRVHPQQHRLLFEVFDENRLTRDDFLGQVDVPLYPLPTENPRLERPYTFKDFVLHPRSHKSRVKGYLRLKMTYLPKTSGSEDDNAEQAEELEPGWVVLDQPDAACHLQQQQEPSPLPPGWEERQDILGRTYYVNHESRRTQWKRPTPQDNLTDAENGNIQLQAQRAFTTRRQISEETESVDNRESSENWEIIREDEATMYSNQAFPSPPPSSNLDVPTHLAEELNARLTIFGNSAVSQPASSSNHSSRRGSLQAYTFEEQPTLPVLLPTSSGLPPGWEEKQDERGRSYYVDHNSRTTTWTKPTVQATVETSQLTSSQSSAGPQSQASTSDSGQQVTQPSEIEQGFLPKGWEVRHAPNGRPFFIDHNTKTTTWEDPRLKIPAHLRGKTSLDTSNDLGPLPPGWEERTHTDGRIFYINHNIKRTQWEDPRLENVAITGPAVPYSRDYKRKYEFFRRKLKKQNDIPNKFEMKLRRATVLEDSYRRIMGVKRADFLKARLWIEFDGEKGLDYGGVAREWFFLISKEMFNPYYGLFEYSATDNYTLQINPNSGLCNEDHLSYFKFIGRVAGMAVYHGKLLDGFFIRPFYKMMLHKPITLHDMESVDSEYYNSLRWILENDPTELDLRFIIDEELFGQTHQHELKNGGSEIVVTNKNKKEYIYLVIQWRFVNRIQKQMAAFKEGFFELIPQDLIKIFDENELELLMCGLGDVDVNDWREHTKYKNGYSANHQVIQWFWKAVLMMDSEKRIRLLQFVTGTSRVPMNGFAELYGSNGPQSFTVEQWGTPEKLPRAHTCFNRLDLPPYESFEELWDKLQMAIENTQGFDGVD

SEQ ID NO: 15689 - protein, 55 aa, Homo sapiens
MQPRVLLVVALLALLASARASEAEDASLLSFMQGYMKHATKTAKDALSSVQESQV

SEQ ID NO: 15690 - protein, 516 aa, Homo sapiens
MATRRLGVGETLGALNAALGPGGPVWIKETRTRHLRSRDFLAPHRALQARFDDGQVPEHLLHALACLQGPGVAPVLRCAPTPAGLSLQLQRSAVFERVLSAVAAYATPASPASLGQRVLLHCPALRSSPCALRLSQLRTVLVADHLARALRAHGVCVRLVPAVRDPHMLTFLQQLRVDWPAASERASSHTLRSHALEELTSANDGRTLSPGILGRLCLKELVEEQGRTAGYDPNLDNCLVTEDLLSVLAELQEALWHWPEDSHPGLAGASDTGTGGCLVVHVVSCEEEFQQQKLDLLWQKLVDKAPLRQKHLICGPVKVAGAPGTLMTAPEYYEFRHTQVCKASALKHGGDLAQDPAWTEIFGVLSVATIKFEMLSTAPQSQLFLALADSSISTKGTKSGTFVMYNCARLATLFESYKCSMEQGLYPTFPPVSSLDFSLLHDEYPPLSGSAEPDSSAGLHSPGAPHCCTHRDDMQVPGTAQHGFQLLLQPGTHPGGASTTPLWSDVRPPAASESCA

SEQ ID NO: 15691 - protein, 1648 aa, Homo sapiens
MDDDSLDELVARSPGPDGHPQVGPADPAGDFEESSVGSSGDSGDDSDSEHGDGTDGEDEGASEEEDLEDRSGSEDSEDDGETLLEVAGTQGKLEAAGSFNSDDDAESCPICLNAFRDQAVGTPENCAHYFCLDCIVEWSKNANSCPVDRTLFKCICIRAQFGGKILRKIPVENTKASEEEEDPTFCEVCGRSDREDRLLLCDGCDAGYHMECLDPPLQEVPVDEWFCPECAAPGVVLAADAGPVSEEEVSLLLADVVPTTSRLRPRAGRTRAIARTRQSERVRATVNRNRISTARRVQHTPGRLGSSLLDEAIEAVATGLSTAVYQRPLTPRTPARRKRKTRRRKKVPGRKKTPSGPSAKSKSSATRSKKRQHRVKKRRGKKVKSEATTRSRIARTLGLRRPVHSSCIPSVLKPVEPSLGLLRADIGAASLSLFGDPYELDPFDSEELSANPLSPLSAKRRALSRSALQSHQPVARPVSVGLSRRRLPAAVPEPDLEEEPVPDLLGSILSGQSLLMLGSSDVIIHRDGSLSAKRAAPVSFQRNSGSLSRGEEGFKGCLQPRALPSGSPAQGPSGNRPQSTGLSCQGRSRTPARTAGAPVRLDLPAAPGAVQARNLSNGSVPGFRQSHSPWFNGTNKHTLPLASAASKISSRDSKPPCRSVVPGPPLKPAPRRTDISELPRIPKIRRDDGGGRRDAAPAHGQSIEIPSACISRLTGREGTGQPGRGTRAESEASSRVPREPGVHTGSSRPPAPSSHGSLAPLGPSRGKGVGSTFESFRINIPGNMAHSSQLSSPGFCNTFRPVDDKEQRKENPSPLFSIKKTKQLRSEVYDPSDPTGSDSSAPGSSPERSGPGLLPSEITRTISINSPKAQTVQAVRCVTSYTVESIFGTEPEPPLGPSSAMSKLRGAVAAEGASDTEREEPTESQGLAARLRRPSPPEPWDEEDGASCSTFFGSEERTVTCVTVVEPEAPPSPDVLQAATHRVVELRPPSRSRSTSSSRSRKKAKRKRVSREHGRTRSGTRSESRDRSSRSASPSVGEERPRRQRSKAKSRRSSSDRSSSRERAKRKKAKDKSREHRRGPWGHSRRTSRSRSGSPGSSSYEHYESRKKKKRRSASRPRGRECSPTSSLERLCRHKHQRERSHERPDRKESVAWPRDRRKRRSRSPSSEHRAREHRRPRSREKWPQTRSHSPERKGAVREASPAPLAQGEPGREDLPTRLPALGEAHVSPEVATADKAPLQAPPVLEVAAECEPDDLDLDYGDSVEAGHVFDDFSSDAVFIQLDDMSSPPSPESTDSSPERDFPLKPALPPASLAVAAIQREVSLMHDEDPSQPPPLPEGTQEPHLLRPDAAEKAEAPSSPDVAPAGKEDSPSASGRVQEAARPEEVVSQTPLLRSRALVKRVTWNLQESESSAPAEDRAPRAPLHRPQKPREGAWDMEDVAPTGVRQVFSELPFPSHVLPEPGFPDTDPSQVYSPGLPPAPAQPSSIPPCALVSQPTVQFILQGSLPLVGCGAAQTLAPVPAALTPASEPASQATAASNSEEKTPAPRLAAEKTKKEEYMKKLHMQERAVEEVKLAIKPFYQKREVTKEEYKDILRKAVQKICHSKSGEINPVKVANLVKAYVDKYRHMRRHKKPEAGEEPPTQGAEG

SEQ ID NO: 15692 - protein, 422 aa, Homo sapiens
MWLFFGITGLLTAALSGHPSPAPPDQLNTSSAESELWEPGERLPVRLTNGSSSCSGTVEVRLEASWEPACGALWDSRAAEAVCRALGCGGAEAASQLAPPTPELPPPPAAGNTSVAANATLAGAPALLCSGAEWRLCEVVEHACRSDGRRARVTCAENRALRLVDGGGACAGRVEMLEHGEWGSVCDDTWDLEDAHVVCRQLGCGWAVQALPGLHFTPGRGPIHRDQVNCSGAEAYLWDCPGLPGQHYCGHKEDAGAVCSASRSLHNLSTPEVPASVQTVTIESSVTVKIENKESRELMLLIPSIVLGILLLGSLIFIAFILLRIKGKYVFMLPIQVQAPPPEDSDSGSDSDYEHYDFSAQPPVALTTFYNSQRHRVTDEEVQQSRFQMPPLEEGLEELHASHIPTANPGHCITDPPSLGPQ

SEQ ID NO: 15693 - protein, 264 aa, Homo sapiens
MTDVPATFTQAECNGDKPPENGQQTITKISEELTDVDSPLPHYRVEPSLEGALTKGSQEERRKLQGNMLLNSSMEDKMLKETSADEMTFREGHQWEKIPLSGSNQEIRRQKERITEQPLKEEEDEDRKNKGHQAAEIEWLGFRKPSQADMLHSKHDEEQKVWDEEIDDDDDDNCNNDEDEVRVIEFKKKHEEVSQFKEEGDASEDSPLSSASSQAVTPDEQPTLGKKSDISRNAYSRYNTISYRKIRKGNTKQRIDEFESMMHL

SEQ ID NO: 15694 - protein, 469 aa, Homo sapiens
MKWEDQNIGDQCQNAKRNLRSHTCEIKDDSQCGETFGQIPDSIVNKNTPRVNPCDSGECGEVVLGHSSLNCNIRVDTGHKSCEHQEYGEKPYTHKQRGKAISHQHSFQTHERPPTGKKPFDCKECAKTFSSLGNLRRHMAAHHGDGPYKCKLCGKAFVWPSLFHLHERTHTGEKPYECKQCSKAFPFYSSYLRHERIHTGEKAYECKQCSKAFPDYSTYLRHERTHTGEKPYKCTQCGKAFSCYYYTRLHERTHTGEQPYACKQCGKTFYHHTSFRRHMIRHTGDGPHKCKICGKGFDCPSSVRNHETTHTGEKPYECKQCGKVLSHSSSFRSHMITHTGDGPQKCKICGKAFGCPSLFQRHERTHTGEKPYQCKQCGKAFSLAGSLRRHEATHTGVKPYKCQCGKAFSDLSSFQNHETTHTGEKPYECKECGKAFSCFKYLSQHKRTHTVEKPYECKTCRKAFSHFSN

SEQ ID NO: 15695 - protein, 487 aa, Homo sapiens
MMLSRAKPAVGRGVQHTDKRKKKGRKIPKLEELLSKRDFTGAITLLEFKRHVGEEEEDTNLWIGYCAFHLGDYKRALEEYENATKEENCNSEVWVNLACTYFFLGMYKQAEAAGFKASKSRLQNRLLFHLAHKFNDEKKLMSFHQNLQDVTEDQLSLASIHYMRSHYQEAIDIYKRILLDNREYLALNVYVALCYYKLDYYDVSQEVLAVYLQQIPDSTIALNLKACNHFRLYNGRAAEAELKSLMDNASSSFEFAKELIRHNLVVFRGGEGALQVLPPLVDVIPEARLNLVIYYLRQDDVQEAYNLIKDLEPTTPQEYILKGVVNAALGQEMGSRDHMKIAQQFFQLVGGSASECDTIPGRQCMASCFFLLKQFDDVLIYLNSFKSYFYNDDIFNFNYAQAKAATGNTSEGEEAFLLIQSEKMKNDYIYLSWLARCYIMNKKPRLAWELYLKMETSGESFSLLQLIANDCYKRDPSRSAPFTEKHR

SEQ ID NO: 15696 - protein, 181 aa, Homo sapiens
MLPYNNKDRDALKRRNKSKKNNSSSRSTHNEMEKNRRAHLRLCLEKLKGLVPLGPESSRHTTLSLLTKAKLHIKKLEDCDRKAVHQIDQLQREQRHLKRQLEKLGIERIRMDSIGSTVSSERSDSDREEIDVDVESTDYLTGDLDWSSSSVSDSDERGSMQSLGSDEGYSSTSIKRIKLQD

SEQ ID NO: 15697 - protein, 401 aa, Homo sapiens
MQGAQEASASEMLPLLLPLLWAASYYGYGYWFLEGADVPVATNDPDEEVQEETRGRFHLLWDPRRKNCSLSIRDARRRDNAAYFFRLKSKWMKYGYTSSKLSVRVMALTHRPNISIPGTLESGHPSNLTCSVPWVCEQGTPPIFSWMSAAPTSLGPRTTQSSVLTITPRPQDHSTNLTCQVTFPGAGVTMERTIQLNVSSFKILQNTSSLPVLEGQALRLLCDADGNPPAHLSWFQGFPALNATPISNTGVLELPQVGSAEEGDFTCRAQHPLGSLQISLSLFVHWKPEGRAGGVLGAVWGASITTLVFLCVCFIFRVKTRRKKAAQPVQNTDDVNPVMVSGSRGHQHQFQTGIVSDHPAEAGPISEDEQELHYAVLHFHKVQPQEPKVTDTEYSEIKIHK

SEQ ID NO: 15698 - protein, 105 aa, Homo sapiens
MCEEETTALVCDNGSGLCKAGFAGDDAPRAVFPSIVGRPRHQGVMVGMGQKDSYVGDEAQSKRGILTLKYPIEHGIITNWDDMEKPLAGIFYQPNIARSQKAMNT

SEQ ID NO: 15699 - protein, 554 aa, Homo sapiens
MLYLQGWSMPAVAEVKLRDDQYTLEHMHAFGMYNYLHCDSWYQDSVYYIDTLGRIMNLTVMLDTALGKPREVFRLPTDLTACDNRLCASIHFSSSTWVTLSDGTGRLYVIGTGERGNSASEKWEIMFNEELGDPFIIIHSISLLNAEEHSIATLLLRIEKEELDMKGSGFYVSLEWVTISKKNQDNKKYEIIKRDILRGKSVPHYAAIEPDGNGLMIVSYKSLTFVQAGQDLEENMDEDISEKIKEPLYYWQQTEDDLTVTIRLPEDSTKEDIQIQFLPDHINIVLKDHQFLEGKLYSSIDHESSTWIIKESNSLEISLIKKNEGLTWPELVIGDKQGELIRDSAQCAAIAERLMHLTSEELNPNPDKEKPPCNAQELEECDIFFEESSSLCRFDGNTLKTTHVVNLGSNQYLFSVIVDPKEMPCFCLRHDVDALLWQPHSSKQDDMWEHIATFNALGYVQASKRDKKFFACAPNYSYAALCECLRRVFIYRQPAPMSTVLYNRKEGRQVGQVAKQQVASLETNDPILGFQATNERLFVLTTKNLFLIKVNTEN

SEQ ID NO: 15700 - protein, 263 aa, Homo sapiens
MNSAAGFSHLDRRERVLKLGESFEKQPRCAFHTVRYDFKPASIDTSSEGYLEVGEGEQVTITLPNIEGSTPPVTVFKGSKKPYLKECILIINHDTGECRLEKLSSNITVKKTRVEGSSKIQYRKEQQQQQMWNSARTPNLVKHSPSEDKMSPASPIDDIERELKAEASLMDQMSSCDSSSDSKSSSSSSSEDSSSDSEDEDCKSSTSDTGNCVSGHPTMTQYRIPDIDASHNRFRDNSGLLMNTLNNLSSHSFSSLYDPLLSH

SEQ ID NO: 15701 - protein, 556 aa, Homo sapiens
MQKFIEADYYELDWYYEECSDVLCAERVGQMTKTYNDIDAVTRLLEEKERDLELAARIGQSLLKKNKTLTERNELLEEQVEHIREEVSQLRHELSMKDELLQFYTSAAEESEPESVCSTPLKRNESSSSVQNYFHLDSLQKKLKDLEEENVVLRSEASQLKTETITYEEKEQQLVNDCVKELRDANVQIASISEELAKKTEDAARQQEEITHLLSQIVDLQKKAKACAVENEELVQHLGAAKDAQRQLTAELRELEDKYAECMEMLHEAQEELKNLRNKTMPNTTSRRYHSLGLFPMDSLAAEIEGTMRKELQLEEAESPDITHQKRVFETVRNINQVVKQRSLTPSPMNIPGSNQSSAMNSLLSSCVSTPRSSFYGSDIGNVVLDNKTNSIILETEAADLGNDERSKKPGTPGTPGSHDLETALRRLSLRRENYLSERRFFEEEQERKLQELAEKGELRSGSLTPTESIMSLGTHSRFSEFTGFSGMSFSSRSYLPEKLQIVKPLEGDHAGPRPLSVLLGDSLWSLIHLRKAGHLCHAYSFFFRDSHPRCWFEFL

SEQ ID NO: 15702 - protein, 515 aa, Homo sapiens
MSSPNIWSTGSSVYSTPVFSQKMTVWILLLLSLYPGFTSQKSDDDYEDYASNKTWVLTPKVPEGDVTVILNNLLEGYDNKLRPDIGVKPTLIHTDMYVNSIGPVNAINMEYTIDIFFAQTWYDRRLKFNSTIKVLRLNSNMVGKIWIPDTFFRNSKKADAHWITTPNRMLRIWNDGRVLYTLRLTIDAECQLQLHNFPMDEHSCPLEFSSWSRSIAQAGMCSGVISAHYSLRFWGSTDPPTLASRVAGISDGYPREEIVYQWKRSSVEVGDTRSWRLYQFSFVGLRNTTEVVKTTSGDYVVMSVYFDLSRRMGYFTIQTYIPCTLIVVLSWVSFWINKDAVPARTSLGITTVLTMTTLSTIARKSLPKVSYVTAMDLFVSVCFIFVFSALVEYGTLHYFVSNRKPSKDKDKKKKNPLLRMFSFKAPTIDIRPRSATIQMNNATHLQERDEEYGYECLDGKDCASFFCCFEDCRTGAWRHGRIHIRIAKMDSYARIFFPTAFCLFNLVYWVSYLYL

SEQ ID NO: 15703 - protein, 426 aa, Homo sapiens
MSAFDMSHGFFPREPICPFEEKTKIGTMVEDHRSNSYQDSVTFDDVAVEFTPEEWALLDTTQKYLYRDVMLENYMNLASVDFFFCLTSEWEIQPRTKRSSLQQGFLKNQIFTGIQMQTRSYSGWKLCENCGEVFSEQFCLKTHMRAQNGGNTFEGNCYGKDSISVHKEASIGQELSKFNPCGKVFTLTPGLAVHLEILNGRQPYKCKECGKGFKYFASLDNHMGIHIGEKLCEFQECERAITTSSHLKQCVAVHTGKKSEKTKNCGKSFTNFSQLSAHAKTHKGEKSFECKECGRSFRNSSSFNVHIQIHTGIKPHKCTECGKAFTRSTHLTQHVRTHTGIKPYECKECGQAFTQYTGLAIHIRNHTGEKPYQCKECGKAFNRSSTLTQHRRIHTGEKPYECVECGKTFITSSHRSKHLKTHSGER

SEQ ID NO: 15704 - protein, 285 aa, Homo sapiens
MEEPQSDPSVEPPLSQETFSDLWKLLPENNVLSPLPSQAMDDLMLSPDDIEQWFTEDPGPDEAPRMPEAAPPVAPAPAAPTPAAPAPAPSWPLSSSVPSQKTYQGSYGFRLGFLHSGTAKSVTCTYSPALNKMFCQLAKTCPVQLWVDSTPPPGTRVRAMAIYKQSQHMTEVVRRCPHHERCSDSDGLAPPQHLIRVEGNLRVEYLDDRNTFRHSVVVPYEPPEVGSDCTTIHYNYMCNSSCMGGMNRRPILTIITLEDSRPRQVDHLRSGVQDSLANIAKSHLY

SEQ ID NO: 15705 - protein, 491 aa, Homo sapiens
VIIHRVLEKQEVEVFYPDFGNIGIVQKSSLRFLKCCYTKLPAQAIPCSLAWVRPVEEHWTSKAILQFQKLCGLKPLVGVVDEYVDGILNIFLCDTSSNEDVYFHHVLRTEGHAIVCRENISSKGFSELNPLALYTTSSGGPEDIVLTELGYPSQQHYFNEDRKISPQSKESELRILQDINDEKSLSHLKSESKEPLKDSEFESLKTCNKSFEEDPKWSNPEPNDLKEENEDEIPTGMPCLESVTIGDDIWDENWLPLQAKMGKGGDAASHLFTASLGGKNQYSSCKEMPQKDWCFSTPKDTWDDSWQPSGLVNGTKVEVHKPEVLGAQEKNTGTNRTQKQLDINGSSDSSTLPKLEEFCTSLTQSEQSADGSQSEPNNSQTQPKQIQLSTAAPCSTTAVDDSAEKPSGSVESSPEILKNEDFSSSRAITLYKDKRQESVDQLSLILSYECQISQKLYIPRSTATAALGAAARLATSRSLLHWYPSVKRMEA

SEQ ID NO: 15706 - protein, 1975 aa, Homo sapiens
MWIPTEHEKYGVVIASFRGTVPYGLSLEIGDTVQILEKCDGWYRGFALKNPNIKGIFPSSYVHLKNACVKNKGQFEMVIPTEDSVITEMTSTLRDWGTMWKQLYVRNEGDLFHRLWHIMNEILDLRRQVLVGHLTHDRMKDVKRHITARLDWGNEQLGLDLVPRKEYAMVDPEDISITELYRLMEHRHRKKDTPVQASSHHLFVQMKSLMCSNLGEELEVIFSLFDSKENRPISERFFLRLNRNGLPKAPDKPERHCSLFVDLGSSELRKDIYITVHIIRIGRMGAGEKKNACSVQYRRPFGCAVLSIADLLTGETKDDLILKVYMCNTESEWYQIHENIIKKLNARYNLTGSNAGLAVSLQLLHGDIEQIRREYSSVFSHGVSITRKLGFSNIIMPGEMRNDLYITIERGEFEKGGKSVARNVEVTMFIVDSSGQTLKDFISFGSGEPPASEYHSFVLYHNNSPRWSELLKLPIPVDKFRGAHIRFEFRHCSTKEKGEKKLFGFSFVPLMQEDGRTLPDGTHELIVHKCEENTNLQDTTRYLKLPFSKGIFLGNNNQAMKATKESFCITSFLCSTKLTQNGDMLDLLKWRTHPDKITGCLSKLKEIDGSEIVKFLQDTLDTLFGILDENSQKYGSKVFDSLVHIINLLQDSKFHHFKPVMDTYIESHFAGALAYRDLIKVLKWYVDRITEAERQEHIQEVLKAQEYIFKYIVQSRRLFSLATGGQNEEEFRCCIQELLMSVRFFLSQESKGSGALSQSQAVFLSSFPAVYSELLKLFDVREVANLVQDTLGSLPTILHVDDSLQAIKLQCIGKTVESQLYTNPDSRYILLPVVLHHLHIHLQEQKDLIMCARILSNVFCLIKKNSSEKSVLEEIDVIVASLLDILLRTILEITSRPQPSSSAMRFQFQDVTGEFVACLLSLLRQMTDRHYQQLLDSFNTKEELRDFLLQIFTVFRILIRPEMFPKDWTVMRLVANNVIITTVLYLSDALRKNFLNENFDYKIWDSYFYLAVIFINQLCLQLEMFTPSKKKKVLEKYGDMRVTMGCEIFSMWQNLGEHKLHFIPALIGPFLEVTLIPQPDLRNVMIPIFHDMMDWEQRRSGNFKQVEAKLIDKLDSLMSEGKGDETYRELFNSIIPLFGPYPSLLKKIERETWRESGVSLIATVTRLMERLLDYRDCMKMGEVDGKKIGCTVSLLNFYKTELNKEEMYIRYIHKLYDLHLKAQNFTEAAYTLLLYDELLEWSDRPLREFLTYPMQTEWQRKEHLHLTIIQNFDRGKCWENGIILCRKIAEQYESYYDYRNLSKMRMMEASLYDKIMDQQRLEPEFFRVGFYGKKFPFFLRNKEFVCRGHDYERLEAFQQRMLNEFPHAIAMQHANQPDETIFQAEAQYLQIYAVTPIPESQEVLQREGVPDNIKSFYKVNHIWKFRYDRPFHKGTKDKENEFKSLWVERTSLYLVQSLPGISRWFEVEKREVVEMSPLENAIEVLENKNQQLKTLISQCQTRQMQNINPLTMCLNGVIDAAVNGGVSRYQEAFFVKEYILSHPEDGEKIARLRELMLEQAQILEFGLAVHEKFVPQDMRPLHKKLVDQFFVMKSSLGIQEFSACMQASPVHFPNGSPRVCRNSAPASVSPDGTRVIPRRSPLSYPAVNRYSSSSLSSQASAEVSNITGQSESSDEVFNMQPSPSTSSLSSTHSASPNVTSSAPSSARASPLLSDKHKHSRENSCLSPRERPCSAIYPTPVEPSQRMLFNHIGDGALPRSDPNLSAPEKAVNPTPSSWSLDSGKEAKNMSDSGKLISPPVPPRPTQTASPARHTTSVSPSPAGRSPLKGSVQSFTPSPVEYHSPGLISNSPVLSGSYSSGISSLSRCSTSETSGFENQVNEQSAPLPVPVPVPVPSYGGEEPVRKESKTPPPYSVYERTLRRPVPLPHSLSIPVTSEPPALPPKPLAARSSHLENGARRTDPGPRPRPLPRKVSQL

SEQ ID NO: 15707 - protein, 315 aa, Homo sapiens
MPSPVGLLRALPLPWPQFLACTLRRLAGPRESTGPSQKPPPLCSVPCRVPAMTEEVAREALLSFVDSKCCYSSTVAGDLVIQELKRQTLCRYRLETFSESRISEWTFQPFTNHSVDGPQRGASPRLWDIKVQGPPMFQEDTRKFQVPHSSLVKECHKCHGRGRYKCSGCHGAGTVRCPSCCGAKRKAKQSRRCQLCAGSGRRRCSTCSGRGNKTCATCKGEKKLLHFIQLVIMWKNSLFEFVSEHRLNCPRELLAKAKGENLFKDENSVVYPIVDFPLRDISLASQRGIAEHSAALASRARVLQQVSQGGGAIWL

SEQ ID NO: 15708 - protein, 861 aa, Homo sapiens
MTSERSRIPCLSAAAAEGTGKKQQEGRAMATLDRKVPSPEAFLGKPWSSWIDAAKLHCSDNVDLEEAGKEGGKSREVMRLNKEDMHLFGHYPAHDDFYLVVCSACNQVVKPQVFQSHCERRHGSMCRPSPSPVSPASNPRTSLVQVKTKACLSGHHSASSTSKPFKTPKDNLLTSSSKQHTVFPAKGSRDKPCVPVPVVSLEKIPNLVKADGANVKMNSTTTTAVSASSTSSSAVSTPPLIKPVLMSKSVPPSPEKILNGKGILPTTIDKKHQNGTKNSNKPYRRLSEREFDPNKHCGVLDPETKKPCTRSLTCKTHSLSHRRAVPGRKKQFDLLLAEHKAKSREKEVKDKEHLLTSTREILPSQSGPAQDSLLGSSGSSGPEPKVASPAKSRPPNSVLPRPSSANSISSSTSSNHSGHTPEPPLPPVGGDLASRLSSDEGEMDGADESEKLDCQFSTHHPRPLAFCSFGSRLMGRGYYVFDRRWDRFRFALNSMVEKHLNSQMWKKIPPAADSPLPSPAAHITTPVPASVLQPFSNPSAVYLPSAPISSRLTSSYIMTSAMLSNAAFVTSPDPSALMSHTTAFPHVAATLSIMDSTFKAPSAVSPIPAVIPSPSHKPSKTKTSKSSKVKDLSTRSDESPSNKKRKPQSSTSSSSSSSSSSLQTSLSSPLSGPHKKNCVLNASSALNSYQAAPPYNSLSVHNSNNGVSPLSAKLEPSGRTSLPGGPADIVRQVGAVGGSSDSCPLSVPSLALHAGDLSLASHNAVSSLPLSFDKSEGKKRKNSSSSSKACKITKMPGMNSVHKKNPPSLLAPVPDPVNSTSSRQVGKNSSLALSQSSPSSISSPGHSRQNTNRTGRIRTLP

SEQ ID NO: 15709 - protein, 91 aa, Homo sapiens
MSNPSAPPPYEDRNPLYPGPPPPGGYGQPSVLPGGYPAYPGYPQPGYGHPAGYPQPMPPTHPMPMNYGPGHGYDGEERAVSDSFGPGEWDD

SEQ ID NO: 15710 - protein, 304 aa, Homo sapiens
HGLPLLPLLSLLVGAWLKLGNGQATSMVQLQGGRFLMGTNSPDSRDGDGPVREATVKPFAIDIFPVTNKDFRDFVREKKYRTEAEMFGWSFVFEDFVSDELRNKATQPMKSGRCLCWAGASCSRSPSFSQSVLWWLPVEKAFWRQPAGPGSGIRERLEHPVLHVSWNDARAYCAWRGKRLPTEEEWEFAARGGLKGQVYPWGNWFQPNRTNLWQGKFPKGDKAEDGFHGVSPVNAFPAQNNYGLYDLLGNVWEWTASPYQAAEQDMRVLRGASWIDTADGSANHRARVTTRMGNTPDSASDNLG

SEQ ID NO: 15711 - protein, 305 aa, Homo sapiens
MSDKSELKAELERKKQRLAQIREEKKRKEEERKKKETDQKKEAVAPVQEESDLEKKRREAEALLQSMGLTPESPIVPPPMSPSSKSVSTPSEAGSQDSGDGAVGSRRGPIKLGMAKITQVDFPPREIVTYTKETQTPVMAQPKEDEEEDDDVVAPKPPIEPEEEKTLKKDEENDSKAPPHELTEEEKQQILHSEEFLSFFDHSTRIVERALSEQINIFFDYSGRDLEDKEGEIQAGAKLSLNRQFFDERWSKHRVVSCLDWSSQYPELLVASYNNNEDAPHEPDGVALVWNMKYKKTTPEYVFHC

SEQ ID NO: 15712 - protein, 1266 aa, Homo sapiens
MGPLMVLFCLLFLYPGLADSAPSCPQNVNISGGTFTLSHGWAPGSLLTYSCPQGLYPSPASRLCKSSGQWQTPGATRSLSKAVCKPGHCPNPGISLGAVRTGFRFGHGDKVRYRCSSNLVLTGSSERECQGNGVWSGTEPICRQPYSYDFPEDVAPALGTSFSHMLGATNPTQKTKDHENGTGTNTYAALNSVYLMMNNQMRLLGMETMAWQEIRHAIILLTDGKSNMGGSPKTAVDHIREILNINQKRNDYLDIYAIGVGKLDVDWRELNELGSKKDGERHAFILQDTKALHQVFEHMLDVSKLTDTICGVGNMSANASDQERTPWHVTIKPKSQETCRGALISDQWVLTAAHCFRDGNDHSLWRVNVGDPKSQWGKEFLIEKAVISPGFDVFAKKNQGILEFYGDDIALLKLAQKVKMSTHARPICLPCTMEANLALRRPQGSTCRDHENELLNKQSVPAHFVALNGSKLNINLKMGVEWTSCAEVVSQEKTMFPNLTDVREVVTDQFLCSGTQEDESPCKGVTTTPWSLARPQGSCSLEGVEIKGGSFRLLQEGQALEYVCPSGFYPYPVQTRTCRSTGSWSTLKTQDQKTVRKAECRAIHCPRPHDFENGEYWPRSPYYNVSDEISFHCYDGYTLRGSANRTCQVNGRWSGQTAICDNGAGYCSNPGIPIGTRKVGSQYRLEDSVTYHCSRGLTLRGSQRRTCQEGGSWSGTEPSCQDSFMYDTPQEVAEAFLSSLTETIEGVDAEDGHGPGEQQKRKIVLDPSGSMNIYLVLDGSDSIGASNFTGAKKCLVNLIEKVASYGVKPRYGLVTYATYPKIWVKVSEADSSNADWVTKQLNEINYEDHKLKSGTNTKKALQAVYSMMSWPDDVPPEGWNRTRHVIILMTDGLHNMGGDPITVIDEIRDLLYIGKDRKNPREDYLDVYVFGVGPLVNQVNINALASKKDNEQHVFKVKDMENLEDVFYQMIDESQSLSLCGMVWEHRKGTDYHKQPWQAKISVIRPSKGHESCMGAVVSEYFVLTAAHCFTVDDKEHSIKVSVGGEKRDLEIEVVLFHPNYNINGKKEAGIPEFYDYDVALIKLKNKLKYGQTIRPICLPCTEGTTRALRLPPTTTCQQQKEELLPAQDIKALFVSEEEKKLTRKEVYIKNGDKKGSCERDAQYAPGYDKVKDISEVVTPRFLCTGGVSPYADPNTCRGDSGGPLIVHKRSRFIQVGVISWGVVDVCKNQKRQKQVPAHARDFHINLFQVLPWLKEKLQDEDLGFL

SEQ ID NO: 15713 - protein, 306 aa, Homo sapiens
MARVPLGRSLTLSPRLEHNGMTSAHHNFRLPGSRDSPASASQVAEIIDLEWYEKSEETHASQIELLETSSTQEPLNASEAFCPRDCMVPVVFPGPVSQEGCCQFTCELLKHIMYQRQQLPLPYEQLKHFYRKPSPQAEEMLKKKPRATTEVSSRKCQQALAELESVLSHLEDFFARTLVPRVLILLGGNALSPKEFYELDLSLLAPYSVDQSLSTAACLRRLFRAIFMADAFSELQAPPLMGTVVMAQGHRNCGEDWFRPKLNYRVPSRGHKLTVTLSCGRPSIRTTAWEDYIWFQAPVTFKGFRE

SEQ ID NO: 15714 - protein, 702 aa, Homo sapiens
MAAPMTPAARPEDYEAALNAALADVPELARLLEIDPYLKPYAVDFQRRYKQFSQILKNIGENEGGIDKFSRGYESFGVHRCADGGLYCKEWAPGAEGVFLTGDFNGWNPFSYPYKKLDYGKWELYIPPKQNKSVLVPHGSKLKVVITSKSGEILYRISPWAKYVVREGDNVNYDWIHWDPEHSYEFKHSRPKKPRSLRIYESHVGISSHEGKVASYKHFTCNVLPRIKGLGYNCIQLMAIMEHAYYASFGYQITSFFAASSRYGTPEELQELVDTAHSMGIIVLLDVVHSHASKNSADGLNMFDGTDSCYFHSGPRGTHDLWDSRLFAYSSWEILRFLLSNIRWWLEEYRFDGFRFDGVTSMLYHHHGVGQGFSGDYSEYFGLQVDEDALTYLMLANHLVHTLCPDSITIAEDVSGMPALCSPISQGGGGFDYRLAMAIPDKWIQLLKEFKDEDWNMGDIVYTLTNRRYLEKCIAYAESHDQALVGDKSLAFWLMDAEMYTNMSVLTPFTPVIDRGIQLHKMIRLITHGLGGEGYLNFMGNEFGHPEWLDFPRKGNNESYHYARRQFHLTDDDLLRYKFLNNFDRDMNRLEERYGWLAAPQAYVSEKHEGNKIIAFERAGLLFIFNFHPSKSYTDYRVGTALPGKFKIVLDSDAAEYGGHQRLDHSTDFFSEAFEHNGRPYSLLVYIPSRVALILQNVDLPN

SEQ ID NO: 15715 - protein, 263 aa, Homo sapiens
MSGALDVLQMKEEDVLKFLAAGTHLGGTNLDFQMEQYIYKRKSDGIYIINLKRTWEKLLLAARAIVAIENPADVSVISSRNTGQRAVLKFAAATGATPIAGRFTPGTFTNQIQAAFREPRLLVVTDPRADHQPLTEASYVNLPTIALCNTDSPLRYVDIAIPCNNKGAHSVGLMWWMLAREVLRMRGTISREHPWEVMPDLYFYRDPEEIEKEEQAAAEKAVTKEEFQGEWTAPAPEFTATQPEVADWSEGVQVPSVPIQQFP

SEQ ID NO: 15716 - protein, 1108 aa, Homo sapiens
MRSEGAAPGPAAPLCGALSLLLGALLGKVIEGHGVTDNIQRFSSLPPYLPVSYHILRAETSFFLKEANQDLLRNSSLQARVESFFTYKTRQPPVLNASYGPFSVEKVVPLDLMLTSNFLGPTNKFSFDWKLKAHILRDKVYLSRPKVQVLFHIMGRDWDDHGAGEKLPCLRVFAFRETREVRGSCRLKGDLGLCVAELELLSSWFSAPTVGAGRKKSMDQPEGTPVELYYTVHPGNERGDCAGGDFRKGNAIRPGKDGLEETTSHLQRIGTVGLYRAQDSAQLSELRLDGNVVIWLPSRPVKQGEVVTAYVTISSNSSVDLFILRAKVKKGVNILSAQTREPRQWGVKQEVGSGGKHVTATVACQRLGPSPRNRSSSLFNEVVQMNFEIASFSSLSGTQPITWQVEYPRKGTTDIAVSEIFVSQKDLVGIVPLAMDTEILNTAVLTGKTVAMPIKVVSVEENSAVMDISESVECKSTDEDVIKVSERCDYIFVNGKEIKGKMDAVVNFTYQYLSAPLCVTVWVPRLPLQIEVSDTELSQIKGWRVPIVTNKRPTRESEDEDEEERRGRGCALQYQHATVRVLTQFVSEGAGPWGQPNYLLSPNWQFDITHLVADFMKLEEPHVATLQDSRVLVGREVGMTTIQVLSPLSDSILAEKTITVLDDKVSVTDLAIQLVAGLSVALYPNAENSKAVTAVVTAEEVLRTPKQEAVFSTWLQFSDGSVTPLDIYDTKDFSLAATSQDEAVVSVPQPRSPRWPVVVAEGEGQGPLIRVDMTIAEACQKSKRKSILAVGVGNVRVKFGQNDADSSPGGDYEEDEIKNHASDRRQKGQHHERTGQDGHLYGSSPVEREEGALRRATTTARSLLDNKVVKNSRADGGRLAGEGQLQNIPIDFTNFPAHVDLPKAGSGLEENDLVQTPRGLSDLEIGMYALLGVFCLAILVFLINCATFALKYRHKQVPLEGQASMTHSHDWVWLGNEAELLESMGDAPPPQDEHTTIIDRGPGACEESNHLLLNGGSHKHVQSQIHRSADSGGRQGREQKQDPLHSPTSKRKKVKFTTFTTIPPDDSCPTVNSIVSSNDEDIKWVCQDVAVGAPKELRNYLEKLKDKA

SEQ ID NO: 15717 - protein, 446 aa, Homo sapiens
MEASFVQTTMALGLSSKKASSRNVAVERKNLITVCRFSVKTLLEKYTAEPIDDSSEEFVNFAAILEQILSHRFKACAPAGPVSWFSSDGQRGFWDYIRLACSKVPNNCVSSIENMENISTARAKGRAWIRVALMEKRMSEYITTALRDTRTTRRFYDSGAIMLRDEATILTGMLIGLSAIDFSFCLKGEVLDGKTPVVIDYTPYLKFTQSYDYLTDEEERHSAESSTSEDNSPEHPYLPLVTDEDSWYSKWHKMEQKFRIVYAQKGYLEELVRLRESQLKDLEAENRRLQLQLEEAAAQNQREKRELEGVILELQEQLTGLIPSDHAPLAQGSKELTTPLVNQWPSLGTLNGAEGASNSKLYRRHSFMSTEPLSAEASLSSDSQRLGEGTRDEEPWGPIGKDPTPSMLGLCGSLASIPSCKSLASFKSNECLVSDSPEGSPALSPS

SEQ ID NO: 15718 - protein, 1674 aa, Homo sapiens
GHFKNFCIRFADGFETSWDDWKPEIHGDLVMNACVVPDGTYEVCSRTTGQAAAESSSAGTWTLNVLWKMCGIDVHMDPNIGKRLNALGNTLTTLTGEEDIDDIADLNSVNIADLSDEDEVDTMSPTIHTSSDGSSISGDGHKLTFGQRLVNHLLGLTPPNQRHSVPAEYLCDPEMWGSPQSSQSHLKACRAHSWGNEATDYRRQAASASQPGELRGRKIMKRIVDIRELNEQAKVIDDLKKLGASEGTINQEIQRYQQLESVAVNDIRRDVRKKLRRSSMRAASLKDKWGLSYKPSYSRSKSISASGRPPLKRMERASSRVGETEELPEIRVDAASPGPRVTFNIQDTLKNTVWGSTPQSSCPGEGYFQFPEETELDLLSVTIEGPSHYSSNSEGSCSVFSSPKTPGGFSPGIPFQTEEGRRDDSLSSTSEDSEKDEKDEDHERERFYIYRKPSHTSRKKATGFAAVHQLFTERWPTTPVNRSLSGTATERNIDFELDIRVEIDSGKCVLHPTTLLQEHDDISLRRSYDRSSRSLDQDSPSKKKKFQTNYASTTHLMTGKKVPSSLQTKPSDLETTVFYIPGVDVKLHYNSKTLKTESPNASRGSSLPRTLSKESKLYAKGKGSGGVKTAKLYAWVALQSLPEEMVISPCLLDFLEKALETIPITPVERNYTAVSSQDEDMGHFEIPDPMEESTTSLVSSSTSAYSSFPVDVVVYVRVQPSQIKFSCLPVSRVECMLKLPSLDLVFSSNRGELETLGTTYPAETLSPGGNATQSGTKTSASKTGIPGSSGLGSPLGRSRHSSSQSDLTSSSSSSSGLSFTACMSDFSLYVFHPYGAGKQKTAVSGLTPGSGGLGNVDEEPTSVTGRKDSLSINLEFVKVSLSRIRRSGGASFFESQSVSKSASKMDTTLINISAVCDIGSASFKYDMRRLSEILAFPRAWYRRSIARRLFLGDQTINLPTSGPGTPDSIEGVSQHLSPESSRKAYCKTWEQPSQSASFTHMPQSPNVFNEHMTNSTMSPGTVGQSLKSPASIRSRSVSDSSVPRRDSLSKTSTPFNKSNKAASQQGTPWETLVVFAINLKQLNVQMNMSNVMGNTTWTTSGLKSQGRLSVGSNRDREISMSVGLGRSQLDSKGGVVGGTIDVNALEMVAHISEHPNQQPSHKIQITMGSTEARVDYMGSSILMGIFSNADLKLQDEWKVNLYNTLDSSITDKSEIFVHGDLKWDIFQVMISRSTTPDLIKIGMKLQEFFTQQFDTSKRALSTWGPVPYLPPKTMTSNLEKSSQEQLLDAAHHRHWPGVLKVVSGCHISLFQIPLPEDGMQFGGSMSLHGNHMTLACFHGPNFRSKSWALFHLEEPNIAFWTEAQKIWEDGSSDHSTYIVQTLDFHLGHNTMVTKPCGALESPMATITKITRRRHENPPHGVASVKEWFNYVTATRNEELNLLRNVDANNTENSTTVKNSSLLSGFRGGSSYNHETETIFALPRMQLDFKSIHVQEPQEPSLQDASLKPKVECSVVTEFTDHICVTMDAELIMFLHDLVSAYLKEKEKAIFPPRILSTRPGQKSPIIIHDDNSSDKDREDSITYTTVDWRDFMCNTWHLEPTLRLISWTGRKIDPVGVDYILQKLGFHHARTTIPKWLQRGVMDPLDKVLSVLIKKLGTALQDEKEKKGKDKEEH

SEQ ID NO: 15719 - protein, 1272 aa, Homo sapiens
MSSNDSSLMAGIIYYSQEKYFHHVQQAAAVGLEKFSNDPVLKFFKAYGVLKEEHIQDAISDLESIRHHPDVSLCSTMALIYAHKRCEIIDREAIQELEYSLKEIRKTVSGTALYYAGLFLWLIGRHDKAKEYIDRMLKISRGFREAMYFMMQQNYSEALEVVNQITVTSGSFLPALVLKMQLFLARQDWEQTVEMGHRILEKDESNIDACQILTVHELAREGNMTTATNHVRNLIKALETREPENPSLHLKKIIVVSRLCGSHQVILGLVCSFIERTFMATPSYVHVATELGYLFILKNQVKEALLWYSEAMKLDKDGMAGLTGIILCHILEGHLEEAEYRLEFLKEVQKSLGKSEVLIFLQALLMSRKHKGEEETTALLKEAVELHFSSMQGIPLGSEYFEKLDPYFLVCIAKEYLLFCPKQPRLPGQIVSPLLKQVAVILNPVVKAAPALIDPLYLMAQVRYYSGELENAQSILQRCLELDPASVDAHLLMCQIYLAQGNFGMCFHCLELGVSHNFQVRDHPLYHLIKARALNKAGDYPEAIKTLKMVIKLPALKKEEGRKFLRPSVQPSQRASILLELVEALRLNGELHEATKVMQDTINEFGGTPEENRITIANVDLVLSKGNVDVALNMLRNILPKQSCYMEAREKMANIYLQTLRDRRLYIRCYRELCEHLPGPHTSLLLGDALMSILEPEKALEVYDEAYRQNPHDASLASRIGHAYVKAHQYTEAIEYYEAAQKINGQDFLCCDLGKLLLKLKKVNKAEKVLKQALEHDIVQDIPSMMNDVKCLLLLAKVYKSHKKEAVIETLNKALDLQSRILKRVPLEQPEMIPSQKQLAASICIQFAEHYLAEKEYDKAVQSYKDVFSYLPTDNKVMLELAQLYLLQGHLDLCEQHCAILLQTEQNHETASVLMADLMFRKQKHEAAINLYHQVLEKAPDNFLVLHKLIDLLRRSGKLEDIPAFFELAKKVSSRVPLEPGFNYCRGIYCWHIGQPNEALKFLNKARKDSTWGQSAIYHMVQICLNPDNEVVGGEAFENQGAESNYMEKKELEQQGVSTAEKLLREFYPHSDSSQTQLRLLQGLCRLATREKANMEAALGSFIQIAQAEKDSVPALLALAQAYVFLKQIPKARMQLKRLAKTPWVLSEAEDLEKSWLLLADIYCQGSKFDLALELLRRCVQYNKSCYKAYEYMGFIMEKEQSYKDAVTNYKLAWKYSHHANPAIGFKLAFNYLKDKKFVEAIEICNDVLREHPDYPKIREEILEKARRSLRP

SEQ ID NO: 15720 - protein, 719 aa, Homo sapiens
MSAEEDARWLRWVTQQFKTIAGEDGEISLQEFKAALHVKESFFAERFFALFDSDRSGTITLQELQEALTLLIHGSPMDKLKFLFQVYDIDGSGSIDPDELRTVLQSCLRESAISLPDEKLDQLTLALFESADADGNGAITFEELRDELQRFPGVMENLTISAAHWLTAPAPRPRPRRPRQLTRAYWHNHRSQLFCLATYAGLHVLLFGLAASAHRDLGASVMVAKGCGQCLNFDCSFIAVLMLRRCLTWLRATWLAQVLPLDQNIQFHQLMGYVVVGLSLVHTVAHTVNFVLQAQAEASPFQFWELLLTTRPGIGWVHGSASPTGVALLLLLLLMFICSSSCIRRSGHFEVFYWTHLSYLLVWLLLIFHGPNFWKWLLVPGILFFLEKAIGLAVSRMAAVCIMEVNLLPSKVTHLLIKRPPFFHYRPGDYLYLNIPTIARYEWHPFTISSAPEQKDTIWLHIRSQGQWTNRLYESFKASDPLGRGSKRLSRSVTMRKSQRSSKGSEILLEKHKFCNIKCYIDGPYGTPTRRIFASEHAVLIGAGIGITPFASILQSIMYRHQKRKHTCPSCQHSWIEGVQDNMKLHKVDFIWINRDQRSFEWFVSLLTKLEMDQAEEAQYGRFLELHMYMTSALGKNDMKAIGLQMALDLLANKEKKDSITGLQTRTQPGRPDWSKVFQKVAAEKKGKVQVFFCGSPALAKVLKGHCEKFGFRFFQENF

SEQ ID NO: 15721 - protein, 781 aa, Homo sapiens
MANVSKKVSWSGRDRDDEEAAPLLRRTARPGGGTPLLNGAGPGAARQDMDPPHPFPKEIPHNEKLLSLKYESLDYDNSENQLFLEEERRINHTAFRTVEIKRWVICALIGILTGLVACFIDIVVENLAGLKYRVIKGNIDKFTEKGGLSFSLLLWATLNAAFVLVGSVIVAFIEPVAAGSGIPQIKCFLNGVKIPHVVRLKTLVIKVSGVILSVVGGLAVGKEGPMIHSGSVIAAGISQGRSTSLKRDFKIFEYFRRDTEKRDFVSAGAAAGVSAAFGAPVGGVLFSLEEGASFWNQFLTWRIFFASMISTFTLNFVLSIYHGNMWDLSSPGLINFGRFDSEKMAYTIHEIPVFIAMGVVGGVLGAVFNALNYWLTMFRIRYIHRPCLQVIEAVLVAAVTATVAFVLIYSSRDCQPLQGGSMSYPLQLFCADGEYNSMAAAFFNTPEKSVVSLFHDPPGSYNPLTLGLFTLVYFFLACWTYGLTVSAGVFIPSLLIGAAWGRLFGISLSYLTGAAIWADPGKYALMGAAAQLGGIVRMTLSLTVIMMEATSNVTYGFPIMLVLMTAKIVGDVFIEGLYDMHIQLQSVPFLHWEAPVTSHSLTAREVMSTPVTCLRRREKVGVIVDVLSDTASNHNGFPVVEHADDTQPARLQGLILRSQLIVLLKHKVFVERSNLGLVQRRLRLKDFRDAYPRFPPIQSIHVSQDERECTMDLSEFMNPSPYTVPQEASLPRVFKLFRALGLRHLVVVDNRNQVVGLVTRKDLARYRLGKRGLEELSLAQT

SEQ ID NO: 15722 - protein, 417 aa, Homo sapiens
MRLSKTLVDMDMADYSAALDPAYTTLEFENVQVLTMGNDTSPSEGTNLNAPNSLGVSALCAICGDRATGKHYGASSCDGCKGFFRRSVRKNHMYSCRFSRQCVVDKDKRNQCRYCRLKKCFRAGMKKEAVQNERDRISTRRSSYEDSSLPSINALLQAEVLSRQITSPVSGINGDIRAKKIASIADVCESMKEQLLVLVEWAKYIPAFCELPLDDQVALLRAHAGEHLLLGATKRSMVFKDVLLLGNDYIVPRHCPELAEMSRVSIRILDELVLPFQELQIDDNEYAYLKAIIFFDPDAKGLSDPGKIKRLRSQVQVSLEDYINDRQYDSRGRFGELLLLLPTLQSITWQMIEQIQFIKLFGMAKIDNLLQEMLLGGPCQAQEGRGWSGDSPGDRPHTVSSPLSSLASPLCRFGQVA

SEQ ID NO: 15723 - protein, 692 aa, Homo sapiens
MVTTLGPKMAAEWGGGVGYSGSGPGRSRWRWSGSVWVRSVLLLLGGLRASATSTPVSLGSSPPCRHHVPSDTEVINKVHLKANHVVKRDVDEHLRIKTVYDKSVEELLPEKKNLVKNKLFPQAISYLEKTFQVRRPAGTILLSRQCATNQYLRKENDPHRYCTGECAAHTKCGPVIVPEEHLQQCRVYRGGKWPHGAVGVPDQEGISDADFVLYVGALATERCSHENIISYAAYCQQEANMDRPIAGYANLCPNMISTQPQEFVGMLSTVKHEVIHALGFSAGLFAFYHDKDGNPLTSRFADGLPPFNYSLGLYQWSDKVVRKVERLWDVRDNKIVRHTVYLLVTPRVVEEARKHFDCPVLEGMELENQGGVGTELNHWEKRLLENEAMTGSHTQNRVLSRITLALMEDTGWYKANYSMAEKLDWGRGMGCDFVRKSCKFWIDQQRQKRQMLSPYCDTLRSNPLQLTCRQDQRAVAVCNLQKFPKPLPQEYQYFDELSGIPAEDLPYYGGSVEIADYCPFSQEFSWHLSGEYQRSSDCRILENQPEIFKNYGAEKYGPHSVCLIQKSAFVMEKCERKLSYPDWGSGCYQVSCSPQGLKVWVQDTSYLCSRAGQVLPVSIQMNGWIHDGNLLCPSCWDFCELCPPETDPPATNLTRALPLDLCSCSSSLVVTLWLLLGNLFPLLAGFLLCIWH

SEQ ID NO: 15724 - protein, 340 aa, Homo sapiens
MLWFRGALGVWVWLAAASQPCKNSNAGRRGQHPRRPAGSCVQRLTMRNTSKELQGATHRYAPCDWYYHVPVKRSEKAVDAPPASQIPGLSNLGDSHSENLPGTRRYWIKETDSEYVKLAKQGGRPDLLKHFAPGTRKGSPVAYSLPDWYIHHSKPPTASQQEVRAVSMPDYMVHEEFNPDQANGSYASRRGPFDFDMKTVWQREAEELEKEKKKLRLPAIDSKYLSKAGTPLGPKNPAGSRLSFPPVPGQKNSSPTNFSKLISNGYKDEWLQQQQRADSDKRTPKTSRASVLSQSPRDLEGPQDAARLQDAEASEGPEDTPESSQSPEESVSASTPAELK

SEQ ID NO: 15725 - protein, 1091 aa, Homo sapiens
MFNGIISIRNKNGEEKVKIERPGGSLSPIWSICWNPSSRWESFWMNRENEDAEDVIVNRYIQEIPSTLKSAVYSSQGSEAEEEEPEEEDDSPRDDNLEERNDILAVADWGQKVSFYQLSGKQIGKDRALNFDPCCISYFTKGEYILLGGSDKQVSLFTKDGVRLGTVGEQNSWVWTCQAKPDSNYVVVGCQDGTISFYQLIFSTVHGLYKDRYAYRDSMTDVIVQHLITEQKVRIKCKELVKKIAIYRNRLAIQLPEKILIYELYSEDLSDMHYRVKEKIIKKFECNLLVVCANHIILCQEKRLQCLSFSGVKEREWQMESLIRYIKVIGGPPGREGLLVGLKNGQILKIFVDNLFAIVLLKQATAVRCLDMSASRKKLAVVDENDTCLVYDIDTKELLFQEPNANSVAWNTQCEDMLCFSGGGYLNIKASTFPVHRQKLQGFVVGYNGSKIFCLHVFSISAVEVPQSAPMYQYLDRKLFKEAYQIACLGVTDTDWRELAMEALEGLDFETAKKAFIRVQDLRYLELISSIEERKKRGETNNDLFLADVFSYQGKFHEAAKLYKRSGHENLALEMYTDLCMFEYAKDFLGSGDPKETKMLITKQADWARNIKEPKAAVEMYISAGEHVKAIEICGDHGWVDMLIDIARKLDKAEREPLLLCATYLKKLDSPGYAAETYLKMGDLKSLVQLHVETQRWDEAFALGEKHPEFKDDIYMPYAQWLAENDRFEEAQKAFHKAGRQREAVQVLEQLTNNAVAESRFNDAAYYYWMLSMQCLDIAQDPAQKDTMLGKFYHFQRLAELYHGYHAIHRHTEDPFSVHRPETLFNISRFLLHSLPKDTPSGISKVKILFTLAKQSKALGAYRLARHAYDKLRGLYIPARFQKSIELGTLTIRAKPFHDSEELVPLCYRCSTNNPLLNNLGNVCINCRQPFIFSASSYDVLHLVEFYLEEGITDEEAISLIDLEVLRPKRDDRQLEIANNSSQILRLVETKDSIGDEDPFTAKLSFEQGGSEFVPVVVSRLVLRSMSRRDVLIKRWPPPLRWQYFRSLLPDASITMCPSCFQMFHSEDYELLVLQHGCCPYCRRCKDDPGP

SEQ ID NO: 15726 - protein, 490 aa, Homo sapiens
MDNYSTGYDVKPPCLYQMPLSGQQSSIKVEDIQMHNYQQHSHLPPQSEEMMPHSGSVYYKPSSPPTPTTPGFQVQHSPMWDDPGSLHNFHQNYVATTHMIEQRKTPVSRLSLFSFKQSPPGTPVSSCQMRFDGPLHVPMNPEPAGSHHVVDGQTFAVPNPIRKPASMGFPGLQIGHASQLLDTQVPSPPSRGSPSNEGLCAVCGDNAACQHYGVRTCEGCKGFFKRTVQKNAKYVCLANKNCPVDKRRRNRCQYCRFQKCLAVGMVKEVVRTDSLKGRRGRLPSKPKSPQEPSPPSPPVSLISALVRAHVDSNPAMTSLDYSRFQANPDYQMSGDDTQHIQQFYDLLTGSMEIIRGWAEKIPGFADLPKADQDLLFESAFLELFVLRLAYRSNPVEEYEHRHFCLLLHCCPGYGHRETRAQGTQESGRTAKQDCKLSQRPRDFQQWGVEPPQLFVQTVGEAPRTSYPLHTGATAHFLPEIGRLGATASNN

SEQ ID NO: 15727 - protein, 217 aa, Homo sapiens
GVALRSTQSTLQAGLAADAWAAPIAMQIYKKHLDPRPGPCPPELGLGLGQLACCCLHRRAKRRPPMTQVYERLEKLQAVVAGVPGHSEAASCIPPSPQENSYVSSTGRAHSGAAPWQPLAAPSGASAQAAEQLQRGPNQPVESDESLGGLSAALRSWHLTPSCPLDPAPLREAGCPQGDTAGESSWGSGPGSRPTAVEGLGLEQDRQGPEESDEFQS

SEQ ID NO: 15728 - protein, 1023 aa, Homo sapiens
TTTTIGISATSATFTNVFGKKRANVVTTPSTNRKNKKNKTKETPPTAHLILPEQHMSLAQQKADKNKINGEPRGGGAGGNSDSDNLDSTDCNSESSSGGKSQELNFVMDVNSSKYPSLLLHSQEEKTSTATSKTQTRLEGEVTPNSLSTSYKTVSLPLSSPNIKLNLTSPKRGQKREEGWKEVVRRSKKLSVPASVVSRIMGRGGCNITAIQDVTGAHIDVDKQKDKNGERMITIRGGTESTRYAVQLINALIQDPAKELEDLIPKNHIRTPASTKSIHANFSSGVGTTAASSKNAFPLGAPTLVTSQATTLSTFQPANKLNKNVPTNVRSSFPVSLPLAYPHPHFALLAAQTMQQIRHPRLPMAQFGGTFSPSPNTWGPFPVRPVNPGNTNSSPKHNNTSRLPNQNGTVLPSESAGLATASCPITVSSVVAASQQLCVTNTRTPSSVRKQLFACVPKTSPPATVISSVTSTCSSLPSVSSAPITSGQAPTTFLPASTSQAQLSSQKMESFSAVPPTKEKVSTQDQPMANLCTPSSTANSCSSSASNTPGAPETHPSSSPTPTSSNTQEEAQPSSVSDLSPMSMPFASNSEPAPLTLTSPRMVAADNQDTSNLPQLAVPAPRVSHRMQPRGSFYSMVPNATIHQDPQSIFVTNPVTLTPPQGPPAAVQLSSAVNIMNGSQMHINPANKSLPPTFGPATLFNHFSSLFDSSQVPANQGWGDGPLSSRVATDASFTVQSAFLGNSVLGHLENMHPDNSKAPGFRPPSQRVSTSPVGLPSIDPSGSSPSSSSAPLASFSGIPGTRVFLQGPAPVGTPSFNRQHFSPHPWTSASNSSTSAPPTLGQPKGVSASQDRKIPPPIGTERLARIRQGGSVAQAPAGTSFVAPVGHSGIWSFGVNAVSEGLSGWSQSVMGNHPMHQQLSDPSTFSQHQPMERDDSGMVAPSNIFHQPMGLPISMYGGTIIPSHPQLADVPGGPLFNGLHNPDPAWNPMIKVIQNSTECTDAQQIWPGTWAPHIGNMHLKYVN

SEQ ID NO: 15729 - protein, 3007 aa, Homo sapiens
GIHNTPLDMMSIVQAKKCQVLVSDIDYRNYLHQWTCLPDQNDVIQAKKAYDLQSDNLYKSDLEWLKGIGWLPEGSVEVMRVKNAQNLLNERLYRIKPEALKFTSIVDTPEVIQAKINAVQISEPLYRDAWEKEKANVNVPADTPLMLQSKINALQISNKRYQQAWEDVKMTGYDLRADAIGIQHAKASRDIASDYLYKTAYEKQKGHYIGCRSAKEDPKLVWAANVLKMQNDRLYKKAYNDHKAKISIPVDMVSISAAKEGQALASDVDYRHYLHRWSCFPDQNDVIQARKAYDLQSDALYKADLEWLRGIGWMPQGSPEVLRVKNAQNIFCDSVYRTPVVNLKYTSIVDTPEVVLAKSNAENISIPKYREVWDKDKTSIHIMPDTPEINLARANALNVSNKLYREGWDEMKAGCDVRLDAIPIQAAKASREIASDYKYKLDHEKQKGHYVGTLTARDDNKIRWALIADKLQNEREYRLDWAKWKAKIQSPVDMLSILHSKNSQALVSDMDYRNYLHQWTCMPDQNDVIQAKKAYELQSDNVYKADLEWLRGIGWMPNDSVSVNHAKHAADIFSEKKYRTKIETLNFTPVDDRVDYVTAKQSGEILDDIKYRKDWNATKSKYTLTETPLLHTAQEAARILDQYLYKEGWERQKATGYILPPDAVPFVHAHHCNDVQSELKYKAEHVKQKGHYVGVPTMRDDPKLVWFEHAGQIQNERLYKEDYHKTKAKINIPADMVSVLAAKQGQTLVSDIDYRNYLHQWMCHPDQNDVIQARKAYDLQSDNVYRADLEWLRGIGWIPLDSVDHVRVTKNQEMMSQIKYKKNALENYPNFRSVVDPPEIVLAKINSVNQSDVKYKETFNKAKGKYTFSPDTPHISHSKDMGKLYSTILYKGAWEGTKAYGYTLDERYIPIVGAKHADLVNSELKYKETYEKQKGHYLAGKVIGEFPGVVHCLDFQKMRSALNYRKHYEDTKANVHIPNDMMNHVLAKRCQYILSDLEYRHYFHQWTSLLEEPNVIRVRNAQEILSDNVYKDDLNWLKGIGCYVWDTPQILHAKKSYDLQSQLQYTAAGKENLQNYNLVTDTPLYVTAVQSGINASEVKYKENYHQIKDKYTTVLETVDYDRTRNLKNLYSSNLYKEAWDRVKATSYILPSSTLSLTHAKNQKHLASHIKYREEYEKFKALYTLPRSVDDDPNTARCLRVGKLNIDRLYRSVYEKNKMKIHIVPDMVEMVTAKDSQKKVSEIDYRLRLHEWICHPDLQVNDHVRKVTDQISDIVYKDDLNWLKGIGCYVWDTPEILHAKHAYDLRDDIKYKAHMLKTRNDYKLVTDTPVYVQAVKSGKQLSDAVYHYDYVHSVRGKVAPTTKTVDLDRALHAYKLQSSNLYKTSLRTLPTGYRLPGDTPHFKHIKDTRYMSSYFKYKEAYEHTKAYGYTLGPKDVPFVHVRRVNNVTSERLYRELYHKLKDKIHTTPDTPEIRQVKKTQEAVSELIYKSDFFKMQGHMISLPYTPQVIHCRYVGDITSDIKYKEDLQVLKGFGCFLYDTPDMVRSRHLRKLWSNYLYTDKARKMRDKYKVVLDTPEYRKVQELKTHLSELVYRAAGKKQKSIFTSVPDTPDLLRAKRGQKLQSQYLYVELATKERPHHHAGNQTTALKHAKDVKDMVSEKKYKIQYEKMKDKYTPVPDTPILIRAKRAYWNASDLRYKETFQKTKGKYHTVKDALDIVYHRKVTDDISKIKYKENYMSQLGIWRSIPDRPEHFHHRAVTDTVSDVKYKEDLTWLKGIGCYAYDTPDFTLAEKNKTLYSKYKYKEVFERTKSDFKYVADSPINRHFKYATQLMNEKKYRADYEQRKDKYHLVVDEPRHLLAKTAGDQISQIKYRKNYEKSKDKFTSIVDTPEHLRTTKVNKQISDILYKLEYNKAKPRGYTTIHDTPMLLHVRKVKDEVSDLKYKEVYQRNKSNCTIEPDAVHIKAAKDAYKVNTNLDYKKQYEANKAHWKWTPDRPDFLQAAKSSLQQSDFEYKLDREFLKGCKLSVTDDKNTVLALRNTLIESDLKYKEKHVKERGTCHAVPDTPQILLAKTVSNLVSENKYKDHVKKHLAQGSYTTLPETRDTVHVKEVTKHVSDTNYKKKFVKEKGKSNYSIMLEPPEVKHAMEVAKKQSDVAYRKDAKENLHYTTVADRPDIKKATQAAKQASEVEYRAKHRKEGSHGLSMLGRPDIEMAKKAAKLSSQVKYRENFDKEKGKTPKYNPKDSQLYKVMKDANNLASEVKYKADLKKLHKPVTDMKESLIMNHVLNTSQLASSYQYKKKYEKSKGHYHTIPDNLEQLHLKEATELQSIVKYKEKYEKERGKPMLDFETPTYITAKESQQMQSGKEYRKDYEESIKGRNLTGLEVTPALLHVKYATKIASEKEYRKDLEESIRGKGLTEMEDTPDMLRAKNATQILNEKEYKRDLELEVKGRGLNAMANETPDFMRARNATDIASQIKYKQSAEMEKANFTSVVDTPEIIHAQQVKNLSSQKKYKEDAEKSMSYYETVLDTPEIQRVRENQKNFSLLQYQCDLKNSKGKITVVQDTPEILRVKENQKNFSSVLYKEDVSPGTAIGKTPEMMRVKQTQDHISSVKYKEAIGQGTPIPDLPEVKRVKETQKHISSVMYKENLGTGIPTTVTPEIERVKRNQENFSSVLYKENMGKGTPLAVTPEMERVKHNQENISSVLYKENVGKATATPVTPEMQRVKRNQENISSVLYSDSFRKQIQGKAAYVLDTPEMRRVRETQRHISTVKYHEDFEKHKGCFTPVVTDPITERVKKNMQDFSDINYRGIQRKVVEMEQKRNDQDQETITGLRVWRTNPGSVFDYDPAEDNIQSRSLHMINVQAQRRSREQSRSASALSISGGEEKSEHSEAPDHHLSTYSDGGVFAVSTAYKHAKTTELPQQRSSSVATQQTTVSSIPSHPSTAGKIFRAMYDYMAADADEVSFKDGDAIINVQAIDEGWMYGTVQRTGRTGMLPANYVEAI

SEQ ID NO: 15730 - protein, 764 aa, Homo sapiens
MKAPAVLAPGILVLLFTLVQRSNGECKEALAKSEMNVNMKYQLPNFTAETPIQNVILHEHHIFLGATNYIYVLNEEDLQKVAEYKTGPVLEHPDCFPCQDCSSKANLSGGVWKDNINMALVVDTYYDDQLISCGSVNRGTCQRHVFPHNHTADIQSEVHCIFSPQIEEPSQCPDCVVSALGAKVLSSVKDRFINFFVGNTINSSYFPDHPLHSISVRRLKETKDGFMFLTDQSYIDVLPEFRDSYPIKYVHAFESNNFIYFLTVQRETLDAQTFHTRIIRFCSINSGLHSYMEMPLECILTEKRKKRSTKKEVFNILQAAYVSKPGAQLARQIGASLNDDILFGVFAQSKPDSAEPMDRSAMCAFPIKYVNDFFNKIVNKNNVRCLQHFYGPNHEHCFNRTLLRNSSGCEARRDEYRTEFTTALQRVDLFMGQFSEVLLTSISTFIKGDLTIANLGTSEGRFMQVVVSRSGPSTPHVNFLLDSHPVSPEVIVEHTLNQNGYTLVITGKKITKIPLNGLGCRHFQSCSQCLSAPPFVQCGWCHDKCVRSEECLSGTWTQQICLPAIYKVFPNSAPLEGGTRLTICGWDFGFRRNNKFDLKKTRVLLGNESCTLTLSESTMNTLKCTVGPAMNKHFNMSIIISNGHGTTQYSTFSYVDPVITSISPKYGPMAGGTLLTLTGNYLNSGNSRHISIGGKTCTLKSVSNSILECYTPAQTISTEFAVKLKIDLANRETSIFSYREDPIVYEIHPTKSFIRHVNIALIQR

SEQ ID NO: 15731 - protein, 433 aa, Homo sapiens
MDRGEKIQLKRVFGYWWGTSFLLINIIGAGIFVSPKGVLAYSCMNVGVSLCVWAGCAILAMTSTLCSAEISISFPCSGAQYYFLKRYFGSTVAFLNLWTSLFLGSGVVAGQALLLAEYSIQPFFPSCSVPKLPKKCLALAMLWIVGILTSRGVKEVTWLQIASSVLKVSILSFISLTGVVFLIRGKKENVERFQNAFDAELPDISHLIQAIFQGYFAYSGELKKPRTTIPKCIFTALPLVTVVYLLVNISYLTVLTPREILSSDAVAITWADRAFPSLAWIMPFAISTSLFSNLLISIFKSSRPIYLASQEGQLPLLFNTLNSHSSPFTAVLLLVTLGSLAIILTSLIDLINYIFFTGSLWSILLMIGILRRRYQEPNLSIPYKSLILVVQAGEAGVQWHDLGLLQPLLPGFKRFSCLSLPSSWDYRCFCHFH

SEQ ID NO: 15732 - protein, 837 aa, Homo sapiens
MARGERRRRAVPAEGVRTAERAARGGPGRRDGRGGGPRSTAGGVALAVVVLSLALGMSGRWVLAWYRARRAVTLHSAPPVLPADSSSPAVAPDLFWGTYRPHVYFGMKTRSPKPLLTGLMWAQQGTTPGTPKLRHTCEQGDGVGPYGWEFHDGLSFGRQHIQDGALRLTTEFVKRPGGQHGGDWSWRVTVEPQDSGTSALPLVSLFFYVVTDGKEVLLPEVGAKGQLKFISGHTSELGDFRFTLLPPTSPGDTAPKYGSYNVFWTSNPGLPLLTEMVKSRLNSWFQHRPPGAPPERYLGLPGSLKWEDRGPSGQGQGQFLIQQVTLKIPISIEFVFESGSAQAGGNQALPRLAGSLLTQALESHAEGFRERFEKTFQLKEKGLSSGEQVLGQAALSGLLGGIGYFYGQGLVLPDIGVEGSEQKVDPALFPPVPLFTAVPSRSFFPRGFLWDEGFHQLVVQRWDPSLTREALGHWLGLLNADGWIGREQILGDEARARVPPEFLVQRAVHANPPTLLLPVAHMLEVGDPDDLAFLRKALPRLHAWFSWLHQSQAGPLPLSYRWRGRDPALPTLLNPKTLPSGLDDYPRASHPSVTERHLDLRCWVALGARVLTRLAEHLGEAEVAAELGPLAASLEAAESLDELHWAPELGVFADFGNHTKAVQLKPRPPQGLVRVVGRPQPQLQYVDALGYVSLFPLLLRLLDPTSSRLGPLLDILADSRHLWSPFGLRSLAASSSFYGQRNSEHDPPYWRGAVWLNVNYLALGALHHYGHLEGPHQARAAKLHGELRANVVGNVWRQYQATGFLWEQYSDRDGRGMGCRPFHGWTSLVLLAMAEDY

SEQ ID NO: 15733 - protein, 756 aa, Homo sapiens
MVVTRSARAKASIQAASAESSGQKSFAANGIQAHPESSTGSDARTTAESQTTGKQSLIPRTPKARKRKSRTTGSLPKGTEPSTDGETSEAESNYSVSEHHDTILRVTRRRQILIACSPVSSVRKKPKVTPTKESYTEEIVSEAESHVSGISRIVLPTEKTTGARRSKAKSLTDPSQESHTEAISDAETSSSDISFSGIATRRTRSMQRKLKAQTEKKDSKIVPGNEKQIVGTPVNSEDSDTRQTSHLQARSLSEINKPNFYNNDFDDDFSHRSSENILTVHEQANVESLKETKQNCKDLDEDANGITDEGKEINEKSSQLKNLSELQDTSLQQLVSQRHSTPQNKNAVSVHSNLNSEAVMKSLTQTFATVEVGRWNNNKKSPIKASDLTKFGDCGGSDDEEESTVISVSEDMNSEGNVDFECDTKLYTSAPNTSQGKDNSVLLVLSSDESQQSENSENEEDTLCFVENSGQRESLSGDTGSLSCDNALFVIDTTPGMSADKNFYLEEEDKASEVAIEEEKEEEEDEKSEEDSSDHDENEDEFSDEEDFLNSTKAKLLKLTSSSIDPGLSIKQLGGLYINFNADKLQSNKRTLTQIKEKKKNELLQKAVITPDFEKNHCVPPYSESKYQLQKKRRKERQKTAGDGWFGMKAPEMTNELKNDLKALKMRASMDPKRFYKKNDRDGFPKYFQIGTIVDNPADFYHSRIPKKQRKRTIVEELLADSEFRRYNRRKYSEIMAEKAANAAGKKFRKKKKFRN

SEQ ID NO: 15734 - protein, 948 aa, Homo sapiens
MTGQARFHRGAEACRAIRQCRSRRPRAAHPEGRAGSGRGSRHASPGVRRGGFSLLLLNLEEYYFEQHRANHILHKGSHHERKIRGSLKICSKSVIFEPDSISQPIIKIPLRDCIKIGKHGENGANRHFTKAKSGGISLIFSQVYFIKEHNVVAPYKIERGKMEYVFELDVPGKVEDVVETLLQLHRASCLDKLGDQTAMITAILQSRLARTSFDKNRFQNISEKLHMECKAEMVTPLVTNPGHVCITDTNLYFQPLNGYPKPVVQITLQDVRRIYKRRHGLMPLGLEVFCTEDDLCSDIYLKFYEPQDRDDLYFYIATYLEHHVAEHTAESYMLQWQRGHLSNYQYLLHLNNLADRSCNDLSQYPVFPWIIHDYSSSELDLSNPGTFRDLSKPVGALNKERLERLLTRYQEMPEPKFMYGSHYSSPGYVLFYLVRIAPEYMLCLQNGRFDNADRMFNSIAETWKNCLDGATDFKELIPEFYGDDVSFLVNSLKLDLGKRQGGQMVDDVELPPWASSPEDFLQKSKDALESNYVSEHLHEWIDLIFGYKQKGSDAVGAHNVFHPLTYEGGVDLNSIQDPDEKVAMLTQILEFGQTPKQLFVTPHPRRITPKFKSLSQTSSYNASMADSPGEESFEDLTEESKTLAWNNITKLQLHEHYKIHKEAVTGITVSRNGSSVFTTSQDSTLKMFSKESKMLQRSISFSNMALSSCLLLPGDATVITSSWDNNVYFYSIAFGRRQDTLMGHDDAVSKICWHDNRLYSASWDSTVKVWSGVPAEMPGTKRHHFDLLAELEHDVSVDTISLNAASTLLVSGTKEGTVNIWDLTTATLMHQIPCHSGIVCDTAFSPDSRHVLSTGTDGCLNVIDVQTGMLISSMTSDEPQRCFVWDGNSVLSGSQSGELLVWDLLGAKISERIQGHTGAVTCIWMNEQCSSIITGGEDRQIIFWKLQY

SEQ ID NO: 15735 - protein, 454 aa, Homo sapiens
MGENDPPAVEAPFSFRSLFGLDDLKISPVAPDADAVAAQILSLLPLKFFPIIVIGIIALILALAIGLGIHFDCSGKYRCRSSFKCIELIARCDGVSDCKDGEDEYRCVRVGGQNAVLQVFTAASWKTMCSDDWKGHYANVACAQLGFPSYVSSDNLRVSSLEGQFREEFVSIDHLLPDDKVTALHHSVYVREGCASGHVVTLQCTACGHRRGYSSRIVGGNMSLLSQWPWQASLQFQGYHLCGGSVITPLWIITAAHCVYDLYLPKSWTIQVGLVSLLDNPAPSHLVEKIVYHSKYKPKRLGNDIALMKLAGPLTFNEMIQPVCLPNSEENFPDGKVCWTSGWGATEDGAGDASPVLNHAAVPLISNKICNHRDVYGGIISPSMLCAGYLTGGVDSCQGDSGGPLVCQERRLWKLVGATSFGIGCAEVNKPGVYTRVTSFLDWIHEQMERDLKT

SEQ ID NO: 15736 - protein, 801 aa, Homo sapiens
VMEVVEAEKIVLLTSARFLFLLLGPAGKAPQYHEIGRSIATLMTDEIFHDVAYKAKDRNDLLSGIDEFLDQVTVLPPGEWDPSIRIEPPKSVPSQEKRKIPVFHNGSTPTLGETPKEAAHHAGPELQRTGRLFGGLILDIKRKAPFFLSDFKDALSLQCLASILFLYCACMSPVITFGGLLGEATEGRISAIESLFGASLTGIAYSLFAGQPLTILGSTGPVLVFEKILYKFCRDYQLSYLSLRTSIGLWTSFLCIVLVATDASSLVCYITRFTEEAFAALICIIFIYEALEKLFDLGETYAFNMHNNLDKLTSYSCVCTEPPNPSNETLAQWKKDNITAHNISWRNLTVSECKKLRGVFLGSACGHHGPYIPDVLFWCVILFFTTFFLSSFLKQFKTKRYFPTKVRSTISDFAVFLTIVIMVTIDYLVGVPSPKLHVPEKFEPTHPERGWIISPLGDNPWWTLLIAAIPALLCTILIFMDQQITAVIINRKEHKLKKGAGYHLDLLMVGVMLGVCSVMGLPWFVAATVLSISHVNSLKVESECSAPGEQPKFLGIREQRVTGLMIFILMGLSVFMTSVLKFIPMPVLYGVFLYMGVSSLKGIQLFDRIKLFGMPAKHQPDLIYLRYVPLWKVHIFTVIQLTCLVLLWVIKVSAAAVVFPMMVLALVFVRKLMDLCFTKRELSWLDDLMPESKKKKEDDKKKKEKEEAERMLQDDDDTVHLPFEGGSLLQIPVKALKYSVDPSIVNISDEMAKTAQWKALSMNTENAKVTRSNMSPDKPVSVKISFEDEPRKKYVDAETSL

SEQ ID NO: 15737 - protein, 593 aa, Homo sapiens
MTMFKEAVTFKDVAVVFTEEELGLLDVSQRKLYRDVMLENFRNLLSVGHQLSHRDTFHFQREEKFWIMETATQREGNSGGKIQTELESVPETGPHEEWSCQQIWEQTASELTRPQDSISSSQFSTQGDVPSQVDAGLSIIHIGETPSEHGKCKKFFSDVSILDLHQQLHSGKISHTCNEYRKRFCYSSALCLHQKVHMGEKRYKCDVCSKAFSQNSQLQTHQRIHTGEKPFKCEQCGKSFSRRSGMYVHCKLHTGEKPHICEECGKAFIHNSQLREHQRIHTGEKPFKCYICGKSFHSRSNLNRHSMVHMQEKSFRCDTCSNSFGQRSALNSHCMDHTKEKLYKCEECGRSFTCRQDLCKHQMDHTGDKPYNCNVCGKGFRWSSCLSRHQRVHNGETTFKCDGCGKRFYMNSQGHSHQRAYREEELYKCQKCGKGYISKFNLDLHQRVHTGERPYNCKECGKSFRWASGILRHKRLHTGEKPFKCEECGKRFTENSKLRFHQRIHTGEKPYKCEECGKGFRWASTHLTHQRLHSREKLFQCEDCGKSSEHSSCLQDQQSDHSGEKTSKCEDCGKRYERRLNLDMILSLFLNDI

SEQ ID NO: 15738 - protein, 393 aa, Homo sapiens
DQQDAAHNMGNHLPLLPAESEEEDEMEVEDQDSKEAKKPNIINFDTSLPTSHTYLGADMEEFHGRTLHDDDSCQVIPVLPQVMMILIPGQTLPLQLFHPQEVSMVRNLIQKDRTFAVLAYSNVQEREAQFGTTAEIYAYREEQDFGIEIVKVKAIGRQRFKVLELRTQSDGIQQAKVQILPECVLPSTMSAVQLESLNKCQIFPSKPVSREDQCSYKWWQKYQKRKFHCANLTSWPRWLYSLYDAETLMDRIKKQLREWDENLKDDSLPSNPIDFSYRVAACLPIDDVLRIQLLKIGSAIQRLRCELDIMNKCTSLCCKQCQETEITTKNEIFRYAWTVAQCKICASHIGWKFTATKKDMSPQKFWGLTRSALLPTIPDTEDEISPDKVILCL

SEQ ID NO: 15739 - protein, 249 aa, Homo sapiens
MIQHHIEACAQVPGMQEILLIGFYQPDEPLTQFLEAAQQEFNLPVRYLQEFAPLGTGGGLYHFRDQILAGSPEAFFVLNADVCSDFPLSAMLEAHRRQRHPFLLLGTTANRTQSLNYGCIVENPQTHEVLHYVEKPSTFISDIINCGIYLFSPEALKPLRDVFQRNQQDGQLEDSPGLWPGAGTIRLEQDVFSALAGQGQIYVHLTDGIWSQIKSAGSALYASRLYLSRYQDTHPERLAKHTPGGPWIR

SEQ ID NO: 15740 - protein, 515 aa, Homo sapiens
MEPNDSTSTAVEEPDSLEVLVKTLDSQTRTFIVGAQMNVKEFKEHIAASVSIPSEKQRLIYQGRVLQDDKKLQEYNVGGKVIHLVERAPPQTHLPSGASSGTGSASATHGGGSPPGTRGPGASVHDRNANSYVMVGTFNLPSDGSAVDVHINMEQAPIQSEPRVRLVMAQHMIRDIQTLLSRMECRGGPQPQHSQPPPQPPAVTPEPVALSSQTSEPVESEAPPREPMEAEEVEERAPAQNPELTPGPAPAGPTPAPETNAPNHPSPAEYVEVLQELQRLESRLQPFLQRYYEVLGAAATTDYNNNHEGREEDQRLINLVGESLRLLGNTFVALSDLRCNLACTPPRHLHVVRPMSHYTTPMVLQQAAIPIQINVGTTVTMTGNGTRPPPTPNAEAPPPGPGQASSVAPSSTNVESSAEGAPPPGPAPPPATSHPRVIRISHQSVEPVVMMHMNIQDSGTQPGGVPSAPTGPLGPPGHGQTLGSTLIQLPSLPPEFMHAVAHQITHQAMVAAVAS

SEQ ID NO: 15741 - protein, 643 aa, Homo sapiens
MASVALEDVAVNFTREEWALLGPCQKNLYKDVMQETIRNLDCVGMKWKDQNIEDQYRYPRKNLRCRMLERFVESKDGTQCGETSSQIQDSIVTKNTLPGVGPYESRMSGEVIMGHSSLNCYIRVGAGHKPYEYHECGEKPDTHKQRGKAFSYHNSLQTHERLHTGKKPYNCKECGKSFSSLGNLQRHMAVQRGDGPYKCKLCGKAFFWPSLLHMHERTHTGEKPYECKQCSKAFSFYSSYLRHERTHTGEKLYECKQCSKAFPDYSSCLRHERTHTGKKPYTCKQCGKAFSASTSLRRHETTHTDEKPYACQQCGKAFHHLGSFQRHMVMHTRDGPHKCKICGKGFDCPSSLKSHERTHTGEKLYECKQCGKALSHSSSFRRHMTMHTGDGPHKCKICGKAFVYPSVFQRHEKTHTAEKPYKCKQCGKAYRISSSLRRHETTHTGEKPYKCKCGKAFIDFYSFQNHKTTHAGEKPYECKECGKAFSCFQYLSQHRRTHTGEKPYECNTCKKAFSHFGNLKVHERIHSGEKPYECKECGKAFSWLTCFLRHERIHMREKPYECQQCGKAFTHSRFLQGHEKTHTGENPYECKECGKAFASLSSLHRHKKTHWKKTHTGENPYGCKECGKAFASLSSLHRHKKTH

SEQ ID NO: 15742 - protein, 5058 aa, Homo sapiens
MGHAGCQFKALLWKNWLCRLRNPVLFLAEFFWPCILFVILTVLRFQEPPRYRDICYLQPRDLPSCGVIPFVQSLLCNTGSRCRNFSYEGSMEHHFRLSRFQTAADPKKVNNLAFLKEIQDLAEEIHGMMDKAKNLKRLWVERSNTPDSSYGSSFFTMDLNKTEEVILKLESLHQQPHIWDFLLLLPRLHTSHDHVEDGMDVAVNLLQTILNSLISLEDLDWLPLNQTFSQVSELVLNVTISTLTFLQQHGVAVTEPVYHLSMQNIVWDPQKVQYDLKSQFGFDDLHTEQILNSSAELKEIPTDTSLEKMVCSVLSSTSEDEAEKWGHVGGCHPKWSEAKNYLVHAVSWLRVYQQVFVQWQQGSLLQKTLTGMGHSLEALRNQFEEESKPWKVVEALHTALLLLNDSLSADGPKDNHTFPKILQHLWKLQSLLQNLPQWPALKRFLQLDGALRNAIAQNLHFVQEVLICLETSANDFKWFELNQLKLEKDVFFWELKQMLAKNAVCPNGRFSEKEVFLPPGNSSIWGGLQGLLCYCNSSETSVLNKLLGSVEDADRILQEVITWHKNMSVLIPEEYLDWQELEMQLSEASLSCTRLFLLLGADPSPENDVFSSDCKHQLVSTVIFHTLEKTQFFLEQAYYWKAFKKFIRKTCEVAQYVNMQESFQNRLLAFPEESPCFEENMDWKMISDNYFQFLNNLLKSPTASISRALNFTKHLLMMEKKLHTLEDEQMNFLLSFVEFFEKLLLPNLFDSSIVPSFHSLPSLTEDILNISSLWTNHLKSLKRDPSATDAQKLLEFGNEVIWKMQTLGSHWIRKEPKNLLRFIELILFEINPKLLELWAYGISKGKRAKLENFFTLLNFSVPENEILSTSFNFSQLFHSDWPKSPAMNIDFVRLSEAIITSLHEFGFLEQEQISEALNTVYAIRNASDLFSALSEPQKQEVDKILTHIHLNVFQDKDSALLLQIYSSFYRYIYELLNIQSRGSSLTFLTQISKHILDIIKQFNFQNISKAFAFLFKTAEVLGGISNVSYCQQLLSIFNFLELQAQSFMSTEGQELEVIHTTLTGLKQLLIIDEDFRISLFQYMSQFFNSSVEDLLDNKCLISDNKHISSVNYSTSEESSFVFPLAQIFSNLSANVSVFNKFMSIHCTVSWLQMWTEIWETISQLFKFDMNVFTSLHHGFTQLLDELEDDVKVSKSCQGILPTHNVARLILNLFKNVTQANDFHNWEDFLDLRDFLVALGNALVSVKKLNLEQVEKSLFTMEAALHQLKTFPFNESTSREFLNSLLEVFIEFSSTSEYIVRNLDSINDFLSNNLTNYGEKFENIITELREAIVFLRNVSHDRDLFSCADIFQNVTECILEDGFLYVNTSQRMLRILDTLNSTFSSENTISSLKGCIVWLDVINHLYLLSNSSFSQGHLQNILGNFRDIENKMNSILKIVTWVLNIKKPLCSSNGSHINCVNIYLKDVTDFLNIVLTTVFEKEKKPKFEILLALLNDSTKQVRMSINNLTTDFDFASQSNWRYFTELILRPIEMSDEIPNQFQNIWLHLITLGKEFQKLVKGIYFNILENNSSSKTENLLNIFATSPKEKDVNSVGNSIYHLASYLAFSLSHDLQNSPKIIISPEIMKATGLGIQLIRDVFNSLMPVVHHTSPQNAGYMQALKKVTSVMRTLKKADIDLLVDQLEQVSVNLMDFFKNISSVGTGNLVVNLLVGLMEKFADSSHSWNVNHLLQLSRLFPKDVVDAVIDVYYVLPHAVRLLQGVPGKNITEGLKDVYSFTLLHGITISNITKEDFAIVIKILLDTIELVSDKPDIISEALACFPVVWCWNHTNSGFRQNSKIDPCNVHGLMSSSFYGKVASILDHFHLSPQGEDSPCSNESSRMEITRKVVCIIHELVDWNSILLELSEVFHVNISLVKTVQKFWHKILPFVPPSINQTRDSISELCPSGSIKQVALQIIEKLKNVNFTKVTSGENILDKLSSLNKILNINEDTETSVQNIISSNLERTVQLISEDWSLEKSTHNLLSLFMMLQNANVTGSSLEALSSFIEKSETPYNFEELWPKFQQIMKDLTQDFRIRHLLSEMNKGIKSINSMALQKITLQFAHFLEILDSPSLKTLEIIEDFLLVTKNWLQEYANEDYSRMIETLFIPVTNESSTEDIALLAKAIATFWGSLKNISRAGNFDVAFLTHLLNQEQLTNFSVVQLLFENILINLINNLAGNSQEAAWNLNDTDLQIMNFINLILNHMQSETSRKTVLSLRSIVDFTEQFLKTFFSLFLKEDSENKISLLLKYFHKDVIAEMSFVPKDKILEILKLDQFLTLMIQDRLMNIFSSLKETIYHLMKSSFILDNGEFYFDTHQGLKFMQDLFNALLRETSMKNKTENNIDFFTVVSQLFFHVNKSEDLFKLNQDLGSALHLVRECSTEMARLLDTILHSPNKDFYALYPTLQEVILANLTDLLFFINNSFPLRNRATLEITKRLVGAISRASEESHVLKPLLEMSGTLVMLLNDSADLRDLATSMDSIVKLLKLVKKVSGKMSTVFKTHFISNTKDSVKFFDTLYSIMQQSVQNLVKEIATLKKIDHFTFEKINDLLVPFLDLAFEMIGVEPYISSNSDIFSMSPSILSYMNQSKDFSDILEEIAEFLTSVKMNLEDMRSLAVAFNNETQTFSMDSVNLREEILGCLVPINNITNQMDFLYPNPISTHSGPQDIKWEIIHEVIPFLDKILSQNSTEIGSFLKMVICLTLEALWKNLKKDNWNVSNVLMTFTQHPNNLLKTIETVLEASSGIKSDYEGDLNKSLYFDTPLSQNITHHQLEKAIHNVLSRIALWRKGLLFNNSEWITSTRTLFQPLFEIFIKATTGKNVTSEKEERTKKEMIDFPYSFKPFFCLEKYLGGLFVLTKYWQQIPLTDQSVVEICEVFQQTVKPSEAMEMLQKVKMMVVRVLTIVAENPSWTKDILCATLSCKQNGIRHLILSAIQGVTLAQDHFQEIEKIWSSPNQLNCESLSKNLSSTLESFKSSLENATGQDCTSQPRLETVQQHLYMLAKSLEETWSSGNPIMTFLSNFTVTEDVKIKDLMKNITKLTEELRSSIQISNETIHSILEANISHSKVLFSALTVALSGKCDQEILHLLLTFPKGEKSWIAAEELCSLPGSKVYSLIVLLSRNLDVRAFIYKTLMPSEANGLLNSLLDIVSSLSALLAKAQHVFEYLPEFLHTFKITALLETLDFQQVSQNVQARSSAFGSFQFVMKMVCKDQASFLSDSNMFINLPRVKELLEDDKEKFNIPEDSTPFCLKLYQEILQLPNGALVWTFLKPILHGKILYTPNTPEINKVIQKANYTFYIVDKLKTLSETLLEMSSLFQRSGSGQMFNQLQEALRNKFVRNFVENQLHIDVDKLTEKLQTYGGLLDEMFNHAGAGRFRFLGSILVNLSSCVALNRFQALQSVDILETKAHELLQQNSFLASIIFSNSLFDKNFRSESVKLPPHVSYTIRTNVLYSVRTDVVKNPSWKFHPQNLPADGFKYNYVFAPLQDMIERAIILVQTGQEALEPAAQTQAAPYPCHTSDLFLNNVGFFFPLIMMLTWMVSVASMVRKLVYEQEIQIEEYMRMMGVHPVIHFLAWFLENMAVLTISSATLAIVLKTSGIFAHSNTFIVFLFLLDFGMSVVMLSYLLSAFFSQANTAALCTSLVYMISFLPYIVLLVLHNQLSFVNQTFLCLLSTTAFGQGVFFITFLEGQETGIQWNNMYQALEQGGMTFGWVCWMILFDSSLYFLCGWYLSNLIPGTFGLRKPWYFPFTASYWKSVGFLVEKRQYFLSSSLFFFNENFDNKGSSLQNREGELEGSAPGVTLVSVTKEYEGHKAVVQDLSLTFYRDQITALLGTNGAGKTTIISMLTGLHPPTSGTIIINGKNLQTDLSRVRMELGVCPQQDILLDNLTVREHLLLFASIKAPQWTKKELHQQVNQTLQDVDLTQHQHKQTRALSGGLKRKLSLGIAFMGMSRTVVLDEPTSGVDPCSRHSLWDILLKYREGRTIIFTTHHLDEAEALSDRVAVLQHGRLRCCGPPFCLKEAYGQGLRLTLTRQPSVLEAHDLKDMACVTSLIKIYIPQAFLKDSSGSELTYTIPKDTDKACLKGLFQALDENLHQLHLTGYGISDTTLEEVFLMLLQDSNKKSHIALGTESELQNHRPTGHLSGYCGSLARPATVQGVQLLRAQVAAILARRLRRTLRAGKSTLADLLLPVLFVALAMGLFMVRPLATEYPPLRLTPGHYQRAETYFFSSGGDNLDLTRVLLRKFRDQDLPCADLNPRQKNSSCWRTDPFSHPEFQDSCGCLKCPNRSASAPYLTNHLGHTLLNLSGFNMEEYLLAPSEKPRLGGWSFGLKIPSEAGGANGNISKPPTLAKVWYNQKGFHSLPSYLNHLNNLILWQHLPPTVDWRQYGITLYSHPYGGALLNEDKILESIRQCGVALCIVLGFSILSASIGSSVVRDRVIGAKRLQHISGLGYRMYWFTNFLYDMLFYLVSVCLCVAVIVAFQLTAFTFRKNLAATALLLSLFGYATLPWMYLMSRIFSSSDVAFISYVSLNFIFGLCTMLITIMPRLLAIISKAKNLQNIYDVLKWVFTIFPQFCLGQGLVELCYNQIKYDLTHNFGIDSYVSPFEMNFLGWIFVQLASQGTVLLLLRVLLHWDLLRWPRGHSTLQGTVKSSKDTDVEKEEKRVFEGRTNGDILVLYNLSKHYRRFFQNIIAVQDISLGIPKGECFGLLGVNGAGKSTTFKMLNGEVSLTSGHAIIRTPMGDAVDLSSAGTAGVLIGYCPQQDALDELLTGWEHLYYYCSLRGIPRQCIPEVAGDLIRRLHLEAHADKPVATYSGGTKRKLSTALALVGKPDILLLDEPSSGMDPCSKRYLWQTIMKEVREGCAAVLTSHSMEECEALCTRLAIMVNGSFKCLGSPQHIKNRFGDGYTVKVWLCKEANQHCTVSDHLKLYFPGIQFKGQHLNLLEYHVPKRWGCLADLFKVIENNKTFLNIKHYSINQTTLEQVFINFASEQQQTLQSTLDPSTDSHHTHHLPI

SEQ ID NO: 15743 - protein, 766 aa, Homo sapiens
MSVQSSSGSLEGPPSWSQLSTSPTPGSAAAARSLLNHTPPSGRPREGAMDELHSLDPRRQELLEARFTGVASGSTGSTGSCSVGAKASTNNESSNHSFGSLGSLSDKESETPEKKQSESSRGRKRKAENQNESSQGKSIGGRGHKISDYFEYQGGNGSSPVRGIPPAIRSPQNSHSHSTPSSSVRPNSPSPTALAFGDHPIVQPKQLSFKIIQTDLTMLKLAALESNKIQDLEKKEGRIDDLLRANCDLRRQIDEQQKLLEKYKERLNKCISMSKKLLIEKSTQEKLSSREKSMQDRLRLGHFTTVRHGASFTEQWTDGFAFQNLVKQQEWVNQQREDIERQRKLLAKRKPPTANNSQAPSTNSEPKQRKNKAVNGAENDPFVRPNLPQLLTLAEYHEQEEIFKLRLGHLKKEEAEIQAELERLERVRNLHIRELKRINNEDNSQFKDHPTLNERYLLLHLLGRGGFSEVYKAFDLYEQRYAAVKIHQLNKSWRDEKKENYHKHACREYRIHKELDHPRIVKLYDYFSLDTDTFCTVLEYCEGNDLDFYLKQHKLMSEKEARSIVMQIVNALRYLNEIKPPIIHYDLKPGNILLVDGTACGEIKITDFGLSKIMDDDSYGVDGMDLTSQGAGTYWYLPPECFVVGKEPPKISNKVDVWSVGVIFFQCLYGRKPFGHNQSQQDILQENTILKATEVQFPVKPVVSSEAKAFIRRCLAYRKEDRFDVHQLANDPYLLPHMRRSNSSGNLHMAGLTASPTPPSSSIITY

SEQ ID NO: 15744 - protein, 529 aa, Homo sapiens
MLRPRFLPPDDRTVREGERKAAKLHFSQLGNSENFLLEVEKSSREKTMKNCVTGESSASKVSANVDSRIEMDSNKGLFIPFPNREIKDSLSTSATQGNGTRDQKLDTFPLGTQTQEVARREMPSDNHQEDEFRHYSPRQSTVRSPEKMTREGYQVSFLDNKSSGSSPEKELIPKPDTFHLTHDASLSKCLDVGDSSQIHPYQLPSDVGLENYDSCYSQTLSLHGSLGKRPQRSKNYQEYSIKPSNDIKTTASHSCGDLLTSLSNPDSSTGRLLKLSSDLYATTHFNSDPAVLVNVEQQLSTSLDDLTPAHGSVPNNAVLGNRTTPLRTLLLSPGTSEHRKIFTKRSLSPSKRGFKWKDNILANLNLKHGFQDATGSEESLKQKLVRVLEENLILSEKIQQLEEGAAISIVSGQQSHTYDDLLHKNQQLTMQVACLNQELAQLKKLEKTVAILHESQRSLVVTNEYLLQQLNKEPKGYSGKALLPPEKGHHLGRSSPFGKSTLSSSSPVAHETGQYLIQSVLDAAPEPGL

SEQ ID NO: 15745 - protein, 616 aa, Homo sapiens
MLQTVWFQGLGRNLLFQEPVTFEDVAVYFTQNEWASLHPTQRALYREVMLENYANVTSLYPTAGGFPLDTERTEKVPGALSSFLPSSSSLELILALLPMSAFPFPKPDLIFQLEQGEAAWGPDPWTLAGGEALRGMCTGGKTKTENEEKTAQLNISKESESHRLIVEGLLMDVPQHPDFKDRLEKSQLHDTGNKTKIGDCTDLTVQDHESSTTEREEIARKLEESSVSTHLITKQGFAKEQVFYKCGECGSYYNPHSDFHLHQRVHTNEKPYTCKECGKTFRYNSKLSRHQKIHTGEKPYSCEECGQAFSQNSHLLQHQKLHGGQRPYECTDCGKTFSYNSKLIRHQRIHTGEKPFKCKECGKAFSCSYDCIIHERIHNGEKPYECKECGKSLSSNSVLIQHQRIHTGEKPYECKECGKAFHRSSVFLQHQRFHTGEQLYKCNECWKTFSCSSRFIVHQRIHNGEKPYECQECGKTFSQKITLVQHQRVHTGEKPYECKECGKAFRWNASFIQHQKWHTRKKLINGTGLSAVKPYCPCAILSPLPPQHTCSALAPPGPPLSSSHAVVLPPSVPFFLLLPSSEKANPSPVQIAHFFQDLAFPGKSSLQSPNPLSHSL

SEQ ID NO: 15746 - protein, 617 aa, Homo sapiens
MEQLSDEEIDHGAEEDSDKEDQDLDKMFGAWLGELDKLTQSLDSDKPMEPVKRSPLRQETNMANFSYRFSIYNLNEALNQGETVDLDALMADLCSIEQELSSIGSGNSKRQITETKATQKLPVSRHTLKHGTLKGLSSSSNRIAKPSHASYSLDDVTAQLEQASLSMDEAAQQSVLEDTKPLVTNQHRRTASAGTVSDAEVHSISNSSHSSITSAASSMDSLDIDKVTRPQELDLTHQGQPITEHSYLDRETSLLLRNIAGKPSHLLTKEEQAAKLKAEKIRVALEKIKEAQVKKLVIRVHMSDDSSKTMMVDERQTVRQVLDNLMDKSHCGYSLDWSLVETVSELQMERIFEDHENLVENLLNWTRDSQNKLIFMERIEKYALFKNPQNYLLGKKETAEMADRNKEVLLEECFCGSSVTVPEIEGVLWLKDDGKKSWKKRYFLLRASGIYYVPKGKAKVSRDLVCFLQLDHVNVYYGQDYRNKYKAPTDYCLVLKHPQIQKKSQYIKYLCCDDVRTLHQWVNGIRIAKYGKQLYMNYQEALKRTESAYDWTSLSSSSIKSGSSSSSIPESQSNHSNQSDSGVSDTQPAGHVRSQSIVSSVFSEAWKRGTQLEESSK

SEQ ID NO: 15747 - protein, 496 aa, Homo sapiens
MELPSPESEEVHEPRLGELLGNPEGQSLGSSPSQDRGCKQVTVTHWKIQTGETAQVCTKSGRNHILNSDLLLLQRELIEGEANPCDICGKTFTFNSDLVRHRISHAGEKPYTCDQCGKGFGQSSHLMEHQRIHTGERLYVCNVCGKDFIHYSGLIEHQRVHSGEKPFKCAQCGKAFCHSSDLIRHQRVHTRERPFECKECGKGFSQSSLLIRHQRIHTGERPYECNECGKSFIRSSSLIRHYQIHTEVKQYECKECGKAFRHRSDLIEHQRIHTGERPFECNECGKAFIRSSKLIQHQRIHTGERPYVCNECGKRFSQTSNFTQHQRIHTGEKLYECNECGKAFFLSSYLIRHQKIHTGERVYECKECGKAFLQKAHLTEHQKIHSGDRPFECKDCGKAFIQSSKLLLHQIIHTGEKPYVCSYCGKGFIQRSNFLQHQKIHTEEKLYECSQYGRDFNSTTNVKNNQRVHQEGLSLSKAPIHLGERSVDKGEHTGNL

SEQ ID NO: 15748 - protein, 443 aa, Homo sapiens
MRLRFWLLIWLLLGFISHQPTPVINSLAVYRHRETDFGVGVRDHPGQHGKTPSPQKLDNLIIIIIGFLRRDTFTILFCTSYLCVSFLKTIFWSRNGHDGSTDVQQRAWRSNRSRQKGLRSICMHTKKRVSSFRGNKIGLKDVITLRRHVETKVRAKIRKRKVTTKINRHDKINGKRKTARKQKMFQRAQELRRRAEDYHKCKIPPSARKPLCNWVRMAAAEHRHSSGLPCWPYLTAEALKNRMGRQPPPPTQQHSITDNSLSLKTPPECLLHPLPPSVDDNIKECPLAPLPPSVDDNLKEYLLVPLPPSPLPPSVDDNLKDCLFVPLPPSPLPPSVDDNLKTPPLATQEAEAEKPPKPKRWRVDEVEQSPKPKRRRADEVEQSPKPKRQREAEAQQLPKPKRRRLSKLRTRHCTQAWAIRINPWVEKKKKIKKQNKTHAPKTN

SEQ ID NO: 15749 - protein, 468 aa, Homo sapiens
MTVLEITLAVILTLLGLAILAILLTRWARCKQSEMYISRYSSEQSARLLDYEDGRGSRHAYSTQSERSKRDYTPSTNSLALSRSSIALPQGSMSSIKCLQTTEEPPSRTAGAMMQFTAPIPGATGPIKLSQKTIVQTPGPIVQYPGSNAGPPSAPRGPPMAPIIISQRTASQLAAPIIISQRTARIPQVHTMDSSGKITLTPVVILTGYMDEELAKKSCSKIQILKCGGTARSQNSREENKEALKNDIIFTNSVESLKSAHIKEPEREGKGTDLEKDKIGMEVKVDSDAGIPKRQETQLKISEMSIPQGQGAQIKKSVSDVPRGQESQVKKSESGVPKGQEAQVTKSGLVVLKGQEAQVEKSEMGVPRRQESQVKKSQSGVSKGQEAQVKKRESVVLKGQEAQVEKSELKVPKGQEGQVEKTEADVPKEQEVQEKKSEAGVLKGPESQVKNTECFRNKDTLIYHHPEA

SEQ ID NO: 15750 - protein, 405 aa, Homo sapiens
MGSPAHRPALLLLLPPLLLLLLLRVPPSRSFPGSGDSPLEDDEVGYSHPRYKDTPWCSPIKVKYGDVYCRAPQGGYYKTALGTRCDIRCQKGYELHGSSLLICQSNKRWSDKVICKHMEPPRIKCPSVKERIAEPNKLTVRVSWETPEGRDTADGILTDVILKGLPPGSNFPEGDHKIQYTVYDRAENKGTCKFRVKVRVKRCGKLNAPENGYMKCSSDGDNYGATCEFSCIGGYELQGSPARVCQSNLAWSGTEPTCAAMNVNVGVRTAAALLDQFYEKRRLLIVSTPTARNLLYRLQLGMLQQAQCGLDLRHITVVELVGVFPTLIGRIGAKIMPPALALQLRLLLRIPLYSFSMVLVDKHGMDKERYVSLVMPVALFNLIDTFPLRKEEMVLQAEMSQTCNT

SEQ ID NO: 15751 - protein, 423 aa, Homo sapiens
MEKSGPSSTISEQQLQRQEGWINTKTDLAEQSLISSEKWLQLHGLKSNKLTLKQILSQIGFPHCEDYVASLGRPVASRYADGLFPQLYRAEDGRVYNLTAKSELIYQFVEHLTQAVESYKQRMDWLTSKSRQIFGVILEQCVTIVLDFGGILEGELDLCREALTMVLQEQVAHITEFNIIRVSQEPVKWQENATPVTEQSIATAISWVEKLTVELTVSEAGRLDALLEAGRDKTIESIYYFVVGDVPEESKELLLQRALEIPCPVYTVSFNARGEGTIAFLKDLSAKTHSRFHAFAERTECVEFPAFSTKDGDNVMTWNSRKLKGKLPPGAGVREDVFLVWQEMEEACSTLAQIQRLVAEPPKPDVATVDCGAVPSFESSGKIVFCLCDMLACPAQSQKQPLLRLHRIQKTPGTLRHGCRNMA

SEQ ID NO: 15752 - protein, 191 aa, Homo sapiens
MASGCKIGPSILNSDLANLGAECLRMLDSGADYLHLDVMDGHFVPNITFGHPVVESLRKQLGQDPFFDMHMMVSKPEQWVKPMAVAGANQYTFHLEATENPGALIKDIRENGMKVGLAIKPGTSVEYLAPWANQIDMALVMTVEPGFGGQKFMEDMMPKVHWLRTQFPSLDIEVDGGVGPDTVHKCAEELT

SEQ ID NO: 15753 - protein, 1266 aa, Homo sapiens
MWVNPEEVLLANALWITERANPYFILQRRKGHAGDGGGGGGLAGLLVGTLDVVLDSSARVAPYRILYQTPDSLVYWTIACGGSRKEITEHWEWLEQNLLQTLSIFENENDITTFVRGKIQGIIAEYNKINDVKEDDDTEKFKEAIVKFHRLFGMPEEEKLVNYYSCSYWKGKVPRQGWMYLSINHLCFYSFLMGREAKLVIRWVDITQLEKNATLLLPDVIKVSTRSSEHFFSVFLNINETFKLMEQLANIAMRQLLDNEGFEQDRSLPKLKRKSPKKVSALKRDLDARAKSERYRALFRLPKDEKLDGHTDCTLWTPFNKMHILGQMFVSTNYICFTSKEENLCSLIIPLREVTIVEKADSSSVLPSPLSISTRNRMTFLFANLKDRDFLVQRISDFLQQTTSKIYSDKEFAGSYNSSDDEVYSRPSSLVSSSPQRSTSSDADGERQFNLNGNSVPTATQTLMTMYRRRSPEEFNPKLAKEFLKEQAWKIHFAEYGQGICMYRTEKTRELVLKGIPESMRGELWLLLSGAINEKATHPGYYEDLVEKSMGKYNLATEEIERDLHRSLPEHPAFQNEMGIAALRRVLTAYAFRNPNIGYCQAMNIVTSVLLLYAKEEEAFWLLVALCERMLPDYYNTRVVGALVDQGVFEELARDYVPQLYDCMQDLGVISTISLSWFLTLFLSVMPFESAVVVVDCFFYEGIKVIFQLALAVLDANVDKLLNCKDDGEAMTVLGRYLDSVTNKDSTLPPIPHLHSLLSDDVEPYPEVDIFRLIRTSYEKFGTIRADLIEQMRFKQRLKVIQTLEDTTKRNVVRTIVTETSFTIDELEELYALFKAEHLTSCYWGGSSNALDRHDPSLPYLEQYRIDFEQFKGMFALLFPWACGTHSDVLASRLFQLLDENGDSLINFREFVSGLSAACHGDLTEKLKLLYKMHVLPEPSSDQDEPDSAFEATQYFFEDITPECTHVVGLDSRSKQGADDGFVTVSLKPDKGKRANSQENRNYLRLWTPENKSKSKNAKDLPKLNQGQFIELCKTMYNMFSEDPNEQELYHATAAVTSLLLEIGEVGKLFVAQPAKEGGSGGSGPSCHQGIPGVLFPKKGPGQPYVVESVEPLPASLAPDSEEHSLGGQMEDIKLEDSSPRDNGACSSMLISDDDTKDDSSMSSYSVLSAGSHEEDKLHCEDIGEDTVLVRSGQGTAALPRSTSLDRDWAITFEQFLASLLTEPALVKYFDKPVCMMARITSAKNIRMMGKPLTSASDYEISAMSG

SEQ ID NO: 15754 - protein, 870 aa, Homo sapiens
MKGWYHGKLDRTIAEERLRQAGKSGSYLIRESDRRPGSFVLSFLSQMNVVNHFRIIAMCGDYYIGGRRFSSLSDLIGYYSHVSCLLKGEKLLYPVAPPEPVEDRRRVRAILPYTKVPDTDEISFLKGDMFIVHNELEDGWMWVTNLRTDEQGLIVEDLVEEVGREEDPHEGKIWFHGKISKQEAYNLLMTVGQVCSFLVRPSDNTPGDYSLYFRTNENIQRFKICPTPNNQFMMGGRYYNSIGDIIDHYRKEQIVEGYYLKEPVPMQDQEQVLNDTVDGKEIYNTIRRKTKDAFYKNIVKKGYLLKKGKGKRWKNLYFILEGSDAQLIYFESEKRATKPKGLIDLSVCSVYVVHDSLFGRPNCFQIVVQHFSEEHYIFYFAGETPEQAEDWMKGLQAFCNLRKSSPGTSNKRLRQVSSLVLHIEEAHKLPVKHFTNPYCNIYLNSVQVAKTHAREGQNPVWSEEFVFDDLPPDINRFEITLSNKTKKSKDPDILFMRCQLSRLQKGHATDEWFLLSSHIPLKGIEPGSLRVRARYSMEKIMPEEEYSEFKELILQKELHVVYALSHVCGQDRTLLASILLRIFLHEKLESLLLCTLNDREISMEDEATTLFRATTLASTLMEQYMKATATQFVHHALKDSILKIMESKQSCELSPSKLEKNEDVNTNLTHLLNILSELVEKIFMASEILPPTLRYIYGCLQKSVQHKWPTNTTMRTRVVSGFVFLRLICPAILNPRMFNIISDSPSPIAARTLILVAKSVQNLANLVEFGAKEPYMEGVNPFIKSNKHRMIMFLDELGNVPELPDTTEHSRTDLSRDLAALHEICVAHSDELRTLSNERGAQQHVLKKLLAITELLQQKQNQYTKTNDVR

SEQ ID NO: 15755 - protein, 247 aa, Homo sapiens
MAKVAKDLNPGVKKMSLGQLQSARGVACLGCKGTCSGFEPHSWRKICKSCKCSQEDHCLTSDLEDDRKIGRLLMDSKYSTLTARVKGGDGIRIYKRNRMIMTNPIATGKDPTFDTITYEWAPPGVTQKLGLQYMELIPKEKQPVTGTEGAFYRRRQLMHQLPIYDQDPSRCRGLLENELKLMEEFVKQYKSEALGVGEVALPGQGGLPKEEGKQQEKPEGAETTAATTNGSLSDPSKEVEYKPVPLV

SEQ ID NO: 15756 - protein, 774 aa, Homo sapiens
MELDMAMEPDRKAAVSHWQQQSYLDSGIHSGATTTAPSLSGKGNPEEEDVDTSQVLYEWEQGFSQSFTQEQVADIDGQYAMTRAQRVRAAMFPETLDEGMQIPSTQFDAAHPTNVQRLAEPSQMLKHAVVNLINYQDDAELATRAIPELTKLLNDEDQVVVNKAAVMVHQLSKKEASRHAIMRSPQMVSAIVRTMQNTNDVETARCTAGTLHNLSHHREGLLAIFKSGGIPALVKMLGSPVDSVLFYAITTLHNLLLHQEGAKMAVRLAGGLQKMVALLNKTNVKFLAITTDCLQILAYGNQESKLIILASGGPQALVNIMRTYTYEKLLWTTSRVLKVLSVCSSNKPAIVEAGGMQALGLHLTDPSQRLVQNCLWTLRNLSDAATKQEGMEGLLGTLVQLLGSDDINVVTCAAGILSNLTCNNYKNKMMVCQVGGIEALVRTVLRAGDREDITEPAICALRHLTSRHQEAEMAQNAVRLHYGLPVVVKLLHPPSHWPLIKATVGLIRNLALCPANHAPLREQGAIPRLVQLLVRAHQDTQRRTSMGGTQQQFVEGVRMEEIVEGCTGALHILARDVHNRIVIRGLNTIPLFVQLLYSPIENIQRVAAGVLCELAQDKEAAEAIEAEGATAPLTELLHSRNEGVATYAAAVLFRMSEDKPQDYKKRLSVELTSSLFRTEPMAWNETADLGLDIGAQGEPLGYRQDDPSYRSFHSGGYGQDALGMDPMMEHEMGGHHPGADYPVDGLPDLGHAQDLMDGLPPGDSNQLAWFDTDL

SEQ ID NO: 15757 - protein, 175 aa, Homo sapiens
SSTKPAAGGTAPLPPWKSPSSSQPLPQVPAPAQSQTQFHVQPQPQPKPQVQLHVQSQTQPVSLANTQPRGPPASSPAPAPKFSPVTPKFTPVASKFSPGAPGGSGSQPNQKLGHPEALSAGTGSPQPPSFTYAQQREKPRVQEKQHPVPPPAQNQNQGLLSSRQAGCAPLGPQGP

SEQ ID NO: 15758 - protein, 760 aa, Homo sapiens
MPKDSGALLGLKVVGGKMTDLGRLGAFITKVKKGSLADVVGHLRAGDEVLEWNGKPLPGATNEEVYNIILESKSEPQVEIIVSRPIGDIPRIPESSHPPLESSSSSFESQKMERPSISVISPTSPGALKDAPQVLPGQLSVKLWYDKVGHQLIVNVLQATDLPARVDGRPRNPYVKMYFLPDRSDKSKRRTKTVKKILEPKWNQTFVYSHVHRRDFRERMLEITVWDQPRVQEEESEFLGEILIELETALLDDEPHWYKLQTHDESSLPLPQPSPFMPRRHIHGESSSKKLQRSQRISDSDISDYEVDDGIGVVPPVGYRSSARESKSTTLTVPEQQRTTHHRSRSVSPHRGNDQGKPRSRLPNVPLQRSLDEIHPTRRSRSPTRHHDASRSPVDHRTRDVDSQYLSEQDSELLMLPRAKRGRSAECLHTTSELQPFLDRARSASTNCLRPDTSLHSPERERHSRKSERSSIQKQTRKGTASDAERMHRQRSPTQSPPADTSFSSRRGRQLPQVPVRSGSIEQESGHKKLKSTIQRSTETGMAAEMRKMVRQPSRESTDGSINSYSSEGNLIFPGVRLGADSQFSDFLDGLGPAQLVGRQTLATPAMGDIQIGMEDKKGQLEVEVIRARSLTQKPGSKSTPAPYVKVYLLENGACIAKKKTRIARKTLDPLYQQSLVFDESPQGKVLQVIVWGDYGRMDHKCFMGVAQILLEELDLSSMVIGWYKLFPPSSLVDPTLTPLTRRASQSSLESSTGPPCIRS

SEQ ID NO: 15759 - protein, 403 aa, Homo sapiens
MPSAEAKLKKNRCANCFDCPGCMHTLSTRATSISTQLPDDPAKTTMKKAYYLACGFCRWTSRDVGMADKSVASGGWQEPENPHTQRMNKLIEYYQQLAQKEKVERDRKKLARRRNYMPLAFSDKYGLGTRLQRPRAGASISTLAGLSLKEGEDQKEIKIEPAQAVDEVEPLPEDYYTRPVNLTEVTTLQQRLLQPDFQPVCASQLYPRHKHLLIKRSLRCRKCEHNLSKPEFNPTSIKFKIQLVAVNYIPEVRIMSIPNLRYMKESQVLLTLTNPVENLTHVTLFECEEGDPDDINSTAKVVVPPKELVLAGKDAAAEYDELAEPQDFQDDPDIIAFRKANKVGIFIKVTPQREEGEVTVCFKMKHDFKNLAAPIRPIEESDQGTEVIWLTQHVELSLGPLLP

SEQ ID NO: 15760 - protein, 579 aa, Homo sapiens
MEALGFLKLEVNGPMVTVALSVALLALLKWYSTSAFSRLEKLGLRHPKPSPFIGNLTFFRQGFWESQMELRKLYGPLCGYYLGRRMFIVISEPDMIKQVLVENFSNFTNRMASGLEFKSVADSVLFLRDKRWEEVRGALMSAFSPEKLNELGLLIMQERIKGHMGGQQAPQRIPPTRLSKPSGIYVNLHYATLPFCMVPLISQACDLLLAHLKRYAESGDAFDIQRCYCNYTTDVVASVAFGTPVDSWQAPEDPFVKHCKRFFEFCIPRPILVLLLSFPSIMVPLARILPNKNRDELNGFFNKLIRNVIALRDQQAAEERRRDFLQMVLDARHSASPMGVQDFDIVRDVFSSTGCKPNPSRQHQPSPMARPLTVDEIVGQAFIFLIAGYEIITNTLSFATYLLATNPDCQEKLLREVDVFKEKHMAPEFCSLEEGLPYLDMVIAETLRMYPPAFRFTREAAQDCEVLGQRIPAGAVLEMAVGALHHDPEHWPSPETFNPERFTAEARQQHRPFTYLPFGAGPRSCLGVRLGLLEVKLTLLHVLHKFRFQACPETQVPLQLESKSALGPKNGVYIKIVSR

SEQ ID NO: 15761 - protein, 689 aa, Homo sapiens
MIDSVKLRRDSAADFFSHYEYLCALQNSVPLPAVRACLREGVLDFNADRLRGVDWAPLLSTLKINKDLPLVSIKSFFQPWLGDTGSDMNKFCRSRVPAIRYKDVTFQLCKALKGCLSISSVLKNLELNGLILRERDLTILAKGLNKSASLVHLSLANCPIGDGGLEIICQGIKSSITLKTVNFTGCNLTWQGADHMAKILKYQTMRRHEETWAESLRYRRPDLDCMAGLRRITLNCNTLIGDLGACAFADSLSEDLWLRALDLQQCGLTNEGAKALLEALETNTTLVVLDIRKNPLIDHSMMKAVIKKVLQNGRSAKSEYQWITSPSVKEPSKTAKQKRRTIILGSGHKGKATIRIGLATKKPVSSGRKHSLGKEYYAPAPLPPGVSGFLPWRTAERAKRHRGFPLIKTRDICNQLQQPGFPVTVTVESPSSSEVEEVDDSSESVHEVPEKTSIEQEALQEKLEECLKQLKEERVIRLKVDKRVSELEHENAQLRNINFSLSEALHAQSLTNMILDDEGVLGSIENSFQKFHAFLDLLKDAGLGQLATMAGIDQSDFQLLGHPQMTSTVSNPPKEEKKALEDEKPEPKQNALGQMQNIQFQKITGDARIPLPLDSFPVPVSTPEGLGTSSNNLGVPATEQRQESFEGFIARMCSPSPDATSGTGSQRKEEELSRNSRSSSEKKTKTESH

SEQ ID NO: 15762 - protein, 216 aa, Homo sapiens
MLPQIPFLLLVSLNLVHGVFYAERYQMPTGIKGPLPNTKTQFFIPYTIKSKGIAVRGEQGTPGPPGPAGPRGHPGPSGPPGKPGYGSPGLQGEPGLPGPPGPSAVGKPGVPGLPGKPGERGPYGPKGDVGPAGLPGPRGPPGPPGIPGPAGISVPGKPGQQGPTGAPGPRGFPGEKGAPGVPGMNGQKGEMGYGAPGRPGERGLPGPQGPTGPSGP

SEQ ID NO: 15763 - protein, 327 aa, Homo sapiens
MRLLERMRKDWFMVGIVLAIAGAKLEPSIGVNGGPLKPEITVSYIAVATIFFNSGLSLKTEELTSALVHLKLHLFIQIFTLAFFPATIWLFLQLLSITPINEWLLKGLQTVGCMPPPVSSAVILTKAVGGNEGIVITPLLLLLFLGSSSSVPFTSIFSQLFMTVVVPLIIGQIVRRYIKDWLERKKPPFGAISSSVLLMIIYTTFCDTFSNPNIDLDKFSLVLILFIIFSIQLSFMLLTFIFSTRNNSGFTPADTVAIIFCSTHKSLTLGIPMLKIVFAGHEHLSLISVPLLIYHPAQILLGSVLVPTIKSWMVSRQKGVKLTRPTV

SEQ ID NO: 15764 - protein, 269 aa, Homo sapiens
ADSMLLALQLSMAENNKQHSGEFTVSLSDVLLTWKYLLHEKLNLPVENMDVTDHYEDVRKIYDDFLKNSNMLDLIDVYQKCRALTSNCENYNTVSPSQLLDFLSGKQYAVGDETDLSIPTSPTSKYNRDNEKVQLLARKIIFSYLNLLVNSKNDLAVAYILNIPDRGLGREAFTDLKHAAREKQMSIFLVATSFIRTIELGGKGYAPPPSDPLRTHVKGLSNFINFIDKLDEILGEIPNPRSPTQVNNSIKPLRERICVSMQEKKIKRV

SEQ ID NO: 15765 - protein, 262 aa, Homo sapiens
MAVFVVLLALVAGVLGNEFSILKSPGSVVFRNGNWPIPGERIPDVAALSMGFSVKEDLSWPGLAVGNLFHRPRATVMVMVKGVNKLALPPGSVISYPLENAVPFSLDSVANSIHSLFSEETPVVLQLAPSEERVYMVGKANSVFEDLSVTLRQLRNRLFQENSVLSSLPLNSLSRNNEVDLLFLSELQVLHDISSLLSRHKHLAKDHSPDLYSLELAGLDEIGKRYGEDSEQFRDASKILVDALQKSLWWECSGRVSHCQVI

SEQ ID NO: 15766 - protein, 459 aa, Homo sapiens
MEALGFLKLEVNGPMVTVALSVALLALLKWYSTSAFSRLEKLGLRHPKPSPFIGNLTFFRQGFWESQMELRKLYGPLCGYYLGRRMFIVISEPDMIKQVLVENFSNFTNRMASGLEFKSVADSVLFLRDKRWEEVRGALMSAFSPEKLNEMVPLISQACDLLLAHLKRYAESGDAFDIQRCYCNYTTDVVASVAFGTPVDSWQAPEDPFVKHCKRFFEFCIPRPILVLLLSFPSIMVPLARILPNKNRDELNGFFNKLIRNVIALRDQQAAEERRRDFLQMVLDARHSASPMGVQDFDIVRDVFSSTGCKPNPSRQHQPSPMARPLTVDEIVGQAFIFLIAGYEIITNTLSFATYLLATNPDCQEKLLREVDVFKEKHMAPEFCSLEEGLPYLDMVIAETLRMYPPAFRFTREAAQDCEVLGQRIPAGAVLEMAVGALHHDPEHWPSPETFNPERYRCS

SEQ ID NO: 15767 - protein, 110 aa, Homo sapiens
MDSHSGEPALLPCGTCDMVFRSSALLATHTQRFCIGHPTQEMTFGAQASVATEPQRAAVSSTSSLEASFLTPAVGFADPPPRTEEPLSGVKDRDEGLGPHHSSDLPPVSF

SEQ ID NO: 15768 - protein, 1216 aa, Homo sapiens
MPLSSHLLPALVLFLAGSSGWAWVPNHCRSPGQAVCNFVCDCRDCSDEAQCGYHGASPTLGAPFACDFEQDPCGWRDISTSGYSWLRDRAGAALEGPGPHSDHTLGTDLGWYMAVGTHRGKEASTAALRSPTLREAASSCKLRLWYHAASGDVAELRVELTHGAETLTLWQSTGPWGPGWQELAVTTGRIRGDFRVTFSATRNATHRGAVALDDLEFWDCGLPTPQANCPPGHHHCQNKVCVEPQQLCDGEDNCGDLSDENPLTCGRHIATDFETGLGPWNRSEGWSRNHRAGGPERPSWPRRDHSRNSAQGSFLVSVAEPGTPAILSSPEFQASGTSNCSLVFYQYLSGSEAGCLQLFLQTLGPGAPRAPVLLRRRRGELGTAWVRDRVDIQSAYPFQILLAGQTGPGGVVGLDDLILSDHCRPVSEVSTLQPLPPGPRAPAPQPLPPSSRLQDSCKQGHLACGDLCVPPEQLCDFEEQCAGGEDEQACGTTDFESPEAGGWEDASVGRLQWRRVSAQESQGSSAAAAGHFLSLQRAWGQLGAEARVLTPLLGPSGPSCELHLAYYLQSQPRGFLALVVVDNGSRELAWQALSSSAGIWKVDKVLLGARRRPFRLEFVGLVDLDGPDQQGAGVDNVTLRDCSPTVTTERDREVSCNFERDTCSWYPGHLSDTHWRWVESRGPDHDHTTGQGHFVLLDPTDPLAWGHSAHLLSRPQVPAAPTECLSFWYHLHGPQIGTLRLAMRREGEETHLWSRSGTQGNRWHEAWATLSHQPGSHAQYQLLFEGLRDGYHGTMALDDVAVRPGPCWAPNYCSFEDSDCGFSPGGQGLWRRQANASGHAAWGPPTDHTTETAQGHYMVVDTSPDALPRGQTASLTSKEHRPLAQPACLTFWYHGSLRSPGTLRVYLEERGRHQVLSLSAHGGLAWRLGSMDVQAERAWRVVFEAVAAGVAHSYVALDDLLLQDGPCPQPGSCDFESGLCGWSHLAWPGLGGYSWDWGGGATPSRYPQPPVDHTLGTEAGHFAFFETGVLGPGGRAAWLRSEPLPATPASCLRFWYHMGFPEHFYKGELKVLLHSAQGQLAVWGAGGHRRHQWLEAQVEVASAKEFQIVFEATLGGQPALGPIALDDVEYLAGQHCQQPAPSPGNTAAPGSVPAVVGSALLLLMLLVLLGLGGRRWLQKKGSCPFQSNTEATAPGFDNILFNADGVTLPASVTSDP

SEQ ID NO: 15769 - protein, 385 aa, Homo sapiens
MITQDHIHMSSGLSQDDYFRTWSPGKPFDQALDPAKDPCLKMKCSRHKVCIAQDSQTAVCISHRRLTHRMKEAGVDHRQWRGPILSTCKQCPVVYPSPVCGSDGHTYSFQCKLEYQACVLGKQISVKCEGHCPCPSDKPTSTSRNVKRACSDLEFREVANRLRDWFKALHESGSQNKKTKTLLRPERSRFDTSILPICKDSLGWMFNRLDTNYDLLLDQSELRSIYLDKNEQCTKAFFNSCDTYKDSLISNNEWCYCFQRQQDPPCQTELSNIQKRQGVKKLLGQYIPLCDEDGYYKPTQCHGSVGQCWCVDRYGNEVMGSRINGVADCAIDFEISGDFASGDFHEWTDDEDDEDDIMNDEDEIEDDDEDEGDDDDGGDDHDVYI

SEQ ID NO: 15770 - protein, 1306 aa, Homo sapiens
MTMYLWLKLLAFGFAFLDTEVFVTGQSPTPSPTGLTTAKMPSVPLSSDPLPTHTTAFSPASTFERENDFSETTTSLSPDNTSTQVSPDSLDNASAFNTTGVSSVQTPHLPTHADSQTPSAGTDTQTFSGSAANAKLNPTPGSNAISDVPGERSTASTFPTDPVSPLTTTLSLAHHSSAALPARTSNTTITANTSDAYLNASETTTLSPSGSAVISTTTIATTPSKPTCDEKYANITVDYLYNKETKLFTAKLNVNENVECGNNTCTNNEVHNLTECKNASVSISHNSCTAPDKTLILDVPPGVEKFQLHDCTQVEKADTTICLKWKNIETFTCDTQNITYRFQCGNMIFDNKEIKLENLEPEHEYKCDSEILYNNHKFTNASKIIKTDFGSPGEPQIIFCRSEAAHQGVITWNPPQRSFHNFTLCYIKETEKDCLNLDKNLIKYDLQNLKPYTKYVLSLHAYIIAKVQRNGSAAMCHFTTKSAPPSQVWNMTVSMTSDNSMHVKCRPPRDRNGPHERYHLEVEAGNTLVRNESHKNCDFRVKDLQYSTDYTFKAYFHNGDYPGEPFILHHSTSYNSKALIAFLAFLIIVTSIALLVVLYKIYDLHKKRSCNLDEQQELVERDDEKQLMNVEPIHADILLETYKRKIADEGRLFLAEFQSIPRVFSKFPIKEARKPFNQNKNRYVDILPYDYNRVELSEINGDAGSNYINASYIDGFKEPRKYIAAQGPRDETVDDFWRMIWEQKATVIVMVTRCEEGNRNKCAEYWPSMEEGTRAFGDVVVKINQHKRCPDYIIQKLNIVNKKEKATGREVTHIQFTSWPDHGVPEDPHLLLKLRRRVNAFSNFFSGPIVVHCSAGVGRTGTYIGIDAMLEGLEAENKVDVYGYVVKLRRQRCLMVQVEAQYILIHQALVEYNQFGETEVNLSELHPYLHNMKKRDPPSEPSPLEAEFQRLPSYRSWRTQHIGNQEENKSKNRNSNVIPYDYNRVPLKHELEMSKESEHDSDESSDDDSDSEEPSKYINASFIMSYWKPEVMIAAQGPLKETIGDFWQMIFQRKVKVIVMLTELKHGDQEICAQYWGEGKQTYGDIEVDLKDTDKSSTYTLRVFELRHSKRKDSRTVYQYQYTNWSVEQLPAEPKELISMIQVVKQKLPQKNSSEGNKHHKSTPLLIHCRDGSQQTGIFCALLNLLESAETEEVVDIFQVVKALRKARPGMVSTFEQYQFLYDVIASTYPAQNGQVKKNNHQEDKIEFDNEVDKVKQDANCVNPLGAPEKLPEAKEQAEGSEPTSGTEGPEHSVNGPASPALNQGS

SEQ ID NO: 15771 - protein, 573 aa, Homo sapiens
MTPESRDTTDLSPGGTQEMEGIVIVKVEEEDEEDHFQKERNKVESSPQVLSRSTTMNERALLSSYLVAYRVAKEKMAHTAAEKIILPACMDMVRTIFDDKSADKLRTIPLSDNTISRRICTIAKHLEAMLITRLQSGIDFAIQLDESTDIASCPTLLVYVRYVWQDDFVEDLLCCLNLNSHITGLDLFTELENCLLGQYKLNWKHCKGISSDGTANMTGKHSRLTEKLLEATHNNAVWNHCFIHREALVSKEISPSLMDVLKNAVKTVNFIKGSSLNSRLLEIFCSEIGVNHTHLLFHTEVRWLSQGKVLSRVYELRNEIYIFLVEKQSHLANIFEDDIWVTKLAYLSDIFGILNELSLKMQGKNNDIFQYLEHILGFQKTLLLWQARLKSNRPSYYMFPTLLQHIEENIINEDCLKEIKLEILLHLTSLSQTFNYYFPEEKFESLKENIWMKDPFAFQNPESIIELNLEPEEENELLQLSSSFTLKNYYKILSLSAFWIKIKDDFPLLSRKSILLLLPFTTTYLCELGFSILTRLKTKKRNRLNSAPDMRVALSSCVPDWKELMNRQAHPSH

SEQ ID NO: 15772 - protein, 114 aa, Homo sapiens
MDSFDLALLQEWDLESLCVYEPDRNALRRKERERRNQETQQDDGTFNSSYSLFSEPYKTNKGDELSNRIQNTLGNYDEMKDFLTDRSNQSHLVGVPKPGVPQTPVNKIDEHFVA

SEQ ID NO: 15773 - protein, 735 aa, Homo sapiens
MKTWVKIVFGVATSAVLALLVMCIVLRPSRVHNSEENTMRALTLKDILNGTFSYKTFFPNWISGQEYLHQSADNNIVLYNIETGQSYTILSNRTMLWRYSYTATYYIYDLSNGEFVRGNELPRPIQYLCWSPVGSKLAYVYQNNIYLKQRPGDPPFQITFNGRENKIFNGIPDWVYEEEMLATKYALWWSPNGKFLAYAEFNDTDIPVIAYSYYGDEQYPRTINIPYPKAGAKNPVVRIFIIDTTYPAYVGPQEVPVPAMIASSDYYFSWLTWVTDERVCLQWLKRVQNVSVLSICDFREDWQTWDCPKTQEHIEESRTGWAGGFFVSTPVFSYDAISYYKIFSDKDGYKHIHYIKDTVENAIQITSGKWEAINIFRVTQDSLFYSSNEFEEYPGRRNIYRISIGSYPPSKKCVTCHLRKERCQYYTASFSDYAKYYALVCYGPGIPISTLHDGRTDQEIKILEENKELENALKNIQLPKEEIKKLEVDEITLWYKMILPPQFDRSKKYPLLIQVYGGPCSQSVRSVFAVNWISYLASKEGMVIALVDGRGTAFQGDKLLYAVYRKLGVYEVEDQITAVRKFIEMGFIDEKRIAIWGWSYGGYVSSLALASGTGLFKCGIAVAPVSSWEYYASVYTERFMGLPTKDDNLEHYKNSTVMARAEYFRNVDYLLIHGTADDNVHFQNSAQIAKALVNAQVDFQAMWYSDQNHGLSGLSTNHLYTHMTHFLKQCFSLSD

SEQ ID NO: 15774 - protein, 753 aa, Homo sapiens
MSTRTPLPTVNERDTENHTSHGDGRQEVTSRTSRSGARCRNSIASCADEQPHIGNYRLLKTIGKGNFAKVKLARHILTGREVAIKIIDKTQLNPTSLQKLFREVRIMKILNHPNIVKLFEVIETEKTLYLIMEYASGGEVFDYLVAHGRMKEKEARSKFRQIVSAVQYCHQKRIVHRDLKAENLLLDADMNIKIADFGFSNEFTVGGKLDTFCGSPPYAAPELFQGKKYDGPEVDVWSLGVILYTLVSGSLPFDGQNLKELRERVLRGKYRIPFYMSTDCENLLKRFLVLNPIKRGTLEQIMKDRWINAGHEEDELKPFVEPELDISDQKRIDIMVGMGYSQEEIQESLSKMKYDEITATYLLLGRKSSELDASDSSSSSNLSLAKVRPSSDLNNSTGQSPHHKVQRSVSSSQKQRRYSDHAGPAIPSVVAYPKRSQTSTADSDLKEDGISSRKSSGSAVGGKGIAPASPMLGNASNPNKADIPERKKSSTVPSSNTASGGMTRRNTYVCSERTTADRHSVIQNGKENSTIPDQRTPVASTHSISSAATPDRIRFPRGTASRSTFHGQPRERRTATYNGPPASPSLSHEATPLSQTRSRGSTNLFSKLTSKLTRRNMSFRFIKRLPTEYERNGRYEGSSRNVSAEQKDENKEAKPRSLRFTWSMKTTSSMDPGDMMREIRKVLDANNCDYEQRERFLLFCVHGDGHAENLVQWEMEVCKLPRLSLNGVRFKRISGTSIAFKNIASKIANELKL

SEQ ID NO: 15775 - protein, 1928 aa, Homo sapiens
MGAMTQLLAGVFLAFLALATEGGVLKKVIRHKRQSGVNATLPEENQPVVFNHVYNIKLPVGSQCSVDLESASGEKDLAPPSEPSESFQEHTVDGENQIVFTHRINIPRRACGCAAAPDVKELLSRLEELENLVSSLREQCTAGAGCCLQPATGRLDTRPFCSGRGNFSTEGCGCVCEPGWKGPNCSEPECPGNCHLRGRCIDGQCICDDGFTGEDCSQLACPSDCNDQGKCVNGVCICFEGYAGADCSREICPVPCSEEHGTCVDGLCVCHDGFAGDDCNKPLCLNNCYNRGRCVENECVCDEGFTGEDCSELICPNDCFDRGRCINGTCYCEEGFTGEDCGKPTCPHACHTQGRCEEGQCVCDEGFAGVDCSEKRCPADCHNRGRCVDGRCECDDGFTGADCGELKCPNGCSGHGRCVNGQCVCDEGYTGEDCSQLRCPNDCHSRGRCVEGKCVCEQGFKGYDCSDMSCPNDCHQHGRCVNGMCVCDDGYTGEDCRDRQCPRDCSNRGLCVDGQCVCEDGFTGPDCAELSCPNDCHGQGRCVNGQCVCHEGFMGKDCKEQRCPSDCHGQGRCVDGQCICHEGFTGLDCGQHSCPSDCNNLGQCVSGRCICNEGYSGEDCSEVSPPKDLVVTEVTEETVNLAWDNEMRVTEYLVVYTPTHEGGLEMQFRVPGDQTSTIIQELEPGVEYFIRVFAILENKKSIPVSARVATYLPAPEGLKFKSIKETSVEVEWDPLDIAFETWEIIFRNMNKEDEGEITKSLRRPETSYRQTGLAPGQEYEISLHIVKNNTRGPGLKRVTTTRLDAPSQIEVKDVTDTTALITWFKPLAEIDGIELTYGIKDVPGDRTTIDLTEDENQYSIGNLKPDTEYEVSLISRRGDMSSNPAKETFTTGLDAPRNLRRVSQTDNSITLEWRNGKAAIDSYRIKYAPISGGDHAEVDVPKSQQATTKTTLTGLRPGTEYGIGVSAVKEDKESNPATINAATELDTPKDLQVSETAETSLTLLWKTPLAKFDRYRLNYSLPTGQWVGVQLPRNTTSYVLRGLEPGQEYNVLLTAEKGRHKSKPARVKASTEQAPELENLTVTEVGWDGLRLNWTAADQAYEHFIIQVQEANKVEAARNLTVPGSLRAVDIPGLKAATPYTVSIYGVIQGYRTPVLSAEASTGETPNLGEVVVAEVGWDALKLNWTAPEGAYEYFFIQVQEADTVEAAQNLTVPGGLRSTDLPGLKAATHYTITIRGVTQDFSTTPLSVEVLTEEVPDMGNLTVTEVSWDALRLNWTTPDGTYDQFTIQVQEADQVEEAHNLTVPGSLRSMEIPGLRAGTPYTVTLHGEVRGHSTRPLAVEVVTEDLPQLGDLAVSEVGWDGLRLNWTAADNAYEHFVIQVQEVNKVEAAQNLTLPGSLRAVDIPGLEAATPYRVSIYGVIRGYRTPVLSAEASTAMGSPKEVIFSDITENSATVSWRAPTAQVESFRITYVPITGGTPSMVTVDGTKTQTRLVKLIPGVEYLVSIIAMKGFEESEPVSGSFTTALDGPSGLVTANITDSEALARWQPAIATVDSYVISYTGEKVPEITRTVSGNTVEYALTDLEPATEYTLRIFAEKGPQKSSTITAKFTTDLDSPRDLTATEVQSETALLTWRPPRASVTGYLLVYESVDGTVKEVIVGPDTTSYSLADLSPSTHYTAKIQALNGPLRSNMIQTIFTTIGLLYPFPKDCSQAMLNGDTTSGLYTIYLNGDKAEALEVFCDMTSDGGGWIVFLRRKNGRENFYQNWKAYAAGFGDRREEFWLGLDNLNKITAQGQYELRVDLRDHGETAFAVYDKFSVGDAKTRYKLKVEGYSGTAGDSMAYHNGRSFSTFDKDTDSAITNCALSYKGAFWYRNCHRVNLMGRYGDNNHSQGVNWFHWKGHEHSIQFAEMKLRPSNFRNLEGRRKRA

SEQ ID NO: 15776 - protein, 113 aa, Homo sapiens
MRSLGQNPTEAELQDMINEVDADGNGTIDFPEFLTMMARKMKDTDSEEEIREAFRVFDKDGNGYISAAELRHVMTNLGEKLTDEEVDEMIREADIDGDGQVNYEEFVQMMTAK

SEQ ID NO: 15777 - protein, 276 aa, Homo sapiens
MEVMNLMEQPIKVTEWQQTYTYDSGIHSGANTCVPSVSSKGIMEEDEACGRQYTLKKTTTYTQGVPPSQGDLEYQMSTTARAKRVREAMCPGVSGEDSSLLLATQVEGQATNLQRLAEPSQLLKSAIVHLINYQDDAELATRALPELTKLLNDEDPVVVTKAAMIVNQLSKKEASRRALMGSPQLVAAVVRTMQNTSDLDTARCTTSILHNLSHHREGLLAIFKSGGIPALVRMLSSPVESVLFYAITTLHNLLLYQEGAKMAVRLADGLQKMVPL

SEQ ID NO: 15778 - protein, 307 aa, Homo sapiens
MEFLRNNRTTEVPRLDSMKPLEKHYSVVLPTVSHSGFLYKTASAGKLLQDRRAREEFSRRWCVLGDGVLSYFENERAVTPNGEIRASEIVCLAVPPPDTHGFEHTFEVYTEGERLYLFGLESAEQAHEWVKCIAKAFVPPLAEDLLARDFERLGRLPYKAGLSLQRAQEGWFSLSGSELRAVFPEGPCEEPLQLRKLQELSIQGDSENQVLVLVERRRTLYIQGERRLDFMGWLGAIQKAAASMGDTLSEQQLGDSDIPVIVYRCVDYITQCGLTSEGIYRKCGQTSKTQRLLESLRQDARSVHLKE

SEQ ID NO: 15779 - protein, 1731 aa, Homo sapiens
MELSCSEAPLYGQMMIYAKFDKNVYLPEDAEFYFTYDGSHQRHVMIAERIEDNVLQSSVPGHGLQETVTVSVCLCSEGYSPVTMGSGSVTYVDNMACRLARLLVTQANRLTACSHQTLLTPFALTAGALPALDEELVLALTHLELPLEWTVLGSSSLEVSSHRESLLHLAMRWGLAKLSQFFLCLPGGVQALALPNEEGATPLDLALREGHSKLVEDVTNFQGRWSPSFSRVQLSEEASLHYIHSSETLTLTLNHTAEHLLEADIKLFRKYFWDRAFLVKAFEPEARPEERTAMPSSGAETEEEIKNSVSSRSAAEKEDIKRVKSLVVQHNEHEDQHSLDLDRSFDILKKSKPPSTLLAAGRLSDMLNGGDEVYANCMVIDQVGDLDISYINIEGITATTSPESRGCTLWPQSSKHTLPTETSPSVYPLSENVEGTAHTEAQQSFMSPSSSCASNLNLSFGWHGFEKEQSHLKKRSSSLDALDADSEGEGHSEPSHICYTPGSQSSSRTGIPSGDELDSFETNTEPDFNISRAESLPLSSNLQSKESLLSGVRSRSYSCSSPKISLGKTRLVRELTVCSSSEEQRAYSLSEPPRENRIQEEEWDKYIIPAKSESEKYKVSRTFSFLMNRMTSPRNKSKTKSKDAKDKEKLNRHQFAPGTFSGVLQCLVCDKTLLGKESLQCSNCNANVHKGCKDAAPACTKKFQEKYNKNKPQTILGNSSFRDIPQPGLSLHPSSSVPVGLPTGRRETVGQVHPLSRSVPGTTLESFRRSATSLESESDHNSCRSRSHSDELLQSMGSSPSTESFIMEDVVDSSLWSDLSSDAQEFEAESWSLVVDPSFCNRQEKDVIKRQDVIFELMQTEMHHIQTLFIMSEIFRKGMKEELQLDHSTVDKIFPCLDELLEIHRHFFYSMKERRQESCAGSDRNFVIDRIGDILVQQFSEENASKMKKIYGEFCCHHKEAVNLFKELQQNKKFQNFIKLRNSNLLARRRGIPECILLVTQRITKYPVLVERILQYTKERTEEHKDLRKALCLIKDMIATVDLKVNEYEKNQKWLEILNKIENKTYTKLKNGHVFRKQALMSEERTLLYDGLVYWKTATGRFKDILALLLTDVLLFLQEKDQKYIFAAVDQKPSVISLQKLIAREVANEERGMFLISASSAGPEMYEIHTNSKEERNNWMRRIQQAVESCPEEKGGRTSESDEDKRKAEARVAKIQQCQEILTNQDQQICAYLEEKLHIYAELGELSGFEDVHLEPHLLIKPDPGEPPQAASLLAAALKEAESLQVAVKASQMGAVSQSCEDSCGDSVLADTLSSHDVPGSPTASLVTGGREGRGCSDVDPGIQGVVTDLAVSDAGEKVECRNFPGSSQSEIIQAIQNLTRLLYSLQAALTIQDSHIEIHRLVLQQQEGLSLGHSILRGGPLQDQKSRDADRQHEELANVHQLQHQLQQEQRRWLRRCEQQQRAQATRESWLQERERECQSQEELLLRSRGELDLQLQEYQHSLERLREGQRLVEREQARMRAQQSLLGHWKHGRQRSLPAVLLPGGPEVMELNRSESLCHENSFFINEALVQMSFNTFNKLNPSVIHQDATYPTTQSHSDLVRTSEHQVDLKVDPSQPSNVSHKLWTAAGSGHQILPFHESSKDSCKNGSSMTKCSCTLTSPPGLWTGTTSTLKDLDTSHTESPTPHDSNSHRPQLQAFITEAKLNLPTRTMTRQDGETGDGAKENIVYL

SEQ ID NO: 15780 - protein, 422 aa, Homo sapiens
MAIAQLATEYVFSDFLLKEPTEPKFKGLRLELAVDKMVTCIAVGLPLLLISLAFAQEISIGTQISCFSPSSFSWRQAAFVDSYCWAAVQQKNSLQSESGNLPLWLHKFFPYILLLFAILLYLPPLFWRFAAAPHICSDLKFIMEELDKVYNRAIKAAKSARDLDMRDGACSVPGVTENLGQSLWEVSESHFKYPIVEQYLKTKKNSNNLIIKYISCRLLTLIIILLACIYLGYYFSLSSLSDEFVCSIKSGILRNDSTVPDQFQCKLIAVGIFQLLSVINLVVYVLLAPVVVYTLFVPFRQKTDVLKVYEILPTFDVLHFKSEGYNDLSLYNLFLEENISEVKSYKCLKVLENIKSSGQGIDPMLLLTNLGMIKMDVVDGKTPMSAEMREEQGNQTAELQDSETKANNGEKNARQRLLDSSC

SEQ ID NO: 15781 - protein, 459 aa, Homo sapiens
MDDFERRRELRRQKREEMRLEAERIAYQRNDDDEEEAARERRRRARQERLRQKQEEESLGQVTDQVEVNAQNSVPDEEAKTTTTNTQVEGDDEAAFLERLARREERRQKRLQEALERQKEFDPTITDASLSLPSRRMQNDTAENETTEKEEKSESRQERYEIEETETVTKSYQKNDWRDAEENKKEDKEKEEEEEEKPKRGSIGENQIKDEKIKKDKEPKEEVKSFMDRKKGFTEVKSQNGEFMTHKLKHTENTFSRPGGRASVDTKEAEGAPQVEAGKRLEELRRRRGETESEEFEKLKQKQQEAALELEELKKKREERRKVLEEEEQRRKQEEADRKLREEEEKRRLKEEIERRRAEAAEKRQKMPEDGLSDDKKPFKCFTPKGSSLKIEERAEFLNKSVQKSSGVKSTHQAAIVSKIDSRLEQYTSAIEGTKSAKPTKPAASDLPVPAEGVRNIKS

SEQ ID NO: 15782 - protein, 194 aa, Homo sapiens
MMSEHDLADVVQIAVEDLSPDHPGTELWDIVLENHVVTDEDEPALKRQRLEINCQDPSIKSFLYSINQTICLRLDSIEAKLQALEATCKSLEEKLDLVTNKQHSPIQVPMVAGSPLGATQTCNKVRCAVPGRRQNTIVVKVPGQEDSHHEDGESGSEASDSVSSCGQAGSQSIGSNVTLITLNSEEDYPNGTWL

SEQ ID NO: 15783 - protein, 759 aa, Homo sapiens
MYCGIQILALWERGVCTQAPCYCIIMEYCAHGQLYEVLRAGRKITPRLLVDWSTGIASGMNYLHLHKIIHRDLKSPNVLVTHTDAVKISDFGTSKELSDKSTKMSFAGTVAWMAPEVIRNEPVSEKVDIWSFGVVLWELLTGEIPYKDVDSSAIIWGVGSNSLHLPVPSTCPDGFKILMKQTWQSKPRNRPSFRQTLMHLDIASADVLATPQETYFKSQAEWREEVKKHFEKIKSEGTCIHRLDEELIRRRREELRHALDIREHYERKLERANNLYMELSAIMLQLEMREKELIKREQAVEKKYPGTYKRHPVRPIIHPNAMEKLMKRKGVPHKSGMQTKRPDLLRSEGIPTTEVAPTASPLSGSPKMSTSSSKSRYRSKPRHRRGNSRGSHSDFAAILKNQPAQENSPHPTYLHQAQSQYPSLHHHNSLQQQYQQPPPAMSQSHHPRLNMHGQDIATCANNLRYFGPAAALRSPLSNHAQRQLPGSSPDLISTAMAADCWRSSEPDKGQAGPWGCCQADAYDPCLQCRPEQYGSLDIPSAEPVGRSPDLSKSPAHNPLLENAQSSEKTEENEFSGCRSESSLGTSHLGTPPALPRKTRPLQKSGDDSSEEEEGEVDSEVEFPRRQRPHRCISSCQSYSTFSSENFSVSDGEEGNTSDHSNSPDELADKLEDRLAEKLDDLLSQTPEIPIDISSHSDGLSDKECAVRRVKTQMSLGKLCVEERGYENPMQFEESDCDSSDGECSDATVRTNKHYSSATW

SEQ ID NO: 15784 - protein, 370 aa, Homo sapiens
MSASAVYVLDLKGKVLICRNYRGDVDMSEVEHFMPILMEKEEEGMLSPILAHGGVRFMWIKHNNLYLVATSKKNACVSLVFSFLYKVVQVFSEYFKELEEESIRDNFVIIYELLDELMDFGYPQTTDSKILQEYITQEGHKLETGAPRPPATVTNAVSWRSEGIKYRKNEVFLDVIESVNLLVSANGNVLRSEIVGSIKMRVFLSGMPELRLGLNDKVLFDNTGRGKSKSVELEDVKFHQCVRLSRFENDRTISFIPPDGEFELMSYRLNTHVKPLIWIESVIEKHSHSRIEYMIKGGKEYLMRAHFGLPSVEAEDKEGKPPISVKFEIPYFTTSGIQVRYLKIIEKSGYQALPWVRYITQNGDYQLRTQ

SEQ ID NO: 15785 - protein, 1226 aa, Homo sapiens
MGDKKDDKDSPKKNKGKERRDLDDLKKEVAMTEHKMSVEEVCRKYNTDCVQGLTHSKAQEILARDGPNALTPPPTTPEWVKFCRQLFGGFSILLWIGAILCFLAYGIQAGTEDDPSGDNLYLGIVLAAVVIITGCFSYYQEAKSSKIMESFKNMVPQQALVIREGEKMQVNAEEVVVGDLVEIKGGDRVPADLRIISAHGCKVDNSSLTGESEPQTRSPDCTHDNPLETRNITFFSTNCVEGTARGVVVATGDRTVMGRIATLASGLEVGKTPIAIEIEHFIQLITGVAVFLGVSFFILSLILGYTWLEAVIFLIGIIVANVPEGLLATVTVCLTLTAKRMARKNCLVKNLEAVETLGSTSTICSDKTGTLTQNRMTVAHMWFDNQIHEADTTEDQSGTSFDKSSHTWVALSHIAGLCNRAVFKGGQDNIPVLKRDVAGDASESALLKCIELSSGSVKLMRERNKKVAEIPFNSTNKYQLSIHETEDPNDNRYLLVMKGAPERILDRCSTILLQGKEQPLDEEMKEAFQNAYLELGGLGERVLGFCHYYLPEEQFPKGFAFDCDDVNFTTDNLCFVGLMSMIDPPRAAVPDAVGKCRSAGIKVIMVTGDHPITAKAIAKGVGIISEGNETVEDIAARLNIPVSQVNPRDAKACVIHGTDLKDFTSEQIDEILQNHTEIVFARTSPQQKLIIVEGCQRQGAIVAVTGDGVNDSPALKKADIGVAMGIAGSDVSKQAADMILLDDNFASIVTGVEEGRLIFDNLKKSIAYTLTSNIPEITPFLLFIMANIPLPLGTITILCIDLGTDMVPAISLAYEAAESDIMKRQPRNPRTDKLVNERLISMAYGQIGMIQALGGFFSYFVILAENGFLPGNLVGIRLNWDDRTVNDLEDSYGQQWTYEQRKVVEFTCHTAFFVSIVVVQWADLIICKTRRNSVFQQGMKNKILIFGLFEETALAAFLSYCPGMDVALRMYPLKPSWWFCAFPYSFLIFVYDEIRKLILRRNPGGEGARQGSRGGRGAAGSQAAGPRLPSPCWMALPPGSHSSLSSHLSGHPLCLLTGLCLCGFLVSLPLCPSLCWAARLACLSPSLTLSLSFLLCLSRLGGEGNLLLTSAPPHRPSLPRPPGPGPPLSVPPILYSGGRSPLFLWPHLGPHPLHYLLPPPLWLASLPCPKPLSSLFSVSVSLPLLTPLSIPPAPATSLGSFLLPFSPPADAISGSGQLSNISVGRE

SEQ ID NO: 15786 - protein, 188 aa, Homo sapiens
MSEARRDSTSSLQRKKPPWLKLDIPSAVPLTAEEPSFLQPLRRQAFLRSVSMPAETAHISSPHHELRRPVLQRQTSITQTIRRGTADWFGVSKDSDSTQKWQRKSIRHCSQRYGKLKPQVLRELDLPSQDNVSLTSTETPPPLYVGPCQLGMQKLPLRFPPAPAAAQARVGGQDELPGGRSADERPLR

SEQ ID NO: 15787 - protein, 191 aa, Homo sapiens
MSQTSSIGSAESLISLERKKEKNINRDITSRKDLPSRTSNVERKASQQQWGRGNFTEGKVPHIRIENGAAIEEIYTFGRILGKGSFGIVIEATDKETETKWAIKKVNKEKAGSSAVKLLEREVNILKSVKHEHIIHLEQVFETPKKMYLVMELCEDGELKEILDRKGHFSENETRWIIQSLASAIAYLHNN

SEQ ID NO: 15788 - protein, 233 aa, Homo sapiens
MAQESVMFSDVSVDFSQEEWECLNDDQRDLYRDVMLENYSNLVSMGHSISKPNVISYLEQGKEPWLADRELTRGQWPVLESRCETKKLFLKKEIYEIESTQWEIMEKLTRRDFQCSSFRDDWECNRQFKKELGSQGGHFNQLVFTHEDLPTLSHHPSFTLQQIINSKKKFCASKEYRKTFRHGSQFATHEIIHTIEKPYECKECGKSFRHPSRLTHHQKIHTGKKPFECKECG

SEQ ID NO: 15789 - protein, 1531 aa, Homo sapiens
MEVSPLQPVNENMQVNKIKKNEDAKKRLSVERIYQKKTQLEHILLRPDTYIGSVELVTQQMWVYDEDVGINYREVTFVPGLYKIFDEILVNAADNKQRDPKMSCIRVTIDPENNLISIWNNGKGIPVVEHKVEKMYVPALIFGQLLTSSNYDDDEKKVTGGRNGYGAKLCNIFSTKFTVETASREYKKMFKQTWMDNMGRAGEMELKPFNGEDYTCITFQPDLSKFKMQSLDKDIVALMVRRAYDIAGSTKDVKVFLNGNKLPVKGFRSYVDMYLKDKLDETGNSLKVIHEQVNHRWEVCLTMSEKGFQQISFVNSIATSKGGRHVDYVADQIVTKLVDVVKKKNKGGVAVKAHQVKNHMWIFVNALIENPTFDSQTKENMTLQPKSFGSTCQLSEKFIKAAIGCGIVESILNWVKFKAQVQLNKKCSAVKHNRIKGIPKLDDANDAGGRNSTECTLILTEGDSAKTLAVSGLGVVGRDKYGVFPLRGKILNVREASHKQIMENAEINNIIKIVGLQYKKNYEDEDSLKTLRYGKIMIMTDQDQDGSHIKGLLINFIHHNWPSLLRHRFLEEFITPIVKVSKNKQEMAFYSLPEFEEWKSSTPNHKKWKVKYYKGLGTSTSKEAKEYFADMKRHRIQFKYSGPEDDAAISLAFSKKQIDDRKEWLTNFMEDRRQRKLLGLPEDYLYGQTTTYLTYNDFINKELILFSNSDNERSIPSMVDGLKPGQRKVLFTCFKRNDKREVKVAQLAGSVAEMSSYHHGEMSLMMTIINLAQNFVGSNNLNLLQPIGQFGTRLHGGKDSASPRYIFTMLSSLARLLFPPKDDHTLKFLYDDNQRVEPEWYIPIIPMVLINGAEGIGTGWSCKIPNFDVREIVNNIRRLMDGEEPLPMLPSYKNFKGTIEELAPNQYVISGEVAILNSTTIEISELPVRTWTQTYKEQVLEPMLNGTEKTPPLITDYREYHTDTTVKFVVKMTEEKLAEAERVGLHKVFKLQTSLTCNSMVLFDHVGCLKKYDTVLDILRDFFELRLKYYGLRKEWLLGMLGAESAKLNNQARFILEKIDGKIIIENKPKKELIKVLIQRGYDSDPVKAWKEAQQKVPDEEENEESDNEKETEKSDSVTDSGPTFNYLLDMPLWYLTKEKKDELCRLRNEKEQELDTLKRKSPSDLWKEDLATFIEELEAVEAKEKQDEQVGLPGKGGKAKGKKTQMAEVLPSPRGQRVIPRITIEMKAEAEKKNKKKIKNENTEGSPQEDGVELEGLKQRLEKKQKREPGTKTKKQTTLAFKPIKKGKKRNPWSDSESDRSSDESNFDVPPRETEPRRAATKTKFTMDLDSDEDFSDFDEKTDDEDFVPSDASPPKTKTSPKLSNKELKPQKSVVSDLEADDVKGSVPLSSSPPATHFPDETEITNPVPKKNVTVKKTAAKSQSSTSTTGAKKRAAPKGTKRDPALNSGVSQKPDPAKTKNRRKRKPSTSDDSDSNFEKIVSKAVTSKKSKGESDDFHMDFDSAVAPRAKSVRAKKPIKYLEESDEDDLF

SEQ ID NO: 15790 - protein, 600 aa, Homo sapiens
GKVLSAKVVTNARSPGAKCYGIVTMSSSTEVSRCIAHLHRTELHGQLISVEKVKGDPSKKEMKKENDEKSSSRSSGDKKNTSDRSSKTQASVKKEEKRSSEKSEKKESKDTKKIEGSKSPGHMVILDQTKGDHCRPSRRGRYEKIHGRSKEKERASLDKKRDKDYRRKEILPFEKMKEQRLREHLVRFERLRRAMELRRRREIAERERRERERIRIIREREERERLQRERERLEIERQKLERERMERERLERERIRIEQERRKEAERIAREREELRRQQQQLRYEQEKRNSLKRPRDVDHRRDDPYWSENKKLSLDTDARFGHGSDYSRQQNRFNDFDHRERGRFPESSAVQSSSFERRDRFVGQSEGKKARPTARREDPSFERYPKNFSDSRRNEPPPPRNELRESDRREVRGERDERRTVIIHDRPDITHPRHPREAGPNPSRPTSWKSEGSMSTDKRETRVERPERSGREVSGHSVRGAPPGNRSSASGYGSREGDRGVITDRGGGSQHYPEERHVVERHGRDTSGPRKEWHGPPSQGPSYHDTRRMGDGRAGAGMITQHSSNASPINRIVQISGNSMPRGSGSGFKPFKGGPPRRF

SEQ ID NO: 15791 - protein, 388 aa, Homo sapiens
MATAIQNPLKSLGEDFYREAIEHCRSYNARLCAERSLRLPFLDSQTGVAQNNCYIWMEKTHRGPGLAPGQIYTYPARCWRKKRRLNILEDPRLRPCEYKIDCEAPLKKEGGLPEGPVLEALLCAETGEKKIELKEEETIMDCQKQQLLEFPHDLEVEDLEDDIPRRKNRAKGKAYGIGGLRKRQDTASLEDRDKPYVCDICGKRYKNRPGLSYHYTHTHLAEEEGEENAERHALPFHRKNNHKQFYKELAWVPEAQRKHTAKKAPDGTVIPNGYCDFCLGGSKKTGCPEDLISCADCGRSGHPSCLQFTVNMTAAVRTYRWQCIECKSCSLCGTSENDDQLLFCDDCDRGYHMYCLSPPMAEPPEGSWSCHLCLRHLKEKASAYITLT

SEQ ID NO: 15792 - protein, 582 aa, Homo sapiens
MDLIDILWRQDIDLGVSREVFDFSQRRKEYELEKQKKLEKERQEQLQKEQEKAFFAQLQLDEETGEFLPIQPAQHIQSETSGSANYSQVAHIPKSDALYFDDCMQLLAQTFPFVDDNESLVPDIPGHIESPVFIATNQAQSPETSVAQVAPVDLDGMQQDIEQVWEELLSIPELQCLNIENDKLVETTMVPSPEAKLTEVDNYHFYSSIPSMEKEVGNCSPHFLNAFEDSFSSILSTEDPNQLTVNSLNSDATVNTDFGDEFYSAFIAEPSISNSMPSPATLSHSLSELLNGPIDVSDLSLCKAFNQNHPESTAEFNDSDSGISLNTSPSVASPEHSVESSSYGDTLLGLSDSEVEELDSAPGSVKQNGPKTPVHSSGDMVQPLSPSQGQSTHVHDAQCENTPEKELPVSPGHRKTPFTKDKHSSRLEAHLTRDELRAKALHIPFPVEKIINLPVVDFNEMMSKEQFNEAQLALIRDIRRRGKNKVAAQNCRKRKLENIVELEQDLDHLKDEKEKLLKEKGENDKSLHLLKKQLSTLYLEVFSMLRDEDGKPYSPSEYSLQQTRDGNVFLVPKSKKPDVKKN

SEQ ID NO: 15793 - protein, 321 aa, Homo sapiens
MGILLGLLLLGHLTVDTYGRPILEVPESVTGPWKGDVNLPCTYDPLQGYTQVLVKWLVQRGSDPVTIFLRDSSGDHIQQAKYQGRLHVSHKVPGDVSLQLSTLEMDDRSHYTCEVTWQTPDGNQVVRDKITELRVQKLSVSKPTVTTGSGYGFTVPQGMRISLQCQARGSPPISYIWYKQQTNNQEPIKVATLSTLLFKPAVIADSGSYFCTAKGQVGSEQHSDIVKFVVKDSSKLLKTKTEAPTTMTYPLKATSTVKQSWDWTTDMDGYLGETSAGPGKSLPVFAIILIISLCCMVVFTMAYIMLCRKTSQQEHVYEAAR

SEQ ID NO: 15794 - protein, 249 aa, Homo sapiens
MANLGCWMLVLFVATWSDLGLCKKRPKPGGWNTGGSRYPGQGSPGGNRYPPQGGGGWGQPHGGGWGQPHGGGWGQPHGGGWGQPHGGGWGQGGGTHSQWNKPSKPKTNMKHMAGAAAAGAVVGGLGGYMLGSAMSRPIIHFGSDYEDRYYRENMHRYPNQVYYRPMDEYSNQNNFVHDCVNITIKQHTVTTTTKGENFTETDVKMMERVVEQMCITQYERESQAYYQRGSSMVLFSSPPVILLISFLIF

SEQ ID NO: 15795 - protein, 241 aa, Homo sapiens
WSGSFPLENTELANVGANQVTVRKGEKDHTTHCHASDHANQLSIHIPGWSYRAGDYTCCDLVVKIKECKKSEDPTTPEPSPAAPSPAPRDGAGSPGLSEDCSESQQTPARSLTLQEALEVRKPQFISRSQERLKKLEHMVQQRKAQRKEDLRQKQSLLPIRTSKKQFTIPHPLSDNLFKPKERCISEKEMHMRSKRIYDNLPEVKKKKEEQRKRVILQSNRLRAEVFKKQLLDQLLQRNAV

SEQ ID NO: 15796 - protein, 770 aa, Homo sapiens
MPALGWAVAAILMLQTAMAEPSPGTLPRKAGVFSDLSNQELKAVHSFLWSKKELRLQPSSTTTMAKNTVFLIEMLLPKKYHVLRFLDKGERHPVREARAVIFFGDQEHPNVTEFAVGPLPGPCYMRALSPRPGYQSSWASRPISTAEYALLYHTLQEATKPLHQFFLNTTGFSFQDCHDRCLAFTDVAPRGVASGQRRSWLIIQRYVEGYFLHPTGLELLVDHGSTDAGHWAVEQVWYNGKFYGSPEELARKYADGEVDVVVLEDPLPGGKGHDSTEEPPLFSSHKPRGDFPSPIHVSGPRLVQPHGPRFRLEGNAVLYGGWSFAFRLRSSSGLQVLNVHFGGERIAYEVSVQEAVALYGGHTPAGMQTKYLDVGWGLGSVTHELAPGIDCPETATFLDTFHYYDADDPVHYPRALCLFEMPTGVPLRRHFNSNFKGGFNFYAGLKGQVLVLRTTSTVYNYDYIWDFIFYPNGVMEAKMHATGYVHATFYTPEGLRHGTRLHTHLIGNIHTHLVHYRVDLDVAGTKNSFQTLQMKLENITNPWSPRHRVVQPTLEQTQYSWERQAAFRFKRKLPKYLLFTSPQENPWGHKRTYRLQIHSMADQVLPPGWQEEQAITWARTEGGQPRALSQAASPVPGRYPLAVTKYRESELCSSSIYHQNDPWHPPVVFEQFLHNNENIENEDLVAWVTVGFLHIPHSEDIPNTATPGNSVGFLLRPFNFFPEDPSLASRDTVIVWPRDNGPNYVQRWIPEDRDCSMPPPFSYNGTYRPV

SEQ ID NO: 15797 - protein, 263 aa, Homo sapiens
YRPTWDLALDPLVSCKLCLGEYPVEQMTTIAQCQCIFCTLCLKQYVELLIKEGLETAISCPDAACPKQGHLQENEIECMVAAEIMQRYKKLQFEREVLFDPCRTWCPASTCQAVCQLQDVGLQTPQPVQCKACRMEFCSTCKASWHPGQGCPETMPITFLPGETSAAFKMEEDDAPIKRCPKCKVYIERDEGCAQMMCKNCKHAFCWYCLESLDDDFLLIHYDKGPCRNKLGHSRASVIWHRTQGDAILEKCILHNTESECHL

SEQ ID NO: 15798 - protein, 419 aa, Homo sapiens
MLQDLSASVFFPPCSQHRTLVAFHGLPLKIKKEPHSPCSEISSACSQEQPFKFSYGEKCLYNVSAYDQKPQVGMRPSNPPTPSSTPVSPLHHASPNSTHTPKPDRAFPAHLPPSQSIPDSSYPMDHRFRRQLSEPCNSFPPLPTMPREGRPMYQRQMSEPNIPFPPQGFKQEYHDPVYEHNTMVGSAASQSFPPPLMIKQEPRDFAYDSEVPSCHSIYMRQEGFLAHPSRTEGCMFEKGPRQFYDDTCVVPEKFDGDIKQEPGMYREGPTYQRRGSLQLWQFLVALLDDPSNSHFIAWTGRGMEFKLIEPEEVARRWGIQKNRPAMNYDKLSRSLRYYYEKGIMQKVAGERYVYKFVCDPEALFSMAFPDNQRPLLKTDMERHINEEDTVPLSHFDESMAYMPEGGCCNPHPYNEGYVY

SEQ ID NO: 15799 - protein, 587 aa, Homo sapiens
MESSSSSNSYFSVGPTSPSAVVLLYSKELKKWDEFEDILEERRHVSDLKFAMKCYTPLVYKGITPCKPIDIKCSVLNSEEIHYVIKQLSKESLQSVDVLREEVSEILDEMSHKLRLGAIRFCAFTLSKVFKQIFSKLQRAIQEHPVVLLPSHRSYIDFLMLSFLLYNYDLPVPVIAAGMDFLGMKMVGELLRMSGAFFMRRTFGGNKLYWAVFSEYVKTMLRNGYAPVEFFLEGTRSRSAKTLTPKFGLLNIVMEPFFKREVFDTYLVPISISYDKILEETLYVYELLGVPKPKESTTGLLKARKILSENFGSIHVYFGDPVSLRSLAAGRMSRSSYNLVPRYIPQKQSEDMHAFVTEVAYKMELLQIENMVLSPWTLIVAVLLQNRPSMDFDALVEKTLWLKGLTQAFGGFLIWPDNKPAEEVVPASILLHSNIASLVKDQVILKVDSGDSEVVDGLMLQHITLLMCSAYRNQLLNIFVRPSLVAVALQMTPGFRKEDVYSCFRFLRDVFADEFIFLPGNTLKDFEEGCYLLCKSEAIQVTTKDILVTEKGNTVLEFLVGLFKPFVESYQIICKYLLSEEEDHFSE

SEQ ID NO: 15800 - protein, 717 aa, Homo sapiens
MFRITNIEFLPEYRQKESREFLSVSRTVQQVINLVYTTSAFSKFYEQSVVADVSNNKGGLLVHFWIVFVMPRAKGHIFCEDCVAAILKDSIQTSIINRTSVGSLQGLAVDMDSVVLNDKGCSQYFYAEHLSLHYPLEISAASGRLMCHFKLVAIVGYLIRLSIKSIQIEADNCVTDSLTIYDSLLPIRSSILYRICEPTRTLMSFVSTNNLMLVTFKSPHIRRLSGIRAYFEVIPEQKCENTVLVKDITGFEGKISSPYYPSYYPPKCKCTWKFQTSLSTLGIALKFYNYSITKKSMKGCEHGWWEINEHMYCGSYMDHQTIFRVPSPLVHIQLQCSSRLSDKPLLAEYGSYNISQPCPVGSFRCSSGLCVPQAQRCDGVNDCFDESDELFCVSPQPACNTSSFRQHGPLICDGFRDCENGRDEQNCTQSIPCNNRTFKCGNDICFRKQNAKCDGTVDCPDGSDEEGCTCSRSSSALHRIIGGTDTLEGGWPWQVSLHFVGSAYCGASVISREWLLSAAHCFHGNRLSDPTPWTAHLGMYVQGNAKFVSPVRRIVVHEYYNSQTFDYDIALLQLSIAWPETLKQLIQPICIPPTGQRVRSGEKCWVTGWGRRHEADNKGSLVLQQAEVELIDQTLCVSTYGIITSRMLCAGIMSGKRDACKGDSGGPLSCRRKSDGKWILTGIVSWGHGSGRPNFPGVYTRVSNFVPWIHKYVPSLL

SEQ ID NO: 15801 - protein, 1560 aa, Homo sapiens
NSIYTISISSTAESGKKPWYLEECSSTLATTYSSGESYDKKIITTDLRQRCTDNHTGTSASAPMAAGIIALALEANPFLTWRDVQHVIVRTSRAGHLNANDWKTNAAGFKVSHLYGFGLMDAEAMVMEAEKWTTVPRQHVCVESTDRQIKTIRPNSAVRSIYKASGCSDNPNRHVNYLEHVVVRITITHPRRGDLAIYLTSPSGTRSQLLANRLFDHSMEGFKNWEFMTIHCWGERAAGDWVLEVYDTPSQLRNFKTPGKLKEWSLVLYGTSVQPYSPTNEFPKVERFRYSRVEDPTDDYGTEDYAGPCDPECSEVGCDGPGPDHCNDCLHYYYKLKNNTRICVSSCPPGHYHADKKRCRKCAPNCESCFGSHGDQCMSCKYGYFLNEETNSCVTHCPDGSYQDTKKNLCRKCSENCKTCTEFHNCTECRDGLSLQGSRCSVSCEDGRYFNGQDCQPCHRFCATCAGAGADGCINCTEGYFMEDGRCVQSCSISYYFDHSSENGYKSCKKCDISCLTCNGPGFKNCTSCPSGYLLDLGMCQMGAICKDGEYVDEHGHCQTCEASCAKCQGPTQEDCTTCPMTRIFDDGRCVSNCPSWKFEFENQCHPCHHTCQRCQGSGPTHCTSCGADNYGREHFLYQGECGDSCPEGHYATEGNTCLPCPDNCELCHSVHVCTRCMKGYFIAPTNHTCQKLECGQGEVQDPDYEECVPCEEGCLGCSLDDPGTCTSCAMGYYRFDHHCYKTCPEKTYSEEVECKACDSNCGSCDQNGCYWCEEGFFLLGGSCVRKCGPGFYGDQEMGECESCHRACETCTGPGHDECSSCQEGLQLLRGMCVHATKTQEEGKFWNEAVSTANLSVVKSLLQERRRWKVQIKRDILRKLQPCHSSCKTCNGSATLCTSCPKGAYLLAQACVSSCPQGTWPSVRSGSCENCTEACAICSGADLCKKCQMQPGHPLFLHEGRCYSKCPEGSYAEDGICERCSSPCRTCEGNATNCHSCEGGHVLHHGVCQENCPERHVAVKGVCKHCPEMCQDCIHEKTCKECTPEFFLHDDMCHQSCPRGFYADSRHCVPCHKDCLECSGPKADDCELCLESSWVLYDGLCLEECPAGTYYEKETKECRDCHKSCLTCSSSGTCTTCQKGLIMNPRGSCMANEKCSPSEYWDEDAPGCKPCHVKCFHCMGPAEDQCQTCPMNSLLLNTTCVKDCPEGYYADEDSNRCAHCHSSCRTCEGRHSRQCHSCRPGWFQLGKECLLQCREGYYADNSTGRCERCNRSCKGCQGPRPTDCLSCDRFFFLLRSKGECHRSCPDHYYVEQSTQTCERCHPTCDQCKGKGALNCLSCVWSYHLMGGICTSDCLVGEYRVGEGEKFNCEKCHESCMECKGPGAKNCTLCPANLVLHMDDSHCLHCCNTSDPPSAQECCDCQDTTDECILRTSKVRPATEHFKTALFITSSMMLVLLLGAAVVVWKKSRGRVQPAAKAGYEKLADPNKSYSSYKSSYRESTSFEEDQVIEYRDRDYDEDDDDDIVYMGQDGTVYRKFKYGLLDDDDIDELEYDDESYSYYQ

SEQ ID NO: 15802 - protein, 918 aa, Homo sapiens
MEPIYPFARPQMNTRFPSSRMVPFHFPPSKCALWNPTPTGDFIYLHLSYYRNPKLVVTEKTIRLAYRHAKQNKKNSSCFLLGSLTADEDEEGVTLTVDRFDPGREVPECLEITPTASLPGDFLIPCKVHTQELCSREMIVHSVDDFSSALKALQCHICSKDSLDCALARNLSSNLNISQVQGTYKYGYLTMDETRKLLLLLESDPKVYSLPLVGIWLSGITHIYSPQVWACCLRYIFNSSVQERVFSESGNFIIVLYSMTHKEPEFYECFPCDGKIPDFRFQLLTSKETLHLFKNVEPPDKNPIRCELSAESQNAETEFFSKASKNFSIKRSSQKLSSGKMPIHDHDSGVEDEDFSPRPIPSPHPVSQKISKIQPSVPELSLVLDGNFIESNPLPTPLEMVNNENPPLINHLEHLKPLQPQLYDEKHSPEVEAGEPSLRGIPNQLNQDKPALLRHCKVRQPPAYKKGNPHTRNSIKPSSHNGPSHDIFEKLQTVSAGNVQNEEYPIRPSTLNSRQSSLAPQSQPHDFVFSPHNSGRPMELQIPTPPLPSYCSTNVCRCCQHHSHIQYSPLNSWQGANTVGSIQDVQSEALQKHSLFHPSGCPALYCNAFCSSSSPIALRPQGDMGSCSPHSNIEPSPVARPPSHMDLCNPQPCTVCMHTPKTESDNGMMGLSPDAYRFLTEQDRQLRLLQAQIQRLLEAQSLMPCSPKTTAVEDTVQAGRQMELVSVEAQSSPGLHMRKGVSIAVSTGASLFWNAAGEDQEPDSQMKQDDTKISSEDMNFSVDINNEVTSLPGSASSLKAVDIPSFEESNIAVEEEFNQPLSVSNGQLAESVSMCLQTGPTGGASNNSETSEEPKIEHVMQPLLHQPSDNQKIYQDLLGQVNHLLNSSSKETEQPSTKAVIISHECTRTQNVYHTKKK

SEQ ID NO: 15803 - protein, 147 aa, Homo sapiens
MTENTHFDKIPESCALKSWRHPGLHHGEAALRGEPRIQTLPVASALSSHRTGPPPISPSKRKFSMEPGDEDLDCDNDHVSKMSRIFNPHLNKTANGDCRRDPRERSRSPIERAVAPTMSLHGSHLYTSLPSLGLEQPLALTKNSLDA

SEQ ID NO: 15804 - protein, 398 aa, Homo sapiens
MALFGALFLALLAGAHAEFPGCKIRVTSKALELVKQEGLRFLEQELETITIPDLRGKEGHFYYNISEKVYDFLSTFITSGMRFLLNQQICPVLYHAGTVLLNSLLDTVPVRSSVDELVGIDYSLMKDPVASTSNLDMDFRGAFFPLTERNWSLPNRAVEPQLQEEERMVYVAFSEFFFDSAMESYFRAGALQLLLVGDKVPHDLDMLLRATYFGSIVLLSPAVIDSPLKLELRVLAPPRCTIKPSGTTISVTASVTIALVPPDQPEVQLSSMTMDARLSAKMALRGKALRTQLDLRRFRIYSNHSALESLALIPLQAPLKTMLQIGVMPMLNERTWRGVQIPLPEGINFVHEVVTNHAGFLTIGADLHFAKGLREVIEKNRPADVRASTAPTPSTAAV

SEQ ID NO: 15805 - protein, 237 aa, Homo sapiens
MLLTRKQTCQLGILLSIHRQHSKIDQILIHQQIELLEVLTGFETNNKYEIKNSFGQRVYFAAEDTDCCTRNCCGPSRPFTLRIIDNMGQEVITLERPLRCSSCCCPCCLQEIEIQAPPGVPIGYVIQTWHPCLPKFTIQNEKREDVLKISGPCVVCSCCGDVDFEIKSLDEQCVVGKISKHWTGILREAFTDADNFGIQFPLDLDVKMKAVMIGACFLIDFMFFESTGSQEQKSGVW

SEQ ID NO: 15806 - protein, 1160 aa, Homo sapiens
MWAMESGHLLWALLFMQSLWPQLTDGATRVYYLGIRDVQWNYAPKGRNVITNQPLDSDIVASSFLKSDKNRIGGTYKKTIYKEYKDDSYTDEVAQPAWLGFLGPVLQAEVGDVILIHLKNFATRPYTIHPHGVFYEKDSEGSLYPDGSSGPLKADDSVPPGGSHIYNWTIPEGHAPTDADPACLTWIYHSHVDAPRDIATGLIGPLITCKRGALDGNSPPQRQDVDHDFFLLFSVVDENLSWHLNENIATYCSDPASVDKEDETFQESNRMHAINGFVFGNLPELNMCAQKRVAWHLFGMGNEIDVHTAFFHGQMLTTRGHHTDVANIFPATFVTAEMVPWEPGTWLISCQVNSHFRDGMQALYKVKSCSMAPPVDLLTGKVRQYFIEAHEIQWDYGPMGHDGSTGKNLREPGSISDKFFQKSSSRIGGTYWKVRYEAFQDETFQEKMHLEEDRHLGILGPVIRAEVGDTIQVVFYNRASQPFSMQPHGVFYEKDYEGTVYNDGSSYPGLVAKPFEKVTYRWTVPPHAGPTAQDPACLTWMYFSAADPIRDTNSGLVGPLLVCRAGALGADGKQKGVDKEFFLLFTVLDENKSWYSNANQAAAMLDFRLLSEDIEGFQDSNRMHAINGFLFSNLPRLDMCKGDTVAWHLLGLGTETDVHGVMFQGNTVQLQGMRKGAAMLFPHTFVMAIMQPDNLGTFEIYCQAGSHREAGMRAIYNVSQCPGHQATPRQRYQAARIYYIMAEEVEWDYCPDRSWEREWHNQSEKDSYGYIFLSNKDGLLGSRYKKAVFREYTDGTFRIPRPRTGPEEHLGILGPLIKGEVGDILTVVFKNNASRPYSVHAHGVLESTTVWPLAAEPGEVVTYQWNIPERSGPGPNDSACVSWIYYSAVDPIKDMYSGLVGPLAICQKGILEPHGGRSDMDREFALLFLIFDENKSWYLEENVATHGSQDPGSINLQDETFLESNKMHAINGKLYANLRGLTMYQGERVAWYMLAMGQDVDLHTIHFHAESFLYRNGENYRADVVDLFPGTFEVVEMVASNPGTWLMHCHVTDHVHAGMETLFTVFSRTEHLSPLTVITKETEKVPPRDIEEGNVKMLGMQIPIKNVEMLASVLVAISVTLLLVVLALGGVVWYQHRQRKLRRNRRSILDDSFKLLSFKQ

SEQ ID NO: 15807 - protein, 547 aa, Homo sapiens
MSSNTMLQKTLLILISFSVVTWMIFIISQNFTKLWSALNLSISVHYWNNSAKSLFPKTSLIPLKPLTETELRIKEIIEKLDQQIPPRPFTHVNTTTSATHSTATILNPRDTYCRGDQLDILLEVRDHLGQRKQYGGDFLRARMSSPALTAGASGKVMDFNNGTYLVSFTLFWEGQVSLSLLLIHPSEGASALWRARNQGYDKIIFKGKFVNGTSHVFTECGLTLNSNAELCEYLDDRDQEAFYCMKPQHMPCEALTYMTTRNREVSYLTDKENSLFHRSKVGVEMMKDRKHIDVTNCNKREKIEETCQVGMKPPVPGGYTLQGKWITTFCNQVQLDTIKINGCLKGKLIYLLGDSTLRQWIYYFPKVVKTLKFFDLHETGIFKKHLLLDAERHTQIQWKKHSYPFVTFQLYSLIDHDYIPREIDRLSGDKNTAIVITFGQHFRPFPIDIFIRRAIGVQKAIERLFLRSPATKVIIKTENIREMHIETERFGDFHGYIHYLIMKDIFKDLNVGIIDAWDMTIAYGTDTIHPPDHVIGNQINMFLNYIC

SEQ ID NO: 15808 - protein, 130 aa, Homo sapiens
LEKNVKEVLEDFAEDGEKKIKLLTGKRVQLAEDLTRTQHYTPGHHMAPHPALTLLLPCLGSDIRARLLFVMESLLLSSALTLCARCLSISSFPPASLCPTPDRFLPHLKPDHAFVEIPSLPCLCFASLHQ

SEQ ID NO: 15809 - protein, 713 aa, Homo sapiens
QLITGVAVFLGVSFFVLSLILGYSWLEAVIFLIGIIVANVPEGLLATVTVCLTLTAKRMARKNCLVKNLEAVETLGSTSTICSDKTGTLTQNRMTVAHMWFDNQIHEADTTEDQSGATFDKRSPTWTALSRIAGLCNRAVFKAGQENISVSKRDTAGDASESALLKCIELSCGSVRKMRDRNPKVAEIPFNSTNKYQLSIHEREDSPQSHVLVMKGAPERILDRCSTILVQGKEIPLDKEMQDAFQNAYMELGGLGERVLGFCQLNLPSGKFPRGFKFDTDELNFPTEKLCFVGLMSMIDPPRAAVPDAVGKCRSAGIKVIMVTGDHPITAKAIAKGVGIISEGNETVEDIAARLNIPMSQVNPREAKACVVHGSDLKDMTSEQLDEILKNHTEIVFARTSPQQKLIIVEGCQRQGAIVAVTGDGVNDSPALKKADIGIAMGISGSDVSKQAADMILLDDNFASIVTGVEEGRLIFDNLKKSIAYTLTSNIPEITPFLLFIIANIPLPLGTVTILCIDLGTDMVPAISLAYEAAESDIMKRQPRNSQTDKLVNERLISMAYGQIENGFLPSRLLGIRLDWDDRTMNDLEDSYGQEWTYEQRKVVEFTCHTAFFASIVVVQWADLIICKTRRNSVFQQGMKNKILIFGLLEETALAAFLSYCPGMGVALRMYPLKVTWWFCAFPYSLLIFIYDEVRKLILRRYPGGWVEKETYY

SEQ ID NO: 15810 - protein, 276 aa, Homo sapiens
TCERGFAAMEETHQKKIEDLQRQHQRELEKLREEKDRLLAEETAATISAIEAMKNAHREEMERELEKSQRSQISSVNSDVEALRRQYLEELQSVQRELEVLSEQYSQKCLENAHLAQALEAERQALRQCQRENQELNAHNQVLLRVKESEIQYLKQEISSLKDELQTALRDKKYASDKYKDIYTELSIAKAKADCDISRLKEQLKAATEALGEKSPDSATVSGYDIMKSKSNPDFLKKDRSCVTRQLRNIRSKSLKEGLTVQERLKLFESRDLKKD

SEQ ID NO: 15811 - protein, 623 aa, Homo sapiens
VEAVPSQTPDKEKAWKVKDEKSGKDDTQIIKRDEWMTVDFMSVKTVSSSSLKAEKETMRKIEQEKNQALEQSKLMERELNPYWKDGGTGLPPEDCSVSSITKVSVVEDGGLSWLRKSYLRMKEQAEKQSRNFEDIVAERYGSMEIFQSKLEDAEKAASTKEDYRRERWRKPTYSDKAQNCQESRESDLVKYGNSSRDRYATTDTAKNSNNEKFIGDEKDKRPGSLETCRRESNPRQNQEFSFGNLRAKFLRPSDDEELSFHSKGRKFEPLSSSSALVAQGSLCSGFRKPTKNSEERLTSWSRSDGRGDKKHSNQKPSETSTDEHQHVPEDPREKSQDEVLRDDPPKKEHLRDTKSTFAGSPERESIHILSVDEKNKLGAKIIKAEMMGNMELAEQLKVQLEKANKFKETITQIPKKSGVENEDQQEVILVRTDQSGRVWPVNTPGKSLESQGGRRKRQMVSTHEERERVRYFHDDDNLSLNDLVKNEKMGTAENQNKLFMRMASKFMGKTDGDYYTLDDMFVSKAAERERLGEEEENQRKKAIAEHRSLAAQMEKCLYCFDSSQFPKHLIVAIGVKVYLCLPNVRSLTEGHCLIVPLQHHRAATLLDEDIWEEIQIKSRTVIQ

SEQ ID NO: 15812 - protein, 283 aa, Homo sapiens
MAPLDLDKYVEIARLCKYLPENDLKRLCDYVCDLLLEESNVQPVSTPVTVCGDIHGQGDFVDRGYYSLETFTYLLALKAKWPDRITLLRGNHESRQITQVYGFYDECQTKYGNANAWRYCTKVFDMLTVAALIDEQILCVHGGLSPDIKTLDQIRTIERNQEIPHKGAFCDLVWSDPEDVDTWAISPRGAGWLFGAKVTNEFVHINNLKLICRAHQLVHEGYKFMFDEKLVTVWSAPNYCYRCGNIASIMVFKDVNTREPKLFRAVPDSERVIPPRTTTPYFL

SEQ ID NO: 15813 - protein, 172 aa, Homo sapiens
MGNGESQLSSVPAQKLGWFIQEYLKPYEECQTLIDEMVNTICDVLQEPEQFPLVQGVAIGGSYGRKTVLRGNSDGTLVLFFSDLKQFQDQKRSQRDILDKTGDKLKFCLFTKWLKNNFEIQKSLDGFTIQVFTKNQRISFEVLAAFNALSKHCWVSGEKSQRSGCQTALCNL

SEQ ID NO: 15814 - protein, 1064 aa, Homo sapiens
MPVQAAQWTEFLSCPICYNEFDENVHKPISLGCSHTVCKTCLNKLHRKACPFDQTAINTDIDVLPVNFALLQLVGAQVPDHQSIKLSNLGENKHYEVAKKCVEDLALYLKPLSGGKGVASLNQSALSRPMQRKLVTLVNCQLVEEEGRVRAMRAARSLGERTVTELILQHQNPQQLSANLWAAVRARGCQFLGPAMQEEALKLVLLALEDGSALSRKVLVLFVVQRLEPRFPQASKTSIGHVVQLLYRASCFKVTKRDEDSSLMQLKEEFRSYEALRREHDAQIVHIAMEAGLRISPEQWSSLLYGDLAHKSHMQSIIDKLQSPESFAKSVQELTIVLQRTGDPANLNRLRPHLELLANIDPNPDAVSPTWEQLENAMVAVKTVVHGLVDFIQNYSRKGHETPQPQPNSKYKTSMCRDLRQQGGCPRGTNCTFAHSQEELEKYRLRNKKINATVRTFPLLNKVGVNNTVTTTAGNVISVIGSTETTGKIVPSTNGISNAENSVSQLISRSTDSTLRALETVKKVGKVGANGQNAAGPSADSVTENKIGSPPKTPVSNVAATSAGPSNVGTELNSVPQKSSPFLTRVPVYPPHSENIQYFQDPRTQIPFEVPQYPQTGYYPPPPTVPAGVAPCVPRFVRSNNVPESSLPPASMPYADHYSTFSPRDRMNSSPYQPPPPQPYGPVPPVPSGMYAPVYDSRRIWRPPMYQRDDIIRSNSLPPMDVMHSSVYQTSLRERYNSLDGYYSVACQPPSEPRTTVPLPREPCGHLKTSCEEQIRRKPDQWAQYHTQKAPLVSSTLPVATQSPTPPSPLFSVDFRADFSESVSGTKFEEDHLSHYSPWSCGTIGSCINAIDSEPKDVIANSNAVLMDLDSGDVKRRVHLFETQRRTKEEDPIIPFSDGPIISKWGAISRSSRTGYHTTDPVQATASQGSATKPISVSDYVPYVNAVDSRWSSYGNEATSSAHYVERDRFIVTDLSGHRKHSSTGDLLSLELQQAKSNSLLLQREANALAMQQKWNSLDEGRHLTLNLLSKEIELRNGEVKKLNLSASCLMYLFSAAASWLYHY

SEQ ID NO: 15815 - protein, 285 aa, Homo sapiens
MKKQRGVGVLPALRMRGNLALVGVLISLAFLSLLPSGHPQPAGDDACSVQILVPGLKGDAGEKGDKGAPGRPGRVGPTGEKGDMGDKGQKGSVGRHGKIGPIGSKGEKGDSGDIGPPGPNGEPGLPCECSQLRKAIGEMDNQVSQLTSELKFIKNAVAGVRETESKIYLLVKEEKRYADAQLSCQGRGGTLSMPKDEAANGLMAAYLAQAGLARVFIGINDLEKEGAFVYSDHSPMRTFNKWRSGEPNNAYDEEDCVEMVASGGWNDVACHTTMYFMCEFDKENM

SEQ ID NO: 15816 - protein, 340 aa, Homo sapiens
MLSGSRAVPTPHRGSEELLKYMLHSPCVSLTMNGTYNTCGSSDLTWPPAIKLGFYAYLGVLLVLGLLLNSLALWVFCCRMQQWTETRIYMTNLAVADLCLLCTLPFVLHSLRDTSDTPLCQLSQGIYLTNRYMSISLVTAIAVDRYVAVRHPLRARGLRSPRQAAAVCAVLWVLVIGSLVARWLLGIQEGGFCFRSTRHNFNSMAFPLLGFYLPLAVVVFCSLKVVTALAQRPPTDVGQAEATRKAARMVWANLLVFVVCFLPLHVGLTVRLAVGWNACALLETIRRALYITSKLSDANCCLDAICYYYMAKEFQEASALAVAPSAKAHKSQDSLCVTLA

SEQ ID NO: 15817 - protein, 577 aa, Homo sapiens
MEPRVVKPPGQDLVVESLKSRYGLGGSCPDEYDFSNFYQSKYKRRTLTSPGDLDIYSGDKVGSSLKYSDESKHCRTPLGSLFKHVNVNCLDDELDSFHDLKKQETEEELIENDYRVSTSKITKQSFKEIEKVALPTNTTSSRPRTECCSDAGDSPLKPVSCPKSKASDKRSLLPHQISQIYDELFQIHLKLQCETAAQQKFAEELQKRERFLLEREQLLFRHENALSKIKGVEEEVLTRFQIIKEQHDAEVEHLTEVLKEKNKETKRLRSSFDALKELNDTLKKQLNEASEENRKIDIQAKRVQARLDNLQRKYEFMTIQRLKGSSHAVHEMKSLKQEKAPVSKTYKVPLNGQVYELLTVFMDWISDHHLSKVKHEESGMDGKKPQLKFASQRNDIQEKCVKLLPLMTEQLQWMPFVNIKLHEPFVKFIYWSLRQLDAGAQHSTMTSTLRRLGEDIFKGVVTKGIQDNSPQHSVENKPKTAAFFKSSNLPLRFLSTLIVLKTVTQADYLAQAFDSLCLDLKTEEGKTLFLEYQAVPVILSHLRISSKGLLSNVIDSLLQMTVESRVIRSSLNFLRFI

SEQ ID NO: 15818 - protein, 517 aa, Homo sapiens
MLLYPAGFSFASLKSDLSKAMSQDGASQFQEVIRQELELSVKKELEKILTTASSHEFEHTKKDLDGFRKLFHRFLQEKGPSVDWGKIQRPPEDSIQPYEKIKARGLPDNISSVLNKLVVVKLNGGLGTSMGCKGPKSLIGVRNENTFLDLTVQQIEHLNKTYNTDVPLVLMNSFNTDEDTKKILQKYNHCRVKIYTFNQSRYPRINKESLLPVAKDVSYSGENTEAWYPPGHGDIYASFYNSGLLDTFIGEGKEYIFVSNIDNLGATVDLYILNHLMNPPNGKRCEFVMEVTNKTRADVKGGTLTQYEGKLRLVEIAQVPKAHVDEFKSVSKFKIFNTNNLWISLAAVKRLQEQNAIDMEIIVNAKTLDGGLNVIQLETAVGAAIKSFENSLGINVPRSRFLPVKTTSDLLLVMSNLYSLNAGSLTMSEKREFPTVPLVKLGSSFTKVQDYLRRFESIPDMLELDHLTVSGDVTFGKNVSLKGTVIIIANHGDRIDIPPGAVLENKIVSGNLRILDH

SEQ ID NO: 15819 - protein, 125 aa, Homo sapiens
MPFHHVTAGLLYKGNYLNRSLSAGSDSEQLANISVEELDEIREAFRVLDRDGNGFISKQELGMAMRSLGYMPSEVELAIIMQRLDMDGDGQVDFDEFMTILGPKLVSSEGRDGFLGNTIDSIFWQ

SEQ ID NO: 15820 - protein, 803 aa, Homo sapiens
DAFVNSQEWTLSRSVPELKVGIVGNLASGKSALVHRYLTGTYVQEESPEGGRFKKEIVVDGQSYLLLIRDEGGPPEAQFAMWVDAVIFVFSLEDEISFQTVYHYYSRMANYRNTSEIPLVLVGTQDAISSANPRVIDDARARKLSNDLKRCTYYETCATYGLNVERVFQDVAQKIVATRKKQQLSIGPCKSLPNSPSHSSVCSAQVSAVHISQTSNGGGSLSDYSSSVPSTPSTSQKELRIDVPPTANTPTPVRKQSKRRSNLFTSRKGSDPDKEKKGLESRADSIGSGRAIPIKQGMLLKRSGKSLNKEWKKKYVTLCDNGVLTYHPSLHDYMQNVHGKEIDLLRTTVKVPGKRPPRATSACAPISSPKTNGLSKDMSSLHISPNSGNVTSASGSQMASGISLVSFNSRPDGMHQRSYSVSSADQWSEATVIANSAISSDTGLGDSVCSSPSISSTTSPKLDPPPSPHANRKKHRRKKSTSNFKADGLSGTAEEQEENFEFIIVSLTGQTWHFEATTYEERDAWVQAIESQILASLQSCESSKNKSRLTSQSEAMALQSIRNMRGNSHCVDCETQNPNWASLNLGALMCIECSGIHRNLGTHLSRVRSLDLDDWPVELIKVMSSIGNELANSVWEESSQGRTKPSVDSTREEKERWIRAKYEQKLFLAPLPCTELSLGQHLLRATADEDLRTAILLLAHGSRDEVNETCGEGDGRTALHLACRKGNVVLAQLLIWYGVDVTARDAHGNTALAYARQASSQECIDVLLQYGCPDERFVLMATPNLSRRNNNRNNSSGRVPTII

SEQ ID NO: 15821 - protein, 873 aa, Homo sapiens
MATFISVQLKKTSEVDLAKPLVKFIQQTYPSGGEEQAQYCRAAEELSKLRRAAVGRPLDKHEGALETLLRYYDQICSIEPKFPFSENQICLTFTWKDAFDKGSLFGGSVKLALASLGYEKSCVLFNCAALASQIAAEQNLDNDEGLKIAAKHYQFASGAFLHIKETVLSALSREPTVDISPDTVGTLSLIMLAQAQEVFFLKATRDKMKDAIIAKLANQAADYFGDAFKQCQYKDTLPKYFYFQEVFPVLAAKHCIMQANAEYHQSILAKQQKKFGEEIARLQHAAELIKTVASRYDEYVNVKDFSDKINRALAAAKKDNDFIYHDRVPDLKDLDPIGKATLVKSTPVNVPISQKFTDLFEKMVPVSVQQSLAAYNQRKADLVNRSIAQMREATTLANGVLASLNLPAAIEDVSGDTVPQSILTKSRSVIEQGGIQTVDQLIKELPELLQRNREILDESLRLLDEEEATDNDLRAKFKERWQRTPSNELYKPLRAEGTNFRTVLDKAVQADGQVKECYQSHRDTIVLLCKPEPELNAAIPSANPAKTMQGSEVVNVLKSLLSNLDEVKKEREGLENDLKSVNFDMTSKFLTALAQDGVINEEALSVTELDRVYGGLTTKVQESLKKQEGLLKNIQVSHQEFSKMKQSNNEANLREEVLKNLATAYDNFVELVANLKEGTKFYNELTEILVRFQNKCSDIVFARKTERDELLKDLQQSIAREPSAPSIPTPAYQSSPAGGHAPTPPTPAPRTMPPTKPQPPARPPPPVLPANRAPSATAPSPVGAGTAAPAPSQTPGSAPPPQAQGPPYPTYPGYPGYCQMPMPMGYNPYAYGQYNMPYPPVYHQSPGQAPYPGPQQPSYPFPQPPQQSYYPQQ

SEQ ID NO: 15822 - protein, 1404 aa, Homo sapiens
MSGARTASTPTPPQTGGGLEPQANGETPQVAVIVRPDDRSQGAIIADRPGLPGPEHSPSESQPSSPSPTPSPSPVLEPGSEPNLAVLSIPGDTMTTIQMSVEESTPISRETGEPYRLSPEPTPLAEPILEVEVTLSKPVPESEFSSSPLQAPTPLASHTVEIHEPNGMVPSEDLEPEVESSPELAPPPACPSESPVPIAPTAQPEELLNGAPSPPAVDLSPVSEPEEQAKEVTASMAPPTIPSATPATAPSATSPAQEEEMEEEEEEEEGEAGEAGEAESEKGGEELLPPESTPIPANLSQNLEAAAATQVAVSVPKRRRKIKELNKKEAVGDLLDAFKEANPAVPEVENQPPAGSNPGPESEGSGVPPRPEEADETWDSKEDKIHNAENIQPGEQKYEYKSDQWKPLNLEEKKRYDREFLLGFQFIFASMQKPEGLPHISDVVLDKANKTPLRPLDPTRLQGINCGPDFTPSFANLGRTTLSTRGPPRGGPGGELPRGPQAGLGPRRSQQGPRKEPRKIIATVLMTEDIKLNKAEKAWKPSSKRTAADKDRGEEDADGSKTQDLFRRVRSILNKLTPQMFQQLMKQVTQLAIDTEERLKGVIDLIFEKAISEPNFSVAYANMCRCLMALKVPTTEKPTVTVNFRKLLLNRCQKEFEKDKDDDEVFEKKQKEMDEAATAEERGRLKEELEEARDIARRRSLGNIKFIGELFKLKMLTEAIMHDCVVKLLKNHDEESLECLCRLLTTIGKDLDFEKAKPRMDQYFNQMEKIIKEKKTSSRIRFMLQDVLDLRGSNWVPRRGDQGPKTIDQIHKEAEMEEHREHIKVQQLMAKGSDKRRGGPPGPPISRGLPLVDDGGWNTVPISKGSRPIDTSRLTKITKPGSIDSNNQLFAPGGRLSWGKGSSGGSGAKPSDAASEAARPATSTLNRFSALQQAVPTESTDNRRVVQRSSLSRERGEKAGDRGDRLERSERGGDRGDRLDRARTPATKRSFSKEVEERSRERPSQPEGLRKAASLTEDRDRGRDAVKREAALPPVSPLKAALSEEELEKKSKAIIEEYLHLNDMKEAVQCVQELASPSLLFIFVRHGVESTLERSAIAREHMGQLLHQLLCAGHLSTAQYYQGLYEILELAEDMEIDIPHVWLYLAELVTPILQEGGVPMGELFREITKPLRPLGKAASLLLEILGLLCKSMGPKKVGTLWREAGLSWKEFLPEGQDIGAFVAEQKVEYTLGEESEAPGQRALPSEELNRQLEKLLKEGSSNQRVFDWIEANLSEQQIVSNTLVRALMTAVCYSAIIFETPLRVDVAVLKARAKLLQKYLCDEQKELQALYALQALVVTLEQPPNLLRMFFDALYDEDVVKEDAFYSWESSKDPAEQQGKGVALKSVTAFFKWLREAEEESDHN

SEQ ID NO: 15823 - protein, 1637 aa, Homo sapiens
MAGQGDCCVKVAVRIRPQLSKEKIEGCHICTSVTPGEPQVLLGKDKAFTYDFVFDLDTWQEQIYSTCVSKLIEGCFEGYNATVLAYGQTGAGKTYTMGTGFDMATSEEEQGIIPRAIAHLFGGIAERKRRAQEQGVAGPEFKVSAQFLELYNEEILDLFDSTRDPDTRHRRSNIKIHEDANGGIYTTGVTSRLIHSQEELIQCLKQGALSRTTASTQMNVQSSRSHAIFTIHLCQMRMCTQPDLVNEAVTGLPDGTPPSSEYETLTAKFHFVDLAGSERLKRTGATGERAKEGISINCGLLALGNVISALGDQSKKVVHVPYRDSKLTRLLQDSLGGNSQTIMIACVSPSDRDFMETLNTLKYANRARNIKNKVVVNQDKTSQQISALRAEIARLQMELMEYKAGKRVIGEDGAEGYSDLFRENAMLQKENGALRLRVKAMQEAIDAINNRVTQLMSQEANLLLAKAGDGNEAIGALIQNYIREIEELRTKLLESEAMNESLRRSLSRASARSPYSLGASPAAPAFGGSPASSMEDASEVIRRAKQDLERLKKKEVRQRRKSPEKEAFKKRAKLQQENSEETDENEAEEEEEERDESGCEEEEGREDEDEDSGSEESLVDSDSDPEEKEVNFQADLADLTCEIEIKQKLIDELENSQRRLQTLKHQYEEKLILLQNKIRDTQLERDRVLQNLSTMECYTEEKANKIKADYEKRLREMNRDLQKLQAAQKEHARLLKNQSRYERELKKLQAEVAEMKKAKVALMKQMREEQQRRRLVETKRNREIAQLKKEQRRQEFQIRALESQKRQQEMVLRRKTQEVSALRRLAKPMSERVAGRAGLKPPMLDSGAEVSASTTSSEAESGARSVSSIVRQWNRKINHFLGDHPAPTVNGTRPARKKFQKKGASQSFSKAARLKWQSLERRIIDIVMQRMTIVNLEADMERLIKKREELFLLQEALRRKRERLQAESPEEEKGLQELAEEIEVLAANIDYINDGITDCQATIVQLEETKEELDSTDTSVVISSCSLAEARLLLDNFLKASIDKGLQVAQKEAQIRLLEGRLRQTDMAGSSQNHLLLDALREKAEAHPELQALIYNVQQENGYASTDEEISEFSEGSFSQSFTMKGSTSHDDFKFKSEPKLSAQMKAVSAECLGPPLDISTKNITKSLASLVEIKEDGVGFSVRDPYYRDRVSRTVSLPTRGSTFPRQSRATETSPLTRRKSYDRGQPIRSTDVGFTPPSSPPTRPRNDRNVFSRLTSNQSQGSALDKSDDSDSSLSEVLRGIISPVGGAKGARTAPLQCVSMAEGHTKPILCLDATDELLFTGSKDRSCKMWNLVTGQEIAALKGHPNNVVSIKYCSHSGLVFSVSTSYIKVWDIRDSAKCIRTLTSSGQVISGDACAATSTRAITSAQGEHQINQIALSPSGTMLYAASGNAVRIWELSRFQPVGKLTGHIGPVMCLTVTQTASQHDLVVTGSKDHYVKMFELGECVTGTIGPTHNFEPPHYDGIECLAIQGDILFSGSRDNGIKKWDLDQQELIQQIPNAHKDWVCALAFIPGRPMLLSACRAGVIKVWNVDNFTPIGEIKGHDSPINAICTNAKHIFTASSDCRVKLWNYVPGLTPCLPRRVLAIKGRATTLP

SEQ ID NO: 15824 - protein, 340 aa, Homo sapiens
MAAIYGGVEGGGTRSEVLLVSEDGKILAEADGLSTNHWLIGTDKCVERINEMVNRAKRKAGVDPLVPLRSLGLSLSGGDQEDAGRILIEELRDRFPYLSESYLITTDAAGSIATATPDGGVVLISGTGSNCRLINPDGSESGCGGWGHMMGDEGSAYWIAHQAVKIVFDSIDNLEAAPHDIGYVKQAMFHYFQVPDRLGILTHLYRDFDKCRFAGFCRKIAEGAQQGDPLSRYIFRKAGEMLGRHIVAVLPEIDPGKIGLPILCVGSVWKSWELLKEGFLLALTQGREIQAQNFFSSFTLMKLRHSSALGGASLGARHIGHLLPMDYSANAIAFYSYTFS

SEQ ID NO: 15825 - protein, 573 aa, Homo sapiens
MSMPLHQISAIPSQDAISARVYRSKTKEKEREEQNEKTLGHFMSHSSNISKAGSPPSASAPAPVSSFSRTSITPSSQDICSSSAVFSECCHHSSVQSAVVSKAPHCQSSLTQGLTVTVICKDTLQASKRNSFGSEWAQALKPAKNTKARRTLKFSRSLNDVGEKAQDTSESFAYVERTCSEGKLILPQDTCLRTNRFHHKEKRTLNHKPLGNSKHSCVSCLSAGRSTASEVEAGKGGRPGLLLEEKADGEATSRSRQLLQYLFSLSHGLSASSLHRFHELESCAARLHTAKSSSGLAGSMGFCSDEMGDDDVFEDSTSAKLKSRVLRAPLCSTEKDSDLDCPSPFSEKLPPISPVSTSGDVCRICHCEGDDESPLITPCHCTGSLHFVHQACLQQWIKSSDTRCCELCKYEFIMETKLKPLRKWEKLQMTSSERRKIMCSVTFHVIAITCVVWSLYVLIDRTAEEIKQGQATGILEWPFWTKLVVVAIGFTGGLLFMYVQCKVYVQLWKRLKAYNRVIYVQNCPETSKKNIFEKSPLTEPNFENKHGYGICHSDTNSSCCTEPEDTGAEIIHV

SEQ ID NO: 15826 - protein, 996 aa, Homo sapiens
MWVQGHSSRASATESVSFSGIVQMDEDTHYDKVEDVVGSHIEDAVTFWAQSINRNKDIMKIGCSLSEVCPQASSVLGNLDPNKIYGGLFSEDQCWYRCKVLKIISVEKCLVRYIDYGNTEILNRSDIVEIPLELQFSSVAKKYKLWGLHIPSDQEVTQFDQGTTFLGSLIFEKEIKMRIKATSEDGTVIAQAEYGSVDIGEEVLKKGFAEKCRLASRTDICEEKKLDPGQLVLRNLKSPIPLWGHRSNQSTFSRPKGHLSEKMTLDLKDENDAGNLITFPKESLAVGDFNLGSNVSLEKIKQDQKLIEENEKLKTEKDALLESYKALELKVEQIAQELQQEKAAAVDLTNHLEYTLKTYIDTRMKNLAAKMEILKEMRHVDISVRFGKDLSDAIQVLDEGCFTTPASLNGLEIIWAEYSLAQENIKTCEYVSEGNILIAQRNEMQQKLYMSVEDFILEVDESSLNKRLKTLQDLSVSLEAVYGQAKEGANSDEILKKFYDWKCDKREEFTSVRSETDASLHRLVAWFQRTLKVFDLSVEGSLISEDAMDNIDEILEKTESSVCKELEIALVDQGDADKEIISNTYSQVLQKIHSEERLIATVQAKYKDSIEFKKQLIEYLNKSPSVDHLLSIKKTLKSLKALLRWKLVEKSNLEESDDPDGSQIEKIKEEITQLRNNVFQEIYHEREEYEMLTSLAQKWFPELPLLHPEIGLLKYMNSGGLLTMSLERDLLDAEPMKELSSKRPLVRSEVNGQIILLKGYSVDVDTEAKVIERAATYHRAWREAEGDSGLLPLIFLFLCKSDPMAYLMVPYYPRANLNAVQANMPLNSEETLKVMKGVAQGLHTLHKADIIHGSLHQNNVFALNREQGIVGDFDFTKSVSQRASVNMMVGDLSLMSPELKMGKPASPGSDLYAYGCLLLWDDKVKSLLCSLICYRSSMTAEQVLNAECFLMPKEQSVPNPEKDTEYTLYKKEEEIKTENLDKCMEKTRNGEANFDC

SEQ ID NO: 15827 - protein, 183 aa, Homo sapiens
MEPPGDWGPPPWRSTPKTDVLRLVLYLTFLGAPCYAPALPSCKEDEYPVGSECCPKCSPGYRVKEACGELTGTVCEPCPPGTYIAHLNGLSKCLQCQMCDPAMGLRASRNCSRTENAVCGCSPGHFCIVQDGDHCAACRAYATSSPGQRVQKGGTESQDTLCQNCPPGTFSPNGTLEECQHQT

SEQ ID NO: 15828 - protein, 581 aa, Homo sapiens
MNRKDSKRKSHQECTGKIGGRGRPRQVRRHKTCPSPREISKVMASMNLGLLSEGGCSEDELLEKCIQSFDSAGSLCHEDHMLNMVLAMHSWVLPSADLAARLLTSYQKATGDTQELRRLQICHLVRYWLMRHPEVMHQDPQLEEVIGRFWATVAREGNSAQRRLGDSSDLLSPGGPGPPLPMSSPGLGKKRKVSLLFDHLETGELAQHLTYLEFRSFQAITPQDLRSYVLQGSVRGCPALEGSVGLSNSVSRWVQVMVLSRPGPLQRAQVLDKFIHVAQRLHQLQNFNTLMAVTGGLCHSAISRLKDSHAHLSPDSTKLSLDLFYTEDEIYELSYAREPRCPKSLPPSPFNAPLVVEWAPGVTPKPDRVTLGRHVEQLVESVFKNYDPEGRGTISQEDFERLSGNFPFACHGLHPPPRQGRGSFSREELTGYLLRASAICSKLGLAFLHTFHEVTFRKPTFCDSCSGFLWGVTKQGYRCRECGLCCHKHCRDQVKVECKKRPGAKGDAGPPGAPVPSTPAPHASCGSEENHSYTLSLEPETGCQLRHAWTQTESPHPSWETDTVPCPVMDPPSTASSKLDS

SEQ ID NO: 15829 - protein, 1674 aa, Homo sapiens
RSKTDRDDKYFSYSKLERDTRYVSSRCRSERERRRSRSHSRSERGSRTNLSYSRSERSHYYDSDRRYHRSSPYRERTRYSRPYTDNRARESSDSEEEYKKTYSRRTSSHSSSYRDLRTSSYSKSDRDCKTETSYLEMERRGKYSSKLERESKRTSENEAIKRCCSPPNELGFRRGSSYSKHDSSASRYKSTLSKPIPKSDKFKNSFCCTELNEEIKQSHSFSLQTPCSKGSELRMINKNPEREKAGSPAPSNRLNDSPTLKKLDELPIFKSEFITHDSHDSIKELDSLSKVKNDQLRSFCPIELNINGSPGAESDLATFCTSKTDAVLMTSDDSVTGSELSPLVKACMLSSNGFQNISRCKEKDLDDTCMLHKKSESPFRETEPLVSPHQDKLMSMPVMTVDYSKTVVKEPVDTRVSCCKTKDSDIYCTLNDSNPSLCNSEAENIEPSVMKISSNSFMNVHLESKPVICDSRNLTDHSKFACEEYKQSIGSTSSASVNHFDDLYQPIGSSGIASSLQSLPPGIKVDSLTLLKCGENTSPVLDAVLKSKKSSEFLKHAGKETIVEVGSDLPDSGKGFASRENRRNNGLSGKCLQEAQEEGNSILPERRGRPEISLDERGEGGHVHTSDDSEVVFSSCDLNLTMEDSDGVTYALKCDSSGHAPEIVSTVHEDYSGSSESSNDESDSEDTDSDDSSIPRNRLQSVVVVPKNSTLPMEETSPCSSRSSQSYRHYSDHWEDERLESRRHLYEEKFESIASKACPQTDKFFLHKGTEKNPEISFTQSSRKQIDNRLPELSHPQSDGVDSTSHTDVKSDPLGHPNSEETVKAKIPSRQQEELPIYSSDFEDVPNKSWQQTTFQNRPDSRLGKTELSFSSSCEIPHVDGLHSSEELRNLGWDFSQEKPSTTYQQPDSSYGACGGHKYQQNAEQYGGTRDYWQGNGYWDPRSGRPPGTGVVYDRTQGQVPDSLTDDREEEENWDQQDGSHFSDQSDKFLLSLQKDKGSVQAPEISSNSIKDTLAVNEKKDFSKNLEKNDIKDRGPLKKRRQEIESDSESDGELQDRKKVRVEVEQGETSVPPGSALVGPSCVMDDFRDPQRWKECAKQGKMPCYFDLIEENVYLTERKKNKSHRDIKRMQCECTPLSKDERAQGEIACGEDCLNRLLMIECSSRCPNGDYCSNRRFQRKQHADVEVILTEKKGWGLRAAKDLPSNTFVLEYCGEVLDHKEFKARVKEYARNKNIHYYFMALKNDEIIDATQKGNCSRFMNHSCEPNCETQKWTVNGQLRVGFFTTKLVPSGSELTFDYQFQRYGKEAQKCFCGSANCRGYLGGENRVSIRAAGGKMKKERSRKKDSVDGELEALMENGEGLSDKNQVLSLSRLMVRIETLEQKLTCLELIQNTHSQSCLKSFLERHGLSLLWIWMAELGDGRESNQKLQEEIIKTLEHLPIPTKNMLEESKVLPIIQRWSQTKTAVPPLSEGDGYSSENTSRAHTPLNTPDPSTKLSTEADTDTPKKLMFRRLKIISENSMDSAISDATSELEGKDGKEDLDQLENVPVEEEEELQSQQLLPQQLPECKVDSETNIEASKLPTSEPEADAEIEPKESNGTKLEEPINEETPSQDEEEGVSDVESERSQEQPDKTVDISDLATKLLDSWKDLKEVYRIPKKSQTEKENTRNQPE

SEQ ID NO: 15830 - protein, 435 aa, Homo sapiens
MNDISQKAEILLSSSKPVPKTYVPKLGKGDVKDKFEAMQRAREERNQRRSRDEKQRRKEQYIREREWNRRKQEIKEMLASDDEEDVSSKVEKAYVPKLTGTVKGRFAEMEKQRQEEQRKRTEEERKRRIEQDMLEKRKIQRELAKRAEQEGDDSLLITVVPVKSYKTSGKMKKNFEDLEKEREEKERIKYEEDKRIRYEEQRPSLKEAKCLSLVMDDEIESEAKKESLSPGKLKLTFEELERQRQENRKKQAEEEARKRLEEEKRAFEEARRQMVNEDEENQDTAKIFKGYRPGKLKLSFEEMERQRREDEKRKAEEEARRRIEEEKKAFAEARRNMVVDDDSPEMYKTISQEFLTPGKLEINFEELLKQKMEEEKRRTEEERKHKLEMEKQEFEQLRQEMGEEEEENETFGLSREYEELIKLKRSGSIQAKNLK

SEQ ID NO: 15831 - protein, 392 aa, Homo sapiens
MDSSAAPTNASNCTDALAYSSCSPAPSPGSWVNLSHLDGNLSDPCGPNRTDLGGRDSLCPPTGSPSMITAITIMALYSIVCVVGLFGNFLVMYVIVRYTKMKTATNIYIFNLALADALATSTLPFQSVNYLMGTWPFGTILCKIVISIDYYNMFTSIFTLCTMSVDRYIAVCHPVKALDFRTPRNAKIINVCNWILSSAIGLPVMFMATTKYRQGSIDCTLTFSHPTWYWENLLKICVFIFAFIMPVLIITVCYGLMILRLKSVRMLSGSKEKDRNLRRITRMVLVVVAVFIVCWTPIHIYVIIKALVTIPETTFQTVSWHFCIALGYTNSCLNPVLYAFLDENFKRCFREFCIPTSSNIEQQNSTRIRQNTRDHPSTANTVDRTNHQVRSL

SEQ ID NO: 15832 - protein, 557 aa, Homo sapiens
MKKMSNIYESAANTLGIFNSPCLTKVELRVACKGISDRDALSKPDPCVILKMQSHGQWFEVDRTEVIRTCINPVYSKLFTVDFYFEEVQRLRFEVHDISSNHNGLKEADFLGGMECTLGQIVSQRKLSKSLLKHGNTAGKSSITVIAEELSGNDDYVELAFNARKLDDKDFFSKSDPFLEIFRMNDDATQQLVHRTEVVMNNLSPAWKSFKVSVNSLCSGDPDRRLKCIVWDWDSNGKHDFIGEFTSTFKEMRGAMEGKQVQWECINPKYKAKKKNYKNSGTVILNLCKIHKMHSFLDYIMGGCQIQFTVAIDFTASNGDPRNSCSLHYIHPYQPNEYLKALVAVGEICQDYDSDKMFPAFGFGARIPPEYTVSHDFAINFNEDNPECAGIQGVVEAYQSCLPKLQLYGPTNIAPIIQKVAKSASEETNTKEASQYFILLILTDGVITDMADTREAIVHASHLPMSVIIVGVGNADFSDMQMLDGDDGILRSPKGEPVLRDIVQFVPFRNFKHASPAALAKSVLAEVPNQVVDYYNGKGIKPKCSSEMYESSRTLAP

SEQ ID NO: 15833 - protein, 520 aa, Homo sapiens
MGQSGRSRHQKRARAQAQLRNLEAYAANPHSFVFTRGCTGRNIRQLSLDVRRVMEPLTASRLQVRKKNSLKDCVAVAGPLGVTHFLILSKTETNVYFKLMRLPGGPTLTFQVKKYSLVRDVVSSLRRHRMHEQQFAHPPLLVLNSFGPHGMHVKLMATMFQNLFPSINVHKVNLNTIKRCLLIDYNPDSQELDFRHYSIKVVPVGASRGMKKLLQEKFPNMSRLQDISELLATGAGLSESEAEPDGDHNITELPQAVAGRGNMRAQQSAVRLTEIGPRMTLQLIKVQEGVGEGKVMFHSFVSKTEEELQAILEAKEKKLRLKAQRQAQQAQNVQRKQEQREAHRKKSLEGMKKARVGGSDEEASGIPSRTASLELGEDDDEQEDDDIEYFCQAVGEAPSEDLFPEAKQKRLAKSPGRKRKRWEMDRGRGRLCDQKFPKTKDKSQGAQVPSPALPTSWQLPTTNSVGSRGTSCGPYWWLSSWWPWPAMAWPCTASASGSSAHGTPPWSSLSSWQSATCSAP

SEQ ID NO: 15834 - protein, 593 aa, Homo sapiens
MLWFLSYRKEWEELFVNNNYLATIRQKGINGQLRSSRFRSICWKLFLCVLPQDKSQWISRIEELRAWYSNIKEIHITNPRKVVGQQDLMINNPLSQDEGSLWNKFFQDKELRSMIEQDVKRTFPEMQFFQQENVRKILTDVLFCYARENEQLLYKQGMHELLAPIVFVLHCDHQAFLHASESAQPSEEMKTVLNPEYLEHDAYAVFSQLMETAEPWFSTFEHDGQKGKETLMTPIPFARPQDLGPTIAIVTKVNQIQDHLLKKHDIELYMHLNRLEIAPQIYGLRWVRLLFGREFPLQDLLVVWDALFADGLSLGLVDYIFVAMLLYIRDALISSNYQTCLGLLMHYPFIGDVHSLILKALFLRDPKRNPRPVTYQFHPNLDYYKARGADLMNKSRTNAKGAPLNINKVSNSLINFGRKLISPAMAPGSAGGPVPGGNSSSSSSVVIPTRTSAEAPSHHLQQQQQQQRLMKSESMPVQLNKGDVVTGSDAQVSVPVQTLTDLQGLSSKNISSSPSVESLPGGREFTGSPPSSATKKDSFFSNISRSRSHSKTMGRKESEEELEAQISFLQGQLNDLDAMCKYCAKVMDTHLGK

SEQ ID NO: 15835 - protein, 547 aa, Homo sapiens
MSTFGYRRGLSKYESIDEDELLASLSAEELKELERELEDIEPDRNLPVGLRQKSLTEKTPTGTFSREALMAYWEKESQKLLEKERLGECGKVAEDKEESEEELIFTESNSEVSEEVYTEEEEEESQEEEEEEDSDEEERTIETAKGINGTVNYDSVNSDNSKPKIFKSQIENINLTNGSNGRNTESPAAIHPCGNPTVIEDALDKIKSNDPDTTEVNLNNIENITTQTLTRFAEALKDNTVVKTFSLANTHADDSAAMAIAEMLKVNEHITNVNVESNFITGKGILAIMRALQHNTVLTELRFHNQRHIMGSQVEMEIVKLLKENTTLLRLGYHFELPGPRMSMTSILTRNMDKQRQKRLQEQKQQEGYDGGPNLRTKVWQRGTPSSSPYVSPRHSPWSSPKLPKKVQTVRSRPLSPVATPPPPPPPPPPPPPSSQRLPPPPPPPPPPLPEKKLITRNIAEVIKQQESAQRALQNGQKKKKGKKVKKQPNSILKEIKNSLRSVQEKKMEDSSRPSTPQRSAHENLMEAIRGSSIKQLKRVEVPEALR

SEQ ID NO: 15836 - protein, 184 aa, Homo sapiens
MNHLPEDMENALTGSQSSHASLRNIHSINPTQLMARIESYEGREKKGISDVRRTFCLFVTFDLLFVTLLWIIELNVNGGIENTLEKEVMQYDYYSSYFDIFLLAVFRFKVLILAYAVCRLRHWWAIALTTAVTSAFLLAKVILSKLFSQGAFGYVLPIISFILAWIETWFLDFKVLPQEAEEEN

SEQ ID NO: 15837 - protein, 328 aa, Homo sapiens
MRSPGGILLQALPRLLQHAALPGLAELPARWALPRGAGGDGPADRLPRGGGASAAAAAAAASGALLGAYLERHGPPEASELPEPGGALAGGPGSGGGGVVVGVAEVRNWRCCCLGSTCWCRSLVLVCVLAALCFASLALVRRYLHHLLLWVESLDSLLGVLLFVVGFIVVSFPCGWGYIVLNVAAGYLYGFVLGMGLMMVGVLIGTFIAHVVCKRLLTAWVAARIQSSEKLSAVIRVVEGGSGLKVVALARLTPIPFGLQNAVFSIIISIGLMFYVVHRAQVELNAAIVACEMELKSSLVKGNQPNTSGSSFYNKRTLTFSGGGINVV

SEQ ID NO: 15838 - protein, 116 aa, Homo sapiens
MSDKSDLKAELERKKQRLAQIREEKKRKEEERKKKEADMQQKKEPVQDDSDLDRKRRETEALLQSIGISPEPPLVPTPMSPSSKSVSTPSEAGSQDSGDLGPLTRDEALLYSPGWS

SEQ ID NO: 15839 - protein, 761 aa, Homo sapiens
MVILEAPHLLRRKEPETPGLSSRIGPSLCPGFCRKRSVSCCFQNLCNNPMEKIISQCRFFVSMNDLGGDFKGVGKGSLAADKVVEEIRRRGGKAVANYDSVEEGEKVVKTALDAFGRIDVVVNNAGILRDRSFARISDEDWDIIHRVHLRGSFQVTRAAWEHMKKQKYGRIIMTSSASGIYGNFGQANYSAAKLGLLGLANSLAIEGRKSNIHCNTIAPNAGSRMTQTVMPEDLVEALKPEYVAPLVLWLCHESCEENGGLFEVGAGWIGKLRWERTLGAIVRQKNHPMTPEAVKANWKKICDFENASKPQSIQESTGSIIEVLSKIDSEGGVSANHTSRATSTATSGFAGAIGQKLPPFSYAYTELEAIMYALGVGASIKDPKDLKFIYEGSSDFSCLPTFGVIIGQKSMMGGGLAEIPGLSINFAKVLHGEQYLELYKPLPRAGKLKCEAVVADVLDKGSGVVIIMDVYSYSEKELICHNQFSLFLVGSGGFGGKRTSDKVKVAVAIPNRPPDAVLTDTTSLNQAALYRLSGDWNPLHIDPNFASLAGFDKPILHGLCTFGFSARRVLQQFADNDVSRFKAIKARFAKPVYPGQTLQTEMWKEGNRIHFQTKVQETGDIVISNAYVDLAPTSGTSAKTPSEGGKLQSTFVFEEIGRRLKDIGPEVVKKVNAVFEWHITKGGNIGAKWTIDLKSGSGKVYQGPAKGAADTTIILSDEDFMEVVLGKLDPQKAFFSGRLKARGNIMLSQKLQMILKDYAKL

SEQ ID NO: 15840 - protein, 188 aa, Homo sapiens
MKQALVDDTEDVSLDFGNEEELAFRKAKIRDRVSKLLASVILLPWPPKVLGLKNVTGRLLVGLRWWNQIDEDGKSHWIFEARKVSPNSIAATEAEARIFWLGLIICPMIWIVFFFSTLFSLKLKWLALVVAGISLQAANLYGYILCKMGGNSDIGKVTASFLSQTVFQTACPGDFQKPGLEGLEIHQH

SEQ ID NO: 15841 - protein, 574 aa, Homo sapiens
MENQLAKSTEERTFQYQDSLPSLPVPSLEESLKKYLESVKPFANQEEYKKTEEIVQKFQSGIGEKLHQKLLERAKGKRNWLEEWWLNVAYLDVRIPSQLNVNFAGPAAHFEHYWPPKEGTQLERGSITLWHNLNYWQLLRKEKVPVHKVGNTPLDMNQFRMLFSTCKVPGITRDSIMNYFRTESEGRSPNHIVVLCRGRAFVFDVIHEGCLVTPPELLRQLTYIHKKCHSEPDGPGIAALTSEERTRWAKAREYLIGLDPENLALLEKIQSSLLVYSMEDSSPHVTPEDYSEIIAAILIGDPTVRWGDKSYNLISFSNGVFGCNCDHAPFDAMIMVNISYYVDEKIFQNEGRWKGSEKVRDIPLPEELIFIVDEKVLNDINQAKAQYLREASDLQIAAYAFTSFGKKLTKNKMLHPDTFIQLALQLAYYRLHGHPGCCYETAMTRHFYHGRTETMRSCTVEAVRWCQSMQDPSVNLRERQQKMLQAFAKHNKMMKDCSAGKGFDRHLLGLLLIAKEEGLPVPELFTDPLFSKSGGGGNFVLSTSLVGYLRVQGVVVPMVHNGYGFFYHIRDDRC

SEQ ID NO: 15842 - protein, 1170 aa, Homo sapiens
MSLLNPVLLPPKVKAYLSQGERFIKWDDETTVASPVILRVDPKGYYLYWTYQSKEMEFLDITSIRDTRFGKFAKMPKSQKLRDVFNMDFPDNSFLLKTLTVVSGPDMVDLTFHNFVSYKENVGKAWAEDVLALVKHPLTANASRSTFLDKILVKLKMQLNSEGKIPVKNFFQMFPADRKRVEAALSACHLPKGKNDAINPEDFPEPVYKSFLMSLCPRPEIDEIFTSYHAKAKPYMTKEHLTKFINQKQRDSRLNSLLFPPARPDQVQGLIDKYEPSGINAQRGQLSPEGMVWFLCGPENSVLAQDKLLLHHDMTQPLNHYFINSSHNTYLTAGQFSGLSSAEMYRQVLLSGCRCVELDCWKGKPPDEEPIITHGFTMTTDIFFKEAIEAIAESAFKTSPYPIILSFENHVDSPRQQAKMAEYCRTIFGDMLLTEPLEKFPLKPGVPLPSPEDLRGKILIKNKKNQFSGPTSSSKDTGGEAEGSSPPSAPAGEGTVWAGEEGTELEEEEVEEEEEEESGNLDEEEIKKMQSDEGTAGLEVTAYEEMSSLVNYIQPTKFVSFEFSAQKNRSYVISSFTELKAYDLLSKASVQFVDYNKRQMSRIYPKGTRMDSSNYMPQMFWNAGCQMVALNFQTMDLPMQQNMAVFEFNGQSGYLLKHEFMRRPDKQFNPFSVDRIDVVVATTLSITVISGQFLSERSVRTYVEVELFGLPGDPKRRYRTKLSPSTNSINPVWKEEPFVFEKILMPELASLRVAVMEEGNKFLGHRIIPINALNSGYHHLCLHSESNMPLTMPALFIFLEMKDYIPGAWADLTVALANPIKFFSAHDTKSVKLKEAMGGLPEKPFPLASPVASQVNGALAPTSNGSPEPRTASLEELRELKGVVKLQRRHEKELRELERRGARRWEELLQRGAAQLAELGPPGVGGVGACKLGPGKGSRKKRSLPREESAGAAPGEGPEGVDGRVRELKDRLELELLRQGEEQYECVLKRKEQHVAEQISKMMELAREKQAAELKALKETSENDTKEMKKKLETKRLERIQGMTKVTTDKMAQERLKREINNSHIQEVVQVIKQMTENLERHQEKLEEKQAACLEQIREMEKQFQKEALAEYEARMKGLEAEVKESVRACLRTCFPSEAKDKPERACECPPELCEQDPLIAKADAQESRL

SEQ ID NO: 15843 - protein, 507 aa, Homo sapiens
MGAAASRRRALRSEAMSSVAAKVRAARAFGEYLSQSHPENRNGADHLLADAYSGHDGSPEMQPAPQNKRRLSLVSNGCYEGSLSEEPSIRKPAGEGPQPRVYTISGEPALLPSPEAEAIELAVVKGRRQRHPHHHSQPLRASPGGSREDVSRPCQSWAGSRQGSKECPGCAQLAPGPTPRAFGLDQPPLPETSGRRKKLERMYSVDRVSDDIPIRTWFPKENLFSFQTATTTMQAISNFRKHLRMVGSRRVKAQTFAERRERSFSRSWSDPTPMKADTSHDSRDSSDLQSSHCTLDEAFEDLDWDTEKGLEAVACDTEGFVPPKVMLISSKVPKAEYIPTIIRRDDPSIIPILYDHEHATFEDILEEIERKLNVYHKGAKIWKMLIFCQGGPGHLYLLKNKVATFAKVEKEEDMIHFWKRLSRLMSKVNPEPNVIHIMGCYILGNPNGEKLFQNLRTLMTPYRVTFESPLELSAQGKQMIETYFDFRLYRLWKSRQHSKLLDFDDVL

SEQ ID NO: 15844 - protein, 648 aa, Homo sapiens
MGCAEGKAVAAAAPTELQTKGKNGDGRRRSAKDHHPGKTLPENPAGFTSTATADSRALLQAYIDGHSVVIFSRSTCTRCTEVKKLFKSLCVPYFVLELDQTEDGRALEGTLSELAAETDLPVVFVKQRKIGGHGPTLKAYQEGRLQKLLKMNGPEDLPKSYDYDLIIIGGGSGGLAAAKEAAQYGKKVMVLDFVTPTPLGTRWGLGGTCVNVGCIPKKLMHQAALLGQALQDSRNYGWKVEETVKHDWDRMIEAVQNHIGSLNWGYRVALREKKVVYENAYGQFIGPHRIKATNNKGKEKIYSAERFLIATGERPRYLGIPGDKEYCISSDDLFSLPYCPGKTLVVGASYVALECAGFLAGIGLDVTVMVRSILLRGFDQDMANKIGEHMEEHGIKFIRQFVPIKVEQIEAGTPGRLRVVAQSTNSEEIIEGEYNTVMLAIGRDACTRKIGLETVGVKINEKTGKIPVTDEEQTNVPYIYAIGDILEDKVELTPVAIQAGRLLAQRLYAGSTVKCDYENVPTTVFTPLEYGACGLSEEKAVEKFGEENIEVYHSYFWPLEWTIPSRDNNKCYAKIICNTKDNERVVGFHVLGPNAGEVTQGFAAALKCGLTKKQLDSTIGIHPVCAEVFTTLSVTKRSGASILQAGCG

SEQ ID NO: 15845 - protein, 1923 aa, Homo sapiens
MGNSYAGQLKSARFEEALHNSIEASLRCSSVVPRPIFSQLYLDPDQHPFSSADVKPKVEDLDKDLVNRYTQNGSLDFSNNLTVNEMEDDEDDEEMSDSNSPPIPYSQKPAPEGSCTTDGFCQAGKDLRLVSLCMEQIDIPAGFLLVGAKSPNLPEHILVCAVDKRFLPDDHGKNALLGFSGNCIGCGERGFRYFTEFSNHINLKLTTQPKKQKHLKYYLVRSSQGVLSKGPLICWKECRSRQSSASCHSIKPSSSVSSTVTPENGTTNGYKSGFTQTDAANGNSSHGGKGSASSSTPAHTGNYSLSPRPSYASGDQATMFISGPPKKRHRGWYPGSPLPQPGLVVPVPTVRPLSRTEPLLSAPVPQTPLTGILQPRPIPAGETVIVPENLLSNSGVRPVILIGYGTLPYFYGNVGDIVVSPLLVNCYKIPQLENKDLEKLGLTGSQFLSVENMILLTIQYLVRLGPDQVPLREEFEQIMLKAMQEFTLRERALQIGAQCVPVSPGQLPWLARLIASVSQDLVHVVVTQNSLAEGISETLRTLSEMRHYQRLPDYVVVICASKIRGNEFCVVVLGQHQSRALAESMLTTSEFLKEISYELITGKVSFLASHFKTTSLGDDLDKLLEKMQQRRGDSVVTPFDGDLNECVSPQEAAAMIPTQNLDLDNETFHIYQPQLTVARKLLSQVCAIADSGSQSLDLGHFSKVDFIIIVPRSEVLVQQTLQRIRQSGVLVDLGLEENGTAHQRAEKYVVRLDNEIQTKFEVFMRRVKQNPYTLFVLVHDNSHVELTSVISGSLSHSEPSHGLADRVINCREVLEAFNLLVLQVSSFPYTLQTQQSRISSSNEVHWIQLDTGEDVGCEEKLYFGLSEYSKSLQWGITSPLLRCDETFEKMVNTLLERYPRLHSMVVRCYLLIQQYSEALMALTTMASLRDHSTPETLSIMDDLISSPGKNKSGRGHMLIIRVPSVQLAMLAKERLQEVRDKLGLQYRFEIILGNPATELSVATHFVARLKSWRGNEPEEWIPRTYQDLDGLPCIVILTGKDPLGETFPRSLKYCDLRLIDSSYLTRTALEQEVGLACCYVSKEVIRGPTVALDLSGKEQERAAVSENDSDELLIDLERPQSNSSAVTGTSGSIMENGVSSSSTADKSQKQSLTPSFQSPATSLGLDEGVSASSAGAGAGETLKQECDSLGPQMASSTTSKPSSSSSGPRTLPWPGQPIRGCRGPQAALPPVVILSKAAYSLLGSQKSGKLPSSSSLLPHADVAWVSSLRPLLNKDMSSEEQSLYYRQWTLARQHHADYSNQLDPASGTRNFHPRRLLLTGPPQVGKTGSYLQFLRILFRMLIRLLEVDVYDEEEINTDHNESSEVSQSEGEPWPDIESFSKMPFDVSVHDPKYSLMSLVYTEKLAGVKQEVIKESKVEEPRKRETVSIMLTKYAAYNTFHHCEQCRQYMDFTSASQMSDSTLHAFTFSSSMLGEEVQLYFIIPKSKESHFVFSKQGKHLESMRLPLVSDKNLNAVKSPIFTPSSGRHEHGLLNLFHAMEGISHLHLLVVKEYEMPLYRKYWPNHIMLVLPGMFNNAGVGAARFLIKELSYHNLELERNRLEELGIKRQCVWPFIVMMDDSCVLWNIHSVQEPSSQPMEVGVSSKNVSLKTVLQHIEATPKIVHYAILGIQKWSSKLTSQSLKAPFSRCHVHDFILLNTDLTQNVQYDFNRYFCEDADFNLRTNSSGLLICRFNNFSLMKKHVQVGGQRDFIIKPKIMVSESLAPILPLQYICAPDSEHTLLAAPAQFLLEKFLQHASYKLFPKAIHNFRSPVLAIDCYLNIGPEVAICYISSRPHSSNVNCEGVFFSGLLLYLCDSFVGADLKKFKFLKGATLCVICQDRSSLRQTIVRLELEDEWQFRLRDEFQTANSSDDKPLYFLTGRHV

SEQ ID NO: 15846 - protein, 437 aa, Homo sapiens
MSGILKRKFEEVDGSSPCSSVRESDDEVSSSESADSGDSVNPSTSSHFTPSSILKREKRLRTKNVHFSCVTVYYFTRRQGFTSVPSQGGSTLGMSSRHNSVRQYTLGEFAREQERLHREMLREHLREEKLNSLKLKMTKNGTVESEEASTLTLDDISDDDIDLDNTEVDEYFFLQPLPTKKRRALLRASGVKKIDVEEKHELRAIRLSREDCGCDCRVFCDPDTCTCSLAGIKCQVDRMSFPCGCTKEGCSNTAGRIEFNPIRVRTHFLHTIMKLELEKNREQQIPTLNGCHSEISAHSSSMGPVAHSVEYSIADSFEIETEPQAAVLHLQSAEELDCQGEEEEEEEDGSSFCSGVTDSSTQSLAPSESDEEEEEEEEEEEEEDDDDDKGDGFVEGLGTHAEVVPLPSVLCYSDGTAVHESHAKNASFYANSSTLYY

SEQ ID NO: 15847 - protein, 464 aa, Homo sapiens
MRLSKTLVDMDMADYSAALDPAYTTLEFENVQVLTMGNDTSPSEGTNLNAPNSLGVSALCAICGDRATGKHYGASSCDGCKGFFRRSVRKNHMYSCRFSRQCVVDKDKRNQCRYCRLKKCFRAGMKKEAVQNERDRISTRRSSYEDSSLPSINALLQAEVLSRQITSPVSGINGDIRAKKIASIADVCESMKEQLLVLVEWAKYIPAFCELPLDDQVALLRAHAGEHLLLGATKRSMVFKDVLLLGNDYIVPRHCPELAEMSRVSIRILDELVLPFQELQIDDNEYAYLKAIIFFDPDAKGLSDPGKIKRLRSQVQVSLEDYINDRQYDSRGRFGELLLLLPTLQSITWQMIEQIQFIKLFGMAKIDNLLQEMLLGGSPSDAPHAHHPLHPHLMQEHMGTNVIVANTMPTHLSNGQMSTPETPQPSPPGGSGSEPYKLLPGAVATIVKPLSAIPQPTITKQEVI

SEQ ID NO: 15848 - protein, 781 aa, Homo sapiens
MEEELKCPVCGSLFREPIILPCSHNVCLPCARTIAVQTPDGEQHLPQPLLLSRGSGLQAGAAAAASLEHDAAAGPACGGAGGSAAGGLGGGAGGGGDHADKLSLYSETDSGYGSYTPSLKSPNGVRVLPMVPAPPGSSAAAARGAACSSLSSSSSSITCPQCHRSASLDHRGLRGFQRNRLLEAIVQRYQQGRGAVPGTSAAAAVAICQLCDRTPPEPAATLCEQCDVLYCSACQLKCHPSRGPFAKHRLVQPPPPPPPPAEAASGPTGTAQGAPSGGGGCKSPGGAGAGATGGSTARKFPTCPEHEMENYSMYCVSCRTPVCYLCLEEGRHAKHEVKPLGAMWKQHKAQLSQALNGVSDKAKEAKEFLVQLKNILQQIQENGLDYEACLVAQCDALVDALTRQKAKLLTKVTKEREHKLKMVWDQINHCTLKLRQSTGLMEYCLEVIKENDPSGFLQISDALIKRVQVSQEQWVKGALEPKVSAEFDLTLDSEPLLQAIHQLDFIQMKLPPVPLLQLEKCCTRNNSVTLAWRMPPFTHSPVDGYILELDDGAGGQFREVYVGKETLCTIDGLHFNSTYNARVKAFNSSGVGPYSKTVVLQTSDVAWFTFDPNSGHRDIILSNDNQTATCSSYDDRVVLGTAAFSKGVHYWELHVDRYDNHPDPAFGVARASVVKDMMLGKDDKAWAMYVDNNRSWFMHCNSHTNRTEGGVCKGATVGVLLDLNKHTLTFFINGQQQGPTAFSHVDGVFMPALSLNRNVQVTLHTGLEVPTNLGRPKLSGN

SEQ ID NO: 15849 - protein, 1818 aa, Homo sapiens
MSEILCQWLNKELKVSRTVSPKSFAKAFSSGYLLGEVLHKFELQDDFSEFLDSRVSSAKLNNFSRLEPTLNLLGVQFDQNVAHGIITEKPGVATKLLYQLYIALQKKKKSGLTGVEMQTMQRLTNLRLQNMKSDTFQERLRHMIPRQTDFNLMRITYRFQEKYKHVKEDLAHLHFEKLERFQKLKEEQRCFDIEKQYLNRRRQNEIMAKIQAAIIQIPKPASNRTLKALEAQKMMKKKKEAEDVADEIKKFEALIKKDLQAKESASKTSLDTAGQTTTDLLNTYSDDEYIKKIQKRLEEDAFAREQREKRRRKLLMDQLIAHEAQEEAYREEQLINRLMRQSQQERRIAVQLMHVRHEKEVLWQNRIFREKQHEERRLKDFQDALDREAALAKQAKIDFEEQFLKEKRFHDQIAVERAQARYEKHYSVCAEILDQIVDLSTKVADYRMLTNNLIPYKLMHDWKELFFNAKPIYEQASVKTLPANPSREQLTELEKRDLLDTNDYEEYKNMVGEWALPEEMVDNLPPSNNCILGHILHRLAEKSLPPRAESTTPELPSFAVKGCLLGKTLSGKTTILRSLQKDFPIQILSIDTLVQEAIQAFHDNEKVSEVLPIQKNDEEDALPVLQEEIKESQDPQHVFSAGPVSDEVLPETEGANADKTPKAEEVKSSDSFLKLTTRAQLGAKSEQLLKKGKSIPDVLLVDIIVNAINEIPVNQDCILDGFPMTLNQAQLLEEALTGCNRNLTEVERKKAQKSTLAIDPATSKEIPLPSPAFDFVILLDVSDTSSMSRMNDIIAEELSYKTAHEDISQRVAAENQDKDGDQNLRDQIQHRIIGFLDNWPLLEQWFSEPENILIKINAEIDKESLCEKVKEILTTEIAKKKNKVEKKLEEKEAEKKAAASLAELPLPTPPPAPPPEPEKEKEIHQSHVASKTPTAKGKPQSEAPHGKQESLQEGKGKKGETALKRKGSPKGKSSGGKVPVKKSPADSTDTSPVAIVPQPPKPGSEEWVYVNEPVPEEMPLFLVPYWELIENSYINTIKTVLRHLREDQHTVLAYLYEIRTSFQEFLKRPDHKQDFVAQWQADFNSLPDDLWDDEETKAELHQRVNDLRDRLWDICDARKEEAEQERLDIINESWLQDTLGMTMNHFFSLMQAELNRFQDTKRLLQDYYWGMESKIPVEDNKRFTRIPLVQLDSKDNSESQLRIPLVPRISISLETVTPKPKTKSVLKGKMDNSLENVESNFEADEKLVMDTWQQASLAVSHMVAAEIHQRLMEEEKENQPADPKEKSPQMGANKKVKKEPPKKKQEDKKPKGKSPPMAEATPVIVTTEEIAEIKRKNELRVKIKEEHLAALQFEEIATQFRLELIKTKALALLEDLVTKVVDVYKLMEKWLGERYLNEMASTEKLTDVARYHIETSTKIQNELYLSQEDFFINGNIKVFPDPPPSIRPPPVEKEEDGTLTIEQLDSLRDQFLDMAPKGIIGNKAFTDILIDLVTLNLGTNNFPSNWMHLTQPELQELTSLLTVNSEFVDWRKFLLVTSMPWPIPLEEELLETLQKFKAVDKEQLGTITFEQYMQAGLWFTGDEDIKIPENPLEPLPFNRQEHLIEFFFRLFADYEKDPPQLDYTQMLLYFACHPDTVEGVYRALSVAVGTHVFQQVKASIPSAEKTSSTDAGPAEEFPEPEENAAREERKLKDDTEKREQKDEEIPENANNEKMSMETLLKVFKGGSEAQDSNRFASHLKIENIYAEGFIKTFQDLGAKNLEPIEVAVLLKHPFIQDLISNYSDYKFPVHIIYVVEMIVCAKGWAPLPSGKQCARWRN

SEQ ID NO: 15850 - protein, 912 aa, Homo sapiens
MVKAPQSEERLARGGKENNSVLACGAQASWSIFGADAAEVPGTRGHSQQEAAMPHIPEDEEPPGEPQAAQSPAGQGPPAAGVSCSPTPTIVLTGDATSPEGETDKNLANRVHSPHKRLSHRHLKVSTASLTSVDPAGHIIDLVNDQLPDISISEEDKKKNLALLEEAKLVSERFLTRRGRKSRSSPGDSPSAVSPNLSPSASPTSSRSNSLTVPTPPGLDVCSGPPSPLPGAPPQKGDEADVSSPHPGEPNVPKGLADRKQNDQRKVSQGRLAPRPPPVEKSKEIAIEQKENFDPLQYPETTPKGLAPVTNSSGKMALNSPQPGPVESELGKQLLKTGWEGSPLPRSPTQDAAGVGPPASQGRGPAGEPMGPEAGSKAELPPTVSRPPLLRGLSWDSGPEEPGPRLQKVLAKLPLAEEEKRFAGKAGGKLAKAPGLKDFQIQVQPVRMQKLTKLREEHILMRNQNLVGLKLPDLSEAAEQEKGLPSELSPAIEEEESKSGLDVMPNISDVLLRKLRVHRSLPGSAPPLTEKEVENVFVQLSLAFRNDSYTLESRINQAERERNLTEENTEKELENFKASITSSASLWHHCEHRETYQKLLEDIAVLHRLAARLSSRAEVVGAVRQEKRMSKATEVMMQYVENLKRTYEKDHAELMEFKKLANQNSSRSCGPSEDGVPRTARSMSLTLGKNMPRRRVSVAVVPKFNALNLPGQTPSSSSIPSLPALSESPNGKGSLPVTSALPALLENGKTNGDPDCEASAPALTLSCLEELSQETKARMEEEAYSKGFQEGLKKTKELQDLKEEEEEQKSESPEEPEEVEETEEEEKGPRSSKLEELVHFLQVMYPKLCQHWQVIWMMAAVMLVLTVVLGLYNSYNSCAEQADGPLGRSTCSAAQRDSWWSSGLQHEQPTEQ

SEQ ID NO: 15851 - protein, 665 aa, Homo sapiens
MMKTFFSTGQGNTEAFHTGTLQRQASHHIGDFCFQKIEKDIHGFQFQWKEDETNDHAAPMTEIKELTGSTGQHDQRHAGNKHIKDQLGLSFHSHLPELHIFQPEGKIGNQVEKSINNASSVSTSQRICCRPKTHISNKYGNNSLHSSLLTQKRNVHMREKSFQCIESGKSFNCSSLLKKHQITHLEEKQCKCDVYGKVFNQKRYLACHRRSHIDEKPYKCNECGKIFGHNTSLFLHKALHTADKPYECEECDKVFSRKSHLETHKIIYTGGKPYKCKVCDKAFTCNSYLAKHTIIHTGEKPYKCNECGKVFNRLSTLARHRRLHTGEKPYECEECEKVFSRKSHLERHKRIHTGEKPYKCKVCDKAFAYNSYLAKHSIIHTGEKPYKCNECGKVFNQQSTLARHHRLHTAEKPYKCEECDKVFRCKSHLERHRRIHTGEKPYKCKVCDKAFRSDSCLTEHQRVHTGEKPYMCNECGKVFSTKANLACHHKLHTAEKPYKCEECEKVFSRKSHMERHRRIHTGEKPYKCKVCDKAFRRDSHLAQHQRVHTGEKPYKCNECGKTFRQTSSLIIHRRLHTGEKPYKCNECGKTFSQMSSLVYHHRLHSGEKPYKCNECGKVFNQQAHLAQHQRVHTGEKPYKCNECGKTFSQMSNLVYHHRLHSGEKP

SEQ ID NO: 15852 - protein, 539 aa, Homo sapiens
MKNLSIEDPVEAIHLGSLIAAQGYIFPISDHVLTMKDDGTFYRFQAPYFWPSNCWEPENTDYAIYLCKRTMQNKARLELADYEAENLARLQRAFARKWEFIFMQAEAQVKIDRKKDKTERKILDSQERAFWDVHRPVPGCVNTTEMDIRKCRRLKNPQKVKKSVYGVTEESQAQSPVHVLSQPIRKTTKEDIRKQITFLNAQIDRHCLKMSKVAESLIAYTEQYVEYDPLITPAEPSNPWISDDVALWDIEMSKEPSQQRVKRWGFSFDEILKDQVGRDQFLRFLESEFSSENLRFWLAVQDLKKQPLQDVAKRVEEIWQEFLAPGAPSAINLDSHSYEITSQNVKDGGRYTFEDAQEHIYKLMKSDSYARFLRSNAYQDLLLAKKKPESEQGRRTSLEKFTRSVNVQNTRPAGAWSIFMAALPMAVWLRTPRSCHGLSESRLLGLPSLHDGLREGQSLPQSCPGSSSTAAEGARERASNGRSLARRQHCQCHGQGEETQLCLWSRLESSKRSQRASSLRTSKAKKKRQTVKQGPKAWP

SEQ ID NO: 15853 - protein, 1090 aa, Homo sapiens
RFSTIQCQRYIHPEGSEKTWTSSTSSDTSQDRSPSEESMSSEPAPSVLPATGDSDTYLSIIHSLETKLYVTEEKLKDVTVRLESQQGQSREALLALHHQWAGTEAQLREQLRASLLQVGALASQLEQERQERARRVEGHVGELGDFQVKNSQALMCLENCREQLRSLPRASQEDEQDARAASLASVESALVSAIQALQHWPAPAHGGARAQLETGGTEENGKPASLQQCSQSELTEQEQVRLLSDQIALEASLISQIADSLKNTTSDVSRMLHEISWSGQPPMESAGAPVDTWARKVLVDGEFWSQVESLRKHLGTLGGEAVGASGDGQQSIPQGLAPILANATWVRAELSFATQSVRESFHRRLQSIQETLRGTQTALRQHKCLLREILGAYQTPDFERVMQQVLEALRLPAGHEDGVQLSWDLSPLGEVLGRDSDSSQEPFDVSDQSPGAFVAIQEELAQQLKEKASLLEEIAAALPSLPPVESLRDCQKLLQVSQSLSYNTCLGGLGQYSSLLVQDAIIQAQVCYASCRIRLEYEKELQLCKESWQTREPSCSEQAQAARALREEYEELLRKQKSEYLDVIAIVERENAELKAKAAQLDHQQQCLEDAESKHSMSMFTLRGRYEEEIRCVVEQLTRTESTLQAERSRVLSQLDASVRDRQDMERHHGEQIQTLEDRFQLKVRELQTIHEEELRTLQEHYSQSLRCLQDTLCLHQGPHPKALPAPAPNWQATQGEADSMTGLRERIQELEAQMDVMREELGHKDLEGDAATLREKYQRDLESLKATCERGFAAMEETHQKKIEDLQRQHQRELEKLREEKDRLLAEETAATISAIEAMKNAHREEMERELEKSQRSQISSVNSDVEALRRQYLEELQSVQRELEVLSEQYSQKCLENAHLAQALEAERQALRQCQRENQELNAHNQELNNRLAAEITRLRTLLTGDGGGEATGSPLAQGKDAYELEVLLRVKESEIQYLKQEISSLKDELQTALRDKKYASDKYKDIYTELSIAKAKADCDISRLKEQLKAATEALGEKSPDSATVSGYDIMKSKSNPDFLKKDRSCVTRQLRNIRSKSVIEQVSWDT

SEQ ID NO: 15854 - protein, 228 aa, Homo sapiens
MMCQSEARQGPELRAAKWLHFPQLALRRRLGQLSCMSRPALKLRSWPLTVLYYLLPFGALRPLSRVGWRPVSRVALYKSVPTRLLSRAWGRLNQVELPHWLRRPVYSLYIWTFGVNMKEAAVEDLHHYRNLSEFFRRKLKPQARPVCGLHSVISPSDGRILNFGQVKNCEVEQVKGVTYSLESFLGPRMCTEDLPFPPAASCDSFKNQLVTREGNELYHCVIYLAPGD

SEQ ID NO: 15855 - protein, 279 aa, Homo sapiens
MKFPFLPILVMKFIEKAQNMSKYVLIDTPGQIEVFTWSASGTIITEALASSFPTVVIYVMDTSRSTNPVTFMSNMLYACSILYKTKLPFIVVMNKTDIIDHSFAVEWMQDFEAFQDALNQETTYVSNLTRSMSLVLDEFYSSLRVVGVSAVLGTGLDELFVQVTSAAEEYEREYRPEYERLKKSLANAESQQQREQLERLRKDMGSVALDAGTAKDSLSPVLHPSDLILTRGTLDEEDEEADSDTDDIDHRVTEESHEEPAFQNFMQESMAQYWKRNNK

SEQ ID NO: 15856 - protein, 1705 aa, Homo sapiens
MELSCSEAPLYGQMMIYAKFDKNVYLPEDAEFYFTYDGSHQRHVMIAERIEDNVLQSSVPGHGLQETVTVSVCLCSEGYSPVTMGSGSVTYVDNMACRLARLLVTQANRLTACSHQTLLTPFALTAGALPALDEELVLALTHLELPLEWTVLGSSSLEVSSHRESLLHLAMRWGLAKLSQFFLCLPGGVQALALPNEEGATPLDLALREGHSKLVEDVTNFQGRWSPSFSRVQLSEEASLHYIHSSETLTLTLNHTAEHLLEADIKLFRKYFWDRAFLVKAFEPEARPEERTAMPSSGAETEEEIKNSVSSRSAAEKEDIKRVKSLVVQHNEHEDQHSLDLDRSFDILKKSKPPSTLLAAGRLSDMLNGGDEVYANCMVIDQVGDLDISYINIEGITATTSPESRGCTLWPQSSKHTLPTETSPSVYPLSENVEGTAHTEAQQSFMSPSSSCASNLNLSFGWHGFEKEQSHLKKRSSSLDALDADSEGEGHSEPSHICYTPGSQSSSRTGIPSGDELDSFETNTEPDFNISRAESLPLSSNLQSKESLLSGVRSRSYSCSSPKISLGKTRLVRELTVCSSSEEQRAYSLSEPPRENRIQEEEWDKYIIPAKSESEKYKVSRTFSFLMNRMTSPRNKSKTKSKDAKDKEKLNRHQFAPGTFSGVLQCLVCDKTLLGKESLQCSNCNANVHKGCKDAAPACTKKFQEKYNKNKPQTILGNSSFRDIPQPGLSLHPSSSVPVGLPTGRRETVGQVHPLSRSVPGTTLESFRRSATSLESESDHNSCRSRSHSDELLQSMGSSPSTESFIMEDVVDSSLWSDLSSDAQEFEAESWSLVVDPSFCNRQEKDVIKRQDVIFELMQTEMHHIQTLFIMSEIFRKGMKEELQLDHSTVDKIFPCLDELLEIHRHFFYSMKERRQESCAGSDRNFVIDRIGDILVQQFSEENASKMKKIYGEFCCHHKEAVNLFKELQQNKKFQNFIKLRNSNLLARRRGIPECILLVTQRITKYPVLVERILQYTKERTEEHKDLRKALCLIKDMIATVDLKVNEYEKNQKWLEILNKIENKTYTKLKNGHVFRKQALMSEERTLLYDGLVYWKTATGRFKDILALLLTDVLLFLQEKDQKYIFAAVDQKPSVISLQKLIAREVANEERGMFLISASSAGPEMYEIHTNSKEERNNWMRRIQQAVESCPEEKGGRTSESDEDKRKAEARVAKIQQCQEILTNQDQQICAYLEEKLHIYAELGELSGFEDVHLEPHLLIKPDPGEPPQAASLLAAALKEAESLQVAVKASQMGAVSQSCEDSCGDSVLADTLSSHDVPGSPTASLVTGGREGRGCSDVDPGIQGVVTDLAVSDAGEKVECRNFPGSSQSEIIQAIQNLTRLLYSLQAALTIQDSHIEIHRLVLQQQEGLSLGHSILRGGPLQDQKSRDADRQHEELANVHQLQHQLQQEQRRWLRRCEQQQRAQATRESWLQERERECQSQEELLLRSRGELDLQLQEYQHSLERLREGQRLVEREQARMRAQQSLLGHWKHGRQRSLPAVLLPGGPEVMELNRSESLCHENSFFINEALVQMSFNTFNKLNPSVIHQDATYPTTQSHSDLVRTSEHQVDLKVDPSQPSNVSHKLWTAAGSGHQILPFHESSKDSCKNDLDTSHTESPTPHDSNSHRPQLQAFITEAKLNLPTRTMTRQDGETGDGAKENIVYL

SEQ ID NO: 15857 - protein, 1117 aa, Homo sapiens
METFFRRHFRGKVPGPGEGQQRPSSVGLPTGKARRRSPAGQASSSLAQRRRSSAQLQGCLLSCGVRAQGSSRRRSSTVPPSCNPRFIVDKVLTPQPTTVGAQLLGAPLLLTGLVGMNEEEGVQEDVVAEASSAIQPGTKTPGPPPPRGAQPLLPLPRYLRRASSHLLPADAVYDHALWGLHGYYRRLSQRRPSGQHPGPGGRRASGTTAGTMLPTRVRPLSRRRQVALRRKAAGPQAWSALLAKAITKSGLQHLAPPPPTPGAPCSESERQIRSTVDWSESATYGEHIWFETNVSGDFCYVGEQYCVARMLKSVSRRKCAACKIVVHTPCIEQLEKINFRCKPSFRESGSRNVREPTFVRHHWVHRRRQDGKCRHCGKGFQQKFTFHSKEIVAISCSWCKQAYHSKVSCFMLQQIEEPCSLGVHAAVVIPPTWILRARRPQNTLKASKKKKRASFKRKSSKKGPEEGRWRPFIIRPTPSPLMKPLLVFVNPKSGGNQGAKIIQSFLWYLNPRQVFDLSQGGPKEALEMYRKVHNLRILACGGDGTVGWILSTLDQLRLKPPPPVAILPLGTGNDLARTLNWGGGYTDEPVSKILSHVEEGNVVQLDRWDLHAEPNPEAGPEDRDEGATDRLPLDVFNNYFSLGFDAHVTLEFHESREANPEKFNSRFRNKMFYAGTAFSDFLMGSSKDLAKHIRVVCDGMDLTPKIQDLKPQCVVFLNIPRYCAGTMPWGHPGEHHDFEPQRHDDGYLEVIGFTMTSLAALQVGGHGERLTQCREVVLTTSKAIPVQVDGEPCKLAASRIRIALRNQATMVQKAKRRSAAPLHSDQQPVPEQLRIQVSRVSMHDYEALHYDKEQLKEASVPLGTVVVPGDSDLELCRAHIERLQQEPDGAGAKSPTCQKLSPKWCFLDATTASRFYRIDRAQEHLNYVTEIAQDEIYILDPELLGASARPDLPTPTSPLPTSPCSPTPRSLQGDAAPPQGEELIEAAKRNDFCKLQELHRAGGDLMHRDEQSRTLLHHAVSTGSKDVVRYLLDHAPPEILDAVEENGETCLHQAAALGQRTICHYIVEAGASLMKTDQQGDTPRQRAEKAQDTELAAYLENRQHYQMIQREDQETAV

SEQ ID NO: 15858 - protein, 580 aa, Homo sapiens
MENFILYEEIGRGSKTVVYKGRRKGTINFVAILCTDKCKRPEITNWVRLTREIKHKNIVTFHEWYETSNHLWLVVELCTGGSLKTVIAQDENLPEDVVREFGIDLISGLHHLHKLGILFCDISPRKILLEGPGTLKFSNFCLAKVEGENLEEFFALVAAEEGGGDNGENVLKKSMKSRVKGSPVYTAPEVVRGADFSISSDLWSLGCLLYEMFSGKPPFFSESISELTEKILCEDPLPPIPKDSSRPKASSDFINLLDGLLQRDPQKRLTWTRLLQHSFWKKAFAGADQESSVEDLSLSRNTMECSGPQDSKELLQNSQSRQAKGHKSGQPLGHSFRLENPTEFRPKSTLEGQLNESMFLLSSRPTPRTSTAVEVSPGEDMTHCSPQKTSPLTKITSGHLSQQDLESQMRELIYTDSDLVVTPIIDNPKIMKQPPVKFDAKILHLPTYSVDKLLFLKDQDWNDFLQQVCSQIDSTEKSMGASRAKLNLLCYLCVVAGHQEVATRLLHSPLFQLLIQHLRIAPNWDIRAKVAHVIGLLASHTAELQENTPVVETTSSIGIGILNCLVQHSTPVPRQCLVYV

SEQ ID NO: 15859 - protein, 348 aa, Homo sapiens
MDLEKNYPTPRTSRTGHGGVNQLGGVFVNGRPLPDVVRQRIVELAHQGVRPCDISRQLRVSHGCVSKILGRYYETGSIKPGVIGGSKPKVATPKVVEKIAEYKRQNPTMFAWEIRDRLLAERVCDNDTVPSVSSINRIIRTKVQQPPNQPVPASSHSIGIQESPVPNGHSLPGRDFLRKQMRGDLFTQQQLEVLDRVFERQHYSDIFTTTEPIKPEQTTEYSAMASLAGGLDDMKANLASPTPADIGSSVPGPQSYPIVTGRDLASTTLPGYPPHVPPAGQGSYSAPTLTGMVPGSEFSGSPYSHPQYSSYNDSWRFPNPGLLGSPYYYSAAARGAAPPAAATAYDRH

SEQ ID NO: 15860 - protein, 234 aa, Homo sapiens
MDLIDILWRQDIDLGVSREVFDFSQRRKEYELEKQKKLEKERQEQLQKEQEKAFFAQLQLDEETGEFLPIQPAQHIQSETSGSANYSQVAHIPKSDALYFDDCMQLLAQTFPFVDDNEVSSATFQSLVPDIPGHIESPVFIATNQAQSPETSVAQVAPVDLDGMQQDIEQVWEELLSIPELQCLNIENDKLVETTMVPSPEAKLTEVDNYHFYSSIPSMEKEVGNCSPHFLNAF

SEQ ID NO: 15861 - protein, 569 aa, Homo sapiens
MDALEDYVWPRATSELILLPVTGLECVGDRLLAGRDGAYYQLFVRDGQLQPVLRQKSCRGMNWLAGLRIVPDGSMVILGFHANEFVVWNPRSHEKLHIVNCGGGHRSWAFSDTEAAMAFAYLKDGDVMLYRALGGCTRPHVILREGLHGREITCVKRVGTITLGPEYGVPSFMQPDDLEPGSEGPDLTDIVITCSEDTTVCVLALPTTTGSAHALTAVCNHISSVRAVAVWGIGTPGGPQDPQPGLTAHVVSAGGRAEMHCFSIMVTPDPSTPSRLACHVMHLSSHRLDEYWDRQRNRHRMVKVDPETRYMSLAVCELDQPGLGPLVAAACSDGAVRLFLLQDSGRILQLLAETFHHKRCVLKVHSFTHEAPNQRRRLLLCSAATDGSLAFWDLTTMLDHDSTVLEPPVDPGLPYRLGTPSLTLQAHSCGINSLHTLPTREGHHLVASGSEDGSLHVFVLAVEMLQLEEAVGEAGLVPQLRVLEEYSVPCAHAAHVTGLKILSPSIMVSASIDQRLTFWRLGHGEPTFMNSTVFHVPDVADMDCWPVSPEFGHRCALGGQGLEVYNWYD

SEQ ID NO: 15862 - protein, 393 aa, Homo sapiens
MQGLLTSGRKPSGGGRCTELPDHCYRMNSSPAGTPSPQPSRANGNINLGPSANPNAQPTDFDFLKVIGKGNYGKVLLAKRKSDGAFYAVKVLQKKSILKKKEQSHIMAERSVLLKNVRHPFLVGLRYSFQTPEKLYFVLDYVNGGELFFHLQRERRFLEPRARFYAAEVASAIGYLHSLNIIYRDLKPENILLDCQGHVVLTDFGLCKEGVEPEDTTSTFCGTPEYLAPEVLRKEPYDRAVDWWCLGAVLYEMLHGLPPFYSQDVSQMYENILHQPLQIPGGRTVAACDLLQSLLHKDQRQRLGSKADFLEIKNHVFFSPINWDDLYHKRLTPPFNPNVTGPADLKHFDPEFTQEAVSKSIGCTPDTVASSSGASSAFLGFSYAPEDDDILDC

SEQ ID NO: 15863 - protein, 540 aa, Homo sapiens
ALLLPRELGPSMAPEDHYRRLVSALSEASTFEDPQRLYHLGLPSHGEDPPWHDPPHHLPSHDLLRVRQEVAAAALRGPSGLEAHLPSSTAGQRRKQGLAQHREGAAPAAAPSFSERELPQPPPLLSPQNAPHVALGPHLRPPFLGVPSALCQTPGYGFLPPAQAEMFAWQQELLRKQNLARLELPADLLRQKELESARPQLLAPETALRPNDGAEELQRRGALLVLNHGAAPLLALPPQGPPGSGPPTPSRDSARRAPRKGGPGPASARPSESKEMTGARLWAQDGSEDEPPKDSDGEDPETAAVGCRGPTPGQAPAGGAGAEGKGLFPGSTLPLGFPYAVSPYFHTGAVGGLSMDGEEAPAPEDVTKWTVDDVCSFVGGLSGCGEYTRVFREQGIDGETLPLLTEEHLLTNMGLKLGPALKIRAQVRRWGVRSGSPDHSWAESSGWVCDSPHQAISLQVARRLGRVFYVASFPVALPLQPPTLRAPERELGTGEQPLSPTTATSPYGGGHALAGQTSPKQENGTLALLPGAPDPSQPLC

SEQ ID NO: 15864 - protein, 241 aa, Homo sapiens
GSRQSSSENELKWSDHQRAWSSTDSDSSNRNLKPAMTKTASFGGITVLTRGDSTSSTRSTGKLSKAGSESSSSAGSSGSLSRTHPPLQSTPLVSGVAAGSPGCVPYPENGIGGQVAPSSTSYILLPLEAATGIPPGSILLNPHTALCESRWNSCNIQPTHQSAAPAKRHGGAVPTAATTAAALPAAPTAGPATAATDGRPSGHSVCPGAAGFLPVSAISSSLFSSPAPPTCVSNAALSHER

SEQ ID NO: 15865 - protein, 407 aa, Homo sapiens
DKVRPWVVAQYPESCKKAASLVEGLADVLEEPGMLLGSPAGSSSILSDGVYERHMDPLLLPGELASPSQALGAGEIPAPSETPWLSPDPLFLEQRRVREAKTEEDGPANTEQKLKSFPEDPQHLGEWGHLDPAEENLKSYRKLLLWGYQLSQPDAASRLDTEELRLVERDPQGSSLPGGRRQESAGCACEEAAPAGVLPELPTEAPPGDALADPPSGTTEEEEEQPGKAPDPQDPQDAESDSATGSQRQSVIQQPAPDRGTAKLGTKRPHPEDGDGQSLEGVSSSGDSAGLEAGQGPGADEPGLSRGKPYACGECGEAFAWLSHLMEHHSSHGGRKRYACQGCWKTFHFSLALAEHQKTHEKEKSYALGGARGPQPSTREAQAGARAGGPPESVEGEAPPAPPEAQR

SEQ ID NO: 15866 - protein, 326 aa, Homo sapiens
MKHFLRMLIQVCLYFYCKFLWRCLKFVMRKLTGRCELQRICYNTKPGASRTMKIETSLRDSKSKLLQTSVSVHPDAIEKTIEDIMELKKINPDVNPQLGISLQACLLQIVGYRNLIADVEKLRREAYDSDNPQHEEMLLKLWKFLKPNTPLESRISKQWCEIGFQGDDPKTDFRGMGLLGLYNLQYFAERDATAAQQVLSDSLHPKCSKFSKAEWEKKRMDKAIGYSFAIVGINITDLAYNLLVSGALKTHFYNIAPEAPTLSHFQQTFCYLMHEFHKFWIEEDPMDIMEFNRVREKFRKRIIKQLQNPDMALCPHFAASEGLINM

SEQ ID NO: 15867 - protein, 3538 aa, Homo sapiens
MKGIRKGESRAKESKPWEPGKRRCAKCGRLDFILMKKMGIKSGFTFWNLVFLLTVSCVKGFIYTCGGTLKGLNGTIESPGFPYGYPNGANCTWVIIAEERNRIQIVFQSFALEEEYDYLSLYDGHPHPTNFRTRLTGFHLPPPVTSTKSVFSLRLTSDFAVSAHGFKVYYEELQSSSCGNPGVPPKGVLYGTRFDVGDKIRYSCVTGYILDGHPQLTCIANSVNTASWDFPVPICRAEDACGGTMRGSSGIISSPSFPNEYHNNADCTWTIVAEPGDTISLIFTDFQMEEKYDYLEIEGSEPPTIWLSGMNIPPPIISNKNWLRLHFVTDSNHRYRGFSAPYQVKKAIDFKSRGFKLFPGKDNSNKFSILNEGGIKTASNLCPDPGEPENGKRIGSDFSLGSTVQFSCDEDYVLQGAKSITCQRIAEVFAAWSDHRPVCKVKTCGSNLQGPSGTFTSPNFPFQYDSNAQCVWVITAVNTNKVIQINFEEFDLEIGYDTLTIGDGGEVGDPRTVLQVLTGSFVPDLIVSMSSQMWLHLQTDESVGSVGFKVNYKEIEKESCGDPGTPLYGIREGDGFSNRDVLRFECQFGFELIGEKSIVCQENNQWSANIPICIFPCLSNFTAPMGTVLSPDYPEGYGNNLNCIWTIISDPGSRIHLSFNDFDLESQFDFLAVKDGDSPESPILGTFTGAEVPSHLTSNSHILRLEFQADHSMSGRGFNITYNTFGHNECPDPGIPINARRFGDNFQLGSSISVICEEGFIKTQGTETITCILMDGKVMWSGLIPKCGAPCGGHFSAPSGVILSPGWPGYYKDSLNCEWVIEAEPGHSIKITFERFQTELNYDVLEVHDGPNLLSPLLGSYNGTQVPQFLFSSSNFIYLLFTTDNSRSNNGFKIHYESVTVNTYSCLDPGIPVHGRRYGHDFSIGSTVSFSCDSGYRLSHEEPLLCEKNHWWSHPLPTCDALCGGDVRGPSGTILSPGYPEFYPNSLNCTWTVDVTHGKGVQFNFHTFHLEDHHDYLLITENGSFTQPLARLTGSDLPPTINAGLYGNFRAQLRFISDFSISYEGFNITFSEYNLEPCEDPGIPQYGSRIGFNFGIGDTLTFSCSSGYRLEGTSEIICLGGGRRVWSAPLPRCVAECGASATNNEGILLSPNYPLNYENNHECIYSIQVQAGKGINISARTFHLAQGDVLKIYDGKDKTTHLLGAFTGASMRGLTLSSTSNQLWLEFNSDTEGTDEGFQLVYTSFELSHCEDPGIPQFGYKISDQGHFAGSTIIYGCNPGYTLHGSSLLKCMTGERRAWDYPLPSCIAECGGRFKGESSGRILSPGYPFPYDNNLRCMWMIEVDPGNIVSLQFLAFDTEASHDILRVWDGPPENDMLLKEISGSLIPEGIHSTLNIVTIQFDTDFYISKSGFAIQFSSSVATACRDPGVPMNGTRNGDGREPGDTVVFQCDPGYELQGEERITCIQVENRYFWQPSPPVCIAPCGGNLTGSSGFILSPNFPHPYPHSRDCDWTITVNADYVISLAFISFSIEPNYDFLYIYDGPDSNSPLIGSFQDSKLPERIESSSNTMHLAFRSDGSVSYTGFHLEYKAKLRESCFDPGNIMNGTRLGMDYKLGSTVTYYCDAGYVLQGYSTLTCIMGDDGRPGWNRALPSCHAPCGSRSTGSEGTVLSPNYPKNYSVGHNCVYSIAVPKEFVVFGQFVFFQTSLHDVVEVYDGPTQQSSLLSSLSGSHSGESLPLSSGNQITIRFTSVGPITAKGFHFVYQAVPRTSSTQCSSVPEPRFGRRIGNEFAVGSSVLFDCNPGYILHGSIAIRCETVPNSLAQWNDSLPTCIVPCGGILTKRKGTILSPGYPEPYDNNLNCVWKITVPEGAGIQVQVVSFATEHNWDSLDFYDGGDNNAPRLGSYSGTTIPHLLNSTSNNLYLNFQSDISVSAAGFHLEYTAIGLDSCPEPQTPSSGIKIGDRYMVGDVVSFQCDQGYSLQGHSHITCMPGPVRRWNYPIPICLAQCGGAMSDFSGVILSPGFPGNYPSSLDCTWTINLPIGFGVHLQFVNFSTETIHDYLEVRSGSSETSTVIGRLSGPQIPSSLFSTTHETSLYFHSDYSQNKQGFHIVYQAYQLQSCPDPRPFRNGFVIGNDFTVGQTISFECFPGYTLIGNSALTCLHGVSRNWNHPLPRCEALCGGNITAMNGTIYSPGYPDEYPNFQDCFWLVRVPPGNGIYINFTVLQTEPIYDFITVWDGPDQNSPQIGQFSGNTALESVYSTSNQILIKFHSDFTTSGFFVLSYHAYQLRVCQPPPPVPNAEILTEDDEFEIGDIIRYQCLPGFTLVGNAILTCRLGERLQMDGAPPVCQVLCPANELRLDSTGVILSPGYPDSYPNLQMCAWSISVEKGYNITMFVEFFQTEKEFDVLQVYDGPNIQSPVLISLSGDYSSAFNITSNGHEVFLQWSADHGNNKKGFRIRYIAFYCSTPESPPHGYIISQTGGQLNSVVRWACDRGFRLVGKSSAVCRKSSYGYHAWDAPVPACQAISCGIPKAPTNGGILTTDYLVGTRVTYFCNDGYRLSSKELTTAVCQSDGTWSNHNKTPRCVVISCGELPTPPNGNKIGTQTSYGSTAIFTCDLGFMLVGSAVRECLSSGLWSESETRCLAGHCGIPELIVNGQVIGENYGYRDTVVYQCNPGFRLIGSSVRICQQDHNWSGQLPSCVPVSCGHPGSPIYGRTSGNGFNFNDVVTFSCNIGYLMQGPTKAQCQANRQWSHPPPMCKVVNCSDPGIPANSKRESKIEHGNFTYGTVVFYDCNPGYFLFGSSVLICQPNGQWDKPLPECIMIDCGHPGVPPNAVLSGEKYTFGSTVHYSCTGKRSLLGQSSRTCQLNGHWSGSQPHCSGDATGTCGDPGTPGHGSRQESNFRTKSTVRYACDTGYILHGSEERTCLANGSWTGRQPECKAVQCGNPGTTANGKVFRIDGTTFSSSVIYSCMEGYILSGPSVRQCTANGTWSGTLPNCTIISCGDPGIPANGLRYGDDYVVGQNVSYMCQPGYTMELNGSRIRTCTINGTWSGVMPTCRAVTCPTPPQISNGRLEGTNFDWGFSISYICSPGYELSFPAVLTCVGNGTWSGEVPQCLPKFCGDPGIPAQGKREGKSFIYQSEVSFSCNFPFILVGSSTRICQADGTWSGSSPHCIEPTQTSCENPGVPRHGSQNNTFGFQVGSVVQFHCKKGHLLQGSTTRTCLPDLTWSGIQPECIPHSCKQPETPAHANVVGMDLPSHGYTLIYTCQPGFFLAGGTEHRVCRSDNTWTGKVPICEAGSKILVKDPRPALGTPSPKLSVPDDVFAQNYIWKGSYNFKGRKQPMTLTVTSFNASTGRVNATLSNSNMELLLSGVYKSQEARLMLRIYLIKVPAHASVKKMKEENWAMDGFVSAEPDGATYVFQGFIQGKDYGQFGLQRLGLNMSEGSNSSNQPHGTNSSSVAIAILVPFFALIFAGFGFYLYKQRTAPKTQYTGCSVHENNNGQAAFENPMYDTNAKSVEGKAVRFDPNLNTVCTMV

SEQ ID NO: 15868 - protein, 181 aa, Homo sapiens
MHTGGETSACKPSSVRLAPSFSFHAAGLQMAGQMPHSHQYSDRRQPNISDQQVSALSYSDQIQQPLTNQVMPDIVMLQRRMPQTFRDPATAPLRKLSVDLIKTYKHINEVYYAKKKRRHQQGQGDDSSHKKERKVYNDGYDDDNYDYIVKNGEKWMDRYEIDSLIGKGSFGQVVKAYDRVE

SEQ ID NO: 15869 - protein, 254 aa, Homo sapiens
MSDDIDWLRSHRGVCKVDLYNPEGQQDQDRKVICFVDVSTLNVEDKDYKDAASSSSEGNLNLGSLEEKEIIVIKDTEKKDQSKTEGSVCLFKQAPSDPVSVLNWLLSDLQKYALGFQHALSPSTSTCKHKVGDTEGEYHRASSENCYSVYADQVNIDYLMNRPQNLRLEMTAAKNTNNNQSPSAPPAKPPSTQRAVISPDGECSIDDLSFYVNRLSSLVIQMAHKEIKEKLEGKSKCLHHSICPSPGNKERISP

SEQ ID NO: 15870 - protein, 811 aa, Homo sapiens
MESQGVPPGPYRATKLWNEVTTSFRAGMPLRKHRQHFKKYGNCFTAGEAVDWLYDLLRNNSNFGPEVTRQQTIQLLRKFLKNHVIEDIKGRWGSENVDDNNQLFRFPATSPLKTLPRRYPELRKNNIENFSKDKDSIFKLRNLSRRTPKRHGLHLSQENGEKIKHEIINEDQENAIDNRELSQEDVEEVWRYVILIYLQTILGVPSLEEVINPKQVIPQYIMYNMANTSKRGVVILQNKSDDLPHWVLSAMKCLANWPRSNDMNNPTYVGFERDVFRTIADYFLDLPEPLLTFEYYELFVNILVVCGYITVSDRSSGIHKIQDDPQSSKFLHLNNLNSFKSTECLLLSLLHREKNKEESDSTERLQISNPGFQERCAKKMQLVNLRNRRVSANDIMGGSCHNLIGLSNMHDLSSNSKPRCCSLEGIVDVPGNSSKEASSVFHQSFPNIEGQNNKLFLESKPKQEFLLNLHSEENIQKPFSAGFKRTSTLTVQDQEELCNGKCKSKQLCRSQSLLLRSSTRRNSYINTPVAEIIMKPNVGQGSTSVQTAMESELGESSATINKRLCKSTIELSENSLLPASSMLTGTQSLLQPHLERVAIDALQLCCLLLPPPNRRKLQLLMRMISRMSQNVDMPKLHDAMGTRSLMIHTFSRCVLCCAEEVDLDELLAGRLVSFLMDHHQEILQVPSYLQTAVEKHLDYLKKGHIENPGDGLFAPLPTYSYCKQISAQEFDEQKVSTSQAAIAELLENIIKNRSLPLKEKRKKLKQFQKEYPLIYQKRFPTTESEAALFGDKPTIKQPMLILRKPKFRSLR

SEQ ID NO: 15871 - protein, 540 aa, Homo sapiens
MARHLREYQDLLNVKMALDIEIAAYRKLLEGEETRFSTFAGSITGPLYTHRPPITISSKIQKPKVEAPKLKVQHKFVEEIIEETKVEDEKSEMEEALTAITEELAVSMKEEKKEAAEEKEEEPEAEEEEVAAKKSPVKATAPEVKEEEGEKEEEEGQEEEEEEDEGAKSDQAEEGGSEKEGSSEKEEGEQEEGETEAEAEGEEAEAKEEKKVEEKSEEVATKEELVADAKVEKPEKAKSPVPKSPVEEKGKSPVPKSPVEEKGKSPVPKSPVEEKGKSPVPKSPVEEKGKSPVSKSPVEEKAKSPVPKSPVEEAKSKAEVGKGEQKEEEEKEVKEAPKEEKVEKKEEKPKDVPEKKKAESPVKEEAVAEVVTITKSVKVHLEKETKEEGKPLQQEKEKEKAGGEGGSEEEGSDKGAKGSRKEDIAVNGEVEGKEEVEQETKEKGSGREEEKGVVTNGLDLSPADEKKGGDKSEEKVVVTKTVEKITSEGGDGATKYITKSVTVTQKVEEHEETFEEKLVSTKKVEKVTSHAIVKEVTQSD

SEQ ID NO: 15872 - protein, 694 aa, Homo sapiens
MKGDTRHLNGEEDAGGREDSILVNGACSDQSSDSPPILEAIRTPEIRGRRSSSRLSKREVSSLLSYTQSLRRRATASAGTPWPSPPSSYLTIDLTDDTEDTHGTPQSSSTPYARLAQDSQQGGMESPQVEADSGDGDSSEYQDGKEFGIGDLVWGKIKGFSWWPAMVVSWKATSKRQAMSGMRWVQWFGDGKFSEVSADKLVALGLFSQHFNLATFNKLVSYRKAMYHALEKARVRAGKTFPSSPGDSLEDQLKPMLEWAHGGFKPTGIEGLKPNNTQPENKTRRRTADDSATSDYCPAPKRLKTNCYNNGKDRGDEDQSREQMASDVANNKSSLEDGCLSCGRKNPVSFHPLFEGGLCQTCRDRFLELFYMYDDDGYQSYCTVCCEGRELLLCSNTSCCRCFCVECLEVLVGTGTAAEAKLQEPWSCYMCLPQRCHGVLRRRKDWNVRLQAFFTSDTGLEYEAPKLYPAIPAARRRPIRVLSLFDGIATGYLVLKELGIKVGKYVASEVCEESIAVGTVKHEGNIKYVNDVRNITKKNIEEWGPFDLVIGGSPCNDLSNVNPARKGLYEGTGRLFFEFYHLLNYSRPKEGDDRPFFWMFENVVAMKVGDKRDISRFLECNPVMIDAIKVSAAHRARYFWGNLPGMNRIFGFPVHYTDVSNMGRGARQKLLGRSWSVPVIRHLFAPLKDYFACE

SEQ ID NO: 15873 - protein, 555 aa, Homo sapiens
MPNKNKKEKESPKAGKSGKSSKEGQDTVESEGTSPEEPSSPKVPPPLLPELLVLIFGGLQGRDVPPADQEKLFIQKLRQCCVLFDFVSDPLSDLKWKEVKRAALSEMVEYITHNRNVITEPIYPEVVHMFAVNMFRTLPPSSNPTGAEFDPEEDEPTLEAAWPHLQLVYEFFLRFLESPDFQPNIAKKYIDQKFVLQLLELFDSEDPRERDFLKTTLHRIYGKFLGLRAYIRKQINNIFYRFIYETEHHNGIAELLEILGSIINGFALPLKEEHKIFLLKVLLPLHKVKSLSVYHPQLAYCVVQFLEKDSTLTEPVVMALLKYWPKTHSPKEVMFLNELEEILDVIEPSEFVKIMEPLFRQLAKCVSSPHFQVAERALYYWNNEYIMSLISDNAAKILPIMFPSLYRNSKTHWNKTIHGLIYNALKLFMEMNQKLFDDCTQQFKAEKLKEKLKMKEREEAWVKIENLAKANPQYTVYSQASTMSIPVAMETDGPLFEDVQMLRKTVKDEAHQAQKDPKKDRPLARRKSELPQDPHTKKALEAHCRADELASQDGR

SEQ ID NO: 15874 - protein, 813 aa, Homo sapiens
MSEQGDLNQAIAEEGGTEQETATPENGIVKSESLDEEEKLELQRRLEAQNQERRKSKSGAGKGKLTRSLAVCEESSARPGGESLQDQESIHLQLSSFSSLQEEDKSRKDDSEREKEKDKNKDKTSEKPKIRMLSKDCSQEYTDSTGIDLHEFLINTLKNNSRDRMILLKMEQEIIDFIADNNNHYKKFPQMSSYQRMLVHRVAAYFGLDHNVDQTGKSVIINKTSSTRIPEQRFCEHLKDEKGEESQKRFILKRDNSSIDKEDNQSVCSQESLFVENSRLLEDSNICNETYKKRQLFRGNRDGSGRTSGSRQSSSENELKWSDHQRAWSSTDSDSSNRNLKPAMTKTASFGGITVLTRGDSTSSTRSTGKLSKAGSESSSSAGSSGSLSRTHPPLQSTPLVSGVAAGSPGCVPYPENGIGGQVAPSSTSYILLPLEAATGIPPGSILLNPHTGQPFVNPDGTPAIYNPPTSQQPLRSAMVGQSQQQPPQQQPSPQPQQQVQPPQPQMAGPLVTQSVQGLQASSQSVQYPAVSFPPQHLLPVSPTQHFPMRDDVATQFGQMTLSRQSSGETPEPPSGPVYPSSLMPQPAQQPSYVIASTGQQLPTGGFSGSGPPISQQVLQPPPSPQGFVQQPPPAQMPVYYYPSGQYPTSTTQQYRPMAPVQYNAQRSQQMPQAAQQAGYQPVLSGQQGFQGLIGVQQPPQSQNVINNQQGTPVQSVMVSYPTMSSYQVPMTQGSQGLPQQSYQQPIMLPNQAGQGSLPATGMPVYCNVTPPTPQNNLRLIGPHCPSSTVPVMSASCRTNCASMSNAGWQVKF

SEQ ID NO: 15875 - protein, 913 aa, Homo sapiens
MVQLRKLLRVLTLMKFPCCVLEVLLCALAAAARGQEMYAPHSIRIEGDVTLGGLFPVHAKGPSGVPCGDIKRENGIHRLEAMLYALDQINSDPNLLPNVTLGARILDTCSRDTYALEQSLTFVQALIQKDTSDVRCTNGEPPVFVKPEKVVGVIGASGSSVSIMVANILRLFQIPQISYASTAPELSDDRRYDFFSRVVPPDSFQAQAMVDIVKALGWNYVSTLASEGSYGEKGVESFTQISKEAGGLCIAQSVRIPQERKDRTIDFDRIIKQLLDTPNSRAVVIFANDEDIKQILAAAKRADQVGHFLWVGSDSWGSKINPLHQHEDIAEGAITIQPKRATVEGFDAYFTSRTLENNRRNVWFAEYWEENFNCKLTISGSKKEDTDRKCTGQERIGKDSNYEQEGKVQFVIDAVYAMAHALHHMNKDLCADYRGVCPEMEQAGGKKLLKYIRNVNFNGSAGTPVMFNKNGDAPGRYDIFQYQTTNTSNPGYRLIGQWTDELQLNIEDMQWGKGVREIPASVCTLPCKPGQRKKTQKGTPCCWTCEPCDGYQYQFDEMTCQHCPYDQRPNENRTGCQDIPIIKLEWHSPWAVIPVFLAMLGIIATIFVMATFIRYNDTPIVRASGRELSYVLLTGIFLCYIITFLMIAKPDVAVCSFRRVFLGLGMCISYAALLTKTNRIYRIFEQGKKSVTAPRLISPTSQLAITSSLISVQLLGVFIWFGVDPPNIIIDYDEHKTMNPEQARGVLKCDITDLQIICSLGYSILLMVTCTVYAIKTRGVPENFNEAKPIGFTMYTTCIVWLAFIPIFFGTAQSAEKLYIQTTTLTISMNLSASVALGMLYMPKVYIIIFHPELNVQKRKRSFKAVVTAATMSSRLSHKPSDRPNGEAKTELCENVDPNNFFFWLYSGTWITL

SEQ ID NO: 15876 - protein, 850 aa, Homo sapiens
MAGALAGLAAGLQVPRVAPSPDSDSDTDSEDPSLRRSAGGLLRSQVIHSGHFMVSSPHSDSLPRRRDQEGSVGPSDFGPRSIDPTLTRLFECLSLAYSGKLVSPKWKNFKGLKLLCRDKIRLNNAIWRAWYIQYVKRRKSPVCGFVTPLQGPEADAHRKPEAVVLEGNYWKRRIEVVMREYHKWRIYYKKRLRKPSREDDLLAPKQAEGRWPPPEQWCKQLFSSVVPVLLGDPEEEPGGRQLLDLNCFLSDISDTLFTMTQSGPSPLQLPPEDAYVGNADMIQPDLTPLQPSLDDFMDISDFFTNSRLPQPPMPSNFPEPPSFSPVVDSLFSSGTLGPEVPPASSAMTHLSGHSRLQARNSCPGPLDSSAFLSSDFLLPEDPKPRLPPPPVPPPLLHYPPPAKVPGLEPCPPPPFPPMAPPTALLQEEPLFSPRFPFPTVPPAPGVSPLPAPAAFPPTPQSVPSPAPTPFPIELLPLGYSEPAFGPCFSMPRGKPPAPSPRGQKASPPTLAPATASPPTTAGSNNPCLTQLLTAAKPEQALEPPLVSSTLLRSPGSPQETVPEFPCTFLPPTPAPTPPRPPPGPATLAPSRPLLVPKAERLSPPAPSGSERRLSGDLSSMPGPGTLSVRVSPPQPILSRGRPDSNKNRRITHISAEQKRRFNIKLGFDTLHGLVSTLSAQPSLKVSKATTLQKTAEYILMLQQERAGLQEEAQQLRDEIEELNAAINLCQQQLPATGVPITHQRFDQMRDMFDDYVRTRTLHNWKFWVFSILIRPLFESFNGMVSTASVHTLRQTSLAWLDQYCSLPALRPTVLNSLRQLGTSTSILTDPGRIPEQATRAVTEGTLGKPL

SEQ ID NO: 15877 - protein, 101 aa, Homo sapiens
MSEQGDLNQAIAEEGGTEQETATPENGIVKSESLDEEEKLELQRRLEAQNQERRKSKSGAGKGKLTRSLAVCEESSARPGGESLQDQVYPLAIIINCMNGI

SEQ ID NO: 15878 - protein, 226 aa, Homo sapiens
MSEETVPEAASPPPPQGQPYFDRFSEDDPEYMRLRNRAADLRQDFNLMEQKKRVTMILQSPSFREELEGLIQEQMKKGNNSSNIWALRQIADFMASTSHAVFPTSSMNVSMMTPINDLHTADSLNLAKGERLMRCKISSVYRLLDLYGWAQLSDTYVTLRVSKEQDHFLISPKGVSCSEVTASSLIKVNILGEVVEKGSSCFPVDTTGFCLHSAIYAARPDVRCII

SEQ ID NO: 15879 - protein, 698 aa, Homo sapiens
MVPGQAQPQSPEMLLLPLLLPVLGAGSLNKDPSYSLQVQRQVPVPEGLCVIVSCNLSYPRDGWDESTAAYGYWFKGRTSPKTGAPVATNNQSREVEMSTRDRFQLTGDPGKGSCSLVIRDAQREDEAWYFFRVERGSRVRHSFLSNAFFLKVTALTKKPDVYIPETLEPGQPVTVICVFNWAFKKCPAPSFSWTGAALSPRRTRPSTSHFSVLSFTPSPQDHDTDLTCHVDFSRKGVSAQRTVRLRVAYAPKDLIISISHDNTSALELQGNVIYLEVQKGQFLRLLCAADSQPPATLSWVLQDRVLSSSHPWGPRTLGLELRGVRAGDSGRYTCRAENRLGSQQQALDLSVQYPPENLRVMVSQANRTVLENLGNGTSLPVLEGQSLRLVCVTHSSPPARLSWTRWGQTVGPSQPSDPGVLELPPIQMEHEGEFTCHAQHPLGSQHVSLSLSVHYPPQLLGPSCSWEAEGLHCSCSSQASPAPSLRWWLGEELLEGNSSQGSFEVTPSSAGPWANSSLSLHGGLSSGLRLRCKAWNVHGAQSGSVFQLLPGKLEHGGGLGLGAALGAGVAALLAFCSCLVVFRVKICRKEARKRAAAEQDVPSTLGPISQGHQHECSAGSSQDHPPPGAATYTPGKGEEQELHYASLSFQGLRLWEPADQEAPSTTEYSEIKIHTGQPLRGPGFGLQLEREMSGMVPK

SEQ ID NO: 15880 - protein, 493 aa, Homo sapiens
MEKYENLGLVGEGSYGMVMKCRNKDTGRIVAIKKFLESDDDKMVKKIAMREIKLLKQLRHENLVNLLEVCKKKKRWYLVFEFVDHTILDDLELFPNGLDYQVVQKYLFQIINGIGFCHSHNIIHRDIKPENILVSQSGVVKLCDFGFARTLAAPGEVYTDYVATRWYRAPELLVGDVKYGKAVDVWAIGCLVTEMFMGEPLFPGDSDIDQLYHIMMCLGNLIPRHQELFNKNPVFAGVRLPEIKEREPLERRYPKLSEVVIDLAKKCLHIDPDKRPFCAELLHHDFFQMDGFAERFSQELQLKVQKDARNVSLSKKSQNRKKEKEKDDSLVEERKTLVVQDTNADPKIKDYKLFKIKGSKIDGEKAEKGNRASNASCLHDSRTSHNKIVPSTSLKDCSNVSVDHTRNPSVAIPPLTHNLSAVAPSINSGMGTETIPIQGYRVDEKTKKCSIPFVKPNRHSPSGIYNINVTTLVSGPPLSDDSGADLPQMEHQH

SEQ ID NO: 15881 - protein, 148 aa, Homo sapiens
MILFKQATYFISLFATVSCGCLTQLYENAFFRGGDVASMYTPNAQYCQMRCTFHPRCLLFSFLPASSINDMEKRFGCFLKDSVTGTLPKVHRTGAVSGHSLKQCGHQISACHRDIYKGVDMRGVNFNVSKVSSVEECQKRCTSNIRCQ

SEQ ID NO: 15882 - protein, 976 aa, Homo sapiens
MTRTDPPDLLVSTVYQDIKVATPGPASKCSPCERSVARPAEPAPFNKRHCRSFDFLEALDGPAMETLPEPPPPESAVPRARTREAEPRRRARSKSAPRAPPGLTPAPASPPVLPRRGREAQRAARAEASPRREPAYPALRALANELHPIKLQPQRGGPGRVAPLCAAAGRCAPPEPPAGPAPHVRCRLDIKPDDAVLQHATRGSRSCGPTEAAHWARPAPQFHGLTVPGPRHMALSRTPTPSDSYCADPRAFYCDGPLPGPRDYAERRSLPFTTPPGPTQFFYTEEPQGFRGSFAASPGPTFDAYYPRPYPSEELSGPSPRRMGGYYAGEVRTFPIQEPPSRSYYGEAPRAYGLPYGPRYVPEEPRAHSTARPFYTEDFGRYRERDVLARTYPHPRSSPAWADWGPRPYRTLQVVPPSDPDPLLASWHGGTGTSPPRLATDSRHYSRSWDNILAPGPRREDPLGRGRSYENLLGREVREPRGVSPEGRRPPVVVNLSTSPRRYAALSLSETSLTEKGRAGEGLGRNWYVTPEITITDNDLRATERPSARAWELPGGRTRPPPHAAPDGPTSGRQRSLEQLDELITDLVIDSRPTAGQASEPAADCLGPQLRRLLDSRPAGSGAPALAPPRSPPASAGSAEEPAAPGEAADASPEPSADEDDLMTCSNARCRRTETMFNACLYFKSCHSCYTYYCSRLCRREDWDAHKARCVYGRVGSVCRHVLQFCRDSGPVHRAFSRIARVGFLSRGRGVLFLGFPSPGSADNFLRFGLEGLLLSPTYLSLRELATHAAPLGSYARELAAAGRLYEPAECFLLSVSVAVGPGTAPPGTPALPAPAPRSHGPTVRKFAKVALAAGSPARPPPARSREPDMETLILTPPPGTAGLDQDGEAGRRAREVAFIHIQRELRLRGVFLRHEFPRVYEQLCEFVEANRRFTPTTIYPTDRRTGRPFMCMIMAASEPRALDWVASANLLDDIM

SEQ ID NO: 15883 - protein, 2046 aa, Homo sapiens
MDEVEQDQHEARLKELFDSFDTTGTGSLGQEELTDLCHMLSLEEVAPVLQQTLLQDNLLGRVHFDQFKEALILILSRTLSNEEHFQEPDCSLEAQPKYVRGGKRYGRRSLPEFQESVEEFPEVTVIEPLDEEARPSHIPAGDCSEHWKTQRSEEYEAEGQLRFWNPDDLNASQSGSSPPQDWIEEKLQEVCEDLGITRDGHLNRKKLVSICEQYGLQNVDGEMLEEVFHNLDPDGTMSVEDFFYGLFKNGKSLTPSASTPYRQLKRHLSMQSFDESGRRTTTSSAMTSTIGFRVFSCLDDGMGHASVERILDTWQEEGIENSQEILKALDFSLDGNINLTELTLALENELLVTKNSIHQAALASFKAEIRHLLERVDQVVREKEKLRSDLDKAEKLKSLMASEVDDHHAAIERRNEYNLRKLDEEYKERIAALKNELRKEREQILQQAGKQRLELEQEIEKAKTEENYIRDRLALSLKENSRLENELLENAEKLAEYENLTNKLQRNLENVLAEKFGDLDPSSAEFFLQEERLTQMRNEYERQCRVLQDQVDELQSELEEYRAQGRVLRLPLKNSPSEEVEANSGGIEPEHGLGSEECNPLNMSIEAELVIEQMKEQHHRDICCLRLELEDKVRHYEKQLDETVVSCKKAQENMKQRHENETHTLEKQISDLKNEIAELQGQAAVLKEAHHEATCRHEEEKKQLQVKLEEEKTHLQEKLRLQHEMELKARLTQAQASFEREREGLQSSAWTEEKVRGLTQELEQFHQEQLTSLVEKHTLEKEELRKELLEKHQRELQEGREKMETECNRRTSQIEAQFQSDCQKVTERCESALQSLEGRYRQELKDLQEQQREEKSQWEFEKDELTQECAEAQELLKETLKREKTTSLVLTQEREMLEKTYKEHLNSMVVERQQLLQDLEDLRNVSETQQSLLSDQILELKSSHKRELREREEVLCQAGASEQLASQRLERLEMEHDQERQEMMSKLLAMENIHKATCETADRERAEMSTEISRLQSKIKEMQQATSPLSMLQSGCQVIGEEEVEGDGALSLLQQGEQLLEENGDVLLSLQRAHEQAVKENVKMATEISRLQQRLQKLEPGLVMSSCLDEPATEFFGNTAEQTEQFLQQNRTKQVEGVTRRHVLSDLEDDEVRDLGSTGTSSVQRQEVKIEESEASVEGFSELENSEETRTESWELKNQISQLQEQLMMLCADCDRASEKKQDLLFDVSVLKKKLKMLERIPEASPKYKLLYEDVSRENDCLQEELRMMETRYDEALENNKELTAEVFRLQDELKKMEEVTETFLSLEKSYDEVKIENEGLNVLVLRLQGKIEKLQESVVQRCDCCLWEASLENLEIEPDGNILQLNQTLEECVPRVRSVHHVIEECKQENQYLEGNTQLLEKVKAHEIAWLHGTIQTHQERPRVQNQVILEENTTLLGFQDKHFQHQATIAELELEKTKLQELTRKLKERVTILVKQKDVLSHGEKEEELKAMMHDLQITCSEMQQKVELLRYESEKLQQENSILRNEITTLNEEDSISNLKLGTLNGSQEEMWQKTETVKQENAAVQKMVENLKKQISELKIKNQQLDLENTELSQKNSQNQEKLQELNQRLTEMLCQKEKEPGNSALEEREQEKFNLKEELERCKVQSSTLVSSLEAELSEVKIQTHIVQQENHLLKDELEKMKQLHRCPDLSDFQQKISSVLSYNEKLLKEKEALSEELNSCVDKLAKSSLLEHRIATMKQEQKSWEHQSASLKSQLVASQEKVQNLEDTVQNVNLQMSRMKSDLRVTQQEKEALKQEVMSLHKQLQNAGGKSWAPEIATHPSGLHNQQKRLSWDKLDHLMNEEQQLLWQENERLQTMVQNTKAELTHSREKVRQLESNLLPKHQKHLNPSGTMNPTEQEKLSLKRECDQFQKEQSPANRKVSQMNSLEQELETIHLENEGLKKKQVKLDEQLMEMQHLRSTATPSPSPHAWDLQLLQQQACPMVPREQFLQLQRQLLQAERINQHLQEELENRTSETNTPQALLPEQRAVHADSYRRIGHL

SEQ ID NO: 15884 - protein, 222 aa, Homo sapiens
MLLSLKPSEAPELDEDEGFGDWSQRPEQRQQHEGAQGALDSGEPPQCRSPEGEQEDRPGLHAYEKEDSDEVHLEELSLSKEGPGPEDTVQDNLGAAGAEEEQEEHQKCQQPRTPSPLVLEGTIEQSSPPLSPTTKLIDRTESLNRSIEKSNSVKKSQPDLPISKIDQWLEQYTQAIETAGRTPKLARQASIELPSMAVASTKSRWETGEVQAQSAAKTPSCK

SEQ ID NO: 15885 - protein, 360 aa, Homo sapiens
TSTSRETQMTPLSLKVTPCTCPQSLRPGTAHSPSQMSPAQRRQPLTRLRAWRRLILGPLGATPIRKSSRPASHLPDTAPWLSSARLEAPTGWPWGLLLHSIFELNKHISAVECLLTYLENTVVPPLAKGLGAGVRTEADVEEEALRRKLEELTSNVSDQETSSEEEEAKDEKAEPNRDKSVGPLPQADPEVGTAAHQTNRQEKSPQDPGDPVQYNRTTDEELSELEDRVAVTASEVQQAESEVSDIESRIAALRAAGLTVKPSGKPRRKSNLPIFLPRVAGKLGKRPEDPNADPSSEAKAMAVPYLLRRKFSNSLKSQGKDDDSFDRKSVYRGSLTQRNPNARKGMASHTFAKPVVAHQS

SEQ ID NO: 15886 - protein, 494 aa, Homo sapiens
GEIKIAVSIEDEANKDLPPAALLYRPVRQYVYGVLFSLAESRKKTERLAFRKNRLPPEFSPVIIKEWAAYKGKSPQTPELVEALAFREWTCPNLKRLWLGKAVEDKNRRMRAFLACMRSDTPAMLNPANVPTHLMVLCCVLRYMVQWPGARILRRQELDAFLAQALSPKLYEPDQLQELKIENLDPRGIQLSALFMSGVDMALFANDACGQPIPWEHCCPWMYFDGKLFQSKLLKASREKTPLIDLCDGQADQAAKVEKMRQSVLEGLSFSRQSHTLPFPPPPALPFYPASAYPRHFGPVPPSQGRGRGFAGVQPIPSQGGKLEIAGTVVGHWAGSRRGRGGRGPFPLQVVSVGGPARGRPRGVISTPVIRTFGRGGRYYGRGYKNQAAIQGRPPYAASAEEVAKELKSKSGESKSSAMSSDGSLAENGVMAEEKPAPQMNGSTGDARAPSHSESALNNDSKTCNTNPHLNALSTDSACRREAALEAAVLNKEE

SEQ ID NO: 15887 - protein, 1291 aa, Homo sapiens
FTSHHWASLSVCFPNLHPKFQLYIYNQLVRFLTKREQKLMQRRQHAEELLEWKRRLDAEEAEIRQMEKQALAAWDKELIKPKTPKKELEDQRTEQKEIASEEESPVPLYSHLNSESSIPEELGSPAVEYVPSESIGQEQPGSPDHSILTEEMICSQELESSTSPSKHSLPKSCTSVSKQESSKGSHRTGGQCHLPIKSHQHCYSWSDESLSMTQSETTSDQSDIEGRIRALKDELRKRKSVVNQLKKEQKKRQKERLKAQEASLIKQLESYDEFIKKTEAELSQDLETSPTAKPQIKTLSSASEKPKIKPLTPLHRSETAKNWKSLTESERSRGSLESIAEHVDASLSGSERSVSERSLSAYAKRVNEWDSRTEDFQTPSPVLRSSRKIREESGDSLENVPALHLLKELNATSRILDMSDGKVGESSKKSEIKEIEYTKLKKSKIEDAFSKEGKSDVLLKLVLEQGDSSEILSKKDLPLDSENVQKDLVGLAIENLHKSEEMLKERQSDQDMNHSPNIQSGKDIHEQKNTKEKDLSWSEHLFAPKEIPYSEDFEVSSFKKEISAELYKDDFEVSSLLSLRKDSQSCRDKPQPMRSSTSGATSFGSNEEISECLSEKSLSIHSNVHSDRLLELKSPTELMKSKERSDVEHEQQVTESPSLASVPTADELFDFHIGDRVLIGNVQPGILRFKGETSFAKGFWAGVELDKPEGNNNGTYDGIAYFECKEKHGIFAPPQKISHIPENFDDYVDINEDEDCYSDERYQCYNQEQNDTEGPKDREKDVSEYFYEKSLPSVNDIEASVNRSRSLKIETDNVQDISGVLEAHVHQQSSVDSQISSKENKDLISDATEKVSIAAEDDTLDNTFSEELEKQQQFTEEEDNLYAEASEKLCTPLLDLLTREKNQLEAQLKSSLNEEKKSKQQLEKISLLTDSLLKVFVKDTVNQLQQIKKTRDEKIQLSNQELLGDDQKKVTPQDLSQNVEEQSPSISGCFLSSELEDEKEEISSPDMCPRPESPVFGASGQEELAKRLAELELSREFLSALGDDQDWFDEDFGLSSSHKIQKNKAEETIVPLMAEPKRVTQQPCETLLAVPHTAEEVEILVHNAAEELWKWKELGHDLHSISIPTKLLGCASKGLDIESTSKRVYKQAVFDLTKEIFEEIFAEDPNLNQPVWMKPCRINSSYFRRVKNPNNLDEIKSFIASEVLKLFSLKKEPNHKTDWQKMMKFGRKKRDRVDHILVQELHEEEAQWVNYDEDELCVKMQLADGIFETLIKDTIDVLNQISEKQGRMLLV

SEQ ID NO: 15888 - protein, 714 aa, Homo sapiens
MLSPKIRQARRARSKSLVMGEQSRSPGRMPCPHRLGPVLKAGWLKKQRSIMKNWQQRWFVLRGDQLFYYKDKDEIKPQGFISLQGTQVTELPPGPEDPGKHLFEISPGGAGEREKVPANPEALLLMASSQRDMEDWVQAIRRVIWAPLGGGTARRSHAHPLEPLPPGIFGQRLEETVHHERKYGPRLAPLLVEQCVDFIRERGLTEEGLFRMPGQANLVRDLQDSFDCGEKPLFDSTTDVHTVASLLKLYLRELPEPVVPFARYEDFLSCAQLLTKDEGEGTLELAKQVSNLPQANYNLLRYICKFLDEVQAYSNVNKMSVQNLATVFGPNILRPQVEDPVTIMEGTSLVQHLMTVLIRKHSQLFTAPVPEGPTSPRGGLQCAVGWGSEEVTRDSQGEPGGPGLPAHRTSSLDGAAVAVLSRTAPTGPGSRCSPGKKVQTLPSWKSSFRQPRSLSGSPKGGGSSLEVPIISSGGNWLMNGLSSLRGHRRASSGDRLKDSGSVQRLSTYDNVPAPGLVPGIPSVASMAWSGASSSESSVGGSLSSCTACRASDSSARSSLHTDWALEPSPLPSSSEDPKSLDLDHSMDEAGAGASNSEPSEPDSPTREHARRSEALQGLVTELRAELCRQRTEYERSVKRIEEGSADLRKRMSRLEEELDQEKKKYIMLEIKLRNSERAREDAERRNQLLQREMEEFFSTLGSLTVGAKGARAPK

SEQ ID NO: 15889 - protein, 790 aa, Homo sapiens
MDGDGGRRDVPGTLMEPGRGAGPAGMAEPRAKAARPGPQRFLRRSVVESDQEEPPGLEAAEAPGPQPPQPLQRRVLLLCKTRRLIAERARGRPAAPAPAALVAQPGAPGAPADAGPEPVGTQEPGPDPIAAAVETAPAPDGGPREEAAATVRKEDEGAAEAKPEPGRTRRDEPEEEEDDEDDLKAVATSLDGRFLKFDIELGRGSFKTVYKGLDTETWVEVAWCELQDRKLTKLERQRFKEEAEMLKGLQHPNIVRFYDFWESSAKGKRCIVLVTELMTSGTLKTYLKRFKVMKPKVLRSWCRQILKGLLFLHTRTPPIIHRDLKCDNIFITGPTGSVKIGDLGLATLKRASFAKSVIGTPEFMAPEMYEEHYDESVDVYAFGMCMLEMATSEYPYSECQNAAQIYRKVTCGIKPASFEKVHDPEIKEIIGECICKNKEERYEIKDLLSHAFFAEDTGVRVELAEEDHGRKSTIALRLWVEDPKKLKGKPKDNGAIEFTFDLEKETPDEVAQEMIESGFFHESDVKIVAKSIRDRVALIQWRRERIWPALQPKEQQDVGSPDKARGPPVPLQVQVTYHAQAGQPGPPEPEEPEADQHLLPPTLPTSATSLASDSTFDSGQGSTVYSDSQSSQQSVMLGSLADAAPSPAQCVCSPPVSEGPVLPQSLPSLGAYQQPTAAPPPLAQPTPLPQVLAPQPVVPLQPVPPHLPPYLAPASQVGAPAQLKPLQMPQAPLQPLAQVPPQMPPIPVVPPITPLAGIDGLPPALPDLPTATVPPVPPPQYFSPAVILPS

SEQ ID NO: 15890 - protein, 204 aa, Homo sapiens
MNLILRYTFSKMAMVSEFLKQAWFIENEEQEYVQTVKSSKGGPGSAVSPYPTFNPSSDVAALHKAIMVKGVDEATIIDILTKRNNAQRQQIKAAYLQETGKPLDETLKKALTGHLEEVVLALLKTPAQFDADELRAAMKGLGTDEDTLIEILASRTNKEIRDINRVYREELKRDLAKDITSDTSGDFRNALLSLAKGDRSEDFG

SEQ ID NO: 15891 - protein, 441 aa, Homo sapiens
MAGEGDQQDAAHNMGNHLPLLPESEEEDEMEVEDQDSKEAKKPNIINFDTSLPTSHTYLGADMEEFHGRTLHDDDSCQVIPVLPQVMMILIPGQTLPLQLFHPQEVSMVRNLIQKDRTFAVLAYSNVQEREAQFGTTAEIYAYREEQDFGIEIVKVKAIGRQRFKVLELRTQSDGIQQAKVQILPECVLPSTMSAVQLESLNKCQIFPSKPVSREDQCSYKWWQKYQKRKFHCANLTSWPRWLYSLYDAETLMDRIKKQLREWDENLKDDSLPSNPIDFSYRVAACLPIDDVLRIQLLKIGSAIQRLRCELDIMNKCTSLCCKQCQETEITTKNEIFSLSLCGPMAAYVNPHGYVHETLTVYKACNLNLIGRPSTEHSWFPGYAWTVAQCKICASHIGWKFTATKKDMSPQKFWGLTRSALLPTIPDTEDEISPDKVILCL

SEQ ID NO: 15892 - protein, 1643 aa, Homo sapiens
MHRAVDPPGARAAREAFALGGLSCAGAWSSCPPHPPPRSAWLPGGRCSASIGQPPLPAPLPPSHGSSSGHPSKPYYAPGAPTPRPLHGKLESLHGCVQALLREPAQPGLWEQLGQLYESEHDSEEATRCYHSALRYGGSFAELGPRIGRLQQAQLWNFHTGSCQHRAKVLPPLEQVWNLLHLEHKRNYGAKRGGPPVKRAAEPPVVQPVPPAALSGPSGEEGLSPGGKRRRGCNSEQTGLPPGLPLPPPPLPPPPPPPPPPPPPLPGLATSPPFQLTKPGLWSTLHGDAWGPERKGSAPPERQEQRHSLPHPYPYPAPAYTAHPPGHRLVPAAPPGPGPRPPGAESHGCLPATRPPGSDLRESRVQRSRMDSSVSPAATTACVPYAPSRPPGLPGTTTSSSSSSSSNTGLRGVEPNPGIPGADHYQTPALEVSHHGRLGPSAHSSRKPFLGAPAATPHLSLPPGPSSPPPPPCPRLLRPPPPPAWLKGPACRAAREDGEILEELFFGTEGPPRPAPPPLPHREGFLGPPASRFSVGTQDSHTPPTPPTPTTSSSNSNSGSHSSSPAGPVSFPPPPYLARSIDPLPRPPSPAQNPQDPPLVPLTLALPPAPPSSCHQNTSGSFRRPESPRPRVSFPKTPEVGPGPPPGPLSKAPQPVPPGVGELPARGPRLFDFPPTPLEDQFEEPAEFKILPDGLANIMKMLDESIRKEEEQQQHEAGVAPQPPLKEPFASLQSPFPTDTAPTTTAPAVAVTTTTTTTTTTTATQEEEKKPPPALPPPPPLAKFPPPSQPQPPPPPPPSPASLLKSLASVLEGQKYCYRGTGAAVSTRPGPLPTTQYSPGPPSGATALPPTSAAPSAQGSPQPSASSSSQFSTSGGPWARERRAGEEPVPGPMTPTQPPPPLSLPPARSESEVLEEISRACETLVERVGRSATDPADPVDTAEPADSGTERLLPPAQAKEEAGGVAAVSGSCKRRQKEHQKEHRRHRRACKDSVGRRPREGRAKAKAKVPKEKSRRVLGNLDLQSEEIQGREKSRPDLGGASKAKPPTAPAPPSAPAPSAQPTPPSASVPGKKAREEAPGPPGVSRADMLKLRSLSEGPPKELKIRLIKVESGDKETFIASEVEERRLRMADLTISHCAADVVRASRNAKVKGKFRESYLSPAQSVKPKINTEEKLPREKLNPPTPSIYLESKRDAFSPVLLQFCTDPRNPITVIRGLAGSLRLNLGLFSTKTLVEASGEHTVEVRTQVQQPSDENWDLTGTRQIWPCESSRSHTTIAKYAQYQASSFQESLQEEKESEDEESEEPDSTTGTPPSSAPDPKNHHIIKFGTNIDLSDAKRWKPQLQELLKLPAFMRVTSTGNMLSHVGHTILGMNTVQLYMKVPGSRTPGHQENNNFCSVNINIGPGDCEWFAVHEHYWETISAFCDRHGVDYLTGSWWPILDDLYASNIPVYRFVQRPGDLVWINAGTVHWVQATGWCNNIAWNVGPLTAYQYQLALERYEWNEVKNVKSIVPMIHVSWNVARTVKISDPDLFKMIKFCLLQSMKHCQVQRESLVRAGKKIAYQGRVKDEPAYYCNECDVEVFNILFVTSENGSRNTYLVHCEGCARRRSAGLQGVVVLEQYRTEELAQAYDAFTLAPASTSR

SEQ ID NO: 15893 - protein, 107 aa, Homo sapiens
MSNPSAPPPYEDRNPLYPGPPPPGGYGQPSVLPGGYPAYPGYPQPGYGHPAGYPQPMPPTHPMPMNYGPGHGYDGEERAVSDSFGPGEWDDRKVRHTFIRKVYSIIS

SEQ ID NO: 15894 - protein, 479 aa, Homo sapiens
MDFSRNLYDIGEQLDSEDLASLKFLSLDYIPQRKQEPIKDALMLFQRLQEKRMLEESNLSFLKELLFRINRLDLLITYLNTRKEEMERELQTPGRAQISAYRVMLYQISEEVSRSELRSFKFLLQEEISKCKLDDDMNLLDIFIEMEKRVILGEGKLDILKRVCAQINKSLLKIINDYEEFSKERSSSLEGSPDEFSNGEELCGVMTISDSPREQDSESQTLDKVYQMKSKPRGYCLIINNHNFAKAREKVPKLHSIRDRNGTHLDAGALTTTFEELHFEIKPHDDCTVEQIYEILKIYQLMDHSNMDCFICCILSHGDKGIIYGTDGQEAPIYELTSQFTGLKCPSLAGKPKVFFIQACQGDNYQKGIPVETDSEEQPYLEMDLSSPQTRYIPDEADFLLGMATVNNCVSYRNPAEGTWYIQSLCQSLRERCPRGDDILTILTEVNYEVSNKDDKKNMGKQMPQPTFTLRKKLVFPSD

SEQ ID NO: 15895 - protein, 329 aa, Homo sapiens
MFRQFYLWTCLASGIILGSLFEICLGQYDDDCKLARGGPPATIVAIDEESRNGTILVDNMLIKGTAGGPDPTIELSLKDNVDYWVLMDPVKQMLFLNSTGRVLDRDPPMNIHSIVVQVQCINKKVGTIIYHEVRIVVRDRNDNSPTFKHESYYATVNELTPVGTTIFTGFSGDNGATDIDDGPNGQIEYVIQYNPDDPTSNDTFEIPLMLTGNIVLRKRLNYEDKTRYFVIIQANDRAQNLNERRTTTTTLTVDVLDGDDLGPMFLPCVLVPNTRDCRPLTYQAAIPELRTPDLGSLCSGTNSWCQGRSGVHWSSPAWRCLFPRRLHQM

SEQ ID NO: 15896 - protein, 672 aa, Homo sapiens
MTATTEVADDEVTEGTVTQIQILQNEQLDEISPLGNEEVSAVSQAWFTTKEDKDSLTNKGHKWKQGMWSKEEIDILMNNIERYLKARGIKDATEIIFEMSKDERKDFYRTIAWGLNRPLFAVYRRVLRMYDDRNHVGKYTPEEIEKLKELRIKHGNDWATIGAALGRSASSVKDRCRLMKDTCNTGKWTEEEEKRLAEVVHELTSTEPGDIVTQGVSWAAVAERVGTRSEKQCRSKWLNYLNWKQSGGTEWTKEDEINLILRIAELDVADENDINWDLLAEGWSSVRSPQWLRSKWWTIKRQIANHKDVSFPVLIKGLKQLHENQKNNPTLLENKSGSGVPNSNTNSSVQHVQIRVARLEDNTAISSSPMAALQIPVQITHVSSADSPATVDSETITLNSGTLQTFEILPSFHLQPTGTPGTYLLQTSSSQGLPLTLTASPTVTLTAAAPASPEQIIVHALSPEHLLNTSDNVTVQCHTPRVIIQTVATEDITSSISQAELTVDSDIQSSDFPEPPDALEADTFPDEIHHPKMTVEPSFNDAHVSKFSDQNSTELMNSVMVRTEEEISDTDLKQEESPSDLASAYVTEGLESPTIEEQVDQTIDDETILIVPSPHGFIQASDVIDTESVLPLTTLTDPILQHHQEESNIIGSSLGSPVSEDSKDVEDLVNCH

SEQ ID NO: 15897 - protein, 423 aa, Homo sapiens
MGMYPGVLVPSSRGGLPLEEVTVAEVLAARGYLTGMAGKWHLGVGPEGAFLPPHQGFHRFLGIPYSHDQGPCQNLTCFPPATPCDGGCDQGLVPIPLLANLSVEAQPPWLPGLEARYMAFAHDLMADAQRQDRPFFLYYASHHTHYPQFSGQSFAERSGRGPFGDSLMELDAAVGTLMTAIGDLGLLEETLVIFTADNGPETMRMSRGGCSGLLRCGKGTTYEGGVREPALAFWPGHIAPGVTHELASSLDLLPTLAALAGAPLPNVTLDGFDLSPLLLGTGKSPRQSLFFYPSYPDEVRGVFAVRTGKYKAHFFTQGSAHSDTTADPACHASSSLTAHEPPLLYDLSKDPGENYNLLGGVAGATPEVLQALKQLQLLKAQLDAAVTFGPSQVARGEDPALQICCHPGCTPRPACCHCPDPHA

SEQ ID NO: 15898 - protein, 96 aa, Homo sapiens
MNYVGQLAGQVFVTVKELYKGLNPATLSGCIDIIVIRQPNGNLQCSPFHVRFGKMGVLRSREKVVDIEINGESVDLHMKLGDNGEAFFVQETDNDQ

SEQ ID NO: 15899 - protein, 623 aa, Homo sapiens
MAAATGDPGLSKLQFAPFSSALDVGFWHELTQKKLNEYRLDEAPKDIKGYYYNGDSAGLPARLTLEFSAFDMSAPTPARCCPAIGTLYNTNTLESFKTADKKLLLEQAANEIWESIKSGTALENPVLLNKFLLLTFAIEALECAYDNLCQTEGVTALPYFLIKYDENMVLVSLLKHYSDFFQGQRTKITIGVYDPCNLAQYPGWPLRNFLVLAAHRWSSSFQSVEVVCFRDRTMQGARDVAHSIIFEVKLPEMAFSPDCPKAVGWEKNQKGGMGPRMVNLSECMDPKRLAESSVDLNLKLMCWRLVPTLDLDKVVSVKCLLLGAGTLGCNVARTLMGWGVRHITFVDNAKISYSNPVRQPLYEFEDCLGGGKPKALAAADRLQKIFPGVNARGFNMSIPMPGHPVNFSSVTLEQARRDVEQLEQLIESHDVVFLLMDTRESRWLPAVIAASKRKLVINAALGFDTFVVMRHGLKKPKQQGAGDLCPNHPVASADLLGSSLFANIPGYKLGCYFCNDVVAPGDSTRDRTLDQQCTVSRPGLAVIAGALAVELMVSVLQHPEGGYAIASSSDDRMNEPPTSLGLVPHQIRGFLSRFDNVLPVSLAFDKCTACSSKIWDMSDDETI

SEQ ID NO: 15900 - protein, 176 aa, Homo sapiens
MFIGGPNTRKDYHIEEGEEVFYQLEGDMVLRVLEQGKHRDVVIRQGEIFLLPARVPHSPQRFANTVGLVVERRRLETELDGLRYYVGDTMDVLFEKWFYCKDLGTQLAPIIQEFFSSEQYRTGKPIPDQLLKEPPFPLSTRSIMEPMSLDAWLDSHHRELQAGTPLSLFGDTYETQ

SEQ ID NO: 15901 - protein, 189 aa, Homo sapiens
METQLSNGPTCNNTANGPTTINNNCSSPVDSGNTEDSKTNLIVNYLPQNMTQEELKSLFGSIGEIESCKLVRDKITGQSLGYGFVNYIDPKDAEKAINTLNGLRLQTKTIKVSYARPSSASIRDANLYVSGLPKTMTQKELEQLFSQYGRIITSRILVDQVTGISRGVGFIRFDKRIEAEEAIKGLNGQ

SEQ ID NO: 15902 - protein, 1886 aa, Homo sapiens
MFRQFYLWTCLASGIILGSLFEICLGQYDDDCKLARGGPPATIVAIDEESRNGTILVDNMLIKGTAGGPDPTIELSLKDNVDYWVLMDPVKQMLFLNSTGRVLDRDPPMNIHSIVVQVQCINKKVGTIIYHEVRIVVRDRNDNSPTFKHESYYATVNELTPVGTTIFTGFSGDNGATDIDDGPNGQIEYVIQYNPDDPTSNDTFEIPLMLTGNIVLRKRLNYEDKTRYFVIIQANDRAQNLNERRTTTTTLTVDVLDGDDLGPMFLPCVLVPNTRDCRPLTYQAAIPELRTPEELNPIIVTPPIQAIDQDRNIQPPSDRPGILYSILVGTPEDYPRFFHMHPRTAELSLLEPVNRDFHQKFDLVIKAEQDNGHPLPAFAGLHIEILDENNQSPYFTMPSYQGYILESAPVGATISDSLNLTSPLRIVALDKDIEDTKDPELHLFLNDYTSVFTVTQTGITRYLTLLQPVDREEQQTYTFSITAFDGVQESEPVIVNIQVMDANDNTPTFPEISYDVYVYTDMRPGDSVIQLTAVDADEGSNGEITYEILVGAQGDFIINKTTGLITIAPGVEMIVGRTYALTVQAADNAPPAERSTGILTLGKALDRESTDRYILIITASDGRPDGTSTATVNIVVTDVNDNAPVFDPYLPRNLSVVEEEANAFVGQVKATDPDAGINGQVHYSLGNFNNLFRITSNGSIYTAVKLNREVRDYYELVVVATDGAVHPRHSTLTLAIKVLDIDDNSPVFTNSTYTVLVEENLPAGTTILQIEAKDVDLGANVSYRIRSPEVKHFFALHPFTGELSLLRSLDYEAFPDQEASITFLVEAFDIYGTMPPGIATVTVIVKDMNDYPPVFSKRIYKGMVAPDAVKGTPITTVYAEDADPPGLPASRVRYRVDDVQFPYPASIFEVEEDSGRVITRVNLNEEPTTIFKLVVVAFDDGEPVMSSSATVKILVLHPGEIPRFTQEEYRPPPVSELATKGTMVGVISAAAINQSIVYSIVSGNEEDTFGINNITGVIYVNGPLDYETRTSYVLRVQADSLEVVLANLRVPSKSNTAKVYIEIQDENNHPPVFQKKFYIGGVSEDARMFTSVLRVKATDKDTGNYSVMAYRLIIPPIKEGKEGFVVETYTGLIKTAMLFHNMRRSYFKFQVIATDDYGKGLSGKADVLVSVVNQLDMQVIVSNVPPTLVEKKIEDLTEILDRYVQEQIPGAKVVVESIGARRHGDAFSLEDYTKCDLTVYAIDPQTNRAIDRNELFKFLDGKLLDINKDFQPYYGEGGRILEIRTPEAVTSIKKRGESLGYTEGALLALAFIIILCCIPAILVVLVSYRQFKVRQAECTKTARIQAALPAAKPAVPAPAPVAAPPPPPPPPPGAHLYEELGDSSMHNLFLLYHFQQSRGNNSVSEDRKHQQVVMPFSSNTIEAHKSAHVDGSLKSNKLKSARKFTFLSDEDDLSAHNPLYKENISQVSTNSDISQRTDFVDPFSPKIQAKSKSLRGPREKIQRLWSQSVSLPRRLMRKVPNRPEIIDLQQWQGTRQKAENENTGICTNKRGSSNPLLTTEEANLTEKEEIRQGETLMIEGTEQLKSLSSDSSFCFPRPHFSFSTLPTVSRTVELKSEPNVISSPAECSLELSPSRPCVLHSSLSRRETPICMLPIETERNIFENFAHPPNISPSACPLPPPPPISPPSPPPAPAPLAPPPDISPFSLFCPPPSPPSIPLPLPPPTFFPLSVSTSGPPTPPLLPPFPTPLPPPPPSIPCPPPPSASFLSTECVCITGVKCTTNLMPAEKIKSSMTQLSTTTVCKTDPQREPKGILRHVKNLAELEKSVANMYSQIEKNYLRTNVSELQTMCPSEVTNMEITSEQNKGSLNNIVEGTEKQSHSQSTSL

SEQ ID NO: 15903 - protein, 533 aa, Homo sapiens
MSQTSLKQKKNEPGMRSSKESLEAEKRKESDKTGVRLSNQGSQESSLRKTDSRGYLVRSQWSRISRSPSTKAPSIDEPRSRNTSAKVELPSSSTSSRTPSTSPSLHDSSPPPLSGQPSLQPPASPQLPRSLDSRPPTPPEPDPGSRRSTKMQENPEAWAQGIVREIRQTRDSQPLEYSRTSPTEWKSSSQRRGIYPASTQLDRNSLSEQQQQQREDEDDYEAAYWASMRSFYEKNPSCSRPWPPKPKNAITIALSSCALFNMVDGRKIYEQEGLEKYMEYQLTNENVILTPGPAFRFVKALQYVNARLRDLYPDEQDLFDIVLMTNNHAQVGVRLINSVNHYGLLIDRFCLTGGKDPIGYLKAYLTNLYIAADSEKVQEAIQEGIASATMFDGAKDMAYCDTQLRVAFDGDAVLFSDESEHFTKEHGLDKFFQYDTLCESKPLAQEEPRLDVLINNAGIFQCPYMKTEDGFEMQFGVNHLGHFLLTNLLLGLLKSSAPSRIVVVSSKLYKYGDINFDDLNSEQSYNKSFCYSR

SEQ ID NO: 15904 - protein, 464 aa, Homo sapiens
MAHLKRLVKLHIKRHYHKKFWKLGAVIFFFIIVLVLMQREVSVQYSKEESRMERNMKNKNKMLDLMLEAVNNIKDAMPKMQIGAPVRQNIDAGERPCLQGYYTAAELKPVLDRPPQDSNAPGASGKAFKTTNLSVEEQKEKERGEAKHCFNAFASDRISLHRDLGPDTRPPECIEQKFKRCPPLPTTSVIIVFHNEAWSTLLRTVHSVLYSSPAILLKEIILVDDASVDEYLHDKLDEYVKQFSIVKIVRQRERKGLITARLLGATVATAETLTFLDAHCECFYGWLEPLLARIAENYTAVVSPDIASIDLNTFEFNKPSPYGSNHNRGNFDWSLSFGWESLPDHEKQRRKDETYPIKTPTFAGGLFSISKEYFEYIGSYDEEMEIWGGENIEMSFRVWQCGGQLEIMPCSVVGHVFRSKSPHSFPKGTQVIARNQVRLAEVWMDEYKEIFYRRNTDAAKIVKQ

SEQ ID NO: 15905 - protein, 958 aa, Homo sapiens
MGRAAATAGGGGGARRWLPWLGLCFWAAGTAAARGTDNGEALPESIPSAPGTLPHFIEEPDDAYIIKSNPIALRCKARPAMQIFFKCNGEWVHQNEHVSEETLDESSGLKVREVFINVTRQQVEDFHGPEDYWCQCVAWSHLGTSKSRKASVRIAYLRKNFEQDPQGREVPIEGMIVLHCRPPEGVPAAEVEWLKNEEPIDSEQDENIDTRADHNLIIRQARLSDSGNYTCMAANIVAKRRSLSATVVVYVNGGWSSWTEWSACNVRCGRGWQKRSRTCTNPAPLNGGAFCEGMSVQKITCTSLCPVDGSWEVWSEWSVCSPECEHLRIRECTAPPPRNGGKFCEGLSQESENCTDGLCILDKKPLHEIKPQRWSRRGIENASDIALYSGLGAAVVAVAVLVIGVTLYRRSQSDYGVDVIDSSALTGGFQTFNFKTVRQGNSLLLNSAMQPDLTVSRTYSGPICLQDPLDKELMTESSLFNPLSDIKVKVQSSFMVSLGVSERAEYHGKNHSRTFPHGNNHSFSTMHPRNKMPYIQNLSSLPTRTELRTTGVFGHLGGRLVMPNTGVSLLIPHGAIPEENSWEIYMSINQGEPSLQSDGSEVLLSPEVTCGPPDMIVTTPFALTIPHCADVSSEHWNIHLKKRTQQGKWEEVMSVEDESTSCYCLLDPFACHVLLDSFGTYALTGEPITDCAVKQLKVAVFGCMSCNSLDYNLRVYCVDNTPCAFQEVVSDERHQGGQLLEEPKLLHFKGNTFSLQISVLDIPPFLWRIKPFTACQEVPFSRVWCSNRQPLHCAFSLERYTPTTTQLSCKICIRQLKGHEQILQVQTSILESERETITFFAQEDSTFPAQTGPKAFKIPYSIRQRICATFDTPNAKGKDWQMLAQKNSINRNLSYFATQSSPSAVILNLWEARHQHDGDLDSLACALEEIGRTHTKLSNISESQLDEADFNYSRQNGL

SEQ ID NO: 15906 - protein, 229 aa, Homo sapiens
KQAWRGSATRLGPQNSGRQECYAFNGTQRFLERYIYNREEFARFDSDVGEFRAVTELGRPAAEYWNSQKDILEEKRAVPDRMCRHNYELGGPMTLQRRVQPRVNVSPSKKGPLQHHNLLVCHVTDFYPGSIQVRWFLNGQEETAGVVSTNLIRNGDWTFQILVMLEMTPQQGDVYTCQVEHTSLDSPVTVEWKAQSDSARSKTLTGAGGFVLGLIICGVGIFMHRRSKK

SEQ ID NO: 15907 - protein, 479 aa, Homo sapiens
MLAVPNMRFGIFLLWWGWVLATESRMHWPGREVHEMSKKGRPQRQRREVHEDAHKQVSPILRRSPDITKSPLTKSEQLLRIDDHDFSMRPGFGGPAIPVGVDVQVESLDSISEVDMDFTMTLYLRHYWKDERLSFPSTNNLSMTFDGRLVKKIWVPDMFFVHSKRSFIHDTTTDNVMLRVQPDGKVLYSLRVTVTAMCNMDFSRFPLDTQTCSLEIESYAYTEDDLMLYWKKGNDSLKTDERISLSQFLIQEFHTTTKLAFYSSTGWYNRLYINFTLRRHIFFFLLQTYFPATLMVMLSWVSFWIDRRAVPARVPLGITTVLTMSTIITGVNASMPRVSYIKAVDIYLWVSFVFVFLSVLEYAAVNYLTTVQERKEQKLREKLPCTSGLPPPRTAMLDGNYSDGEVNDLDNYMPENGEKPDRMMVQLTLASERSSPQRKSQRSSYVSMRIDTHAIDKYSRIIFPAAYILFNLIYWSIFS

SEQ ID NO: 15908 - protein, 142 aa, Homo sapiens
MSEETVPEAASPPPPQGQPYFDRFSEDDPEYMRLRNRAADLRQDFNLMEQKKRVTMILQSPSFREELEGLIQEQMKKGNNSSNIWALRQIADFMASTSHAVFPTSSMNVSMMTPINDLHTADSLNLAKGERLMRCKISSVYR

SEQ ID NO: 15909 - protein, 1012 aa, Homo sapiens
MPAVASVPKELYLSSSLKDLNKKTEVKPEKISTKRYEEAEVRKKLEEKDRQEEAQRLQQKRQETGREDGGTLAKGSLENVLDSKDKTQKSNGEKNEKCETKEKGAITAKELYTMMTDKNISLIIMDARRMQDYQDSCILHSLSVPEEAISPGVTASWIEAHLPDDSKDTWKKRGNVEYVVLLDWFSSAKDLQIGTTLRSLKDALFKWESKTVLRNEPLVLEGGYENWLLCYPQYTTNAKVTPPPRRQNEEVSISLDFTYPSLEESIPSKPAAQTPPASIEVDENIELISGQNERMGPLNISTPVEPVAASKSDVSPIIQPVPSIKNVPQIDRTKKPAVKLPEEHRIKSESTNHEQQSPQSGKVIPDRSTKPVVFSPTLMLTDEEKARIHAETALLMEKNKQEKELRERQQEEQKEKLRKEEQEQKAKKKQEAEENEITEKQQKAKEEMEKKESEQAKKEDKETSAKRGKEITGVKRQSKSEHETSDAKKSVEDRGKRCPTPEIQKKSTGDVPHTSVTGDSGSGKAQREPLTRARSEEMGRIVPGLPSGWAKFLDPITGTFRYYHSPTNTVHMYPPEMAPSSAPPSTPPTHKAKPQIPAERDREPSKLKRSYSSPDITQAIQEEEKRKPTVTPTVNRENKPTCYPKAEISRLSASQIRNLNPVFGGSGPALTGLRNLGNTCYMNSILQCLCNAPHLADYFNRNCYQDDINRSNLLGHKGEVAEEFGIIMKALWTGQYRYISPKDFKITIGKINDQFAGYSQQDSQELLLFLMDGLHEDLNKADNRKRYKEENNDHLDDFKAAEHAWQKHKQLNESIIVALFQGQFKSTVQCLTCHKKSRTFEAFMYLSLPLASTSKCTLQDCLRLFSKEEKLTDNNRFYCSHCRARRDSLKKIEIWKLPPVLLVHLKRFSYDGRWKQKLQTSVDFPLENLDLSQYVIGPKNNLKKYNLFSVSNHYGGLDGGHYTAYCKNAARQRWFKFDDHEVSDISVSSVKSSAAYILFYTSLGPRVTDVAT

SEQ ID NO: 15910 - protein, 449 aa, Homo sapiens
MPATLLRAVARSHHILSKAHQCRRIGHLMLKPLKEFENTTCSTLTIRQSLDLFLPDKTASGLNKSQILEMNQKKSDTSMLSPLNAARCQDEKAHLPTMKSFGTHRRVTHKPNLLGSKWFIKILKRHFSSVSTETFVPKQDFPQVKRPLKASRTRQPSRTNLPVLSVNEDLMHCTAFATADEYHLGNLSQDLASHGYVEVTSLPRDAANILVMGVENSAKEGDPGTIFFFREGAAVFWNVKDKTMKHVMKVLEKHEIQPYEIALVHWENEELNYIKIEGQSKLHRGEIKLNSELDLDDAILEKFAFSNALCLSVKLAIWEASLDKFIESIQSIPEALKAGKKVKLSHEEVMQKIGELFALRHRINLSSDFLITPDFYWDRENLEGLYDKTCQFLSIGRRVKVMNEKLQHCMELTDLMRNHLNEKRALRLEWMIVILITIEVMFELGRVFF

SEQ ID NO: 15911 - protein, 652 aa, Homo sapiens
MLPAAPGKGLGSPDPAPCGPAPPDSEDYFEVNIPTDLRAKHSGEISERKEIEELSEASRNTIPLAVVLPTEIPCENPGEIFIILRDEVIGDTVEVEFTSSNKRIRTRPALWNKKVWCMKALEFPAGSVHVNVYCDGIVKATTKIKYYPTAKAKECLFRMADSGESLCQNSIEELDGVLTSIFKHEIPYYEFQSLQTEICSQNKYTHFKELPTLLHCAAKFGLKNLAIHLLQCSGATWASKMKNMEGSDPAHIAERHGHKELKKIFEDFSIQEIDINNEQENDYEEDIASFSTYIPSTQNPAFHHESRKTYGQSADGAEANEMEGEGKQNGSGMETKHSPLEVGSESSEDQYDDLYVFIPGADPENNSQEPLMSSRPPLPPPRPVANAFQLERPHFTLPGTMVEGQMERSQNWGHPGVRQETGDEPKGEKEKKEEEKEQEEEEDPYTFAEIDDSEYDMILANLSIKKKTGSRSFIINRPPAPTPRPTSIPPKEETTPYIAQVFQQKTARRQSDDDKFCGLPKKQDRARIESPAFSTLRGCLTDGQEELILLQEKVKNGKMSMDEALEKFKHWQMGKSGLEMIQQEKLRQLRDCIIGKRPEEENVYNKLTIVHHPGGKETAHNENKFYNVHFSNKLPARPQVEKEFGFCCKKDH

SEQ ID NO: 15912 - protein, 2156 aa, Homo sapiens
MLFFLDRMLAFPMNETFCCLWIACVFNSTLAQQGTESFQCDNGVSLPPDSICDFTDQCGDSSDERHCLNYERCDFEDGLCHMTQDQSLQPSWTKRSGMIGLSPPFYDHNGDVSAHFLSLVSRVDSISSSLRSRVFLPTNDQHDCQITFYYFSCQVSGKLMVGLQTACGGPIQHLWQNTAALPNQWERNVIKIQSSQRFQVVFEGQMASTYEQDEVIAIDDISFSSGCLPANDGILLCQEALNAERELCHPDTDLCRFDATDEELRLCQACGFEFDMCEWTSEASAGQISWMRTKAREIPAFESTPQQDQGGDDEGYYVWVGAKHGFTLNHLDSRAYLNSSVCHCLGKSCHLQFYYAMESSVLRVRLYNNKEEEIFWTYNISTHSQWVKADVLIPEDLKTFKIIFEGTLLSQRSFIALDHLWVYACGQTQSRKLCSADEFPCTSGQCIAKESVCDSRQDCSDESDEDPATCSKHLTCDFESGFCGWEPFLTEDSHWKLMKGLNNGEHHFPAADHTANINHGSFIYLEAQRSPGVAKLGSPVLTKLLTASTPCQVQFWYHLSQHSNLSVFTRTSLDGNLQKQGKIIRFSESQWSHAKIDLIAEAGESTLPFQLILEATVLSSNATVALDDISVSQECEISYKSLPRTSTQSKFSKCDFEANSCDWFEAISGDHFDWIRSSQSELSADFEHQAPPRDHSLNASQGHFMFILKKSSSLWQVAKLQSPTFSQTGPGCILSFWFYNYGLSVGAAELQLHMENSHDSTVIWRVLYNQGKQWLEATIQLGRLSQPFHLSLDKVSLGIYDGVSAIDDIRFENCTLPLPAESCEGLDHFWCRHTRACIEKLRLCDLVDDCGDRTDEVNCAPELQCNFETGICNWEQDAKDDFDWTRSQGPTPTLNTGPMKDNTLGTAKGHYLYIESSEPQAFQDSAALLSPILNATDTKGCTFRFYYHMFGKRIYRLAIYQRIWSDSRGQLLWQIFGNQGNRWIRKHLNISSRQPFQILVEASVGDGFTGDIAIDDLSFMDCTLYPGNLPADLPTPPETSVPVTLPPHNCTDNEFICRSDGHCIEKMQKCDFKYDCPDKSDEASCVMEVCSFEKRSLCKWYQPIPVHLLQDSNTFRWGLGNGISIHHGEENHRPSVDHTQNTTDGWYLYADSSNGKFGDTADILTPIISLTGPKCTLVFWTHMNGATVGSLQVLIKKDNVTSKLWAQTGQQGAQWKRAEVFLGIRSHTQIVFRAKRGISYIGDVAVDDISFQDCSPLLSPERKCTDHEFMCANKHCIAKDKLCDFVNDCADNSDETTFICRTSSGRCDFEFDLCSWKQEKDEDFDWNLKASSIPAAGTEPAADHTLGNSSGHYIFIKSLFPQQPMRAARISSPVISKRSKNCKIIFHYHMYGNGIGALTLMQVSVTNQTKVLLNLTVEQGNFWRREELSLFGDEDFQLKFEGRVGKGQRGDIALDDIVLTENCLSLHDSVQEELAVPLPTGFCPLGYRECHNGKCYRLEQSCNFVDNCGDNTDENECGSSCTFEKGWCGWQNSQADNFDWVLGVGSHQSLRPPKDHTLGNENGHFMYLEATAVGLRGDKAHFRSTMWRESSAACTMSFWYFVSAKATGSIQILIKTEKGLSKVWQESKQNPGNHWQKADILLGKLRNFEVIFQGIRTRDLGGGAAIDDIEFKNCTTVGEISELCPEITDFLCRDKKCIASHLLCDYKPDCSDRSDEAHCAHYTSTTGSCNFETSSGNWTTACSLTQDSEDDLDWAIGSRIPAKALIPDSDHTPGSGQHFLYVNSSGSKEGSVARITTSKSFPASLGMCTVRFWFYMIDPRSMGILKVYTIEESGLNILVWSVIGNKRTGWTYGSVPLSSNSPFKVAFEADLDGNEDIFIALDDISFTPECVTGGPVPVQPSPCEADQFSCIYTLQCVPLSGKCDGHEDCIDGSDEMDCPLSPTPPLCSNMEFPCSTDECIPSLLLCDGVPDCHFNEDELICSNKSCSNGALVCASSNSCIPAHQRCDGFADCMDFQLDESSCSECPLNYCRNGGTCVVEKNGPMCRCRQGWKGNRCHIKFNPPATDFTYAQNNTWTLLGIGLAFLMTHITVAVLCFLANRKVPIRKTEGSGNCAFVNPVYGNWSNPEKTESSVYSFSNPLYGTTSGSLETLSHHLK

SEQ ID NO: 15913 - protein, 482 aa, Homo sapiens
VEYHTFFRLLDQPKPKAKAVFFSRGSSFRYSGRTQKQLVDYFKDSGMKRIPYERRHSKTHTSVRALTADLPKQSISFPEGLRTPASPSSANAFYSLSPSTLVPSGLPEFKDSSSSLTDPQVSYVKSPAAERRSGAVAGGPDTPSAQPLGPPALQPGPGVGFCHVVSSCGSVCAGGQSFSALDLDTGRAGRELSAACKNDNGGDDFTTGSFPSGGEHRCDRQCRGGAPAFTLTNAQLQVSEEFIDDDPADISFFAGGSEAFSFPYGSVVPQESQASAQPLVAPPLCELPGSARSSPDRYSMEAVDMNTEDGFAFEEESDFNGNAHPSDTSELFEVKAQASRMQRLLGPSETSSLRNSQSENSSLNNMPLRGGLSVHTCSSASQSEASSMVNFPAYSVRSESSSAFQFSDIIDQLEQLSYPPTTAEDSSSTESDSWDSETEAPLDISLFFSNPFAHTSGERVPFDLQNNLKNLTPGEQIDKNPS

SEQ ID NO: 15914 - protein, 531 aa, Homo sapiens
MDGIVTEVAVGVKRGSDELLSGSVLSSPNSNMSSMVVTANGNDSKKFKGEDKMDGAPSRVLHIRKLPGEVTETEVIALGLPFGKVTNILMLKGKNQAFLELATEEAAITMVNYYSAVTPHLRNQPIYIQYSNHKELKTDNTLNQRAQAVLQAVTAVQTANTPLSGTTVSESAVTPAQSPVLRIIIDNMYYPVTLDVLHQIFSKFGAVLKIITFTKNNQFQALLQYGDPVNAQQAKLALDGQNIYNACCTLRIDFSKLVNLNVKYNNDKSRDYTRPDLPSGDGQPALDPAIAAAFAKETSLLAVPGALSPLAIPNAAAAAAAAAAGRVGMPGVSAGGNTVLLVSNLNEEMVTPQSLFTLFGVYGDVQRVKILYNKKDSALIQMADGNQSQLAMNHLNGQKMYGKIIRVTLSKHQTVQLPREGLDDQGLTKDFGNSPLHRFKKPGSKNFQNIFPPSATLHLSNIPPSVAEEDLRTLFANTGGTVKAFKFFQDHKMALLQMATVEEAIQALIDLHNYNLGENHHLRVSFSKSTI

SEQ ID NO: 15915 - protein, 1659 aa, Homo sapiens
MSSRRKRAPPVRVDEEKRQQLHWNMHEDRRNEPIIISDDDEQPCPGSDTSSAHYIILSDSLKEEVAHRDKKRCSKVVSFSKPIEKEETVGIFSPLSVKLNIVISPYHFDNSWKAFLGELTLQLLPAQSLIENFSERSITLMSSESSNQFLIYVHSKGEDVEKQKKEPMSICDKGILVESSFSGEMLEDLGWLQKKRRIKLYQKPEGNHIIKVGIYLLEAGLAKLDFLSDANSRMKKFNQLMKKVMEKLHNSIIPDVLEEDEDDPESEPEGQDIDELYHFVKQTHQQETQSIQVDVQHPALIPVLRPYQREAVNWMLQQECFRSSPATESALHFLWREIVTSEGLKLYYNPYTGCIIREYPNSGPQLLGGILADEMGLGKTVEVLALILTHTRQDVKQDALTLPEGKVVNYFIPSHYFGGKLKKTEIQNIEFEPKEKVQCPPTRVMILTAVKEMNGKKGVSILSIYKYVSSIYRYDVQRNRSLLKRMLKCLIFEGLVKQIKGHGFSGTFTLGKNYKEEDICDKTKKQAVGSPRKIQKETRKSGNKDTDSEYLPSDTSDDDDDPYYYYYKSRRNRSKLRKKLVPSTKKGKSQPFINPDSQGHCPATSDSGITDVAMSKSTCISEFNQEHETEDCAESLNHADSDVPPSNTMSPFNTSDYRFECICGELDQIDRKPRVQCLKCHLWQHAKCVNYDEKNLKIKPFYCPHCLVAMEPVSTRATLIISPSSICHQWVDEINRHVRSSSLRVLVYQGVKKDGFLQPHFLAEQDIVIITYDVLRSELNYVDIPHSNSEDGRRLRNQKRYMAIPSPLVAVEWWRICLDEAQMVECPTVKAAEMAQRLSGINRWCISGTPVQRGLEDLFGLVVFLGIEPYCVKHWWVRLLYRPYCKKNPQHLYSFIAKILWRSAKKDVIDQIQIPPQTEEIHWLHFSPVERHFYHRQHEVCCQDVVVKLRKISDWALKLSSLDRRTVTSILYPLLRLRQACCHPQAVRGEFLPLQKSFEQSTFSFSTMTMEELLTSLQKKCGTECEEAHRQLVCALNGLAGIHIIKGEYALAAELYREVLRSSEEHKGKLKTDSLQRLHATHNLMELLIARHPGIPPTLRDGRLEEEAKQLREHYMSKCNTEVAEAQQALYPVQQTIHELQRKIHSNSPWWLNVIHRAIEFTIDEELVQRVRNEITSNYKQQTGKLSMSEKGLQFLLTTQMEELNKCQKLVREAVKNLEGPPSRNVIESATVCHLRPARLPLNCCVFCKADELFTEYESKLFSNTVKGQTAIFEEMIEDEEGLVDDRAPTTTRGLWAISETERSMKAILSFAKSHRFDVEFVDEGSTSMDLFEAWKKEYKLLHEYWMALRNRVSAVDELAMATERLRVRDPREPKPNPPVLHIIEPHEVEQNRIKLLNDKAVATSQLQKKLGQLLYLTNLEKSQDKTSGGVNPEPCPICARQLGKQWAVLTCGHCFCNECISIIIEQYSVGSHRSSIKCAICRQTTSHKEISYVFTSEKANQEEDIPVKGSHSTKVEAVVRTLMKIQLRDPGAKALVFSTWQDVLDIISKALTDNNMEFAQISRVKTFQENLSAFKRDPQINILLLPLHTGSNGLTIIEATHVLLVEPILNPAHELQAIGRVHRIGQTKPTIVHRFLIKATIEERMQAMLKTAERSIYI

SEQ ID NO: 15916 - protein, 296 aa, Homo sapiens
MEALLLGAGLLLGAYVLVYYNLVKAPPCGGMGNLRGRTAVVTGISSCGRTREAFNLLLRVNHIGPFLLTHLLLPCLKACAPSRVVVVASAAHCRGRLDFKRLDRPVVGWRQELRAYADTKLANVLFARELANQLEATGVTCYAAHPGPVNSELFLRHVPGWLRPLLRPLAWLVLRAPRGGAQTPLYCALQEGIEPLSGRYFANCHVEEVPPAARDDRAAHRLWEASKRLAGLGPGEDAEPDEDPQSEDSEAPSSLSTPHPEEPTVSQPYPSPQSSPDLSKMTHRIQAKVEPEIQLS

SEQ ID NO: 15917 - protein, 372 aa, Homo sapiens
MATKPTEPVTILSLRKLSLGTAEPQVKEPKTFTVEDAVETIGFGRFHIALFLIMGSTGVFWLAGSLLIIGLASVIIPTIGWRWLIRVASIPGIILIVAFKFIPESARFNVSTGNTRAALATLERVAKMNRSVMPEGKLVEPVLEKRGRFADLLDAKYLRTTLQIWVIWLGISFAYYGVILASAELLERDLVCGSKSDSAVVVTGGDSGESQSPCYCHMFAPSDYRTMIISTIGEIALNPLNILGINFLGRRLSLSITMGCTALFFLLLNICTSSAGLIGFLFMLRALVAANFNTVYIYTAEVYPTTMRALGMGTSGSLCRIGAMVAPFISQVLMSASILGALCLFSSVCVVCAISAFTLPIETKGRALQQIK

SEQ ID NO: 15918 - protein, 209 aa, Homo sapiens
ATKTASYDEHFRPEKLREWPEPESVSLMEVLAREDIDEAVCAILFKENSIVKRLDMYFQHVDTFKERRKEMLHKKWVENVAEPLQQRIMEKVTVPPFVDPLFQRQQEVDEERRTGLQCETGKRHSIKELEEIEKARLHASSPYFTFTSHCVIPKEWHKASARARSKTYKYSPEKLIYADKKQKRKEKKTADLSQAAFERQFLSSKLSQK

SEQ ID NO: 15919 - protein, 1388 aa, Homo sapiens
GIFLGNNNQAMKATKESFCITSFLCSTKLTQNGDMLDLLKWRTHPDKITGCLSKLKEIDGSEIVKFLQDTLDTLFGILDENSQKYGSKVFDSLVHIINLLQDSKFHHFKPVMDTYIESHFAGALAYRDLIKVLKWYVDRITEAERQEHIQEVLKAQEYIFKYIVQSRRLFSLATGGQNEEEFRCCIQELLMSVRFFLSQESKGSGALSQSQAVFLSSFPAVYSELLKLFDVREVANLVQDTLGSLPTILHVDDSLQAIKLQCIGKTVESQLYTNPDSRYILLPVVLHHLHIHLQEQKDLIMCARILSNVFCLIKKNSSEKSVLEEIDVIVASLLDILLRTILEITSRPQPSSSAMRFQFQDVTGEFVACLLSLLRQMTDRHYQQLLDSFNTKEELRDFLLQIFTVFRILIRPEMFPKDWTVMRLVANNVIITTVLYLSDALRKNFLNENFDYKIWDSYFYLAVIFINQLCLQLEMFTPSKKKKVLEKYGDMRVTMGCEIFSMWQNLGEHKLHFIPALIGPFLEVTLIPQPDLRNVMIPIFHDMMDWEQRRSGNFKQVEAKLIDKLDSLMSEGKGDETYRELFNSIIPLFGPYPSLLKKIERETWRESGVSLIATVTRLMERLLDYRDCMKMGEVDGKKIGCTVSLLNFYKTELNKEEMYIRYIHKLYDLHLKAQNFTEAAYTLLLYDELLEWSDRPLREFLTYPMQTEWQRKEHLHLTIIQNFDRGKCWENGIILCRKIAEQYESYYDYRNLSKMRMMEASLYDKIMDQQRLEPEFFRVGFYGKKFPFFLRNKEFVCRGHDYERLEAFQQRMLNEFPHAIAMQHANQPDETIFQAEAQYLQIYAVTPIPESQEVLQREGVPDNIKSFYKVNHIWKFRYDRPFHKGTKDKENEFKSLWVERTSLYLVQSLPGISRWFEVEKREVVEMSPLENAIEVLENKNQQLKTLISQCQTRQMQNINPLTMCLNGVIDAAVNGGVSRYQEAFFVKEYILSHPEDGEKIARLRELMLEQAQILEFGLAVHEKFVPQDMRPLHKKLVDQFFVMKSSLGIQEFSACMQASPVHFPNGSPRVCRNSAPASVSPDGTRVIPRRSPLSYPAVNRYSSSSLSSQASAEVSNITGQSESSDEVFNMQPSPSTSSLSSTHSASPNVTSSAPSSARASPLLSDKHKHSRENSCLSPRERPCSAIYPTPVEPSQRMLFNHIGDGALPRSDPNLSAPEKASPARHTTSVSPSPAGRSPLKGSVQSFTPSPVEYHSPGLISNSPVLSGSYSSGISSLSRCSTSETSGFENQVNEQSAPLPVPVPVPVPSYGGEEPVRKESKTPPPYSVYERTLRRPVPLPHSLSIPVTSEPPALPPKPLAARSSHLENGARRTDPGPRPRPLPRKVSQL

SEQ ID NO: 15920 - protein, 1758 aa, Homo sapiens
SPGTPGPTMGRSQGSPMDPMVMKRPQLYGMGSNPHSQPQQSSPYPGGSYGPPGPQRYPIGIQGRTPGAMAGMQYPQQQMPPQYGQQGVSGYCQQGQQPYYSQQPQPPHLPPQAQYLPSQSQQRYQPQQDMSQEGYGTRSQPPLAPGKPNHEDLNLIQQERPSSLPDLSGSIDDLPTGTEATLSSAVSASGSTSSQGDQSNPAQSPFSPHASPHLSSIPGGPSPSPVGSPVGSNQSRSGPISPASIPGFMAGTQRNPQMAQYGPQQTGPSMSPHPSPGGQMHAGISSFQQSNSSGTYGPQMSQYGPQGNYSRPPAYSGVPSASYSGPGPGMGISANNQMHGQGPSQPCGAVPLGRMPSAGMQNRPFPGNMSSMTPSSPGMSQQGGPGMGPPMPTVNRKAQEAAAAVMQAAANSAQSRQGSFPGMNQSGLMASSSPYSQPMNNSSSLMNTQAPPYSMAPAMVNSSAASVGLADMMSPGESKLPLPLKADGKEEGTPQPESKSKDSYSSQGISQPPTPGNLPVPSPMSPSSASISSFHGDESDSISSPGWPKTPSSPKSSSSTTTGEKITKVYELGNEPERKLWVDRYLTFMEERGSPVSSLPAVGKKPLDLFRLYVCVKEIGGLAQVNKNKKWRELATNLNVGTSSSAASSLKKQYIQYLFAFECKIERGEEPPPEVFSTGDTKKQPKLQPPSPANSGSLQGPQTPQSTGSNSMAEVPGDLKPPTPASTPHGQMTPMQGGRSSTISVHDPFSDVSDSSFPKRNSMTPNAPYQQGMSMPDVMGRMPYEPNKDPFGGMRKVPGSSEPFMTQGQMPNSSMQDMYNQSPSGAMSNLGMGQRQQFPYGASYDRRHEPYGQQYPGQGPPSGQPPYGGHQPGLYPQQPNYKRHMDGMYGPPAKRHEGDMYNMQYSSQQQEMYNQYGGSYSGPDRRPIQGQYPYPYSRERMQGPGQIQTHGIPPQMMGGPLQSSSSEGPQQNMWAARNDMPYPYQNRQGPGGPTQAPPYPGMNRTDDMMVPDQRINHESQWPSHVSQRQPYMSSSASMQPITRPPQPSYQTPPSLPNHISRAPSPASFQRSLENRMSPSKSPFLPSMKMQKVMPTVPTSQVTGPPPQPPPIRREITFPPGSVEASQPVLKQRRKITSKDIVTPEAWRVMMSLKSGLLAESTWALDTINILLYDDSTVATFNLSQLSGFLELLVEYFRKCLIDIFGILMEYEVGDPSQKALDHNAARKDDSQSLADDSGKEEEDAECIDDDEEDEEDEEEDSEKTESDEKSSIALTAPDAAADPKEKPKQASKFDKLPIKIVKKNNLFVVDRSDKLGRVQEFNSGLLHWQLGGGDTTEHIQTHFESKMEIPPRRRPPPPLSSAGRKKEQEGKGDSEEQQEKSIIATIDDVLSARPGALPEDANPGPQTESSKFPFGIQQAKSHRNIKLLEDEPRSRDETPLCTIAHWQDSLAKRCICVSNIVRSLSFVPGNDAEMSKHPGLVLILGKLILLHHEHPERKRAPQTYEKEEDEDKGVACSKDEWWWDCLEVLRDNTLVTLANISGQLDLSAYTESICLPILDGLLHWMVCPSAEAQDPFPTVGPNSVLSPQRLVLETLCKLSIQDNNVDLILATPPFSRQEKFYATLVRYVGDRKNPVCREMSMALLSNLAQGDALAARAIAVQKGSIGNLISFLEDGVTMAQYQQSQHNLMHMQPPPLEPPSVDMMCRAAKALLAMARVDENRSEFLLHEGRLLDISISAVLNSLVASVICDVLFQIGQL

SEQ ID NO: 15921 - protein, 1001 aa, Homo sapiens
MPTEKKISSASDCINSMVEGSELKKVRSNSRIYHRYFLLDADMQSLRWEPSKKDSEKAKIDIKSIKEVRTGKNTDIFRSNGISDQISEDCAFSVIYGENYESLDLVANSADVANIWVTGLRYLISYGKHTLDMLESSQDNMRTSWVSQMFSEIDVDNLGHITLCNAVQCIRNLNPGLKTSKIELKFKELHKSKDKAGTEVTKEEFIEVFHELCTRPEIYFLLVQFSSNKEFLDTKDLMMFLEAEQGVAHINEEISLEIIHKYEPSKEGQEKGWLSIDGFTNYLMSPDCYIFDPEHKKVCQDMKQPLSHYFINSSHNTYLIEDQFRGPSDITGYIRALKMGCRSVELDVWDGPDNEPVIYTGHTMTSQIVFRSVIDIINKYAFFASEYPLILCLENHCSIKQQKVMVQHMKKLLGDKLYTTSPNVEESYLPSPDVLKGKILIKAKKLSSNCSGVEGDVTDEDEGAEMSQRMGKENMEQPNNVPVKRFQLCKELSELVSICKSVQFKEFQVSFQVQKYWEVCSFNEVLASKYANENPGDFVNYNKRFLARVFPSPMRIDSSNMNPQDFWKCGCQIVAMNFQTPGLMMDLNIGWFRQNGNCGYVLRPAIMREEVSFFSANTKDSVPGVSPQLLHIKIISGQNFPKPKGSGAKGDVVDPYVYVEIHGIPADCAEQRTKTVHQNGDAPIFDESFEFQINLPELAMVRFVVLDDDYIGDEFIGQYTIPFECLQTGYRHVPLQSLTGEVLAHASLFVHVAITNRRGGGKPHKRGLSVRKGKKSREYASLRTLWIKTVDEVFKNAQPPIRDATDLRENMQNAVVSFKELCGLSSVANLMQCMLAVSPRFLGPDNTPLVVLNLSEQYPTMELQGIVPEVLKKIVTTYDMMIQSLKALIENADAVYEKIVHCQKAAMEFHEHLHSIGTKEGLKERKLQKAVESFTWNITILKGQADLLKYAKNETLENLKQIHFAAVSCGLNKPGTENADVQKPRRSLEVIPEKANDETGE

SEQ ID NO: 15922 - protein, 263 aa, Homo sapiens
VAGPVDGGDLDPVACFLSWCRRVGLELSPKVSERAGGRRTRGGARAALTSPPAQVAVSRQGTVAGYGMVARESVQAGELLFVVPRAALLSQHTCSIGGLLERERVALQSQSGWVPLLLALLHELQAPASRWRPYFALWPELGRLEHPMFWPEEERRCLLQGTGVPEAVEKDLANIRSEYQSIVLPFMEAHPDLFSLRVRSLELYHQLVALVMAYSFQEPLEEEEDEKEPNSPVMVPAADILNHLANHNANLEYSAMTQLTFRW

SEQ ID NO: 15923 - protein, 2987 aa, Homo sapiens
MRSRLPPALAALGAALLLSSIEAEVDPPSDLNFKIIDENTVHMSWAKPVDPIVGYRITVDPTTDGPTKEFTLSASTTETLLSELVPETEYVVTITSYDEVEESVPVIGQLTIQTGSSTKPVEKKPGKTEIQKCSVSAWTDLVFLVDGSWSVGRNNFKYILDFIAALVSAFDIGEEKTRVGVVQYSSDTRTEFNLNQYYQRDELLAAIKKIPYKGGNTMTGDAIDYLVKNTFTESAGARVGFPKVAIIITDGKSQDEVEIPARELRNVGVEVFSLGIKAADAKELKQIASTPSLNHVFNVANFDAIVDIQNEIISQVCSGVDEQLGELVSGEEVVEPPSNLIAMEVSSKYVKLNWNPSPSPVTGYKVILTPMTAGSRQHALSVGPQTTTLSVRDLSADTEYQISVSAMKGMTSSEPISIMEKTQPMKVQVECSRGVDIKADIVFLVDGSYSIGIANFVKVRAFLEVLVKSFEISPNRVQISLVQYSRDPHTEFTLKKFTKVEDIIEAINTFPYRGGSTNTGKAMTYVREKIFVPSKGSRSNVPKVMILITDGKSSDAFRDPAIKLRNSDVEIFAVGVKDAVRSELEAIASPPAETHVFTVEDFDAFQRISFELTQSICLRIEQELAAIKKKAYVPPKDLSFSEVTSYGFKTNWSPAGENVFSYHITYKEAAGDDEVTVVEPASSTSVVLSSLKPETLYLVNVTAEYEDGFSIPLAGEETTEEVKGAPRNLKVTDETTDSFKITWTQAPGRVLRYRIIYRPVAGGESREVTTPPNQRRRTLENLIPDTKYEVSVIPEYFSGPGTPLTGNAATEEVRGNPRDLRVSDPTTSTMKLSWSGAPGKVKQYLVTYTPVAGGETQEVTVRGDTTNTVLQGLKEGTQYALSVTALYASGAGDALFGEGTTLEERGSPQDLVTKDITDTSIGAYWTSAPGMVRGYRVSWKSLYDDVDTGEKNLPEDAIHTMIENLQPETKYRISVFATYSSGEGEPLTGDATTELSQDSKTLKVDEETENTMRVTWKPAPGKVVNYRVVYRPHGRGKQMVAKVPPTVTSTVLKRLQPQTTYDITVLPIYKMGEGKLRQGSGTTASRFKSPRNLKTSDPTMSSFRVTWEPAPGEVKGYKVTFHPTGDDRRLGELVVGPYDNTVVLEELRAGTTYKVNVFGMFDGGESSPLVGQEMTTLSDTTVMPILSSGMECLTRAEADIVLLVDGSWSIGRANFRTVRSFISRIVEVFDIGPKRVQIALAQYSGDPRTEWQLNAHRDKKSLLQAVANLPYKGGNTLTGMALNFIRQQNFRTQAGMRPRARKIGVLITDGKSQDDVEAPSKKLKDEGVELFAIGIKNADEVELKMIATDPDDTHAYNVADFESLSRIVDDLTINLCNSVKGPGDLEAPSNLVISERTHRSFRVSWTPPSDSVDRYKVEYYPVSGGKRQEFYVSRMETSTVLKDLKPETEYVVNVYSVVEDEYSEPLKGTEKTLPVPVVSLNIYDVGPTTMHVQWQPVGGATGYILSYKPVKDTEPTRPKEVRLGPTVNDMQLTDLVPNTEYAVTVQAVLHDLTSEPVTVREVTLPLPRPQDLKLRDVTHSTMNVFWEPVPGKVRKYIVRYKTPEEDVKEVEVDRSETSTSLKDLFSQTLYTVSVSAVHDEGESPPVTAQETTRPVPAPTNLKITEVTSEGFRGTWDHGASDVSLYRITWAPFGSSDKMETILNGDENTLVFENLNPNTIYEVSITAIYPDESESDDLIGSERTLPILTTQAPKSGPRNLQVYNATSNSLTVKWDPASGRVQKYRITYQPSTGEGNEQTTTIGGRQNSVVLQKLKPDTPYTITVSSLYPDGEGGRMTGRGKTKPLNTVRNLRVYDPSTSTLNVRWDHAEGNPRQYKLFYAPAAGGPEELVPIPGNTNYAILRNLQPDTSYTVTVVPVYTEGDGGRTSDTGRTLMRGLARNVQVYNPTPNSLDVRWDPAPGPVLQYRVVYSPVDGTRPSESIVVPGNTRMVHLERLIPDTLYSVNLVALYSDGEGNPSPAQGRTLPRSGPRNLRVFGETTNSLSVAWDHADGPVQQYRIIYSPTVGDPIDEYTTVPGRRNNVILQPLQPDTPYKITVIAVYEDGDGGHLTGNGRTVGLLPPQNIHISDEWYTRFRVSWDPSPSPVLGYKIVYKPVGSNEPMEAFVGEMTSYTLHNLNPSTTYDVNVYAQYDSGLSVPLTDQGTTLYLNVTDLKTYQIGWDTFCVKWSPHRAATSYRLKLSPADGTRGQEITVRGSETSHCFTGLSPDTDYGVTVFVQTPNLEGPGVSVKEHTTVKPTEAPTEPPTPPPPPTIPPARDVCKGAKADIVFLTDASWSIGDDNFNKVVKFIFNTVGGFDEISPAGIQVSFVQYSDEVKSEFKLNTYNDKALALGALQNIRYRGGNTRTGKALTFIKEKVLTWESGMRKNVPKVLVVVTDGRSQDEVKKAALVIQQSGFSVFVVGVADVDYNELANIASKPSERHVFIVDDFESFEKIEDNLITFVCETATSSCPLIYLDGYTSPGFKMLEAYNLTEKNFASVQGVSLESGSFPSYSAYRIQKNAFVNQPTADLHPNGLPPSYTIILLFRLLPETPSDPFAIWQITDRDYKPQVGVIADPSSKTLSFFNKDTRGEVQTVTFDTEEVKTLFYGSFHKRDEGKCPAFPNSCTCTQDSVGPPGPPGPAGGPGAKGPRGERGISGAIGPPGPRGDIGPPGPQGPPGPQGPNGLSIPGEQGRQGMKGDAGEPGLPGRTGTPGLPGPPGPMGPPGDRGFTGKDGAMGPRGPPGPPGSPGSPGVTGPSGKPGKPGDHGRPGPSGLKGEKGDRGDIASQNMMRAVARQVCEQLISGQMNRFNQMLNQIPNDYQSSRNQPGPPGPPGPPGSAGARGEPGPGGRPGFPGTPGMQGPPGERGLPGEKGERGTGSSGPRGLPGPPGPQGESRTGPPGSTGSRGPPGPPGRPGNSGIRGPPGPPGYCDSSQCASIPYNGQGYPGSG

SEQ ID NO: 15924 - protein, 526 aa, Homo sapiens [sequence omitted]

SEQ ID NO: 15925 - protein, 1241 aa, Homo sapiens
MGTDSPSPRPLRPGVTLPPGALTMNTKDTTEVAENSHHLKIFLPKKLLECLPRCPLLPPERLRWNTNEEIASYLITFEKHDEWLSCAPKTRPQNGSIILYNRKKVKYRKDGYLWKKRKDGKTTREDHMKLKVQGMECLYGCYVHSSIVPTFHRRCYWLLQNPDIVLVHYLNVPALEDCGKGCSPIFCSISSDRREWLKWSREELLGQLKPMFHGIKWSCGNGTEEFSVEHLVQQILDTHPTKPAPRTHACLCSGGLGSGSLTHKCSSTKHRIISPKVEPRALTLTSIPHAHPPEPPPLIAPLPPELPKAHTSPSSSSSSSSSGFAEPLEIRPSPPTSRGGSSRGGTAILLLTGLEQRAGGLTPTRHLAPQADPRPSMSLAVVVGTEPSAPPAPPSPAFDPDRFLNSPQRGQTYGGGQGVSPDFPEAEAAHTPCSALEPAAALEPQAAARGPPPQSVAGGRRGNCFFIQDDDSGEELKGHGAAPPIPSPPPSPPPSPAPLEPSSRVGRGEALFGGPVGASELEPFSLSSFPDLMGELISDEAPSIPAPTPQLSPALSTITDFSPEWSYPEGGVKVLITGPWTEAAEHYSCVFDHIAVPASLVQPGVLRCYCPAHEVGLVSLQVAGREGPLSASVLFEYRARRFLSLPSTQLDWLSLDDNQFRMSILERLEQMEKRMAEIAAAGQVPCQGPDAPPVQDEGQGPGFEARVVVLVESMIPRSTWKGPERLAHGSPFRGMSLLHLAAAQGYARLIETLSQWRSVETGSLDLEQEVDPLNVDHFSCTPLMWACALGHLEAAVLLFRWNRQALSIPDSLGRLPLSVAHSRGHVRLARCLEELQRQEPSVEPPFALSPPSSSPDTGLSSVSSPSELSDGTFSVTSAYSSAPDGSPPPAPLPASEMTMEDMAPGQLSSGVPEAPLLLMDYEATNSKGPLSSLPALPPASDDGAAPEDADSPQAVDVIPVDMISLAKQIIEATPERIKREDFVGLPEAGASMRERTGAVGLSETMSWLASYLENVDHFPSSTPPSELPFERGRLAVPSAPSWAEFLSASTSGKMESDFALLTLSDHEQRELYEAARVIQTAFRKYKGRRLKEQQEVAAAVIQRCYRKYKQLTWIALKFALYKKMTQAAILIQSKFRSYYEQKRFQQSRRAAVLIQQHYRSYRRRPGPPHRTSATLPARNKLLSHQEAGPGSPEDHEIPAALPTQDEGTEAEPGAGRASPAGTGHMTWPPPFSPPWGRLVQS

SEQ ID NO: 15926 - protein, 860 aa, Homo sapiens
MASVWQRLGFYASLLKRQLNGGPDVIKWERRVIPGCTRSIYSATGKWTKEYTLQTRKDVEKWWHQRIKEQASKISEADVINPMGWDAFGLPAENAAVERNLHPQSWTQSNIKHMRKQLDRLGLCFSWDREITTCLPDYYKWTQYLFIKLYEAGLAYQKEALVNWDPVDQTVLANEQVDEHGCSWRSGAKVEQKYLRQWFIKTTAYAKAMQDALADLPEWYGIKGMQAHWIGDCVGCHLDFTLKVHGQATGEKLTAYTATPEAIYGTSHVAISPSHRLLHGHSSLKEALRMALVPGKDCLTPVMAVNMLTQQEVPVVILAKADLEGSLDSKIGIPSTSSEDTILAQTLGLAYSEVIETLPDGTERLSSSAEFTGMTRQDAFLALTQKARGKRVGGDVTSDKLKDWLISRQRYWGTPIPIVHCPVCGPTPVPLEDLPVTLPNIASFTGKGGPPLAMASEWVNCSCPRCKGAAKRETDTMDTFVDSAWYYFRYTDPHNPHSPFNTAVADYWMPVDLYIGGKEHAVMHLFYARFFSHFCHDQKMVKHREPFHKLLAQGLIKGQTFRLPSGQYLQREEVDLTGSVPVHAKTKEKLEVTWEKMSKSKHNGVDPEEVVEQYGIDTIRLYILFAAPPEKDILWDVKTDALPGVLRWQQRLWTLTTRFIEARASGKSPQPQLLSNKEKAEARKLWEYKNSVISQVTTHFTEDFSLNSAISQLMGLSNALSQASQSVILHSPEFEDALCALMVMAAPLAPHVTSEIWAGLALVPRKLCAHYTWDASVLLQAWPAVDPEFLQQPEVVQMAVLINNKACGKIPVPQQVARDQDKVHEFVLQSELGVRLLQGRSIKKSFLSPRTALINFLVQD

SEQ ID NO: 15927 - protein, 203 aa, Homo sapiens
MSRESDVEAQQSHGSSACSQPHGSVTQSQGSSSQSQGISSSSTSTMPNSSQSSHSSSGTLSSLETVSTQELYSIPEDQEPEDQEPEEPTPAPWARLWALQDGFANLECVNDNYWFGRDKSCEYCFDEPLLKRTDKYRTYSKKHFRIFREVGPKNSYIAYIEDHSGNGTFVNTELVGKGKRRPLNNNSEIALSLSRNKVVPVER

SEQ ID NO: 15928 - protein, 223 aa, Homo sapiens
METPLDVLSRAASLVHADDEKREAALRGEPRIQTLPVASALSSHRTGPPPISPSKRKFSMEPGDEDLDCDNDHVSKMSRIFNPHLNKTANGDCRRDPRERSRSPIERAVAPTMSLHGSHLYTSLPSLGLEQPLALTKNSLDASRPAGLSPTLTPGERQQNRPSVITCASAGARNCNLSHCPIAHSGCAAPGPASYRRPPSAATTCDPVVEEHFRRSLGKNYKE

SEQ ID NO: 15929 - protein, 151 aa, Homo sapiens
MGNVPSAVKHCLSYQQLLREHLWIGDSVAGALDPAQETSQLSGLPEFVKIVEVGPRDGLQNEKVIVPTDIKIEFINRLSQTGLSVIEVTSFVSSRWVPQVAAGATEISVFGAASESFSKKNINCSIEESMGKFEEVVKSARHMNIPARGYL

SEQ ID NO: 15930 - protein, 790 aa, Homo sapiens
MPSALAIFTCRPNSHPFQERHVYLDEPIKIGRSVARCRPAQNNATFDCKVLSRNHALVWFDHKTGKFYLQDTKSSNGTFINSQRLSRGSEESPPCEILSGDIIQFGVDVTENTRKVTHGCIVSTIKLFLPDGMEARLRSDVIHAPLPSPVDKVAANTPSMYSQELFQLSQYLQEALHREQMLEQKLATLQRLLAITQEASDTSWQALIDEDRLLSRLEVMGNQLQACSKNQTEDSLRKELIALQEDKHNYETTAKESLRRVLQEKIEVVRKLSEVERSLSNTEDECTHLKEMNERTQEELRELANKYNGAVNEIKDLSDKLKVAEGKQEEIQQKGQAEKKELQHKIDEMEEKEQELQAKIEALQADNDFTNERLTALQEKLIVEGHLTKAVEETKLSKENQTRAKESDFSDTLSPSKEKSSDDTTDAQMDEQDLNEPLAKVSLLKDDLQGAQSEIEAKQEIQHLRKELIEAQELARTSKQKCFELQALLEEERKAYRNQVEESTKQIQVLQAQLQRLHIDTENLREEKDSEITSTRDELLSARDEILLLHQAAAKVASERDTDIASLQEELKKVRAELERWRKAASEYEKEITSLQNSFQLRCQQCEDQQREEATRLQGELEKLRKEWNALETECHSLKRENVLLSSELQRQEKELHNSQKQSLELTSDLSILQMSRKELENQVGSLKEQHLRDSADLKTLLSKAENQAKDVQKEYEKTQTVLSELKLKFEMTEQEKQSITDELKQCKNNLKLLREKGNNKPWPWMPMLAALVAVTAIVLYVPGLARASP

SEQ ID NO: 15931 - protein, 95 aa, Homo sapiens
MLPPQKKPWESMAKGLVLGALFTSFLLLVYSYAVPPLHAGLASTTPEAAASCSPPALEPEAVIRANGSAGECQPRRNIVFLKTHKTASSTLLNIL

SEQ ID NO: 15932 - protein, 627 aa, Homo sapiens
MAMALTDPAQVSVTFDDVAVTFTQEEWGQLDLAQRTLYQEVMLENCGLLVSLGCPVPRPELIYHLEHGQEPWTRKEDLSQGTCPGDKGKPKSTEPTTCELALSEGISFWGQLTQGASGDSQLGQPKDQDGFSEMQGERLRPGLDSQKEKLPGKMSPKHDGLGTADSVCSRIIQDRVSLGDDVHDCDSHGSGKNPVIQEEENIFKCNECEKVFNKKRLLARHERIHSGVKPYECTECGKTFSKSTYLLQHHMVHTGEKPYKCMECGKAFNRKSHLTQHQRIHSGEKPYKCSECGKAFTHRSTFVLHNRSHTGEKPFVCKECGKAFRDRPGFIRHYIIHSGENPYECFECGKVFKHRSYLMWHQQTHTGEKPYECSECGKAFCESAALIHHYVIHTGEKPFECLECGKAFNHRSYLKRHQRIHTGEKPYVCSECGKAFTHCSTFILHKRAHTGEKPFECKECGKAFSNRADLIRHFSIHTGEKPYECMECGKAFNRRSGLTRHQRIHSGEKPYECIECGKTFCWSTNLIRHSIIHTGEKPYECSECGKAFSRSSSLTQHQRMHTGRNPISVTDVGRPFTSGQTSVNIQELLLGKNFLNVTTEENLLQEEASYMASDRTYQRETPQVSSL

SEQ ID NO: 15933 - protein, 1112 aa, Homo sapiens
MAEQEASGLQVLLHTLQSSSDKESILTILKVLGDLLSVGTDRRIHYMISKGGSEALLQTLVDTARTAPPDYDILLPLFRLLAKVGLRDKKIGRKALELEALDVTLILARKNLSHGQNLLHCLWALRVFASSVSMGAMLGINGAMELLFKVITPYTRKRTQAIRAATEVLAALLKSKSNGRRAVNRGYVTSLLGLHQDWHSHDTANAYVQIRRGLLLCLRHIAALRSGREAFLAAQGMEILFSTTQNCLDDKSMEPVISVVLQILRQCYPTSPLPLVTASSAYAFPVPGCITTEPPHDLPEEDFEDDGDDEVDKDSDTEDGKVEDDDLETDVNKLSSKPGLDRPEEELMQYEVMCLELSYSFEELQSKLGDDLNSEKTQYANHHHIPAAASSKQHCYSKDQSSCGQEREYAVQTSLLCRVKTGRSTVHLGSKKNPGVNLYQNVQSNSLRRDSSESEIPDIQASPKADAWDVDAIFCPRMSASFSNSTRTREVVKVIDKLLQTHLKRVPFHDPYLYMAKARRTSSVVDFKMMAFPDVWGHCPPPTTQPMLERKCGVQRIRIFEDIRRLIQPSDVINKVVFSLDEPWPLQDNASNCLRFFSKFESGNLRKAIQVREFEYDLLVNADVNSTQHQQWFYFKVSGMQAAIPYHFNIINCEKPNSQFNYGMQPTLYSVKEALLGKPTWIRTGHEICYYKNHYRQSTAVAGGASGKCYYTLTFAVTFPHSEDVCYLAYHYPYTYTALMTHLDILEKSVNLKEVYFRQDVLCQTLGGNPCPLVTITAMPESNSDEHLEQFRHRPYQVITARVHPGESNASWVMKGTLEFLVSSDPVARLLRENFIFKIIPMLNPDGVINGNHRCSLSGEDLNRQWLSPSAHLQPTIYHAKGLLYHLSSIGRSPVVFCDFHGHSQKKNVFLYGCSIKETLWQAACTVGTSTILEEVNYRTLPKILDKLAPAFTMSSCSFLVEKSRASTARVVVWREMGVSRSYTMESSYCGCNQGPYQCTQRLLERTKNERAHPVDGLQGLQFGTRELEEMGAMFCLGLLILELKSASCSHQLLAQAATLLSAEEDALDQHLQRLKSSNFLPKHIWFAYHFFAITNFFKMNLLLHVSPVCDT

SEQ ID NO: 15934 - protein, 554 aa, Homo sapiens
MARRPRHSIYSSDEDDEDFEMCDHDYDGLLPKSGKRHLGKTRWTREEDEKLKKLVEQNGTDDWKVIANYLPNRTDVQCQHRWQKVLNPELIKGPWTKEEDQRVIELVQKYGPKRWSVIAKHLKGRIGKQCRERWHNHLNPEVKKTSWTEEEDRIIYQAHKRLGNRWAEIAKLLPGRTDNAIKNHWNSTMRRKVEQEGYLQESSKASQPAVATSFQKNSHLMGFAQAPPTAQLPATGQPTVNNDYSYYHISEAQNVSSHVPYPVALHVNIVNVPQPAAAAIQRHYNDEDPEKEKRIKELELLLMSTENELKGQQVLPTQNHTCSYPGWHSTTIADHTRPHGDSAPVSCLGEHHSTPSLPADPGSLPEESASPARCMIVHQGTILDNDSSSWCDLSSFEFFEEADFSPSQHHTGKALQLQQREGNGTKPAGEPSPRVNKRMLSESSLDPPKVLPPARHSTIPLVILRKKRGQASPLATGDCSSFIFADVSSSTPKRSPVKSLPFSPSQFLNTSSNHENSDLEMPSLTSTPLIGHKLTVTTPFHRDQTVKTQKENTV

SEQ ID NO: 15935 - protein, 658 aa, Homo sapiens
MSSQPAGNQTSPGATEDYSYGSWYIDEPQGGEELQPEGEVPSCHTSIPPGLYHACLASLSILVLLLLAMLVRRRQLWPDCVRGRPGLPRPRAVPAAVFMVLLSSLCLLLPDEDALPFLTLASAPSQDGKTEAPRGAWKILGLFYYAALYYPLAACATAGHTAAHLLGSTLSWAHLGVQVWQRAECPQVPKIYKYYSLLASLPLLLGLGFLSLWYPVQLVRSFSRRTGAGSKGLQSSYSEEYLRNLLCRKKLGSSYHTSKHGFLSWARVCLRHCIYTPQPGFHLPLKLVLSATLTGTAIYQVALLLLVGVVPTIQKVRAGVTTDVSYLLAGFGIVLSEDKQEVVELVKHHLWALEVCYISALVLSCLLTFLVLMRSLVTHRTNLRALHRGAALDLSPLHRSPHPSRQAIFCWMSFSAYQTAFICLGLLVQQIIFFLGTTALAFLVLMPVLHGRNLLLFRSLESSWPFWLTLALAVILQNMAAHWVFLETHDGHPQLTNRRVLYAATFLLFPLNVLVGAMVATWRVLLSALYNAIHLGQMDLSLLPPRAATLDPGYYTYRNFLKIEVSQSHPAMTAFCSLLLQAQSLLPRTMAAPQDSLRPGEEDEGMQLLQTKDSMAKGARPGASRGRARWGLAYTLLHNPTLQVFRKTALLGANGAQP

SEQ ID NO: 15936 - protein, 241 aa, Homo sapiens
MDDKKKKRSPKPCLAQPAQAPGTLRRVPVPTSHSGSLALGLPHLPSPKQRAKFKRVGKEKCRPVLAGGGSGSAGTPLQHSFLTEVTDVYEMEGGLLNLLNDFHSGRLQAFGKECSFEQLEHVREMQEKLARLHFSLDVCGEEEDDEEEEDGVTEGLPEEQKKTMADRNLDQLLSNLEDLSNSMYPFQGTRLCVCVPERSVSSSPALQEYSHTTNFPTSCSPVRFSHRLPKPRYRNLEFPQN

SEQ ID NO: 15937 - protein, 479 aa, Homo sapiens
MQEVPEAAGLARVEPPRRSSGVGAARLRFPGGSRPLRARACVLALAVLALPERNNADSMSAHSMLCERIAIAKELIKRAESLSRSRKGGIEGGAKLCSKLKAELKFLQKVEAGKVAIKESHLQSTNLTHLRAIVESAENLEEVVSVLHVFGYTDTLGEKQTLVVDVVANGGHTWVKAIGRKAEALHNIWLGRGQYGDKSIIEQAEDFLQASHQQPVQYSNPHIIFAFYNSVSSPMAEKLKEMGISVRGDIVAVNALLDHPEELQPSESESDDEGPELLQVTRVDRENILASVAFPTEIKVDVCKRVNLDITTLITYVSALSYGGCHFIFKEKVLTEQAEQERKEQVLPQLEAFMKDKELFACESAVKDFQSILDTLGGPGERERATVLIKRINVVPDQPSERALRLVASSKINSRSLTIFGTGDTLKAITMTANSGFVRAANNQGVKFSVFIHQPRALTESKEALATPLPKDYTTDSEH

SEQ ID NO: 15938 - protein, 295 aa, Homo sapiens
MTENTHFDKIPESCALKSWRHPGLHHGEAALRGEPRIQTLPVASALSSHRTGPPPISPSKRKFSMEPGDEDLDCDNDHVSKMSRIFNPHLNKTANGDCRRDPRERSRSPIERAVAPTMSLHGSHLYTSLPSLGLEQPLALTKNSLDASRPAGLSPTLTPGERQQNRPSVITCASAGARNCNLSHCPIAHSGCAAPGPASYRRPPSAATTCDPVVEEHFRRSLGKNYKEPEPAPNSVSITGSVDDHFAKALGDTWLQIKAAKDGASSSPESASRRGQPASPSAHMVSHSHSPSVVS

SEQ ID NO: 15939 - protein, 419 aa, Homo sapiens
MGTLSAPPCTQRIKWKGLLLTASLLNFWNLPTTAQVTIEAEPTKVSEGKDVLLLVHNLPQNLTGYIWYKGQMRDLYHYITSYVVDGEIIIYGPAYSGRETAYSNASLLIQNVTREDAGSYTLHIIKGDDGTRGVTGRFTFTLHLETPKPSISSSNLNPRETMEAVSLTCDPETPDASYLWWMNGQSLPMTHSLKLSETNRTLFLLGVTKYTAGPYECEIRNPVSASRSDPVTLNLLPKLPKPYITINNLNPRENKDVLNFTCEPKSENYTYIWWLNGQSLPVSPRVKRPIENRILILPSVTRNETGPYQCEIRDRYGGIRSDPVTLNVLYGPDLPRIYPSFTYYRSGEVLYLSCSADSNPPAQYSWTINEKFQLPGQKLFIRHITTKHSGLYVCSVRNSATGKESSKSMTVEVSDWTVP

SEQ ID NO: 15940 - protein, 173 aa, Homo sapiens
CLHSKEHSIKATLIWRLFFLIMFLTIIVCGMVAALSAIRANCHQEPSVCLQAACPESWIGFQRKCFYFSDDTKNWTSSQRFCDSQDADLAQVESFQELNFLLRYKGPSDHWIGLSREQGQPWKWINGTEWTRQLVMKEDGANLYVAKVSQVPRMNPRPVMVSYPGSRRVCLFE

SEQ ID NO: 15941 - protein, 215 aa, Homo sapiens
MAKERCLKKSFQDSLEDIKKRMKEKRNKNLAEIGKRRSFIAAPCQIITNTSTLLKNYQDNNKMLVLALENEKSKVKEAQDIILQLRKECYYLTCQLYALKGKLTSQQTVEPAQNQEICSSGMDPNSDDSSRNLFVKDLPQIPLEETELPGQGESFQIEDQIPTIPQDTLGVDFDSGALEVSPAKEAIFILYYVREFVSRFPDCRKCKLETHICLR

SEQ ID NO: 15942 - protein, 836 aa, Homo sapiens
NCIMQEDESYLLQVLRYLIEFELKESDNPRRLLRRGTCAFSILFKLFSEGLFSAKLFLTATLHEPIMQLLVEDEDHLETDPNKLIERFSPSQQEKLFGEKGSDRFRQKVQEMVESNEAKLVALVNKFIGYLKQNTYCFPHSLRWIVSQMYKTLSCVDRLEVGEVRAMCTDLLLACFICPAVVNPEQYGIISDAPINEVARFNLMQVGRLLQQLAMTGSEEGDPRTKSSLGKFDKSCVAAFLDVVIGGRAVETPPLSSVNLLEGLSRTVVYITYSQLITLVNFMKSVMSGDQLREDRMALDNLLANLPPAKPGKSSSLEMTPYNTPQLSPATTPANKKNRLPIATRSRSRTNMLMDLHMDHEGSSQETIQEVQPEEVLVISLGTGPQLTPGMMSENEVLNMQLSDGGQGDVPVDENKLHGKPDKTLRFSLCSDNLEGISEGPSNRSNSVSSLDLEGESVSELGAGPSGSNGVEALQLLEHEQATTQDNLDDKLRKFEIRDMMGLTDDRDISETVSETWSTDVLGSDFDPNIDEDRLQEIAGAAAENMLGSLLCLPGSGSVLLDPCTGSTISETTSEAWSVEVLPSDSEAPDLKQEERLQELESCSGLGSTSDDTDVREVSSRPSTPGLSVVSGISATSEDIPNKIEDLRSECSSDFGGKDSVTSPDMDEITHGASAVVRPKVHYARPSHPPPDPPILEGAVGGNEARLPNFGSHVLTPAEMEAFKQRHSYPERLVRSRSSDIVSSVRRPMSDPSWNRRPGNEERELPPAAAIGATSLVAAPHSSSSSPSKDSSRGETEERKDSDDEKSDRNRPWWRKRFVSAMPKAPIPFRKKEKQE

SEQ ID NO: 15943 - protein, 852 aa, Homo sapiens
MGLKDHLGHDLGHLYVESTDPQLSPAVPWSTVENPSMDTVNVGKDEKEASEENASSGDSEENTNSDHESEQLGSISVEPGLITKTHRQLCRSPCLEPHILKRNEILQDFKPEESQTTSKEAKKPPDVVREYQTKLEFALKLGYSEEQVQLVLNKLGTDALINDILGELVKLGNKSEADQTVSTINTITRETSSLESQRSESPMQEIVTDDGENLRPIVIDGSNVAMSHGNKEVFSCRGIKLAVDWFLERGHKDITVFVPAWRKEQSRPDALITDQEILRKLEKEKILVFTPSRRVQGRRVVCYDDRFIVKLAFESDGIIVSNDNYRDLANEKPEWKKFIDERLLMYSFVNDKFMPPDDPLGRHGPSLDNFLRKKPIVPEHKKQPCPYGKKCTYGHKCKYYHPERGSQPQRSVADELRAMSRNTAAKTANEGGLVKSNSVPCSTKADSTSDVKRGAPKRQSDPSIRTQVYQDLEEKLPTKNKLETRSVPSLVSIPATSTAKPQSTTSLSNGLPSGVHFPPQDQRPQGQYPSMMMATKNHGTPMPYEQYPKCDSPVDIGYYSMLNAYSNLSLSGPRSPERRFSLDTDYRISSVASDCSSEGSMSCGSSDSYVGYNDRSYVSSPDPQLEENLKCQHMHPHSRLNPQPFLQNFHDPLTRGQSYSHEEPKFHHKPPLPHLALHLPHSAVGARSSCPGDYPSPPSSAHSKAPHLGRSLVATRIDSISDSRLYDSSPSRQRKPYSRQEGLGSWERPGYGIDAYGYRQTYSLPDNSTQPCYEQFTFQSLPEQQEPAWRIPYCGMPQDPPRYQDNREKIYINLCNIFPPDLVRIVMKRNPHMTDAQQLAAAILVEKSQLGY

SEQ ID NO: 15944 - protein, 1349 aa, Homo sapiens
MPQPLLPALPPLSSPSGAGSCGPSGGEVKQEPVGGRGRREWRVAPSSRPRSSPRLALPTQCSGRRLFRRRARGLRSDNMEAVKTFNSELYSLNDYKPPISKAKMTQITKAAIKAIKFYKHVVQSVEKFIQKCKPEYKVPGLYVIDSIVRQSRHQFGQEKDVFAPRFSNNIISTFQNLYRCPGDDKSKIVRVLNLWQKNNVFKSEIIQPLLDMAAGIPPPVVTPVLASTTTAMSNTPGTPVTPVTPANVVQGLPDPWVSQITNTDTLAAVAQILQSPQGQQLQQLIQTLQIQQQKPQPSILQALDAGLVVQLQALTAQLTAAAAAANTLTPLEQGVSFNKKLMDRFDFGEDSEHSEEPKKEIPASQLSHVSESVNNSIFHQIAEQLQQQNLEHLRQQLLEQQQPQKATPQDSQEGTFGSEHSASPSQGSSQQHFLEPEVNLDDSIDIQQQDMDIDEGQDGVEEEVFEQEAKKVAVRSRSRTHSRSRSRSPRKRRSRSRSGSRKRKHRKRSRSRSRERKRKSSRSYSSERRAREREKERQKKGLPPIRSKTLSVCSTTLWVGQVDKKATQQDLTNLFEEFGQIESINMIPPRGCAYVCMVHRQDAFRALQKLSSGSYKIGSKVIKIAWALNKGVKTEYKQFWDVDLGVTYIPWEKVKVDDLEGFAEGGMIDQETVNTEWETVKSSEPVKETVQTTQSPTPVEKETVVTTQAEVFPPPVAMLQIPVAPAVPTVSLVPPAFPVSMPVPPPGFSPIPPPPFLRASFNPSQPPPGFMPPPVPPPVVPPPTIPPVVPTSLVQPSLSMTPETVKDVGFGSLVIPGGSVASNLATSALPAGNVFNAPTKQAEPEEKVPHLIDHQISSGENTRSVIPNDISSNAAILGGQPPNVTSNSGILGVQRPNVSSNSEILGVRPSNVSSSSGIIAAQPPNILNNSGILGIQPPSVSNSSGLLGVLPPNIPNNSGLVGVQPPNVPNTPGLLGTQPPAGPQNLPPLSIPNQRMPTMPMLDIRPGLIPQAPGPRFPLIQPGIPPQRGIPPPSVLDSALHPPPRGPFPPGDIFSQPERPFLAPGRQSVDNVTNPEKRIPLGNDNIQQEGDRDYRFPPIETRESISRPPPVDVRDVVGRPIDPREGPGRPPLDGRDHFGRPPVDIRENLVRPGIDHLGRRDHFGFNPEKPWGHRGDFDEREHRVLPVYGGPKGLHEERGRFRSGNYRFDPRSGPWNRGFGQEVHRDFDDRRRPWERQRDRDDRDFDFCREMNGNRLGRDRIQNTWVPPPHARVFDYFEGATSQRKGDNVPQVNGENTERHAQPPPIPVQNDPELYEKLTSSNEINKEKSDTVADIESEPVVESTETEGT

SEQ ID NO: 15945 - protein, 481 aa, Homo sapiens
MGTLGKAREAPRKPSHGCRAASKARLEAKPANSPFPSHPSLAHITQFRMMVSLGHLAKGASLDDLIDSCIQSFDADGNLCRSNQLLQVMLTMHRIVISSAELLQKVITLYKDALAKNSPGLCLKICYFVRYWITEFWVMFKMDASLTDTMEEFQELVKAKGEELHCRLIDTTQINARDWSRKLTQRIKSNTSKKRKVSLLFDHLEPEELSEHLTYLEFKSFRRISFSDYQNYLVNSCVKENPTMERSIALCNGISQWVQLMVLSRPTPQLRAEVFIKFIQVAQKLHQLQNFNTLMAVIGGLCHSSISRLKETSSHVPHEINKVLGEMTELLSSSRNYDNYRRAYGECTDFKIPILGVHLKDLISLYEAMPDYLEDGKVNVHKLLALYNHISELVQLQEVAPPLEANKDLVHLLTLSLDLYYTEDEIYELSYAREPRNHRAPSVFKNYDHDQDGYISQEEFEKIAASFPFSFCVMDKDSSGE

SEQ ID NO: 15946 - protein, 178 aa, Homo sapiens
MSAHSMLCERIAIAKELIKRAESLSRSRKGGIEGGAKLCSKLKAELKFLQKVEAGKVAIKESHLQSTNLTHLRAIVESAENLEEVVSVLHVFGYTDTLGEKQTLVVDVVANGGHTWVKAIGRKAEALHNIWLGRGQYGDKSIIEQAEDFLQASHQQPVQYSNPHIIFAFYNSVSSPMA

SEQ ID NO: 15947 - protein, 1551 aa, Homo sapiens
MNLDSLSLALSQISYLVDNLTKKNYRASQQEIQHIVNRHGPEADRHLLRCLFSHVDFSGDGKSSGKDFHQTQFLIQECALLITKPNFISTLSYAIDNPLHYQKSLKPAPHLFAQLSKVLKLSKVQEVIFGLALLNSSSSDLRGFAAQFIKQKLPDLLRSYIDADVSGNQEGGFQDIAIEVLHLLLSHLLFGQKGAFGVGQEQIDAFLKTLRRDFPQERCPVVLAPLLYPEKRDILMDRILPDSGGVAKTMMESSLADFMQEVGYGFCASIEECRNIIVQFGVREVTAAQVARVLGMMARTHSGLTDGIPLQSISAPGSGIWSDGKDKSDGAQAHTWNVEVLIDVLKELNPSLNFKEVTYELDHPGFQIRDSKGLHNVVYGIQRGLGMEVFPVDLIYRPWKHAEGQLSFIQHSLINPEIFCFADYPCHTVATDILKAPPEDDNREIATWKSLDLIESLLRLAEVGQYEQVKQLFSFPIKHCPDMLVLALLQINTSWHTLRHELISTLMPIFLGNHPNSAIILHYAWHGQGQSPSIRQLIMHAMAEWYMRGEQYDQAKLSRILDVAQDLKALSMLLNGTPFAFVIDLAALASRREYLKLDKWLTDKIREHGEPFIQACMTFLKRRCPSILGGLAPEKDQPKSAQLPPETLATMLACLQACAGSVSQELSETILTMVANCSNVMNKARQPPPGVMPKGRPPSASSLDAISPVQIDPLAGMTSLSIGGSAAPHTQSMQGFPPNLGSAFSTPQSPAKAFPPLSTPNQTTAFSGIGGLSSQLPVGGLGTGSLTGIGTGALGLPAVNNDPFVQRKLGTSGLNQPTFQQSKMKPSDLSQVWPEANQHFSKEIDDEANSYFQRIYNHPPHPTMSVDEVLEMLQRFKDSTIKREREVFNCMLRNLFEEYRFFPQYPDKELHITACLFGGIIEKGLVTYMALGLALRYVLEALRKPFGSKMYYFGIAALDRFKNRLKDYPQYCQHLASISHFMQFPHHLQEYIEYGQQSRDPPVKMQGSITTPGSIALAQAQAQAQVPAKAPLAGQVSTMVTTSTTTTVAKTVTVTRPTGVSFKKDVPPSINTTNIDTLLVATDQTERIVEPPENIQEKIAFIFNNLSQSNMTQKVEELKETVKEEFMPWVSQYLVMKRVSIEPNFHSLYSNFLDTLKNPEFNKMVLNETYRNIKVLLTSDKAAANFSDRSLLKNLGHWLGMITLAKNKPILHTDLDVKSLLLEAYVKGQQELLYVVPFVAKVLESSIRSVVFRPPNPWTMAIMNVLAELHQEHDLKLNLKFEIEVLCKNLALDINELKPGNLLKDKDRLKNLDEQLSAPKKDVKQPEELPPITTTTTSTTPATNTTCTATVPPQPQYSYHDINVYSLAGLAPHITLNPTIPLFQAHPQLKQCVRQAIERAVQELVHPVVDRSIKIAMTTCEQIVRKDFALDSEESRMRIAAHHMMRNLTAGMAMITCREPLLMSISTNLKNSFASALRVSWLFPWYRYKTYYCLSVIIFFFVYIWHWALPLILNNHHICLMSSIILDCNSVRQSIMSVCFFFFLLYSQHDV

SEQ ID NO: 15948 - protein, 650 aa, Homo sapiens
MASPADSCIQFTRHASDVLLNLNRLRSRDILTDVVIVVSREQFRAHKTVLMACSGLFYSIFTDQLKCNLSVINLDPEINPEGFCILLDFMYTSRLNLREGNIMAVMATAMYLQMEHVVDTCRKFIKASEAEMVSAIKPPREEFLNSRMLMPQDIMAYRGREVVENNLPLRSAPGCESRAFAPSLYSGLSTPPASYSMYSHLPVSSLLFSDEEFRDVRMPVANPFPKERALPCDSARPVPGEYSRPTLEVSPNVCHSNIYSPKETIPEEARSDMHYSVAEGLKPAAPSARNAPYFPCDKASKEEERPSSEDEIALHFEPPNAPLNRKGLVSPQSPQKSDCQPNSPTESCSSKNACILQASGSPPAKSPTDPKACNWKKYKFIVLNSLNQNAKPEGPEQAELGRLSPRAYTAPPACQPPMEPENLDLQSPTKLSASGEDSTIPQASRLNNIVNRSMTGSPRSSSESHSPLYMHPPKCTSCGSQSPQHAEMCLHTAGPTFPEEMGETQSEYSDSSCGEKPYRCNICGAQFNRPANLKTHTRIHSGEKPYKCETCGARFVQVAHLRAHVLIHTGEKPYPCEICGTRFRHLQTLKSHLRIHTGEKPYHCEKCNLHFRHKSQLRLHLRQKHGAITNTKVQYRVSATDLPPELPKAC

SEQ ID NO: 15949 - protein, 216 aa, Homo sapiens
MKVLWAALLVTFLAGCQAKVEQAVETEPEPELRQQTEWQSGQRWELALGRFWDYLRWVQTLSEQVQEELLSSQVTQELRALMDETMKELKAYKSELEEQLTPVAEETRARLSKELQAAQARLGADMEDVCGRLVQYRGEVQAMLGQSTEELRVRLASHLRKLRKRLLRDADDLQKRLAVYQAGAREGAERGLSAIRERLGPLVEQGRVRAATVGSL

SEQ ID NO: 15950 - protein, 892 aa, Homo sapiens
MFCAAVLENLGQTIVPDLGSLESQHDFRTPEFEEFNGKPDSLFFNDGQRRIDFVLVYEDESRKETNKKGTNEKQRRKRQAYESNLICHGLQLEATRSVLDDKLVFVKVHAPWEVLCTYAEIMHIKLPLKPNDLKNRSSAFGTLNWFTKVLSVDESIIKPEQEFFTAPFEKNRMNDFYIVDRDAFFNPATRSRIVYFILSRVKYQVINNVSKFGINRLVNSGIYKAAFPLHDCKFRRQSEDPSCPNERYLLYREWAHPRSIYKKQPLDLIRKYYGEKIGIYFAWLGYYTQMLLLAAVVGVACFLYGYLNQDNCTWSKEVCHPDIGGKIIMCPQCDRLCPFWKLNITCESSKKLCIFDSFGTLVFAVFMGVWVTLFLEFWKRRQAELEYEWDTVELQQEEQARPEYEARCTHVVINEITQEEERIPFTAWGKCIRITLCASAVFFWILLIIASVIGIIVYRLSVFIVFSAKLPKNINGTDPIQKYLTPQTATSITASIISFIIIMILNTIYEKVAIMITNFELPRTQTDYENSLTMKMFLFQFVNYYSSCFYIAFFKGKFVGYPGDPVYWLGKYRNEECDPGGCLLELTTQLTIIMGGKAIWNNIQEVLLPWIMNLIGRFHRVSGSEKITPRWEQDYHLQPMGKLGLFYEYLEMIIQFGFVTLFVASFPLAPLLALVNNILEIRVDAWKLTTQFRRLVPEKAQDIGAWQPIMQGIAILAVVTNAMIIAFTSDMIPRLVYYWSFSVPPYGDHTSYTMEGYINNTLSIFKVADFKNKSKGNPYSDLGNHTTCRYRDFRYPPGHPQEYKHNIYYWHVIAAKLAFIIVMEHVIYSVKFFISYAIPDVSKRTKSKIQREKYLTQKLLHENHLKDMTKNMGVIAERMIEAVDNNLRPKSE

SEQ ID NO: 15951 - protein, 752 aa, Homo sapiens
LEESMPEDQEPVSASTHIASSLGINPHVLQIMKASLLTDEEDVDMALDQRFSRLPSKADTSQEICSPRLPISASHSSKTRSLVGGLLQSKFTSGAFLSPSVSVQECRTPRAASLMNIPSTSSCLTESPFKVHLEKLSLRQRKPDEDMKLYQTPLELKLKHSTVHVDELCPLIVPNLGVAVIHDYADWVKEASGDLPEAQIVKHWSLTWTLCEALWGHLKELDSQLNEPREYIQILERRRAFSRWLSCTATPQIEEEVSLTQKNSPVEAVFSYLTGKRISEACSLAQQSGDHRLALLLSQFVGSQSVRELLTMQLVDWHQLQADSFIQDERLRIFALLAGKPVWQLSEKKQINVCSQLDWKRSLAIHLWYLLPPTASISRALSMYEEAFQNTSDSDRYACSPLPSYLEGSGCVIAEEQNSQTPLRDVCFHLLKLYSDRHYDLNQLLEPRSITADPLDYRLSWHLWEVLRALNYTHLSAQCEGVLQASYAGQLESEGLWEWAIFVLLHIDNSGIREKAVRELLTRHCQLLETPESWAKETFLTQKLRVPAKWIHEAKAVRAHMESDKHLEALCLFKAEHWNRCHKLIIRHLASDAIINENYDYLKGFLEDLAPPERSSLIQDWETSGLVYLDYIRVIEMLRHIQQVDCSGNDLEQLHIKVTSLCSRIEQIQCYSAKDRLAQSDMAKRVANLLRVVLSLHHPPDRTSDSTPDPQRVPLRLLAPHIGRLPMPEDYAMDELRSLTQSYLRELAVGSL

SEQ ID NO: 15952 - protein, 315 aa, Homo sapiens
MLVLVAQAGGDTLKVTGHYVKCVFLLFVSHLLSEPLSRTVDHGMFENLNTALTPKLQASRSFPHLSKPVAPGSAPLGSGEPGGPGLWVGSSQHLKNLGKAMGAKVNDFLRRKEPSSLGSVGVTEINKTAGAQLASGTDAAPEAWLEDERSVLQETFPRLDPPPPITRKRTPRALKTTQDMLISSQPVLSSLEYGTEPSPGQAQDSAPTAQPDVPADASQPEATMEREERGKVLPNGEVSLSVPDLIHKDSQDESKLKMTECRRASSPSLIERNGFKLSLSPISLAESWEDGSPPPQARTSSLDNEGPHPDLLSFE

SEQ ID NO: 15953 - protein, 622 aa, Homo sapiens
MEICADPQFIIGGATRTDICQGALGDCWLLAAIASLTLNEEILARVVPLNQSFQENYAGIFHFQFWQYGEWVEVVVDDRLPTKDGELLFVHSAEGSEFWSALLEKAYAKINGCYEALSGGATTEGFEDFTGGIAEWYELKKPPPNLFKIIQKALQKGSLLGCSIDITSAADSEAITFQKLVKGHAYSVTGAEEVESNGSLQKLIRIRNPWGEVEWTGRWNDNCPSWNTIDPEERERLTRRHEDGEFWMSFSDFLRHYSRLEICNLTPDTLTSDTYKKWKLTKMDGNWRRGSTAGGCRNYPNTFWMNPQYLIKLEEEDEDEEDGESGCTFLVGLIQKHRRRQRKMGEDMHTIGFGIYEVPEELSGQTNIHLSKNFFLTNRARERSDTFINLREVLNRFKLPPGEYILVPSTFEPNKDGDFCIRVFSEKKADYQAVDDEIEANLEEFDISEDDIDDGFRRLFAQLAGEDAEISAFELQTILRRVLAKRQDIKSDGFSIETCKIMVDMLDSDGSGKLGLKEFYILWTKIQKYQKIYREIDVDRSGTMNSYEMRKALEEAGFKMPCQLHQVIVARFADDQLIIDFDNFVRCLVRLETLFKIFKQLDPENTGTIELDLISWLCFSVL

SEQ ID NO: 15954 - protein, 869 aa, Homo sapiens
MNKAPQSTGPPPAPSPGLPQPAFPPGQTAPVVFSTPQATQMNTPSQPRQGGFRSLQHFYPSRAQPPSSAASRVQSAAPARPGPAAHVYPAGSQVMMIPSQISYPASQGAYYIPGQGRSTYVVPTQQYPVQPGAPGFYPGASPTEFGTYAGAYYPAQGVQQFPTGVAPTPVLMNQPPQIAPKRERKTIRIRDPNQGGKDITEEIMSGARTASTPTPPQTGGGLEPQANGETPQVAVIVRPDDRSQGAIIADRPGLPGPEHSPSESQPSSPSPTPSPSPVLEPGSEPNLAVLSIPGDTMTTIQMSVEESTPISRETGEPYRLSPEPTPLAEPILEVEVTLSKPVPESEFSSSPLQAPTPLASHTVEIHEPNGMVPSEDLEPEVESSPELAPPPACPSESPVPIAPTAQPEELLNGAPSPPAVDLSPVSEPEEQAKEVTASMAPPTIPSATPATAPSATSPAQEEEMEEEEEEEEGEAGEAGEAESEKGGEELLPPESTPIPANLSQNLEAAAATQVAVSVPKRRRKIKELNKKEAVGDLLDAFKEANPAVPEVENQPPAGSNPGPESEGSGVPPRPEEADETWDSKEDKIHNAENIQPGEQKYEYKSDQWKPLNLEEKKRYDREFLLGFQFIFASMQKPEGLPHISDVVLDKANKTPLRPLDPTRLQGINCGPDFTPSFANLGRTTLSTRGPPRGGPGGELPRGPQAGLGPRRSQQGPRKEPRKIIATVLMTEDIKLNKAEKAWKPSSKRTAADKDRGEEDADGSKTQDLFRRVRSILNKLTPQMFQQLMKQVTQLAIDTEERLKGVIDLIFEKAISEPNFSVAYANMCRCLMALKVPTTEKPTVTVNFRKLLLNRCQKEFEKDKDDDEVF

SEQ ID NO: 15955 - protein, 435 aa, Homo sapiens
MAQAVWSRLGRILWLACLLPWAPAGVAAGLYELNLTTDSPATTGAVVTISASLVAKDNGSLALPADAHLYRFHWIHTPLVLTGKMEKGLSSTIRVVGHVPGEFPVSVWVTAADCWMCQPVARGFVVLPITEFLVGDLVVTQNTSLPWPSSYLTKTVLKVSFLLHDPSNFLKTALFLYSWDFGDGTQMVTEDSVVYYNYSIIGTFTVKLKVVAEWEEVEPDATRAVKQKTGDFSASLKLQETLRGIQVLGPTLIQTFQKMTVTLNFLGSPPLTVCWRLKPECLPLEEGECHPVSVASTAYNLTHTFRDPGDYCFSIRAENIISKTHQYHKIQVWPSRIQPAVFAFPCATLITVMLAFIMYMTLRNATQQKDMVEVADFDFSPMSDKNPEPPSGVRCCCQMCCGPFLLETPSEYLEIVRENHGLLPPLYKSVKTYTV

SEQ ID NO: 15956 - protein, 352 aa, Homo sapiens
MAYHSFLVEPISCHAWNKDRTQIAICPNNHEVHIYEKSGAKWTKVHELKEHNGQVTGIDWAPESNRIVTCGTDRNAYVWTLKGRTWKPTLVILRINRAARCVRWAPNENKFAVGSGSRVISICYFEQENDWWVCKHIKKPIRSTVLSLDWHPNNVLLAAGSCDFKCRIFSAYIKEVEERPAPTPWGSKMPFGELMFESSSSCGWVHGVCFSASGSRVAWVSHDSTVCLADADKKMAVATLASETLPLLALTFITDNSLVAAGHDCFPVLFTYDAAAGMLSFGGRLDVPKQSSQRGLTARERFQNLDKKASSEGGTAAGAGLDSLHKNSVRSRCSAAARPSARSSAPLAWMAA

SEQ ID NO: 15957 - protein, 209 aa, Homo sapiens
MMVQGQEYEAGGSVIHPLNLHMKRFVKDLGLSAVQASGGLLGIYNGETLVFEESNWFIINVIKLVWRYGFQSLRMHMWVEDVLDKFMRIYRYQSHDYAFSSVEKLLHALGGDDFLGMLNRTLLETLQKAGFSEKFLNEMIAPVMRVNYGQSTDINAFVGAVSLSCSDSGLWAVEGGNKLVCSGLLQASKSNLISGSVMYIEEKTKTKYT

SEQ ID NO: 15958 - protein, 274 aa, Homo sapiens
MRFTFTSRCLALFLLLNHPTPILPAFSNQTYPTIEPKPFLYVVGRKKMMDAQYKCYDRMQQLPAYQGEGPYCNRTWDGWLCWDDTPAGVLSYQFCPDYFPDFDPSEKVTKYCDEKGVWFKHPENNRTWSNYTMCNAFTPEKLKNAYVLYYLAIVGHSLSIFTLVISLGIFVFFRSLGCQRVTLHKNMFLTYILNSMIIIIHLVEVVPNGELVRRDPVSCKILHFFHQYMMACNYFWMLCEGIYLHTLIVVAVFTEKQRLRWYYLLGWAPAFHRD

SEQ ID NO: 15959 - protein, 245 aa, Homo sapiens
MAAAPPSYCFVAFPPRAKDGLVVFGKNSARPRDEVQEVVYFSAADHEPESKVECTYISIDQVPRTYAIMISRPAWLWGAEMGANEHGVCIANEAINTREPAAEIEALLGMDLVRLGLERGETAKEALDVIVSLLEEHGQGGNYFEDANSCHSFQSAYLIVDRDEAWVLETIGKYWAAEKVTEGVRCICSQLSLTTKMDAEHPELRSYAQSQGWWTGEGEFNFSEVFSPVEDHLDCGAGKDSLEKQ

SEQ ID NO: 15960 - protein, 270 aa, Homo sapiens
LLAALRRGGREPPTGGSRLASSSEVLASIENIIQDIITSLARNEAPAFTIDNRSSWENIKFEDSVGLQMVSHCTTRKIKSDSPKSAQKFSLILKILSMIYKLVQSNTYATKRDIYYTDSQLFGNQTVVDNIINDISCMLKVSRRSLHILSTSKGLIAGNLRYIEEDGTKVNCTCGATAVAVPSNIQGIRITDAKFVLIVEKDATFQRLLDDNFCNKLSPCIMITGKGVPDLNTRLLVKKLWDTFHVPVFTLVDADPHGIEIMCIYKYGSM

SEQ ID NO: 15961 - protein, 1040 aa, Homo sapiens
MMSSVSTESKLQQAVSLQGVDPETCMIVFKNHWAQVVKILEKHDPLKNTQAKYGSIPPDEASAVQNYVEHMLFLLIEEQAKDAAMGPILEFVVSENIMEKLFLWSLRREFTDETKIEQLKMYEMLVTQSHQPLLHHKPILKPLMMLLSSCSGTTTPTVEEKLVVLLNQLCSILAKDPSILELFFHTSEDQGAANFLIFSLLIPFIHREGSVGQQARDALLFIMSLSAENTMVAHHIVENTYFCPVLATGLSGLYSSLPTKLEEKGEEWHCLLKDDWLLLPSLVQFMNSLEFCNAVIQVAHPLIRNQLVNYIYNGFLVPVLAPALHKVTVEEVMTTTAYLDLFLRSISEPALLEIFLRFILLHQHENVHILDTLTSRINTPFRLCVVSLALFRTLIGLHCEDVMLQLVLRYLIPCNHMMLSQRWAVKERDCYSVSAAKLLALTPVCCSSGITLTLGNQERDYILWSKCMHDTSGPVERPFPEAFSESACIVEYGKALDISYLQYLWEAHTNILRCMRDCRVWSALYDGDSPDPEMFLQSLTEEGSVSSACPVFGLPQQLPRKTGPQLAPRKDKSQTELEWDDSYDTGISSGADVGSPGPYDDLEVSGPPAPIDPPKHIQEMKKNALLLFKGSYIEESDFQDDVMVYRLCAEKDSEDMKDSQEEAARPPAEAQAEVQSVPINNGPLLSTQPETDSEEEWNRDNSDPFHSEPKEPKQEREPEAAPESNSELASPAPEAEHSSNLTAAHPESEELIAQYDQIIKELDSGAEGLMEQNYPTPDPLLLTKEEEGKEESKGEKEKEGKKELEDEEDDFDSFIAEMPAVETVPSPFVGRDEAAFASRHPVRTQSTPFTGPFISVVLSKLENMLENSLHVNLLLIGIITQLASYPQPLLRSFLLNTNMVFQPSVRSLYQVLASVKNKIEQFASVERDFPGLLIQAQQYLLFRVDMSDMTPAALTKDPIQEASRTGSGKNLLDGPPRVLQPFLTHRTKVAEAPPNLPLPVRNPMLAAALFPEFLKELAALAQEHSILCYKILGDFEDSCC

SEQ ID NO: 15962 - protein, 969 aa, Homo sapiens
MWAMESGHLLWALLFMQSLWPQLTDGATRVYYLGIRDVQWNYAPKGRNVITNQPLDSDIVASSFLKSDKNRIGGTYKKTIYKEYKDDSYTDEVAQPAWLGFLGPVLQAEVGDVILIHLKNFATRPYTIHPHGVFYEKDSEGSLYPDGSSGPLKADDSVPPGGSHIYNWTIPEGHAPTDADPACLTWIYHSHVDAPRDIATGLIGPLITCKRGALDGNSPPQRQDVDHDFFLLFSVVDENLSWHLNENIATYCSDPASVDKEDETFQESNRMHAINGFVFGNLPELNMCAQKRVAWHLFGMGNEIDVHTAFFHGQMLTTRGHHTDVANIFPATFVTAEMVPWEPGTWLISCQVNSHFRDGMQALYKVKSCSMAPPVDLLTGKVRQYFIEAHEIQWDYGPMGHDGSTGKNLREPGSISDKFFQKSSSRIGGTYWKVRYEAFQDETFQEKMHLEEDRHLGILGPVIRAEVGDTIQVVFYNRASQPFSMQPHGVFYEKDYEGTVYNDGTFEIYCQAGSHREAGMRAIYNVSQCPGHQATPRQRYQAARIYYIMAEEVEWDYCPDRSWEREWHNQSEKDSYGYIFLSNKDGLLGSRYKKAVFREYTDGTFRIPRPRTGPEEHLGILGPLIKGEVGDILTVVFKNNASRPYSVHAHGVLESTTVWPLAAEPGEVVTYQWNIPERSGPGPNDSACVSWIYYSAVDPIKDMYSGLVGPLAICQKGILEPHGGRSDMDREFALLFLIFDENKSWYLEENVATHGSQDPGSINLQDETFLESNKMHAINGKLYANLRGLTMYQGERVAWYMLAMGQDVDLHTIHFHAESFLYRNGENYRADVVDLFPGTFEVVEMVASNPGTWLMHCHVTDHVHAGMETLFTVFSRTEHLSPLTVITKETEKAVPPRDIEEGNVKMLGMQIPIKNVEMLASVLVAISVTLLLVVLALGGVVWYQHRQRKLRRNRRSILDDSFKLLSFKQ

SEQ ID NO: 15963 - protein, 832 aa, Homo sapiens
MAMLPPPGPQSFVHFTKQSLALIEQRIAERKSKEPKEEKKDDDEEAPKPSSDLEAGKQLPFIYGDIPPGMVSEPLEDLDPYYADKKTFIVLNKGKTIFRFNATPALYMLSPFSPLRRISIKILVHSLFSMLIMCTILTNCIFMTMNNPPDWTKNVEYTFTGIYTFESLVKILARGFCVGEFTFLRDPWNWLDFVVIVFAYLTEFVNLGNVSALRTFRVLRALKTISVIPGLKTIVGALIQSVKKLSDVMILTVFCLSVFALIGLQLFMGNLKHKCFRNSLENNETLESIMNTLESEEDFRKYFYYLEGSKDALLCGFSTDSGQCPEGYTCVKIGRNPDYGYTSFDTFSWAFLALFRLMTQDYWENLYQQTLRAAGKTYMIFFVVVIFLGSFYLINLILAVVAMAYEEQNQANIEEAKQKELEFQQMLDRLKKEQEEAEAIAAAAAEYTSIRRSRIMGLSESSSETSKLSSKSAKERRNRRKKKNQKKLSSGEEKGDAEKLSKSESEDSIRRKSFHLGVEGHRRAHEKRLSTPNQSPLSIRGSLFSARRSSRTSLFSFKGRGRDIGSETEFADDEHSIFGDNESRRGSLFVPHRPQERRSSNISQASRSPPMLPVNGKMHSAVDCNGVVSLVDGRSALMLPNGQLLPEGTTNQIHKKRRCSSYLLSEDMLNDPNLRQRAMSRASILTNTVEELEESRQKCPPWWYRFAHKFLIWNCSPYWIKFKKCIYFIVMDPFVDLAITICIVLNTLFMAMEHHPMTEEFKNVLAIGNLVFTGIFAAEMVLKLIAMDPYEYFQVGWNIFDSLIVTLSLVELFLADVEGLSVLRSFRLVNIN

SEQ ID NO: 15964 - protein, 254 aa, Homo sapiens
MGLSTVPDLLLPLVLLELLVGIYPSGVIGLVPHLGDREKRDSVCPQGKYIHPQNNSICCTKCHKGTYLYNDCPGPGQDTDCRECESGSFTASENHLRHCLSCSKCRKEMGQVEISSCTVDRDTVCGCRKNQYRHYWSENLFQCFNCSLCLNGTVHLSCERSSPEAKPSPHPRGWPLPHAVALPFLPPPVFCGSDNQLLSGRPHPVPRHFLCPVGWGCRRFSFSCAALLPTGQEKQNTVCTCHAGFFLRENECVS

SEQ ID NO: 15965 - protein, 939 aa, Homo sapiens
MPAVSKGDGMRGLAVFISDIRNCKSKEAEIKRINKELANIRSKFKGDKALDGYSKKKYVCKLLFIFLLGHDIDFGHMEAVNLLSSNRYTEKQIGYLFISVLVNSNSELIRLINNAIKNDLASRNPTFMGLALHCIASVGSREMAEAFAGEIPKVLVAGDTMDSVKQSAALCLLRLYRTSPDLVPMGDWTSRVVHLLNDQHLGVVTAATSLITTLAQKNPEEFKTSVSLAVSRLSRIVTSASTDLQDYTYYFVPAPWLSVKLLRLLQCYPPPDPAVRGRLTECLETILNKAQEPPKSKKVQHSNAKNAVLFEAISLIIHHDSEPNLLVRACNQLGQFLQHRETNLRYLALESMCTLASSEFSHEAVKTHIETVINALKTERDVSVRQRAVDLLYAMCDRSNAPQIVAEMLSYLETADYSIREEIVLKVAILAEKYAVDYTWYVDTILNLIRIAGDYVSEEVWYRVIQIVINRDDVQGYAAKTVFEALQAPACHENLVKVGGYILGEFGNLIAGDPRSSPLIQFHLLHSKFHLCSVPTRALLLSTYIKFVNLFPEVKPTIQDVLRSDSQLRNADVELQQRAVEYLRLSTVASTDILATVLEEMPPFPERESSILAKLKKKKGPSTVTDLEDTKRDRSVDVNGGPEPAPASTSAVSTPSPSADLLGLGAAPPAPAGPPPSSGGSGLLVDVFSDSASVVAPLAPGSEDNFARFVCKNNGVLFENQLLQIGLKSEFRQNLGRMFIFYGNKTSTQFLNFTPTLICSDDLQPNLNLQTKPVDPTVEGGAQVQQVVNIECVSDFTEAPVLNIQFRYGGTFQNVSVQLPITLNKFFQPTEMASQDFFQRWKQLSNPQQEVQNIFKAKHPMDTEVTKAKIIGFGSALLEEVDPNPANFVGAGIIHTKTTQIGCLLRLEPNLQAQMYRLTLRTSKEAVSQRLCELLSAQF

SEQ ID NO: 15966 - protein, 853 aa, Homo sapiens
MPVRKQDTQRALHLLEEYRSKLSQTEDRQLRSSIERVINIFQSNLFQALIDIQEFYEVTLLDNPKCIDRSKPSEPIQPVNTWEISSLPSSTVTSETLPSSLSPSVEKYRYQDEDTPPQEHISPQITNEVIGPELVHVSEKNLSEIENVHGFVSHSHISPIKVNGTDADYEYEEITLERGNSGLGFSIAGGTDNPHIGDDSSIFITKIITGGAAAQDGRLRVNDCILRVNEVDVRDVTHSKAVEALKEAGSIVRLYVKRRKPVSEKIMEIKLIKGPKGLGFSIAGGVGNQHIPGDNSIYVTKIIEGGAAHKDGKLQIGDKLLAVNNVCLEEVTHEEAVTALKNTSDFVYLKVAKPTSMYMNDGYAPPDITNSSSQPVDNHVSPSSFLGQTPASPARYSPVSKAVLGDDEITREPRKVVLHRGSTGLGFNIVGGEDGEGIFISFILAGGPADLSGELRKGDRIISVNSVDLRAASHEQAAAALKNAGQAVTIVAQYRPEEYSRFEAKIHDLREQMMNSSISSGSGSLRTSQKRSLYVRALFDYDKTKDSGLPSQGLNFKFGDILHVINASDDEWWQARQVTPDGESDEVGVIPSKRRVEKKERARLKTVKFNSKTRDKGEIPDDMGSKGLKHVTSNASDSESSYRGQEEYVLSYEPVNQQEVNYTRPVIILGPMKDRINDDLISEFPDKFGSCVPHTTRPKRDYEVDGRDYHFVTSREQMEKDIQEHKFIEAGQYNNHLYGTSVQSVREVAEKGKHCILDVSGNAIKRLQIAQLYPISIFIKPKSMENIMEMNKRLTEEQARKTFERAMKLEQEFTEHFTAIVQGDTLEDIYNQVKQIIEEQSGSYIWVPAKEKL

SEQ ID NO: 15967 - protein, 781 aa, Homo sapiens
MSEFLLALLTLSGLLPIARVLTVGADRDQQLCDPGEFLCHDHVTCVSQSWLCDGDPDCPDDSDESLDTSRTCQVDQFSCGNGRCIPRAWLCDREDDCGDQTDEMASCEFPTCEPLTQFVCKSGRCISSKWHCDSDDDCGDGSDEVGCVHSCFDNQFRCSSGRCIPGHWACDGDNDCGDFSDEAQINCTKEEIHSPAGCNGNEFQCHPDGNCVPDLWRCDGEKDCEDGSDEKGCNGTIRLCDHKTKFSCWSTGRCINKAWVCDGDIDCEDQSDEDDCDSFLCGPPKHPCANDTSVCLQPEKLCNGKKDCPDGSDEGYLCDECSLNNGGCSNHCSVVPGRGIVCSCPEGLQLNKDNKTCEIVDYCSNHLKCSQVCEQHKHTVKCSCYEGWKLDVDGESCTSVDPFEAFIIFSIRHEIRRIDLHKRDYSLLVPGLRNTIALDFHFNQSLLYWTDVVEDRIYRGKLSESGGVSAIEVVVEHGLATPEGLTVDWIAGNIYWIDSNLDQIEVAKLDGSLRTTLIAGAMEHPRAIALDPRYGILFWTDWDANFPRIESASMSGAGRKTIYKDMKTGAWPNGLTVDHFEKRIVWTDARSDAIYSALYDGTNMIEIIRGHEYLSHPFAVSLYGSEVYWTDWRTNTLSKANKWTGQNVSVIQKTSAQPFDLQIYHPSRQPQAPNPCAANDGKGPCSHMCLINHNRSAACACPHLMKLSSDKKTCYEMKKFLLYARRSEIRGVDIDNPYFNFITAFTVPDIDDVTVIDFDASEERLYWTDIKTQTIKRAFIN

SEQ ID NO: 15968 - protein, 1095 aa, Homo sapiens
MDQKILSLAAEKTADKLQEFLQTLREGDLTNLLQNQAVKGKVAGALLRAIFKGSPCSEEAGTLRRRKIYTCCIQLVESGDLQKEIASEIIGLLMLEAHHFPGPLLVELANEFISAVREGSLVNGKSLELLPIILTALATKKENLAYGKGVLSGEECKKQLINTLCSGRWDQQYVIQLTSMFKDVPLTAEEVEFVVEKALSMFSKMNLQEIPPLVYQLLVLSSKGSRKSVLEGIIAFFSALDKQHNEEQSGDELLDVVTVPSGELRHVEGTIILHIVFAIKLDYELGRELVKHLKVGQQGDSNNNLSPFSIALLLSVTRIQRFQDQVLDLLKTSVVKSFKDLQLLQGSKFLQNLVPHRSYVSTMILEVVKNSVHSWDHVTQGLVELGFILMDSYGPKKVLDGKTIETSPSLSRMPNQHACKLGANILLETFKIHEMIRQEILEQVLNRVVTRASSPISHFLDLLSNIVMYAPLVLQSCSSKVTEAFDYLSFLPLQTVQRLLKAVQPLLKVSMSMRDCLILVLRKAMFANQLDARKSAVAGFLLLLKNFKVLGSLSSSQCSQSLSVSQVHVDVHSHYNSVANETFCLEIMDSLRRCLSQQADVRLMLYEGFYDVLRRNSQLANSVMQTLLSQLKQFYEPKPDLLPPLKLEACILTQGDKISLQEPLDYLLCCIQHCLAWYKNTVIPLQQGEEEEEEEEAFYEDLDDILESITNRMIKSELEDFELDKSADFSQSTSIGIKNNICAFLVMGVCEVLIEYNFSISSFSKNRFEDILSLFMCYKKLSDILNEKAGKAKTKMANKTSDSLLSMKFVSSLLTALFRVLLWRYTSIPTSVEESGKKEKGKSISLLCLEGLQKIFSAVQQFYQPKIQQFLRALDVTDKEGEEREDADVSVTQRTAFQIRQFQRSLLNLLSSQEEDFNSKEALLLVTVLTSLSKLLEPSSPQFVQMLSWTSKICKENSREDALFCKSLMNLLFSLHVSYKSPVILLRDLSQDIHGHLGDIDQDVEVEKTNHFAIVNLRTAAPTVCLLVLSQAEKVLEEVDWLITKLKGQVSQETLSVSPGVSELRRNSKKYGKAGEAVWFSSDPPVLFFHFLRTE

SEQ ID NO: 15969 - protein, 101 aa, Homo sapiens
MEEPTAVEGQVQLPSPHQGSLRKAVAAALALDGESTMGHRKKKRKESRPESIIIYRSDNEKTDEEPGESEGGDQPKEEEGDDFLDYPVDDDMWNLPLDSRY

SEQ ID NO: 15970 - protein, 177 aa, Homo sapiens
MAASLVVQILGDKFPCTLVAQKIDLPEYQGEPDEISIQKCQEAVRQVQGPVLVEDTCLCFNALGGLPGPYIKWFLEKLKPEGLHQLLAGFEDKSAYALCTFALSTGDPSQPVRLFRGRTSGRIVAPRGCQDFGWDPCFQPDGYEQTYAEMPKAEKNAVSHRFRALLELQEYFGSLAA

SEQ ID NO: 15971 - protein, 680 aa, Homo sapiens
MEGFLKSDERQRLAKERREEREKCLAAREQQILEKQKRARLQYEKQMEERWRKLEEQRQREDQKRAAVEEKRKQKLREEEERLEAMMRRSLERTQQLELKKKYSWGAPLAIGPGGHDACDKLSTSTMSLPKPTEPPMNKRLSSSTVAISYSPDRAPLGPLNPSYKSSPTRNIEKKKATSTSTSGAGDVGKEALSGGEASLVEKVKRGQRTATSLPVVNFGSPLRRCEFSGGIPKRPSSPVISKTATKAYPQSPKTTKPPYPGSPVKYRLPALSGQDMPKRKAEKEKSNKEREGTLAQQAAGPQGEEALEKHVVDKHASEKHAAAAGGKAENSAALGKPTAGTTDAGEAAKILAEKRRQARLQKEQEEQERLEKEEQDRLEREELKRKAEEERLRLEEEARKQEEERKRQEEEKKKQEGEEKRKAGEEAKRKAEEELLLKEKQEQEKQEKAMIEKQKEAAETKAREVAEQMRLEREQIMLQIEQERLERKKRIDEIMKRTRKSDVSPQVKKEDPKVGVQPAVCVEKKTKLVVPNKMEINGLNTCQEVNGVDHAAPETYPQDIFSNGLKPAGGLIHLDALDGKSNSLDDSTEEVQSMDVSPVSKEELISIPEFSPVSEMIPGVSLDQNGTGNARALQDLLDFTGPPTFPKRSSENLSLDDCNKNLIEGFNSPGQETPLNTFC

SEQ ID NO: 15972 - protein, 114 aa, Homo sapiens
MSPSQLIGFLLLWVPASRGEIVLTQSPDFQSVTPKEKVTITCRASQSIGSSLHWYQQKPDQSPKLLIKYASQSISGVPSRFSGSGSGTDFTLTINSLEAEDAAAYYCHQSSSLP

SEQ ID NO: 15973 - protein, 343 aa, Homo sapiens
MEQPQEEAPEVREEEEKEEVAEAEGAPELNGGPQHALPSSSYTAIRFGRMPEAEKRKLVAGLTANEGSQYNPQVADLKAFSKHIYNAYLKNFNMTKKKARSILTGKASHTAPFVIHDIETLWQAEKGLVWKQLVNGLPPYKEISVHVFYRCQCTTVETVRELTEFAKSIPSFSSLFLNDQVTLLKYGVHEAIFAMLASIVNKDGLLVANGSGFVTREFLRSLRKPFSDIIEPKFEFAVKFNALELDDSDLALFIAAIILCGDRPGLMNVPRVEAIQDTILRALEFHLQANHPDAQYLFPKLLQKMADLRQLVTEHAQMMQRIKKTETETSLHPLLQEIYKDMY

SEQ ID NO: 15974 - protein, 645 aa, Homo sapiens
APEPSPHSGTPQPALGQPAPLLPAAVGAVSLATSQLPSPPLGPTVPPQPPSALESDGEGPPPRVGFVDSTIKSLDEKLRTLLYQEHVPTSSASAGTPVEVGDRDFTLEPLRGDQPRSEVCGGDLALPPVPKEAVSGRVQLPQPLVEKSELAPTRGAVMEQGTSSSMTESSPRSMLGYDRDGRQVASDSHVVPSVPQDVPAFVRPARVEPTDRDGGEAGESSAEPPPSDMGTVGGQASHPQTLGARALGSPRKRPEQQDVSSPAKTVGRFSVVSTQDEWTLASPHSLRYSAPPDVYLDEAPSSPDVKLAVRRAQTASSIEVGVGEPVSSDSGDEGPRARPPVQKQASLPVSGSVAGDFVKKATAFLQRPSRAGSLGPETPSRVGMKVPTISVTSFHSQSSYISSDNDSELEDADIKKELQSLREKHLKEISELQSQQKQEIEALYRRLGKPLPPNVGFFHTAPPTGRRRKTSKSKLKAGKLLNPLVRQLKVVASSTGHLADSSRGPPAKDPAQASVGLTADSTGLSGKAVQTQQPCSVRASLSSDICSGLASDGGGARGQGSSTSSLAPGPEPGPQPALHVQAQVNNSNNKKGTFTDDLHKLVDEWTSKTVGAAQLKPTLNQLKQTQKLQDMEAQAGWAAPGEARA

SEQ ID NO: 15975 - protein, 677 aa, Homo sapiens
MQTQEILRILRLPELGDLGQFFRSLSATTLDSGGARRSVIGSGPQLLTHYYDDARTMYQVFRRGLSISGNGPCLGFRKPKQPYQWLSYQEVADRAEFLGSGLLQHNCKACTDQFIGVFAQNRPEWIIVELACYTYSMVVVPLYDTLGPGAIRYIINTGLSCQEGASATASTQADISTVIVDKPQKAVLLLEHVERKETPGLKLIILMDPFEEALKERGQKCGVVIKSMQAVEDCGQENHQAPVPPQPDDLSIVCFTSGTTGNPKGAMLTHGNVVADFSGFLKVTEKVIFPRQDDVLISFLPLAHMFERVIQSVVYCHGGRVGFFQGDIRLLSDDMKALCPTIFPVVPRLLNRMYDKIFSQANTPLKRWLLEFAAKRKQAEVRSGIIRNDSIWDELFFNKIQASLGGCVRMIVTGAAPASPTVLGFLRAALGCQVYEGYGQTECTAGCTFTTPGDWTSGHVGAPLPCNHIKLVDVEELNYWACKGEGEICVRGPNVFKGYLKDPDRTKEALDSDGWLHTGDIGKWLPAGTLKIIDRKKHIFKLAQGEYVAPEKIENIYIRSQPVAQIYVHGDSLKAFLVGIVVPDPEVMPSWAQKRGIEGTYADLCTNKDLKKAILEDMVRLGKESGLHSFEQVKAIHIHSDMFSVQNGLLTPTLKAKRPELREYFKKQIEELYSISM

SEQ ID NO: 15976 - protein, 138 aa, Homo sapiens
MSETSRTAFGGRRAVPPNNSNAAEDDLPTVELQGVVPRGVNLQEFLNVTSVHLFKERWDTNKVDHHTDKYENNKLIVRRGQSFYVQIDFSRPYDPRRDLFRVEYVIGRYPQENKGTYIPVPIVSELQSGKWGAKIVMR

SEQ ID NO: 15977 - protein, 166 aa, Homo sapiens
MYRARAARAGPEPGSPGRFGILSTGQLRDLLQDEPKLDRIVRLSRKEQMEQLLLGEQSLEAFLPAFQRGRALAHLRRTQAEKLQELLRRRERSAQPAPTSAADPPKSFPAAAVLPTGAARGPPAVPRSLPPLDSRPVPPLKGSPGCPLGPAPLLSPRPSQPEPPHR

SEQ ID NO: 15978 - protein, 457 aa, Homo sapiens
MTGLVSLSYFPLSTRSCALQSCSPVWGCGPCCSAGCPSPFHCLSQQDCNEIKGERFTVLETRLLVSNVSAEDRGNYACQAILTHSGKQYEVLNGITVSIKRAGYGGSVPKIIYPKNHSIEVQLGTTLIVDCNVTDTKDNTNLRCWRVNNTLVDDYYDESKRIREGVETHVSFREHNLYTVNITFLEVKMEDYGLPFMCHAGVSTAYIILQLPAPDFRAYLIGGLIALVAVAVSVVYIYNIFKIDIVLWYRSAFHSTETIVDGKLYDAYVLYPKPHKESQRHAVDALVLNILPEVLERQCGYKLFIFGRDEFPGQAVANVIDENVKLCRRLIVIVVPESLGFGLLKNLSEEQIAVYSALIQDGMKVILIELEKIEDYTVMPESIQYIKQKHGAIRWHGDFTEQSQCMKTKFWKTVRYHMPPRRCRPFPPVQLLQHTPCYRTAGPELGSRRKKCTLTTG

SEQ ID NO: 15979 - protein, 128 aa, Homo sapiens
MFNNCEVVLGNLEITYVQRNYDLSFLKTIQEVAGYVLIALNTVERIPLENLQIIRGNMYYENSYALAVLSNYDANKTGLKELPMRNLQEILHGAVRFSNNPALCNVESIQWRDIVSSDFLSNMSMDFQ

SEQ ID NO: 15980 - protein, 271 aa, Homo sapiens
MTLHCAFQPTHPIICFRRVACLIHHQDPLFLDLMGTCHSDSTKPAILKPQHLTWYRTHLARGLTLYPPDILDAMLKEKKLAQDQNGALMIPIQDLEDMPAPQYPYIPPMTEFFFDGTSDITIFPPPISVEPVEVDFGACPGPEAPNPVPLCLMNHTKGKIMVVWTRRSDCPFWVTPESCDVPPLKSMAMRLHFQPPHPNCLYTVELEAFAIYKVCARNEREECGVSARSLSGLVGWQEVTEGSFRLHPLRARLSLGWTVTPMSLSPPKLLA

SEQ ID NO: 15981 - protein, 637 aa, Homo sapiens
MGRKLDLSGLTDDETEHVLQVVQRDFNLRKKEEERLSELKQKLDEEGSKCSILSKHQQFVEHCCMRCCSPFTFLVNTKRQCGDCKFNVCKSCCSYQKHEKAWVCCVCQQARLLRAQSLEWFYNNVKSRFKRFGSAKVLKNLYRKHRLESGACFDILGGSLFESNLENEGSISGSDSTFYRQSEGHSVMDTLAVALRVAEEAIEEAISKAEAYGDSLDKQNEASYLRDHKEELTEELATTILQKIIRKQKSKSEQQVEEEPGWPHPQSCSTKVADEGTSASPGGYRAPAALWRSQSAFSITGEEALKTPPVEAPSRQPRDQGQHPRAESALPSWKSVDRLDETNLAPVLQSPDGNWVALKDGAPPPTRLLAKPKSGTFQALEVASSVASAYDEMGSDSEEDFDWSEALSKLCPRSRALPRNPQPQPTQAQSSDQGPIAASPSSALSPNPEAMCSDSETSSAGSSREVGHQARLSWLQRKAPRNPAAEKMRLHGELDVNFNPQLASRETSDSSEPEEAPHTTDRRARRWRRARLGSEEPSKEPSSPSAQLRDLDTHQVSDDLSETDISNEARDPQTLTDTTEEKRRNRLYELAMKMSEKETSSGEDQESEPKTESENQKESLSSEDNSQSVQEELKKKS

SEQ ID NO: 15982 - protein, 571 aa, Homo sapiens
MKPAQRNLYRDVMLENYSNLVTVGCQVTKPDVIFKLEQEEEPWVMEEEMFGRHCPEPRRGENCCASEVMAEGLKFKDVVIYFSQKEWECLHSAQKDLYRDVMLENYGNLVLLGLSDTKPNVISLLEQKKEPWMVKRKETKEWCPDWEFGRETKNLSPKENIYEIRSPQQEKARVIREIRCQVERQQGHQEGHFRPAVIPFTSMQCTAHREYQWLHTGEKSCECRKCKNAFRYQSCPIQHEIIHNKEKEPECGECRKIFNSGSDLIKHQTLHESKKHSENNKCAFNHDSGITQPQSINTGEKPHKCKECGKAFRSSSQISQHQRMHLGEKPYKCRECGKAFPSTAQLNLHQRIHTDEKYYESKACGKAFTRPSHLFRHQRIHTGEKPHKCKECGKAFRYDTQLSLHQIIHTGERRYECRECGKVYSCASQLSLHQRIHTGEKPHECKECGKAFISDSHLIRHQSVHTGEKPCKCKECGKSFRRGSELTRHQRAHTGEKPYECKECEKAFTCSTELVRHQKVHTGERPHKCKECGKAFIRRSELTHHERSHTGEKPYECKECGKPFGGGSELS

SEQ ID NO: 15983 - protein, 207 aa, Homo sapiens
MEWGKQWLVWLLLGHMVVSQMATLLARKRRWYKTENEYYLLQFTLTVRCLYYTSFSLELCWQQLPAASTSYSFPWMLAYVFYYPVLHNGPILSFSEFIKQMQQQEHDSLKASLCVLALGLGRLLCWWWLAELMAHLMYMHAIYSSIPLLETVSCWTLGGLALAQVLFFYVKYLVLFGVPALLMRLDGLTPPALPRCVSTMFSFTGMW

SEQ ID NO: 15984 - protein, 373 aa, Homo sapiens
IMDQYKFYDPSPPRRRGNWITLKMRKLIKSKKDINRERQKSLTLTPTRSDSSEGFLQLPHQDSQDSSSVGSNSLEDGQTLGTKKSSNTTSFEDISPQGVSDDSSTGSRVHAGAVNNQSRPQSHSSGEFSLLHDHEAWSSSGSSPIQYLKRQTRSSPVLQHKISETLESRHHKIKTGSPGSEVVTLQQFLEESNKLTSVQIKSSSQENLLDEVMKSLSVSSDFLGKDKPVSCGLARSVSGKTPGDFYDRRTTKPEFLRPGPRKTEDTYFISSAGKPTPGTQGKIKLVKESSLSRQSKDSNPYATLPRASSVISTAEGTTRRTSIHDFLTKDSRLPISVDSPPAAADSNTTAASNVDKVQESRNSKSRSREQQSS

SEQ ID NO: 15985 - protein, 407 aa, Homo sapiens
MFYGTHFIMSPPTKSKLKRQSQLLSSMLSRTLSYKYRDLDSTFSSLGASDDPAELSTQLSAPGVLKVFGDSVCTGTHYKSVLATGTSSARELVKEALERYALDPRQAGQYVLCDVVGQAGDAGQRWQARCFRVFGDSEKPLLIQELWKPREGLSRRFELRKRSDVEELAAKEVDTITAGINAQARRLQRSRAKGTPTPALGDARSSPPPRLRRTVSETSLSPVNALPAAAQGPEEPGPDAMRYSLYQSPHLLLLQGYSQQHPGVCAQPGPAHGGPADPLQQAQHQPLSPRHPASTLHHPPATAPGQRPGRGEAGPGAHPRGAHLRQLLRGGAQDRGAAPRGPALPGALLPAAIQGPRAGPAPARPGLGAPPGCAAELPAVRGRARGPGSRLPYSGRPAPAPAAAPGV

SEQ ID NO: 15986 - protein, 373 aa, Homo sapiens
MQEKDASSQGFLPHFQHFATQAIHVGQDPEQWTSRAVVPPISLSTTFKQGAPGQHSGFEYSRSGNPTRNCLEKAVAALDGAKYCTNRYFRQVASEFGLKISFVDCSKIKLLEAAITPETKLVWIETPTNPTQKVIDIEGCAHIVHKHGDIILVVDNTFMSPYFQRPLALGADISMYSATKYMNGHSDVVMGLVSVNCESLHNRLRFLQNSLGAVPSPIDCYLCNRGLKTLHVRMEKHFKNGMAVAQFLESNPWVEKVIYPGLPSHPQHELVKRQCTGCTGMVTFYIKGTLQHAEIFLKNLKLFTLAESLGGFESLAELPAIMTHASVLKNDRDVLGISDTLIRLSVGLEDEEDLLEDLDQALKAAHPPSGSHS

SEQ ID NO: 15987 - protein, 619 aa, Homo sapiens
MGPLTFMDVAIEFSVEEWQCLDTAQQNLYRNVMLENYRNLVFLGIAVSKPDLITCLEQGKEPWNMERHEMVAKPPGMCCYFAQDLRPEQSIKASLQRIILRKYEKCGHHNLQLKKGYKSVDEYKVHKGSYNGFNQCLTTTQSKIFQCDKYVKDFHKFSNSNRHKTEKNPFKCKECGKSFCVLSHLTQHKRIHTTVNSYKLEECGKAFNVSSTLSQHKRIHTGQKHYKCEECGIAFNKSSHLNTHKIIHTGEKSYKREECGKAFNISSHLTTHKIIHTGENAYKCKECGKAFNQSSTLTRHKIIHAGEKPYICEHCGRAFNQSSNLTKHKRIHTGDKPYKCEECGKAFNVSSTLTQHKRIHTGEKPYKCEECGKAFNVSSTLTQHKRIHTGEKPYKCEECGKAFNTSSHLTTHKRIHTGEKPYKCEECGKAFNQFSQLTTHKIIHTGEKPYKCKECGKAFKRSSNLTEHRIIHTGEKPYKCEECGKAFNLSSHLTTHKKIHTGEKPYKCKECGKAFNQSSTLARHKIIHAGEKPYKCEECGKAFYQYSNLTQHKIIHTGEKPYKCEECGKAFNWSSTLTKHKVIHTGEKPYKCKECGKAFNQCSNLTTHKKIHAVEKSDK

SEQ ID NO: 15988 - protein, 2572 aa, Homo sapiens
MATLNSASTTGTTPSPGHNAPSLPSDTFSSSTPSDPVTKDPPAASSTSENMRSSEPGGQLLESGCGLVPPKEIGEPQEGPDCGHFPPNDPGVEKDKEQEEEEEGLPPMDLSNHLFFTAGGEAYLVAKLSLPGGSELLLPKGFPWGEAGIKEEPSLPFLAYPPPSHLTALHIQHGFDPIQGFSSSDQILSHDTSAPSPAACEERHGAFWSYQLAPNPPGDPKDGPMGNSGGNHVAVFWLCLLCRLGFSKPQAFMDHTQSHGVKLTPAQYQGLSGSPAVLQEGDEGCKALISFLEPKLPARPSSDIPLDNSSTVNMEANVAQTEDGPPEAEVQALILLDEEVMALSPPSPPTATWDPSPTQAKESPVAAGEAGPDWFPEGQEEDGGLCPPLNQSSPTSKEGGTLPAPVGSPEDPSDPPQPYRLADDYTPAPAAFQGLSLSSHMSLLHSRNSCKTLKCPKCNWHYKYQQTLDVHMREKHPESNSHCSYCSAGGAHPRLARGESYNCGYKPYRCDVCNYSTTTKGNLSIHMQSDKHLANLQGFQAGPGGQGSPPEASLPPSAGDKEPKTKSSWQCKVCSYETNISRNLRIHMTSEKHMQNVLMLHQGLPLGLPPGLMGPGPPPPPGATPTSPPELFQYFGPQALGQPQTPLAGPGLRPDKPLEAQLLLNGFHHVGAPARKFPTSAPGSLSPDAHLPPSQLLGSSSDSLPTSPPPDDSLSLKVFRCLVCQAFSTDSLELLLYHCSIGRSLPEAEWKEVAGDTHRCKLCCYGTQLKANFQLHLKTDKHAQKYQLAAHLREGGGAMGTPSPASLGDGAPYGSVSPLHLRCNICDFESNSKEKMQLHARGAAHEENSQIYKFLLDMEGAEAGAELGLYHCLLCAWETPSRLAVLQHLRTPAHRDAQAQRRLQLLQNGPTTEEGLAALQSILSFSHGQLRTPGKAPVTPLAEPPTPEKDAQNKTEQLASEETENKTGPSRDSANQTTVYCCPYCSFLSPESSQVRAHTLSQHAVQPKYRCPLCQEQLVGRPALHFHLSHLHNVVPECVEKLLLVATTVEMTFTTKVLSAPTLSPLDNGQEPPTHGPEPTPSRDQAAEGPNLTPEASPDPLPEPPLASVEVPDKPSGSPGQPPSPAPSPVPEPDAQAEDVAPPPTMAEEEEGTTGELRSAEPAPADSRHPLTYRKTTNFALDKFLDPARPYKCTVCKESFTQKNILLVHYNSVSHLHKMKKAAIDPSAPARGEAGAPPTTTAATDKPFKCTVCRVSYNQSSTLEIHMRSVLHQTRSRGTKTDSKIEGPERSQEEPKEGETEGEVGTEKKGPDTSGFISGLPFLSPPPPPLDLHRFPAPLFTPPVLPPFPLVPESLLKLQQQQLLLPFYLHDLKVGPKLTLAGPAPVLSLPAATPPPPPQPPKAELAEREWERPPMAKEGNEAGPSSPPDPLPNEAARTAAKALLENFGFELVIQYNEGKQAVPPPPTPPPPEALGGGDKLACGACGKLFSNMLILKTHEEHVHRRFLPFEALSRYAAQFRKSYDSLYPPLAEPPKPPDGSLDSPVPHLGPPFLVPEPEAGGTRAPEERSRAGGHWPIEEEESSRGNLPPLVPAGRRFSRTKFTEFQTQALQSFFETSAYPKDGEVERLASLLGLASRVVVVWFQNARQKARKNACEGGSMPTGGGTGGASGCRRCHATFSCVFELVRHLKKCYDDQTLEEEEEEAERGEEEEEVEEEEVEEEQGLEPPAGPEGPLPEPPDGEELSQAEATKAGGKEPEEKATPSPSPAHTCDQCAISFSSQDLLTSHRRLHFLPSLQPSAPPQLLDLPLLVFGERNPLVAATSPMPGPPLKRKHEDGSLSPTGSEAGGGGEGEPPRDKRLRTTILPEQLEILYRWYMQDSNPTRKMLDCISEEVGLKKRVVQVWFQNTRARERKGQFRSTPGGVPSPAVKPPATATPASLPKFNLLLGKVDDGTGREAPKREAPAFPYPTATLASGPQPFLPPGKEATTPTPEPPLPLLPPPPPSEEEGPEEPPKASPESEACSLSAGDLSDSSASSLAEPESPGAGGTSGGPGGGTGVPDGMGQRRYRTQMSSLQLKIMKACYEAYRTPTMQECEVLGEEIGLPKRVIQVWFQNARAKEKKAKLQGTAAGSTGGSSEGLLAAQRTDCPYCDVKYDFYVSCRGHLFSRQHLAKLKEAVRAQLKSESKCYDLAPAPEAPPALKAPPATTPASMPLGAAPTLPRLAPVLLSGPALAQPPLGNLAPFNSGPAASSGLLGLATSVLPTTTVVQTAGPGRPLPQRPMPDQTNTSTAGTTDPVPGPPTEPLGDKVSSERKPVAGPTSSSNDALKNLKALKTTVPALLGGQFLPFPLPPAGGTAPPAVFGPQLQGAYFQQLYGMKKGLFPMNPMIPQTLIGLLPNALLQPPPQPPEPTATAPPKPPELPAPGEGEAGEVDELLTGSTGISTVDVTHRYLCRQCKMAFDGEAPATAHQRSFCFFGRGSGGSMPPPLRVPICTYHCLACEVLLSGREALASHLRSSAHRRKAAPPQGGPPISITNAATAASAAVAFAKEEARLPHTDSNPKTTTTSTLLAL

SEQ ID NO: 15989 - protein, 444 aa, Homo sapiens
MALKWTTVLLIQLSFYFSSGSCGKVLVWAAEYSLWMNMKTILKELVQRGHEVTVLASSASILFDPNDSSTLKLEVYPTSLTKTEFENIIMQLVKRLSEIQKDTFWLPFSQEQEILWAINDIIRNFCKDVVSNKKLMKKLQESRFDIVFADAYLPCGRPTTLSETMRKADIWLMRNSWNFKFPHPFLPNVDFVGGLHCKPAKPLPKEMEEFVQSSGENGVVVFSLGSMVSNMTEERANVIATALAKIPQKVLWRFDGNKPDALGLNTRLYKWIPQNDLLGHPKTRAFITHGGANGIYEAIYHGIPMVGIPLFFDQPDNIAHMKAKGAAVRVDFNTMSSTDLLNALKTVINDPSYKENIMKLSRIQHDQPVKPLDRAVFWIEFVMRHKGAKHLRVAAHNLTWFQYHSLDVIGFLLACVATVLFIITKCCLFCFWKFARKGKKGKRD

SEQ ID NO: 15990 - protein, 451 aa, Homo sapiens
MVELFIFLFLLGETPFKVVVKSLSPKELVRIHVPKPLDRNDGTFLMRYRMYETVDEGLKIEVLYGDEHVAQSPYILKGPVYHEYCECPEDPQAWQKTLSCPTKEPQIAKDFASFPSINLQQMLKEVPKRFGDERGAIVHYTILNNHVYRRSLGKYTDFKMFSDEILLSLTRKVLLPDLEFYVNLGDWPLEHRKVNGTPSPIPIISWCGSLDSRDVVLPTYDITHSMLEAMRGVTNDLLSIQGNTGPSWINKTERAFFRGRDSREERLQLVQLSKENPQLLDAGITGYFFFQEKEKELGKAKLMGFFDFFKYKYQVNVDGTVAAYRYPYLMLGDSLVLKQDSPYYEHFYMALEPWKHYVPIKRNLSDLLEKVKWAKENDEEAKKIAKEGQLMARDLLQPHRLYCYYYQVLQKYAERQSSKPEVRDGMELVPQPEDSTAICQCHRKKPSREEL

SEQ ID NO: 15991 - protein, 1070 aa, Homo sapiens
MIKRVQNLLGHYLIHGFRVRPEPNGDLDLEAMVAVFGSKGLRVVKISWGQGHFWELWRSGLWNMSDWIWDARWLEGNIALALGHNSVVLYDPVVGCILQEVPCTDRCTLSSACLIGDAWKELTIVAGAVSNQLLVWYPATALADNKPVAPDRRISGHVGIIFSMSYLESKGLLATASEDRSVRIWKVGDLRVPGGRVQNIGHCFGHSARVWQVKLLENYLISAGEDCVCLVWSHEGEILQAFRGHQGRGIRAIAAHERQAWVITGGDDSGIRLWHLVGRGYRGLGVSALCFKSRSRPGTLKAVTLAGSWRLLAVTDTGALYLYDVEVKCWEQLLEDKHFQSYCLLEAAPGPEGFGLCAMANGEGRVKVVPINTPTAAVDQTLFPGKVHSLSWALRGYEELLLLASGPGGVVACLEISAAPSGKAIFVKERCRYLLPPSKQRWHTCSAFLPPGDFLVCGDRRGSVLLFPSRPGLLKDPGVGGKARAGAGAPVVGSGSSGGGNAFTGLGPVSTLPSLHGKQGVTSVTCHGGYVYTTGRDGAYYQLFVRDGQLQPVLRQKSCRGMNWLAGLRIVPDGSMVILGFHANEFVVWNPRSHEKLHIVNCGGGHRSWAFSDTEAAMAFAYLKDGDVMLYRALGGCTRPHVILREGLHGREITCVKRVGTITLGPEYGVPSFMQPDDLEPGSEGPDLTDIVITCSEDTTVCVLALPTTTGSAHALTAVCNHISSVRAVAVWGIGTPGGPQDPQPGLTAHVVSAGGRAEMHCFSIMVTPDPSTPSRLACHVMHLSSHRLDEYWDRQRNRHRMVKVDPETRYMSLAVCELDQPGLGPLVAAACSDGAVRLFLLQDSGRILQLLAETFHHKRCVLKVHSFTHEAPNQRRRLLLCSAATDGSLAFWDLTTMLDHDSTVLEPPVDPGLPYRLGTPSLTLQAHSCGINSLHTLPTREGHHLVASGSEDGSLHVFVLAVEMLQLEEAVGEAGLVPQLRVLEEYSVPCAHAAHVTGLKILSPSIMVSASIDQRLTFWRLGHGEPTFMNSTVFHVPDVADMDCWPVSPEFGHRCALGGQGLEVYNWYD

SEQ ID NO: 15992 - protein, 682 aa, Homo sapiens
MDFSRLHMYSPPQCVPENTGYTYALSSSYSSDALDFETEHKLDPVFDSPRMSRRSLRLATTACTLGDGEAVGADSGTSSAVSLKNRAARTTKQRRSTNKSAFSINHVSRQVTSSGVSHGGTVSLQDAVTRRPPVLDESWIREQTTVDHFWGKAASGVFWWLGIGWYQFVTLISWLNVFLLTRCLRNICKFLVLLIPLFLLLGLSLRGQGNFFSFLPVLNWASMHRTQRVDDPQDVFKPTTSRLKQPLQGDSEAFPWHWMSGVEQQVASLSGQCHHHGENLRELTTLLQKLQARVDQMEGGAAGPSASVRDAVGQPPRETDFMAFHQEHEVRMSHLEDILGKLREKSEAIQKELEQTKQKTISAVGEQLLPTVEHLQLELDQLKSELSSWRHVKTGCETVDAVQERVDVQVREMVKLLFSEDQQGGSLEQLLQRFSSQFVSKGDLQTMLRDLQLQILRNVTHHVSVTKQLPTSEAVVSAVSEAGASGITEAQARAIVNSALKLYSQDKTGMVDFALESGGGSILSTRCSETYETKTALMSLFGIPLWYFSQSPRVVIQPDIYPGNCWAFKGSQGYLVVRLSMMIHPAAFTLEHIPKTLSPTGNISSAPKDFAVYGLENEYQEEGQLLGQFTYDQDGESLQMFQALKRPDDTAFQIVELRIFSNWGHPEYTCLYRFRVHGEPVK

SEQ ID NO: 15993 - protein, 1029 aa, Homo sapiens
MLFRARGPVRGRGWGRPAEAPRRGRSPPWSPAWICCWALAGCQAAWAGDLPSSSSRPLPPCQEKDYHFEYTECDSSGSRWRVAIPNSAVDCSGLPDPVRGKECTFSCASGEYLEMKNQVCSKCGEGTYSLGSGIKFDEWDELPAGFSNIATFMDTVVGPSDSRPDGCNNSSWIPRGNYIESNRDDCTVSLIYAVHLKKSGYVFFEYQYVDNNIFFEFFIQNDQCQEMDTTTDKWVKLTDNGEWGSHSVMLKSGTNILYWRTTGILMGSKAVKPVLVKNITIEGVAYTSECFPCKPGTFSNKPGSFNCQVCPRNTYSEKGAKECIRCKDDSQFSEEGSSECTERPPCTTKDYFQIHTPCDEEGKTQIMYKWIEPKICREDLTDAIRLPPSGEKKDCPPCNPGFYNNGSSSCHPCPPGTFSDGTKECRPCPAGTEPALGFEYKWWNVLPGNMKTSCFNVGNSKCDGMNGWEVAGDHIQSGAGGSDNDYLILNLHIPGFKPPTSMTGATGSELGRITFVFETLCSADCVLYFMVDINRKSTNVVESWGGTKEKQAYTHIIFKNATFTFTWAFQRTNQGQDNRRFINDMVKIYSITATNAVDGVASSCRACALGSEQSGSSCVPCPPGHYIEKETNQCKECPPDTYLSIHQVYGKEACIPCGPGSKNNQDHSVCYSDCFFYHEKENQSLHYDFSNLSSVGSLMNGPSFTSKGTKYFHFFNISLCGHEGKKMALCTNNITDFTVKEIVAGSDDYTNLVGAFVCQSTIIPSESKGFRAALSSQSIILADTFIGVTVETTLKNINIKEDMFPVPTSQIPDVHFFYKSSTATTSCINGRSTAVKMRCNPTKSGAGVISVPSKCPAGTCDGCTFYFLWESAEACPLCTEHDFHEIEGACKRGFQETLYVWNEPKWCIKGISLPEKKLATCETVDFWLKVGAGVGAFTAVLLVALTCYFWKKNQKLEYKYSKLVMTTNSKECELPAADSCAIMEGEDNEEEVVYSNKQSLLGKLKSLATKEKEDHFESVQLKTSRSPNI

SEQ ID NO: 15994 - protein, 115 aa, Homo sapiens
MAFMTRKLWDLEQQVKAQTDEILSKDQKIAALEDLVQTLRPHPAEATLQRQEELETMCVQLQRQVREMERFLSDYGLQWVGEPMDQEDSESKTVSEHGERDWMTAKKFWKPGRAG

SEQ ID NO: 15995 - protein, 519 aa, Homo sapiens
LDFLLLQDPASTCVPEPASQHTLRSGPGCLQQPEQQGVRDPGGIWAKLGAAEASAERLQGRRSRGASGSEPQQMGSDVRDLNALLPAVPSLGGGGGCALPVSGAAQWAPVLDFAPPGASAYGSLGGPAPPPAPPPPPPPPPHSFIKQEPSWGGAEPHEEQCLSAFTVHFSGQFTGTAGACRYGPFGPPPPSQASSGQARMFPNAPYLPSCLESQPAIRNQGYSTVTFDGTPSYGHTPSHHAAQFPNHSFKHEDPMGQQGSLGEQQYSVPPPVYGCHTPTDSCTGSQALLLRTPYSSDNLYQMTSQLECMTWNQMNLGATLKGVAAGSSSSVKWTEGQSNHSTGYESDNHTTPILCGAQYRIHTHGVFRGIQDVRRVPGVAPTLVRSASETSEKRPFMCAYPGCNKRYFKLSHLQMHSRKHTGEKPYQCDFKDCERRFSRSDQLKRHQRRHTGVKPFQCKTCQRKFSRSDHLKTHTRTHTGEKPFSCRWPSCQKKFARSDELVRHHNMHQRNMTKLQLAL

SEQ ID NO: 15996 - protein, 243 aa, Homo sapiens
MAAAIASSLIRQKRQARESNSDRVSASKRRSSPSKDGRSLCERHVLGVFSKVRFCSGRKRPVRRRPEPQLKGIVTRLFSQQGYFLQMHPDGTIDGTKDENSDYTLFNLIPVGLRVVAIQGVKASLYVAMNGEGYLYSSDVFTPECKFKESVFENYYVIYSSTLYRQQESGRAWFLGLNKEGQIMKGNRVKKTKPSSHFVPKPIEVCMYREPSLHEIGEKQGRSRKSSGTPTMNGGKVVNQDST

SEQ ID NO: 15997 - protein, 1146 aa, Homo sapiens
LRDNIAGEELELSKSLNELGIKELYAWDNRRETFRKSSLGNDETDKEKKKFLGFFKVNKRSNSKAEQLVLSGADSDEDTSRAAPGRGLNGCLTTPNSPSMHSRSLTLGPSLSLGSISGVSVKSEMKKRRAPPPPGSGPPVQDKASEKVSLGSQIDLQKKKRRAPAPPPPQPPPPSPLIPNRTEDKEENRKSTMGGGRQVPQKPPRGTARGPPQLVLPPPPPYPPPDTDVVEPLSFPGEGAGSEASDPIPKLSLPLGSGSHCSPDGAPQVLSEAEETVSVGSCFASEDTTEDSGVMSSPSDIVSLDSQQDSMKYKDKWATDQEDCSDQDLAGTPDLGPQKSPLWEKNGSENSHLRTEKAVTASNDEEDLLIAGEFRKTLAELDEDLEEMEDSYETDTSSLTSSIHGASNHCPQDAMIPHGDTDAIPVTFIGEVSDDPVDSGLFSNRNNNAGSFDSEGVASRRDSLAPLQAEHSQPHEKAREEVPALHPASHDVGKGIRVALSNISKDGNLMETAPRVTSFASNLHTDNLNAKVKDKVYGCADGERTQATERVNSQPVNEKDSNDKNAALAPTSWHQRGQNPGKSYRLKHGLTTYKIIPPKSEMRCYDRDVSLSTGAIKIDELGNLVSPHATGIRIISLSSSVPEAESQPIGKVREFWRCNSVEKHLGRPSESSARGPPSTPVPTQTQNPESRLQADPKPISPQQKSAHHEGRNPLGEGRNQPPTMGMGHVRVPAAHTTEVTFLKPQRRTSSQYVASAIAKRIGAPKVHADVVRPHGYAEKGYAGKAPVLAAPPVTVKDDRTSSPHSETQGWKDGAQWPCVTPPNNHGEDLAVGAPPRGEVIGPHRKLSTQDRPAAIHRSSCFSLVQSSQRDRVSVGQSCGFSGKQSTSSQEASSASEPRRAPDGTDPPPPHTSDTQACSRELVNGSVRAPGHGEPSHPPGGSGTESHILLEREEKPSVFSTDGNETDSIWPPSIFGPKKKFKPVVQRPVPKDTSLHSALMEAIHSAGGKDRLRKTAEHTGEGRPAKLSYTEAEGERSALLAAIRGHSGTCSLRKVASSASEELQSFRDAALSAQGSESPLLEDLGLLSPPAIPPPPPPPSQALSAPRTASRFSTGTLSNTADARQALMDAIRSGTGAARLRKVPLLV

SEQ ID NO: 15998 - protein, 257 aa, Homo sapiens
MSEVPVARVWLVLLLLTVQVGVTAGAPWQCAPCSAEKLALCPPVSASCSEVTRSAGCGCCPMCALPLGAACGVATARCARGLSCRALPGEQQPLHALTRGQGACVQESDASAPHAAEAGSPESPESTEITEEELLDNFHLMAPSEEDHSILWDAISTYDGSKALHVTNIKKWKEPCRIELYRVVESLAKAQETSGEEISKFYLPNCNKNGFYHSRQTSMDGEAGLCWCVYPWNGKRIPGSPEIRGDPNCQIYFNVQN

SEQ ID NO: 15999 - protein, 712 aa, Homo sapiens
MLKDYLSVAQDALRTQKELYHVKEQRLALALDEYVRLNDAYKEKSSSHTSLFSGSSSSTKYDPDILKAEISTTRLRVKKLKRELSQMKQELLYKEQGFETLQQIDKKMSGGQSGYELSEAKAILTELKSIRKAISSGEKEKQDLMQSLAKLQERFHLDQNIGRSEPDLRCSPVNSHLCLSRQTLDAGSQTSISGDIGVRSRSNLAEKVRLSLQYEEAKRSMANLKIELSKLDSEAWPGALDIEKEKLMLINEKEELLKELQFVTPQKRTQDELERLEAERQRLEEELLSVRGTPSRALAERLRLEERRKELLQKLEETTKLTTYLHSQLKSLSASTLSMSSGSSLGSLASSRGSLNTSSRGSLNSLSSTELYYSSQSDQIDVDYQYKLDFLLQEKSGYIPSGPITTIHENEVVKSPSQPGQSGLCGVAAAATGHTPPLAEAPKSVASLSSRSSLSSLSPPGSPLVLEGTFPMSSSHDASLHQFTADFEDCELSSHFADISLIENQILLDSDSGGASQSLSEDKDLNECAREPLYEGTADVEKSLPKRRVIHLLGEKTTCVSAAVSDESVAGDSGVYEAFVKQPSEMEDVTYSEEDVAIVETAQVQIGLRYNAKSSSFMVIIAQLRNLHAFLIPHTSKVYFRVAVLPSSTDVSCLFRTKVHPPTESILFNDVFRVAISQTALQQKTLRKNFTFVTAITHGVCLPLPVPMPSFA

SEQ ID NO: 16000 - protein, 362 aa, Homo sapiens
MSGGSADYNREHGGPEGMDPDGVIESNWNEIVDNFDDMNLKESLLRGIYAYGFEKPSAIQQRAIIPCIKGYDVIAQAQSGTGKTATFAISILQQLEIEFKETQALVLAPTRELAQQIQKVILALGDYMGATCHACIGGTNVRNEMQKLQAEAPHIVVGTPGRVFDMLNRRYLSPKWIKMFVLDEADEMLSRGFKDQIYEIFQKLNTSIQVVLLSATMPTDVLEVTKKFMRDPIRILVKKEELTLEGIKQFYINVEREEWKLDTLCDLYETLTITQAVIFLNTRRKVDWLTEKMHARDFTVSALHGDMDQKERDVIMREFRSGSSRVLITTDLLARGIDVQQVSLVINYDLPTNRENYIHRSR

SEQ ID NO: 16001 - protein, 599 aa, Homo sapiens
HPSPRHQPRQVAGTPTSSQPSFGPSIRERPSQSLCPCPCPAGEGDPAWPALERRLVTSRGRQPSPQSHAQLLTRRRHSSEQVPPESEPRADFRSGKWLQEPATGDARDSRQALRARMSSKHRICSQEEVVIPCAYDSDSESVDLELSNLEIIKKGSSSIELTDLDIPDIPGLHCEPLSHSPRHLTQQDPLSEAIVEKLIQSIQKVFNGELKGELEKLKFLGDLSSLSQALPYDETAKSFIHSHIADIVHTLNVLVQEERPHSLSSSMRQEVFVTIADLSYQDVHLLLGSEDRAELFSLTIKSIITLPSVRTLTQIQEIMPNGTCNTECLYRQTFQAFSEMLQSLVVKDPHLENLDTIIKLPLRFQRLGHLVALMALLCGDPQEKVAEEAAEGIHSLLHITLRLKYITHDKKDQQNLKRALTKCREFLELHSSAAKCFYNCPFRIAQVFEGFLDSNELCQFIMTTFDTLKTLKHPCIQRSAGELLLTLAKNTESQFEKVPEIMGVICAQLSIISQPRVRQQIINTVSLFISRPKYTDIVLSFLLCHPVPYNRHLAEVWRMLSVELPSTTWILWRLLRKLQKCHNEPAQEKMAYVAVAVSP

SEQ ID NO: 16002 - protein, 376 aa, Homo sapiens
MSDEVFSTTLAYTKSPKVTKRTTFQDELIRAITARSARQRSSEYSDDFDSDEIVSLGDFSDTSADENSVNKKMNDFHISDDEEKNPSKLLFLKTNKSNGNITKDEPVCAIKNEEEMAPDGCEDIVVKSFSESQNKDEEFEKDKIKMKPKPRILSIKSTSSAENNSLDTDDHFKPSPRPRSMLKKKSHMEEKDGLEDKETALSEELELHSAPSSLPTPNGIQLEAEKKAFSENLDPEDSCLTSLASSSLKQILGDSFSPGSEGNASGKDPNEEITENHNSLKSDENKENSFSADHVTTAVEKSKESQVTADDLEEEKAKAELIMDDDRTVDPLLSKSQSILISTSATASSKKTIEDRNIKNKKSTNNRASSASARSG

SEQ ID NO: 16003 - protein, 485 aa, Homo sapiens
MAAAVPDEAVARDVQRLLVQFQDEGGQLLGSPFDVPVDITPDRLQLVCNALLAQEDPLPLAFFVHDAEIVSSLGKTLESQAVETEKVLDIIYQPQAIFRVRAVTRCTSSLEGHSEAVISVAFSPTGKYLASGSGDTTVRFWDLSTETPHFTCKGHRHWVLSISWSPDGRKLASGCKNGQILLWDPSTGKQVGRTLAGHSKWITGLSWEPLHANPECRYVASSSKDGSVRIWDTTAGRCERILTGHTQSVTCLRWGGDGLLYSASQDRTIKVWRAHDGVLCRTLQGHGHWVNTMALSTDYALRTGAFEPAEASVNPQDLQGSLQELKERALSRYNLVRGQGPERLVSGSDDFTLFLWSPAEDKKPLTRMTGHQALINQVLFSPDSRIVASASFDKSIKLWDGRTGKYLASLRGHVAAVYQIAWSADSRLLVSGSSDSTLKVWDVKAQKLAMDLPGHADEVYAVDWSPDGQRVASGGKDKCLRIWRR

SEQ ID NO: 16004 - protein, 640 aa, Homo sapiens
MENQLAKSTEERTFQYQDSLPSLPVPSLEESLKKYLESVTRTCYQIRGLDPDAKRGFLDLTREGIQVKPFANQEEYKKTEEIVQKFQSGIGEKLHQKLLERAKGKRNWLEEWWLNVAYLDVRIPSQLNVNFAGPAAHFEHYWPPKEGTQLERGSITLWHNLNYWQLLRKEKVPVHKVGNTPLDMNQFRMLFSTCKVPGITRDSIMNYFRTESEGRSPNHIVVLCRGRAFVFDVIHEGCLVTPPELLRQLTYIHKKCHSEPDGPGIAALTSEERTRWAKAREYLIGLDPENLALLEKIQSSLLVYSMEDSSPHVTPEDYSEIIAAILIGDPTVRWGDKSYNLISFSNGVFGCNCDHAPFDAMIMVNISYYVDEKIFQNEGRWKGSEKVRDIPLPEELIFIVDEKVLNDINQAKAQYLREASDLQIAAYAFTSFGKKLTKNKMLHPDTFIQLALQLAYYRLHGHPGCCYETAMTRHFYHGRTETMRSCTVEAVRWCQSMQDPSVNLRERQQKMLQAFAKHNKMMKDCSAGKGFDRHLLGLLLIAKEEGLPVPELFTDPLFSKSGGGGNFVLSTSLVGYLRVQGVVVPMVHNGYGFFYHIRDDRFVVACSAWKSCPETDAEKLVQLTFCAFHDMIQLMNSTHL

SEQ ID NO: 16005 - protein, 2129 aa, Homo sapiens
MAERRAFAQKISRTVAAEVRKQISGQYSGSPQLLKNLNIVGNISHHTTVPLTEAVDPVDLEDYLITHPLAVDSGPLRDLIEFPPDDIEVVYSPRDCRTLVSAVPEESEMDPHVRDCIRSYTEDWAIVIRKYHKLGTGFNPNTLDKQKERQKGLPKQVFESDEAPDGNSYQDDQDDLKRRSMSIDDTPRGSWACSIFDLKNSLPDALLPNLLDRTPNEEIDRQNDDQRKSNRHKELFALHPSPDEEEPIERLSVPDIPKEHFGQRLLVKCLSLKFEIEIEPIFASLALYDVKEKKKISENFYFDLNSEQMKGLLRPHVPPAAITTLARSAIFSITYPSQDVFLVIKLEKVLQQGDIGECAEPYMIFKEADATKNKEKLEKLKSQADQFCQRLGKYRMPFAWTAIHLMNIVSSAGSLERDSTEVEISTGERKGSWSERRNSSIVGRRSLERTTSGDDACNLTSFRPATLTVTNFFKQEGDRLSDEDLYKFLADMRRPSSVLRRLRPITAQLKIDISPAPENPHYCLTPELLQVKLYPDSRVRPTREILEFPARDVYVPNTTYRNLLYIYPQSLNFANRQGSARNITVKVQFMYGEDPSNAMPVIFGKSSCSEFSKEAYTAVVYHNRSPDFHEEIKVKLPATLTDHHHLLFTFYHVSCQQKQNTPLETPVGYTWIPMLQNGRLKTGQFCLPVSLEKPPQAYSVLSPEVPLPGMKWVDNHKGVFNVEVVAVSSIHTQDPYLDKFFALVNALDEHLFPVRIGDMRIMENNLENELKSSISALNSSQLEPVVRFLHLLLDKLILLVIRPPVIAGQIVNLGQASFEAMASIINRLHKNLEGNHDQHGRNSLLASYIHYVFRLPNTYPNSSSPGPGGLGGSVHYATMARSAVRPASLNLNRSRSLSNSNPDISGTPTSPDDEVRSIIGSKGLDRSNSWVNTGGPKAAPWGSNPSPSAESTQAMDRSCNRMSSHTETSSFLQTLTGRLPTKKLFHEELALQWVVCSGSVRESALQQAWFFFELMVKSMVHHLYFNDKLEAPRKSRFPERFMDDIAALVSTIASDIVSRFQKDTEMVERLNTSLAFFLNDLLSVMDRGFVFSLIKSCYKQVSSKLYSLPNPSVLVSLRLDFLRIICSHEHYVTLNLPCSLLTPPASPSPSVSSATSQSSGFSTNVQDQKIANMFELSVPFRQQHYLAGLVLTELAVILDPDAEGLFGLHKKVINMVHNLLSSHDSDPRYSDPQIKARVAMLYLPLIGIIMETVPQLYDFTETHNQRGRPICIATDDYESESGSMISQTVAMAIAGTSVPQLTRPGSFLLTSTSGRQHTTFSAESSRSLLICLLWVLKNADETVLQKWFTDLSVLQLNRLLDLLYLCVSCFEYKGKKVFERMNSLTFKKSKDMRAKLEEAILGSIGARQEMVRRSRGQLERSPSGSAFGSQENLRWRKDMTHWRQNTEKLDKSRAEIEHEALIDGNLATEANLIILDTLEIVVQTVSVTESKESILGGVLKVLLHSMACNQSAVYLQHCFATQRALVSKFPELLFEEETEQCADLCLRLLRHCSSSIGTIRSHASASLYLLMRQNFEIGNNFARVKMQVTMSLSSLVGTSQNFNEEFLRRSLKTILTYAEEDLELRETTFPDQVQDLVFNLHMILSDTVKMKEHQEDPEMLIDLMYRIAKGYQTSPDLRLTWLQNMAGKHSERSNHAEAAQCLVHSAALVAEYLSMLEDRKYLPVGCVTFQNISSNVLEESAVSDDVVSPDEEGICSGKYFTESGLVGLLEQAAASFSMAGMYEAVNEVYKVLIPIHEANRDAKKLSTIHGKLQEAFSKIVHQDGKRMFGTYFRVGFYGTKFGDLDEQEFVYKEPAITKLAEISHRLEGFYGERFGEDVVEVIKDSNPVDKCKLDPNKAYIQITYVEPYFDTYEMKDRITYFDKNYNLRRFMYCTPFTLDGRAHGELHEQFKRKTILTTSHAFPYIKTRVNVTHKEEIILTPIEVAIEDMQKKTQELAFATHQDPADPKMLQMVLQGSVGTTVNQGPLEVAQVFLSEIPSDPKLFRHHNKLRLCFKDFTKRCEDALRKNKSLIGPDQKEYQRELERNYHRLKEALQPLINRKIPQLYKAVLPVTCHRDSFSRMSLRKMDL

SEQ ID NO: 16006 - protein, 187 aa, Homo sapiens
MAAIRKKLVIVGDGACGKTCLLIVFSKDQFPEVYVPTVFENYVADIEVDGKQVELALWDTAGQEDYDRLRPLSYPDTDVILMCFSIDSPDSLENIPEKWTPEVKHFCPNVPIILVGNKKDLRNDEHTRRELAKMKQEPHCVARLECCGTILAQLQPPPPRFKRFPCLSLLSSWGYRRPLPHPGAGET

SEQ ID NO: 16007 - protein, 96 aa, Homo sapiens
MEPLLLGRGLIVYLMFLLLKFSKAIEIPSSVQQVPTIIKQSKVQVAFPFDEYFQIECEAKGNPEPTFSWTKDGNPFYFTDHRIIPSNNSGTFRIPN

SEQ ID NO: 16008 - protein, 681 aa, Homo sapiens
MSNLKMKEAALIYLDRSGGLQKFIDDCKYYNDSKQSYAVYRFKILINPSDVVELDAELGNHILHQPLKAAEVFQSVCFIAVKTLSLIGQLQTETQINIVLKLTHLPPLPSYGLDLCEFPLDYTSQRFYMMQGIVIAMTTITKYTQGARFLCSDEACPLSKGFQYIRVHVPGATESATIRNDFLCNLCASSLQEDRKFRVLGDKQIVEIIATKALRAFQGYSNNQPFRFQSLTIFLRDESVNKMNIGNEYKIIGIPTCVKTSQTAVCIEANSITFCNSKVPSGISDNFRCLLSLTSSSCWKFTAILANIFASQITPPGTYNLLKLCLLMSLVQTTDRNKELEDCLDILIITSDTLLIDRLLNFSINLVPRGIRHLVSTEIFPTLSRNKYGTGAVSIQAGSALLAKGGICFIGDLASHKKDKLEQLQTVLESRSITVYIPGKKFGEDIDQQMTFPVQCSFWSFVDVDSSSRRNAQKINTLIGQMDCSLIPANLVEAFGLLINCNESSPCHPFLPTVQHTLNKAINPEGLFYAASRQFTTEDFEKLLAFAKNLNVEFSLEAERMTHGYYLASRRIRTGSVCGSKLSASALKYLVFLSEAHARLNLRNKVLKEDVLIAALLFETSLTLKYGATVFCVAPNAVFPFELYNEEYLEQRDLYLTQCQQQLEQFIATYGPGTTIFSSDE

SEQ ID NO: 16009 - protein, 610 aa, Homo sapiens
MSVQVVSAAAAAKVPEVELKDLSPSEAESQLGLSTAAVGAMAPPAGGGDPEAPAPAAERPPVPGPGSGPAAALSPAAGKVPQASAMKRSDPHHQHQRHRDGGEALVSPDGTVTEAPRTVKKIQFADQKQEFNKRPTKIGRRSLSRSISQSSTDSYSSAASYTDSSDDETSPRDKQQKNSKGSSDFCVKNIKQAEFGRREIEIAEQEMPALMALRKRAQGEKPLAGAKIVGCTHITAQTAVLMETLGALGAQCRWAACNIYSTLNEVAAALAESGFPVFAWKGESEDDFWWCIDRCVNVEGWQPNMILDDGGDLTHWIYKKYPNMFKKIKGIVEESVTGVHRLYQLSKAGKLCVPAMNVNDSVTKQKFDNLYCCRESILDGLKRTTDMMFGGKQVVVCGYGEVGKGCCAALKAMGSIVYVTEIDPICALQACMDGFRLVKLNEVIRQVDIVITCTGNKNVVTREHLDRMKNSCIVCNMGHSNTEIDVASLRTPELTWERVRSQVDHVIWPDGKRIVLLAEGRLLNLSCSTVPTFVLSITATTQALALIELYNAPEGRYKQDVYLLPKKMDEYVASLHLPTFDAHLTELTDEQAKYLGLNKNGPFKPNYYRY

SEQ ID NO: 16010 - protein, 372 aa, Homo sapiens
MSPKRIAKRRSPPADAIPKSKKVKDTRAAASRRVPGARSCQVSHRSHSTEPGLVLTLGQGDVGQLGLGENVMERKKPALVSIPEDVVQAEAGGMHTVCLSKSGQVYSFGCNDEGALGRDTSVEGSEMVPGKVELQEKVVQVSAGDSHTAALTDDGRVFLWGSFRDNNGVIGLLEPMKKSMVPVQVQLDVPVVKVASGNDHLVMLTADGDLYTLGCGEQGQLGRVPELFANRGGRQGLERLLVPKCVMLKSRGSRGHVRFQDAFCGAYFTFAISHEGHVYGFGLSNYHQLGTPGTESCFIPQNLTSFKNSTKSWVGFSGGQHHTVCMDSEGKAYSLGRAEYGRLGLGEGAEEKSIPTLISRLPAVSSVACGAS

SEQ ID NO: 16011 - protein, 562 aa, Homo sapiens
MLACLPGPGDLSFQLLSHTQMNTGLQKWDTTQKMRTAHYPTPAELDAYAKKVANNPLTIKIFPNSVKVPQRKHVRRTVNGLDTSAQRYSPYPTQAATKAGLLAIVKVPAKSILKDFDGTRARLLPEAIMNPPVAPYATVAPSTLAHPQAQALARQQALQHAQTLAHAPPQTLQHPQGIPPPQALSHPQSLQQPQGLGHPQPMAQTQGLVHPQALAHQGLQHPHNPLLHGGRKMPDSDAPPNVTVSTSTIPLSMAATLQHSQPPDLSSIVHQINQFCQTRAGISTTSVCEGQIANPSPISRSLLINASTRVSTHSVPTPMPSCVVNPMEHTHAATAALPAAGPVNLPTGISRVPTGYPSDLKPVTWNQHQLAHLQQMCSEASGTPAPGLTGKHAAGRELAGPGFVGKAPAYPQELCLAQSFHLKPPLEKPTPSPPVNGMAAPLAYPNGHYFQPLWNNILPTPNSDSSGSQDLAMPFHGGQPTGAPLDCAAAPGAHYRAGTGGGPVASQNSLMQTVDYLSGDFQQACFREQSLAMLSKAHRAPGNRAPDPTESRSLHIQHPGYR

SEQ ID NO: 16012 - protein, 695 aa, Homo sapiens
MAFSKGFRIYHKLDPPPFSLIVETRHKEECLMFESGAVAVLSSAEKEAIKGTYSKVLDAYGLLGVLRLNLGDTMLHYLVLVTGCMSVGKIQESEVFRVTSTEFISLRIDSSDEDRISEVRKVLNSGNFYFAWSASGISLDLSLNAHRSMQEQTTDNRFFWNQSLHLHLKHYGVNCDDWLLRLMCGGVEIRTIYAAHKQAKACLISRLSCERAGTRFNVRGTNDDGHVANFVETEQVVYLDDSVSSFIQIRGSVPLFWEQPGLQVGSHRVRMSRGFEANAPAFDRHFRTLKNLYGKQIIVNLLGSKEGEHMLSKAFQSHLKASEHAADIQMVNFDYHQMVKGGKAEKLHSVLKPQVQKFLDYGFFYFNGSEVQRCQSGTVRTNCLDCLDRTNSVQAFLGLEMLAKQLEALGLAEKPQLVTRFQEVFRSMWSVNGDSISKIYAGTGALEGKAKAGKLKDGARSVTRTIQNNFFDSSKQEAIDVLLLGNTLNSDLADKARALLTTGSLRASSKVLKSMCENFYKYSKPKKIRVCVGTWNVNGGKQFRSIAFKNQTLTDWLLDAPKLAGIQEFQDKRSKPTDIFAIGFEEMVELNAGNIVSASTTNQKLWAVELQKTISRDNKYVLLASEQLVGVCLFVFIRPQHAPFIRDVAVDTVKTGMGGATGNKGAVAIRMLFHTTSLCFVCSHFAAGQSQVKER

SEQ ID NO: 16013 - protein, 269 aa, Homo sapiens
MSSGASRKSWDPGNPWPPDWPITGRKMKVLWAALLVTFLAGCQAKVEQAVETEPEPELRQQTEWQSGQRWELALGRFWDYLRWVQTLSEQVQEELLSSQVTQELRALMDETMKELKAYKSELEEQLTPVAEETRARLSKELQAAQARLGADMEDVCGRLVQYRGEVQAMLGQSTEELRVRLASHLRKLRKRLLRDADDLQKRLAVYQAGAREGAERGLSAIRERLGPLVEQGRVRAATVGSLAGQPLQERAQAWGERLRARMEEMGSRT

SEQ ID NO: 16014 - protein, 531 aa, Homo sapiens
MLENYRNLVFVGIAASKPDLITCLEQGKEPWNVKRHEMVAEPPVVCSYFARDLWPKQGKKNYFQKVILRRYKKCGCENLQLRKYCKSMDECKVHKECYNGLNQCLTTTQNKIFQCDKYVKVFHKFSNSNRHTIRHTGKKSFKCKECEKSFCMLSHLAQHKRIHSGEKPYKCKECGKAYNETSNLSTHKRIHTGKKPYKCEECGKAFNRLSHLTTHKIIHTGKKPYKCEECGKAFNQSANLTTHKRIHTGEKPYKCEECGRAFSQSSTLTAHKIIHAGEKPYKCEECGKAFSQSSTLTTHKIIHTGEKFYKCEECGKAFSQLSHLTTHKRIHSGEKPYKCEECGKAFKQSSTLTTHKRIHAGEKFYKCEVCSKAFSRFSHLTTHKRIHTGEKPYKCEECGKAFNLSSQLTTHKIIHTGEKPYKCEECGKAFNQSSTLSKHKVIHTGEKPYKYEECGKAFNQSSHLTTHKMIHTGEKPYKCEECGKAFNNSSILNRHKMIHTGEKLYKPESCNNACDNIAKISKYKRNCAGEK

SEQ ID NO: 16015 - protein, 737 aa, Homo sapiens
PEKPVKQEEMAALDVDSGGGGGGGGGHGEYLQQQQQHGNGAVAAAAAAQTGDLASAQLGGAPNRWEVLSATPTTIKDEAGNLVQIPSAATSSGQYVLPLQNLQNQQIFSVAPGSDSSNGTVSSVQYQVIPQIQSADGQQVQIGFTGSSDNGGINQESSQIQIIPGSNQTLLASGTPSANIQNLIPQTGQVQVQGVAIGGSSFPGQTQVVANVPLGLPGNITFVPINSVDLDSLGLSGSSQTMTAGINADGHLINTGQAMDSSDNSERTGERVSPDINETNTDTDLFVPTSSSSQLPVTIDSTGILQQNTNSLTTSSGQVHSSDLQGNYIQSPVSEETQAQNIQVSTAQPVVQHLQLQESQQPTSQAQIVQGITPQTIHGVQASGQNISQQALQNLQLQLNPGTFLIQAQTVTPSGQVTWQTFQVQGVQNLQNLQIQNTAAQQITLTPVQTLTLGQVAAGGAFTSTPVSLSTGQLPNLQTVTVNSIDSAGIQLHPGENADSPADIRIKEEEPDPEEWQLSGDSTLNTNDLTHLRVQVVDEEGDQQHQEGKRLRRVACTCPNCKEGGGRGTNLGKKKQHICHIPGCGKVYGKTSHLRAHLRWHSGERPFVCNWMYCGKRFTRSDELQRHRRTHTGEKKFVCPECSKRFMRSDHLAKHIKTHQNKKGIHSSSTVLASVEAARDDTLITAGGTTLILANIQQGSVSGIGTVNTSATSNQDILTNTEIPLQLVTVSGNETME

SEQ ID NO: 16016 - protein, 420 aa, Homo sapiens
MFKRTVLSCPPPAAPPLQARGAFRSFPHSWGEDFLASLMFKIQLEPLKLRAWTLNGFVKFRNKETSAGPVAVMGKDYYKILGIPSGANEDEIKKAYRKMALKYHPDKNKEPNAEEKFKEIAEAYDVLSDPKKRGLYDQYGEEGLKTGGGTSGGSSGSFHYTFHGDPHATFASFFGGSNPFDIFFASSRSTRPFSGFDPDDMDVDEDEDPFGAFGRFGFNGLSRGPRRAPEPLYPRRKVQDPPVVHELRVSLEEIYHGSTKRMKITRRRLNPDGRTVRTEDKILHIVIKRGWKEGTKITFPKEGDATPDNIPADIVFVLKDKPHAHFRRDGTNVLYSALISLKEALCGCTVNIPTIDGRVIPLPCNDVIKPGTVKRLRGEGLPFPKVPTQRGDLIVEFKVRFPDRLTPQTRQILKQHLPCS

SEQ ID NO: 16017 - protein, 493 aa, Homo sapiens
MDFLLGNPFSSPVGQRIEKATDGSLQSEDWALNMEICDIINETEEGPKDALRAVKKRIVGNKNFHEVMLALTVLETCVKNCGHRFHVLVASQDFVESVLVRTILPKNNPPTIVHDKVLNLIQSWADAFRSSPDLTGVVTIYEDLRRKGLEFPMTDLDMLSPIHTPQRTVFNSETQSGQDSVGTDSSQQEDSGQHAAPLPAPPILSGDTPIAPTPEQIGKLRSELEMVSGNVRVMSEMLTELVPTQAEPADLELLQELNRTCRAMQQRVLELIPQIANEQLTEELLIVNDNLNNVFLRHERFERFRTGQTTKAPSEAEPAADLIDMGPDPAATGNLSSQLAGMNLGSSSVRAGLQSLEASGRLEDEFDMFALTRGSSLADQRKEVKYEAPQATDGLAGALDARQQSTGAIPVTQACLMEDIEQWLSTDVGNDAEEPKGVTSEGKFDKFLEERAKAADRLPNLSSPSAEGPPGPPSGPAPRKKTQEKDDDMLFAL

SEQ ID NO: 16018 - protein, 743 aa, Homo sapiens
MLASPEPKGLVPFTKESFELIKQHIAKTHNEDHEEEDLKPTPDLEVGKKLPFIYGNLSQGMVSEPLEDVDPYYYKKKNTFIVLNKNRTIFRFNAASILCTLSPFNCIRRTTIKVLVHPFFQLFILISVLIDCVFMSLTNLPKWRPVLENTLLGIYTFEILVKLFARGVWAGSFSFLGDPWNWLDFSVTVFEVIIRYSPLDFIPTLQTARTLRILKIIPLNQGLKSLVGVLIHCLKQLIGVIILTLFFLSIFSLIGMGLFMGNLKHKCFRWPQENENETLHNRTGNPYYIRETENFYYLEGERYALLCGNRTDAGQCPEGYVCVKAGINPDQGFTNFDSFGWALFALFRLMAQDYPEVLYHQILYASGKVYMIFFVVVSFLFSFYMASLFLGILAMAYEEEKQRVGEISKKIEPKFQQTGKELQEGNETDEAKTIQIEMKKRSPISTDTSLDVLEDATLRHKEELEKSKKICPLYWYKFAKTFLIWNCSPCWLKLKEFVHRIIMAPFTDLFLIICIILNVCFLTLEHYPMSKQTNTLLNIGNLVFIGIFTAEMIFKIIAMHPYGYFQVGWNIFDSMIVFHGLIELCLANVAGMALLRLFRMLRIFKLGKYWPTFQILMWSLSNSWVALKDLVLLLFTFIFFSAAFGMKLFGKNYEEFVCHIDKDCQLPRWHMHDFFHSFLNVFRILCGEWVETLWDCMEVAGQSWCIPFYLMVILIGNLLVSSQFFYIFHENWYKVVWYFHDVH

SEQ ID NO: 16019 - protein, 245 aa, Homo sapiens
MRLSFIVFSSQATIILPLTGDRGKISKGLEDLKRVSPVGETYIHEGLKLANEQIQKAGGLKTSSIIIALTDGKLDGLVPSYAEKEAKISRSLGASVYCVGVLDFEQAQLERIADSKEQVFPVKGGFQALKGIINSILAQSCTEILELQPSSVCVGEEFQIVLSGRGFMLGSRNGSVLCTYTVNETYTTSVKPVSVQLNSMLCPAPILNKAGEWGLTVTQAGVKWHDLTHCTFGLSGSGDPPTSAS

SEQ ID NO: 16020 - protein, 587 aa, Homo sapiens
MPLDKAMPLKHYLLLLVGCQAWGAGLAYHGCPSECTCSRASQVECTGARIVAVPTPLPWNAMSLQILNTHITELNESPFLNISALIALRIEKNELSRITPGAFRNLGSLRYLSLANNKLQVLPIGLFQGLDSLESLLLSSNQLLQIQPAHFSQCSNLKELQLHGNHLEYIPDGAFDHLVGLTKLNLGKNSLTHISPRVFQHLGNLQVLRLYENRLTDIPMGTFDGLVNLQELALQQNQIGLLSPGLFHNNHNLQRLYLSNNHISQLPPSVFMQLPQLNRLTLFGNSLKELSPGIFGPMPNLRELWLYDNHISSLPDNVFSNLRQLQVLILSRNQISFISPGAFNGLTELRELSLHTNALQDLDGNVFRMLANLQNISLQNNRLRQLPGNIFANVNGLMAIQLQNNQLENLPLGIFDHLGKLCELRLYDNPWRCDSDILPLRNWLLLNQPRLGTDTVPVCFSPANVRGQSLIIINVNVAVPSVHVPEVPSYPETPWYPDTPSYPDTTSVSSTTELTSPVEDYTDLTTIQVTDDRSVWGMTQAQSGLAIAAIVIGIVALACSLAACVGCCCCKKRSQAVLMQMKAPNEC

SEQ ID NO: 16021 - protein, 289 aa, Homo sapiens
MTPIVTVLICLRLSLGPRTHVQAGTLPKPTLWAEPGSVITQGSPVTLWCQGILETQEYRLYREKKTAPWITRIPQEIVKKGQFPIPSITWEHTGRYRCFYGSHTAGWSEPSDPLELVVTGAYIKPTLSALPSPVVTSGGNVTLHCVSQVAFGSFILCKEGEDEHPQCLNSQPRTHGWSRAIFSVGPVSPSRRWSYRCYAYDSNSPHVWSLPSDLLELLVLGAAETLSPPQNKSDSKAGAANTLSPSQNKTASHPQDYTVENLIRMGIAGLVLVVLGILLFEAQHSQRSL

SEQ ID NO: 16022 - protein, 1741 aa, Homo sapiens
YCDEAVRDPSQAPPVDVHQPPAFLHKLLQLAGVRLHYEELPAQEEPPEPPLQIGSCSGYMELMVKLKQNEAFPGPKLEVAGQLGSLHLLLTPRQLQQLQELLSAVSLTDHEGLADKLNKSRPLGAEDLWLIEQDLNQQLQAGAVAEPLSPDPLTNPLLNLDNTDLFFSMAGLTSSVASALSELSLSDVDLASSVRSDMASRRLSAQAHPAGKMAPNPLLDTMRPDSLLKMTLGGVTLTLLQTSAPSSGPPDLATHFFTEFDATKDGPFGSRDFHHLRPRFQRACPCSHVRLTGTAVQLSWELRTGSRGRRTTSMEVHFGQLEVLECLWPRGTSEPEYTEILTFPGTLGSQASARPCAHLRHTQILRRVPKSRPRRSVACHCHSELALDLANFQADVELGALDRLAALLRLATVPAEPPAGLLTEPLPAMEQQTVFRLSAPRATLRLRFPIADLRPEPDPWAGQAVRAEQLRLELSEPQFRSELSSGPGPPVPTHLELTCSDLHGIYEDGGKPPVPCLRVSKALDPKSTGRKYFLPQVVVTVNPQSSSTQWEVAPEKGEELELSVESPCELREPEPSPFSSKRTMYETEEMVIPGDPEEMRTFQSRTLALSRCSLEVILPSVHIFLPSKEVYESIYNRINNDLLMWEPADLLPTPDPAAQPSGFPGPSGFWHDSFKMCKSAFKLANCFDLTPDSDSDDEDAHFFSVGASGGPQAAAPEAPSLHLQSTFSTLVTVLKGRITALCETKDEGGKRLEAVHGELVLDMEHGTLFSVSQYCGQPGLGYFCLEAEKATLYHRAAVDDYPLPSHLDLPSFAPPAQLAPTIYPSEEGVTERGASGRKGQGRGPHMLSTAVRIHLDPHKNVKEFLVTLRLHKATLRHYMALPEQSWHSQLLEFLDVLDDPVLGYLPPTVITILHTHLFSCSVDYRPLYLPVRVLITAETFTLSSNIIMDTSTFLLRFILDDSALYLSDKCEVETLDLRRDYVCVLDVDLLELVIKTWKGSTEGKLSQPLFELRCSNNVVHVHSCADSCALLVNLLQYVMSTGDLHPPPRPPSPTEIAGQKVQLSESPASLPSCPPVETALINQRDLADALLDTERSLRELAQPSGGHLPQASPISVYLFPGERSGAPPPSPPVGGPAGSLGSCSEEKEDEREEEGDGDTLDSDEFCILDAPGLGIPPRDGEPVVTQLHPGPIVVRDGYFSRPIGSTDLLRAPAHFPVPSTRVVLREVSLVWHLYGGRDFGPHPGHRARTGLSGPRSSPSRCSGPNRPQNSWRTQGGSGRQHHVLMEIQLSKVSFQHEVYPAEPATGPAAPSQELEERPLSRQVFIVQELEVRDRLASSQINKFLYLHTSERMPRRAHSNMLTIKALHVAPTTNLGGPECCLRVSLMPLRLNVDQDALFFLKDFFTSLVAGINPVVPGETSAEARPETRAQPSSPLEGQAEGVETTGSQEAPGGGHSPSPPDQQPIYFREFRFTSEVPIWLDYHGKHVTMDQVGTFAGLLIGLAQLNCSELKLKRLCCRHGLLGVDKVLGYALNEWLQDIRKNQLPGLLGGVGPMHSVVQLFQGFRDLLWLPIEQYRKDGRLMRGLQRGAASFGSSTASAALELSNRLVQAIQATAETVYDILSPAAPVSRSLQDKRSARRLRRGQQPADLREGVAKAYDTVREGILDTAQTICDVASRGHEQKGLTGAVGGVIRQLPPTVVKPLILATEATSSLLGGMRNQIVPDAHKDHALKWRSDSAQD

SEQ ID NO: 16023 - protein, 1171 aa, Homo sapiens
MAPVYEGMASHVQVFSPHTLQSSAFCSVKKLKIEPSSNWDMTGYGSHSKVYSQSKNIPLSQPATTTVSTSLPVPNPSLPYEQTIVFPGSTGHIVVTSASSTSVTGQVLGGPHNLMRRSTVSLLDTYQKCGLKRKSEEIENTSSVQIIEEHPPMIQNNASGATVATATTSTATSKNSGSNSEGDYQLVQHEVLCSMTNTYEVLEFLGRGTFGQVVKCWKRGTNEIVAIKILKNHPSYARQGQIEVSILARLSTESADDYNFVRAYECFQHKNHTCLVFEMLEQNLYDFLKQNKFSPLPLKYIRPVLQQVATALMKLKSLGLIHADLKPENIMLVDPSRQPYRVKVIDFGSASHVSKAVCSTYLQSRYYRAPEIILGLPFCEAIDMWSLGCVIAELFLGWPLYPGASEYDQIRYISQTQGLPAEYLLSAGTKTTRFFNRDTDSPYPLWRLKTPDDHEAETGIKSKEARKYIFNCLDDMAQVNMTTDLEGSDMLVEKADRREFIDLLKKMLTIDADKRITPIETLNHPFVTMTHLLDFPHSTHVKSCFQNMEICKRRVNMYDTVNQSKTPFITHVAPSTSTNLTMTFNNQLTTVHNQPSAASMAAVAQRSMPLQTGTAQICARPDPFQQALIVCPPGFQGLQASPSKHAGYSVRMENAVPIVTQAPGAQPLQIQPGLLAQQAWPSGTQQILLPPAWQQLTGVATHTSVQHATVIPETMAGTQQLADWRNTHAHGSHYNPIMQQPALLTGHVTLPAAQPLNVGVAHVMRQQPTSTTSSRKSKQHQSSVRNVSTCEVSSSQAISSPQRSKRVKENTPPRCAMVHSSPACSTSVTCGWGDVASSTTRERQRQTIVIPDTPSPTVSVITISSDTDEEEEQKHAPTSTVSKQRKNVISCVTVHDSPYSDSSSNTSPYSVQQRAGHNNANAFDTKGSLENHCTGNPRTIIVPPLKTQASEVLVECDSLVPVNTSHHSSSYKSKSSSNVTSTSGHSSGSSSGAITYRQQRPGPHFQQQQPLNLSQAQQHITTDRTGSHRRQQAYITPTMAQAPYSFPHNSPSHGTVHPHLAAAAAAAHLPTQPHLYTYTAPAALGSTGTVAHLVASQGSARHTVQHTAYPASIVHQVPVSMGPRVLPSPTIHPSQYPAQFAHQTYISASPASTVYTGYPLSPAKVNQYPYI

SEQ ID NO: 16024 - protein, 300 aa, Homo sapiens
DANVQIASISEELAKKTEDAARQQEEITHLLSQIVDLQKKAKALRELEDKYAECMEMLHEAQEELKNLRNKTMPNTTSRRYHSLGLFPMDSLAAEIEGTMRKELQLEEAESPDITHQKRVFETVRNINQVVKQRSLTPSPMNIPGSNQSSAMNSLLSSCVSTPRSSFYGSDIGNVVLDNKTNSIILETEAADLGNDERSKKPGTPGTPGSHDLETALRRLSLRRENYLSERRFFEEEQERKLQELAEKGELRSGSLTPTESIMSLGTHSRFSEFTGFSGMSFSSRSYLPEKLQIVKPLEG

SEQ ID NO: 16025 - protein, 439 aa, Homo sapiens
MDRDLLRQSLNCHGSSLLSLLRSEQQDNPHFRSLLGSAAEPARGPPPQHPLQGRKEKRVDNIEIQKFISKKADLLFALSWKSDAPATSEINEDSEDHYAIMPPLEQFMEIPSMDRRELFFRDIERGDIVIGRISSIREFGFFMVLICLGSGIMRDIAHLEITALCPLRDVPSHSNHGDPLSYYQTGDIIRAGIKDIDRYHEKLAVSLYSSSLPPHLSGIKLGVISSEELPLYYRRSVELNSNSLESYENVMQSSLGFVNPGVVEFLLEKLGIDESNPPSLMRGLQSKNFSEDDFASALRKKQSASWALKCVKIGVDYFKVGRHVDAMNEYNKALEIDKQNVEALVARGALYATKGSLNKAIEDFELALENCPTHRNARKYLCQTLVERGGQLEEEEKFLNAESYYKKALALDETFKDAEDALQKLHKYMQVIPYFLLEI

SEQ ID NO: 16026 - protein, 114 aa, Homo sapiens
MMLTQAPSSVVRSRNSRNHTVNSGGSCLSASTVAIPAINDSSAAMSACSTISAQPASSMDTQMHSPKKQERVNKRVIWGIEVAEELHWKGWELGKETTRNLVLKNRSLKLQKMK

SEQ ID NO: 16027 - protein, 397 aa, Homo sapiens
MDSSAAPTNASNCTDALAYSSCSPAPSPGSWVNLSHLDGNLSDPCGPNRTDLGGRDSLCPPTGSPSMITAITIMALYSIVCVVGLFGNFLVMYVIVRYTKMKTATNIYIFNLALADALATSTLPFQSVNYLMGTWPFGTILCKIVISIDYYNMFTSIFTLCTMSVDRYIAVCHPVKALDFRTPRNAKIINVCNWILSSAIGLPVMFMATTKYRQGSIDCTLTFSHPTWYWENLLKICVFIFAFIMPVLIITVCYGLMILRLKSVRMLSGSKEKDRNLRRITRMVLVVVAVFIVCWTPIHIYVIIKALVTIPETTFQTVSWHFCIALGYTNSCLNPVLYAFLDENFKRCFREFCIPTSSNIEQQNSTRIRQNTRDHPSTANTVDRTNHQRERRQKSDW

SEQ ID NO: 16028 - protein, 586 aa, Homo sapiens
MEELVVEVRGSNGAFYKAFVKDVHEDSITVAFENNWQPDRQIPFHDVRFPPPVGYNKDINESDEVEVYSRANEKEPCCWWLAKVRMIKGEFYVIEYAACDATYNEIVTIERLRSVNPNKPATKDTFHKIKLDVPEDLRQMCAKEAAHKDFKKAVGAFSVTYDPENYQLVILSINEVTSKRAHMLIDMHFRSLRTKLSLIMRNEEASKQLESSRQLASRFHEQFIVREDLMGLAIGTHGANIQQARKVPGVTAIDLDEDTCTFHIYGEDQDAVKKARSFLEFAEDVIQVPRNLVGKVIGKNGKLIQEIVDKSGVVRVRIEAENEKNVPQEEEIMPPNSLPSNNSRVGPNAPEEKKHLDIKENSTHFSQPNSTKVQRGMVPFVFVGTKDSIANATVLLDYHLNYLKEVDQLRLERLQIDEQLRQIGASSRPPPNRTDKEKSYVTDDGQGMGRGSRPYRNRGHGRRGPGYTSAPTEEERESFLRRGDGRRRGGGGRGQGGRGRGGGFKGNDDHSRTDNRPRNPREAKGRTTDGSLQIRVDCNNERSVHTKTLQNTSSEGSRLRTGKDRNQKKEKPDSVDGQQPLVNGVP

SEQ ID NO: 16029 - protein, 1254 aa, Homo sapiens
MSQPPLLPASAETRKFTRALSKPGTAAELRQSVSEVVRGSVLLAKPKLIEPLDYENVIVQKKTQILNDCLREMLLFPYDDFQTAILRRQGRYICSTVPAKAEEEAQSLFVTECIKTYNSDWHLVNYKYEDYSGEFRQLPNKVVKLDKLPVHVYEVDEEVDKDEDAASLGSQKGGITKHGWLYKGNMNSAISVTMRSFKRRFFHLIQLGDGSYNLNFYKDEKISKEPKGSIFLDSCMGVVQNNKVRRFAFELKMQDKSSYLLAADSEVEMEEWITILNKILQLNFEAAMQEKRNGDSHEDDEQSKLEGSGSGLDSYLPELAKSAREAEIKLKSESRVKLFYLDPDAQKLDFSSAEPEVKSFEEKFGKRILVKCNDLSFNLQCCVAENEEGPTTNVEPFFVTLSLFDIKYNRKISADFHVDLNHFSVRQMLATTSPALMNGSGQSPSVLKGILHEAAMQYPKQGIFSVTCPHPDIFLVARIEKVLQGSITHCAEPYMKSSDSSKVAQKVLKNAKQACQRLGQYRMPFAWAARTLFKDASGNLDKNARFSAIYRQDSNKLSNDDMLKLLADFRKPEKMAKLPVILGNLDITIDNVSSDFPNYVNSSYIPTKQFETCSKTPITFEVEEFVPCIPKHTQPYTIYTNHLYVYPKYLKYDSQKSFAKARNIAICIEFKDSDEEDSQPLKCIYGRPGGPVFTRSAFAAVLHHHQNPEFYDEIKIELPTQLHEKHHLLLTFFHVSCDNSSKGSTKKRDVVETQVGYSWLPLLKDGRVVTSEQHIPVSANLPSGYLGYQELGMGRHYGPEIKWVDGGKPLLKISTHLVSTVYTQDQHLHNFFQYCQKTESGAQALGNELVKYLKSLHAMEGHVMIAFLPTILNQLFRVLTRATQEEVAVNVTRVIIHVVAQCHEEGLESHLRSYVKYAYKAEPYVASEYKTVHEELTKSMTTILKPSADFLTSNKLLKYSWFFFDVLIKSMAQHLIENSKVKLLRNQRFPASYHHAVETVVNMLMPHITQKFRDNPEASKNANHSLAVFIKRCFTFMDRGFVFKQINNYISCFAPGDPKTLFEYKFEFLRVVCNHEHYIPLNLPMPFGKGRIQRYQDLQLDYSLTDEFCRNHFLVGLLLREVGTALQEFREVRLIAISVLKNLLIKHSFDDRYASRSHQARIATLYLPLFGLLIENVQRINVRDVSPFPVNAGMTVKDESLALPAVNPLVTPQKGSTLDNSLHKDLLGAISGIGNAPCSCGLLSTITLKVSWSQ

SEQ ID NO: 16030 - protein, 116 aa, Homo sapiens
MGIKTALPAAELGLYSLVLSGALAYAGRGLLEASQDGAHRKAFRESVRPGWEYIGRKMDVADFEWVMWFTSFRNVIIFALSGHVLFAKLCTMVAPKSGFVTGTFDLQEVLFHGGSS

SEQ ID NO: 16031 - protein, 874 aa, Homo sapiens
MASAVRGSRPWPRLGLQLQFAALLLGTLSPQVHTLRPENLLLVSTLDGSLHALSKQTGDLKWTLRDDPVIEGPMYVTEMAFLSDPADGSLYILGTQKQQGLMKLPFTIPELVHASPCRSSDGVFYTGRKQDAWFVVDPESGETQMTLTTEGPSTPRLYIGRTQYTVTMHDPRAPALRWNTTYRRYSAPPMDGSPGKYMSHLASCGMGLLLTVDPGSGTVLWTQDLGVPVMGVYTWHQDGLRQLPHLTLARDTLHFLALRWGHIRLPASGPRDTATLFSTLDTQLLMTLYVGKDETGFYVSKALVHTGVALVPRGLTLAPADGPTTDEVTLQVSGEREGSPSTAVRYPSGSVALPSQWLLIGHHELPPVLHTTMLRVHPTLGSGTAETRPPENTQAPAFFLEQQPQVVEKQQETPLAPADFAHISQDAQSLHSGASRRSQKRLQSPSKQAQPLDDPEAEQLTVVGKISFNPKDVLGRGAGGTFVFRGQFEGRAVAVKRLLRECFGLVRREVQLLQESDRHPNVLRYFCTERGPQFHYIALELCRASLQEYVENPDLDRGGLEPEVVLQQLMSGLAHLHSLHIVHRDLKPGNILITGPDSQGLGRVVLSDFGLCKKLPAGRCSFSLHSGIPGTEGWMAPELLQLLPPDSPTSAVDIFSAGCVFYYVLSGGSHPFGDSLYRQANILTGAPCLAHLEEEVHDKVVARDLVGAMLSPLPQPRPSAPQVLAHPFFWSRAKQLQFFQDVSDWLEKESEQEPLVRALEAGGCAVVRDNWHEHISMPLQTDLRKFRSYKGTSVRDLLRAVRNKKHHYRELPVEVRQALGQVPDGFVQYFTNRFPRLLLHTHRAMRSCASESLFLPYYPPDSEARRPCPGATGR

SEQ ID NO: 16032 - protein, 210 aa, Homo sapiens
MWVTKLLPALLLQHVLLHLLLLPIAIPYAEGQRKRRNTIHEFKKSAKTTLIKIDPALKIKTKKVNTADQCANRCTRNKGLPFTCKAFVFDKARKQCLWFPFNSMSSGVKKEFGHEFDLYENKDYIRNCIIGKGRSYKGTVSITKSGIKCQPWSSMIPHEHSFLPSSYRGKDLQENYCRNPRGEEGGPWCFTSNPEVRYEVCDIPQCSEGK

SEQ ID NO: 16033 - protein, 724 aa, Homo sapiens
MESGRGSSTPPGPIAALGMPDTGPGSSSLGKLQALPVGPRAHCGDPVSLAAAGDGSPDIGPTGELSGSLKIPNRDSGIDSPSSSVAGENFPCEEGLEAGPSPTVLGAHAEMALDSQVPKVTPQEEADSDVGEEPDSENTPQKADKDAGLAQHSGPQKLLHIAQELLHTEETYVKRLHLLDQVFCTRLTDAGIPPEVIMGIFSNISSIHRFHGQFLLPELKTRITEEWDTNPRLGDILQKLAPFLKMYGEYVKNFDRAVGLVSTWTQRSPLFKDVVHSIQKQEVCGNLTLQHHMLEPVQRVPRYELLLKDYLKRLPQDAPDRKDAERSLELISTAANHSNAAIRKVEKMHKLLEVYEQLGGEEDIVNPANELIKEGQIQKLSAKNGTPQDRHLFLFNSMILYCVPKLRLMGQKFSVREKMDISGLQVQDIVKPNTAHTFIITGRKRSLELQTRTEEEKKEWIQIIQATIEKHKQNSETFKAFGGAFSQDEDPSLSPDMPITSTSPVEPVVTTEGSSGAAGLEPRKLSSKTRRDKEKQSCKSCGETFNSITKRRHHCKLCGAVICGKCSEFKAENSRQSRVCRDCFLTQPVAPESTETPTADPQPSLLCGPLRLSESGETWSEVWAAIPMSDPQVLHLQGGSQDGRLPRTIPLPSCKLSVPDPEERLDSGHVWKLQWAKQSWYLSASSAELQQQWLETLSTAAHGDTAQDSPGALQLQVPMGAAAP

SEQ ID NO: 16034 - protein, 367 aa, Homo sapiens
MDGFYDQQVPYMVTNSQRGRNCNEKPTNVRKRKFINRDLAHDSEELFQDLSQLQETWLAEAQVPDNDEQFVPDYQAESLAFHGLPLKIKKEPHSPCSEISSACSQEQPFKFSYGEKCLYNVSAYDQKPQVGMRPSNPPTPSSTPVSPLHHASPNSTHTPKPDRAFPAHLPPSQSIPDSSYPMDHRFRRQLSEPCNSFPPLPTMPREGRPMYQRQMSEPNIPFPPQGFKQEYHDPVYEHNTMVGSAASQSFPPPLMIKQEPRDFAYDSEVPSCHSIYMRQEGFLAHPSRTEGCMFEKGPRQFYDDTCVVPEKFDGFSNVALSVIILRGICLSTDHRRHQTRARNVSGRTHIPTARITSALAVFGSSSG

SEQ ID NO: 16035 - protein, 1577 aa, Homo sapiens
MHNTADEVVLYHKLAGPWGRCTGDCGPGGVQSRAVWCFHVDGWTSHLSNCGESNRPPKERSCFRVCDWHSDLFQWEVSDWHHCVLVPYARGEVKPRTAECVTAQHGLQHRMVRCIQKLNRTVVANEICEHFALQPPTEQACLIPCPRDCVVSEFLPWSNCSKGCGKKLQHRTRAVIAPPLFGGLQCPNLTESRACDAPISCPLGEEEYTFSLKVGPWSKCRLPHLKEINPSGRTVLDFNSDSNERVTFKHQSYKAHHHSKSWAIEIGYQTRQVSCTRSDGQNAMLSLCLQDSFPLTVQSCIMPKDCETSQWSSWSPCSKTCRSGSLLPGFRSRSRNVKHMAIGGGKECPELLEKEACIVEGELLQQCPRYSWRTSEWKECQVSLLLEQQDPHWHVTGPVCGGGIQTREVYCAQSVPAAAALRAKEVSRPVEKALCVGPAPLPSQLCNIPCSTDCIVSSWSAWGLCIHENCHDPQGKKGFRTRQRHVLMESTGPAGHCPHLVESVPCEDPMCYRWLASEGICFPDHGKCGLGHRILKAVCQNDRGEDVSGSLCPVPPPPERKSCEIPCRMDCVLSEWTEWSSCSQSCSNKNSDGKQTRSRTILALAGEGGKPCPPSQALQEHRLCNDHSCMQLHWETSPWGPCSEDTLVTALNATIGWNGEATCGVGIQTRRVFCVKSHVGQVMTKRCPDSTRPETVRPCFLPCKKDCIVTAFSEWTPCPRMCQAGNATVKQSRYRIIIQEAANGGQECPDTLYEERECEDVSLCPVYRWKPQKWSPCILVPESVWQGITGSSEACGKGLQTRAVSCISDDNRSAEMMECLKQTNGMPLLVQECTVPCREDCTFTAWSKFTPCSTNCEATKSRRRQLTGKSRKKEKCQDSDLYPLVETELCPCDEFISQPYGNWSDCILPEGRREPHRGLRVQADSKECGEGLRFRAVACSDKNGRPVDPSFCSSSGYIQEKCVIPCPFDCKLSDWSSWGSCSSSCGIGVRIRSKWLKEKPYNGGRPCPKLDLKNQAQVHEAVPCYSECNQYSWVVEHWSSCKINNELRSLRCGGGTQSRKIRCVNTADGEGGAVDSNLCNQDEIPPETQSCSLMCPNECVMSEWGLWSKCPQSCDPHTMQRRTRHLLRPSLNSRTCAEDSQVQPCLLNENCFQFQYNLTEWSTCQLSENAPCGQGVRTRLLSCVCSDGKPVSMDQCEQHNLEKPQRMSIPCLVECVVNCQLSGWTAWTECSQTCGHGGRMSRTRFIIMPTQGEGRPCPTELTQEKTCPVTPCYSWVLGNWSACKLEGGDCGEGVQIRSLSCMVHSGSISHAAGRVEDALCGEMPFQDSILKQLCSVPCPGDCHLTEWSEWSTCELTCIDGRSFETVGRQSRSRTFIIQSFENQDSCPQQVLETRPCTGGKCYHYTWKASLWNNNERTVWCQRSDGVNVTGGCSPQARPAAIRQCIPACRKPFSYCTQGGVCGCEKGYTEIMKSNGFLDYCMKVPGSEDKKADVKNLSGKNRPVNSKIHDIFKGWSLQPLDPDGRVKIWVYGVSGGAFLIMIFLIFTSYLVCKKPKPHQSTPPQQKPLTLAYDGDLDM

SEQ ID NO: 16036 - protein, 405 aa, Homo sapiens
MRPSGTAGAALLALLAALCPASRALEEKKVCQGTSNKLTQLGTFEDHFLSLQRMFNNCEVVLGNLEITYVQRNYDLSFLKTIQEVAGYVLIALNTVERIPLENLQIIRGNMYYENSYALAVLSNYDANKTGLKELPMRNLQEILHGAVRFSNNPALCNVESIQWRDIVSSDFLSNMSMDFQNHLGSCQKCDPSCPNGSCWGAGEENCQKLTKIICAQQCSGRCRGKSPSDCCHNQCAAGCTGPRESDCLVCRKFRDEATCKDTCPPLMLYNPTTYQMDVNPEGKYSFGATCVKKCPRNYVVTDHGSCVRACGADSYEMEEDGVRKCKKCEGPCRKVCNGIGIGEFKDSLSINATNIKHFKNCTSISGDLHILPVAFRGDSFTHTPPLDPQELDILKTVKEITGLS

SEQ ID NO: 16037 - protein, 479 aa, Homo sapiens
MLLLLLPLLWGRERAEGQTSKLLTMQSSVTVQEGLCVHVPCSFSYPSHGWIYPGPVVHGYWFREGANTDQDAPVATNNPARAVWEETRDRFHLLGDPHTKNCTLSIRDARRSDAGRYFFRMEKGSIKWNYKHHRLSVNVTALTHRPNILIPGTLESGCPQNLTCSVPWACEQGTPPMISWIGTSVSPLDPSTTRSSVLTLIPQPQDHGTSLTCQVTFPGASVTTNKTVHLNVSYPPQNLTMTVFQGDGTVSTVLGNGSSLSLPEGQSLRLVCAVDAVDSNPPARLSLSWRGLTLCPSQPSNPGVLELPWVHLRDAAEFTCRAQNPLGSQQVYLNVSLQSKATSGVTQGVVGGAGATALVFLSFCVIFVVVRSCRKKSARPAAGVGDTGIEDANAVRGSASQILNHFIGFPTFLGLGFEFLLNLRDLCCHPDSEFYVYHFSHFRLIKNIAGEIVWSLEGKILWLLDVSDFFHWFFLICVG

SEQ ID NO: 16038 - protein, 307 aa, Homo sapiens
MHLAITMDRKKTIKVWNCQDRDALAVLPMPQPCYCMEAYLTKDGPFLMVGDAAGDIYTFTLPGLRDVSKVTAFQYGIVLLHCSPDKKWVFACGTYSRTLPQVFLTESLLRPSEGSVPLSTFLPHKLCASACWTPKVKNRITLMSQSSTGKKTEFITFDLTTKKTGGQTVIQAYEIASFQVAAHLKCPIWMGASDGYMIVFTSGPYLLLFSITGFLLQRFEDHQAAINNFWVDPCYVLTTSENSVHVYMWEEGGRHPYLRSCCHLENTWHDHTTDSCISSVMCDNASIVLRVRKVSDSSILVMYSLNT

SEQ ID NO: 16039 - protein, 985 aa, Homo sapiens
MARRGKKPVVRTLEDLTLDSGYGGAADSVRSSNLSLCCSDSHPASPYGGSCWPPLADSMHSRHNSFDTVNTALVEDSEGLDCAGQHCSRLLPDLDEVPWTLQELEALLLRSRDPRAGPAVPGGLPKDALAKLSTLVSRALVRIAKEAQRLSLRFAKCTKYEIQSAMEIVLSWGLAAHCTAAALAALSLYNMSSAGGDRLGRGKSARCGLTFSVGRVYRWMVDSRVALRIHEHAAIYLTACMESLFRDIYSRVVASGVPRSCSGPGSGSGSGPGPSSGPGAAPAADKEREAPGGGAASGGACSAASSASGGSSCCAPPAAAAAAVPPAAAANHHHHHHHALHEAPKFTVETLEHTVNNDSEIWGLLQPYQHLICGKNASGVLCLPDSLNLHRDPQRSNKPGELPMFSQSELRTIEQSLLATRVGSIAELSDLVSRAMHHLQPLNAKHHGNGTPLHHKQGALYWEPEALYTLCYFMHCPQMEWENPNVEPSKVNLQVERPFLVLPPLMEWIRVAVAHAGHRRSFSMDSDDVRQAARLLLPGVDCEPRQLRADDCFCASRKLDAVAIEAKFKQDLGFRMLNCGRTDLVKQAVSLLGPDGINTMSEQGMTPLMYACVRGDEAMVQMLLDAGADLNVEVVSTPHKYPSVHPETRHWTALTFAVLHGHIPVVQLLLDAGAKVEGSVEHGEENYSETPLQLAAAVGVPWTLHTWLESLRIAFQQHRRPLIQCLLKEFKTIQEEEYTEELVTQGLPLMFEILKASKNEVISQQLCVIFTHCYGPYPIPKLTEIKRKQTSRLDPHFLNNKEMSDVTFLVEGRPFYAHKVLLFTASPRFKALLSSKPTNDGTCIEIGYVKYSIFQLVMQYLYYGGPESLLIKNNEIMELLSAAKFFQLEALQRHCEIICAKSINTDNCVDIYNHAKFLGVTELSAYCEGYFLKNMMVLIENEAFKQLLYDKNGEGTGQDVLQDLQRTLAIRIQSIHLSSSKGSVV

SEQ ID NO: 16040 - protein, 128 aa, Homo sapiens
MSSVAVLTQESFAEHRSGLVPQQIKVATLNSEEESDPPTYKDAFPPLPEKAACLESAQEPAGAWGNKIRPIKASVITQVFHVPLEERKYKDMNQFGEGLSNCCHSQRTPSLCYWQKWRETARLGAKNC

SEQ ID NO: 16041 - protein, 355 aa, Homo sapiens
MERLWGLFQRAQQLSPRSSQTVYQRVEGPRKGHLEEEEEDGEEGAETLAHFCPMELRGPEPLGSRPRQPNLIPWAAAGRRAAPYLVLTALLIFTGAFLLGYVAFRGSCQACGDSVLVVSEDVNYEPDLDFHQGRLYWSDLQAMFLQFLGEGRLEDTIRQTSLRERVAGSAGMAALTQDIRAALSRQKLDHVWTDTHYVGLQFPDPAHPNTLHWVDEAGKVGEQLPLEDPDVYCPYSAIGNVTGELVYAHYGRPEDLQDLRARGVDPVGRLLLVRVGVISFAQKEAQRPCGPPRMAGEPPRLPLSPGPRATTAASGQQSQDLHPHQQHLRLHRRPLRARSLRCHRGPEGCMGPRSS

SEQ ID NO: 16042 - protein, 1060 aa, Homo sapiens
NKTSKENSEQEKDTRVCEHPLSDIVIAGEAAHPLPHTFHRLLQTISDLMMSLPSGSSLQQMALRCWSLKFKQSDHQFLHQSNVFHHINNILSKSDDGDSEESFSISIQSGFEAMSQELCIVMCLKDLTSIVDIKTSSRPAMIGSLTDGSTETFWESGDEDKNKTKNITINCVKGINARYVSVHVDNSRDLGNKVTSMTFLTGKAVEDLCRIKQVDLDSRHIGWVTSELPGGDNHIIKIELKGPENTLRVRQVKVLGWKDGESTKIAGQISASVAQQRNCEAETLRVFRLITSQVFGKLISGDAEPTPEQEEKALLSSPEGEEKATSDADLKEHMVGIIFSRSKLTNLQKQVCAHIVQAIRMEATRVREEWEHAISSKENANSQPNDEDASSDAYCFELLSMVLALSGSNVGRQYLAQQLTLLQDLFSLLHTASPRVQRQVTSLLRRVLPEVTPSRLASIIGVKSLPPADISDIIHSTEKGDWNKLGILDMFLGCIAKALTVQLKAKGTTITGTAGTTVGKGVTTVTLPMIFNSSYLRRGESHWWMKGSTPTQISEIIIKLIKDMAAGHLSEAWSRVTKNAIAETIIALTKMEEEFRSPVRCIATTRLWLALASLCVLDQDHVDRLSSGRWMGKDGQQKQMPMCDNHDDGETAAIILCNVCGNLCTDCDRFLHLHRRTKTHQRQVFKEEEEAIKVDLHEGCGRTKLFWLMALADSKTMKAMVEFREHTGKPTTSSSEACRFCGSRSGTELSAVGSVCSDADCQEYAKIACSKTHPCGHPCGGVKNEEHCLPCLHGCDKSATSLKQDADDMCMICFTEALSAAPAIQLDCSHIFHLQCCRRVLENRWLGPRITFGFISCPICKNKINHIVLKDLLDPIKELYEDVRRKALMRLEYEGLHKSEAITTPGVRFYNDPAGYAMNRYAYYVCYKCRKAYFGGEARCDAEAGRGDDYDPRELICGACSDVSRAQMCPKHGTDFLEYKCRYCCSVAVFFCFGTTHFCNACHDDFQRMTSIPKEELPHCPAGPKGKQLEGTECPLHVVHPPTGEEFALGCGVCRNAHTF

SEQ ID NO: 16043 - protein, 698 aa, Homo sapiens
MAFAWWPCLILALLSSLAASGFPRSPFRLLGKRSLPEGVANGIEVYSTKINSKVTSRFAHNVVTMRAVNRADTAKEVSFDVELPKTAFITNFTLTIDGVTYPGNVKEKEVAKKQYEKAVSQGKTAGLVKASGRKLEKFTVSVNVAAGSKVTFELTYEELLKRHKGKYEMYLKVQPKQLVKHFEIEVDIFEPQGISMLDAEASFITNDLLGSALTKSFSGKKGHVSFKPSLDQQRSCPTCTDSLLNGDFTITYDVNRESPGNVQIVNGYFVHFFAPQGLPVVPKNVAFVIDISGSMAGRKLEQTKEALLRILEDMQEEDYLNFILFSGDVSTWKEHLVQATPENLQEARTFVKSMEDKGMTNINDGLLRGISMLNKAREEHRIPERSTSIVIMLTDGDANVGESRPEKIQENVRNAIGGKFPLYNLGFGNNLNYNFLENMALENHGFARRIYEDSDADLQLQGFYEEVANPLLTGVEMEYPENAILDLTQNTYQHFYDGSEIVVAGRLVDEDMNSFKADVKGHGATNDLTFTEEVTTEKITLWNRAVPSTFSWLDTVTVTQDGLSMMINRKNMVVSFGDGVTFVVVLHQVWKKHPVHRDFLGFYVVDSHRMSAQTHGLLGQFFQPFDFKVSDIRPGSDPTKPDATLVVKNHQLIVTRGSQKDYRKDASIGTKVVCWFVHNNGEGLIDGVHTDYIVPNLF

SEQ ID NO: 16044 - protein, 553 aa, Homo sapiens
MPGMMEKGPELLGKNRSANGSAKSPAGGGGSGASSTNGGLHYSEPESGCSSDDEHDVGMRVGAEYQARIPEFDPGATKYTDKDNGGMLVWSPYHSIPDAKLDEYIAIAKEKHGYNVEQALGMLFWHKHNIEKSLADLPNFTPFPDEWTVEDKVLFEQAFSFHGKSFHRIQQMLPDKTIASLVKYYYSWKKTRSRTSLMDRQARKLANRHNQGDSDDDVEETHPMDGNDSDYDPKKEAKKEGNTEQPVQTSKIGLGRREYQSLQHRHHSQRSKCRPPKGMYLTQEDVVAVSCSPNAANTILRQLDMELISLKRQVQNAKQVNSALKQKMEGGIEEFKPPESNQKINARWTTEEQLLAVQGVRKYGKDFQAIADVIGNKTVGQVKNFFVNYRRRFNLEEVLQEWEAEQGTQASNGDASTLGEETKSASNVPSGKSTDEEEEAQTPQAPRTLGPSPPAPSSTPTPTAPIATLNQPPPLLRPTLPAAPALHRQPPPLQQQARFIQPRPTLNQPPPPLIRPANSMPPRLNPRPVLSTVGGQQPPSLIGIQTDSQSSLH

SEQ ID NO: 16045 - protein, 448 aa, Homo sapiens
MSSRKLSGPKGRRLSIHVVTWNVASAAPPLDLSDLLQLNNRNLNLDIYVIGLQELNSGIISLLSDAAFNDSWSSFLMDVLSPLSFIKVSHVRMQGILLLVFAKYQHLPYIQILSTKSTPTGLFGYWGNKGGVNICLKLYGYYVSIINCHLPPHISNNYQRLEHFDRILEMQNCEGRDIPNILDHDLIIWFGDMNFRIEDFGLHFVRESIKNRCYGGLWEKDQLSIAKKHDPLLREFQEGRLLFPPTYKFDRNSNDYDTSEKKRKPAWTDRILWRLKRQPCAGPDTPIPPASHFSLSLRGYSSHMTYGISDHKPVSGTFDLELKPLVSAPLIVLMPEDLWTVENDMMVSYSSTSDFPSSPWDWIGLYKVGLRDVNDYVSYAWVGDSKVSCSDNLNQVYIDISNIPTTEDEFLLCYYSNSLRSVVGISRPFQIPPGSLREDPLGEAQPQI

SEQ ID NO: 16046 - protein, 211 aa, Homo sapiens
ACFSQPPTAAQLLRALGPVELALTSILTLLALGSIAIFLEDAVYLYKNTLCPIKRRTLLWKSSAPTLATFKERCLECVGFASCVLAAKGFRSLRVSLPPSPAPAPSEQVVSVLCCFGLWIPRSLVLVEMTITSFYAVCFYLLMLVMVEGFGGKEAVLRTLRDTPMMVHTGPCCCCCPCCPRLLLTRKKLQLLMLGPFQYAFLKITLTLVGL

SEQ ID NO: 16047 - protein, 411 aa, Homo sapiens
MGLSFSSGQKANGFPPDKSSGSKKQKQYQRIRKEKPQQHNFTHRLLAAALKSHSGNISCMDFSSNGKYLATCADDRTIRIWSTKDFLQREHRSMRANVELDHATLVRFSPDCRAFIVWLANGDTLRVFKMTKREDGGYTFTATPEDFPKKHKAPVIDIGIANTGKFIMTASSDTTVLIWSLKGQVLSTINTNQMNNTHAAVSPCGRFVASCGFTPDVKVWEVCFGKKGEFQEVVRAFELKGHSAAVHSFAFSNDSRRMASVSKDGTWKLWDTDVEYKKKQDPYLLKTGRFEEAAGAAPCRLALSPNAQVLALASGSSIHLYNTRRGEKEECFERVHGECIANLSFDITGRFLASCGDRAVRLFHNTPGHRAMVEEMQGHLKRASNESTRQRLQQQLTQAQETLKSLGALKK

SEQ ID NO: 16048 - protein, 1962 aa, Homo sapiens
MANFLLPRGTSSFRRFTRESLAAIEKRMAEKQARGSTTLQESREGLPEEEAPRPQLDLQASKKLPDLYGNPPQELIGEPLEDLDPFYSTQKTFIVLNKGKTIFRFSATNALYVLSPFHPIRRAAVKILVHSLFNMLIMCTILTNCVFMAQHDPPPWTKYVEYTFTAIYTFESLVKILARGFCLHAFTFLRDPWNWLDFSVIIMAYTTEFVDLGNVSALRTFRVLRALKTISVISGLKTIVGALIQSVKKLADVMVLTVFCLSVFALIGLQLFMGNLRHKCVRNFTALNGTNGSVEADGLVWESLDLYLSDPENYLLKNGTSDVLLCGNSSDAGTCPEGYRCLKAGENPDHGYTSFDSFAWAFLALFRLMTQDCWERLYQQTLRSAGKIYMIFFMLVIFLGSFYLVNLILAVVAMAYEEQNQATIAETEEKEKRFQEAMEMLKKEHEALTIRGVDTVSRSSLEMSPLAPVNSHERRSKRRKRMSSGTEECGEDRLPKSDSEDGPRAMNHLSLTRGLSRTSMKPRSSRGSIFTFRRRDLGSEADFADDENSTAGESESHHTSLLVPWPLRRTSAQGQPSPGTSAPGHALHGKKNSTVDCNGVVSLLGAGDPEATSPGSHLLRPVMLEHPPDTTTPSEEPGGPQMLTSQAPCVDGFEEPGARQRALSAVSVLTSALEELEESRHKCPPCWNRLAQRYLIWECCPLWMSIKQGVKLVVMDPFTDLTITMCIVLNTLFMALEHYNMTSEFEEMLQVGNLVFTGIFTAEMTFKIIALDPYYYFQQGWNIFDSIIVILSLMELGLSRMSNLSVLRSFRLLRVFKLAKSWPTLNTLIKIIGNSVGALGNLTLVLAIIVFIFAVVGMQLFGKNYSELRDSDSGLLPRWHMMDFFHAFLIIFRILCGEWIETMWDCMEVSGQSLCLLVFLLVMVIGNLVVLNLFLALLLSSFSADNLTAPDEDREMNNLQLALARIQRGLRFVKRTTWDFCCGLLRQRPQKPAALAAQGQLPSCIATPYSPPPPETEKVPPTRKETRFEEGEQPGQGTPGDPEPVCVPIAVAESDTDDQEEDEENSLGTEEESSKQTPEDSCSEGSTADMTNTAELLEQIPDLGQDVKDPEDCFTEGCVRRCPCCAVDTTQAPGKVWWRLRKTCYHIVEHSWFETFIIFMILLSSGALAFEDIYLEERKTIKVLLEYADKMFTYVFVLEMLLKWVAYGFKKYFTNAWCWLDFLIVDVSLVSLVANTLGFAEMGPIKSLRTLRALRPLRALSRFEGMRVVVNALVGAIPSIMNVLLVCLIFWLIFSIMGVNLFAGKFGRCINQTEGDLPLNYTIVNNKSQCESLNLTGELYWTKVKVNFDNVGAGYLALLQVATFKGWMDIMYAAVDSRGYEEQPQWEYNLYMYIYFVIFIIFGSFFTLNLFIGVIIDNFNQQKKKLGGQDIFMTEEQKKYYNAMKKLGSKKPQKPIPRPLNKYQGFIFDIVTKQAFDVTIMFLICLNMVTMMVETDDQSPEKINILAKINLLFVAIFTGECIVKLAALRHYYFTNSWNIFDFVVVILSIVGTVLSDIIQKYFFSPTLFRVIRLARIGRILRLIRGAKGIRTLLFALMMSLPALFNIGLLLFLVMFIYSIFGMANFAYVKWEAGIDDMFNFQTFANSMLCLFQITTSAGWDGLLSPILNTGPPYCDPTLPNSNGSRGDCGSPAVGILFFTTYIIISFLIVVNMYIAIILENFSVATEESTEPLSEDDFDMFYEIWEKFDPEATQFIEYSVLSDFADALSEPLRIAKPNQISLINMDLPMVSGDRIHCMDILFAFTKRVLGESGEMDALKIQMEEKFMAANPSKISYEPITTTLRRKHEEVSAMVIQRAFRRHLLQRSLKHASFLFRQQAGSGLSEEDAPEREGLIAYVMSENFSRPLGPPSSSSISSTSFPPSYDSVTRATSDNLQVRGSDYSHSEDLADFPPSPDRDRESIV

SEQ ID NO: 16049 - protein, 1027 aa, Homo sapiens
MMGDYRLPDHPQPMEILNLYLGDSLEPHPGECPRETCSHEDPPEPFEEQTWATDPPEPTRQNVPPWGSGVELTHLGSWVHQDGLEPCQEQTRATDPPESTRQDAPPWGSGVELTHLGSPSAQREHRQNTASPGSPVNSHLPGSPKQNRSTSTQVVFWAGILQAQMCVLDLEEELEKTEGLKAGLKCCLPTPPVDLPGDTGLHSSPPENEDSGEDSSEPEGEGQAWLREGTPDSSPQWGAEEESMFFSNPLFLASPCSENSASGECFSWGASDSHAGVRTGPESPATLEPPLPEDTVLWELESEPDLGDGAAISGHCTPPFPVPIYKPHSICWASVAAAEGAPAAPPGHGESEGDRLGPAPSAAPCVDEALTWESGCVGSDLGPAAHPVQPWASLSPEGWQRGGPFWPQVTLNSQDREPSSPESESRGPGPRPSPASSQEGSPQLQHHSSGILPKWTLDASQSSLLETDGEQPSSLKKKEAGEAPKPGEEVKSEGTARPAETGDVQPDIHLTSAEHENLRTPMNSSWLPGSPMPQAQSPEEGQRPPAGDKLANGVRNNKVAWNLASRLYRLEGFRKSEVAAYLQKNNDFSRAVAEEYLSFFQFGGQSLDRALRSFLQALVLSGETQERERILYQFSRRFHHCNPGIFPSVDSVHTLTCAIMLLNTDLHGQNIGKSMSCQEFITNLNGLRDGGNFPKELLKALYWSIRSEKLEWAVDEEDTARPEKAQPSLPAGKMSKPFLQLAQDPTVPTYKQGILARKMHQDADGKKTPWGKRGWKMFHTLLRGMVLYFLKGEDHCLEGESLVGQMVDEPVGVHHSLATPATHYTKKPHVFQLRTADWRLYLFQAPTAKEMSSWIARINLAAATHSAPPFPAAVGSQRRFVRPILPVGPAQSSLEEQHRSHENCLDAAADDLLDLQRNLPERRGRGRELEEHRLRKEYLEYEKTRYETYVQLLVARLHCPSDALDLWEEQLGREAGGTREPKLSLKKSHSSPSLHQDEAPTTAKVKRNISERRTYRKIIPKRNRNQL

SEQ ID NO: 16050 - protein, 511 aa, Homo sapiens
MLQVHRTGLGRLGVSLSKGLHHKAVLAVRREDVNAWERRAPLAPKHIKGITNLGYKVLIQPSNRRAIHDKDYVKAGGILQEDISEACLILGVKRPPEEKLMSRKTYAFFSHTIKAQEANMGLLDEILKQEIRLIDYEKMVDHRGVRVVAFGQWAGVAGMINILHGMGLRLLALGHHTPFMHIGMAHNYRNSSQAVQAVRDAGYEISLGLMPKSIGPLTFVFTGTGNVSKGAQAIFNELPCEYVEPHELKEVSQTGDLRKVYGTVLSRHHHLVRKTDAVYDPAEYDKHPERYISRFNTDIAPYTTCLINGIYWEQNTPRLLTRQDAQSLLAPGKFSPAGVEGCPALPHKLVAICDISADTGGSIEFMTECTTIEHPFCMYDADQHIIHDSVEGSGILMCSIDNLPAQLPIEATECFGDMLYPYVEEMILSDATQPLESQNFSPVVRDAVITSNGTLPDKYKYIQTLRESRERAQSLSMGTRRKVLVLGSGYISEPVLEYLSRDGNIEITDLT

SEQ ID NO: 16051 - protein, 590 aa, Homo sapiens
MAESPGCCSVWARCLHCLYSCHWRKCPRERMQTSKCDCIWFGLLFLTFLLSLSWLYIGLVLLNDLHNFNEFLFRRWGHWMDWSLAFLLVISLLVTYASLLLVLALLLRLCRQPLHLHSLHKVLLLLIMLLVAAGLVGLDIQWQQEWHSLRVSLQATAPFLHIGAAAGIALLAWPVADTFYRIHRRGPKILLLLLFFGVVLVIYLAPLCISSPCIMEPRDLPPKPGLVGHRGAPMLAPENTLMSLRKTAECGATVFETDVMVSSDGVPFLMHDEHLSRTTNVASVFPTRITAHSSDFSWTELKRLNAGSWFLERRPFWGAKPLAGPDQKEAESQTVPALEELLEEAAALNLSIMFDLRRPPQNHTYYDTFVIQTLETVLNARVPQAMVFWLPDEDRANVQRRAPGMRQIYGRQGGNRTERPQFLNLPYQDLPLLDIKDRFLLPAQAGLKLLASSNLPASASQSAGITGLSHCPPQPPGYKHELSHLAMALHKDNVSVNLFVVNKPWLFSLLWCAGVDSVTTNDCQLLQQMRYPIWLITPQTYLIIWVITNCVSTMLLLWTFLLQRRFVKKRGKTGLETAVLLTRINNFMME

SEQ ID NO: 16052 - protein, 790 aa, Homo sapiens
MENFQYSVQLSDQDWAEFSATADECGLLQAGLASGDELLSSDIDQGDSSGSSPPRAPPLPTGQLAAGGRSRRGCEEEDVATQQPVSRSQGEPVLALGTGQQTPSTSARAEAPPSLGPGASPPSQFSSCPGPASSGDQMQRLLQGPAPRPPGEPPGSPKSPGHSTGSQRPPDSPGAPPRSPSRKKRRAVGAKGGGHTGASASAQTGSPLLPAASPETAKLMAKAGQEELGPGPAGAPEPGPRSPVQEDRPGPGLGLSTPVPVTEQGTDQIRTPRRAKLHTVSTTVWEALPDVSRAKSDMAVSTPASEPQPDRDMAVSTPASEPQSDRDMAVSTPASEPQPDTDMAVSTPASEPQPDRDMAVSIPASKPQSDTAVSTPASEPQSSVALSTPISKPQLDTDVAVSTPASKHGLDVALPTAGPVAKLEVASSPPVSEAVPRMTESSGLVSTPVPRADAAGLAWPPTRRAGPDVVEMEAVVSEPSAGAPGCCSGAPALGLTQVPRKKKVRFSVAGPSPNKPGSGQASARPSAPQTATGAHGGPGAWEAVAVGPRPHQPRILKHLPRPPPSAVTRVGPGSSFAVTLPEAYEFFFCDTIEENEEAEAAAAGQDPAGVQWPDMCEFFFPDVGAQRSRRRGSPEPLPRADPVPAPIPGDPVPISIPEVYEHFFFGEDRLEGVLGPAVPLPLQALEPPRSASEGAGPGTPLKPAVVERLHLALRRAGELRGPVPSFAFSQNDMCLVFVAFATWAVRTSDPHTPDAWKTALLANVGTISAIRYFRRQVGQGRRSHSPSPSS

SEQ ID NO: 16053 - protein, 270 aa, Homo sapiens
MLPKRRRARVGSPSGDAASSTPPSTRFPGVAIYLVEPRMGRSRRAFLTGLARSKGFRVLDACSSEATHVVMEETSAEEAVSWQERRMAAAPPGCTPPALLDISWLTESLGAGQPVPVECRHRLEVAGPRKGPLSPAWMPAYACQRPTPLTHHNTGLSEALEILAEAAGFEGSEGRLLTFCRAASVLKALPSPVTTLSQLQGLPHFGEHSSRVVQELLEHGVCEEVERVRRSERYQTMKVRRAGLGPTPGMSCPGNDNTVHTMHGEANRGS

SEQ ID NO: 16054 - protein, 217 aa, Homo sapiens
MEEGGRDKAPVQPQQSPAAAPGGTDEKPSGKERRDAGDKDKEQELSEEDKQLQDELEMLVERLGEKDTSLYRPALEELRRQIRSSTTSMTSVPKPLKFLRPHYGKLKEIYENMAPGENKRFAADIISVLAMTMSGERECLKYRLVGSQEELASWGHEYVSCVNYVPEPENSALLRCALGVFRKFSRFPEALRLALMLNDMELVEDIFTSCKDVVVQK

SEQ ID NO: 16055 - protein, 642 aa, Homo sapiens
MRSITQGACRFIWEDKGYISGDHINLVSSSLSSFPILQRSSEEKILYSDRLSLERQKLTVCPIINGEDHLRLLNFQHNFITRIQNISNLQKLISLDLYDNQIEEISGLSTLRCLRVLLLGKNRIKKISNLENLKSLDVLDLHGNQITKIENINHLCELRVLNLARNFLSHVDNLNGLDSLTELNLRHNQITFVRDVDNLPCLQHLFLSFNNISSFDSVSCLADSSSLSDITFDGNPIAQESWYKHTVLQNMMQLRQLDMKRITEEERRMASVLAKKEEEKKRESHKQSLLKEKKRLTINNVARQWDLQQQRVANIATNEDRKDSDSPQDPCQIDGSTLSAFPEETGPLDSGLNNALQGLSVIDTYLVEVDGDTLSLYGSGALESLDRNWSVQTAGMITTVSFTFIEFDEIVQVLPKLKIKFPNSLHLKFKETNLVMLQQFNALAQLRRIDQLTIDPQGNPVVNFTLWKYYVLFRLSHFSMQKINGTEVTQNDMIMAERLFGILAHVASSELPQYRLISILGDARKKQFRYLLESKGKKPGIINEENNDSKRLVGENTNRATLNYTTRDFYNEKLEEIKEKKKFCKTYIEDLVKEATEINMKNEALQKLWPQMFIELVRDAVIEIRNKNSYMKLCLQQITDQK

SEQ ID NO: 16056 - protein, 140 aa, Homo sapiens
MDEDTHYDKVEDVVGSHIEDAVTFWAQASSVLGNLDPNKIYGGLFSEDQCWYRCKVLKIISVEKCLVRYIDYGNTEILNRSDIVEIPLELQFSSVAKKYKLWGLHIPSDQEVTQFDQGTTFLGSLIFEKEIKMRIKATSE

SEQ ID NO: 16057 - protein, 676 aa, Homo sapiens
MAANVGSMFQYWKRFDLQQLQRELDATATVLANRQDESEQSRKRLIEQSREFKKNTPEDLRKQVAPLLKSFQGEIDALSKRSKEAEAAFLNVYKRLIDVPDPVPALDLGQQLQLKVQRLHDIETENQKLRETLEEYNKEFAEVKNQEVTIKALKEKIREYEQTLKNQAETIALEKEQKLQNDFAEKERKLQETQMSTTSKLEEAEHKVQSLQTALEKTRTELFDLKTKYDEETTAKADEIEMIMTDLERANQRAEVAQREAETLREQLSSANHSLQLASQIQKAPDVAIEVLTRSSLEVELAAKEREIAQLVEDVQRLQASLTKLRENSASQISQLEQQLSAKNSTLKQLEEKLKGQADYEEVKKELNILKSMEFAPSEGAGTQDAAKPLEVLLLEKNRSLQSENAALRISNSDLSGRCAELQVRITEAVATATEQRELIARLEQDLSIIQSIQRPDAEGAAEHRLEKIPEPIKEATALFYGPAAPASGALPEGQVDSLLSIISSQRERFRARNQELEAENRLAQHTLQALQSELDSLRADNIKLFEKIKFLQSYPGRGSGSDDTELRYSSQYEERLDPFSSFSKRERQRKYLSLSPWDKATLSMGRLVLSNKMARTIGFFYTLFLHCLVFLVLYKLAWSESMERDCATFCAKKFADHLHKFHENDNGAAAGDLWQ

SEQ ID NO: 16058 - protein, 214 aa, Homo sapiens
MLPAATEVQCSPWKKNACCTASTSQELHKDTSRLYNFNWDHCGKMEPACKRHFIQDTCLYECSPNLGPWIQQVNQSWRKERFLDVPLCKEDCQRWWEDCHTSHTCKSNWHRGWDWTSGVNKCPAGALCRTFESYFPTPAALCEGLWSHSYKVSNYSRGSGRCIQMWFDSAQGNPNEEVARFYAAAMHVNAGEMLHGTGGLLLSLALMLQLWLLG

SEQ ID NO: 16059 - protein, 764 aa, Homo sapiens
MYRVTWSTFWLRFQHYTCTMSLKPRVVDFDETWNKLLTTIKAVVMLEYVERATWNDRFSDIYALCVAYPEPLGERLYTETKIFLENHVRHLHKRVLESEEQVLVMYHRYWEEYSKGADYMDCLYRYLNTQFIKKNKLTEADLQYGYGGVDMNEPLMEIGELALDMWRKLMVEPLQAILIRMLLREIKNDRGGEDPNQKVIHGVINSFVHVEQYKKKFPLKFYQEIFESPFLTETGEYYKQEASNLLQESNCSQYMEKVLGRLKDEEIRCRKYLHPSSYTKVIHECQQRMVADHLQFLHAECHNIIRQEKKNDMANMYVLLRAVSTGLPHMIQELQNHIHDEGLRATSNLTQENMPTLFVESVLEVHGKFVQLINTVLNGDQHFMSALDKALTSVVNYREPKSVCKAPELLAKYCDNLLKKSAKGMTENEVEDRLTSFITVFKYIDDKDVFQKFYARMLAKRLIHGLSMSMDSEEAMINKLKQACGYEFTSKLHRMYTDMSVSADLNNKFNNFIKNQDTVIDLGISFQIYVLQAGAWPLTQAPSSTFAIPQELEKSVQMFELFYSQHFSGRKLTWLHYLCTGEVKMNYLGKPYVAMVTTYQMAVLLAFNNSETVSYKELQDSTQMNEKELTKTIKSLLDVKMINHDSEKEDIDAESSFSLNMNFSSKRTKFKITTSMQKDTPQEMEQTRSAVDEDRKMYLQAAIVRIMKARKVLRHNALIQEVISQSRARFNPSISMIKKCIEVLIDKQYIERSQASADEYSYVA

SEQ ID NO: 16060 - protein, 132 aa, Homo sapiens
MSEACLHRKSHSERRSTLKNEQSSPHLIQTTWTSSIFHLDHDDVNDQSVSSAQTFQTEEKKCKGYIPSYLDKDELCVVCGDKATGYHYRCITCEGCKGFFRRTIQKNLHPSYSCKYEGKCVIDKVTRNQCQE

SEQ ID NO: 16061 - protein, 98 aa, Homo sapiens
MEPERCRIQTEFNQLRNILDRVEQRELKKLEQEEKKGLRIIEEAENDLVHQTQSLRELISDLERRCQGSTMELLQDVSDVTERSEFWTLRKPEALPTK

SEQ ID NO: 16062 - protein, 748 aa, Homo sapiens
MLGTLRAMEGEDVEDDQLLQKLRASRRRFQRRMQRLIEKYNQPFEDTPVVQMATLTYETPQGLRIWGGRLIKERNEGEIQDSSMKPADRTDGSVQAAAWGPELPSHRTVLGADSKSGEVDATSDQEESVAWALAPAVPQSPLKNELRRKYLTQVDILLQGAEYFECAGNRAGRDVRVTPLPSLASPAVPAPGYCSRISRKSPGDPAKPASSPREWDPLHPSSTDMALVPRNDSLSLQETSSSSFLSSQPFEDDDICNVTISDLYAGMLHSMSRLLSTKPSSIISTKTFIMQNWNSRRRHRYKSRMNKTYCKGARRSQRSSKENFIPCSEPVKGTGALRDCKNVLDVSCRKTGLKLEKAFLEVNRPQIHKLDPSWKERKVTPSKYSSLIYFDSSATYNLDEENRFRTLKWLISPVKIVSRPTIRQGHGENRQREIEIRFDQLHREYCLSPRNQPRRMCLPDSWAMNMYRGGPASPGGLQGLETRRLSLPSSKAKAKSLSEAFENLGKRSLEAGRCLPKSDSSSSLPKTNPTHSATRPQQTSDLHVQGNSSGIFRKSVSPSKTLSVPDKEVPGHGRNRYDEIKEEFDKLHQKYCLKSPGQMTVPLCIGVSTDKASMEVRYQTEGFLGKLNPDPHFQGFQKLPSSPLGCRKSLLGSTAIEAPSSTCVARAITRDGTRDHQFPAKRPRLSEPQGSGRQGNSLGASDGVDNTVRPGDQGSSSQPNSEERGENTSYRMEEKSDFMLEKLETKSV

SEQ ID NO: 16063 - protein, 969 aa, Homo sapiens
MKVNRETKRLYVGGLSQDISEADLQNQFSRFGEVSDVEIITRKDDQGNPQKVFAYINISVAEADLKKCMSVLNKTKWKGGTLQIQLAKESFLHRLAQEREAAKAKKEESTTGNANLLEKTGGVDFHMKAVPGTEVPGHKNWVVSKFGRVLPVLHLKNQHKRKIIKYDPSKYCHNLKKIGEDFSNTIPISSLTWELEGGNDPMSKKRRGEFSDFHGPPKKIIKVQKDESSTGSLAMSTRPRRVIERPPLTQQQAAQKRTCDSITPSKSSPVPVSDTQKLKNLPFKTSGLETAKKRNSISDDDTDSEDELRMMIAKEENLQRTTQPSINESESDPFEVVRDDFKSGVHKLHSLIGLGIKNRVSCHDSDDDIMRNDREYDSGDTDEIIAMKKNVAKVKNSTEFSQMEKSTKKTSFKNRENCELSDHCIKLQKRKSNVESALSHGLKSLNRKSPSHSSSSEDADSASELADSEGGEEYNAMMKNCLRVNLTLADLEQLAGSDLKVPNEDTKSDGPETTTQCKFDRGSKSPKTPTGLRRGRQCIRPAEIVASLLEGEENTCGKQKPKENNLKPKFQAFKGVGCLYEKESMKKSLKDSVASNNKDQNSMKHEDPSIISMEDGSPYVNGSLGEVTPCQHAKKANGPNYIQPQKRQTTFESQDRKAVSPSSSEKRSKNPISRPLEGKKSLSLSAKTHNIGFDKDSCHSTTKTEASQEERSDSSGLTSLKKSPKVSSKDTREIKTDFSLSISNSSDVSAKDKHAEDNEKRLAALEARQKAKEVQKKLVHNALANLDGHPEDKPTHIIFGSDSECETEETSTQEQSHPGEEWVKESMGKTSGKLFDSSDDDESDSEDDSNRFKIKPQFEGRAGQKLMDLQSHFGTDDRFRMDSRFLETDSEEEQEEVNEKKTAEEEELAEEKKKALNVVQSVLQINLSNSTNRGSVAAKKFKDIIHYDPTKQDHATYERKRDDKPKESK

SEQ ID NO: 16064 - protein, 1089 aa, Homo sapiens
VNPAEPRFAGPVHLQYHPHLWPLCELQELCLQHRGRCRVVYGPLRPRPVHFYQDLSSMDLIRPRVSLVCQIVRVGHMELKEGKKHTCGLRRPFGVAVMDITDIIHGKVDDEEKQHFIPFQQIAMETYIRQRQLIMSPLITSHVIGENEPLTSVLNKVIAAKEVNHKGQGLWVSLKLLPGDLTQVQKNFSHLVDRSTAIARKMGFPEIILPGDVRNDIYVTLIHGEFDKGKKKTPKNVEVTMSVHDEEGKLLEKAIHPGAGYEGISEYKSVVYYQVKQPCWYETVKVSIAIEEVTRCHIRFTFRHRSSQETRDKSERAFGVAFVKLMNPDGTTLQDGRHDLVVYKGDNKKMEDAKFYLTLPGTKMEMEEKELQASKNLVTFTPSKDSTKDSFQIATLICSTKLTQNVDLLGLLNWRSNSQNIKHNLKKLMEVDGGEIVKFLQDTLDALFNIMMEMSDSETYDFLVFDALVFIISLIGDIKFQHFNPVLETYIYKHFSATLAYVKLSKVLNFYVANADDSSKTELLFAALKALKYLFRFIIQSRVLYLRFYGQSKDGDEFNNSIRQLFLAFNMLMDRPLEEAVKIKGAALKYLPSIINDVKLVFDPVELSVLFCKFIQSIPDNQLVRQKLNCMTKIVESTLFRQSECREVLLPLLTDQLSGQLDDNSNKPDHEASSQLLSNILEVLDRKDVGATAVHIQLIMERLLRRINRTVIGMNRQSPHIGSFVACMIALLQQMDDSHYSHYISTFKTRQDIIDFLMETFIMFKDLIGKNVYAKDWMVMNMTQNRVFLRAINQFAEVLTRFFMDQASFELQLWNNYFHLAVAFLTHESLQLETFSQAKRNKIVKKYGDMRKEIGFRIRDMWYNLGPHKIKFIPSMVGPILEVTLTPEVELRKATIPIFFDMMQCEFNFSGNGNFHMFENELITKLDQEVEGGRGDEQYKVLLEKLLLEHCRKHKYLSSSGEVFALLVSSLLENLLDYRTIIMQDESKENRMSCTVNVLNFYKEKKREDIYIRYLYKLRDLHRDCENYTEAAYTLLLHAELLQVNGSESLFQQGGVQCPFRLNSIHFMILMGKNFIPGISFYTSFFSSF

SEQ ID NO: 16065 - protein, 628 aa, Homo sapiens
MLSCLKEEMPPQELTRRLATVITHVDEIMQQEVRPLMAVEIIEQLHRQFAILSGGRGEDGAPIITFPEFSGFKHIPDEDFLNVMTYLTSIPSVEAASIGFIVVIDRRRDKWSSVKASLTRIAVAFPGNLQLIFILRPSRFIQRTFTDIGIKYYRNEFKTKVPIIMVNSVSDLHGYIDKSQLTRELGGTLEYRHGQWVNHRTAIENFALTLKTTAQMLQTFGSCLATAELPRSMLSTEDLLMSHTRQRDKLQDELKLLGKQGTTLLSCIQEPATKCPNSKLNLNQLENVTTMERLLVQLDETEKAFSHFWSEHHLKLNQCLQLQHFEHDFCKAKLALDNLLEEQAEFTGIGDSVMHVEQILKEHKKLEEKSQEPLEKAQLLALVGDQLIQSHHYAADAIRPRCVELRHLCDDFINGNKKKWDILGKSLEFHRQLDKVSQWCEAGIYLLASQAVDKCQSREGVDIALNDIATFLGTVKEYPLLSPKEFYNEFELLLTLDAKAKAQKVLQRLDDVQEIFHKRQVSLMKLAAKQTRPVQPVAPHPESSPKWVSSKTSQPSTSVPLARPLRTSEEPYTETELNSRGKEDDETKFEVKSEEIFESHHERGNPELEQQARLGDLSPRRYSSQYFK

SEQ ID NO: 16066 - protein, 1018 aa, Homo sapiens [sequence omitted]

SEQ ID NO: 16067 - protein, 405 aa, Homo sapiens
FQAMRLGVEEINNSTALLPNITLGYQLYDVCSDSANVYATLRVLSLPGQHHIELQGDLLHYSPTVLAVIGPDSTNRAATTAALLSPFLVPMISYAASSETLSVKRQYPSFLRTIPNDKYQVETMVLLLQKFGWTWISLVGSSDDYGQLGVQALENQATGQGICIAFKDIMPFSAQVGDERMQCLMRHLAQAGATVVVVFSSRQLARVFFESVVLTNLTGKVWVASEAWALSRHITGVPGIQRIGMVLGVAIQKRAVPGLKAFEEAYARADKKAPRPCHKGSWCSSNQLCRECQAFMAHTMPKLKAFSMSSAYNAYRAVYAVAHGLHQLLGCASGACSRGRVYPWQTSTDASLVGKKSGHLREARPASRALWCFWLCVSTPLGCCWQLTRCCCCCCLGLLACLPGT

SEQ ID NO: 16068 - protein, 673 aa, Homo sapiens
MDRPAAAAAAGCEGGGGPNPGPAGGRRPPRAAGGATAGSRQPSVETLDSPTGSHVEWCKQLIAATISSQISGSVTSENVSRDYKVFRRPDLRALRDGNKLAQMEEAPLFPGESIKAIVKDVMYICPFMGAVSGTLTVTDFKLYFKNVERDPHFILDVPLGVISRVEKIGAQSHGDNSCGIEIVCKDMRNLRLAYKQEEQSKLGIFENLNKHAFPLSNGQALFAFSYKEKFPINGWKVYDPVSEYKRQGLPNESWKISKINSNYEFCDTYPAIIVVPTSVKDDDLSKVAAFRAKGRVPVLSWIHPESQATITRCSQPLVGPNDKRCKEDEKYLQTIMDANAQSHKLIIFDARQNSVADTNKTKGGGYESESAYPNAELVFLEIHNIHVMRESLRKLKEIVYPSIDEARWLSNVDGTHWLEYIRMLLAGAVRIADKIESGKTSVVVHCSDGWDRTAQLTSLAMLMLDSYYRTIKGFETLVEKEWISFGHRFALRVGHGNDNHADADRSPIFLQFVDCVWQMTRQFPSAFEFNELFLITILDHLYSCLFGTFLCNCEQQRFKEDVYTKTISLWSYINSQLDEFSNPFFVNYENHVLYPVASLSHLELWVNYYVRWNPRMRPQMPIHQNLKELLAVRAELQKRVEGLQREVATRAVSSSSERGSSPSHSATSVHTSV

SEQ ID NO: 16069 - protein, 536 aa, Homo sapiens
MEIRQHEWLSASPHEGFEQMRLKSRPKEPSPSLTRVGANFYSSVKQQDYSASVWLRRKDKLEHSQQKCIVIFALVCCFAILVALIFSAVDIMGEDEDGLSEKNCQNKCRIALVENIPEGLNYSENAPFHLSLFQGWMNLLNMAKKSVDIVSSHWDLNHTHPSACQGQRLFEKLLQLTSQNIEIKLVSDVTADSKVLEALKLKGAEVTYMNMTAYNKGRLQSSFWIVDKQHVYIGSAGLDWQSLGQMKELGVIFYNCSCLVLDLQRIFALYSSLKFKSRVPQTWSKRLYGVYDNEKKLQLQLNETKSQAFVSNSPKLFCPKNRSFDIDAIYSVIDDAKQYVYIAVMDYLPISSTSTKRTYWPDLDAKIREALVLRSVRVRLLLSFWKETDPLTFNFISSLKAICTEIANCSLKVKFFDLERENACATKEQKNHTFPRLNRNKYMVTDGAAYIGNFDWVGNDFTQNAGTGLVINQADVRNNRSIIKQLKDVFERDWYSPYAKTLQPTKQPNCSSLFKLKPLSNKTATDDTGGKDPRNV

SEQ ID NO: 16070 - protein, 376 aa, Homo sapiens
TECYSSDEDLAEQLLVYSCEAWGGSNCLELAVEATDQHFIAQPGVQWYVNGVNYFTDLWNVMDTLGLFYFIAGIVFRLHSSNKSSLYSGRVIFCLDYIIFTLRLIHIFTVSRNLGPKIIMLQRMLIDVFFFLFLFAVWMVAFGVARQGILRQNEQRWRWIFRSVIYEPYLAMFGQVPSDVDGTTYDFAHCTFTGNESKPLCVELDEHNLPRFPEWITIPLVCIYMLSTNILLVNLLVAMFGYTVGTVQENNDQVWKFQRYFLVQEYCSRLNIPFPFIVFAYFYMVVKKCFKCCCKEKNMESSVCCFKNEDNETLAWEGVMKENYLVKINTKANDTSEEMRHRFRQLDTKIILRNADEQFCYRLLNERFSDPWVHGG

SEQ ID NO: 16071 - protein, 1952 aa, Homo sapiens
MPALGPALLQALWAGWVLTLQPLPPTAFTPNGTYLQHLARDPTSGTLYLGATNFLFQLSPGLQLEATVSTGPVLDSRDCLPPVMPDECPQAQPTNNPNQLLLVSPGALVVCGSVHQGVCEQRRLGQLEQLLLRPERPGDTQYVAANDPAVSTVGLVAQGLAGEPLLFVGRGYTSRGVGGGIPPITTRALWPPDPQAAFSYEETAKLAVGRLSEYSHHFVSAFARGASAYFLFLRRDLQAQSRAFRAYVSRVCLRDQHYYSYVELPLACEGGRYGLIQAAAVATSREVAHGEVLFAAFSSAAPPTVGRPPSAAAGASGASALCAFPLDEVDRLANRTRDACYTREGRAEDGTEVAYIEYDVNSDCAQLPVDTLDAYPCGSDHTPSPMASRVPLEATPILEWPGIQLTAVAVTMEDGHTIAFLGDSQGQLHRVYLGPGSDGHPYSTQSIQQGSAVSRDLTFDGTFEHLYVMTQSTLLKVPVASCAQHLDCASCLAHRDPYCGWCVLLGRCSRRSECSRGQGPEQWLWSFQPELGCLQVAAMSPANISREETREVFLSVPDLPPLWPGESYSCHFGEHQSPALLTGSGVMCPSPDPSEAPVLPRGADYVSVSVELRFGAVVIAKTSLSFYDCVAVTELRPSAQCQACVSSRWGCNWCVWQHLCTHKASCDAGPMVASHQSPLVSPDPPARGDGDSAELEGPPAPLILPSSLDYQYDTPGLWELEEATLGASSCPCVESVQGSTLMPVHVEREIRLLGRNLHLFQDGPGDNECVMELEGLEVVVEARVECEPPPDTQCHVTCQQHQLSYEALQPELRVGLFLRRAGRLRVDSAEGLHVVLYDCSVGHGDCSRCQTAMPQYGCVWCEGERPRCVTREACGEAEAVATQCPAPLIHSVEPLTGPVDGGTRVTIRGSNLGQHVQDVLGMVTVAGVPCAVDAQEYEVSSSLVCITGASGEEVAGATAVEVPGRGRGVSEHDFAYQDPKVHSIFPARGPRAGGTRLTLNGSKLLTGRLEDIRVVVGDQPCHLLPEQQSEQLRCETSPRPTPATLPVAVWFGATERRLQRGQFKYTLDPNITSAGPTKSFLSGGREICVRGQNLDVVQTPRIRVTVVSRMLQPSQGLGRRRRVVPETACSLGPSCSSQQFEEPCHVNSSQLITCRTPALPGLPEDPWVRVEFILDNLVFDFATLNPTPFSYEADPTLQPLNPEDPTMPFRHKPGSVFSVEGENLDLAMSKEEVVAMIGDGPCVVKTLTRHHLYCEPPVEQPLPRHHALREAPDSLPEFTVQMGNLRFSLGHVQYDGESPGAFPVAAQVGLGVGTSLLALGVIIIVLMYRRKSKQALRDYKKVQIQLENLESSVRDRCKKEFTDLMTEMTDLTSDLLGSGIPFLDYKVYAERIFFPGHRESPLHRDLGVPESRRPTVEQGLGQLSNLLNSKLFLTKFIHTLESQRTFSARDRAYVASLLTVALHGKLEYFTDILRTLLSDLVAQYVAKNPKLMLRRTETVVEKLLTNWMSICLYTFVRDSVGEPLYMLFRGIKHQVDKGPVDSVTGKAKYTLNDNRLLREDVEYRPLTLNALLAVGPGAGEAQGVPVKVLDCDTISQAKEKMLDQLYKGVPLTQRPDPRTLDVEWRSGVAGHLILSDEDVTSEVQGLWRRLNTLQHYKVPDGATVALVPCLTKHVLRENQDYVPGERTPMLEDVDEGGIRPWHLVKPSDEPEPPRPRRGSLRGGERERAKAIPEIYLTRLLSMKGTLQKFVDDLFQVILSTSRPVPLAVKYFFDLLDEQAQQHGISDQDTIHIWKTNSLPLRFWINIIKNPQFVFDVQTSDNMDAVLLVIAQTFMDACTLADHKLGRDSPINKLLYARDIPRYKRMVERYYADIRQTVPASDQEMNSVLAELSWNYSGDLGARVALHELYKYINKYYDQIITALEEDGTAQKMQLGYRLQQIAAAVENKVTDL

SEQ ID NO: 16072 - protein, 881 aa, Homo sapiens
MFWKFDLHTSSHLDTLLEREDLSLPELLDEEDVLQECKVVNRKLLDFLLQPPHLQAMVAWVTQEPPDSGEERLRYKYPSVACEILTSDVPQINDALGADESLLNRLYGFLQSTGSLNPLLASFFSKVMGILINRKTDQLVSFLRKKDDFVDLLLQHIGTSAIMDLLLRLLTCVERPQLRQDVVNWLNEEKIVQRLIEQIHPSKDENQHSNASQSLCDIIRLSREQMIQVQDSPEPDQLLATLEKQETIEQLLSNMFEGEQSQSVIVSGIQVLLTLLEPRRPRSESVTVNSFFSSVDGQLELLAQGALESTVSSVGALHALRPRLSCFHQLLLEPPKLEPLQMTWGMLAPPLGNTRLHVVKLLASALSANDAALTHELLALDVPNTMLDLFFHYVFNNFLHAQVEGCVSTMLSLGPPPDSSPETPIQNPVVKHLLQQCRLVERILTSWEENDRVQCAGGPRKGYMGHLTRVAGALVQNTEKGPNAEQLRQLLKELPSEQQEQWEAFVSGPLAETNKKNMVDLVNTHHLHSSSDDEDDRLKEFNFPEEAVLQQAFMDFQMQRMTSAFIDHFGFNDEEFGEQEESVNAPFDKTANITFSLNADDENPNANLLEICYKDRIQQFDDDEEEEDEEEAQGSGESDGEDGAWQGSQLARGARLGQPPGVRSGGSTDSEDEEEEDEEEEEDEEGIGCAARGGATPLSYPSPGPQPPGPSWTATFDPVPTDAPTSPRVSGEEELHTGPPAPQGPLSVPQGLPTQSLASPPARDALQLRSQDPTPPSAPQEATEGSKVTEPSAPCQALVSIGDLQATFHGIRSAPSSSDSATRDPSTSVPASGAHQPPQTTEGEKSPEPLGLPQSQSAQALTPPPIPNGSAPEGPASPGSQ

SEQ ID NO: 16073 - protein, 1204 aa, Homo sapiens
MKDQQTVIMTECTSLQFVSPFAFEAMQKVDVVCLASLSDPELRLLLPCLVRMALCAPADQSQSWAQDKKLILRLLSGVEAVNSIVALLSVDFHALEQDASKEQQLRHKLGGGSGESILVSQLQHGLTLEFEHSDSPRRLRLVLSELLAIMNKVSESNGEFFFKSSELFESPVYLEEAADVLCILQAELPSLLPIVDVAEALLHVRNGAWFLCLLVANVPDSFNEVCRGLIKNGERQDEESLGGRRRTDALRFLCKMNPSQALKVRGMVVEECHLPGLGVALTLDHTKNEACEDGVSDLVCFVSGLLLGTNAKVRTWFGTFIRNGQQRKRETSSSVLWQMRRQLLLELMGILPTVRSTRIVEEADVDMEPNVSVYSGLKEEHVVKASALLRLYCALMGIAGLKPTEEEAEQLLQLMTSRPPATPAGVRFVSLSFCMLLAFSTLVSTPEQEQLMVVWLSWMIKEEAYFESTSGVSASFGEMLLLVAMYFHSNQLSAIIDLVCSTLGMKIVIKPSSLSRMKTIFTQEIFTEQVVTAHAVRVPVTSNLSANITGFLPIHCIYQLLRSRSFTKHKVSIKDWIYRQLCETSTPLHPQLLPLIDVYINSILTPASKSNPEATNQPVTEQEILNIFQGVIGGDNIRLNQRFSITAQLLVLYYILSYEEALLANTKTLAAMQRKPKSYSSSLMDQIPIKFLIRQAQGLQQELGGLHSALLRLLATNYPHLCIVDDWICEEEITGTDALLRRMLLTNNAKNHSPKQLQEAFSAVPVNNTQVMQIIEHLTLLSASELIPYAEVLTSNMSQLLNSGVPRRILQTVNKLWMVLNTVMPRRLWVMTVNALQPSIKFVRQQKYTQNDLMIDPLIVLRCDQRVHRCPPLMDITLHMLNGYLLASKAYLSAHLKETEQDRPSQNNTIGLVGQTDAPEVTREELKNALLAAQDSAAVQILLEICLPTEEEKANGVNPDSLLRNVQSVITTSAPNKGMEEGEDNLLCNLREVQCLICCLLHQMYIADPNIAKLVHFQGYPCELLPLTVAGIPSMHICLDFIPELIAQPELEKQIFAIQLLSHLCIQYALPKSLSVARLAVNVMGTLLTVLTQAKRYAFFMPTLPSLVSFCRAFPPLYEDIMSLLIQIGQVCASDVATQTRDIDPIITRLQQIKEKPSGWSQICKDSSYKNGSRDTGSMDPDVQLCHCIERTVIEIINMSVSGI

SEQ ID NO: 16074 - protein, 228 aa, Homo sapiens
MKPKMKYSTNKISTAKWKNTASKALCFKLGKSQQKAKEVCPMYFMKLRSGLMIKKEACYFRRETTKRPSLKTGRKHKRHLVLAACQQQSTVECFAFGISGVQKYTRALHDSSITDKVLLSYYESQHPSNESGDGVDGKMLMVTLSPTKDFWLHANNKEHSVELHKCEKPLPDQAFFVLHNMHSNCVSFECKTDPGVFIGVKDNHLALIKVDSSENLCTENILFKLSET

SEQ ID NO: 16075 - protein, 346 aa, Homo sapiens
MISRPAWLWGAEMGANEHGVCIANEAINTREPAAEIEALLGMDLVRLGLERGETAKEALDVIVSLLEEHGQGGNYFEDANSCHSFQSAYLIVDRDEAWVLETIGKYWAAEKVTEGVRCICSQLSLTTKMDAEHPELRSYAQSQGWWTGEGEFNFSEVFSPVEDHLDCGAGKDSLEKQEESITVQTMMNTLRDKASGVCIDSEFFLTTASGVSVLPQNRSSPCIHYFTGTPDPSRSIFKPFIFVDDVKLVPKTQSPCFGDDDPAKKEPRFQEKPDRRHELYKAHEWARAIIESDQEQGRKLRSTMLELEKQGLEAMEEILTSSEPLDPAEVGDLFYDCVDTEIKFFK

SEQ ID NO: 16076 - protein, 1007 aa, Homo sapiens
MRDFGFGVLQTAPLRSSSPGPLFCGEAYGPYAVGSVNPLPSATPFGPLSPPPLPVTGFLEAASPFSVPLGGGAGSPAAAASSSSPFLAHQQTMQDELLLGLTQQPARPLSGAAATEKLPDHHPGGGTIAGVTHLLPSQDFKPSLHHPSSSSASSCCCCRTSSPQDFSKRQQQQLSSQKRKEFSPPHLPHPPDSKPPPPPPPLHCPGRFSPPPPPAGPLLQPAQLAQRQQQQPPQQFSLLHQQHLSPQDFAPRQRPADLPPLPQLPPSPPAAPRRRHGGAGSPRKTPAAGEGSAAESPNAGLASSTPVNPAPGSMESPNHPLLNSPSNLLPGGALGAGAFSSLQSPDLPHPGGGGGGGGGGPPGGGGGGGSASPPPLPGFGTPWSVQTASPPPQPQQPPPTQPQQQPPPPQQPPQPQPQPPGSSATTPGGGSGGSLSAMPPPSPDSENGFYPGLPSSMNPAFFPSFSPVSPHGCTGLSVPTSGGGGGGFGGPFSATAVPPPPPPAMNIPQQQPPPPAAPQQPQSRRSPVSPQLQQQHQAAAAAFLQQRNSYNHHQPLLKQSPWSNHQSSGWGTGSMSWGAMHGRDHRRTGNMGIPGTMNQISPLKKPFSGNVIAPPKFTRSTPSLTPKSWIEDNVFRTDNNSNTLLPLQVRMDRSRMYDSLNMHSLENSLIDIMRAEHDPLKGRLSYPHPGTDNLLMLNARSYGRRRGRSSLFPIDDGLLDDGHSDQVGVLNSPTCYSAHQNGERIERFSRKVFVGGLPPDIDEDEITASFRRFGPLVVDWPHKAESKSYFPPKGYAFLLFQEESSVQALIDACIEEDGKLYLCVSSPTIKDKPVQIRPWNLSDSDFVMDGSQPLDPRKTIFVGGVPRPLRAVELAMIMDRLYGGVCYAGIDTDPELKYPKGAGRVAFSNQQSYIAAISARFVQLQHGDIDKRVEVKPYVLDDQMCDECQGARCGGKFAPFFCANVTCLQYYCEFCWANIHSRAGREFHKPLVKEGADRPRQIHFRWN

SEQ ID NO: 16077 - protein, 887 aa, Homo sapiens
MDHYDSQQTNDYMQPEEDWDRDLLLDPAWEKQQRKTFTAWCNSHLRKAGTQIENIEEDFRDGLKLMLLLEVISGERLAKPERGKMRVHKISNVNKALDFIASKGVKLVSIGAEEIVDGNVKMTLGMIWTIILRFAIQDISVEETSAKEGLLLWCQRKTAPYKNVNIQNFHISWKDGLGFCALIHRHRPELIDYGKLRKDDPLTNLNTAFDVAEKYLDIPKMLDAEDIVGTARPDEKAIMTYVSSFYHAFSGAQKAETAANRICKVLAVNQENEQLMEDYEKLASDLLEWIRRTIPWLENRVPENTMHAMQQKLEDFRDYRRLHKPPKVQEKCQLEINFNTLQTKLRLSNRPAFMPSEGRMVSDINNAWGCLEQVEKGYEEWLLNEIRRLERLDHLAEKFRQKASIHEAWTDGKEAMLRQKDYETATLSEIKALLKKHEAFESDLAAHQDRVEQIAAIAQELNELDYYDSPSVNARCQKICDQWDNLGALTQKRREALERTEKLLETIDQLYLEYAKRAAPFNNWMEGAMEDLQDTFIVHTIEEIQGLTTAHEQFKATLPDADKERLAILGIHNEVSKIVQTYHVNMAGTNPYTTITPQEINGKWDHVRQLVPRRDQALTEEHARQQHNERLRKQFGAQANVIGPWIQTKMEEIGRISIEMHGTLEDQLSHLRQYEKSIVNYKPKIDQLEGDHQLIQEALIFDNKHTNYTMEHIRVGWEQLLTTIARTINEVENQILTRDAKGISQEQMNEFRASFNHFDRKKTGMMDTDDFRACLISMGYNMGEAEFARIMSIVDPNRLGVVTFQAFIDFMSRETADTDTADQVMASFKILAGDKNYITMDELRRELPPDQAEYCIARMAPYTGPDSVPGALDYMSFSTALYGESDL

SEQ ID NO: 16078 - protein, 629 aa, Homo sapiens
MSHVAVENALGLDQQFAGLDLNSSDNQSGGSTASKGRYIPPHLRNREATKGFYDKDSSGWSSSKDKDAYSSFGSRSDSRGKSSFFSDRGSGSRGRFDDRGRSDYDGIGSRGDRSGFGKFERGGNSRWCDKSDEDDWSKPLPPSERLEQELFSGGNTGINFEKYDDIPVEATGNNCPPHIESFSDVEMGEIIMGNIELTRYTRPTPVQKHAIPIIKEKRDLMACAQTGSGKTAAFLLPILSQIYSDGPGEALRAMKFSYRSRVRPCVVYGGADIGQQIRDLERGCHLLVATPGRLVDMMERGKIGLDFCKYLVLDEADRMLDMGFEPQIRRIVEQDTMPPKGVRHTMMFSATFPKEIQMLARDFLDEYIFLAVGRVGSTSENITQKVVWVEESDKRSFLLDLLNATGKDSLTLVFVETKKGADSLEDFLYHEGYACTSIHGDRSQRDREEALHQFRSGKSPILVATAVAARGLDISNVKHVINFDLPSDIEEYVHRIGRTGRVGNLGLATSFFNERNINITKDLLDLLVEAKQEVPSWLENMAYEHHYKGSSRGRSKSSRFSGGFGARDYRQSSGASSSSFSSSRASSSRSGGGGHGSSRGFGGGGYGGFYNSDGYGGNYNSQGVDWWGN

SEQ ID NO: 16079 - protein, 725 aa, Homo sapiens
MGLWWVTVQPPARRMGWLPLLLLLTQCLGVPGQRSPLNDFQVLRGTELQHLLHAVVPGPWQEDVADAEECAGRCGPLMDCRAFHYNVSSHGCQLLPWTQHSPHTRLRRSGRCDLFQKKDYVRTCIMNNGVGYRGTMATTVGGLPCQAWSHKFPNDHKYTPTLRNGLEENFCRNPDGDPGGPWCYTTDPAVRFQSCGIKSCREAACVWCNGEEYRGAVDRTESGRECQRWDLQHPHQHPFEPGKFLDQGLDDNYCRNPDGSERPWCYTTDPQIEREFCDLPRCGSEAQPRQEATTVSCFRGKGEGYRGTANTTTAGVPCQRWDAQIPHQHRFTPEKYACKDLRENFCRNPDGSEAPWCFTLRPGMRAAFCYQIRRCTDDVRPQDCYHGAGEQYRGTVSKTRKGVQCQRWSAETPHKPQFTFTSEPHAQLEENFCRNPDGDSHGPWCYTMDPRTPFDYCALRRCADDQPPSILDPPDQVQFEKCGKRVDRLDQRRSKLRVVGGHPGNSPWTVSLRNRQGQHFCGGSLVKEQWILTARQCFSSCHMPLTGYEVWLGTLFQNPQHGEPSLQRVPVAKMVCGPSGSQLVLLKLERSVTLNQRVALICLPPEWYVVPPGTKCEIAGWGETKGTGNDTVLNVALLNVISNQECNIKHRGRVRESEMCTEGLLAPVGACEGDYGGPLACFTHNCWVLEGIIIPNRVCARSRWPAVFTRVSVFVDWIHKVMRLG

SEQ ID NO: 16080 - protein, 329 aa, Homo sapiens
MCGATSFLHECTRLILVTTQNAEFLQKGLQVHTCFGVYPHASVWHDCASQKKGCAVYLHVSVEFNKLIPENGFIKFHQVRRVMTILFLTMVISYFGCMKAAPMKEANIRGQGGLAYPGVRTHGTLESVNGPKAGSRGLTSLADTFEHVIEELLDEDQKVRPNEENNKDADLYTSRVMLSSQVPLEPPLLFLLEEYKNYLDAANMSMRVRRHSDPARRGELSVCDSISEWVTAADKKTAVDMSGGTVTVLEKVPVSKGQLKQYFYETKCNPMGYTKEGCRGIDKRHWNSQCRTTQSYVRALTMDSKKRIGWRFIRIDTSCVCTLTIKRGR

SEQ ID NO: 16081 - protein, 199 aa, Homo sapiens
MRQISLVGAVDEEVGDYFPEFLDMLEESPFLKCTLPWGTLSSLKLQSRKDSDDGPIMWVRPGEQMIPVADMPKSPFKRKRTTNEIKNLQYLPRTSEPREMLFEDRTRAHADHIGQGFERQTTAAVGVLKAVHCGEWPDQPRITKDVICFHAEDFLEVVQRMQLDLHEPPLSQCVQWVDDAKLNQLRREGIRYARIQLYD

SEQ ID NO: 16082 - protein, 240 aa, Homo sapiens
MPFHHCHRDPLPPPGLTPERLHARRQLYAACAVCFVFMAGEVVGGYLAHSLAIMTDAAHLLADVGSMMGSLFSLWLSTRPATRTMTFGWHRSETLGALASVVSLWMVTGILLYLAFVRLLHSDYHIEGGAMLLTASIAVCANLLMAFVLHQAGPPHSHGSRGAEYAPLEEGPEEPLPLGNTSVRAAFVHVLGDLLQSFGVLAASILIYFKPQYKAADPISTFLFSICALGSTAPTLRDVL

SEQ ID NO: 16083 - protein, 191 aa, Homo sapiens
MFPPSGHQDVSERRLDTQRPQVTMWERDVSSDRQEPGRRGRSWGLEGSQALSQQAEVIVRQLQELRRLEEEVRLLRETSLQQKMRLEAQAMELEALARAEKAGRAEAEGLRAALAGAEVVRKNLEEGSQRELEEVQRLHQEQLSSLTQAHEEALSSLTSKAEGLEKSLSSLETRRAGEAKELAEAQREAEL

SEQ ID NO: 16084 - protein, 554 aa, Homo sapiens
MLLPLLLSSLLGGSQAMDGRFWIRVQESVMVPEGLCISVPCSFSYPRQDWTGSTPAYGYWFKAVTETTKGAPVATNHQSREVEMSTRGRFQLTGDPAKGNCSLVIRDAQMQDESQYFFRVERGSYVRYNFMNDGFFLKVTGTKPTTSHFSVLSFTPRPQDHNTDLTCHVDFSRKGVSAQRTVRLRVAYAPRDLVISISRDNTPALEPQPQGNVPYLEAQKGQFLRLLCAADSQPPATLSWVLQNRVLSSSHPWGPRPLGLELPGVKAGDSGRYTCRAENRLGSQQRALDLSVQYPPENLRVMVSQANRTVLENLGNGTSLPVLEGQSLCLVCVTHSSPPARLSWTQRGQVLSPSQPSDPGVLELPRVQVEHEGEFTCHARHPLGSQHVSLSLSVHYKKGLISTAFSNGAFLGIGITALLFLCLALIIMKILPKRRTQTETPRPRFSRHSTILDYINVVPTAGPLAQKRNQKATPNSPRTPLPPGAPSPESKKNQKKQYQLPSFPEPKSSTQAPESQESQEELHYATLNFPGVRPRPEARMPKGTQADYAEVKFQ

SEQ ID NO: 16085 - protein, 389 aa, Homo sapiens
MEKRETFVQAVSKELVGEFLQFVQLDKEASDPFSLNELLDELSRKQKEELWQRLKNLLTDVLLESPVDGWQVVEAQGEDNMETEHGSKMRKSIEIIYAITSVILASVSVINESENYEALLECVIILNGILYALPESERKLQSSIQDLCVTWWEKGLPAKEDTGKTAFVMLLRRSLETKTGADVCRLWRIHQALYCFDYDLEESGEIKDMLLECFININYIKKEEGRRFLSCLFNWNINFIKMIHGTIKNQLQGLQKSLMVYIAEIYFRAWKKASGKILEAIENDCIQDFMFHGIHLPRRSPVHSKVREVLSYFHHQKKVRQGVEEMLYRLYKPILWRGLKARNSEVRSNAALLFVEAFPIRDPNLHAIEMDSEIQKQFEELYGSLVFVK

SEQ ID NO: 16086 - protein, 431 aa, Homo sapiens
MEFAAENEGKSGGGLHSVAEGVRLSPEPGREGVRDLAGAEEFGGGEEGTGLTGIKEIGDGEEGSGQRPEEIPMDLTVVKQETDSSLVVKEAKVGEPEVKEEKVKEEVMDWSEVKEEKDNLEIKQEEKFVGQCIKEELMHGECVKEEKDFLKKEIVDDTKVKEEPPINHPVGCKRKLAMSRCETCGTEEAKYRCPRCMRYSCSLPCVKKHKAELTCNGVRDKTAYISIQQFTEMNLLSDYRFLEDVARTADHISRDAFLKRPISNKYMYFMKNRARRQGINLKLLPNGFTKRKENSTFFDKKKQQFCWHVKLQFPQSQAEYIEKRVPDDKTINEILKPYIDPEKSDPVIRQRLKAYIRSQTGVQILMKIEYMQQNLVRYYELDPYKSLLDNLRNKVIIEYPTLHVVLKGSNNDMKVLHQVKSESTKNVGNEN

SEQ ID NO: 16087 - protein, 505 aa, Homo sapiens
KTQLDEENLKKIFREVQIMKMLCHPHIIRLYQVMETERMIYLVTEYASGGEIFDHLVAHGRMAEKEARRKFKQIVTAVYFCHCRNIVHRDLKAENLLLDANLNIKIADFGFSNLFTPGQLLKTWCGSPPYAAPELFEGKEYDGPKVDIWSLGVVLYVLVCGALPFDGSTLQNLRARVLSGKFRIPFFMSTECEHLIRHMLVLDPNKRLSMEQICKHKWMKLGDADPNFDRLIAECQQLKEERQVDPLNEDVLLAMEDMGLDKEQTLQSLRSDAYDHYSAIYSLLCDRHKRHKTLRLGALPSMPRALAFQAPVNIQAEQAGTAMNISVPQVQLINPENQIVEPDGTLNLDSDEGEEPSPEALVRYLSMRRHTVGVADPRTEVMEDLQKLLPGFPGVNPQAPFLQVAPNVNFMHNLLPMQNLQPTGQLEYKEQSLLQPPTLQLLNGMGPLGRRASDGGANIQLHAQQLLKRPRGPSPLVTMTPAVPAVTPVDEESSDGEPDQEAVQR

SEQ ID NO: 16088 - protein, 175 aa, Homo sapiens
MAGGVTVTNGVKGKKSTCPSAAPSASAPAMTTVENKSKISTGTASSTKRSTSTGNKESSSTRERLRERTRLNQSKKLPSAGQGANDMALAKRSRSRTATECDVRMSKSKSDNQISDRAALEAKVKDLLTLAKTKDVEILHLRNELRDMRAQLGINEDHSEGDEKSEKETIMAHQP

SEQ ID NO: 16089 - protein, 1249 aa, Homo sapiens
MNWLCRNQDPNPPPQPEELTSSLHAFKNKAFKKSKVCGVCKQIIDGQGISCRACKYSCHKKCEAKVVIPCGVQVRLEQAPGSSTLSSSLCRDKPLRPVILSPTMEEGHGLDLTYITERIIAVSFPAGCSEESYLHNLQEVTRMLKSKHGDNYLVLNLSEKRYDLTKLNPKIMDVGWPELHAPPLDKMCTICKAQESWLNSNLQHVVVIHCRGGKGRIGVVISSYMHFTNVSASADQALDRFAMKKFYDDKVSALMQPSQKRYVQFLSGLLSGSVKMNASPLFLHFVILHGTPNFDTGGVCRPFLKLYQAMQPVYTSGIYNVGPENPSRICIVIEPAQLLKGDVMVKCYHKKYRSATRDVIFRLQFHTGAVQGYGLVFGKEDLDNASKDDRFPDYGKVELVFSATPEKIQGSEHLYNDHGVIVDYNTTDPLIRWDSYENLSADGEVLHTQGPVDGSLYAKVRKKSSSDPGIPGGPQAIPATNSPDHSDHTLSVSSDSGHSTASARTDKTEERLAPGTRRGLSAQEKAELDQLLSGFGLEDPGSSLKEMTDARSKYSGTRHVVPAQVHVNGDAALKDRETDILDDEMPHHDLHSVDSLGTLSSSEGPQSAHLGPFTCHKSSQNSLLSDGFGSNVGEDPQGTLVPDLGLGMDGPYERERTFGSREPKQPQPLLRKPSVSAQMQAYGQSSYSTQTWVRQQQMVVAHQYSFAPDGEARLVSRCPADNPGLVQAQPRVPLTPTRGTSSRVAVQRGVGSGPHPPDTQQPSPSKAFKPRFPGDQVVNGAGPELSTGPSPGSPTLDIDQSIEQLNRLILELDPTFEPIPTHMNALGSQANGSVSPDSVGGGLRASSRLPDTGEGPSRATGRQGSSAEQPLGGRLRKLSLGQYDNDAGGQLPFSKCAWGKAGVDYAPNLPPFPSPADVKETMTPGYPQDLDIIDGRILSSKESMCSTPAFPVSPETPYVKTALRHPPFSPPEPPLSSPASQHKGGREPRSCPETLTHAVGMSESPIGPKSTMLRADASSTPSFQQAFASSCTISSNGPGQRRESSSSAERQWVESSPKPMVSLLGSGRPTGSPLSAEFSGTRKDSPVLSCFPPSELQAPFHSHELSLAEPPDSLAPPSSQAFLGFGTAPVGSGLPPEEDLGALLANSHGASPTPSIPLTATGAADNGFLSHNFLTVAPGHSSHHSPGLQGQGVTLPGQPPLPEKKRASEGDRSLGSVSPSSSGFSSPHSGSTISIPFPNVLPDFSKASE

SEQ ID NO: 16090 - protein, 402 aa, Homo sapiens
MHQRDLSRSSSPPSLLDQLQMGCDGASCGSLNMECRVCGDKASGFHYGVHACEGCKGFFRRTIRMKLEYEKCERSCKIQKKNRNKCQYCRFQKCLALGMSHNAIRFGRMPEAEKRKLVAGLTANEGSQYNPQVADLKAFSKHIYNAYLKNFNMTKKKARSILTGKASHTAPFVIHDIETLWQAEKGLVWKQLVNGLPPYKEISVHVFYRCQCTTVETVRELTEFAKSIPSFSSLFLNDQVTLLKYGVHEAIFAMLASIVNKDGLLVANGSGFVTREFLRSLRKPFSDIIEPKFEFAVKFNALELDDSDLALFIAAIILCGDRPGLMNVPRVEAIQDTILRALEFHLQANHPDAQYLFPKLLQKMADLRQLVTEHAQMMQRIKKTETETSLHPLLQEIYKDMY

SEQ ID NO: 16091 - protein, 2266 aa, Homo sapiens
MDEEEDGAGAEESGQPRSFMRLNDLSGAGGRPGPGSAEKDPGSADSEAEGLPYPALAPVVFFYLSQDSRPRSWCLRTVCNPWFERISMLVILLNCVTLGMFRPCEDIACDSQRCRILQAFDDFIFAFFAVEMVVKMVALGIFGKKCYLGDTWNRLDFFIVIAGMLEYSLDLQNVSFSAVRTVRVLRPLRAINRVPSMRILVTLLLDTLPMLGNVLLLCFFVFFIFGIVGVQLWAGLLRNRCFLPENFSLPLSVDLERYYQTENEDESPFICSQPRENGMRSCRSVPTLRGDGGGGPPCGLDYEAYNSSSNTTCVNWNQYYTNCSAGEHNPFKGAINFDNIGYAWIAIFQVITLEGWVDIMYFVMDAHSFYNFIYFILLIIVGSFFMINLCLVVIATQFSETKQRESQLMREQRVRFLSNASTLASFSEPGSCYEELLKYLVYILRKAARRLAQVSRAAGVRVGLLSSPAPLGGQETQPSSSCSRSHRRLSVHHLVHHHHHHHHHYHLGNGTLRAPRASPEIQDRDANGSRRLMLPPPSTPALSGAPPGGAESVHSFYHADCHLEPVRCQAPPPRSPSEASGRTVGSGKVYPTVHTSPPPETLKEKALVEVAASSGPPTLTSLNIPPGPYSSMHKLLETQSTGACQSSCKISSPCLKADSGACGPDSCPYCARAGAGEVELADREMPDSDSEAVYEFTQDAQHSDLRDPHSRRQRSLGPDAEPSSVLAFWRLICDTFRKIVDSKYFGRGIMIAILVNTLSMGIEYHEQPEELTNALEISNIVFTSLFALEMLLKLLVYGPFGYIKNPYNIFDGVIVVISVWEIVGQQGGGLSVLRTFRLMRVLKLVRFLPALQRQLVVLMKTMDNVATFCMLLMLFIFIFSILGMHLFGCKFASERDGDTLPDRKNFDSLLWAIVTVFQILTQEDWNKVLYNGMASTSSWAALYFIALMTFGNYVLFNLLVAILVEGFQAEEISKREDASGQLSCIQLPVDSQGGDANKSESEPDFFSPSLDGDGDRKKCLALVSLGEHPELRKSLLPPLIIHTAATPMSLPKSTSTGLGEALGPASRRTSSSGSAEPGAAHEMKSPPSARSSPHSPWSAASSWTSRRSSRNSLGRAPSLKRRSPSGERRSLLSGEGQESQDEEESSEEERASPAGSDHRHRGSLEREAKSSFDLPDTLQVPGLHRTASGRGSASEHQDCNGKSASGRLARALRPDDPPLDGDDADDEGNLSKGERVRAWIRARLPACCLERDSWSAYIFPPQSRFRLLCHRIITHKMFDHVVLVIIFLNCITIAMERPKIDPHSAERIFLTLSNYIFTAVFLAEMTVKVVALGWCFGEQAYLRSSWNVLDGLLVLISVIDILVSMVSDSGTKILGMLRVLRLLRTLRPLRVISRAQGLKLVVETLMSSLKPIGNIVVICCAFFIIFGILGVQLFKGKFFVCQGEDTRNITNKSDCAEASYRWVRHKYNFDNLGQALMSLFVLASKDGWVDIMYDGLDAVGVDQQPIMNHNPWMLLYFISFLLIVAFFVLNMFVGVVVENFHKCRQHQEEEEARRREEKRLRRLEKKRRKAQCKPYYSDYSRFRLLVHHLCTSHYLDLFITGVIGLNVVTMAMEHYQQPQILDEALKICNYIFTVIFVLESVFKLVAFGFRRFFQDRWNQLDLAIVLLSIMGITLEEIEVNASLPINPTIIRIMRVLRIARVLKLLKMAVGMRALLDTVMQALPQVGNLGLLFMLLFFIFAALGVELFGDLECDETHPCEGLGRHATFRNFGMAFLTLFRVSTGDNWNGIMKDTLRDCDQESTCYNTVISPIYFVSFVLTAQFVLVNVVIAVLMKHLEESNKEAKEEAELEAELELEMKTLSPQPHSPLGSPFLWPGVEGPDSPDSPKPGALHPAAHARSASHFSLEHPTMQPHPTELPGPDLLTVRKSGVSRTHSLPNDSYMCRHGSTAEGPLGHRGWGLPKAQSGSVLSVHSQPADTSYILQLPKDAPHLLQPHSAPTWGTIPKLPPPGRSPLAQRPLRRQAAIRTDSLDVQGLGSREDLLAEVSGPSPPLARAYSFWGQSSTQAQQHSRSHSKISKHMTPPAPCPGPEPNWGKGPPETRSSLELDTELSWISGDLLPPGGQEEPPSPRDLKKCYSVEAQSCQRRPTSWLDEQRRHSIAVSCLDSGSQPHLGTDPSNLGGQPLGGPGSRPKKKLSPPSITIDPPESQGPRTPPSPGICLRRRAPSSDSKDPLASGPPDSMAASPSPKKDVLSLSGLSSDPADLDP

SEQ ID NO: 16092 - protein, 361 aa, Homo sapiens
GLLHGVAPWRSSLHPCEITALSQSLQPLRKLPFRAFRTDARKIHTAPARTMFLLRPLPILLVTGGGYAGYRQYEKYRERELEKLGLEIPPKLAGHWEVALYKSVPTRLLSRAWGRLNQVELPHWLRRPVYSLYIWTFGVNMKEAAVEDLHHYRNLSEFFRRKLKPQARPVCGLHSVISPSDGRILNFGQVKNCEVEQVKGVTYSLESFLGPRMCTEDLPFPPAASCDSFKNQLVTREGNELYHCVIYLAPGDYHCFHSPTDWTVSHRRHFPAVGATNVGSIRIYFDRDLHTNSPRHSKGSYNDFSFVTHTNREGVPMRKGEHLGEFNLGSTIVLIFEAPKDFNFQLKTGQKIRFGEALGSL

SEQ ID NO: 16093 - protein, 101 aa, Homo sapiens
MLFLCFDRIRVTVDGEFLHYIFPLQFLDSPEWDSLRPTEEGIFQVTLTAETDCRYVSWRRKKLYLLFAQHRYISRLFSVLIGSDIADKLYALNDRVYIGKR

SEQ ID NO: 16094 - protein, 382 aa, Homo sapiens
SRFSGEGKNWSSLINLHCQLELEVHYYNEMFGVWEPLLEPLEIDQTEDFRPWNLGIKMKKKAKMAIVESDPEEENYKVPEYKTVISFHSKDQLNITLSKCGLVMLNNLVKAFTEAATGSSADFVKDLAPFMILNSLGLTISVSPSDSFSVLNIPMAKSYVLKNGESLSMDYIRTKDNDHFNAMTSLSSKLFFILLTPVNHSTADKIPLTKVGRRLYTVRHRESGVERSIVCQIDTVEGSKKVTIRSPVQIRNHFSVPLSVYEGDTLLGTASPENEFNIPLGSYRSFIFLKPEDENYQMCEGIDFEEIIKNDGALLKKKCRSKNPSKESFLINIVPEKDNLTSLSVYSEDGWDLPYIMHLWPPILLRNLLPYKIAYYIEVSAN

SEQ ID NO: 16095 - protein, 614 aa, Homo sapiens
MEKPRSIEETPSSEPMEEEEDDDLELFGGYDSFRSYNSSVGSESSSYLEESSEAENEDREAGELPTSPLHLLSPGTPRSLDGSGSEPAVCEMCGIVGTREAFFSKTKRFCSVSCSRSYSSNSKKASILARLQGKPPTKKAKVLHKAAWSAKIGAFLHSQGTGQLADGTPTGQDALVLGFDWGKFLKDHSYKAAPVSCFKHVPLYDQWEDVMKGMKVEVLNSDAVLPSRVYWIASVIQTAGYRVLLRYEGFENDASHDFWCNLGTVDVHPIGWCAINSKILVPPRTIHAKFTDWKGYLMKRLVGSRTLPVDFHIKMVESMKYPFRQGMRLEVVDKSQVSRTRMAVVDTVIGGRLRLLYEDGDSDDDFWCHMWSPLIHPVGWSRRVGHGIKMSERRSDMAHHPTFRKIYCDAVPYLFKKVRAVYTEGGWFEEGMKLEAIDPLNLGNICVATVCKVLLDGYLMICVDGGPSTDGLDWFCYHASSHAIFPATFCQKNDIELTPPKGYEAQTFNWENYLEKTKSKAAPSRLFNMDCPNHGFKVGMKLEAVDLMEPRLICVATVKRVVHRLLSIHFDGWDSEYDQWVDCESPDIYPVGWCELTGYQLQPPVAAGKLPRSL

SEQ ID NO: 16096 - protein, 274 aa, Homo sapiens
MARHGLPLLPLLSLLVGAWLKLGNGQATSMVQLQGGRFLMGTNSPDSRDGDGPVREATVKPFAIDIFPVTNKDFRYIRDFVREKKYRTEAEMFGWSFVFEDFVSDELRNKATQPMKSVLWWLPVEKAFWRQPAGPGSGIRERLEHPVLHVSWNDARAYCAWRGKRLPTEEEWEFAARGGLKGQVYPWGNWFQPNRTNLWQGKFPKGDKAEDGFHGVSPVNAFPAQNNYGLYDLLGNVWEWTASPYQAAEQDMRVLRGASWIDTADGSANHRARV

SEQ ID NO: 16097 - protein, 468 aa, Homo sapiens
HYSCISELNSKLQDTLEQIEEQLDVALSKICKNFDINHYTKVQQAYRLLGKTQTAMDQLHMHFTQAIHNTVFQVVLGYVELCAGNTDTKFQKLQYKDLCTHVTPDSYIPCLADLCKALWEVMLSYYRTMEWHEKHDNEDTASASEGSNMIGTEETNFDRGYIKKKLEHGLTRIWQDVQLKVKTYLLGTDLSIFKYDDFIFVLDIISRLMQVGEEFCGSKSEVLQESIRKQSVNYFKNYHRTRLDELRMFLENETWELCPVKSNFSILQLHEFKFMEQSRSPSVSPSKQPVSTSSKTVTLFEQYCSGGNPFEIQANHKDEETEDVLASNGYESDEQEKSAYQEYDSDSDVPEELKRDYVDEQTGDGPVKSVSRETLKSRKKSDYSLNKVNAPILTNTTLNVIRLVDGVSLCCLGWSTVAHLHSLQAPPPGFKPFSCLSLPRSWDYRRPPPRPANFLYFLFFSRDGVSPC

SEQ ID NO: 16098 - protein, 927 aa, Homo sapiens
MATAAETSASEPEAESKAGPKADGEEDEVKAARTRRKVLSRAVAAATYKTMGPAWDQQEEGVSESDGDEYAMASSAESSPGEYEWEYDEEEEKNQLEIERLEEQLSINVYDYNCHVDLIRLLRLEGELTKVRMARQKMSEIFPLTEELWLEWLHDEISMAQDGLDREHVYDLFEKAVKDYICPNIWLEYGQYSVGGIGQKGGLEKVRSVFERALSSVGLHMTKGLALWEAYREFESAIVEAARLEKVHSLFRRQLAIPLYDMEATFAEYEEWSEDPIPESVIQNYNKALQQLEKYKPYEEALLQAEAPRLAEYQAYIDFEMKIGDPARIQLIFERALVENCLVPDLWIRYSQYLDRQLKVKDLVLSVHNRAIRNCPWTVALWSRYLLAMERHGVDHQVISDSSKELEELRAAFTRALEYLKQEVEERFNESGDPSCVIMQNWARIEARLCNNMQKARELWDSIMTRGNAKYANMWLEYYNLERAHGDTQHCRKALHRAVQCTSDYPEHVCEVLLTMERTEGSLEDWDIAVQKTETRLARVNEQRMKAAEKEAALVQQEEEKAEQRKRARAEKKALKKKKKIRGPEKRGADEDDEKEWGDDEEEQPSKRRRVENSIPAAGETQNVEVAAGPAGKCAAVDVEPPSKQKEKAASLKRDMPKVLHDSSKDSITVFVSNLPYSMQEPDTKLRPLFEACGEVVQIRPIFSNRGDFRGYCYVEFKEEKSALQALEMDRKSVEGRPMFVSPCVDKSKNPDFKVFRYSTSLEKHKLFISGLPFSCTKEELEEICKAHGTVKDLRLVTNRAGKPKGLAYVEYENESQASQAVMKMDGMTIKENIIKVAISNPPQRKVPEKPETRKAPGGPMLLPQTYGARGKGRTQLSLLPRALQRPSAAAPQAENGPAAAPAVAAPAATEAPKMSNADFAKLFLRK

SEQ ID NO: 16099 - protein, 256 aa, Homo sapiens
MEEPEEPADSGQSLVPVYIYSPEYVSMCDSLAKIPKRASMVHSLIEAYALHKQMRIVKPKVASMEEMATFHTDAYLQHLQKVSQEGDDDHPDSIEYGLGYDCPATEGIFDYAAAIGGATITAAQCLIDGMCKVAINWSGGWHHAKKDEASGFCYLNDAVLGILRLRRKFERILYVDLDLHHGDGVEDAFSFTSKVMTVSLHKFSPGFFPGTGDVSDVGLGKGRYYSVNVPIQDGIQDEKYYQICERYEPPAPNPGL

SEQ ID NO: 16100 - protein, 245 aa, Homo sapiens
MDAIHIGMSSTPLVKHTAGAGLKANRPRVMSKSGHSNVRIDKVDGIYLLYLQDLWTTVIDMKWRYKLTLFAATFVMTWFLFGVIYYAIAFIHGDLEPGEPISNHTPCIMKVDSLTGAFLFSLESQTTIGYGVRSITEECPHAIFLLVAQLVITTLIEIFITGTFLAKIARPKKRAETIKFSHCAVITKQNGKLCLVIQVANMRKSLLIQCQLSGKLLQTHVTKEGERILLNQATVKFHVDSSSES

SEQ ID NO: 16101 - protein, 114 aa, Homo sapiens
MLTAAGSTAELSACAISGLFNCITIHPLNIAAGVWMIMNAFILLLCEAPFCCQFIEFANTVAEKVDRLRSWQKAVFYCGMAVVPIVISLTLTTLLGNAIAFATGVLYGLSALGK

SEQ ID NO: 16102 - protein, 385 aa, Homo sapiens
MESLASDGFKLKEVSSVNSPPSQPPQPVVPAKPVQCVHHVSTQPSCPGRGKMSKLLNPEEMTSRDYYFDSYAHFGIHEEMLKDEVRTLTYRNSMYHNKHVFKDKVVLDVGSGTGILSMFAAKAGAKKVFGIECSSISDYSEKIIKANHLDNIITIFKGKVEEVELPVEKVDIIISEWMGYCLFYESMLNTVIFARDKWLKPGGLMFPDRAALYVVAIEDRQYKDFKIHWWENVYGFDMTCIRDVAMKEPLVDIVDPKQVVTNACLIKEVDIYTVKTEELSFTSAFCLQIQRNDYVHALVTYFNIEFTKCHKKMGFSTAPDAPYTHWKQTVFYLEDYLTVRRGEEIYGTISMKPNAKNVRDLDFTVDLDFKGQLCETSVSNDYKMR

SEQ ID NO: 16103 - protein, 1443 aa, Homo sapiens
MATSRGASRCPRDIANVMQRLQDEQEIVQKRTFTKWINSHLAKRKPPMVVDDLFEDMKDGVKLLALLEVLSGQKLPCEQGRRMKRIHAVANIGTALKFLEGRKIKLVNINSTDIADGRPSIVLGLMWTIILYFQIEELTSNLPQLQSLSSSASSVDSIVSSETPSPPSKRKVTTKIQGNAKKALLKWVQYTAGKQTGIEVKDFGKSWRSGVAFHSVIHAIRPELVDLETVKGRSNRENLEDAFTIAETELGIPRLLDPEDVDVDKPDEKSIMTYVAQFLKHYPDIHNASTDGQEDDEILPGFPSFANSVQNFKREDRVIFKEMKVWIEQFERDLTRAQMVESNLQDKYQSFKHFRVQYEMKRKQIEHLIQPLHRDGKLSLDQALVKQSWDRVTSRLFDWHIQLDKSLPAPLGTIGAWLYRAEVALREEITVQQVHEETANTIQRKLEQHKDLLQNTDAHKRAFHEIYRTRSVNGIPVPPDQLEDMAERFHFVSSTSELHLMKMEFLELKYRLLSLLVLAESKLKSWIIKYGRRESVEQLLQNYVSFIENSKFFEQYEVTYQILKQTAEMYVKADGSVEEAENVMKFMNETTAQWRNLSVEVRSVRSMLEEVISNWDRYGNTVASLQAWLEDAEKMLNQSENAKKDFFRNLPHWIQQHTAMNDAGNFLIETCDEMVSRDLKQQLLLLNGRWRELFMEVKQYAQADEMDRMKKEYTDCVVTLSAFATEAHKKLSEPLEVSFMNVKLLIQDLEDIEQRVPVMDAQYKIITKTAHLITKESPQEEGKEMFATMSKLKEQLTKVKECYSPLLYESQQLLIPLEELEKQMTSFYDSLGKINEIITVLEREAQSSALFKQKHQELLACQENCKKTLTLIEKGSQSVQKFVTLSNVLKHFDQTRLQRQIADIHVAFQSMVKKTGDWKKHVETNSRLMKKFEESRAELEKVLRIAQEGLEEKGDPEELLRRHTEFFSQLDQRVLNAFLKACDELTDILPEQEQQGLQEAVRKLHKQWKDLQGEAPYHLLHLKIDVEKNRFLASVEECRTELDRETKLMPQEGSEKIIKEHRVFFSDKGPHHLCEKRLQLIEELCVKLPVRDPVRDTPGTCHVTLKELRAAIDSTYRKLMEDPDKWKDYTSRFSEFSSWISTNETQLKGIKGEAIDTANHGEVKRAVEEIRNGVTKRGETLSWLKSRLKVLTEVSSENEAQKQGDELAKLSSSFKALVTLLSEVEKMLSNFGDCVQYKEIVKNSLEELISGSKEVQEQAEKILDTENLFEAQQLLLHHQQKTKRISAKKRDVQQQIAQAQQGEGGLPDRGHEELRKLESTLDGLERSRERQERRIQVTLRKWERFETNKETVVRYLFQTGSSHERFLSFSSLESLSSELEQTKEFSKRTESIAVQAENLVKEASEIPLGPQNKQLLQQQAKSIKEQVKKLEDTLEEEYVIDKS

SEQ ID NO: 16104 - protein, 715 aa, Homo sapiens
MSSPKRSSKPSMSLAPSGSSMPTADPKPPASLKSTKSATPNRSLVPTKPATSRNSVMSPSSSKSTKSTSTKRAPSNRPSSRSRVRSKARTPSRVSTDTRTSKASKASDVRCHQRRGTHSRGRTPGRRGSRSSKRSPSRASTPGRIRTHGARPGMASRVRTPTSQQKGSRGKSYGRPRTSNRERSDSQPRNLSKKSYRPPGGSGIGRSSELAVTPSTAKCQTPTGIPSKEKSDNPSPSSSRKVKSYGQMIIPSREKSYSPTEMSSRVKSYNQASTRSRPQSHSQSRSPRRSRSGSQKRTHSRVRSHSWKRNHSRARSRTRKGILSQMGRHSQSRSHSKGKSQNQSRTPRRGRSHNWSRNPSKERSHSHSRSSSKERDHRGSSSPRKESGRSQSGSPNKQRDHSRSRSPNKARDRSRSRSPYKARDRSRSRSPNKARDCSRSRSPYKARDRSRSRSPNKARDHSRSRSPNKARDRSRSRSPSKERDHSQLGSPSKERDHRRSRSPSKERQCRQSRSSSKERDHRRSRSPSKERQRRQSRSPNKERDRSQSRSPSEEREHRQSRSPSKERDRRRWRSPSKERERRQSRSSSEERDHSRSRSPNKQSGYSRPRASSKEKAHSRSRTPSKEGNHSQSRTSSKESDPSQSTVPRSPDWKRSPTRTSSLSQNRTPSKTSSHSPSTFPSGGQTLSQDDSQADATTSKATLPGERSSSSSSKLA

SEQ ID NO: 16105 - protein, 1283 aa, Homo sapiens
MAKQLNLPENTDDWTKEDVNQWLESHKIDQKHREILTEQDVNGAVLKWLKKEHLVDMGITHGPAIQIEELFKELRKTAIEDSIQTSKMGKPSKNAPKDQTVSQKERRETSKQKQKGKENPDMANPSAMSTTAKGSKSLKVELIEDKIDYTKERQPSIDLTCVSYPFDEFSNPYRYKLDFSLQPETGPGNLIDPIHEFKAFTNTATATEEDVKMKFSNEVFRFASACMNSRTNGTIHFGVKDKPHGKIVGIKVTNDTKEALINHFNLMINKYFEDHQVQQAKKCIREPRFVEVLLPNSTLSDRFVIEVDIIPQFSECQYDYFQIKMQNYNNKIWEQSKKFSLFVRDGTSSKDITKNKVDFRAFKADFKTLAESRKAAEEKFRAKTNKKEREGPKLVKLLTGNQDLLDNSYYEQYILVTNKCHPDQTKHLDFLKEIKWFAVLEFDPESNINGVVKAYKESRVANLHFPSVYVEQKTTPNETISTLNLYHQPSWIFCNGRLDLDSEKYKPFDPSSWQRERASDVRKLISFLTHEDIMPRGKFLVVFLLLSSVDDPRDPLIETFCAFYQDLKGMENILCICVHPHIFQGWKDLLEARLIKHQDEISSQCISALSLEEINGTILKLKSVTQSSKRLLPSIGLSTVLLKKEEDIMTALEIICENECEGTLLEKDKNKFLEFKASKEEDFYRGGKVSWWNFYFSSESYSSPFVKRDKYERLEAMIQNCADSSKPTSTKIIHLYHHPGCGGTTLAMHILWELRKKFRCAVLKNKTVDFSEIGEQVTSLITYGAMNRQEYVPVLLLVDDFEEQDNVYLLQYSIQTAIAKKYIRYEKPLVIILNCMRSQNPEKSARIPDSIAVIQQLSPKEQRAFELKLKEIKEQHKNFEDFYSFMIMKTNFNKEYIENVVRNILKGQNIFTKEAKLFSFLALLNSYVPDTTISLSQCEKFLGIGNKKAFWGTEKFEDKMGTYSTILIKTEVIECGNYCGVRIIHSLIAEFSLEELKKSYHLNKSQIMLDMLTENLFFDTGMGKSKFLQDMHTLLLTRHRDEHEGETGNWFSPFIEALHKDEGNEAVEAVLLESIHRFNPNAFICQALARHFYIKKKDFGNALNWAKQAKIIEPDNSYISDTLGQVYKSKIRWWIEENGGNGNISVDDLIALLDLAEHASSAFKESQQQSEDREYEVKERLYPKSKRRYDTYNIAGYQGEIEVGLYTIQILQLIPFFDNKNELSKRYMVNFVSGSSDIPGDPNNEYKLALKNYIPYLTKLKFSLKKSFDFFDEYFVLLKPRNN

SEQ ID NO: 16106 - protein, 98 aa, Homo sapiens
MLPPQKKPWESMAKGLVLGALFTSFLLLVYSYAVPPLHAGLASTTPEAAASCSPPALEPEAVIRANGSAGECQPRRNIVFLKTHKTASSTLLNILFRF

SEQ ID NO: 16107 - protein, 332 aa, Homo sapiens
MSEETVPEAASPPPPQGQPYFDRFSEDDPEYMRLRNRAADLRQDFNLMEQKKRVTMILQSPSFREELEGLIQEQMKKGNNSSNIWALRQIADFMASTSHAVFPTSSMNVSMMTPINDLHTADSLNLAKGERLMRCKISSVYRLLDLYGWAQLSDTYVTLRVSKEQDHFLISPKGVSCSEVTASSLIKVNILGEVVEKGSSCFPVDTTGFCLHSAIYAARPDVRCIIHLHTPATAAVSAMKWGLLPVSHNALLVGDMAYYDFNGEMEQEADRINLQKCLGPTCKSTESQLMSKGDEDTKDDSEETVPNPFSQLTDQELEEYKKEVERKKLELD

SEQ ID NO: 16108 - protein, 1092 aa, Homo sapiens
LNTSSLESATDEAGSPLAAAAAAAAAERCSWLVPLVRTLLDRAYEPLGLQWGLPSLPPTNGSPTFFEDFQAFCATPEWRHFIDKQVQPTMSQFEMDTYAKSHDLMSGFWNACYDMLMSSGQRRQWERAQSRRAFQELVLEPAQRRARLEGLRYTAVLKQQATQHSMALLHWGALWRQLASPCGAWALRDTPIPRWKLSSAETYSRMRLKLVPNHHFDPHLEASALRDNLGEVPLTPTEEASLPLAVTKEAKVSTPPELLQEDQLGEDELAELETPMEAAELDEQREKLVLSAECQLVTVVAVVPGLLEVTTQNVYFYDGSTERVETEEGIGYDFRRPLAQLREVHLRRFNLRRSALELFFIDQANYFLNFPCKVGTTPVSSPSQTPRPQPGPIPPHTQVRNQVYSWLLRLRPPSQGYLSSRSPQEMLRASGLTQKWVQREISNFEYLMQLNTIAGRTYNDLSQYPVFPWVLQDYVSPTLDLSNPAVFRDLSKPIGVVNPKHAQLVREKYESFEDPAGTIDKFHYGTHYSNAAGVMHYLIRVEPFTSLHVQLQSGRFDCSDRQFHSVAAAWQARLESPADVKELIPEFFYFPDFLENQNGFDLGCLQLTNEKVGDVVLPPWASSPEDFIQQHRQALESEYVSAHLHEWIDLIFGYKQRGPAAEEALNVFYYCTYEGAVDLDHVTDERERKALEGIISNFGQTPCQLLKEPHPTRLSAEEAAHRLARLDTNSPSIFQHLDELKAFFAEVTVSASGLLGTHSWLPYDRNISNYFSFSKDPTMGSHKTQRLLSGPWVPGSGVSGQALAVAPDGKLLFSGGHWDGSLRVTALPRGKLLSQLSCHLDVVTCLALDTCGIYLISGSRDTTCMVWRLLHQGGLSVGLAPKPVQVLYGHGAAVSCVAISTELDMAVSGSEDGTVIIHTVRRGQFVAALRPLGATFPGPIFHLALGSEGQIVVQSSAWERPGAQVTYSLHLYSVNGKLRASLPLAEQPTALTVTEDFVLLGTAQCALHILQLNTLLPAAPPLPMKVAIRSVAVTKERSHVLVGLEDGKLIVVVAGQPSEVRSSQFARKLWRSSRRISQVSSGETEYNPTEAR

SEQ ID NO: 16109 - protein, 140 aa, Homo sapiens
MSNPSAPPPYEDRNPLYPGPPPPGGYGQPSVLPGGYPAYPGYPQPGYGHPAGYPQPMPPTHPMPMNYGPGHGYDGEERAVSDSFGPGEWDDRKVRHTFIRKVYSIISVQLLITVAIIAIFTFVEPVSAFVRRNVAVYYVS

SEQ ID NO: 16110 - protein, 936 aa, Homo sapiens
MKSLKKDSRLRITPTRLLEASENVKEKKRAKGPEQPTPTIQEEPEPVSNVLQGDDILALAIKKEDLKEQHIPRLTEKEDKRVITQKFIIRKLKPMDPRRKVCHLVARPANPDEATKPLDYSGPGDSFDGSDQILPHHILGSLQDFKRIALARGNTQLAERIPTSPCLMTLISAEGESKQKAPKEEKRPPWAPPPQHNFLKNWQRNTALRKKQQEALSEHLKKPVSELLMHTGETYRRIQEERELIDCTLPTRRDRKSWENSGFWSRLEYLGDEMTGLVMTKTKTQRGLMEPITHIRKPHSIRVETGLPAQRDASYRYTWDRSLFLIYRRKELQRIMEELDFSQQDIDGLEVVGKGWPFSAVTVEDYTVFERSQGSSSEDTAYLGTLASSSDVSMPILGPSLLFCGKPACWIRGSNPQDKRQVGIAAHLTFETLEGEKTSSELTVVNNGTVAIWYDWRRQHQPDTFQDLKKNRMQRFYFDNREGVILPGEIKTFTFFFKSLTAGVFREFWEFRTHPTLLGGAILQVNLHAVSLTQDVFEDERKVLESKLTAHEAVTVVREVLQELLMGVLTPERTPSPVDAYLTEEDLFRHRNPPLHYEHQVVQSLHQLWRQYMTLPAKAEEARPGDKEHVSPIATEKASVNAELLPRFRSPISETQVPRPENEALRESGSQKARVGTKSPQRKSIMEEILVEESPDVDSTKSPWEPDGLPLLEWNLCLEDFRKAVMVLPDENHREDALMRLNKAALELCQKPRPLQSNLLHQMCLQLWRDVIDSLVGHSMWLRSVLGLPEKETIYLNVPEEQDQKSPPIMEVKVPVGKAGKEERKGAAQEKKQLGIKDKEDKKGAKLLGKEDRPNSKKHKAKDDKKVIKSASQDRFSLEDPTPDIILSSQEPIDPLVMGKYTQSLHSEVHPGRCVPWENTMQGAFPSTTRCGGSCL

SEQ ID NO: 16111 - protein, 731 aa, Homo sapiens
SSEKAALDGPLDAALDHLRLGNTFTFRVTVLQASSISAEYADIFCQFNFIHRHDEAFSTEPLKNTGRGPPLGFYHVQNIAVEVTKSFIEYIKSQPIVFEVFGHYQQHPFPPLCKDVLSPLRPSRRHFPRVMPLSKPVPATKLSTLTRPCPGPCHCKYDLLVYFEICELEANGDYIPAVVDHRGGMPCMGTFLLHQGIQRRITVTLLHETGSHIRWKEVRELVVGRIRNTPETDESLIDPNILSLNILSSGYIHPAQDDRQFLDSDIPSVSLGNDTRTFYQFEAAWDSSMHNSLLLNRVTPYREKIYMTLSAYIEMENCTQPAVVTKDFCMVFYSRDAKLPASRSIRNLFGSGSLRASESNRVTGVYELSLCHVADAGSPGMQRRRRRVLDTSVAYVRGEENLAGWRPRSDSLILDHQWELEKLSLLQEVEKTRHYLLLREKLETAQRPVPEALSPAFSEDSESHGSSSASSPLSAEGRPSPLEAPNERQRELAVKCLRLLTHTFNREYTHSHVCVSASESKLSEMSVTLLRDPSMSPLGVATLTPSSTCPSLVEGRYGATDLRTPQPCSRPASPEPELLPEADSKKLPSPARATETDKEPQRLLVPDIQEIRVSPIVSKKGYLHFLEPHTSGWARRFVVVRRPYAYMYNSDKDTVERFVLNLATAQVEYSEDQQAMLKTPNTFAVCTEHRGILLQAASDKDMHDWLYAFNPLLAGTIRSKLSRRRSAQMRV

SEQ ID NO: 16112 - protein, 2446 aa, Homo sapiens
MTARGQSPLAPLLETLEDPSASHGGQTDAYLTLTSRMTGEEGKEVITEIEKKLPRLYKVLKTHISSQNSELSSAALQALGFCLYNPKITSELSEANALELLSKLNDTIKNSDKNVRTRALWVISKQTFPSEVVGKMVSSIIDSLEILFNKGETHSAVVDFEALNVIVRLIEQAPIQMGEEAVRWAKLVIPLVVHSAQKVHLRGATALEMGMPLLLQKQQEIASITEQLMTTKLISELQKLFMSKNETYVLKLWPLFVKLLGRTLHRSGSFINSLLQLEELGFRSGAPMIKKIAFIAWKSLIDNFALNPDILCSAKRLKLLMQPLSSIHVRTETLALTKLEVWWYLLMRLGPHLPANFEQVCVPLIQSTISIDSNASPQGNSCHVATSPGLNPMTPVHKGASSPYGAPGTPRMNLSSNLGGMATIPSIQLLGLEMLLHFLLGPEALSFAKQNKLVLSLEPLEHPLISSPSFFSKHANTLITAVHDSFVAVGKDAPDVVVSAIWKELISLVKSVTESGNKKEKPGSEVLTLLLKSLESIVKSEVFPVSKTLVLMEITIKGLPQKVLGSPAYQVANMDILNGTPALFLIQLIFNNFLECGVSDERFFLSLESLVGCVLSGPTSPLAFSDSVLNVINQNAKQLENKEHLWKMWSVIVTPLTELINQTNEVNQGDALEHNFSAIYGALTLPVNHIFSEQRFPVATMKTLLRTWSELYRAFARCAALVATAEENLCCEELSSKIMSSLEDEGFSNLLFVDRIIYIITVMVDCIDFSPYNIKYQPKVKSPQRPSDWSKKKNEPLGKLTSLFKLIVKVIYSFHTLSFKEAHSDTLFTIGNSITGIISSVLGHISLPSMIRKIFATLTRPLALFYENSKLDEVPKVYSCLNNKLEKLLGEIIACLQFSYTGTYDSELLEQLSPLLCIIFLHKNKQIRKQSAQFWNATFAKVMMLVYPEELKPVLTQAKQKFLLLLPGLETVEMMEESSGPYSDGTENSQLNVKISGMERKSNGKRDSFLAQTKNKKENMKPAAKLKLESSSLKVKGEILLEEEKSTDFVFIPPEGKDAKERILTDHQKEVLKTKRCDIPAMYNNLDVSQDTLFTQYSQEEPMEIPTLTRKPKEDSKMMITEEQMDSDIVIPQDVTEDCGMAEHLEKSSLSNNECGSLDKTSPEMSNSNNDERKKALISSRKTSTECASSTENSFVVSSSSVSNTTVAGTPPYPTSRRQTFITLEKFDGSENRPFSPSPLNNISSTVTVKNNQETMIKTDFLPKAKQREGTFSKSDSEKIVNGTKRSSRRAGKAEQTGNKRSKPLMRSEPEKNTEESVEGIVVLENNPPGLLNQTECVSDNQVHLSESTMEHDNTKLKAATVENAVLLETNTVEEKNVEINLESKENTPPVVISADQMVNEDSQVQITPNQKTLRRSSRRRSEVVESTTESQDKENSHQKKERRKEEEKPLQKSPLHIKDDVLPKQKLIAEQTLQENLIEKGSNLHEKTLGETSANAETEQNKKKADPENIKSEGDGTQDIVDKSSEKLVRGRTRYQTRRASQGLLSSIENSESDSSEAKEEGSRKKRSGKWKNKSNESVDIQDQEEKVVKQECIKAENQSHDYKATSEEDVSIKSPICEKQDESNTVICQDSTVTSDLLQVPDDLPNVCEEKNETSKYAEYSFTSLPVPESNLRTRNAIKRLHKRDSFDNCSLGESSKIGISDISSLSEKTFQTLECQHKRSRRVRRSKGCDCCGEKSQPQEKSLIGLKNTENNDVEISETKKADVQAPVSPSETSQANPYSEGQFLDEHHSVNFHLGLKEDNDTINDSLIVSETKSKENTMQESLPSGIVNFREEICDMDSSEAMSLESQESPNENFKTVGPCLGDSKNVSQESLETKEEKPEETPKMELSLENVTVEGNACKVTESNLEKAKTMELNVGNEASFHGQERTKTGISEEAAIEENKRNDDSEADTAKLNAKEVATEEFNSDISLSDNTTPVKLNAQTEISEQTAAGELDGGNDVSDLHSSEETNTKMKNNEEMMIGEAMAETGHDGETENEGITTKTSKPDEAETNMLTAEMDNFVCDTVEMSTEEGIIDANKTETNTEYSKSEEKLDNNQMVMESDILQEDHHTSQKVEEPSQCLASGTAISELIIEDNNASPQKLRELDPSLVSANDSPSGMQTRCVWSPLASPSTSILKRGLKRSQEDEISSPVNKVRRVSFADPIYQAGLADDIDRRCSIVRSHSSNSSPIGKSVKTSPTTQSKISEMAKESIPCPTESVYPPLVNCVAPVDIILPQITSNMWARGLGQLIRAKNIKTIGDLSTLTASEIKTLPIRSPKVSNVKKALRIYHEQQVKTRGLEEIPVFDISEKTVNGIENKSLSPDEERLVSDIIDPVALEIPLSKNLLAQISALALQLDSEDLHNYSGSQLFEMHEKLSCMANSVIKNLQSRWRSPSHENSI

SEQ ID NO: 16113 - protein, 1772 aa, Homo sapiens
ECQNAAQIYRKVTCGIKPASFEKVHDPEIKEIIGECICKNKEERYEIKDLLSHAFFAEDTGVRVELAEEDHGRKSTIALRLWVEDPKKLKGKPKDNGAIEFTFDLEKETPDEVAQEMIESGFFHESDVKIVAKSIRDRVALIQWRRERIWPALQPKEQQDVGSPDKARGPPVPLQVQVTYHAQAGQPGPPEPEEPEADQHLLPPTLPTSATSLASDSTFDSGQGSTVYSDSQSSQQSVMLGSLADAAPSPAQCVCSPPVSEGPVLPQSLPSLGAYQQPTAAPGLPVGSVPAPACPPSLQQHFPDPAMSFAPVLPPPSTPMPTGPGQPAPPGQQPPPLAQPTPLPQVLAPQPVVPLQPVPPHLPPYLAPASQVGAPAQLKPLQMPQAPLQPLAQVPPQMPPIPVVPPITPLAGIDGLPPALPDLPTATVPPVPPPQYFSPAVILPSLAAPLPPASPALPLQAVKLPHPPGAPLAMPCRTIVPNAPATIPLLAVAPPGVAALSIHSAVAQLPGQPVYPAAFPQMAPTDVPPSPHHTVQNMRATPPQPALPPQPTLPPQPVLPPQPTLPPQPVLPPQPTRPPQPVLPPQPMLPPQPVLPPQPALPVRPEPLQPHLPEQAAPAATPGSQILLGHPAPYAVDVAAQVPTVPVPPAAVLSPPLPEVLLPAAPELLPQFPSSLATVSASVQSVPTQTATLLPPANPPLPGGPGIASPCPTVQLTVEPVQEEQASQDKPPGLPQSCESYGGSDVTSGKELSDSCEGAFGGGRLEGRAARKHHRRSTRARSRQERASRPRLTILNVCNTGDKMVECQLETHNHKMVTFKFDLDGDAPDEIATYMVEHDFILQAERETFIEQMKDVMDKAEDMLSEDTDADRGSDPGTSPPHLSTCGLGTGEESRQSQANAPVYQQNVLHTGKRWFIICPVAEHPAPEAPESSPPLPLSSLPPEASQDSAPYKDQLSSKEQPSFLASQQLLSQAGPSNPPGAPPAPLAPSSPPVTALPQDGAAPATSTMPEPASGTASQAGGPGTPQGLTSELETSQPLAETHEAPLAVQPLVVGLAPCTPAPEAASTRDASAPREPLPPPAPEPSPHSGTPQPALGQPAPLLPAAVGAVSLATSQLPSPPLGPTVPPQPPSALESDGEGPPPRVGFVDSTIKSLDEKLRTLLYQEHVPTSSASAGTPVEVGDRDFTLEPLRGDQPRSEVCGGDLALPPVPKEAVSGRVQLPQPLVEKSELAPTRGAVMEQGTSSSMTAESSPRSMLGYDRDGRQVASDSHVVPSVPQDVPAFVRPARVEPTDRDGGEAGESSAEPPPSDMGTVGGQASHPQTLGARALGSPRKRPEQQDVSSPAKTVGRFSVVSTQDEWTLASPHSLRYSAPPDVYLDEAPSSPDVKLAVRRAQTASSIEVGVGEPVSSDSGDEGPRARPPVQKQASLPVSGSVAGDFVKKATAFLQRPSRAGSLGPETPSRVGMKVPTISVTSFHSQSSYISSDNDSELEDADIKKELQSLREKHLKEISELQSQQKQEIEALYRRLGKPLPPNVGFFHTAPPTGRRRKTSKSKLKAGKLLNPLVRQLKVVASSTGSSTSSLAPGPEPGPQPALHVQAQVNNSNNKKGTFTDDLHKLVDEWTSKTVGAAQLKPTLNQLKQTQKLQDMEAQAGWAAPGEARAMTAPRAGVGMPRLPPAPGPLSTTVIPGAAPTLSVPTPGTALSNLPTPPCALPLGQYRGLLPAPVSWGPWAGQVGQLGAQGSWNTPQVPVLPVFLQPPVVSMPGPRLRIT

SEQ ID NO: 16114 - protein, 464 aa, Homo sapiens
MAAQPPRPVGERSMGSSREAARAPARSPAWASTQASTPGAALAVQRESPESGLQKHYSNLCMEKSQKINPFILHILQEVDEEIKKGLAAGITLNIAGNNRLVPVERVTGEDFWILSKILKNCLYINGLDVGYNLLCDVGAYYAAKLLQKQLNLIYLNLMFNDIGPEGGELIAKVLHKNRTLKYLRMTGNKIENKGGMFFAAMLQINSSLEKLDLGDCDLGMQSVIAFATVLTQNQAIKAINLNRPILYSEQEESTVHVGRMLKENHCLVALHMCKHDIKNSGIQQLCDALYLNSSLRYLDVSCNKITHDGMVYLADVLKSNTTLEVIDLSFNRIENAGANYLSETLTSHNRSLKALSVVSNNIEGEGLVALSQSMKTNLTFSHIYIWGNKFDEATCIAYSDLIQMGCLKPDNTDVEPFVVDGRVYLAEVSNGLKKHYYWTSTYGESYDHSSNAGFALVPVGQQP

SEQ ID NO: 16115 - protein, 862 aa, Homo sapiens
MDTAEEDICRVCRSEGTPEKPLYHPCVCTGSIKFIHQECLVQWLKHSRKEYCELCKHRFAFTPSRIYKCLFTGSVSSLLTLPLDMLSTENLLADCLQGCFVVTCTLCAFISLVWLREQIVHGGAPIWLEHAAPPFNAAGHHQNEAPAGGNGAENVAADQPANPPAENAVVGENPDAQDDQAEEEEEDNEEEDDAGVEDAADANNGAQDDMNWNALEWDRAAEELTWERMLGLDGSLVFLEHVFWVVSLNTLFILVFAFCPYHIGHFSLVGLGFEEHVQASHFEGLITTIVGYILLAITLIICHGLATLVKFHRSRRLLGVCYIVVKVSLLVVVEIGVFPLICGWWLDICSLEMFDATLKDRELSFQSAPGTTMFLHWLVGMVYVFYFASFILLLREVLRPGVLWFLRNLNDPDFNPVQEMIHLPIYRHLRRFILSVIVFGSIVLLMLWLPIRIIKSVLPNFLPYNVMLYSDAPVSELSLELLLLQVVLPALLEQGHTRQWLKGLVRAWTVTAGYLLDLHSYLLGDQEENENSANQQVNNNQHARNNNAIPVVGEGLHAAHQAILQQGGPVGFQPYRRPLNFPLRIFLLIVFMCITLLIASLICLTLPVFAGRWLMSFWTGTAKIHELYTAACGLYVCWLTIRAVTVMVAWMPQGRRVIFQKVKEWSLMIMKTLIVAVLLAGVVPLLLGLLFELVIVAPLRVPLDQTPLFYPWQDWALGVLHAKIIAAITLMGPQWWLKTVIEQVYANGIRNIDLHYIVRKLAAPVISVLLLSLCVPYVIASGVVPLLGVTAEMQNLVHRRIYPFLLMVVVLMAILSFQVRQFKRLYEHIKNDKYLVGQRLVNYERKSGKQGSSPPPPQSSQE

SEQ ID NO: 16116 - protein, 276 aa, Homo sapiens
TLIYRLPGVLTWPTSNVIIEESQPQKIKMLLEKFVEECKFPPVPDAICCYQKCHGYSKIQIYITDPDFKDFLQGICLTPDCEGVISKIIIFSSGGEVKCEFEHKVIKEKVPPRPILKQKCSSLEKLRLKEDKKLKRKIQKKEAKKLAQERMEEDLRESNPPKNEEQKETVDNVQRCQFLDDRILQCIKQYADKIKSGIQNTAMLLKELLSWKVLSTEDYTTCFSSRNFLNEAVDYVIRHLIQENNRVKTRIFLHVLSELKEVEPKLAAWIQKLNSF

SEQ ID NO: 16117 - protein, 1038 aa, Homo sapiens
MFHLRTCAAKLRPLTASQTVKTFSQNRPAAARTFQQIRCYSAPVAAEPFLSGTSSNYVEEMYCAWLENPKSVHKSWDIFFRNTNAGAPPGTAYQSPLPLSRGSLAAVAHAQSLVEAQPNVDKLVEDHLAVQSLIRAYQIRGHHVAQLDPLGILDADLDSSVPADIISSTDKLDLAVFKERLRMLTVGGFYGLDESDLDKVFHLPTTTFIGGQESALPLREIIRRLEMAYCQHIGVEFMFINDLEQCQWIRQKFETPGIMQFTNEEKRTLLARLVRSTRFEEFLQRKWSSEKRFGLEGCEVLIPALKTIIDKSSENGVDYVIMGMPHRGRLNVLANVIRKELEQIFCQFDSKLEAADEGSGDVKYHLGMYHRRINRVTDRNITLSLVANPSHLEAADPVVMGKTKAEQFYCGDTEGKKVMSILLHGDAAFAGQGIVYETFHLSDLPSYTTHGTVHVVVNNQIGFTTDPRMARSSPYPTDVARVVNAPIFHVNSDDPEAVMYVCKVAAEWRSTFHKDVVVDLVCYRRNGHNEMDEPMFTQPLMYKQIRKQKPVLQKYAELLVSQGVVNQPEYEEEISKYDKICEEAFARSKDEKILHIKHWLDSPWPGFFTLDGQPRSMSCPSTGLTEDILTHIGNVASSVPVENFTIHGGLSRILKTRGEMVKNRTVDWALAEYMAFGSLLKEGIHIRLSGQDVERGTFSHRHHVLHDQNVDKRTCIPMNHLWPNQAPYTVCNSSLSEYGVLGFELGFAMASPNALVLWEAQFGDFHNTAQCIIDQFICPGQAKWVRQNGIVLLLPHGMEGMGPEHSSARPERFLQMCNDDPDVLPDLKEANFDINQLYDCNWVVVNCSTPGNFFHVLRRQILLPFRKPLIIFTPKSLLRHPEARSSFDEMLPGTHFQRVIPEDGPAAQNPENVKRLLFCTGKVYYDLTRERKARDMVGQVAITRIEQLSPFPFDLLLKEVQKYPNAELAWCQEEHKNQGYYDYVKPRLRTTISRAKPVWYAGRDPAAAPATGNKKTHLTELQRLLDTAFDLDVFKNFS

SEQ ID NO: 16118 - protein, 560 aa, Homo sapiens
MSEHSRNSDQEELLDEEINEDEILANLSAEELKELQSEMEVMAPDPSLPVGMIQKDQTDKPPTGNFNHKSLVDYMYWEKASRRMLEEERVPVTFVKSEEKTQEEHEEIEKRNKNMAQYLKEKLNNEIVANKRESKGSSNIQETDEEDEEEEDDDDDDEGEDDGEESEETNREEEGKAKEQIRNCENNCQQVTDKAFKEQRDRPEAQEQSEKKISKLDPKKLALDTSFLKVSTRPSGNQTDLDGSLRRVRKNDPDMKELNLNNIENIPKEMLLDFVNAMKKNKHIKTFSLANVGADENVAFALANMLRENRSITTLNIESNFITGKGIVAIMRCLQFNETLTELRFHNQRHMLGHHAEMEIARLLKANNTLLKMGYHFELPGPRMVVTNLLTRNQDKQRQKRQEEQKQQQLKEQKKLIAMLENGLGLPPGMWELLGGPKPDSRMQEFFQPPPPRPPNPQNVPFSQRSEMMKKPSQAPKYRTDPDSFRVVKLKRIQRKSRMPEAREPPEKTNLKDVIKTLKPVPRNRPPPLVEITPRDQLLNDIRHSSVAYLKPVQLPKELA

SEQ ID NO: 16119 - protein, 394 aa, Homo sapiens
MEIRLPDLALKRIFSFLDLFGLLQVSQVNKHWNRIADSDYLWRSLSLQRWDCSNFTNQHLGTHTWKQFFLHQRRKELRLALAQPHNFIYKVTKNIAFETELAYLSGNRLTVDEQEKSIICSVSPKQELCAWDVQEVGDAAGDIYTFTLPGLRDVSKVTAFQYGIVLLHCSPDKKWVFACGTYSRTLPQVFLTESLLRPSEGSVPLSTFLPHKLCASACWTPKVKNRITLMSQSSTGKKTEFITFDLTTKKTGGQTVIQAYEIASFQVAAHLKCPIWMGASDGYMIVFTSGPYLLLFSITGFLLQRFEDHQAAINNFWVDPCYVLTTSENSVHVYMWEEGGRHPYLRSCCHLENTWHDHTTDSCISSVMCDNASIVLRVRKVSDSSILVMYSLNT

SEQ ID NO: 16120 - protein, 1397 aa, Homo sapiens
MAPPPPPVLPVLLLLAAAAALPAMGLRAAAWEPRVPGGTRAFALRPGCTYAVGAACTPRAPRELLDVGRDGRLAGRRRVSGAGRPLPLQVRLVARSAPTALSRRLRARTHLPGCGARARLCGTGARLCGALCFPVPGGCAAAQHSALAAPTTLPACRCPPRPRPRCPGRPICLPPGGSVRLRLLCALRRAAGAVRVGLALEAATAGTPSASPSPSPPLPPNLPEARAGPARRARRGTSGRGSLKFPMPNYQVALFENEPAGTLILQLHAHYTIEGEEERVSYYMEGLFDERSRGYFRIDSATGAVSTDSVLDRETKETHVLRVKAVDYSTPPRSATTYITVLVKDTNDHSPVFEQSEYRERVRENLEVGYEVLTIRASDRDSPINANLRYRVLGGAWDVFQLNESSGVVSTRAVLDREEAAEYQLLVEANDQGRNPGPLSATATVYIEVEDENDNYPQFSEQNYVVQVPEDVGLNTAVLRVQATDRDQGQNAAIHYSILSGNVAGQFYLHSLSGILDVINPLDFEDVQKYSLSIKAQDGGRPPLINSSGVVSVQVLDVNDNEPIFVSSPFQATVLENVPLGYPVVHIQAVDADSGENARLHYRLVDTASTFLGGGSAGPKNPAPTPDFPFQIHNSSGWITVCAELDREEVEHYSFGVEAVDHGSPPMSSSTSVSITVLDVNDNDPVFTQPTYELRLNEDAAVGSSVLTLQARDRDANSVITYQLTGGNTRNRFALSSQRGGGLITLALPLDYKQEQQYVLAVTASDGTRSHTAHVLINVTDANTHRPVFQSSHYTVSVSEDRPVGTSIATLSANDEDTGENARITYVIQDPVPQFRIDPDSGTMYTMMELDYENQVAYTLTIMAQDNGIPQKSDTTTLEILILDANDNAPQFLWDFYQGSIFEDAPPSTSILQVSATDRDSGPNGRLLYTFQGGDDGDGDFYIEPTSGVIRTQRRLDRENVAVYNLWALAVDRGSPTPLSASVEIQVTILDINDNAPMFEKDELELFVEENNPVGSVVAKIRANDPDEGPNAQIMYQIVEGDMRHFFQLDLLNGDLRAMVELDFEVRREYVLVVQATSAPLVSRATVHILLVDQNDNPPVLPDFQILFNNYVTNKSNSFPTGVIGCIPAHDPDVSDSLNYTFVQGNELRLLLLDPATGELQLSRDLDNNRPLEALMEVSVSDGIHSVTAFCTLRVTIITDDMLTNSITVRLENMSQEKFLSPLLALFVEGVAAVLSTTKDDVFVFNVQNDTDVSSNILNVTFSALLPGGVRGQFFPSEDLQEQIYLNRTLLTTISTQRVLPFDDNICLREPCENYMKCVSVLRFDSSAPFLSSTTVLFRPIHPINGLRCRCPPGFTGDYCETEIDLCYSDPCGANGRCRSREGGYTCECFEDFTEIS

SEQ ID NO: 16121 - protein, 497 aa, Homo sapiens
MAAAALRDPAQGYVTFEDVAVYFSQEEWRLLDDAQRLLYRNVMLENFTLLASLGLASSKTHEITQLESWEEPFMPAWEVVTSAIPRGCWHGAEAEEAPEQIASVGLLSSNIQQHQKQHCGEKPLKRQEGRVPVLRSCKVHLSEKSLQSREVGKALLISSGVLKHQVTHTGEKSHRSSKSREAFHAGKRHYKCSECGKAFGQKYLLVQHQRLHAGKKTYECSECGKLFRDMSNLFIHQIVHTGERPYGCSNCGKSFSRNAHLIEHQRVHTGEKPFTCSECGKAFRHNSTLVQHHKIHTGVRPYECSECGKLFSFNSSLMKHQRIHTGERPYKCSECGKFYSHKSNLIKHWRVHTGERPYKCSDCGKFFTQCSSLMQHQKVHTGEKPFKCNECGRFFRENSTLVRHQRVHTGAKPYECRECGKFFSQSSTLMQHRKVHIGEKPFKCNECGRLFRENSSLVKHQRVHTGAKPYECRECGKFFRHNSSLFKHRRIHTGEMQ

SEQ ID NO: 16122 - protein, 771 aa, Homo sapiens
MPGSATALRHERLKKTNARPIPLGLFTINEEDEQQKNGNSRRPKAPDSYKVQDKKNASSRPASAISGQNNNHSGNKPDPPPVLRVDDRQRLARERREEREKQLAAREIVWLEREERARQHYEKHLEERKKRLEEQRQKEERRRAAVEEKRRQRLEEDKERHEAVVRRTMERSQKPKQKHNRWSWGGSLHGSPSIHSADPDRRSVSTMNLSKYVDPVISKRLSSSSATLLNSPDRARRLQLSPWESSVVNRLLTPTHSFLARSKSTAALSGEAASCSPIIMPYKAAHSRNSMDRPKLFVTPPEGSSRRRIIHGTASYKKERERENVLFLTSGTRRAVSPSNPKARQPARSRLWLPSKSLPHLPGTPRPTSSLPPGSVKAAPAQVRPPSPGNIRPVKREVKVEPEKKDPEKEPQKVANEPSLKGRAPLVKVEEATVEERTPAEPEVGPAAPAMAPAPASAPAPASAPAPAPVPTPAMVSAPSSTVNASASVKTSAGTTDPEEATRLLAEKRRLAREQREKEERERREQEELERQKREELAQRVAEERTTRREEESRRLEAEQAREKEEQLQRQAEERALREREEAERAQRQKEEEARVREEAERVRQEREKHFQREEQERLERKKRLEEIMKRTRRTEATDKKTSDQRNGDIAKGALTGGTEVSALPCTTNAPGNGKPVGSPHVVTSHQSKVTVESTPDLEKQPNENGVSVQNENFEEIINLPIGSKPSRLDVTNSESPEIPLNPILAFDDEGTLGPLPQVDGVQTQQTAEVI

SEQ ID NO: 16123 - protein, 642 aa, Homo sapiens
MKIFCSRANPTTGSVEWLEEDEHYDYHQEIARSSYADMLHDKDRVFKPMADAAVKIVEKNGFSDKIKVINKHSTEVTVGPEGDMPCRANILVTELFDTELIGEGALPSYEHAHRHLVEENCEAVPHRATVYAQLVESGRMWSWNKLFPIHVQTSLGEQVIVPPVDVESCPGAPSVCDIQLNQVSPADFTVLSDVLPMFSIDFSKQVSSSAACHSRRFEPLTSGRAQVVLSWWDIEMDPEGKIKCTMAPFWAHSDPEEMQWRDHWMQCVYFLPQEEPVVQGSALYLVAHHDDYCVWYSLQRTSPEKNERVRQMRPVCDCQAHLLWNRPRFGEINDQDRTDRYVQALRTVLKPDSVCLCVSDGSLLSVLAHHLGVEQVFTVESSAASHKLLRKIFKANHLEDKINIIEKRPELLTNEDLQGRKVSLLLGEPFFTTSLLPWHNLYFWYVRTAVDQHLGPGAMVMPQAASLHAVVVEFRDLWRIRSPCGDCEGFDVHIMDDMIKRALDFRESREAEPHPLWEYPCRSLSEPWQILTFDFQQPVPLQPLCAEGTVELRRPGQSHAAVLWMEYHLTPECTLSTGLLEPADPEGGCCWNPHCKQAVYFFSPAPDPRALLGGPRTVSYAVEFHPDTGDIIMEFRHADTPD

SEQ ID NO: 16124 - protein, 363 aa, Homo sapiens
MERRRLLGGMALLLLQALPSPLSARAEPPQDKEACVGTNNQSYICDTGHCCGQSQCCNYYYELWWFWLVWTIIIILSCCCVCHHRRAKHRLQAQQRQHEINLIAYREAHNYSALPFYFRFLPNYLLPPYEEVVNRPPTPPPPYSAFQLQQQQLLPPQCGPAGGSPPGIDPTRGSQGAQSSPLSEPSRSSTRPPSIADPDPSDLPVDRAATKAPGMEPSGSVAGLGELDPGAFLDKDAECREELLKDDSSEHGAPDSKEKTPGRHRRFTGDSGIEVCVCNRGHHDDDLKEFNTLIDDALDGPLDFCDSCHVRPPGDEEEGLCQSSEEQAREPGHPHLPRPPACLLLNTINEQDSPNSQSSSSPS

SEQ ID NO: 16125 - protein, 1681 aa, Homo sapiens [sequence omitted]

SEQ ID NO: 16126 - protein, 339 aa, Homo sapiens
MGEMEQLRQEAEQLKKQIADARKACADVTLAELVSGLEVVGRVQMRTRRTLRGHLAKIYAMHWATDSKLLVSASQDGKLIVWDSYTTNKVHAIPLRSSWVMTCAYAPSGNFVACGGLDNMCSIYNLKSREGNVKVSRELSAHTGYLSCCRFLDDNNIVTSSGDTTALWDIETGQQKTVFVGHTGDCMSLAVSPDFNLFISGACDASAKLWDVREGTCRQTFTGHESDINAICFFPNGEAICTGSDDASCRLFDLRADQELICFSHESIICGITSVAFSLSGRLLFAGYDDFNCNVWDSMKSERVGILSGHDNRVSCLGVTADGMAVATGSWDSFLKIWN

SEQ ID NO: 16127 - protein, 85 aa, Homo sapiens
MVHLTPEEKTAVNALWGKVNVDAVGGEALGSSWAMCWCVCWPATLARNSPHKCRLPIRRWWLVWLMPWLTSTIEILDCFLITIRR

SEQ ID NO: 16128 - protein, 62 aa, Homo sapiens
MSHQPLSCLTEKEDSPSESTGNGPPHLAHPNLDTFTPEELLQQMKELLTENHQLKEPCGQVD

SEQ ID NO: 16129 - protein, 662 aa, Homo sapiens
MGPLRESKEHRVQHHDKEISRSRIPRLILRPHMPQQQHKVSPASESPFSEEESREFNPSSSGRSARTVSSNSFCSDDTGCPSSQSVSPVKTPSDAGNSPIGFCPGSDEGFTRKKCTIGMVGEGSIQSSRYKKESKSGLVKPGSEADFSSSSSTGSISAPEVHMSTAGSKRSSSSRNRGPHGRSNGASSHKPGSSPSSPREKDLLSMLCRNQLSPVNIHPSYAPSSPSSSNSGSYKGSDCSPIMRRSGRYMSCGENHGVRPPNPEQYLTPLQQKEVTVRHLKTKLKESERRLHERESEIVELKSQLARMREDWIEEECHRVEAQLALKEARKEIKQLKQVIETMRSSLADKDKGIQKYFVDINIQNKKLESLLQSMEMAHSGSLRDELCLDFPCDSPEKSLTLNPPLDTMADGLSLEEQVTGEGADRELLVGDSIANSTDLFDEIVTATTTESGDLELVHSTPGANVLELLPIVMGQEEGSVVVERAVQTDVVPYSPAISELIQSVLQKLQDPCPSSLASPDESEPDSMESFPESLSALVVDLTPRNPNSAILLSPVETPYANVDAEVHANRLMRELDFAACVEERLDGVIPLARGGVVRQYWSSSFLVDLLAVAAPVVPTVLWAFSTQRGGTDPVYNIGALLRGCCVVALHSLRRTAFRIKT

SEQ ID NO: 16130 - protein, 1015 aa, Homo sapiens
MASSPLPGPNDILLASPSSAFQPDTLSQPRPGHANLKPNQVGQVILYGIPIVSLVIDGQERLCLAQISNTLLKNFSYNEIHNRRVALGITCVQCTPVQLEILRRAGAMPISSRRCGMITKREAERLCKSFLGENRPPKLPDNFAFDVSHECAWGCRGSFIPARYNSSRAKCIKCSYCNMYFSPNKFIFHSHRTPDAKYTQPDAANFNSWRRHLKLTDKSPQDELVFAWEDVKAMFNGGSRKRALPQPGAHPACHPLSSVKAAAVAAAAAVAGGGGLLGPHLLGAPPPPPPPPPPLAELAGAPHAHHKRPRFDDDDDSLQEAAVVAAASLSAAAASLSVAAASGGAGTGGGGAGGGCVAGVGVGAGAGAGAGAGAKGPRSYPVIPVPSKGSFGGVLQKFPGCGGLFPHPYTFPAAAAAFSLCHKKEDAGAAAEALGGAGAGGAGAAPKAGLSGLFWPAGRKDAFYPPFCMFWPPRTPGGLPVPTYLQPPPQPPSALGCALGESPALLRQAFLDLAEPGGAAGSAEAAPPPGQPPQVVANGPGSGPPPPAGGAGSRDALFESPPGGSGGDCSAGSTPPADSVAAAGAGAAAAGSGPAGSRVPAPHHPHLLEGRKAGGGSYHHSSAFRPVGGKDDAESLAKLHGASAGAPHSAQTHPHHHHHPHHHHHHHHPPQPPSPLLLLPPQPDEPGSERHHPAPPPPPPPPPPPPLAQHPHHRGLLSPGGTSCCYPSEDSSEDEDDEEEEQEVDVEGHKPPEGEEEEEGRDPDDDEEEDEETEVLLGDPLVGGGRFLQGRGPSEKGSSRDRAPAVAGAFPLGLNSSRLLQEDGKLGDPGSDLPPPPPPPLAPQKASGGGSSSPGSPVHHPSLEEQPSYKDSQKTKENNQVIVSTKDDNSFSDKNKEHSFFITDSDASGGDFWRERSGEHTQETNSPHSLKKDVENMGKEELQKVLFEQIDLRRRLEQEFQVLKGNTSFPVFNNFQDQMKRELAYREEMVQQLQIIPYAASLIRKEKLGAHLSKS

SEQ ID NO: 16131 - protein, 1297 aa, Homo sapiens
MSSGDPAHLGLCLWLWLGATLGREQVQASGLLRLAVLPEDRLQMKWRESEGSGLGYLVQVKPMAGDSEQEVILTTKTPKATVGGLSPSKGYTLQIFELTGSGRFLLARREFVIEDLKSSSLDRSSQRPLGSGAPEPTPSHTGSPDPEQASEPQVAFTPSQDPRTPGGSEWRETGPQFRCLPPVPADMVFLVDGSWSIGHSHFQQVKDFLASVIAPFEIGPDKVQVGLTQYSGDAQTEWDLNSLSTKEQVLAAVRRLRYKGGNTFTGLALTHVLGQNLQPAAGLRPEAAKVVILVTDGKSQDDVHTAARVLKDLGVNVFAVGVKNADEAELRLLASPPRDITVHSVLDFLQLGALAGLLSRLICQRLQGGSPRQGPAAAPALDTLPAPTSLVLSQVTSSSIRLSWTPAPRHPLKYLIVWRASRGGTPREVVVEGPAASTELHNLASRTEYLVSVFPIYEGGVGEGLRGLVTTAPLPPPRALTLAAVTPRTVHLTWQPSAGATHYLVRCSPASPKGEEEEREVQVGRPEVLLDGLEPGRDYEVSVQSLRGPEGSEARGIRARTPTLAPPRHLGFSDVSHDAARVFWEGAPRPVRLVRVTYVSSEGGHSGQTEAPGNATSATLGPLSSSTTYTVRVTCLYPGGGSSTLTGRVTTKKAPSPSQLSMTELPGDAVQLAWVAAAPSGVLVYQITWTPLGEGKAHEISVPGNLGTAVLPGLGRHTEYDVTILAYYRDGARSDPVSLRYTPSTVSRSPPSNLALASETPDSLQVSWTPPLGRVLHYWLTYAPASGLGPEKSVSVPGARSHVTLPDLQAATKYRVLVSAIYAAGRSEAVSATGQTACPALRPDGSLPGFDLMVAFSLVEKAYASIRGVAMEPSAFGGTPTFTLFKDAQLTRRVSDVYPAPLPPEHTIVFLVRLLPETPREAFALWQMTAEDFQPLLGVLLDAGKKSLTYFHRDPRAALQEATFDPQEVRKIFFGSFHKVHVAVGRSKVRLYVDCRKVAERPLGEMGSPPAAGFVTLGRLAKARGPRSSSAAFQLQMLQIVCSDTWADEDRCCELPASRDGETCPAFVSACSCSSETPGPPGPQGPPGLPGRNGTPGEQGFPGPRGPPGVKGEKGDHGLPGLQGHPGHQGIPGRVGLQGPKGMRGLEGTAGLPGPPGPRGFQGMAGARGTSGERGPPGTVGPTGLPGPKGERGEKGEPQSLATLYQLVSQACESAIQTHVSKFDSFHENTRPPMPILEQKLEPGTEPLGSPGTRSKALVPGEWGRGGRHLEGRGEPGAVGQMGSPGQQGASTQGLWE

SEQ ID NO: 16132 - protein, 648 aa, Homo sapiens
MEKNGNNRKLRVCVATCNRADYSKLAPIMFGIKTEPEFFELDVVVLGSHLIDDYGNTYRMIEQDDFDINTRLHTIVRGEDEAAMVESVGLALVKLPDVLNRLKPDIMIVHGDRFDALALATSAALMNIRILHIEGGEVSGTIDDSIRHAITKLAHYHVCCTRSAEQHLISMCEDHDRILLAGCPSYDKLLSAKNKDYMSIIRMWLGDDVKSKDYIVALQHPVTTDIKHSIKMFELTLDALISFNKRTLVLFPNIDAGSKEMVRVMRKKGIEHHPNFRAVKHVPFDQFIQLVAHAGCMIGNSSCGVREVGAFGTPVINLGTRQIGRETGENVLHVRDADTQDKILQALHLQFGKQYPCSKIYGDGNAVPRILKFLKSIDLQEPLQKKFCFPPVKENISQDIDHILETLSALAVDLGGTNLRVAIVSMKGEIVKKYTQFNPKTYEERINLILQMCVEAAAEAVKLNCRILGVGIGGGIIHQHELIHGSSFCAAELGHLVVSLDGPDCSCGSHGCIEAYASGMALQREAKKLHDEDLLLVEGMSVPKDEAVGALHLIQAAKLGNAKAQSILRTAGTALGLGVVNILHTMNPSLVILSGVLASHYIHIVKDVIRQQALSSVQDVDVVVSDLVDPALLGAASMVLDYTTRRIY

SEQ ID NO: 16133 - protein, 380 aa, Homo sapiens
MRSPGGILLQALPRLLQHAALPGLAELPARWALPRGAGGDGPADRLPRGGGASAAAAAAAASGALLGAYLERHGPPEASELPEPGGALAGGPGSGGGGVVVGVAEVRNWRCCCLGSTCWCRSLVLVCVLAALCFASLALVRRYLHHLLLWVESLDSLLGVLLFVVGFIVVSFPCGWGYIVLNVAAGYLYGFVLGMGLMMVGVLIGTFIAHVVCKRLLTAWVAARIQSSEKLSAVIRVVEGGSGLKVVALARLTPIPFGLQNAVFSITDLSLPNYLMASSVGLLPTQLLNSYLGTTLRTMEDVIAEQSVSGYFVFCLQIIISIGLMFYVVHRAQVELNAAIVACEMELKSSLVKGNQPNTSGSSFYNKRTLTFSGGGINVV

SEQ ID NO: 16134 - protein, 269 aa, Homo sapiens
INVTVGGESCQHEFRGDMVVCPLPPSLQLGQDGAPLQVCVDALPAIDGLDSTTCVHGASFSDSEDESCVPLLRKESIQLRDLDSALLAEVKDVLIPHERVVTHSDRVIGKGHFGVVYHGEYIDQAQNRIQCAIKSLSRITEMQQVEAFLREGLLMRGLNHPNVLALIGIMLPPEGLPHVLLPYMCHGDLLQFIRSPQRNPTVKDLISFGLQVARGMEYLAEQKFVHRDLAARNCMLDESFTVKVADFGLARDILDREYYSVQQHRHARL

SEQ ID NO: 16135 - protein, 1246 aa, Homo sapiens
MEADGAGEQMRPLLTRVTSRGPDEEAVVDLGKTSSTVNTKFEKEELESHRAVYIGVHVPFSKESRRRHRHRGHKHHHRRRKDKESDKEDGRESPSYDTPSQRVQFILGTEDDDEEHIPHDLFTEMDELCYRDGEEYEWKETARWLKFEEDVEDGGDRWSKPYVATLSLHSLFELRSCILNGTVMLDMRASTLDEIADMVLDNMIASGQLDESIRENVREALLKRHHHQNEKRFTSRIPLVRSFADIGEGLSASRHSLRTGLSASNLSLRGESPLSLLLGHLLPSSRAGTPAGSRCTTPVPTPQNSPPSSPSISRLTSRSSQESQRQAPELLVSPASDDIPTVVIHPPEEDLEAALKGEEQKNEENVDLTPGILASPQSAPGNLDNSKSGEIKGNGSGGSRENSTVDFSKVDMNFMRKIPTGAEASNVLVGEVDFLERPIIAFVRLAPAVLLTGLTEVPVPTRFLFLLLGPAGKAPQYHEIGRSIATLMTDEIFHDVAYKAKDRNDLLSGIDEFLDQVTVLPPGEWDPSIRIEPPKSVPSQEKRKIPVFHNGSTPTLGETPKEAAHHAGPELQRTGRLFGGLILDIKRKAPFFLSDFKDALSLQCLASILFLYCACMSPVITFGGLLGEATEGRISAIESLFGASLTGIAYSLFAGQPLTILGSTGPVLVFEKILYKFCRDYQLSYLSLRTSIGLWTSFLCIVLVATDASSLVCYITRFTEEAFAALICIIFIYEALEKLFDLGETYAFNMHNNLDKLTSYSCVCTEPPNPSNETLAQWKKDNITAHNISWRNLTVSECKKLRGVFLGSACGHHGPYIPDVLFWCVILFFTTFFLSSFLKQFKTKRYFPTKVRSTISDFAVFLTIVIMVTIDYLVGVPSPKLHVPEKFEPTHPERGWIISPLGDNPWWTLLIAAIPALLCTILIFMDQQITAVIINRKEHKLKKGAGYHLDLLMVGVMLGVCSVMGLPWFVAATVLSISHVNSLKVESECSAPGEQPKFLGIREQRVTGLMIFILMGLSVFMTSVLKFIPMPVLYGVFLYMGVSSLKGIQLFDRIKLFGMPAKHQPDLIYLRYVPLWKVHIFTVIQLTCLVLLWVIKVSAAAVVFPMMVLALVFVRKLMDLCFTKRELSWLDDLMPESKKKKEDDKKKKEKEEAERMLQDDDDTVHLPFEGGSLLQIPVKALKYSVDPSIVNISDEMAKTAQWKALSMNTENAKVTRSNMSPDKPVSVKISFEDEPRKKYVDAETSL

SEQ ID NO: 16136 - protein, 891 aa, Homo sapiens
MVAPVLETSHVFCCPNRVRGVLNWSSGPRGLLAFGTSCSVVLYDPLKRVVVTNLNGHTARVNCIQWICKQDGSPSTELVSGGSDNQVIHWEIEDNQLLKAVHLQGHEGPVYAVHAVYQRRTSDPALCTLIVSAAADSAVRLWSKKGPEVMCLQTLNFGNGFALALCLSFLPNTDVTWKTGQVERGRAWKPPASLALCSRSCDSMVSCYASILCKALWKEKLHTFWHHNRISFLPSAFRPIPILACGNDDCRIHIFAQQNDQFQKVLSLCGHEDWIRGVEWAAFGRDLFLASCSQDCLIRIWKLYIKSTSLETQDDDNIRLKENTFTIENESVKIAFAVTLETVLAGHENWVNAVHWQPVFYKDGVLQQPVRLLSASMDKTMILWAPDEESGVWLEQVRVGEVGGNTLGFYDCQFNEDGSMIIAHAFHGALHLWKQNTVNPREWTPEIVISGHFDGVQDLVWDPEGEFIITVGTDQTTRLFAPWKRKDQSQVTWHEIARPQIHGYDLKCLAMINRFQFVSGADEKVLRVFSAPRNFVENFCAITGQSLNHVLCNQDSDLPEGATVPALGLSNKAVFQGDIASQPSDEEELLTSTGFEYQQVAFQPSILTEPPTEDHLLQNTLWPEVQKLYGHGYEIFCVTCNSSKTLLASACKAAKKEHAAIILWNTTSWKQVQNLVFHSLTVTQMAFSPNEKFLLAVSRDRTWSLWKKQDTISPEFEPVFSLFAFTNKITSVHSRIIWSCDWSPDSKYFFTGSRDKKVVVWGECDSTDDCIEHNIGPCSSVLDVGGAVTAVSVCPVLHPSQRYVVAVGLECGKICLYTWKKTDQVPEINDWTHCVETSQSQSHTLAIRKLCWKNCSGKTEQKEAEGAEWLHFASCGEDHTVKIHRVNKCAL

SEQ ID NO: 16137 - protein, 1212 aa, Homo sapiens
MGDMTNSDFYSKNQRNESSHGGEFGCTMEELRSLMELRGTEAVVKIKETYGDTEAICRRLKTSPVEGLPGTAPDLEKRKQIFGQNFIPPKKPKTFLQLVWEALQDVTLIILEIAAIISLGLSFYHPPGEGNEGCATAQGGAEDEGEAEAGWIEGAAILLSVICVVLVTAFNDWSKEKQFRGLQSRIEQEQKFTVVRAGQVVQIPVAEIVVGDIAQVKYGDLLPADGLFIQGNDLKIDESSLTGESDQVRKSVDKDPMLLSGTHVMEGSGRMLVTAVGVNSQTGIIFTLLGAGGEEEEKKDKKGKMQDGNVDASQSKAKQQDGAAAMEMQPLKSAEGGDADDRKKASMHKKEKSVLQGKLTKLAVQIGKAGLVMSAITVIILVLYFTVDTFVVNKKPWLPECTPVYVQYFVKFFIIGVTVLVVAVPEGLPLAVTISLAYSVKKMMKDNNLVRHLDACETMGNATAICSDKTGTLTTNRMTVVQAYVGDVHYKEIPDPSSINTKTMELLINAIAINSAYTTKILPPEKEGALPRQVGNKTECGLLGFVLDLKQDYEPVRSQMPEEKLYKVYTFNSVRKSMSTVIKLPDESFRMYSKGASEIVLKKCCKILNGAGEPRVFRPRDRDEMVKKVIEPMACDGLRTICVAYRDFPSSPEPDWDNENDILNELTCICVVGIEDPVRPEVPEAIRKCQRAGITVRMVTGDNINTARAIAIKCGIIHPGEDFLCLEGKEFNRRIRNEKGEIEQERIDKIWPKLRVLARSSPTDKHTLVKGIIDSTHTEQRQVVAVTGDGTNDGPALKKADVGFAMGIAGTDVAKEASDIILTDDNFSSIVKAVMWGRNVYDSISKFLQFQLTVNVVAVIVAFTGACITQDSPLKAVQMLWVNLIMDTFASLALATEPPTETLLLRKPYGRNKPLISRTMMKNILGHAVYQLALIFTLLFVGEKMFQIDSGRNAPLHSPPSEHYTIIFNTFVMMQLFNEINARKIHGERNVFDGIFRNPIFCTIVLGTFAIQIVIVQFGGKPFSCSPLQLDQWMWCIFIGLGELVWGQVIATIPTSRLKFLKEAGRLTQKEEIPEEELNEDVEEIDHAERELRRGQILWFRGLNRIQTQIRVVKAFRSSLYEGLEKPESRTSIHNFMAHPEFRIEDSQPHIPLIDDTDLEEDAALKQNSSPPSSLNKNNSAIDSGINLTTDTSKSATSSSPGSPIHSLETSL

SEQ ID NO: 16138 - protein, 1236 aa, Homo sapiens
MGRSGKLPSGVSAKLKRWKKGHSSDSNPAICRHRQAARSRFFSRPSGRSDLTVDAVKLHNELQSGSLRLGKSEAPETPMEEEAELVLTEKSSGTFLSGLSDCTNVTFSKVQRFWESNSAAHKEICAVLAAVTEVIRSQGGKETETEYFAALVLSCLATLLRKQDLEAWGYPVTLQVYHGLLSFTVHPKPKIRKAAQHGVCSVLKGSEFMFEKAPAHHPAAISTAKFCIQEIEKSGGSKEATTTLHMLTLLKDLLPCFPEGLVKSCSETLLRVMTLSHVLVTACAMQAFHSLFHARPGLSTLSAELNAQIITALYDYVPSENDLQPLLAWLKVMEKAHINLVRLQWDLGLGHLPRFFGTAVTCLLSPHSQVLTAATQSLKEILKECVAPHMADIGSVTSSASGPAQSVAKMFRAVEEGLTYKFHAAWSSVLQLLCVFFEACGRQAHPVMRKCLQSLCDLRLSPHFPHTAALDQAVGAAVTSMGPEVVLQAVPLEIDGSEETLDFPRSWLLPVIRDHVQETRLGFFTTYFLPLANTLKSKAMDLAQAGSTVESKIYDTLQWQMWTLLPGFCTRPTDVAISFKGLARTLGMAISERPDLRVTVCQALRTLITKGCQAEADRAEVSRFAKNFLPILFNLYGQPVAAGDTPAPRRAVLETIRTYLTITDTQLVNSLLEKASEKVLDPASSDFTRLSVLDLVVALAPCADEAAISKLYSTIRPYLESKAHGVQKKAYRVLEEVCASPQGPGALFVQSHLEDLKKTLLDSLRSTSSPAKRPRLKCLLHIVRKLSAEHKEFITALIPEVILCTKEVSVGARKNAFALLVEMGHAFLRFGSNQEEALQCYLVLIYPGLVGAVTMVSCSILALTHLLFEFKGLMGTSTVEQLLENVCLLLASRTRDVVKSALGFIKVAVTVMDVAHLAKHVQLVMEAIGKLSDDMRRHFRMKLRNLFTKFIRKFGFELVKRLLPEEYHRVLVNIRKAEARAKRHRALSQAAVEEEEEEEEEEEPAQGKGDSIEEILADSEDEEDNEEEERSRGKEQRKLARQRSRAWLKEGGGDEPLNFLDPKVAQRVLATQPGPGRGRKKDHGFKVSADGRLIIREEADGNKMEEEEGAKGEDEEMADPMEDVIIRNKKHQKLKHQKEAEEEELEIPPQYQAGGSGIHRPVAKKAMPGAEYKAKKAKGDVKKKGRPDPYAYIPLNRSKLNRRKKMKLQGQFKGLVKAARRGSQVGHKNRRKDRRP

SEQ ID NO: 16139 - protein, 128 aa, Homo sapiens
MMGSPVSHLLAGFCVWVVLGWVGGSVPNLGPAEQEQNHYLAQLFGLYGENGTLTAGGLARLLHSLGLGRVQGLRLGQHGPLTGRAASPAADNSTHRPQNPELSVDVWAGMPLGPSGWGDLEESKAPHL

SEQ ID NO: 16140 - protein, 4410 aa, Homo sapiens
MRLAEERAALAAENADGEPGADRRLRLLGTYVAMSLRPAAGAWERCAGSAEAEQLLQAFLGRDAAEGPRPLLVVRPGPRGLAIRPGLEVGPESGLAGAKALFFLRTGPEPPGPDSFRGAVVCGDLPAAPLEHLAALFSEVVLPVLANEKNRLNWPHMICEDVRRHAHSLQCDLSVILEQVKGKTLLPLPAGSEKMEFADSKSETVLDSIDKSVIYAIESAVIKWSYQVQVVLKRESSQPLLQGENPTPKVELEFWKSRYEDLKYIYNQLRTITVRGMAKLLDKLQSSYFPAFKAMYRDVVAALAEAQDIHVHLIPLQRHLEALENAEFPEVKPQLRPLLHVVCLIWATCKSYRSPGRLTVLLQEICNLLIQQASNYLSPEDLLRSEVEESQRKLQVVSDTLSFFKQEFQDRRENLHTYFKENQEVKEWDFQSSLVFVRLDGFLGQLHVVEGLLKTALDFHKLGKVEFSGVRGNALSQQVQQMHEEFQEMYRLLSGSSSDCLYLQSTDFENDVSEFNQKVEDLDRRLGTIFIQAFDDAPGLEHAFKLLDIAGNLLERPLVARDTSDKYLVLIQMFNKDLDAVRMIYSQHVQEEAELGFSPVHKNMPTVAGGLRWAQELRQRIQGPFSNFGRITHPCMESAEGKRMQQKYEDMLSLLEKYETRLYEDWCRTVSEKSQYNLSQPLLKRDPETKEITINFNPQLISVLKEMSYLEPREMKHMPETAAAMFSSRDFYRQLVANLELMANWYNKVMKTLLEVEFPLVEEELQNIDLRLRAAEETLNWKTEGICDYVTEITSSIHDLEQRIQKTKDNVEEIQNIMKTWVTPIFKTKDGKRESLLSLDDRHDRMEKYYNLIKESGLKIHALVQENLGLFSADPTSNIWKTYVNSIDNLLLNGFFLAIECSLKYLLENTECKAGLTPIFEAQLSLAIPELVFYPSLESGVKGGFCDIVEGLITSIFRIPSLVPRLSPQNGSPHYQVDLDGIPDLANMRRTLMERVQRMMGLCCGYQSTFSQYSYLYVEDRKEVLGQFLLYGHILTPEEIEDHVEDGIPENPPLLSQFKVQIDSYETLYEEVCRLEPIKVFDGWMKIDIRPFKASLLNIIKRWSLLFKQHLVDHVTHSLANLDAFIKKSESGLLKKVEKGDFQGLVEIMGHLMAVKERQSNTDEMFEPLKQTIELLKTYEQELPETVFKQLEELPEKWNNIKKVAITVKQQVAPLQANEVTLLRQRCTAFDAEQQQFWEQFHKEAPFRFDSIHPHQMLDARHIEIQQMESTMASISESASLFEVNVPDYKQLRQCRKEVCQLKELWDTIGMVTSSIHAWETTPWRNINVEAMELECKQFARHIRNLDKEVRAWDAFTGLESTVWNTLSSLRAVAELQNPAIRERHWRQLMQATGVSFTMDQDTTLAHLLQLQLHHYEDEVRGIVDKAAKEMGMEKTLKELQTTWAGMEFQYEPHPRTNVPLLCSDEDLIEVLEDNQVQLQNLVMSKYVAFFLEEVSGWQKKLSTVDAVISIWFEVQRTWTHLESIFTGSEDIRAQLPQDSKRFEGIDIDFKELAYDAQKIPNVVQTTNKPGLYEKLEDIQGRLCLCEKALAEYLDTKRLAFPRFYFLSSSDLLDILSNGTAPQQVQRHLSKLFDNMAKMRFQLDASGEPTKTSLGMYSKEEEYVAFSEPCDCSGQVEIWLNHVLGHMKATVRHEMTEGVTAYEEKPREQWLFDHPAQVALTCTQIWWTTEVGMAFARLEEGYESAMKDYYKKQVAQLKTLITMLIGQLSKGDRQKIMTICTIDVHARDVVAKMIAQKVDNAQAFLWLSQLRHRWDDEVKHCFANICDAQFLYSYEYLGNTPRLVITPLTDRCYITLTQSLHLTMSGAPAGPAGTGKTETTKDLGRALGILVYVFNCSEQMDYKSCGNIYKGLAQTGAWGCFDEFNRISVEVLSVVAVQVKSIQDAIRDKKQWFSFLGEEISLNPSVGIFITMNPGYAGRTELPENLKSLFRPCAMVVPDFELICEIMLVAEGFIEAQSLARKFITLYQLCKELLSKQDHYDWGLRAIKSVLVVAGSLKRGDPDRPEDQVLMRSLRDFNIPKIVTDDMPIFMGLIGDLFPALDVPRRRDPNFEALVRKAIVDLKLQAEDNFVLKVVQLEELLAVRHSVFVVGGAGTGKSQVLRSLHKTYQIMKRRPVWTDLNPKAVTNDELFGIINPATGEWKDGLFSSIMRELANITHDGPKWILLDGDIDPMWIESLNTVMDDNKVLTLASNERIPLNPTMKLLFEISHLRTATPATVSRAGILYINPADLGWNPPVSSWIEKREIQTERANLTILFDKYLPTCLDTLRTRFKKIIPIPEQSMVQMVCHLLECLLTTEDIPADCPKEIYEHYFVFAAIWAFGGAMVQDQLVDYRAEFSKWWLTEFKTVKFPSQGTIFDYYIDPETKKFEPWSKLVPQFEFDPEMPLQACLVHTSETIRVCYFMERLMARQRPVMLVGTAGTGKSVLVGAKLASLDPEAYLVKNVPFNYYTTSAMLQAVLEKPLEKKAGRNYGPPGNKKLIYFIDDMNMPEVDAYGTVQPHTIIRQHLDYGHWYDRSKLSLKEITNVQYVSCMNPTAGSFTINPRLQRHFSVFVLSFPGADALSSIYSIILTQHLKLGNFPASLQKSIPPLIDLALAFHQKIATTFLPTGIKFHYIFNLRDFANIFQGILFSSVECVKSTWDLIRLYLHESNRVYRDKMVEEKDFDLFDKIQTEVLKKTFDDIEDPVEQTQSPNLYCHFANGIGEPKYMPVQSWELLTQTLVEALENHNEVNTVMDLVLFEDAMRHVCHINRILESPRGNALLVGVGGSGKQSLTRLAAFISSMDVFQITLRKGYQIQDFKMDLASLCLKAGVKNLNTVFLMTDAQVADERFLVLINDLLASGEIPDLYSDDEVENIISNVRNEVKSQGLVDNRENCWKFFIDRIRRQLKVTLCFSPVGNKLRVRSRKFPAIVNCTAIHWFHEWPQQALESVSLRFLQNTEGIEPTVKQSISKFMAFVHTSVNQTSQSYLSNEQRYNYTTPKSFLEFIRLYQSLLHRHRKELKCKTERLENGLLKLHSTSAQVDDLKAKLAAQEVELKQKNEDADKLIQVVGVETDKVSREKAMADEEEQKVAVIMLEVKQKQKDCEEDLAKAEPALTAAQAALNTLNKTNLTELKSFGSPPLAVSNVSAAVMVLMAPRGRVPKDRSWKAAKVTMAKVDGFLDSLINFNKENIHENCLKAIRPYLQDPEFNPEFVATKSYAAAGLCSWVINIVRFYEVFCDVEPKRQALNKATADLTAAQEKLAAIKAKIAHLNENLAKLTARFEKATADKLKCQQEAEVTAVTISLANRLVGGLASENVRWADAVQNFKQQERTLCGDILLITAFISYLGFFTKKYRQSLLDRTWRPYLSQLKTPIPVTPALDPLRMLMDDADVAAWQNEGLPADRMSVENATILINCERWPLMVDPQLQGIKWIKNKYGEDLRVTQIGQKGYLQIIEQALEAGAVVLIENLEESIDPVLGPLLGREVIKKGRFIKIGDKECEYNPKFRLILHTKLANPHYQPELQAQATLINFTVTRDGLEDQLLAAVVSMERPDLEQLKSDLTKQQNGFKITLKTLEDSLLSRLSSASGNFLGETVLVENLEITKQTAAEVEKKVQEAKVTEVKINEAREHYRPAAARASLLYFIMNDLSKIHPMYQFSLKAFSIVFQKAVERAAPDESLRERVANLIDSITFSVYQYTIRGLFECDKLTYLAQLTFQILLMNREVNAVELDFLLRSPVQTGTASPVEFLSHQAWGAVKVLSSMEEFSNLDRDIEGSAKSWKKFVESECPEKEKLPQEWKNKTALQRLCMLRAMRPDRMTYALRDFVEEKLGSKYVVGRALDFATSFEESGPATPMFFILSPGVDPLKDVESQGRKLGYTFNNQNFHNVSLGQGQEVVAEAALDLAAKKGHWVILQDTLEMCSRETEFKSILFALCYFHAVVAERRKFGPQGWNRSYPFNTGDLTISVNVLYNFLEANAKVPYDDLRYLFGEIMYGGHITDDWDRRLCRTYLGEFIRPEMLEGELSLAPGFPLPGNMDYNGYHQYIDAELPPESPYLYGLHPNAEIGFLTQTSEKLFRTVLELQPRDSQARDGAGATREEKVKALLEEILERVTDEFNIPELMAKVEERTPYIVVAFQECGRMNILTREIQRSLRELELGLKGELTMTSHMENLQNALYFDMVPESWARRAYPSTAGLAAWFPDLLNRIKELEAWTGDFTMPSTVWLTGFFNPQSFLTAIMQSTARKNEWPLDQMALQCDMTKKNREEFRSPPREGAYIHGLFMEGACWDTQAGIITEAKLKDLTPPMPVMFIKAIPADKQDCRSVYSCPVYKTSQRGPTYVWTFNLKTKENPSKWVLAGVALLLQI

SEQ ID NO: 16141 - protein, 256 aa, Homo sapiens
MNVPGGGAAAVMMTGYNNGRCPRNSLYSDCIIEEKTVVLQKKDNEGFGFVLRGAKADTPIEEFTPTPAFPALQYLESVDEGGVAWQAGLRTGDFLIEVNNENVVKVGHRQVVNMIRQGGNHLVLKVVTVTRNLDPDDTARKKAPPPPKRAPTTALTLRSKSMTSELEELVDKASVRKKKDKPEEIVPASKPSRAAENMAVEPRVATIKQRPSSRCFPAGSDMNSVYERQGIAVMTPTVPGSPKAPFLGIPREARRS

SEQ ID NO: 16142 - protein, 601 aa, Homo sapiens
MVTCTQNMKAALKSLLYHSRNLGYLQNNKITSISIYAFRGLNSLTKLYLSHNRITFLKPGVFEDLHRLEWLIIEDNHLSRISPPTFYGLNSLILLVLMNNVLTRLPDKPLCQHMPRLHWLVMRKNKINHLNENTFAPLQKLDELDLGSNKIENLPPLIFKDLKELSQLNLSYNPIQKIQANQFDYLVKLKSLSLEGIEISNIQQRMFRPLMNLSHIYFKKFQYCGYAPHVRSCKPNTDGISSLENLLASIIQRVFVWVVSAVTCFGNIFVICMRPYIRSENKLYAMSIISLCCADCLMGIYLFVIGGFDLKFRGEYNKHAQLWMESTHCQLVGSLAILSTEVSVLLLTFLTLEKYICIVYPFRCVRPGKCRTITVLILIWITGFIVAFIPLSNKEFFKNYYGTNGVCFPLHSEDTESIGAQIYSVAIFLGINLAAFIIIVFSYGSMFYSVHQSAITATEIRNQVKKEMILAKRFFFIVFTDALCWIPIFVVKFLSLLQVEIPGTITSWVVIFILPINSALNPILYTLTTRPFKEMIHRFWYNYRQRKSMDSKGQKTYAPSFIWVEMWPLQEMPPELMKPDLFTYPCEMSLISQSTRLNSYS

SEQ ID NO: 16143 - protein, 563 aa, Homo sapiens
MARRLLPAHVQESVTFRDVAVFFSQDEWLHLDSAQRALYREVMLENYSILVSLGILFSKPKVISQLEQGEDPWMVESGVPQGAHLGWESLFGTIVSKEENQEVMKKLIIDGTFDFKLEKTYINEDKLEKQQGKKNRLFSKVLVTIKKVYMKERSFKGVEFGKNLGLKSSLIRKPRIVSRGRRPRSQQYSVLFKQLGVNTVRKCYKCNICGKIFLHSSSLSKHQRIHTGEKLYKCKECRKAFSQSSSLTQHLRVHTGEKPYICSECGKAFSFTTSLIGHQRMHTGERPYKCKECGKTFKGSSSLNNHQRIHTGEKPYKCNECGRAFSQCSSLIQHHRIHTGEKPYECTQCGKAFTSISRLSRHHRIHTGEKPFHCNECGKVFSYHSALIIHQRIHTGEKPYACKECGKAFSQSSALIQHQRIHTGEKPYKCNECGKAFSWISRLNIHHRIHTGEKPYNCKECGKAFSSHSGVNTHRKIHTGEKPYKCNDCEKAFNQSSALIQHQRIHTGEKPYNCKVCGKAFRQSSSLMTHMRIHTGEKPYKCKECGKAFSQSSSLTNHQRTHN

SEQ ID NO: 16144 - protein, 155 aa, Homo sapiens
MNWHMIISGLIVVVLKVVGMTLFLLYFPQIFNKSNDGFTTTRSYGTVCPKDWEFYQARCFFLSTSESSWNESRDFCKGKGSTLAIVNTPEKLKFLQDITDAEKYFIGLIYHREEKRWRWINNSVFNGKYVNMPQFPGDLGLLQKTKPEIAGFTLE

SEQ ID NO: 16145 - protein, 467 aa, Homo sapiens
MASLLQSDRVLYLVQGEKKVRAPLSQLYFCRYCSELRSLECVSHEVDSHYCPSCLENMPSAEAKLKKNRCANCFDCPGCMHTLSTRATSISTQLPDDPAKTTMKKAYYLACGFCRWTSRDVGMADKSVASGGWQEPENPHTQRMNKLIEYYQQLAQKEKVERDRKKLARRRNYMPLAFSQHTIHVVDKYGLGTRLQRPRAGASISTLAGLSLKEGEDQKEIKIEPAQAVDEVEPLPEDYYTRPVNLTEVTTLQQRLLQPDFQPVCASQLYPRHKHLLIKRSLRCRKCEHNLSKPEFNPTSIKFKIQLVAVNYIPEVRIMSIPNLRYMKESQVLLTLTNPVENLTHVTLFECEEGDPDDINSTAKVVVPPKELVLAGKDAAAEYDELAEPQDFQDDPDIIAFRKANKVGIFIKVTPQREEGEVTVCFKMKHDFKNLAAPIRPIEESDQGTEVIWLTQHVELSLGPLLP

SEQ ID NO: 16146 - protein, 1468 aa, Homo sapiens
MTRMSCPWGSYQWEPGACPAAPRGIGGGDMAGGIPDVRGLQEAALGAGRSQEEARLVEEAQTPVMLPQDSGQRVEEVPGDLMAKRMSLILHVQKLPWDHVPCLRRTRQNLYQDVGGHAHGSGLGGAKRGAARSALRRPLPPATCRPAGIVSGPSPRLDSNPTGAHLIKQTRPLTVEWTKDTPVPEPMELRSDASHKENVSPKPAALPKPGKRLKQRRFRRSLGIGLSGRHDQWVPGCQVERGGPAATPSPGAVLDQEPCRVQTNLASPGPRLGLALKDTTGQLVNSSFWQQSNLQSLARRRQGKAREFAIQQSNLSINETSSPHLCPEPGGSSGPHKLPWGPLLSQEPLARPSSCLRQSGLPAPGTPSGDFRPTEAFAPLDGHTQPGLRSWGGLGSWRSRLVGEPLTLEDLAVPSQNQTQAPSRAAVHQLLASVHCLAQEAARLRCQAPQEPPAWGVSPKQKGEEGAPRERVHREEERTAFHLSDTVPASSASKNKAQNITAPESEAICWQLLSRCFRSWRHLVKRQREPAAAAVALGRWQLLRKCLQALWLREAQLEAAWGQYTKVLLVRSFREVSGLQVGPGGRVKQCPGSLREEEIAQRLLSHPRQRTDSRHERVQILQALQLAVFFLWCQQKKRARQERETLRKATRATQRTGSFPQAWHSTAAGVAWVAPLSPQHQRAWLCRCFGAWQQFVQRGSRYRDHLADRRTGTLRKCLEQWVRMKQLRESDGAKVTQLSLCRQKAGREAVYTAGPGACGLGAVGQAQGQQEQGRGSLQDACWTLALCWALLLWKMRLFQRQWANSFFQGLQQRMLQRSLRWWHLRALGPDATSSCTKTPSALEPLSSSTLQDSLEKVPRAPTLPDTLQGSLLWAAGQRQQGQCLLLWQARAQQFQGTARWYQHTRQRRIFLSWSRWATAQWAWRELASHRAWDRTCRAVLGLWRQRLLQSRLVEWWAQERGWRLARDALCHWHSCWQGQQFLHEKCQTWVQVHLQGLQKVVFRSWQQAAAHQRCTVTRPEQLLLQSYFQAWCEVVRDTGVLRAQHQAFQDGLRRRALGAVFATWREAQEVAAGAQEQRVAQASLARWRSCGQQGQEDGQQKKARAPQAFPAWPVAPGMHHEAQQQAGESAGAQAAQCWTWCWALWVHESCRGQVSRAHASWKPRAWVLEASVQSAVRGGVQRAILTQLRPAELRRFLRTVQLRVRLGLPGAGKTRSCWTQATELVPPAPSLQCSLGGRRKPRGTAWAQRCREHSLCPAFQLWPQWPGQSSWVPGLPLWTRDQGPRAHSSPEPRACKAQSKAHKRRLRILEKQAQAHGSALLLALKGHDALGHQEEVPAAPVPRGTASRAAGFPAGQVPGSGMAALGGCPRGRAAGADPAQGVAPEMGLADVVAADPATASGSAVTAAGRWAFKKWHQRLAARSPRRGAASSPRPWSKPGPKGPESGQEAARAPRGWGLGAEHGAQLQL

SEQ ID NO: 16147 - protein, 121 aa, Homo sapiens
MTPNSMTENGLTAWDKPKHCPDREHDWKLVGMSEACLHRKSHSERRSTLKNEQSSPHLIQTTWTSSIFHLDHDDVNDQSVSSAQTFQTEEKKCKGYIPSYLDKDELCVVCGDKATGYHYRC

SEQ ID NO: 16148 - protein, 806 aa, Homo sapiens
MGAPACALALCVAVAIVAGASSESLGTEQRVVGRAAEVPGPEPGQQEQLVFGSGDAVELSCPPPGGGPMGPTVWVKDGTGLVPSERVLVGPQRLQVLNASHEDSGAYSCRQRLTQRVLCHFSVRVTDAPSSGDDEDGEDEAEDTGVDTGAPYWTRPERMDKKLLAVPAANTVRFRCPAAGNPTPSISWLKNGREFRGEHRIGGIKLRHQQWSLVMESVVPSDRGNYTCVVENKFGSIRQTYTLDVLERSPHRPILQAGLPANQTAVLGSDVEFHCKVYSDAQPHIQWLKHVEVNGSKVGPDGTPYVTVLKTAGANTTDKELEVLSLHNVTFEDAGEYTCLAGNSIGFSHHSAWLVVLPAEEELVEADEAGSVYAGILSYGVGFFLFILVVAAVTLCRLRSPPKKGLGSPTVHKISRFPLKRQVSLESNASMSSNTPLVRIARLSSGEGPTLANVSELELPADPKWELSRARLTLGKPLGEGCFGQVVMAEAIGIDKDRAAKPVTVAVKMLKDDATDKDLSDLVSEMEMMKMIGKHKNIINLLGACTQGGPLYVLVEYAAKGNLREFLRARRPPGLDYSFDTCKPPEEQLTFKDLVSCAYQVARGMEYLASQKCIHRDLAARNVLVTEDNVMKIADFGLARDVHNLDYYKKTTNGRLPVKWMAPEALFDRVYTHQSDVWSFGVLLWEIFTLGGSPYPGIPVEELFKLLKEGHRMDKPANCTHDLYMIMRECWHAAPSQRPTFKQLVEDLDRVLTVTSTDEYLDLSAPFEQYSPGGQDTPSSSSSGDDSVFAHDLLPPAPPSSGGSRT

SEQ ID NO: 16149 - protein, 821 aa, Homo sapiens
MGPWSRSLSALLLLLQVSSWLCQEPEPCHPGFDAESYTFTVPRRHLERGRVLGRVNFEDCTGRQRTAYFSLDTRFKVGTDGVITVKRPLRFHNPQIHFLVYAWDSTYRKFSTKVTLNTVGHHHRPPPHQASVSGIQAELLTFPNSSPGLRRQKRDWVIPPISCPENEKGPFPKNLVQIKSNKDKEGKVFYSITGQGADTPPVGVFIIERETGWLKVTEPLDRERIATYTLFSHAVSSNGNAVEDPMEILITVTDQNDNKPEFTQEVFKGSVMEGALPGTSVMEVTATDADDDVNTYNAAIAYTILSQDPELPDKNMFTINRNTGVISVVTTGLDRESFPTYTLVVQAADLQGEGLSTTATAVITVTDTNDNPPIFNPTTGLDFEAKQQYILHVAVTNVVPFEVSLTTSTATVTVDVLDVNEAPIFVPPEKRVEVSEDFGVGQEITSYTAQEPDTFMEQKITYRIWRDTANWLEINPDTGAISTRAELDREDFEHVKNSTYTALIIATDNGSPVATGTGTLLLILSDVNDNAPIPEPRTIFFCERNPKPQVINIIDADLPPNTSPFTAELTHGASANWTIQYNDPTQESIILKPKMALEVGDYKINLKLMDNQNKDQVTTLEVSVCDCEGAAGVCRKAQPVEAGLQIPAILGILGGILALLILILLLLLFLRRRAVVKEPLLPPEDDTRDNVYYYDEEGGGEEDQDFDLSQLHRGLDARPEVTRNDVAPTLMSVPRYLPRPANPDEIGNFIDENLKAADTDPTAPPYDSLLVFDYEGSGSEAASLSSLNSSESDKDQDYDYLNEWGNRFKKLADMYGGGEDD

SEQ ID NO: 16150 - protein, 325 aa, Homo sapiens
MFANLKYVSLGILVFQTTSLVLTMRYSRTLKEEGPRYLSSTAVVVAELLKIMACILLVYKDSKCSLRALNRVLHDEILNKPMETLKLAIPSGIYTLQNNLLYVALSNLDAATYQVTYQLKILTTALFSVSMLSKKLGVYQWLSLVILMTGVAFVQWPSDSQLDSKELSAGSQFVGLMAVLTACFSSGFAGVYFEKILKETKQSVWIRNIQLGFFGSIFGLMGVYIYDGELVSKNGFFQGYNRLTWIVVVLQALGGLVIAAVIKYADNILKGFATSLSIILSTLISYFWLQDFVPTSVFFLGAILVITATFLYGYDPKPAGNPTKA

SEQ ID NO: 16151 - protein, 725 aa, Homo sapiens
MGTRKKVHAFVRVKPTDDFAHEMIRYGDDKRSIDIHLKKDIRRGVVNNQQTDWSFKLDGVLHDASQDLVYETVAKDVVSQALDGYNGTIMCYGQTGAGKTYTMMGATENYKHRGILPRALQQVFRMIEERPTHAITVRVSYLEIYNESLFDLLSTLPYVGPSVTPMTIVENPQGVFIKGLSVHLTSQEEDAFSLLFEGETNRIIASHTMNKNSSRSHCIFTIYLEAHSRTLSEEKYITSKINLVDLAGSERLGKSGSEGQVLKEATYINKSLSFLEQAIIALGDQKRDHIPFRQCKLTHALKDSLGGNCNMVLVTNIYGEAAQLEETLSSLRFASRMKLVTTEPAINEKYDAERMVKNLEKELALLKQELAIHDSLTNRTFVTYDPMDEIQIAEINSQVRRYLEGTLDEIDIISLRQIKEVFNQFRVVLSQQEQEVESTLRRKYTLIDRNDFAAISAIQKAGLVDVDGHLVGEPEGQNFGLGVAPFSTKPGKKAKSKKTFKEPLRPDTPPSKPVAFEEFKNEQGSEINRIFKENKSILNERRKRASETTQHINAIKREIDVTKEALNFQKSLREKQGKYENKGLMIIDEEEFLLILKLKDLKKQYRSEYQDLRDLRAEIQYCQHLVDQCRHRLLMEFDIWYNESFVIPEDMQMALKPGGSIRPGMVPVNRIVSLGEDDQDKFSQLQQRVLPEGPDSISFYNAKVKIEQKHNYLKTMMGLQQAHRK

SEQ ID NO: 16152 - protein, 369 aa, Homo sapiens
MEFLERTYLVNDKAAKMYAFTLESVELQQKPVNKDQCPRERPEELESGGMYHCHSGSKPTEKGANEYAYAKWKLCSASAICFIFMIAEVVGGHIAGSLAVVTDAAHLLIDLTSFLLSLFSLWLSSKPPSKRLTFGWHRAEILGALLSILCIWVVTGVLVYLACERLLYPDYQIQATVMIIVSSCAVAANIVLTVVLHQRCLGHNHKEVQANASVRAAFVHALGDLFQSISVLISALIIYFKPEYKIADPICTFIFSILVLASTITILKDFSILLMEGVPKSLNYSGVKELILAVDGVLSVHSLHIWSLTMNQVILSAHVATAASRDSQVVRREIAKALSKSFTMHSLTIQMESPVDQDPDCLFCEDPCD

SEQ ID NO: 16153 - protein, 2265 aa, Homo sapiens
MLRGPGPGLLLLAVQCLGTAVPSTGASKSKRQAQQMVQPQSPVAVSQSKPGCYDNGKHYQINQQWERTYLGNALVCTCYGGSRGFNCESKPEAEETCFDKYTGNTYRVGDTYERPKDSMIWDCTCIGAGRGRISCTIANRCHEGGQSYKIGDTWRRPHETGGYMLECVCLGNGKGEWTCKPIAEKCFDHAAGTSYVVGETWEKPYQGWMMVDCTCLGEGSGRITCTSRNRCNDQDTRTSYRIGDTWSKKDNRGNLLQCICTGNGRGEWKCERHTSVQTTSSGSGPFTDVRAAVYQPQPHPQPPPYGHCVTDSGVVYSVGMQWLKTQGNKQMLCTCLGNGVSCQETAVTQTYGGNSNGEPCVLPFTYNGRTFYSCTTEGRQDGHLWCSTTSNYEQDQKYSFCTDHTVLVQTRGGNSNGALCHFPFLYNNHNYTDCTSEGRRDNMKWCGTTQNYDADQKFGFCPMAAHEEICTTNEGVMYRIGDQWDKQHDMGHMMRCTCVGNGRGEWTCIAYSQLRDQCIVDDITYNVNDTFHKRHEEGHMLNCTCFGQGRGRWKCDPVDQCQDSETGTFYQIGDSWEKYVHGVRYQCYCYGRGIGEWHCQPLQTYPSSSGPVEVFITETPSQPNSHPIQWNAPQPSHISKYILRWRPKNSVGRWKEATIPGHLNSYTIKGLKPGVVYEGQLISIQQYGHQEVTRFDFTTTSTSTPVTSNTVTGETTPFSPLVATSESVTEITASSFVVSWVSASDTVSGFRVEYELSEEGDEPQYLDLPSTATSVNIPDLLPGRKYIVNVYQISEDGEQSLILSTSQTTAPDAPPDTTVDQVDDTSIVVRWSRPQAPITGYRIVYSPSVEGSSTELNLPETANSVTLSDLQPGVQYNITIYAVEENQESTPVVIQQETTGTPRSDTVPSPRDLQFVEVTDVKVTIMWTPPESAVTGYRVDVIPVNLPGEHGQRLPISRNTFAEVTGLSPGVTYYFKVFAVSHGRESKPLTAQQTTKLDAPTNLQFVNETDSTVLVRWTPPRAQITGYRLTVGLTRRGQPRQYNVGPSVSKYPLRNLQPASEYTVSLVAIKGNQESPKATGVFTTLQPGSSIPPYNTEVTETTIVITWTPAPRIGFKLGVRPSQGGEAPREVTSDSGSIVVSGLTPGVEYVYTIQVLRDGQERDAPIVNKVVTPLSPPTNLHLEANPDTGVLTVSWERSTTPDITGYRITTTPTNGQQGNSLEEVVHADQSSCTFDNLSPGLEYNVSVYTVKDDKESVPISDTIIPAVPPPTDLRFTNIGPDTMRVTWAPPPSIDLTNFLVRYSPVKNEEDVAELSISPSDNAVVLTNLLPGTEYVVSVSSVYEQHESTPLRGRQKTGLDSPTGIDFSDITANSFTVHWIAPRATITGYRIRHHPEHFSGRPREDRVPHSRNSITLTNLTPGTEYVVSIVALNGREESPLLIGQQSTVSDVPRDLEVVAATPTSLLISWDAPAVTVRYYRITYGETGGNSPVQEFTVPGSKSTATISGLKPGVDYTITVYAVTGRGDSPASSKPISINYRTEIDKPSQMQVTDVQDNSISVKWLPSSSPVTGYRVTTTPKNGPGPTKTKTAGPDQTEMTIEGLQPTVEYVVSVYAQNPSGESQPLVQTAVTTIPAPTDLKFTQVTPTSLSAQWTPPNVQLTGYRVRVTPKEKTGPMKEINLAPDSSSVVVSGLMVATKYEVSVYALKDTLTSRPAQGVVTTLENVSPPRRARVTDATETTITISWRTKTETITGFQVDAVPANGQTPIQRTIKPDVRSYTITGLQPGTDYKIYLYTLNDNARSSPVVIDASTAIDAPSNLRFLATTPNSLLVSWQPPRARITGYIIKYEKPGSPPREVVPRPRPGVTEATITGLEPGTEYTIYVIALKNNQKSEPLIGRKKTDELPQLVTLPHPNLHGPEILDVPSTVQKTPFVTHPGYDTGNGIQLPGTSGQQPSVGQQMIFEEHGFRRTTPPTTATPIRHRPRPYPPNVGQEALSQTTISWAPFQDTSEYIISCHPVGTDEEPLQFRVPGTSTSATLTGLTRGATYNVIVEALKDQQRHKVREEVVTVGNSVNEGLNQPTDDSCFDPYTVSHYAVGDEWERMSESGFKLLCQCLGFGSGHFRCDSSRWCHDNGVNYKIGEKWDRQGENGQMMSCTCLGNGKGEFKCDPHEATCYDDGKTYHVGEQWQKEYLGAICSCTCFGGQRGWRCDNCRRPGGEPSPEGTTGQSYNQYSQRYHQRTNTNVNCPIECFMPLDVQADREDSRE

SEQ ID NO: 16154 - protein, 1152 aa, Homo sapiens
MGITEYNNQCRAIVMRYSAEWKSTVSRLGRWIDFDNDYKTLYPQFMESVWWVFKQLYDKGLVYRGVKVMPFSTACNTPLSNFESHQNYKDVQDPSVFVTFPLEEDETVSLVAWTTTPWTLPSNLAVCVNPEMQYVKIKDVARGRLLILMEARLSALYKLESDYEILERFPGAYLKGKKYRPLFDYFLKCKENGAFTVLVDNYVKEEEGTGVVHQAPYFGAEDYRVCMDFNIIRKDSLPVCPVDASGCFTTEVTDFAGQYVKDADKSIIRTLKEQGRLLVATTFTHSYPFCWRSDTPLIYKAVPSWFVRVENMVDQLLRNNDLCYWVPELVREKRFGNWLKDARDWTISRNRYWGTPIPLWVSDDFEEVVCIGSVAELEELSGAKISDLHRESVDHLTIPSRCGKGSLHRISEVFDCWFESGSMPYAQVHYPFENKREFEDAFPADFIAEGIDQTRGWFYTLLVLATALFGQPPFKNVIVNGLVLASDGQKMSKRKKNYPDPVSIIQKYGADALRLYLINSPVVRAENLRFKEEGVRDVLKDVLLPWYNAYRFLIQNVLRLQKEEEIEFLYNENTVRESPNITDRWILSFMQSLIGFFETEMAAYRLYTVVPRLVKFVDILTNWYVRMNRRRLKGENGMEDCVMALETLFSVLLSLCRLMAPYTPFLTELMYQNLKVLIDPVSVQDKDTLSIHYLMLPRVREELIDKKTESAVSQMQSVIELGRVIRDRKTIPIKYPLKEIVVIHQDPEALKDIKSLEKYIIEELNVRKVTLSTDKNKYGIRLRAEPDHMVLGKRLKGAFKAVMTSIKQLSSEELEQFQKTGTIVVEGHELHDEDIRLMYTFDQATGGTAQFEAHSDAQALVLLDVTPDQSMVDEGMAREVINRIQKLRKKCNLVPTDEITVYYKAKSEGTYLNSVIESHTEFIFTTIKAPLKPYPVSPSDKVLIQEKTQLKGSELEITLTRGSSLPGPACAYVNLNICANGSEQGGVLLLENPKGDNRLDLLKLKSVVTSIFGVKNTELAVFHDETEIQNQTDLLSLSGKTLCVTAGSAPSLINSSSTLLCQYINLQLLNAKPQECLMGTVGTLLLENPLGQNGLTHQGLLYEAAKVFGLRSRKLKLFLNETQTQEITEDIPVKTLNMKTVYVSVLPTTADF

SEQ ID NO: 16155 - protein, 97 aa, Homo sapiens
MKKKLVVLGLLAVVLVLVIVGLCLWLPSASKEPDNHVYTRAAVAADAKQCSKIGRDALRDGGSAVDAAIAALLCVGLMNAHSMGIGGGLFLTIYNST

SEQ ID NO: 16156 - protein, 899 aa, Homo sapiens
MARHGCLGLGLFCCVLFAATVGPQPTPSIPGAPATTLTPVPQSEASMLSLNLGLNFKFHLRGPAAVWGSPVTETQPLSLGPGQEPGEEVASGLRTDPLWELLVGSSGNSLTEWGSTEGGSKPRASSLLPESTSRRSGPSDGPTAPYQPRRSTVTWDTALMVTALPSSAPRPHQSELELKFDMALRAGAAPTLGHRTLPLLPSLRASLAEIAGRLGPFGFFGTTLSPLRNFSGLSPPGETTSTSSASGVSGSLGFLGTTLSLPPYSLERKLSSPSPLDPAASLSFASIATTSLDPTVPISGPDDLSPPASLGNPSGQPECGPGSCSVGELPEREGQPPEAPRPLFFLTLEADWAEARARWGLAWEAHVYGVGALFGLVALLALLALALLPWRCPPGAPCLALLDLLLLSAGTTRAFPLFYDAYGHRDRLPALAWLLLQDLPLPCLAAGLGLACLLLARPRPPRCPTGLAALLLLGLGLAAAAALGSAAHRPLRPLRLASRGLHAFLAAFLSGLLLALSCWGGRRRRAGAPLGGSGFKGATPLPQGRSPFAPRESWRRAARTAPVAGTFGLLSGALQGYEVLHALGYGGQSGLEGPWPWWAFQLGLRLGEVGVALPLALLGLYPALCSPRVPPRCWAKLFRLSPGHAAPLLPGGWVTGPPDKEPLGSAIARGDAELLQLCALAGPGPDLLLQGGGCRGFEGAAANPAPSPASSPCSDYTVDFRPPSPINLRRSIEEALCSEALLAPGLFQGPAFEDALPGLGLYRTASLGTGGRASERSGEASGPAAPPELPSPGAWPAGSSVSSGSFCGLSRDSSSMLLCSSPDRPPRCPLVCVLSPPRPSGSSPSLPASGSYQALSPPSRDSPEPASELQAEEALLQEQFLDACRQIDELSVGSDTIDL

SEQ ID NO: 16157 - protein, 1141 aa, Homo sapiens
MSFSLTFTELANIAIPQCGVLNFKALHLLLHGILEHIHMAELKKVLSGDEDFLQTSQVVIMPREGDAQPILNPMKRLSNVFDHVVSRLDKLENQLALLQDLPSTAQLLEASQGTARPVQDLWHLIKLRKMVEGHDEVMAKSMQTLQDLLTDLHALQVTITALRKEVDMLKNMLDKVHPERMDIFAEDFKIQNWKMVALQREVASLQNKFKTIPKTEDMVLWSGLHDAMFTSEIGSSPLDLWQSVEQLPEAALAQTTKYLEATRAIQVSEPVQNPQLLQTVWHYEVPELLPEGSSAQAVSLSRAQEPAQPPALTPESAPGCTTEFAPGPAPGTEPVPGLELGLELEPVPALGPVPGPSVTPGSLPAPWPVLGPVPAPGAQPPPLGDWPALPRRWPLPQGWPRVGSWPLWDLGVLRPTQPQPSRAPPPATEFGSLWPRPLQPYQSRQGEALQLAAVQVKGEENDVPSLRGLRERARKDGAPKDRTRKDGVPKDRGGKDVDPKDRAHKDDVPKDRGGKDVDPKDRAHKDDVPKDRGGKDGDPKDRVGKDGAPKEAQPKAPQSALHRLKTTAAIAAAAAAAYAAATSSAAQAAKVAAKFVKDAPATKMAAIATDTAAAGPLGVFADVLGAGPSRGATESQILGDDSEIYEILSPSYSAASIGPDPALSQAMVATKQAMSPEDKKRAVKYSMSHIAQIPVKHDSLKEEFAQLSCNLNQRLSYLANMGGPSSLGTTVDILQKKIGSLQKSRLKEEELERIWGNQIEMMKDRYITLDKAVENLQIRMDEFKTLQAQIKRLEMNKVNKSTMEEELREKADRSALAGKASRVDLETVALELNEMIQGILFKVTIHEDSWKKAMEELSKDVNTKLVHSDLDPLKKEMEEVWKIVRKLLIEGLRLDPDSAAGFRRKLFKRVKCISCDRPVEMMTGPQLITIRKAHLLSRLRPASANSCEYLQRQQMREQQWLQLQDLGIQEDCQQDWGDGPQNATSLKCKSCNLLTLYPYGDPHVIDYDSAEVDILGVDGILYKGRVNSQRGAQPLAVAKELAAVKAPSPPSQSLYDRVHSSALFGAICPPLCPRSSACSAASGPHLTMPARPPSLPPLLLLPPLIPSLRDPQQAPGSTRLSRAPHIESRVGRKPPEEPANP

SEQ ID NO: 16158 - protein, 324 aa, Homo sapiens
MSPAAAAEPDGDQQDRHVSKLIFCFFVFGAVLLCVGVLLSIFGFQACQYKPLPDCPMVLKVAGPACAVVGLGAVILARSRAQLQLRAGLQRGQQMDPDRAFICGESRQFAQCLIFGFLFLTSGMLISVLGIWVPGCGSNWAQEPLNETDTGDSEPRMCGFLSLQIMGPLIVLVGLCFFVVAHVKKRNTLNAGQDASEREEGQIQIMEPVQVTVGDSVIIFPPPPPPYFPESSASAVAESPGTNSLLPNENPPSYYSIFNYGRTPTSEGAASERDCESIYTISGTNSSSEASHTPHLPSELPPRYEEKENAAATFLPLSSEPSPP

SEQ ID NO: 16159 - protein, 1165 aa, Homo sapiens
IEIPMDLTQPPTITKQSAKDHIVDPRDNILIECEAKGNPAPSFHWTRNSRFFNIAKDPRVSMRRRSGTLVIDFRSGGRPEEYEGEYQCFARNKFGTALSNRIRLQVSKSPLWPKENLDPVVVQEGAPLTLQCNPPPGLPSPVIFWMSSSMEPITQDKRVSQGHNGDLYFSNVMLQDMQTDYSCNARFHFTHTIQQKNPFTLKVLTNHPYNDSSLRNHPDMYSARGVAERTPSFMYPQGTASSQMVLRGMDLLLECIASGVPTPDIAWYKKGGDLPSDKAKFENFNKALRITNVSEEDSGEYFCLASNKMGSIRHTISVRVKAAPYWLDEPKNLILAPGEDGRLVCRANGNPKPTVQWMVNGEPLQSAPPNPNREVAGDTIIFRDTQISSRAVYQCNTSNEHGYLLANAFVSVLDVPPRMLSPRNQLIRVILYNRTRLDCPFFGSPIPTLRWFKNGQGSNLDGGNYHVYENGSLEIKMIRKEDQGIYTCVATNILGKAENQVRLEVKDPTRIYRMPEDQVARRGTTVQLECRVKHDPSLKLTVSWLKDDEPLYIGNRMKKEDDSLTIFGVAERDQGSYTCVASTELDQDLAKAYLTVLADQATPTNRLAALPKGRPDRPRDLELTDLAERSVRLTWIPGDANNSPITDYVVQFEEDQFQPGVWHDHSKYPGSVNSAVLRLSPYVNYQFRVIAINEVGSSHPSLPSERYRTSGAPPESNPGDVKGEGTRKNNMEITWTPMNATSAFGPNLRYIVKWRRRETREAWNNVTVWGSRYVVGQTPVYVPYEIRVQAENDFGKGPEPESVIGYSGEDYPRAAPTEVKVRVMNSTAISLQWNRVYSDTVQGQLREYRAYYWRESSLLKNLWVSQKRQQASFPGDRLRGVVSRLFPYSNYKLEMVVVNGRGDGPRSETKEFTTPEGVPSAPRRFRVRQPNLETINLEWDHPEHPNGIMIGYTLKYVAFNGTKVGKQIVENFSPNQTKFTVQRTDPVSRYRFTLSARTQVGSGEAVTEESPAPPNEATPTAAYTNNQADIATQGWFIGLMCAIALLVLILLIVCFIKRSRGGKYPVREKKDVPLGPEDPKEEDGSFDYSDEDNKPLQGSQTSLDGTIKQQESDDSLVDYGEGGEGQFNEDGSFIGQYTVKKDKEETEGNESSEATSPVNAIYSLA

SEQ ID NO: 16160 - protein, 2754 aa, Homo sapiens
MAASERLYELWLLYYAQKDLGYLQQWLKAFVGAFKKSISLSSLEPRRPEEAGAEVPLLPLDELHVLAEQLHQADLEQALLLLKLFIILCRNLENIEAGRGQVLVPRVLALLTKLVAELKGCPPPQGRGTQLENVALHALLLCEGLFDPYQTWRRQRSGEVISSKEKSKYKFPPAALPQEFSAFFQESLQNADHLPPILLLRLIHLFCAVLAGGKENGQMAVSDGSVKGLLSVVRGWSRGPAPDPCLVPLALEALVGAVHVLHASRAPPRGPELRALLESYFHVLNADWPAGLSSGPEEALVTLRVSMLDAIPMMLACEDRPVLQATFLSNNCFEHLTRLIQNSKLYLQSRAPPEGDSDLATRLLTEPDVQKVLDQDTDAIAVHVVRVLTCIMSDSPSAKEVFKERIGYPHLQEVLQSHGPPTHRLLQELLNMAVEGDHSMCPPPPIRNEQPVLVLAQWLPSLPTAELRLFLAQRLRWLCDSCPASRATCVQAGLVGCLLETLSTGLALEARCQEQLLALLQALGRVSIRPMELRHLLRPRPGLDSEPGGAEAGKARHAGAVIRTLSGMARHQGPARALRYFDLTPSMAGIMVPPVQRWPGPGFTFHAWLCLHPMDTAPTPAPTRPLQRKQLYSFFTSSGSGFEAFFTAAGTLVVAVCTRKEYLTMSLPEVSFADSAWHCVAIVHVPGRRPFSQNLVHVYKDGHLVKTAPLRCPSLSEPFSSCCIGSAGYRTTTTTTGLPTPPVPATLAYTHPALTRSQSVPASTGLGWGSGLVAPLQEGSIDSTLAGTQDTRWGSPTSLEGELGAVAIFHEALQATALRTLCTLGPNETAPFKPEGELHELSTRLLLHYSPQACKNNICLDLSPSHGLDGRLTGHRVETWDVKDVVNCVGGMGALLPLLERVAAQPKEAEAGPAETHDLVGPELTSGHNTQGLVLPLGKSSEERMERNAVAAFLLMLRNFLQGHMVNQESLVQCQGPAIIGALLRKVPSWAMDMNVLMSAQLLMEQVAAEGSGPLLYLLYQHLLFNFHLWTLSDFAVRLGHIQYMSSIVREHRQKLRKKYGVQFILDALRTHYSPQRERPLAADDLRTVQTSLLGLAREFLVRSLSADDVQVTQTMLSFLAATGDDGQAVGALDLLLALLHGSLVQESLAVFLLEPGNLEVLLALLVRPGSLPLLPDRVCKILRRLQQNERLPERSRQRLRLRECGLQGLVACLPEGTVSPQLCQGLYKLFLGADCLNLSDLLAVVQLSLQADLSVRLDICRQLFHLIYGQPDVVRLLARQAGWQDVLTRLYVLEAATAGSPPPSSPESPTSPKPAPPKPPTESPAEPSDVFLPSEAPCPDPDGFYHALSPFCTPFDLGLERSSVGSGNTAGGGGSSGTLTPASQPGTPSPLDGPRPFPAAPGRHSSSLSNVLEDGSLPEPTISGDDTSNTSNPQQTSEEELCNLLTNVLFSVTWRGVEGSDEAAWRERGQVFSVLTQLGASATLVRPPDCIKRSLLEMMLESALTDIKEAPVGVLASLTQQALWLLRLLQDFLCAEGHGNQELWSEKLFEGVCSLLDRLGAWPHLANGTADLREMAQIGLRLVLGYILLEDPQLHAQAYVRLHMLLQTAVPARREEACYVLSKLEAALGRVLNTSSLESATDEAGSPLAAAAAAAAAERCSWLVPLVRTLLDRAYEPLGLQWGLPSLPPTNGSPTFFEDFQAFCATPEWRHFIDKQVQPTMSQFEMDTYAKSHDLMSGFWNACYDMLMSSGQRRQWERAQSRRAFQELVLEPAQRRARLEGLRYTAVLKQQATQHSMALLHWGALWRQLASPCGAWALRDTPIPRWKLSSAETYSRMRLKLVPNHHFDPHLEASALRDNLGEVPLTPTEEASLPLAVTKEAKVSTPPELLQEDQLGEDELAELETPMEAAELDEQREKLVLSAECQLVTVVAVVPGLLEVTTQNVYFYDGSTERVETEEGIGYDFRRPLAQLREVHLRRFNLRRSALELFFIDQANYFLNFPCKVGTTPVSSPSQTPRPQPGPIPPHTQVRNQVYSWLLRLRPPSQGYLSSRSPQEMLRASGLTQKWVQREISNFEYLMQLNTIAGRTYNDLSQYPVFPWVLQDYVSPTLDLSNPAVFRDLSKPIGVVNPKHAQLVREKYESFEDPAGTIDKFHYGTHYSNAAGVMHYLIRVEPFTSLHVQLQSGRFDCSDRQFHSVAAAWQARLESPADVKELIPEFFYFPDFLENQNGFDLGCLQLTNEKVGDVVLPPWASSPEDFIQQHRQALESEYVSAHLHEWIDLIFGYKQRGPAAEEALNVFYYCTYEGAVDLDHVTDERERKALEGIISNFGQTPCQLLKEPHPTRLSAEEAAHRLARLDTNSPSIFQHLDELKAFFAEVVSDGVPLVLALVPHRQPHSFITQGSPDLLVTVSASGLLGTHSWLPYDRNISNYFSFSKDPTMGSHKTQRLLSGPWVPGSGVSGQALAVAPDGKLLFSGGHWDGSLRVTALPRGKLLSQLSCHLDVVTCLALDTCGIYLISGSRDTTCMVWRLLHQGGLSVGLAPKPVQVLYGHGAAVSCVAISTELDMAVSGSEDGTVIIHTVRRGQFVAALRPLGATFPGPIFHLALGSEGQIVVQSSAWERPGAQVTYSLHLYSVNGKLRASLPLAEQPTALTVTEDFVLLGTAQCALHILQLNTLLPAAPPLPMKVAIRSVAVTKERSHVLVGLEDGKLIVVVAGQPSEVRSSQFARKLWRSSRRISQVSSGETEYNPTEAR

SEQ ID NO: 16161 - protein, 2219 aa, Homo sapiens
GRRDVPGTLMEPGRGAGPAGMAEPRAKAARPGPQRFLRRSVVESDQEEPPGLEAAEAPGPQPPQPLQRRVLLLCKTRRLIAERARGRPAAPAPAALVAQPGAPGAPADAGPEPVGTQEPGPDPIAAAVETAPAPDGGPREEAAATVRKEDEGAAEAKPEPGRTRRDEPEEEEDDEDDLKAVATSLDGRFLKFDIELGRGSFKTVYKGLDTETWVEVAWCELQDRKLTKLERQRFKEEAEMLKGLQHPNIVRFYDFWESSAKGKRCIVLVTELMTSGTLKTYLKRFKVMKPKVLRSWCRQILKGLLFLHTRTPPIIHRDLKCDNIFITGPTGSVKIGDLGLATLKRASFAKSVIGTPEFMAPEMYEEHYDESVDVYAFGMCMLEMATSEYPYSECQNAAQIYRKVTCGIKPASFEKVHDPEIKEIIGECICKNKEERYEIKDLLSHAFFAEDTGVRVELAEEDHGRKSTIALRLWVEDPKKLKGKPKDNGAIEFTFDLEKETPDEVAQEMIESGFFHESDVKIVAKSIRDRVALIQWRRERIWPALQPKEQQDVGSPDKARGPPVPLQVQVTYHAQAGQPGPPEPEEPEADQHLLPPTLPTSATSLASDSTFDSGQGSTVYSDSQSSQQSVMLGSLADAAPSPAQCVCSPPVSEGPVLPQSLPSLGAYQQPTAAPGLPVGSVPAPACPPSLQQHFPDPAMSFAPVLPPPSTPMPTGPGQPAPPGQQPPPLAQPTPLPQVLAPQPVVPLQPVPPHLPPYLAPASQVGAPAQLKPLQMPQAPLQPLAQVPPQMPPIPVVPPITPLAGIDGLPPALPDLPTATVPPVPPPQYFSPAVILPSLAAPLPPASPALPLQAVKLPHPPGAPLAMPCRTIVPNAPATIPLLAVAPPGVAALSIHSAVAQLPGQPVYPAAFPQMAPTDVPPSPHHTVQNMRATPPQPALPPQPTLPPQPVLPPQPTLPPQPVLPPQPTRPPQPVLPPQPMLPPQPVLPPQPALPVRPEPLQPHLPEQAAPAATPGSQILLGHPAPYAVDVAAQVPTVPVPPAAVLSPPLPEVLLPAAPELLPQFPSSLATVSASVQSVPTQTATLLPPANPPLPGGPGIASPCPTVQLTVEPVQEEQASQDKPPGLPQSCESYGGSDVTSGKELSDSCEGAFGGGRLEGRAARKHHRRSTRARSRQERASRPRLTILNVCNTGDKMVECQLETHNHKMVTFKFDLDGDAPDEIATYMVEHDFILQAERETFIEQMKDVMDKAEDMLSEDTDADRGSDPGTSPPHLSTCGLGTGEESRQSQANAPVYQQNVLHTGKRWFIICPVAEHPAPEAPESSPPLPLSSLPPEASQDSAPYKDQLSSKEQPSFLASQQLLSQAGPSNPPGAPPAPLAPSSPPVTALPQDGAAPATSTMPEPASGTASQAGGPGTPQGLTSELETSQPLAETHEAPLAVQPLVVGLAPCTPAPEAASTRDASAPREPLPPPAPEPSPHSGTPQPALGQPAPLLPAAVGAVSLATSQLPSPPLGPTVPPQPPSALESDGEGPPPRVGFVDSTIKSLDEKLRTLLYQEHVPTSSASAGTPVEVGDRDFTLEPLRGDQPRSEVCGGDLALPPVPKEAVSGRVQLPQPLVEKSELAPTRGAVMEQGTSSSMTAESSPRSMLGYDRDGRQVASDSHVVPSVPQDVPAFVRPARVEPTDRDGGEAGESSAEPPPSDMGTVGGQASHPQTLGARALGSPRKRPEQQDVSSPAKTVGRFSVVSTQDEWTLASPHSLRYSAPPDVYLDEAPSSPDVKLAVRRAQTASSIEVGVGEPVSSDSGDEGPRARPPVQKQASLPVSGSVAGDFVKKATAFLQRPSRAGSLGPETPSRVGMKVPTISVTSFHSQSSYISSDNDSELEDADIKKELQSLREKHLKEISELQSQQKQEIEALYRRLGKPLPPNVGFFHTAPPTGRRRKTSKSKLKAGKLLNPLVRQLKVVASSTGHLADSSRGPPAKDPAQASVGLTADSTGLSGKAVQTQQPCSVRASLSSDICSGLASDGGGARGQGWTVYHPTSERVTYKSSSKPRARFLSGPVSVSIWSALKRLCLGKEHSSRSSTSSLAPGPEPGPQPALHVQAQVNNSNNKKGTFTDDLHKLVDEWTSKTVGAAQLKPTLNQLKQTQKLQDMEAQAGWAAPGEARAMTAPRAGVGMPRLPPAPGPLSTTVIPGAAPTLSVPTPGSCGPRAVSTPTSYT

SEQ ID NO: 16162 - protein, 465 aa, Homo sapiens
MLLLGLLLLLPLLAGARLLWNWWKLRSLHLPPLAPGFLHLLQPDLPIYLLGLTQKFGPIYRLHLGLQDKLVSRNYPDLSLGDYSLLWKAHKKLTRSALLLGIRDSMEPVVEQLTQEFCERMRAQPGTPVAIEEEFSLLTCSIICYLTFGDKIKDDNLMPAYYKCIQEVLKTWSHWSIQIVDVIPFLRFFPNPGLRRLKQAIEKRDHIVEMQLRQHKESLVAGQWRDMMDYMLQGVAQPSMEEGSGQLLEGHVHMAAVDLLIGGTETTANTLSWAVVFLLHHPEIQQRLQEELDHELGPGASSSRVPYKDRARLPLLNATIAEVLRLRPVVPLALPHRTTRPSSISGYDIPEGTVIIPNLQGAHLDETVWERPHEFWPDRFLEPGKNSRALAFGCGARVCLGEPLARLELFVVLTRLLQAFTLLPSGDALPSLQPLPHCSVILKMQPFQVRLQPRGMGAHSPGQSQ

SEQ ID NO: 16163 - protein, 797 aa, Homo sapiens
SNKKCIPMDLQCDRLDDCGDGSDEQGCRIAPTEYTCEDNVNPCGDDAYCNQIKTSVFCRCKPGFQRNMKNRQCEDLNECLVFGTCSHQCINVEGSYKCVCDQNFQERNNTCIAEGSEDQVLYIANDTDILGFIYPFNYSGDHQQISHIEHNSRITGMDVYYQRDMIIWSTQFNPGGIFYKRIHGREKRQANSGLICPEFKRPRDIAVDWVAGNIYWTDHSRMHWFSYYTTHWTSLRYSINVGQLNGPNCTRLLTNMAGEPYAIAVNPKRGMMYWTVVGDHSHIEEAAMDGTLRRILVQKNLQRPTGLAVDYFSERIYWADFELSIIGSVLYDGSNSVVSVSSKQGLLHPHRIDIFEDYIYGAGPKNGVFRVQKFGHGSVEYLALNIDKTKGVLISHRYKQLDLPNPCLDLACEFLCLLNPSGATCVCPEGKYLINGTCNDDSLLDDSCKLTCENGGRCILNEKGDLRCHCWPSYSGERCEVNHCSNYCQNGGTCVPSVLGRPTCSCALGFTGPNCGKTVCEDFCQNGGTCIVTAGNQPYCHCQPEYTGDRCQYYVCHHYCVNSESCTIGDDGSVECVCPTRYEGPKCEVDKCVRCHGGHCIINKDSEDIFCNCTNGKIASSCQLCDGYCYNGGTCQLDPETNVPVCLCSTNWSGTQCERPAPKSSKSDHISTRSIAIIVPLVLLVTLITTLVIGLVLCKRKRRTKTIRRQPIINGGINVEIGNPSYNMYEVDHDHNDGGLLDPGFMIDPTKPTNYSNPVYAKLYMDGQNCRNSLGSVDERKELLPKKIEIGIRETVA

SEQ ID NO: 16164 - protein, 572 aa, Homo sapiens
MDPSSDYHFLSQILWKRVKLTLVCGVFEGVLQHVDPNKIVVLKKVKNVETGRSVPGVKLFFGHEIVNVELLDEVEQGSVRAKASSVSLHAERTWMEKMKVEDLNVCEPASPAPEAPATSLLNDLKYSPSEEEEVTYTVINQFQQKFGAAILHIKKQNVLSVAAEGANVCRHGKLCWLQVATNCRVYLFDIFLLGSRAFHNGLQMILEDKRILKVIHDCRWLSDCLSHQYGILLNNVFDTQVADVLQFSMETGGYLPNCITTLQESLIKHLQVAPKYLSFLEKRQKLIQENPEVWFIRPVSPSLLKILALEATYLLPLRLALLDEMMSDLTTLVDGYLNTYREGSADRLGGTEPTCMELPEELLQLKDFQKQRREKAAREYRVNAQGLLIRTVLQPKKLVTETAGKEEKVKGFLFGKNFRIDKAPSFTSQDFHGDVNLLKEESLNKQATNPQHLPPTEEGETSEDSSNKLICTKSKGSEDQRITQKEHFMTPKHEFQASLSLKEETEQLLMVENKEDLKCTKQAVSMSSFPQETRVSPSDTFYPIRKTVVSTLPPCPALEKIDSWISPFLNLP

SEQ ID NO: 16165 - protein, 762 aa, Homo sapiens
MAPHQPGQPGFKFTVAESCDRIKDEFQFLQAQYHSLKVEYDKLANEKTEMQRHYVMYYEMSYGLNIEMHKQTEIAKRLNTILAQIMPFLSQEHQQQVAQAVERAKQVTMTELNAIIGQQQLQAQHLSHATHGPPVQLPPHPSGLQPPGIPPVTGSSSGLLALGALGSQAHLTVKDEKNHHELDHRERESSANNSVSPSESLRASEKHRGSADYSMEAKKRKAEEKDSLSRYDSDGDKSDDLVVDVSNEDPATPRVSPAHSPPENGLDKARSLKKDAPTSPASVASSSSTPSSKTKDLGHNDKSSTPGLKSNTPTPRNDAPTPGTSTTPGLRSMPGKPPGMDPIASALRTPISITSSYAAPFAMMSHHEMNGSLTSPGAYAGLHNIPPQMSAAAAAAAAAYGRSPMVSFGAVGFDPHPPMRATGLPSSLASIPGGKPAYSFHVSADGQMQPVPFPHDALAGPGIPRHARQINTLSHGEVVCAVTISNPTRHVYTGGKGCVKIWDISQPGSKSPISQLDCLNRDNYIRSCKLLPDGRTLIVGGEASTLTIWDLASPTPRIKAELTSSAPACYALAISPDAKVCFSCCSDGNIAVWDLHNQTLVRQFQGHTDGASCIDISHDGTKLWTGGLDNTVRSWDLREGRQLQQHDFTSQIFSLGYCPTGEWLAVGMESSNVEVLHHTKPDKYQLHLHESCVLSLKFAYCGKWFVSTGKDNLLNAWRTPYGASIFQSKESSSVLSCDISADDKYIVTGSGDKKATVYEVIY

SEQ ID NO: 16166 - protein, 643 aa, Homo sapiens
MAEGELKDMEQFFDDLSDSFSGTEPEVHKTSVVGLFLRHMILAYSKLSFSQVFKLYTALQQYFQNGEKKTVEDADMELTSRDEGERKMEKEELDVSVREEEVSCSGPLSQKQAEFFLSQQASLLKNDETKALTPASLQKELNNLLKFNPDFAEAHYLSYLNNLRVQDVFSSTHSLLHYFDRLILTGAESKSNGEEGYGRSLRYAALNLAALHCRFGHYQQAELALQEAIRIAQESNDHVCLQHCLSWLYVLGQKRSDSYVLLEHSVKKAVHFGLPRAFAGKTANKLMDALKDSDLLHWKHSLSELIDISIAQKTAIWRLYGRSTMALQQAQMLLSMNSLEAVNAGVQQNNTESFAVALCHLAELHAEQGCFAAASEVLKHLKERFPPNSQHAQLWMLCDQKIQFDRAMNDGKYHLADSLVTGITALNSIEGVYRKAVVLQAQNQMSEAHKLLQKLLVHCQKLKNTEMVISVLLSVAELYWRSSSPTIALPMLLQALALSKEYRLQYLASETVLNLAFAQLILGIPEQALSLLHMAIEPILADGAILDKGRAMFLVAKCQVASAASYDQPKKAEALEAAIENLNEAKNYFAKVDCKERIRDVVYFQARLYHTLGKTQERNRCAMLFRQLHQELPSHGVPLINHL

SEQ ID NO: 16167 - protein, 668 aa, Homo sapiens
MASSGEDISNDDDDMHPAAAGMADGVHLLGFSDEILLHILSHVPSTDLILNVRRTCRKLAALCLDKSLIHTVLLQKDYQASEDKVRQLVKEIGREIQQLSMAGCYWLPGSTVEHVARCRSLVKVNLSGCHLTSLRLSKMLSALQHLRSLAIDVSPGFDASQLSSECKATLSRVRELKQTLFTPSYGVVPCCTSLEKLLLYFEILDRTREGAILSGQLMVGQSNVPHYQNLRVFYARLAPGYINQEVVRLYLAVLSDRTPQNLHAFLISVPGSFAESGATKNLLDSMARNVVLDALQLPKSWLNGSSLLQHMKFNNPFYFSFSRCTLSGGHLIQQVINGGKDLRSLASLNLSGCVHCLSPDSLLRKAEDDIDSSILETLVASCCNLRHLNLSAAHHHSSEGLGRHLCQLLARLRHLRSLSLPVCSVADSAPRADRAPAQPAMHAVPRGFGKKVRVGVQSCPSPFSGQACPQPSSVFWSLLKNLPFLEHLELIGSNFSSAMPRNEPAIRNSLPPCSRAQSVGDSEVAAIGQLAFLRHLTLAQLPSVLTGSGLVNIGLQCQQLRSLSLANLGMMGKVVYMPALSDMLKHCKRLRDLRLEQPYFSANAQFFQALSQCPSLQRLCLVSRSGTLQPDAVLAFMARCLQVVMCHLFTGESLATCKSLQQSLLRSR

SEQ ID NO: 16168 - protein, 451 aa, Homo sapiens
PPTLCCLKLAFIDPATGKLMDKSFSIRYHDMPDVIDFLVLRQFYDEARQRNWQSCDRFRSIIDDAWWFGTVLSQEPYQPQYPDSHFQCYIVRWDNTEIEKLSPWDMEPIPDNVDPPEELGASISVTTDELEKLLYKPQAGEWGQKSRDEECDRIISGIDQLLNLDIAAAFAGPVDLCTYPKYCTVVAYPTDLYTIRMRLVNRFYRRLSALVWEVRYIEHNARTFNEPESVIARSAKKITDQLLKFIKNQHCTNISELSNTSENDEQNAEDLDDSDLPKTSSGRRRDYRDIIDTPMDFGTVRETLDAGNYDSPLEFCKDIRLIFSNAKAYTPNKRSKIYSMTLRLSALFEEKMKKISSDFKIGQKFNEKLRRSQRFKQRQNCKGDSQPNKSIRNLKPKRLKSQTKIIPELVGSPTQSTSSRTAYLGTHKTSAGISSGVTSGDSSDSAESSER

SEQ ID NO: 16169 - protein, 481 aa, Homo sapiens
MAAGWLTTWSQNSVTFQEVAVDFSQEEWALLDPAQKNLYKDVMLENFRNLASVGYQLCRHSLISKVDQEQLKTDERGILQGDCADWETQLKPKDTIAMQNIPGGKTSNGINTAENQPGEHSLECNHCGKFRKNTRFICTRYCKGEKCYKYIKYSKVFNHPSTLRSHVSIHIGEKTLEFTDCRKAFNQESSLRKHLRTPTGQKFQEYEQCDMSFSLHSSCSVREQIPTGEKGDECSDYGKISPLSVHTKTGSVEEGLECNEHEKTFTDPLSLQNCVRTHSGEMPYECSDCGKAFIFQSSLKKHMRSHTGEKPYECDHCGKSFSQSSHLNVHKRTHTGEKPYDCKECGKAFTVPSSLQKHVRTHTGEKPYECSDCGKAFIDQSSLKKHTRSHTGEKPYECNQCGKSFSTGSYLIVHKRTHTGEKTYECKECGKAFRNSSCLRVHVRTHTGEKPYKCIQCEKAFSTSTNLIMHKRIHNGQKLHE

SEQ ID NO: 16170 - protein, 515 aa, Homo sapiens
MPNQGEDCYFFFYSTCTKGDSCPFRHCEAAIGNETVCTLWQEGRCFRQVCRFRHMEIDKKRSEIPCYWENQPTGCQKLNCAFHHNRGRYVDGLFLPPSKTVLPTVPESPEEEVKASQLSVQQNKLSVQSNPSPQLRSVMKVESSENVPSPTHPPVVINAADDDEDDDDQFSEEGDETKTPTLQPTPEVHNGLRVTSVRKPAVNIKQGECLNFGIKTLEEIKSKKMKEKSKKQGEGSSGVSSLLLHPEPVPGPEKENVRTVVRTVTLSTKQGEEPLVRLSLTERLGKRKFSAGGDSDPPLKRSLAQRLGKKVEAPETNIDKTPKKAQVSKSLKERLGMSADPDNEDATDKVNKVGEIHVKTLEEILLERASQKRGELQTKLKTEGPSKTDDSTSGARSSSTIRIKTFSEVLAEKKHRQQEAERQKSKKDTTCIKLKIDSEIKKTVVLPPIVASRGQSEEPAGKTKSMQEVHIKTLEEIKLEKALRVQQSSESSTSSPSQHEATPGARRLLRITKRT

SEQ ID NO: 16171 - protein, 577 aa, Homo sapiens
DSGPLRIAKTPSPPEEPSPLPSPTASPNHTLAPASPAPARPRSPSQTRKGPPVPPLPKVTPTKELQQENIISFFEDNFVPEISVTTPSQNEVPEVKKEETLLDLDFDPFKPEVTPAGSAGVTHSPMSQTLPWDLWTTSTDLVQPTDSSESLSLCNLIMEETPDSGLAEEIQRSQNDIGAFTWGPDASTDRVSQEVTSGGFGEDSACPSETEQDIRLSTSLLSSADWPTVAEESEHAPGPAFPGGNEQLPPKPAPEAGVAIAACVEMEQLYDPLDSDMPAMDTAGLFKESHEDMKKSDEEEEKQKMEDSLWAGVEACQKASGGSFNGFTQPQDTSLFTMQTDQSMICNLIIPGADADAAVGTLVSAAEGAPGEEAEAEKATVPAGEGVSLEEAKIGTETTEGAESAQPEAEELEATVPQEKVIPSVVIEPASNHEEEGENEITIGAEPKETTEDAAPPGPTSETPELATEQKPIQDPQPTPSAPAMGAADQLASAREASQELPPGFLYKVETLHDFEAANSDELTLQRGDVVLVVPSDSEADQDAGWLVGVKESDWLQYRDLATYKGLFPENFTRRLD

SEQ ID NO: 16172 - protein, 841 aa, Homo sapiens
MADRGCPLEAAPLPAEVRESLAELELELSEGDITQKGYEKKRAKLLARYIPLIQGIDPSLQAENRIPGPSQTTAAAPKQQKSRPTASRDERFRSDVHTEAVQAALAKYKERKMPMPSKRRSVLVHSSVETYTPPDTSSASEDEGSLRRPGRLTSTPLQSHSSVEPWLDRVIQGSSTSSSASSTSSHPGGRPTTAPSAAATPGAAATTALAGLEAHTHIDLHSAPPDVTTGLVEHSYFERPQVASVRSVPRGCSGSMLETADGVPVNSRVSSKIQQLLNTLKRPKRPPLKEFFVDDFEELLEVQQPDPNQPKPEGSETSVLRGEPLTAGVPRPPSLLATLQRWGTTQPKSPCLTALDTTGKAVYTLTYGKLWSRSLKLAYTLLNKLTSKNEPLLKPGDRVALVFPNSDPVMFMVAFYGCLLAELVPVPIEVPLTRKDAGSQQVGFLLGSCGVFLALTTDACQKGLPKAQTGEVAAFKGWPPLSWLVIDGKHLAKPPKDWHPLAQDTGTGTAYIEYKTSKEGSTVGVTVSHASLLAQCRALTQACGYSEAETLTNVLDFKRDAGLWHGVLTSVMNRMHVVSVPYALMKANPLSWIQKVCFYKARAALVKSRDMHWSLLAQRGQRDVSLSSLRMLIVADGANPWSISSCDAFLNVFQSRGLRPEVICPCASSPEALTVAIRRPPDLGGPPPRKAVLSMNGLSYGVIRVDTEEKLSVLTVQDVGQVMPGANVCVVKLEGTPYLCKTDEVGEICVSSSATGTAYYGLLGITKNVFEAVPVTTGGAPIFDRPFTRTGLLGFIGPDNLVFIVGKLDGLMVTGVRRHNADDVVATALAVEPMKFVYRGR

SEQ ID NO: 16173 - protein, 154 aa, Homo sapiens
MAASMFYGRLVAVATLRNHRPRTAQRAAAQGPVLIGSSHGGVNIEDVAAESPEAIIKEPIDIEEGIKKEQALQLAQKMGFPPNIVESAAENMVKLYSLFLKYDATMIEINPMVEDSDGAVLCMDAKINFDSNSAYRQKKIFDLQDWTQEDERDK

SEQ ID NO: 16174 - protein, 1006 aa, Homo sapiens
MGSAEDAVKEKLLWNVKKEVKQIMEEAVTRKFVHEDSSHIIALCGAVEACLLHQLRRRAAGFLRSDKMAALFTKVGKTCPVAGEICHKVQELQQQAEGRKPSGVSQEALRRQGSASGKAPALSPQALKHVWVRTALIEKVLDKVVQYLAENCSKYYEKEALLADPVFGPILASLLVGPCALEYTKLKTADHYWTDPSADELVQRHRIRGPPTRQDSPAKRPALGIRKRHSSGSASEDRLAACARECVESLHQNSRTRLLYGKNHVLVQPKEDMEAVPGYLSLHQSAESLTLKWTPNQLMNGTLGDSELEKSVYWDYALVVPFSQVVCIHCHQQKSGGTLVLVSQDGIQRPPLHFPQGGHLLSFLSCLENGLLPRGQLEPPLWTQQGKGKVFPKLRKRSSIRSVDMEEMGTGRATDYVFRIIYPGHRHEHNAGDMIEMQGFGPSLPAWHLEPLCSQGSSCLSCSSSSSPHATPSHCSCIPDRLPLRLLCESMKRQIVSRAFYGWLAHCRHLSTVRTHLSALVHHSVIPPDRPPGASAGLTKDVWSKYQKDKKNYKELELLRQVYYGGIEHEIRKDVWPFLLGHYKFGMSKKEMEQVDAVVAARYQQVLAEWKACEVVVRQREREAHPATRTKFSSGSSIDSHVQRLIHRDSTISNDVFISVDDLEPPEPQDPEDSRPKPEQEAGPGTPGTAVVEQQHSVEFDSPDSGLPSSRNYSVASGIQSSLDEGQSVGFEEEDGGGEEGSSGPGPAAHTLREPQDPSQEKPQAGELEAGEELAAVCAAAYTIELLDTVALNLHRIDKDVQRCDRNYWYFTPPNLERLRDVMCSYVWEHLDVGYVQGMCDLLAPLLVTLDNDQLAYSCFSHLMKRMSQNFPNGGAMDTHFANMRSLIQILDSELFELMHQNGDYTHFYFCYRWFLLDFKRELLYEDVFAVWEVIWAARHISSEHFVLFIALALVEAYREIIRDNNMDFTDIIKFFNERAEHHDAQEILRIARDLVHKVQMLIENK

SEQ ID NO: 16175 - protein, 166 aa, Homo sapiens
MGRPLLLPLLPLLLPPAFLQPSGSTGSGPSYLYGVTQPKHLSASMGGSVEIPFSFYYPWELATAPDVRISWRRGHFHRQSFYSTRPPSIHKDYVNRLFLNWTEGQKSGFLRISNLQKQDQSVYFCRVELDTRSSGRQQWQSIEGTKLSITQGQQRTKATTPAREPF

SEQ ID NO: 16176 - protein, 424 aa, Homo sapiens
MSENSSDSDSSCGWTVISHEGSDIEMLNSVTPTDSCEPAPECSSLEQEELQALQIEQGESSQNGTVLMEETAYPALEETSSTIEAEEQKIPEDSIYIGTASDDSDIVTLEPPKLEEIGNQEVVIVEEAQSSEDFNMGSSSSSQYTFCQPETVFSSQPSDDESSSDETSNQPSPAFRRRRARKKTVSASESEDRLVAEQETEPSKELSKRQFSSGLNKCVILALVIAISMGFGHFYGTIQIQKRQQLVRKIHEDELNDMKDYLSQCQQEQESFIDYKSLKENLARCWTLTEAEKMSFETQKTNLATENQYLRKLFTDFVNDVKDYLRNMKEYEVDNDGVFEKLDEYIYRHFFGHTFSPPYGPSRPDKKQRMVNIENSRHRKQEQKHLQPQPYKREGKWHKYGRTNGRQMANLEIELGQLPFDPQY

SEQ ID NO: 16177 - protein, 208 aa, Homo sapiens
MEGCLGVAELRKLSTFSAYLEDHSYNVEQIWRDIEDVIIKTLISAHPIIRHNYHTCFPNHTLNSACFEILGFDILLDHKLKPWLLEVNHSPSFSTDSRLDKEVKDGLLYDTLVLINLESCDKKKVLEEERQRGQFLQQCCSREMRIEEAKGFRAVQLKKTETYEKENCGGFRLIYPSLNSEKYEKFFQDNNSLFQNTVASRAREEYAR

SEQ ID NO: 16178 - protein, 667 aa, Homo sapiens
MQTQEILRILRLPELGDLGQFFRSLSATTLVSMGALAAILAYWFTHRPKALQPPCNLLMQSEEVEDSGGARRSVIGSGPQLLTHYYDDARTMYQVFRRGLSISGNGPCLGFRKPKQPYQWLSYQEVADRAEFLGSGLLQHNCKACTDQFIGVFAQNRPEWIIVELACYTYSMVVVPLYDTLGPGAIRYIINTADISTVIVDKPQKAVLLLEHVERKETPGLKLIILMDPFEEALKERGQKCGVVIKSMQAVEDCGQENHQAPVPPQPDDLSIVCFTSGTTGNPKGAMLTHGNVVADFSGFLKVTESQWAPTCADVHISYLPLAHMFERMVQSVVYCHGGRVGFFQGDIRLLSDDMKALCPTIFPVVPRLLNRMYDKIFSQANTPLKRWLLEFAAKRKQAEVRSGIIRNDSIWDELFFNKIQASLGGCVRMIVTGAAPASPTVLGFLRAALGCQVYEGYGQTECTAGCTFTTPGDWTSGHVGAPLPCNHIKLVDVEELNYWACKGEGEICVRGPNVFKGYLKDPDRTKEALDSDGWLHTGDIGKWLPAGTLKIIDRKKHIFKLAQGEYVAPEKIENIYIRSQPVAQIYVHGDSLKAFLVGIVVPDPEVMPSWAQKRGIEGTYADLCTNKDLKKAILEDMVRLGKESGLHSFEQDLPQCLIQIKVFSKY

SEQ ID NO: 16179 - protein, 187 aa, Homo sapiens
MPRVVPDQRSKFENEEFFRKLSRECEIKYTGFRDRPHEERQARFQNACRDGRSEIAFVATGTNLSLQFFPASWQGEQRQTPSREYVDLEREAGKVYLKAPMILNGVCVIWKGWIDLQRLDGMGCLEFDEERAQQEDALAQQAFEEARRRTREFEDRDRSHREEMEARRQQDPSPGSNLGGGDDLKLR

SEQ ID NO: 16180 - protein, 92 aa, Homo sapiens
KKEKSCHRPSSPVPLVSDFESLGGSESSGQQNQKIPQLPSSPENLVSEIPPPQLGYAVSDENLTLGKKAELQHFPGIWKVLNSEMVLFLQIC

SEQ ID NO: 16181 - protein, 39 aa, Homo sapiens
MASAGHIITLLLWGYLLELWTGGHTADTTHPRLRLSHKE

SEQ ID NO: 16182 - protein, 551 aa, Homo sapiens
MLPLLLLPLLWGGSLQEKPVYELQVQKSVTVQEGLCVLVPCSFSYPWRSWYSSPPLYVYWFRDGEIPYYAEVVATNNPDRRVKPETQGRFRLLGDVQKKNCSLSIGDARMEDTGSYFFRVERGRDVKYSYQQNKLNLEVTALIEKPDIHFLEPLESGRPTRLSCSLPGSCEAGPPLTFSWTGNALSPLDPETTRSSELTLTPRPEDHGTNLTCQMKRQGAQVTTERTVQLNVSYAPQTITIFRNGIALEILQNTSYLPVLEGQALRLLCDAPSNPPAHLSWFQGSPALNATPISNTGILELRRVRSAEEGGFTCRAQHPLGFLQIFLNLSVYSLPQLLGPSCSWEAEGLHCRCSFRARPAPSLCWRLEEKPLEGNSSQGSFKVNSSSAGPWANSSLILHGGLSSDLKVSCKAWNIYGSQSGSVLLLQGRSNLGTGVVPAALGGAGVMALLCICLCLIFFLIVKARRKQAAGRPEKMDDEDPIMGTITSGSRKKPWPDSPGDQASPPGDAPPLEEQKELHYASLSFSEMKSREPKDQEAPSTTEYSEIKTSK

SEQ ID NO: 16183 - protein, 983 aa, Homo sapiens
MRLGSGTFATCCVAIEVLGIAVFLRGFFPAPVRSSARAEHGAEPPAPEPSAGASSNWTTLPPPLFSKVVIVLIDALRDDFVFGSKGVKFMPYTTYLVEKGASHSFVAEAKPPTVTMPRIKALMTGSLPGFVDVIRNLNSPALLEDSVIRQAKAAGKRIVFYGDETWVKLFPKHFVEYDGTTSFFVSDYTEVDNNVTRHLDKVLKRGDWDILILHYLGLDHIGHISGPNSPLIGQKLSEMDSVLMKIHTSLQSKERETPLPNLLVLCGDHGMSETGSHGASSTEEVNTPLILISSAFERKPGDIRHPKHVQQTDVAATLAIALGLPIPKDSVGSLLFPVVEGRPMREQLRFLHLNTVQLSKLLQENVPSYEKDPGFEQFKMSERLHGNWIRLYLEEKHSEVLFNLGSKVLRQYLDALKTLSLSLSAQVAQYDIYSMMVGTVVVLEVLTLLLLSVPQALRRKAELEVPLSSPGFSLLFYLVILVLSAVHVIVCTSAESSCYFCGLSWLAAGGVMVLASALLCVIVSVLTNVLVGGNTPRKNPMHPSSRWSELDLLILLGTAGHVLSLGASSFVEEEHQTWYFLVNTLCLALSQETYRNYFLGDDGEPPCGLCVEQGHDGATAAWQDGPGCDVLERDKGHGSPSTSEVLRGREKWMVLASPWLILACCRLLRSLNQTGVQWAHRPDLGHWLTSSDHKAELSVLAALSLLVVFVLVQRGCSPVSKAALALGLLGVYCYRAAIGSVRFPWRPDSKDISKGIIEARFVYVFVLGILFTGTKDLLKSQVIAADFKLKTVGLWEIYSGLVLLAALLFRPHNLPVLAFSLLIQTLMTKFIWKPLRHDAAEITVMHYWFGQAFFYFQGNSNNIATVDISAGFVGLDTYVEIPAVLLTAFGTYAGPVLWASHLVHFLSSETRSGSALSHACFCYALICSIPVFTYIVLVTSLRYHLFIWSVFSPKLLYEGMHLLITAAVCVFFTAMDQTRLTQS

SEQ ID NO: 16184 - protein, 366 aa, Homo sapiens
MRRKEKRLLQAVALVLAALVLLPNVGLWALYRERQPDGTPGGSGAAVAPAAGQGSHSRQKKTFFLGDGQKLKDWHDKEAIRRDAQRVGNGEQGRPYPMTDAERVDQAYRENGFNIYVSDKISLNRSLPDIRHPNCNSKRYLETLPNTSIIIPFHNEGWSSLLRTVHSVLNRSPPELVAEIVLVDDFSDREHLKKPLEDYMALFPSVRILRTKKREGLIRTRMLGASVATGDVITFLDSHCEANVNWLPPLLDRIARNRKTIVCPMIDVIDHDDFRYETQAGDAMRGAFDWEMYYKRIPIPPELQKADPSDPFESPVMAGGLFAVDRKWFWELGGYDPGLEIWGGEQYEISFKVSQLSRRPVLGTAS

SEQ ID NO: 16185 - protein, 387 aa, Homo sapiens
SQCGVKAVNKASSTTPKGNSSNGNSGSNSNKAVKENDKEKGKEKEKEKKEKTPATTPEARVLGKDGKEKPKEERPNKDEKARETKERTPKSDKEKEKFKKEEKAKDEKFKTTVPNAESKSTQEREREKEPSRERDIAKEMKSKENVKGGEKTPVSGSLKSPVPRSDIPEPEREQKRRKIDTHPSPSHSSTVKVTAILPKVPLGSENYASSPVISIHFLQDSLIELKESSAKLYINHTPPPLSKSKEREMDKKDLDKSRERSREREKKDEKDRKERKRDHSNNDREVPPDLTKRRKEENGTMGVSKHKSESPCESPYPNEKDKEKNKSKSSGKEKGSDSFKSEKMDKISSGGKKESRHDKEKIEKKEKRDSSGGKEEKKHHKSSDKHR

SEQ ID NO: 16186 - protein, 450 aa, Homo sapiens
METSRSPSPQFAPQKLTDKPPLLIQDEDSTRIERVMDNNTTVKMVPIKIVHSESQPEKESRQSLACPAEPPALPHGLEKDQIKTLSTSEQFYSRFCLYTRQGAEPEAPHRAQPAEPQPLGTQVPPEKDRCTSPPGLSYMKAKEKTVEDLKSEELAREIVGKDKSLADILDPSVKIKTTMDLMEGIFPKDEHLLEEAQQRRKLLPKIPSPRSTEERKEEPSVPAAVSLATNSTYYSTSAPKAELLIKMKDLQEQQEHEEDSGSDLDHDLSVKKELIESISRKLQVLREARESLLEDVQANTVLGAEVEAIVKGVCKPSEFDKFRMFIGDLDKVVNLLLSLSGRLARVENALNNLDDGASPGDRQSLLEKQRVLIQQHEDAKELKENLDRRERIVFDILANYLSEESLADYEHFVKMKSALIIEQRELEDKIHLGEEQLKCLLDSLQPERGK

SEQ ID NO: 16187 - protein, 165 aa, Homo sapiens
MFKGILQSGLDNFVINHMLKNNVAGQTSIQTLVPNTDQKSTSVKKDNHKKKTVKMLEYLGKDVLHGVFNYLAKHDVLTLKEEEKKKYYDTKIEDKALILVDSLRKNRVAHQMFTQTLLNMDQKITSVKPLLQIEAGPPESAESTNILKLCPREEFLRLCKKNHDE

SEQ ID NO: 16188 - protein, 180 aa, Homo sapiens
IDTHPSPSHSSTVKDSLIELKESSAKLYINHTPPPLSKSKEREMDKKDLDKSRERSREREKKDEKDRKERKRDHSNNDREVPPDLTKRRKEENGTMGVSKHKSESPCESPYPNEKDKEKNKSKSSGKEKGSDSFKSEKMDKISSGGKKESRHDKEKIEKKEKRDSSGGKEEKKQSSDKHR

SEQ ID NO: 16189 - protein, 735 aa, Homo sapiens
KKSLEIKEEKIAALEARLEESTNYNQQLRQELKTNATLQAEKQALKTQLKQLETQNNNLQAQILALQRQTVSLQEQNTTLQTQNAKLQVENSTLNSQSTSLMNQNAQLLIQQSSLENENESVIKEREDLKSLYDSLIKDHEKLELLHERQASEYESLISKHGTLKSAHKNLEVEHRDLEDRYNQLLKQKGQLEDLEKMLKVEQEKMLLENKNHETVAAEYKKLCGENDRLNHTYSQLLKETEVLQTDHKNLKSLLNNSKLEQTRLEAEFSKLKEQYQQLDITSTKLNNQCELLSQLKGNLEEENRHLLDQIQTLMLQNRTLLEQNMESKDLFHVEQRQYIDKLNELRRQKEKLEEKIMDQYKFYDPSPPRRRGNWITLKMRKLIKSKKDINRERQKSLTLTPTRSDSSEGFLQLPHQDSQDSSSVGSNSLEDGQTLGTKKSSTMNDLVQSMVLAGQWTGSTENLEVPDDISTGKRRKELGAMAFSTTAINFSTVNSSAGFRSKQLVNNKDTTSFEDISPQGVSDDSSTGSRVHASRPASLDSGRTSTSNSNNNASLHEVKAGAVNNQSRPQSHSSGEFSLLHDHEAWSSSGSSPIQYLKRQTRSSPVLQHKISETLESRHHKIKTGSPGSEVVTLQQFLEESNKLTSVQIKSSSQENLLDEVMKSLSVSSDFLGKDKPVSCGLARSVSGKTPGDFYDRRTTKPEFLRPGPRKTEDTYFISSAGKPTPGTQGKIKL

SEQ ID NO: 16190 - protein, 611 aa, Homo sapiens
MQETIRNLDCVGMKWKDQNIEDQYRYPRKNLRCRMLERFVESKDGTQCGETSSQIQDSIVTKNTLPGVGPYESRMSGEVIMGHSSLNCYIRVGAGHKPYEYHECGEKPDTHKQRGKAFSYHNSLQTHERLHTGKKPYNCKECGKSFSSLGNLQRHMAVQRGDGPYKCKLCGKAFFWPSLLHMHERTHTGEKPYECKQCSKAFSFYSSYLRHERTHTGEKLYECKQCSKAFPDYSSCLRHERTHTGKKPYTCKQCGKAFSASTSLRRHETTHTDEKPYACQQCGKAFHHLGSFQRHMVMHTRDGPHKCKICGKGFDCPSSLKSHERTHTGEKLYECKQCGKALSHSSSFRRHMTMHTGDGPHKCKICGKAFVYPSVFQRHEKTHTAEKPYKCKQCGKAYRISSSLRRHETTHTGEKPYKCKCGKAFIDFYSFQNHKTTHAGEKPYECKECGKAFSCFQYLSQHRRTHTGEKPYECNTCKKAFSHFGNLKVHERIHSGEKPYECKECGKAFSWLTCFLRHERIHMREKPYECQQCGKAFTHSRFLQGHEKTHTGENPYECKECGKAFASLSSLHRHKKTHWKKTHTGENPYGCKECGKAFASLSSLHRHKKTH

SEQ ID NO: 16191 - protein, 217 aa, Homo sapiens
MANLGCWMLVLFVATWSDLGLCKKRPKPGGWNTGGSRYPGQGSPGGNRYPPQGGGGWGQPHGGGWGQPHGGGWGQPHGGGWGQPHGGGWGQGGGTHSQWNKPSKPKTNMKHMAGAAAAGAVVGGLGGYMLGSAMSRPIIHFGSDYEDRYYRENMHRYPNQVYYRPMDEYSNQNNFVHDCVNITIKQHTVTTTTKGENFTETDVKMMERVVEQMCITQ

SEQ ID NO: 16192 - protein, 402 aa, Homo sapiens
MEAHEIIEEPHITMDAEKHPPSKDPSAEDLQENHISESFLKPSTSETPLEPHTSESPLVPSPSQIPLEAHSPETHQEPSISETPSETPTYEASLDSPISVVPEKHLTLPPQSRDYVCLSSSDTLKEDLSSESSSNEVPWTRRSTHLSESESLPEHCLSGPSSQVQVDTTEKQEEEAGEVEKGVDASDSTAHTAQPGHQLGNTARPVFPARQTELVEVAKAMHREEFGAQVNNLFQWEKDAALNAIQTGLYIGWRCPHYLWDCFRIGDESRCFCGHLLREHRIISDISVPCKVSQCRCFMFCFIPSRPEEVGEFWLKRRATFDPKAWRAQCRCKHSHEEHAATGPHPCRHHGCCCGCFESNFLCAACDRRWEEHETFFDTQKTRQRGGRPRGTDTVSNWHRPL

SEQ ID NO: 16193 - protein, 506 aa, Homo sapiens
MAENLKRLVSNETLRTLQEKLDFWLKEYNTNTCDQNLNHCLELIEQVAKVQGQLFGILTAAAQEGGRNDGVETIKSRLLPWLEASFTAASLGKSVDSKVPSLQDTFDRERHKDPSPRDRDMQQLDSNLNSTRSQCNQVQDELKSLQAQEDARHRNTDQRSSENRRSEPWSLEERKREQWNSLKQNADQQDTEAMSDYKKQLRNLKEEIAVLSAEKSALQGRSSRSRSPSPAPRSRSCSRSRSASPSTAVKVRRPSPNRSKLSNVARKAALLSRFSDSYSQARLDAQCLLRRCIDKAETVQRIIYIATVEAFHVAKMAFRHFKIHVRKSLTPSYVGSNDFENAVLDYVICHLDLYDSQSSVNDVIRAMNVNPKISFPPVVDFCLLSDFIQEICCIAFAMQALEPPLDIAYGADGEVFNDCKYRRSYDSDFTAPLVLYHVWPALMENDCVIMKGEAVTRRGAFWNSVRSVSRCRSRSLSPICPRSQIGLNTMSRSRSPSPIRCGLPRF

SEQ ID NO: 16194 - protein, 299 aa, Homo sapiens
MFHGTVTEELTSHEEWSHYNENIREGQKDFVFVKFNGLHLKSMENLQSCISLRVCIFSNNFITDIHPLQSCIKLIKLDLHGNQIKSLPNTKFWNGLKNLKLLYLHDNGFAKLKNICVLSACPTLIALTMFDCPVSLKKGYRHVLVNSIWPLKALDHHVISDEEIIQNWHLPERFKACNHRLFFNFCPALRKGTTYEEEINNIKHITSKINAILAHNSPVLIVQRWIRGFLVRKNLSPVFFHKKKQQEKIIRGYEAKWIYITKGYEDKLLKDLFFKPETNIKGKLAYWKHDKKKLWVNFH

SEQ ID NO: 16195 - protein, 182 aa, Homo sapiens
TLKRSSTGSYEERVKRLSVSELNEILEEIETAIKEYSEELVQQLALRDELEFEKEVKNSFISVLIEVQNKQKEHKETAKKKKKLKNGSSQNGKNERSHMPGTYLTTVIPYEKKNGPPSVEDLQILTKKRRLLVNNPVPLFLSPLFGNFKSGKQLSVLRAMKEDSEKVPSLLTDYILKVLCPT

SEQ ID NO: 16196 - protein, 1298 aa, Homo sapiens
MKVVPEKNAVRILWGRERGARAMGAQRLLQELVEDKTRWMKWEGKRVELPDSPRSTFLLAFSPDRTLLASTHVNHNIYITEVKTGKCVHSLIGHRRTPWCVTFHPTISGLIASGCLDGEVRIWDLHGGSESWFTDSNNAIASLAFHPTAQLLLIATANEIHFWDWSRREPFAVVKTASEMERVRLVRFDPLGHYLLTAIVNPSNQQGDDEPEIPIDGTELSHYRQRALLQSQPVRRTPLLHNFLHMLSSRSSGIQVGEQSTVQDSATPSPPPPPPQPSTERPRTSAYIRLRQRVSYPTAECCQHLGILCLCSRCSGTRVPSLLPHQDSVPPASARATTPSFSFVQTEPFHPPEQASSTQQDQGLLNRPSAFSTVQSSTAGNTLRNLSLGPTRRSLGGPLSSHPSRYHREIAPGLTGSEWTRTVLSLNSRSEAESMPPPRTSASSVSLLSVLRQQEGGSQASVYTSATEGRGFPASGLATESDGGNGSSQNNSGSIRHELQCDLRRFFLEYDRLQELDQSLSGEAPQTQQAQEMLNNNIESERPGPSHQPTPHSSENNSNLSRGHLNRCRACHNLLTFNNDTLRWERTTPNYSSGEASSSWQVPSSFESVPSSGSQLPPLERTEGQTPSSSRLELSSSASPQEERTVGVAFNQETGHWERIYTQSSRSGTVSQEALHQDMPEESSEEDSLRRRLLESSLISLSRYDGAGSREHPIYPDPARLSPAAYYAQRMIQYLSRRDSIRQRSMRYQQNRLRSSTSSSSSDNQGPSVEGTDLEFEDFEDNGDRSRHRAPRNARMSAPSLGRFVPRRFLLPEYLPYAGIFHERGQPGLATHSSVNRVLAGAVIGDGQSAVASNIANTTYRLQWWDFTKFDLPEISNASVNVLVQNCKIYNDASCDISADGQLLAAFIPSSQRGFPDEGILAVYSLAPHNLGEMLYTKRFGPNAISVSLSPMGRYVMVGLASRRILLHPSTEHMVAQVFRLQQAHGGETSMRRVFNVLYPMPADQRRHVSINSARWLPEPGLGLAYGTNKGDLVICRPEALNSGVEYYWDQLNETVFTVHSNSRSSERPGTSRATWRTDRDMGLMNAIGLQPRNPATSVTSQGTQTLALQLQNAETQTEREVPEPGTAASGPGEGEGSEYGASGEDALSRIQRLMAEGGMTAVVQREQSTTMASMGGFGNNIIVSHRIHRSSQTGTEPGAAHTSSPQPSTSRGLLPEAGQLAERGLSPRTASWDQPGTPGREPTQPTLPSSSPVPIPVSLPSAEGPTLHCELTNNNHLLDGGSSRGDAAGPRGEPRNR

SEQ ID NO: 16197 - protein, 613 aa, Homo sapiens
MAATEISVLSEQFTKIKELELMPEKGLKEEEKDGVCREKDHRSPSELEAERTSGAFQDSVLEEEVELVLAPSEESEKYILTLQTVHFTSEAVELQDMSLLSIQQQEGVQVVVQQPGPGLLWLEEGPRQSLQQCVAISIQQELYSPQEMEVLQFHALEENVMVASEDSKLAVSLAETTGLIKLEEEQEKNQLLAERTKEQLFFVETMSGDERSDEIVLTVSNSNVEEQEDQPTAGQADAEKAKSTKNQRKTKGAKGTFHCDVCMFTSSRMSSFNRHMKTHTSEKPHLCHLCLKTFRTVTLLRNHVNTHTGTRPYKCNDCNMAFVTSGELVRHRRYKHTHEKPFKCSMCKYASVEASKLKRHVRSHTGERPFQCCQCSYASRDTYKLKRHMRTHSGVHMRNLHAYSAAELKCRYCSAVFHERYALIQHQKTHKNEKRFKCKHCSYACKQERHMTAHIRTHTGEKPFTCLSCNKCFRQKQLLNAHFRKYHDANFIPTVYKCSKCGKGFSRWINLHRHSEKCGSGEAKSAASGKGRRTRKRKQTILKEATKGQKEAAKGWKEAANGDEAAAEEASTTKGEQFPGEMFPVACRETTARVKEEVDEGVTCEMLLNTMDK

SEQ ID NO: 16198 - protein, 4188 aa, Homo sapiens
MEKDAEDGAPSEGAEAPPSTEEAAPPRSEEEEAPRPPTVEAPAEDGFSPSAEDAVSSVVDYRDLIPSEEGIVLPDDHEADLNRVRQRLAPRPVQSVISEVLSLPSSRRSSRYRRSMSGLPNLQETLKERQARFREARESRRLKIDPSYKYIFEILAENLGLDIVTVEELILDCPSLEAFTNFFAKDGCKTLKFLYQEGDVPGIECGRTIAGATKGAKMMKLYIDNAAPDKLKGLCIFFVRCRNDVAINVKTIQEEALFTVLDASKGLLNGIRDMLANIFLPAVLATNNWGALNQSKQGESEKHIFTETINRYLSFLDGARISIEGTVKLKTIDNVNFSKLHTFEEVTAAASNSETVHQLEEVLMVWYKQIEQVLIESEQMRKEAGDSGPLTELEHWKRMSAKFNYIIEQIKGPSCKAVINVLNVAHSKLLKNWRDLDARITDTANESKDNVRYLYTLEKVCQPLYNHDLVSMAHGIQNLINAIRMIHGVSRYYNTSERMTSLFIKVTNQMVTACKAYITDGGLNHVWDQETPVVLKKIQDCIFLFKEYQASFHKTRKLISESSGEKSFEVSEMYIFGKFEAFCKRLEKITEMITVVQTYSTLSNSTIEGIDIMAIKFRNIYQGVKKKQYDILDPRRTEFDTDFLDFMTKINGLEVQIQAFMNSSFGKILSSQQALQLLQRFQKLNIPCLGLEINHTIERILQYYVAELDATKKLYHSQKDDPPLARNMPPIAGKILWVRQLYRRISEPINYFFKNSDILSSPDGKAVIRQYNKISYVLVEFEVVYHTAWIREISQLHYALQATLFVRHPETGKLLVNFDPKILEVVRETKCMIKMKLDVPEQAKRLLKLESKLKADKLYLQGLLQYYDELCQEVPSVFVNLMTPKMKKVESVLRQGLTVLTWSSLTLESFFQEVELVLDMFNQLLKKISDLCEMHIDTVLKEIAKTVLISLPESGATKVEDMLTLNETYTKEWADILNHKSKHVEEAVRELISIFEQIYEVKYTGKVGKQSEQRKHVVFGSETGEGENNDYEANIVNEFDTHDKEDEFKKECKEVFAFFSHQLLDSLQKATRLSLDTMKRRIFVASLYGRKQSEDIISFIKSEVHLAIPNVVMIPSLDDIQQAINRMIQLTLEVSRGVAHWGQQQIRPIKSVIPSPTTTDVTHQNTGKLLKKEERSFEEAIPARKLKNFYPGVAEHKDISKLVLLLSSSVNSLRKAAHEALQDFQKYKTLWTEDRDVKVKEFLANNPSLTEIRSEILHYATFEQEIDELKPIIVVGALELHTEPMKLALSIEAKAWKMLLCRYLNEEYKKKMSYMIAFINEYLKKLSRPIRDLDDVRFAMEALSCIRDNEIQMDMTLGPIEEAYAILNRFEVEVTKEESEAVDTLRYSFNKLQSKAVSVQEDLVQVQPKFKSNLLESVEVFREDVINFAEAYELEGPMVPNIPPQEASNRLQIFQASFDDLWRKFVTYSSGEQLFGLPVTDYEVLHKTRKELNLLQKLYGLYDTVMSSISGYYEILWGDVDIEKINAELLEFQNRCRKLPKGLKDWQAFLDLKKRIDDFSESCPLLEMMTNKAMKQRHWDRISELTGTPFDVESDSFCLRNIMEAPLLKHKDDIEDICISAIKEKDIEAKLTQVIENWTNQNLSFAAFKGKGELLLKGTESGEIITLMEDSLMVLGSLLSNRYNAPFKKNIQNWVYKLSTSSDIIEEWLVVQNLWVYLEAVFVGGDIAKQLPQEAKRFQNIDKSWIKIMQRAHENPNVINCCVGDETMGQLLPHLHEQLEVCQKSLTGYLEKKRLLFPRFFFVSDPVLLEILGQASDSHTIQPHLPAVSDNINEVTFHAKDYDRIMAVISREGEKIVLDNSVMAKGPVEIWLLDLLKMQMSSLHNIIRSAFYQISDSGFQLLPFLSHFPAQVGLLGIQMLWTHDSEEALRNAKDDRKIMQVTNQKFLDILNTLISQTTHDLSKFDRVKFETLITIHVHQRDIFDDLVKMHIKSPTDFEWLKQSRFYFKEDLDQTVVSITDVDFIYQNEFLGCTDRLVITPLTDRCYITLAQALGMNMGGAPAGPAGTGKTETTKDMGRCLGKYVVVFNCSDQMDFRGLGRIFKGLAQSGSWGCFDEFNRIELPVLSVAAQQIYIVLTARKERKKQFIFSDGDCVDLNPEFGIFLTMNPGYAGRQELPENLKIQFRTVAMMVPDRQIIMRVKLASCGFLENVILAQKFYVLYKLCEEQLTKQVHYDFGLRNILSVLRTLGSQKRARPEDSELSIVMRGLRDMNLSKLVDEDEPLFLSLINDLFPGLQLDSNTYAELQNAVAHQVQIEGLINHPPWNLKLVQLYETSLVRHGLMTLGPSGSGKTTVITILMKAQTECGRPHREMRMNPKAITAPQMFGRLDTATNDWTDGIFSTLWRKTLKAKKGENIFLILDGPVDAIWIENLNSVLDDNKTLTLANGDRIPMAPSCKLLFEVHNIENASPATVSRMGMVYISSSALSWRPILQAWLKKRTAQEAAVFLTLYEKVFEDTYTYMKLNLNPKMQLLECNYIVQSLNLLEGLIPSKEEGGVSCVEHLHKLFVFGLMWSLGALLELESREKLEAFLRQHESKLDLPEIPKGSNQTMYEFYVTDYGDWEHWNKKLQPYYYPTDSIPEYSSILVPNVDNIRTNFLIDTIAKQHKAVLLTGEQGTAKTVMVKAYLKKYDPEVQLSKSLNFSSATEPMMFQRTIESYVDKRIGSTYGPPGGRKMTVFIDDINMPVINEWGDQITNEIVRQMMEMEGMYSLDKPGDFTTIVDVQLIAAMIHPGGGRNDIPQRLKRQFTVFNCTLPSNASIDKIFGIIGCGYFDPCRSFKPQICEMIVNLVSVGRVLWQWTKVKMLPTPSKFHYIFNLRDLSRIWQGMLTIKAEECASIPTLLSLFKHECSRVIADRFITPEDEQWFNAHLTRAVEENIGSDAASCILPEPYFVDFLREMPEPTGDEPEDSVFEVPKIYELMPSFDFLAEKLQFYQRQFNEIIRGTSLDLVFFKDAMTHLIKISRIIRTSCGNALLVGVGGSGKQSLSRLASFIAGYQIFQITLTRSYNVTNLTDDLKALYKVAGADGKGITFIFTDSEIKDEAFLEYLNNLLSSGEISNLFARDEMDEITQGLISVMKRELPRHPPTFDNLYEYFISRSRKNLHVVLCFSPVGEKFRARSLKFPGLISGCTMDWFSRWPREALIAVASYFLSDYNIVCSSEIKRQVVETMGLFHDMVSESCESYFQRYRRRAHVTPKSYLSFINGYKNIYAEKVKFINEQAERMNIGLDKLMEASESVAKLSQDLAVKEKELAVASIKADEVLAEVTVSAQASAKIKNEVQEVKDKAQKIVDEIDSEKVKAESKLEAAKPALEEAEAALNTIKPNDIATVRKLAKPPHLIMRIMDCVLLLFQKKIDPVTMDPEKSCCKPSWGESLKLMSATGFLWSLQQFPKDTINEETVELLQPYFNMDDYTFESAKKVCGNVAGLLSWTLAMAIFYGINREVLPLKANLAKQEGRLAVANAELGKAQALLDEKQAELDKVQAKFDAAMNEKMDLLNDADTCRKKMQAASTLIDGLSGEKIRWTQQSKEFKAQINRLVGDILLCTGFLSYLGPFNQIFRNYLLKDQWEMELRARKIPFTENLNLISMLVDPPTIGEWGLQGLPGDDLSIQNGIIVTKATRYPLLIDPQTQGKTWIKSKEKENDLQVTSLNHKYFRTHLEDSLSLGRPLLIEDIHEELDPALDNVLEKNFIKSGTTFKVKVGDKECDIMDTFKLYITTKLPNPAFTPEINAKTSVIDFTVTMKGLENQLLRRVILTEKQELEAERVKLLEDVTFNKRKMKELEDNLLYKLSATKGSLVDDESLIGVLRTTKQTAAEVSEKLHVAAETEIKINAAQEEFRPAATRGSILYFLITEMSMVNIMYQTSLAQFLKLFDQSMARSEKSPLPQKRITNIIEYLTYEVFTYSVRGLYENHKFLFVLLMTLKIDLQRGTVKHREFQALIKGGAALDLKACPPKPYRWILDMTWLNLVELSKLPQFAEIMNQISRNEKGWKSWFDKDAPEEEIIPDGYNDSLDTCHKLLLIRSWCPDRTVFQARKYIADSLEEKYTEPVILNLEKTWEESDTRTPLICFLSMGSDPTNQIDALAKKLKLECRTISMGQGQEVHARKLIQMSMQQVCDKRLLLLQHYC

SEQ ID NO: 16199 - protein, 696 aa, Homo sapiens
MEASVILPILKKKLAFLSGGKDRRSGLILTIPLCLEQTNMDELSVTLDYLLSIPSEKCKARGFTVIVDGRKSQWNVVKTVVVMLQNVVPAEVSLVCVVKPDEFWDKKVTHFCFWKEKDRLGFEVILVSANKLTRYIEPCQLTEDFGGSLTYDHMDWLNKRLVFEKFTKESTSLLDELALINNGSDKGNQQEKERSVDLNFLPSVDPETVLQTGHELLSELQQRRFNGSDGGVSWSPMDDELLAQPQVMKLLDSLREQYTRYQEVCRQRSKRTQLEEIQQKVMQVVNWLEGPGSEQLRAQWGIGDSIRASQALQQKHEEIESQHSEWFAVYVELNQQIAALLNAGDEEDLVELKSLQQQLSDVCYRQASQLEFRQNLLQAALEFHGVAQDLSQQLDGLLGMLCVDVAPADGASIQQTLKLLEEKLKSVDVGLQGLREKGQGLLDQISNQASWAYGKDVTIENKENVDHIQGVMEDMQLRKQRCEDMVDVRRLKMLQMVQLFKCEEDAAQAVEWLSELLDALLKTHIRLGDDAQETKVLLEKHRKFVDVAQSTYDYGRQLLQATVVLCQSLRCTSRSSGDTLPRLNRVWKQFTIASEERVHRLEMAIAFHSNAEKILQDCPEEPEAINDEEQFDEIEAVGKSLLDRLTVPVVYPDGTEQYFGSPSDMASTAENIRDRMKLVNLKRQQLRHPEMVTTES

SEQ ID NO: 16200 - protein, 203 aa, Homo sapiens
MGIKTALPAAELGLYSLVLSGALAYAGRGLLEASQDGAHRKAFRESVRPGWEYIGRKMDVADFEWVMWFTSFRNVIIFALSGHVLFAKLCTMVAPKLRSWMYAVYGALAVMGTMGPWYLLLLLGHCVGLYVASLLGQPWLCLGLGLASLASFKMDPLISWQSGFVTGTFDLQEVLFHGGSSFTVLRCTSFALESCAHPDRHYS

SEQ ID NO: 16201 - protein, 223 aa, Homo sapiens
MDFLLLGLCLYWLLRRPSGVVLCLLGACFQMLPAAPSGCPQLCRCEGRLLYCEALNLTEAPHNLSGLLGLSLRYNSLSELRAGQFTGLMQLTWLYLDHNHICSVQGDAFQKLRRVKELTLSSNQITQLPNTTFRPMPNLRSVDLSYNKLQALAPDLFHGLRKLTTLHMRANAIQFVPVRIFQDCRSLKFLDIGYNQLKSLARNSFAGLFKLTELHLEHNDLVK

SEQ ID NO: 16202 - protein, 294 aa, Homo sapiens
MPSAGLCSCWGGRVLPLLLAYVCYLLLGATIFQLLERQAEAQSRDQFQLEKLRFLENYTCLDQWAMEQFVQVIMEAWVKGVNPKGNSTNPSNWDFGSSFFFAGTVVTTIGYGNLAPSTEAGQVFCVFYALLGIPLNVIFLNHLGTGLRAHLAAIERWEDRPRRSQVLQVLGLALFLTLGTLVILIFPPMVFSHVEGWSFSEGFYFAFITLSTIGFGDYVVGTDPSKHYISVYRSLAAIWILLGLAWLALILPLGPLLLHRCCQLWLLSRGLGVKDGAASDPSGLPRPQKIPISA

SEQ ID NO: 16203 - protein, 706 aa, Homo sapiens
IKFSKLTCPERNESLSVEDQMEQSSLYFWDLLEGSEKAVVGTTYKHLKDLLSKLLNSGYFESIPVPKNAKEKEVPLEEEMLIQSEKKTQLSKTESVKESESLMEFAQPEIQPQEFLNRRYMTEVDYSNKQGEEQPWEADYARKPNLPKRWDMLTEPDGQEKKQESFKSWEASGKHQEVSKPAVSLEQRKQDTSKLRSTLPEEQKKQEISKSKPSPSQWKQDTPKSKAGYVQEEQKKQETPKLWPVQLQKEQDPKKQTPKSWTPSMQSEQNTTKSWTTPMCEEQDSKQPETPKSWENNVESQKHSLTSQSQISPKSWGVATASLIPNDQLLPRKLNTEPKDVPKPVHQPVGSSSTLPKDPVLRKEKLQDLMTQIQGTCNFMQESVLDFDKPSSAIPTSQPPSATPGSPVASKEQNLSSQSDFLQEPLQATSSPVTCSSNACLVTTDQASSGSETEFMTSETPEAAIPPGKQPSSLASPNPPMAKGSEQGFQSPPASSSSVTINTAPFQAMQTVFNVNAPLPPRKEQEIKESPYSPGYNQSFTTASTQTPPQCQLPSIHVEQTVHSQETANYHPDGTIQVSNGSLAFYPAQTNVFPRPTQPFVNSRGSVRGCTRGGRLITNSYRSPGGYKGFDTYRGLPSISNGNYSQLQFQAREYSGAPYSQRCLETSEPLWLLGKARIISSSVISEEGHLVVHEQIREQGGVILLR

SEQ ID NO: 16204 - protein, 121 aa, Homo sapiens
MSDKSELKAELERKKQRLAQIREEKKRKEEERKKKETDQKKEAVAPVQEESDLEKKRREAEALLQSMGLTPESPIDEDLLNLEWLKSRKSTFLLEKLSRIQRKLRLQLWLNPKKMKRKMMM

SEQ ID NO: 16205 - protein, 372 aa, Homo sapiens
MSSKYPRSVRRCLPLCALTLEAALILLFYFFTHYDASLEDQKGLVASYQVGQDLTVMAALGLGFLTSNFRRHSWSSVAFNLFMLALGVQWAILLDGFLSQFPPGKVVITLFSIRLATMSAMSVLISAGAVLGKVNLAQLVVMVLVEVTALGTLRMVISNIFNTDYHMNLRHFYVFAAYFGLTVAWCLPKPLPKGTEDNDQRATIPSLSAMLGALFLWMFWPSVNSALLRSPIQRKNAMFNTYYALAVSVVTAISGSSLAHPQRKISMTYVHSAVLAGGVAVGTSCHLIPSPWLAMVLGLVAGLISIGGAKCLPVCCNRVLGIHHISVMHSIFSLLGLLGEITYIVLLVLHTVWNGNGMFAPKSQNMESTSCG

SEQ ID NO: 16206 - protein, 739 aa, Homo sapiens
MEGGGGRDEPSACRAGDVNMDDPKKEDILLLADEKFDFDLSLSSSSANEDDEVFFGPFGHKERCIAASLELNNPVPEQPPLPTSESPFAWSPLAGEKFVEVYKEAHLLALHIESSSRNQAAQAAKPEDPRSQGVERFIQESKLKINLFEKEKEMKKSPTSLKRETYYLSDSPLLGPPVGEPRLLASSPALPSSGAQARLTRAPGPPHSAHALPRESCTAHAASQAATQRKPGTKLLLPRAASVRGRSIPGAAEKPKKEIPASPSRTKIPAEKESHRDVLPDKPAPGAVNVPAAGSHLGQGKRAIPVPNKLGLKKTLLKAPGSTSNLARKSSSGPVWSGASSACTSPAVGKAKSSEFASIPANSSRPLSNISKSGRMGPAMLRPALPAGPVGASSWQAKRVDVSELAAEQLTAPPSASPTQPQTPEGGGQWLNSSCAWSESSQLNKTRSIRRRDSCLNSKTKVMPTPTNQFKIPKFSIGDSPDSSTPKLSRAQRPQSCTSVGRVTVHSTPVRRSSGPAPQSLLSAWRVSALPTPASRRCSGLPPMTPKTMPRAVGSPLCVPARRRSSEPRKNSAMRTEPTRESNRKTDSRLVDVSPDRGSPPSRVPQALNFSPEESDSTFSKSTATEVAREEAKPGGDAAPSEALLVDIKLEPLAVTPDAASQPLIDLPLIDFCDTPEAHVAVGSESRPLIDLMTNTPDMNKNVAKPSPVVGQLIDLSSPLIQLSPEADKENVDSPLLKF

SEQ ID NO: 16207 - protein, 1247 aa, Homo sapiens
MSLFLRVVFSFTMFGDLFEEEYSTVSNNQYGKGKKLKTKALEPPAPREFTNLSGIRNQGGTCYLNSLLQTLHFTPEFREALFSLGPEELGLFEDKDKPDAKVRIIPLQLQRLFAQLLLLDQEAASTADLTDSFGWTSNEEMRQHDVQELNRILFSALETSLVGTSGHDLIYRLYHGTIVNQIVCKECKNVSERQEDFLDLTVAVKNVSGLEDALWNMYVEEEVFDCDNLYHCGTCDRLVKAAKSAKLRKLPPFLTVSLLRFNFDFVKCERYKETSCYTFPLRINLKPFCEQSELDDLEYIYDLFSVIIHKGGCYGGHYHVYIKDVDHLGNWQFQEEKSKPDVNLKDLQSEEEIDHPLMILKAILLEENNLIPVDQLGQKLLKKIGISWNKKYRKQHGPLRKFLQLHSQIFLLSSDESTVRLLKNSSLQAESDFQRNDQQIFKMLPPESPGLNNSISCPHWFDINDSKVQPIREKDIEQQFQGKESAYMLFYRKSQLQRPPEARANPRYGVPCHLLNEMDAANIELQTKRAECDSANNTFELHLHLGPQYHFFNGALHPVVSQTESVWDLTFDKRKTLGDLRQSIFQLLEFWEGDMVLSVAKLVPAGLHIYQSLGGDELTLCETEIADGEDIFVWNGVEVGGVHIQTGIDCEPLLLNVLHLDTSSDGEKCCQVIESPHVFPANAEVGTVLTALAIPAGVIFINSAGCPGGEGWTAIPKEDMRKTFREQGLRNGSSILIQDSHDDNSLLTKEEKWVTSMNEIDWLHVKNLCQLESEEKQVKISATVNTMVFDIRIKAIKELKLMKELADNSCLRPIDRNGKLLCPVPDSYTLKEAELKMGSSLGLCLGKAPSSSQLFLFFAMGSDVQPGTEMEIVVEETISVRDCLKLMLKKSGLQGDAWHLRKMDWCYEAGEPLCEEDATLKELLICSGDTLLLIEGQLPPLGFLKVPIWWYQLQGPSGHWESHQDQTNCTSSWGRVWRATSSQGASGNEPAQVSLLYLGDIEISEDATLAELKSQAMTLPPFLEFGVPSPAHLRAWTVERKRPGRLLRTDRQPLREYKLGRRIEICLEPLQKGENLGPQDVLLRTQVRIPGERTYAPALDLVWNAAQGGTAGSLRQRVADFYRLPVEKIEIAKYFPEKFEWLPISSWNQQITKRKKKKKQDYLQGAPYYLKDGDTIGVKNLLIDDDDDFSTIRDDTGKEKQKQRALGRRKSQEALHEQSSYILSSAETPARPRAPETSLSIHVGSFR

SEQ ID NO: 16208 - protein, 808 aa, Homo sapiens
MLEGHESYDTENFYFREIRKNLQEVDFQWKDGEINYKEGPMTHKNNLTGQRVRHSQGDVENKHMENQLILRFQSGLGELQKFQTAEKIYGCNQIERTVNNCFLASPLQRIFPGVQTNISRKYGNDFLQLSLPTQDEKTHIREKPYIGNECGKAFRVSSSLINHQMIHTTEKPYRCNESGKAFHRGSLLTVHQIVHTRGKPYQCDVCGRIFRQNSDLVNHRRSHTGDKPYICNECGKSFSKSSHLAVHQRIHTGEKPYKCNRCGKCFSQSSSLATHQTVHTGDKPYKCNECGKTFKRNSSLTAHHIIHAGKKPYTCDVCGKVFYQNSQLVRHQIIHTGETPYKCNECGKVFFQRSRLAGHRRIHTGEKPYKCNECGKVFSQHSHLAVHQRVHTGEKPYKCNECGKAFNWGSLLTVHQRIHTGEKPYKCNVCGKVFNYGGYLSVHMRCHTGEKPLHCNKCGMVFTYYSCLARHQRMHTGEKPYKCNVCGKVFIDSGNLSIHRRSHTGEKPFQCNECGKVFSYYSCLARHRKIHTGEKPYKCNDCGKAYTQRSSLTKHLVIHTGENPYHCNEFGEAFIQSSKLARYHRNPTGEKPHKCSECGRTFSHKTSLVYHQRRHTGEMPYKCIECGKVFNSTTTLARHRRIHTGEKPYKCNECGKVFRYRSGLARHWSIHTGEKPYKCNECGKAFRVRSILLNHQMMHTGEKPYKCNECGKAFIERSNLVYHQRNHTGEKPYKCMECGKAFGRRSCLTKHQRIHSSEKPYKCNECGKSYISRSGLTKHQIKHAGENLTTKLNVERPLDVVLTSGIPK

SEQ ID NO: 16209 - protein, 730 aa, Homo sapiens
MLLFVEQVASKGTGLNPNAKVWQEIAPGNTDATPVTHGTESSWHEIAATSGAHPEVSVFNTGNAELSEDICKEYEVMYSSSCETTRNTTGIEESTDGMILGPEDLSYQIYDVSGESNSAVSTEDLKECLKKQLEFCFSRENLSKDLYLISQMDSDQFIPIWTVANMEEIKKLTTDPDLILEVLRSSPMVQVDEKGEKVRPSHKRCIVILREIPETTPIEEVKGLFKSENCPKVISCEFAHNSNWYITFQSDTDAQQAFKYLREEVKTFQGKPIMARIKAINTFFAKNGYRLMDSSIYSHPIQTQAQYASPVFMQPVYNPHQQYSVYSIVPQSWSPNPTPYFETPLAPFPNGSFVNGFNSPGSYKTNAAAMNMGRPFQKNRVKPQFRSSGGSEHSTEGSVSLGDGQLNRYSSRNFPAERHNPTVTGHQEQTYLQKETSTLQVEQNGDYGRGRRTLFRGRRRREDDRISRPHPSTAESKAPTPKFDLLASNFPPLPGSSSRMPGELVLENRMSDVVKGVYKEKDNEELTISCPVPADEQTECTSAQQLNMSTSSPCAAELTALSTTQQEKDLIEDSSVQKDGLNQTTIPVSPPSTTKPSRASTASPCNNNINAATAVALQEPRKLSYAEVCQKPPKEPSSVLVQPLRELRSNVVSPTKNEDNGAPENSVEKPHEKPEARASKDYSGFRGNIIPRGAAGKIREQRRQFSHRAIPQGVTRRNGKEQYVPPRSPK

SEQ ID NO: 16210 - protein, 129 aa, Homo sapiens
MFRITNIEFLPEYRQKESREFLSVSRTVQQVINLVYTTSAFSKFYEQSVVADVSNNKGGLLVHFWIVFVMPRAKGHIFCEDCVAAILKDSIQTSIINRTSVGSLQGLAVDMDSVVLNEVLGLTLIVWID

SEQ ID NO: 16211 - protein, 180 aa, Homo sapiens
MDQSGMEIPVTLIIKAPNQKYSDQTISCFLNWTVGKLKTHLSNVYPSKPSSDHSGSTTPSSGQETLSLAVGSSSEGLRQRTLPQAQTDQAQSHQFPYVMQGNVDNQFPGQAAPPGFPVYPAFSPLQMLWWQQMYAHQYYMQYQAAVSAQATSNVNPTQPTTSQPLNLAHVPGEEPPPAPN

SEQ ID NO: 16212 - protein, 865 aa, Homo sapiens
MALVLGSLLLLGLCGNSFSGGQPSSTDAPKAWNYELPATNYETQDSHKAGPIGILFELVHIFLYVVQPRDFPEDTLRKFLQKAYESKIDYDKPETVILGLKIVYYEAGIILCCVLGLLFIILMPLVGYFFCMCRCCNKCGGEMHQRQKENGPFLRKCFAISLLVICIIISIGIFYGFVANHQVRTRIKRSRKLADSNFKDLRTLLNETPEQIKYILAQYNTTKDKAFTDLNSINSVLGGGILDRLRPNIIPVLDEIKSMATAIKETKEALENMNSTLKSLHQQSTQLSSSLTSVKTSLRSSLNDPLCLVHPSSETCNSIRLSLSQLNSNPELRQLPPVDAELDNVNNVLRTDLDGLVQQGYQSLNDIPDRVQRQTTTVVAGIKRVLNSIGSDIDNVTQRLPIQDILSAFSVYVNNTESYIHRNLPTLEEYDSYWWLGGLVICSLLTLIVIFYYLGLLCGVCGYDRHATPTTRGCVSNTGGVFLMVGVGLSFLFCWILMIIVVLTFVFGANVEKLICEPYTSKELFRVLDTPYLLNEDWEYYLSGKLFNKSKMKLTFEQVYSDCKKNRGTYGTLHLQNSFNISEHLNINEHTGSISSELESLKVNLNIFLLGAAGRKNLQDFAACGIDRMNYDSYLAQTGKSPAGVNLLSFAYDLEAKANSLPPGNLRNSLKRDAQTIKTIHQQRVLPIEQSLSTLYQSVKILQRTGNGLLERVTRILASLDFAQNFITNNTSSVIIEETKKYGRTIIGYFEHYLQWIEFSISEKVASCKPVATALDTAVDVFLCSYIIDPLNLFWFGIGKATVFLLPALIFAVKLAKYYRRMDSEDVYDDVETIPMKNMENGNNGYHKDHVYGIHNPVMTSPSQH

SEQ ID NO: 16213 - protein, 283 aa, Homo sapiens
MSSFDLPAPSPPRCSPQFPSIGQEPPEMNLYYENFFHPQGVPSPQRPSFEGGGEYGATPNPYLWFNGPTMTPPPYLPGPNASPFLPQAYGVQRPLLPSVSGLGGSDLGWLPIPSQEELMKLVRPPYSYSALIAMAIHGAPDKRLTLSQIYQYVADNFPFYNKSKAGWQNSIRHNLSLNDCFKKVPRDEDDPAYVSGGSPTSHPLVTPGLSPEPSDKTGQNSLTFNSFSPLTNLSNHSGGGDWANPMPTNMLSYGGSVLSQFSPHFYNSVNTSGVLYPREGTEV

SEQ ID NO: 16214 - protein, 522 aa, Homo sapiens
LDFLLLQDPASTCVPEPASQHTLRSGPGCLQQPEQQGVRDPGGIWAKLGAAEASAERLQGRRSRGASGSEPQQMGSDVRDLNALLPAVPSLGGGGGCALPVSGAAQWAPVLDFAPPGASAYGSLGGPAPPPAPPPPPPPPPHSFIKQEPSWGGAEPHEEQCLSAFTVHFSGQFTGTAGACRYGPFGPPPPSQASSGQARMFPNAPYLPSCLESQPAIRNQGYSTVTFDGTPSYGHTPSHHAAQFPNHSFKHEDPMGQQGSLGEQQYSVPPPVYGCHTPTDSCTGSQALLLRTPYSSDNLYQMTSQLECMTWNQMNLGATLKGVAAGSSSSVKWTEGQSNHSTGYESDNHTTPILCGAQYRIHTHGVFRGIQDVRRVPGVAPTLVRSASETSEKRPFMCAYPGCNKRYFKLSHLQMHSRKHTGEKPYQCDFKDCERRFSRSDQLKRHQRRHTGVKPFQCKTCQRKFSRSDHLKTHTRTHTGKTSEKPFSCRWPSCQKKFARSDELVRHHNMHQRNMTKLQLAL

SEQ ID NO: 16215 - protein, 563 aa, Homo sapiens
MTVLEITLAVILTLLGLAILAILLTRWARCKQSEMYISRYSSEQSARLLDYEDGRGSRHAYSTQSDTSYDNRERSKRDYTPSTNSLVSMASKFSLGQTELILLLMCFILALSRSSIGSIKCLQTTEEPPSRTAGAMMQFTAPIPGATGPIKLSQKTIVQTPGPIVQYPGSNAGPPSAPRGPPMAPIIISQRTARIPQVHTMDSSGKITLTPVVILTGYMDEELAKKSCSKIQILKCGGTARSQNSREENKEALKNDIIFTNSVESLKSAHIKEPEREGKGTDLEKDKIGMEVKVDSDAGIPKRQETQLKISEMSIPQGQGAQIKKSVSDVPRGQESQVKKSESGVPKGQEAQVTKSGLVVLKGQEAQVEKSEMGVPRRQESQVKKSQSGVSKGQEAQVKKRESVVLKGQEAQVEKSELKVPKGQEGQVEKTEADVPKEQEVQEKKSEAGVLKGPESQVKNTEVSVPETLESQVKKSESGVLKGQEAQEKKESFEDKGNNDKEKERDAEKDPNKKEKGDKNTKGDKGKDKVKGKRESEINGEKSKGSKRAKANTGRKYNKKVEE

SEQ ID NO: 16216 - protein, 287 aa, Homo sapiens
MAEKILEKLDVLDKQAEIILARRTKINRLQSEGRKTTMAIPLTFDFQLEFEEALATSASKAISKIKEDKSCSITKSKMHVSFKCEPEPRKSNFEKSNLRPFFIQTNVKNKESESTEPVEEHLKSRSIRPYLYLKDTTEMENAGPLNVLYSQHRQACRRSLGSTDFSPMFNIQSNAHKKEKDSTLFTAQIEKKPRKPLDSVGLLEGDRNKRKKSPQMNDFNIKENKSVRNYQLSKYRSVRKKSLLPLCFEDELKNPHAKIVNVSPTKTVTSHMEQKDTNPIIFHDTEY

SEQ ID NO: 16217 - protein, 293 aa, Homo sapiens
MVCEGKRSASCPCFFLLTAKFYWILTMMQRTHSQEYAHSIRVDGDIILGGLFPVHAKGERGVPCGELKKEKGIHRLEAMLYAIDQINKDPDLLSNITLGVRILDTCSRDTYALEQSLTFVQALIEKDASDVKCANGDPPIFTKPDKISGVIGAAASSVSIMVANILRLFKIPQISYASTAPELSDNTRYDFFSRVVPPDSYQAQAMVDIVTALGWNYVSTLASEGNYGESGVEAFTQISREIGGVCIAQSQKIPREPRPGEFEKIIKRLLETPNARAVIMFANEDDIRRILEA

SEQ ID NO: 16218 - protein, 652 aa, Homo sapiens
MLDTIARALQDLGRQVLPTLPSLSQEEVSIIWGNVSEFVRRQLTLHKGVQIPAFGTFTFIRQKLEVGNNKFILIQRPVFIMVEKLVQIHGLKQNKVYTPGEIPIVPLNFVMISLEGPFNRDVVEGCVKETLLFLSRSISMKQNVEFTFKGIGVLMIRDSKVKMRFYKDFLCTMDGSGALAKALANRPGTVDSVLSSREALRKWPSSVLAFPRIELKEMENKLPMETLVEECGENRERKCKLKDQSDKEEGTRDISSPKRLRDRQALFPAKVTNVSLLEKFERSESGGKIMTPESLSYPSCLKHDSEMKPQTSPACQDHNKAGQEMCYVCLQRAQRNSLLYYSEERRREIEDERLIQQYQMLKDQEALFRHQMKSLATREQNQKNAAYNLGVAEAIRNHKNEKPEFYKSFLFDKRPLSPALNALKQEEYSRSLLKQMDNRQENEIKQRQYRELMDRLEQVQLTEELAAQRAKFLKDKMEETQCYKRALDAQIKNKPSRLPPFEPDSSEPIFGKNEGELMVEKQKREQNYMKHQLEAAANHKRKAILHQLVDQRRDLQMLQRTQREHLADRTAELERVNRVNQCLQEDWERSAAMKKQRDLEDKAFERASDKLFLLDQCEKYRRCKQCQRRTSNVGESNLWPLNKFLPGSRLLV

SEQ ID NO: 16219 - protein, 566 aa, Homo sapiens
REREQLLQARDCAYHLQSAVRLMKTLSPGSPSGGPSPLPQWCRDLQLHPSQGAVLRIGPGETLEPLLLARPIGLAAQCLEAVIEMQLRALGREPASPGLSSQLAELLFALPAYHTLQRKALSHVPGAARPFPTSRVLRLLTGERGCQVASRLDEALQGSALRDQLRRRCQEEGDLLPGLLGLVGGVAGSASCGLGLGGAGALWSQYWTLLWAACAQSLDLNLGPWRDPRATAQQLSQALGQASLPQECEKELASLCHRLLHQSLIWSWDQGFCQALGSALGGQSSLPTSSGTAELLQQLFPPLLDALREPRLRRIFCQPADPAPVALGLCTLQTTLLWFLGRAQQYLAAWDPASFLLLIQKDLPPLLHEAEALYSLASEESLALEVEQQLGLEIQKLTAQIQLLPEESLSVFSQECHKQAMQGFKLYMPRGRYWRLRLCPEPPSAPSEYAGLVVRTVLEPVLQGLQGLPPQAQAPALGQALTAIVGAWLDHILTHGIRFSLQGALQLKQDFGVVRELLEEEQWSLSPDLRQTLLMLSIFQQLDGALLCLLQQPLPKSQVHRRPPCC

SEQ ID NO: 16220 - protein, 219 aa, Homo sapiens
MVKIAFNTPTAVQKEEARQDVEALLSRTVRTQILTGKSTIYRGEMCFFDSEDPANSLRGGEPNFLPVTEEADIREDDNIAIIDVPVPSFSDSDPAAIIHDFEKGMTAYLDLLLGNCYLMPLNTSIVMPPKNLVELFGKLASGRYLPQTYVVREDLVAVEEIRDVSNLGIFIYQLCNNRKSFRLRRRDLLLGFNKRAIDKCWKIRHFPNEFIVETKICQE

SEQ ID NO: 16221 - protein, 602 aa, Homo sapiens
MAGVKVPLVAMHHAYVVTERIEGIQNMPNVRDHDASVYLRLQGDALSVGGYEANPIFWEEVSDKFAFGLFDLDWEVFTQHIEGAINRVPVLEKTGIKSTVCGPESFTPDHKPLMGEAPELRGFFLGCGFNSAGMMLGGGCGQELAHWIIHGRPEKDMHGYDIRRFHHSLTDHPRWIRERSHESYAKNYSVVFPHDEPLAGRNMRRDPLHEELLGQGCVFQERHGWERPGWFHPRGPAPVLEYDYYGAYGSRAHEDYAYRRLLADEYTFAFPPHHDTIKKECLACRGAAAVFDMSYFGKFYLVGLDARKAADWLFSADVSRPPGSTVYTCMLNHRGGTESDLTVSRLAPSHQASPLAPAFEGDGYYLAMGGAVAQHNWSHITTVLQDQKSQCQLIDSSEDLGMISIQGPASRAILQEVLDADLSNEAFPFSTHKLLRAAGHLVRAMRLSFVGELGWELHIPKASCVPVYRAVMAAGAKHGLINAGYRAIDSLSIEKGYRHWHADLRPDDSPLEAGLAFTCKLKSPVPFLGREALEQQRAAGLRRRLVCFTMEDKVPMFGLEAIWRNGQVVGHVRRADFGFAIDKTIATVTSMTPAVGRSRWTL

SEQ ID NO: 16222 - protein, 160 aa, Homo sapiens
MPDLNDCVSINRAVPQMPTGMEKEEESEHHLQRAISAQQVFREKKESMVIPVPEAESNVNYYNRLYKGEFKQPKQFIHIQPFNLDNEQPDYDMDSEDETLLNRLNRKMEIKPLQFEIMIDRLEKASSNQLVTLQEAKLLLNEDDYLIKAVYDYWVRKRKN

SEQ ID NO: 16223 - protein, 127 aa, Homo sapiens
MKKKLVVLGLLAVVLVLVIVGLCLWLPSASKEPDNHVYTRAAVAADAKQCSKIGRDALRDGGSAVDAAIAALLCVGLMNAHSMGIGGGLFLTIYNSTTRKAEVINAREVAPRLAFATMFNSSEQSQK

SEQ ID NO: 16224 - protein, 1091 aa, Homo sapiens
MRPSGTAGAALLALLAALCPASRALEEKKVCQGTSNKLTQLGTFEDHFLSLQRMFNNCEVVLGNLEITYVQRNYDLSFLKTIQEVAGYVLIALNTVERIPLENLQIIRGNMYYENSYALAVLSNYDANKTGLKELPMRNLQGQKCDPSCPNGSCWGAGEENCQKLTKIICAQQCSGRCRGKSPSDCCHNQCAAGCTGPRESDCLVCRKFRDEATCKDTCPPLMLYNPTTYQMDVNPEGKYSFGATCVKKCPRNYVVTDHGSCVRACGADSYEMEEDGVRKCKKCEGPCRKVCNGIGIGEFKDSLSINATNIKHFKNCTSISGDLHILPVAFRGDSFTHTPPLDPQELDILKTVKEITGFLLIQAWPENRTDLHAFENLEIIRGRTKQHGQFSLAVVSLNITSLGLRSLKEISDGDVIISGNKNLCYANTINWKKLFGTSGQKTKIISNRGENSCKATGQVCHALCSPEGCWGPEPRDCVSCRNVSRGRECVDKCNLLEGEPREFVENSECIQCHPECLPQAMNITCTGRGPDNCIQCAHYIDGPHCVKTCPAGVMGENNTLVWKYADAGHVCHLCHPNCTYGCTGPGLEGCPTNGPKIPSIATGMVGALLLLLVVALGIGLFMRRRHIVRKRTLRRLLQERELVEPLTPSGEAPNQALLRILKETEFKKIKVLGSGAFGTVYKGLWIPEGEKVKIPVAIKELREATSPKANKEILDEAYVMASVDNPHVCRLLGICLTSTVQLITQLMPFGCLLDYVREHKDNIGSQYLLNWCVQIAKGMNYLEDRRLVHRDLAARNVLVKTPQHVKITDFGLAKLLGAEEKEYHAEGGKVPIKWMALESILHRIYTHQSDVWSYGVTVWELMTFGSKPYDGIPASEISSILEKGERLPQPPICTIDVYMIMVKCWMIDADSRPKFRELIIEFSKMARDPQRYLVIQGDERMHLPSPTDSNFYRALMDEEDMDDVVDADEYLIPQQGFFSSPSTSRTPLLSSLSATSNNSTVACIDRNGLQSCPIKEDSFLQRYSSDPTGALTEDSIDDTFLPVPGEWLVWKQSCSSTSSTHSAAASLQCPSQVLPPASPEGETVADLQTQ

SEQ ID NO: 16225 - protein, 141 aa, Homo sapiens
MYTPNAQYCQMRCTFHPRCLLFSFLPASSINDMEKRFGCFLKDSVTGTLPKVHRTGAVSGHSLKQCGHQISACHRDIYKGVDMRGVNFNVSKVSSVEECQKRCTSNIRCQFFSYATQTFHKAEYRNNCLLKYSPGGTPTAI

SEQ ID NO: 16226 - protein, 916 aa, Homo sapiens
MCCSTHLFQPLQLAGGLEWPWSNLLCFLTPVKLHPEVWGLFPNQQSQEHAAFRFALSQLTEPPKLLPQIDIVNISDSFEMTYRFCSQFSKGVYAIFGFYERRTVNMLTSFCGALHVCFITPSFPVDTSNQFVLQLRPELQDALISIIDHYKWQKFVYIYDADRGLSVLQKVLDTAAEKNWQVTAVNILTTTEEGYRMLFQDLEKKKERLVVVDCESERLNAILGQIIKLEKNGIGYHYILANLGFMDIDLNKFKESGANVTGFQLVNYTDTIPAKIMQQWKNSDARDHTRVDWKRPKYTSALTYDGVKVMAEAFQSLRRQRIDISRRGNAGDCLANPAVPWGQGIDIQRALQQVRFEGLTGNVQFNEKGRRTNYTLHVIEMKHDGIRKIGYWNEDDKFVPAATDAQAGGDNSSVQNRTYIVTTILEDPYVMLKKNANQFEGNDRYEGYCVELAAEIAKHVGYSYRLEIVSDGKYGARDPDTKAWNGMVGELVYGRADVAVAPLTITLVREEVIDFSKPFMSLGISIMIKKPQKSKPGVFSFLDPLAYEIWMCIVFAYIGVSVVLFLVSRFSPYEWHSEEFEEGRDQTTSDQSNEFGIFNSLWFSLGAFMQQGCDISPRSLSGRIVGGVWWFFTLIIISSYTANLAAFLTVERMVSPIESAEDLAKQTEIAYGTLEAGSTKEFFRRSKIAVFEKMWTYMKSAEPSVFVRTTEEGMIRVRKSKGKYAYLLESTMNEYIEQRKPCDTMKVGGNLDSKGYGIATPKGSALRGPVNLAVLKLSEQGVLDKLKSKWWYDKGECGSKDSGSKDKTSALSLSNVAGVFYILIGGLGLAMLVALIEFCYKSRSESKRMKGFCLIPQQSINEAIRTSTLPRNSGAGASSGGSGENGRVVSHDFPKSMQSIPCMSHSSGMPLGATGL

SEQ ID NO: 16227 - protein, 700 aa, Homo sapiens
MAATEISVLSEQFTKIKELELMPEKGLKEEEKDGVCREKDHRSPSELEAERTSGAFQDSVLEEEVELVLAPSEESEKYILTLQTVHFTSEAVELQDMSLLSIQQQEGVQVVVQQPGPGLLWLEEGPRQSLQQCVAISIQQELYSPQEMEVLQFHALEENVMVASEDSKLAVSLAETTGLIKLEEEQEKNQLLAERTKEQLFFVETMSGDERSDEIVLTVSNSNVEEQEDQPTAGQADAEKAKSTKNQRKTKGAKGTFHCDVCMFTSSRMSSFNRHMKTHTSEKPHLCHLCLKTFRTVTLLRNHVNTHTGTRPYKCNDCNMAFVTSGELVRHRRYKHTHEKPFKCSMCKYASVEASKLKRHVRSHTGERPFQCCQCSYASRDTYKLKRHMRTHSGEKPYECHICHTRFTQSGTMKIHILQKHGENVPKYQCPHCATIIARKSDLRVHMRNLHAYSAAELKCRYCSAVFHERYALIQHQKTHKNEKRFKCKHCSYACKQERHMTAHIRTHTGEKPFTCLSCNKCFRQKQLLNAHFRKYHDANFIPTVYKCSKCGKGFSRWINLHRHSEKCGSGEAKSAASGKGRRTRKRKQTILKEATKGQKEAAKGWKEAANGDEAAAEEASTTKGEQFPGEMFPVACRETTARVKEEVDEGVTCEMLLNTMDNSAGCTGRMMLVSAWLLGRPQETYNQGRRRRGSRRVTW

SEQ ID NO: 16228 - protein, 2591 aa, Homo sapiens
MPVTEKDLAEDAPWKKIQQNTFTRWCNEHLKCVNKRIGNLQTDLSDGLRLIALLEVLSQKRMYRKYHQRPTFRQMQLENVSVALEFLDRESIKLVSIDSKAIVDGNLKLILGLVWTLILHYSISMPVWEDEGDDDAKKQTPKQRLLGWIQNKIPYLPITNFNQNWQDGKALGALVDSCAPGLCPDWESWDPQKPVDNAREAMQQADDWLGVPQVITPEEIIHPDVDEHSVMTYLSQFPKAKLKPGAPLKPKLNPKKARAYGRGIEPTGNMVKQPAKFTVDTISAGQGDVMVFVEDPEGNKEEAQVTPDSDKNKTYSVEYLPKVTGLHKVTVLFAGQHISKSPFEVSVDKAQGDASKVTAKGPGLEAVGNIANKPTYFDIYTAGAGVGDIGVEVEDPQGKNTVELLVEDKGNQVYRCVYKPMQPGPHVVKIFFAGDTIPKSPFVVQVGEACNPNACRASGRGLQPKGVRIRETTDFKVDTKAAGSGELGVTMKGPKGLEELVKQKDFLDGVYAFEYYPSTPGRYSIAITWGGHHIPKSPFEVQVGPEAGMQKVRAWGPGLHGGIVGRSADFVVESIGSEVGSLGFAIEGPSQAKIEYNDQNDGSCDVKYWPKEPGEYAVHIMCDDEDIKDSPYMAFIHPATGGYNPDLVRAYGPGLEKSGCIVNNLAEFTVDPKDAGKAPLKIFAQDGEGQRIDIQMKNRMDGTYACSYTPVKAIKHTIAVVWGGVNIPHSPYRVNIGQGSHPQKVKVFGPGVERSGLKANEPTHFTVDCTEAGEGDVSVGIKCDARVLSEDEEDVDFDIIHNANDTFTVKYVPPAAGRYTIKVLFASQEIPASPFRVKVDPSHDASKVKAEGPGLSKAGVENGKPTHFTVYTKGAGKAPLNVQFNSPLPGDAVKDLDIIDNYDYSHTVKYTPTQQGNMQVLVTYGGDPIPKSPFTVGVAAPLDLSKIKLNGLENRVEVGKDQEFTVDTRGAGGQGKLDVTILSPSRKVVPCLVTPVTGRENSTAKFIPREEGLYAVDVTYDGHPVPGSPYTVEASLPPDPSKVKAHGPGLEGGLVGKPAEFTIDTKGAGTGGLGLTVEGPCEAKIECSDNGDGTCSVSYLPTKPGEYFVNILFEEVHIPGSPFKADIEMPFDPSKVVASGPGLEHGKVGEAGLLSVDCSEAGPGALGLEAVSDSGTKAEVSIQNNKDGTYAVTYVPLTAGMYTLTMKYGGELVPHFPARVKVEPAVDTSRIKVFGPGIEGKDVFREATTDFTVDSRPLTQVGGDHIKAHIANPSGASTECFVTDNADGTYQVEYTPFEKGLHVVEVTYDDVPIPNSPFKVAVTEGCQPSRVQAQGPGLKEAFTNKPNVFTVVTRGAGIGGLGITVEGPSESKINCRDNKDGSCSAEYIPFAPGDYDVNITYGGAHIPGSPFRVPVKDVVDPSKVKIAGPGLGSGVRARVLQSFTVDSSKAGLAPLEVRVLGPRGLVEPVNVVDNGDGTHTVTYTPSQEGPYMVSVKYADEEIPRSPFKVKVLPTYDASKVTASGPGLSSYGVPASLPVDFAIDARDAGEGLLAVQITDQEGKPKRAIVHDNKDGTYAVTYIPDKTGRYMIGVTYGGDDIPLSPYRIRATQTGDASKCLATGPGIASTVKTGEEVGFVVDAKTAGKGKVTCTVLTPDGTEAEADVIENEDGTYDIFYTAAKPGTYVIYVRFGGVDIPNSPFTVMATDGEVTAVEEAPVTEEAYVPVSDMNGLGFKPFDLVIPFAVRKGEITGEVHMPSGKTATPEIVDNKDGTVTVRYAPTEVGLHEMHIKYMGSHIPESPLQFYVNYPNSGSVSAYGPGLVYGVANKTATFTIVTEDAGEGGLDLAIEGPSKAEISCIDNKDGTCTVTYLPTLPGDYSILVKYNDKHIPGSPFTAKITDDSRRCSQVKLGSAADFLLDISETDLSSLTASIKAPSGRDEPCLLKRLPNNHIGISFIPREVGEHLVSIKKNGNHVANSPVSIMVVQSEIGDARRAKVYGRGLSEGRTFEMSDFIVDTRDAGYGGISLAVEGPSKVDIQTEDLEDGTCKVSYFPTVPGVYIVSTKFADEHVPGSPFTVKISGEGRVKESITRTSRAPSVATVGSICDLNLKIPEINSSDMSAHVTSPSGRVTEAEIVPMGKNSHCVRFVPQEMGVHTVSVKYRGQHVTGSPFQFTVGPLGEGGAHKVRAGGPGLERGEAGVPAEFSIWTREAGAGGLSIAVEGPSKAEITFDDHKNGSCGVSYIAQEPGNYEVSIKFNDEHIPESPYLVPVIAPSDDARRLTVMSLQESGLKVNQPASFAIRLNGAKGKIDAKVHSPSGAVEECHVSELEPDKYAVRFIPHENGVHTIDVKFNGSHVVGSPFKVRVGEPGQAGNPALVSAYGTGLEGGTTGIQSEFFINTTRAGPGTLSVTIEGPSKVKMDCQETPEGYKVMYTPMAPGNYLISVKYGGPNHIVGSPFKAKVTGQRLVSPGSANETSSILVESVTRSSTETCYSAIPKASSDASKVTSKGAGLSKAFVGQKSSFLVDCSKAGSNMLLIGVHGPTTPCEEVSMKHVGNQQYNVTYVVKERGDYVLAVKWGEEHIPGSPFHVTVP

SEQ ID NO: 16229 - protein, 1111 aa, Homo sapiens
YYLNAQDGAGGEEEKAEGGAGEEHDLFAGLKPLEQESRMEVLFACAEALHAHGYSSEASRLTVELAQDLLANPPDLKVEPPPAKGKKNKVSTSRQTWVATNTLSKAAFLLTVLSERPEHHNLAFRVGMFALELQRPPASTKALEVKLAYQESEVAALLKKIPLGPSEMSTMRCRAEELREGTLCDYRPVLPLMLASFIFDVLCAPVVSPTGSRPPSRNWNSETPGDEELGFEAAVAALGMKTTVSEAEHPLLCEGTRREKGDLALALMITYKDDQAKLKKILDKLLDRESQTHKPQTLSSFYSSSRPTTASQRSPSKHGGPSAPGALQPLTSGSAGPAQPGSVAGAGPGPTEGFTEKNVPESSPHSPCEGLPSEAALTPRPEGKVPSRLALGSRGGYNGRGWGSPGRPKKKHTGMASIDSSAPETTSDSSPTLSRRPLRGGWAPTSWGRGQDSDSISSSSSDSLGSSSSSGSRRASASGGARAKTVEVGRYKGRRPESHAPHVPNQPSEAAAHFYFELAKTVLIKAGGNSSTSIFTHPSSSGGHQGPHRNLHLCAFEIGLYALGLHNFVSPNWLSRTYSSHVSWITGQAMEIGSAALTILVECWDGHLTPPEVASLADRASRARDSNMVRAAAELALSCLPHAHALNPNEIQRALVQCKEQDNLMLEKACMAVEEAAKGGGVYPEVLFEVAHQWFWLYEQTAGGSSTAREGATSCSASGIRAGGEAGRGMPEGRGGPGTEPVTVAAAAVTAAATVVPVISVGSSLYPGPGLGHGHSPGLHPYTALQPHLPCSPQYLTHPAHPAHPMPHMPRPAVFPVPSSAYPQGVHPAFLGAQYPYSVTPPSLAATAVSFPVPSMAPITVHPYHTEPGLPLPTSVACELWGQGTVSSVHPASTFPAIQGASLPALTTQPSPLVSGGFPPPEEETHSQPVNPHSLHHLHAAYRVGMLALEMLGRRAHNDHPNNFSRSPPYTDDVKWLLGLAAKLGVNYVHQFCVGAAKGVLSPFVLQEIVMETLQRLSPAHAHNHLRAPAFHQLVQRCQQAYMQYIHHRLIHLTPADYDDFVNAIRSARSAFCLTPMGMMQFNDILQNLKRSKQTKELWQRVSLEMATFSP

SEQ ID NO: 16230 - protein, 359 aa, Homo sapiens
MQRAVSVVARLGFRLQAFPPALCRPLSCAQEVLRRTPLYDFHLAHGGKMVAFAGWSLPVQYRDSHTDSHLHTRQHCSLFDVSHMLQTKILGSDRVKLMESLVVGDIAELRPNQDKVRELQNQGRDVGLEVLDNALLALQGPTAAQVLQAGVADDLRKLPFMTSAVMEVFGVSGCRVTRCGYTGEDGVEISVPVAGAVHLATAILKNPEVKLAGLAARDSLRLEAGLCLYGNDIDEHTTPVEGSLSWTLGKRRRAAMDFPGAKVIVPQLKGRVQRRRVGLMCEGAPMRAHSPILNMEGTKIGTVTSGCPSPSLKKNVAMGYVPCEYSRPGTMLLVEVRRKQQMAVVSKMPFVPTNYYTLK

SEQ ID NO: 16231 - protein, 474 aa, Homo sapiens
MGSSFWEGLQVAVGLPQGCWPQGLDSGEPAEGGQLEAAPVCIVTRQSKETAGPTLGRGGWRQGSLRRGKGTSCRCRQLSPGHGPGRLTGCGECHRLPCRGLVSGFTGLRGQEEDDLAFCLATIGSDRQATEAAPSCVGDMADTPRDAGLKQAPASRNEKAPVDFGYVGIDSILEQMRRKAMKQGFEFNIMVVGQSGLGKSTLINTLFKSKISRKSVQPTSEERIPKTIEIKSITHDIEEKGVRMKLTVIDTPGFGDHINNENCWQPIMKFINDQYEKYLQEEVNINRKKRIPDTRVHCCLYFIPATGHSLRPLDIEFMKRLSKVVNIVPVIAKADTLTLEERVHFKQRITADLLSNGIDVYPQKEFDEDSEDRLVNEKFREMIPFAVVGSDHEYQVNGKRILGRKTKWGTIEVENTTHCEFAYLRDLLIRTHMQNIKDITSSIHFEAYRVKRLNEGSSAMANGMEEKEPEAPEM

SEQ ID NO: 16232 - protein, 522 aa, Homo sapiens
MASASSGPSSSVGFSSFDPAVPSCTLSSAASGIKRPMASEVPYASGMPIKKIGHRSVDSSGETTYKKTTSSALKGAIQLGITHTVGSLSTKPERDVLMQDFYVVESIFFPSEGSNLTPAHHYNDFRFKTYAPVAFRYFRELFGIRPDDYLYSLCSEPLIELCSSGASGSLFYVSSDDEFIIKTVQHKEAEFLQKLLPGYYMNLNQNPRTLLPKFYGLYCVQAGGKNIRIVVMNNLLPRSVKMHIKYDLKGSTYKRRASQKEREKPLPTFKDLDFLQDIPDGLFLDADMYNALCKTLQRDCLVLQSFKIMDYSLLMSIHNIDHAQREPLSSETQYSVDTRRPAPQKALYSTAMESIQGEARRGGTMETDDQFVKKLEHSWKALVHDGDTVSVHRPGFYAERFQRFMCNTVFKKIPLKPSPSKKFRSGSSFSRRAGSSGNSCITYQPSVSGEHKAQVTTKAEVEPGVHLGRPDVLPQTPPLEEISEGSPIPDPSFSPLVGETLQMLTTSTTLEKLEVAESEFTH

SEQ ID NO: 16233 - protein, 1761 aa, Homo sapiens
HSRGSPFKKIPAVGGKELDLHGLYTRVTTLGGFAKVSEKNQWGEIVEEFNFPRSCSNAAFALKQYYLRYLEKYEKVHHFGEDDDEVPPGNPKPQLPIGAIPSSYNYQQHSVSDYLRQSYGLSMDFNSPNDYNKLVLSLLSGLPNEVDFAINVCTLLSNESKHVMQLEKDPKIITLLLANAGVFDDTLGSFSTVFGEEWKEKTDRDFVKFWKDIVDDNEVRDLISDRNKSHEGTSGEWIWESLFHPPRKLGINDIEGQRVLQIAVILRNLSFEEGNVKLLAANRTCLRFLLLSAHSHFISLRQLGLDTLGNIAAELLLDPVDFKTTHLMFHTVTKCLMSRDRFLKMRGMEILGNLCKAEDNGVLICEYVDQDSYREIICHLTLPDVLLVISTLEVLYMLTEMGDVACTKIAKVEKSIDMLVCLVSMDIQMFGPDALAAVKLIEHPSSSHQMLSEIRPQAIEQVQTQTHVASAPASRAVVAQHVAPPPGIVEIDSEKFACQWLNAHFEVNPDCSVSRAEMYSEYLSTCSKLARGGILTSTGFYKCLRTVFPNHTVKRVEDSSSNGQAHIHVVGVKRRAIPLPIQMYYQQQPVSTSVVRVDSVPDVSPAPSPAGIPHGSQTIGNHFQRTPVANQSSNLTATQMSFPVQGVHTVAQTVSRIPQNPSPHTHQQQNAPVTVIQSKAPIPCEVVKATVIQNSIPQTGVPVSIAVGGGPPQSSVVQNHSTGPQPVTVVNSQTLLHHPSVIPQQSPLHTVVPGQIPSGTPVTVIQQAVPQSHMFGRVQNIPACTSTVSQGQQLITTSPQPVQTSSQQTSAGSQSQDTVIIAPPQYVTTSASNIVSATSVQNFQVATGQMVTIAGVPSPQASRVGFQNIAPKPLPSQQVSSTVVQQPIQQPQQPTQQSVVIVSQPAQQGQTYAPAIHQIVLANPAALPAGQTVQLTGQPNITPSSSPSPVPATNNQVPTAMSSSSTPQSQGPPPTVSQMLSVKRQQQQQHSPAPPPQQVQVQVQQPQQVQMQVQPQQSNAGVGQPASGESSLIKQLLLPKRGPSTPGGKLILPAPQIPPPNNARAPSPQVVYQVASNQAAGFGVQGQTPAQQLLVGQQNVQLVPSAMPPSGGVQTVPISNLQILPGPLISNSPATIFQGTSGNQVTITVVPNTSFAPATVSQGNATQLIAPAGITMSGTQTGVGLPVQTLPATQASPAGQSSCTTATPPFKGDKIICQKEEEAKEATGLHVHERKIEVMENPSCRRGATNTSNGDTKENEMHVGSLLNGRKYSDSSLPPSNSGKIQSETNQCSLISNGPSLELGENGASGKQNSEQIDMQDIKSDLRKPLVNGICDFDKGDGSHLSKNIPNHKTSNHVGNGEISPMEPQGTLDITQQDTAKGDQLERISNGPVLTLGGSSVSSIQEASNAATQQFSGTDLLNGPLASSLNSDVPQQRPSVVVSPHSTTSVIQGHQIIAVPDSGSKVSHSPALSSDVRSTNGTAECKTVKRPAEDTDRETVAGIPNKVGVRIVTISDPNNAGCSATMVAVPAGADPSTVAKVAIESAVQQKQQHPPTYVQNVVPQNTPMPPSPAVQVQGQPNSSQPSPFSGSSQPGDPMRKPGQNFMCLWQSCKKWFQTPSQVFYHAATEHGGKDVYPGQCLWEGCEPFQRQRFSFITHLQDKHCSKDALLAGLKQDEPGQAGSQKSSTKQPTVGGTSSTPRAQKAIVNHPSAALMALRRGSRNLVFRDFTDEKEGPITKHIRLTAALILKNIGKYSECGRR

SEQ ID NO: 16234 - protein, 668 aa, Homo sapiens
MGPLRESKMSNFEKEHRVQHHDKEISRSRIPRLILRPHMPQQQHKVSPASESPFSEEESREFNPSSSGRSARTVSSNSFCSDDTGCPSSQSVSPVKTPSDAGNSPIGFCPGSDEGFTRKKCTIGMVGEGSIQSSRYKKESKSGLVKPGSEADFSSSSSTGSISAPEVHMSTAGSKRSSSSRNRGPHGRSNGASSHKPGSSPSSPREKDLLSMLCRNQLSPVNIHPSYAPSSPSSSNSGSYKGSDCSPIMRRSGRYMSCGENHGVRPPNPEQYLTPLQQKEVTVRHLKTKLKESERRLHERESEIVELKSQLARMREDWIEEECHRVEAQLALKEARKEIKQLKQVIETMRSSLADKDKGIQKYFVDINIQNKKLESLLQSMEMAHSGSLRDELCLDFPCDSPEKSLTLNPPLDTMADGLSLEEQVTGEGADRELLVGDSIANSTDLFDEIVTATTTESGDLELVHSTPGANVLELLPIVMGQEEGSVVVERAVQTDVVPYSPAISELIQSVLQKLQDPCPSSLASPDESEPDSMESFPESLSALVVDLTPRNPNSAILLSPVETPYANVDAEVHANRLMRELDFAACVEERLDGVIPLARGGVVRQYWSSSFLVDLLAVAAPVVPTVLWAFSTQRGGTDPVYNIGALLRGCCVVALHSLRRTAFRIKT

SEQ ID NO: 16235 - protein, 220 aa, Homo sapiens [sequence omitted]

SEQ ID NO: 16236 - protein, 142 aa, Homo sapiens
MTTDDLCQALLRHYSAKKYQGKEENSDVPRRKRKVLHLVSQWIALYKDWLPEDEHSKMFLKTIYRNVLDDVYEYPILEKELKEFQKILGMHRRHTVDEYSPQKKNKALFHQFSLKENWLQHRGTVTETEEIFCHVYITEHSY

SEQ ID NO: 16237 - protein, 287 aa, Homo sapiens
KERGLFRGIEDNPMVVPLCNRSKDVVEPLLRPQWEWCISRQLWWGHRIPAYFVTVSDPAVPPGEDPDGRYWVSGRNEAEAREKAAKEFGVSPDKISLQQDEDVLDTWFSSGLFPLSILGWPNQSEDLSVFYPGTLLETGHDILFFWVARMVMLGLKLTGRLPFREVYLHAIVRDAHGRKMSKSLGNVIDPLDVIYGISLQGLHNQLLNSNLDPSEVEKAKEGQKADFPAGIPECGTDALRFGLCAYMSQGRDINLDVNRILGYRHFCNKLWNATKFALRGLGKGFVP

SEQ ID NO: 16238 - protein, 731 aa, Homo sapiens
MNIMNTEQSQNSIVSRIKVFEGQTNIETSGLPKKPEITPRSLPPKPTVSSGKPSVAPKPAANRASGEWDSGTENRLKVTSKEGLTPYPPLQEAGSIPVTKPELPKKPNPGLIRSVNPEIPGRGPLAESSDSGKKVPTPAPRPLLLKKSVSSENPTYPSAPLKPVTVPPRLAGASQAKAYKSLGEGPPANPPVPVLQSKPLVDIDLISFDDDVLPTPSGNLAEESVGSEMVLGLHEDPQSPPPLPAEKPIGNTFSTVSGKLSNVERTRNLESNHPGQTGGFVRVPPRLPPRPVNGKTIPTQQPPTKVPPERPPPPKLSATRRSNKKLPFNRSSSDMDLQKKQSNLATGLSKAKSQVFKNQDPVLPPRPKPGHPLYSKYMRGDVLVMLKQTENNYLECQKGEDTGRVHLSQMKIITPLDEHLRSRPNDPSHAQKPVDSGAPHAVVLHDFPAEQVDDLNLTSGEIVYLLEKIDTDWYRGNCRNQIGIFPANYVKVIIDIPEGGNGKRECVSSHCVKGSRCVARFEYIGEQKDELSFSEGEIIILKEYVNEEWARGEVRGRTGIFPLNFVEPVEDYPTSGANVLSTKVPLKTKKEDSGSNSQVNSLPAEWCEALHSFTAETSDDLSFKRGDRIQILERLDSDWCRGRLQDREGIFPAVFVRPCPAEAKSMLAIVPKGRKAKALYDFRGENEDELSFKAGDIITELESVDDDWMSGELMGKSGIFPKNYIQFLQIS

SEQ ID NO: 16239 - protein, 738 aa, Homo sapiens
MASAELQGKYQKLAQEYSKLRAQNQVLKKGVVDEQANSAALKEQLKMKDQSLRKLQQEMDSLTFRNLQLAKRVELLQDELALSEPRGKKNKKSGESSSQLSQEQKSVFDEDLQKKIEENERLHIQFFEADEQHKHVEAELRSRLATLETEAAQHQAVVDGLTRKYMETIEKLQNDKAKLEVKSQTLEKEAKECRLRTEECQLQLKTLHEDLSGRLEESLSIINEKVPFNDTKYSQYNALNVPLHNRRHQLKMRDIAGQALAFVQDLVTALLNFHTYTEQRIQIFPVDSAIDTISPLNQKFSQYLHENASYVRPLEEGMLHLFESITEDTVTVLETTVKLKTFSEHLTSYICFLRKILPYQLKSLEEECESSLCTSALRARNLELSQDMKKMTAVFEKLQTYIALLALPSTEPDGLLRTNYSSVLTNVGAALHGFHDVMKDISKHYSQKAAIEHELPTATQKLITTNDCILSSVVALTNGAGKIASFFSNNLDYFIASLSYGPKAASGFISPLSAECMLQYKKKAAAYMKSLRKVQQSLEKISKLEQEKEHWMLEAQLAKIKLEKENQRIADKLKNTGSAQLVGLAQENAAVSNTAGQDEATAKAVLEPIQSTSLVPDVESREDLIKNHYMARIVELTSQLQLADSKSVHFYAECRALSKRLALAEKSKEALTEEMKLASQNISRLQDELTTTKRSYEDQLSMMSDHLCSMNETLSKQREEIDTLKMSSKGNSKKNKSR

SEQ ID NO: 16240 - protein, 364 aa, Homo sapiens
MMDLRNTPAKSLDKFIEDYLLPDTCFRMQINHAIDIICGFLKERCFRGSSYPVCVSKVVKGGSSGKGTTLRGRSDADLVVFLSPLTTFQDQLNRRGEFIQEIRRQLEACQRERAFSVKFEVQAPRWGNPRALSFVLSSLQLGEGVEFDVLPAFDALGQLTGGYKPNPQIYVKLIEECTDLQKEGEFSTCFTELQRDFLKQRPTKLKSLIRLVKHWYQNCKKKLGKLPPQYALELLTVYAWERGSMKTHFNTAQGFRTVLELVINYQQLCIYWTKYYDFKNPIIEKYLRRQLTKPRPVILDPADPTGNLGGGDPKGWRQLAQEAEAWLNYPCFKNWDGSPVSSWILLVRPPASSLPFIPAPLHEA

SEQ ID NO: 16241 - protein, 436 aa, Homo sapiens
MRDAGDPSPPNKMLRRSDSPENKYSDSTGHSKAKNVHTHRVRERDGGTSYSPQENSHNHSALHSSNSHSSNPSNNPSKTSDAPYDSADDWSEHISSSGKKYYYNCRTEVSQWEKPKEWLEREQRQKEANKMAVNSFPKDRDYRREVMQATATSGFASGMEDKHSSDASSLLPQNILSQTSRHNDRDYRLPRAETHSSSTPVQHPIKPVVHPTATPSTVPSSPFTLQSDHQPKKSFDANGASTLSKLPTPTSSVPAQKTERKESTSGDKPVSHSCTTPSTSSASGLNPTSAPPTSASAVPVSPVPQSPIPPLLQDPNLLRQLLPALQATLQLNNSNVDISKINEVLTAAVTQASLQSIIHKFLTAGPSAFNITSLISQAAQLSTQDIPLHEGIQMERDTHRSKWEVKGSLCQKADKQQECLVWNGSIMVQRLLQPSG

SEQ ID NO: 16242 - protein, 224 aa, Homo sapiens
ASTSRLDALPRVTCPNHPDAILVEDYRAGDMICPECGLVVGDRVIDVGSEWRTFSNDKATKDPSRVGDSQNPLLSDGDLSTMIGKGTGAASFDEFGNSKYQNRRTMSSSDRAMMNAFKEITTMADRINLPRNIVDRTNNLFKQVYEQKSLKGRANDAIASACLYIACRQEGVPRTFKEICAVSRISKKEIGRCFKLILKALETSVDLITTGDFMSRNWRYCWCC

SEQ ID NO: 16243 - protein, 183 aa, Homo sapiens
MRANDALQVLGLLFSLARGSEVGNSQAVCPGTLNGLSVTGDAENQYQTLYKLYERCEVVMGNLEIVLTGHNADLSFLQWIREVTGYVLVAMNEFSTLPLPNLRVVRGTQVYDGKFAIFVMLNYNTNSSHALRQLRLTQLTGQFPMVPSGLTPQPAQDWYLLDDDPRLLTLSASSKVPVTLAAV

SEQ ID NO: 16244 - protein, 702 aa, Homo sapiens
MAAAVTIPGPRIGALQSSGLTLLLSLAAHCSGPQAKVLSPGGLDASGANLWASANCSLLQGFWCQPASQLPRDQLSALIQRLALLQVPLQAWQLSCLANLASRCGLQDDFTLHPPNLLLFYNLSQVREADCRAFIRRAAQGDVELLSHLPDQRVALWRAAVACLVGAGLRLSASDQQLLGALVCDMDASSIGAADPHMLENLRRCPRLTAAQRIALNSLLAGGKTSLGPPGSWTLEGLQALGPLATYISPHLWAQVQEAVGLGFFRSVVASCQVGRLGQREARCFVTSFLESKTKPVSSRPRLSTGNITAATLRDDLFLVHYDCAELESCLDGCILRTNLDTLLQHLLPTECQHVVKAKLAQIYPQGLPEDQLRLITSLVYLYSRTEIGQWSITSQDTVMALLASDVALENQTEAVLQKFLEHNGTVSGALLLAIGGTRLCWMSPHQIQTIHPQELRLAGALDLSSCPQSRKDVLYTKAHETFGSSGTLAAYYRLMRPYLGGSPGGAQPPSPVPPGGAPVEELRHLAHANISMDIDTFTSLNPLELQSLDVGNVTALLGHNVGDLQKARSHPTVRAWLRSLNSSTLGQLGLDASPTSPTGPAHGTRGPPSTTHQVLHLVHTSGLPTNDAQASTSGSLWAPLGYLPLAMALPCSLLCLLHWGTCILVSVDSVASGWLGSQGSGAGKTEVLDSAGRPLGLTGQL

SEQ ID NO: 16245 - protein, 890 aa, Homo sapiens
MAFAWWPCLILALLSSLAASGFPRSPFRLLGKRSLPEGVANGIEVYSTKINSKVTSRFAHNVVTMRAVNRADTAKEVSFDVELPKTAFITNFTLTIDGVTYPGNVKEKEVAKKQYEKAVSQGKTAGLVKASGRKLEKFTVSVNVAAGSKVTFELTYEELLKRHKGKYEMYLKVQPKQLVKHFEIEVDIFEPQGISMLDAEASFITNDLLGSALTKSFSGKKGHVSFKPSLDQQRSCPTCTDSLLNGDFTITYDVNRESPGNVQIVNGYFVHFFAPQGLPVVPKNVAFVIDISGSMAGRKLEQTKEALLRILEDMQEEDYLNFILFSGDVSTWKEHLVQATPENLQEARTFVKSMEDKGMTNINDGLLRGISMLNKAREEHRIPERSTSIVIMLTDGDANVGESRPEKIQENVRNAIGGKFPLYNLGFGNNLNYNFLENMALENHGFARRIYEDSDADLQLQGFYEEVANPLLTGVEMEYPENAILDLTQNTYQHFYDGSEIVVAGRLVDEDMNSFKADVKGHGATNDLTFTEEVDMKEMEKALQERDYIFGNYIERLWAYLTIEQLLEKRKNAHGEEKENLTARALDLSLKYHFVTPLTSMVVTKPEDNEDERAIADKPGEDAEATPVSPAMSYLTSYQPPQNPYYYVDGDPHFIIQIPEKDDALCFNIDEAPGTVLRLIQDAVTGLTVNGQITGDKRGSPDSKTRKTYFGKLGIANAQMDFQVEVTTEKITLWNRAVPSTFSWLDTVTVTQDGLSMMINRKNMVVSFGDGVTFVVVLHQVWKKHPVHRDFLGFYVVDSHRMSAQTHGLLGQFFQPFDFKVSDIRPGSDPTKPDATLVVKNHQLIVTRGSQKDYRKDASIGTKVVCWFVHNNGEGLIDGVHTDYIVPNLF

SEQ ID NO: 16246 - protein, 585 aa, Homo sapiens
MELLTFRDVAIEFSPEEWKCLDPAQQNLYRDVMLENYRNLISLGVAISNPDLVIYLEQRKEPYKVKIHETVAKHPAVCSHFTQDFLPVQGIEDSFHKLILRRYEKCGHENLELRKSCKRKVQKGGYNEFNQCLSTIQSKIFQCNVHVKVFSTFSNSNQRRIRHTGEKHFKECGKSFQKFSDLTQHQGIHAGEKPYTCEECGKDFKWYLIFNEYEIIHTGEKPFTCEECGNIFTTSSNFAKHKVHTGEKSYKYEECGKAFNRSSTLTKHKRIHAEEKPFTCEECGKIITSSSNVAKHKKIHTGEKLYKCQECGKVFNRSTTLTKHNRIHTGEKPYTCEECGKAFSRSSVLNEHKRIHTGEKPYKCEQCGKAFRQSATLNKHKSIHTGEKPYTCEECGKAFSRFTTLNEHKRIHTGERPHKCEECGKAFGWSTDLNKHKIIHTGEKPYKCEECGKAFGWSAYLSKHKKIHTGEKPYRCEECGKAFLCSRALNKHKTIHTGEKPYECEECGKAFGWSTYLSKHKKIHTGEKPYRCEECGKAFRRSRVLNKYKTIHTGDKTPKCKGCGKAFKWSSYLNQHNKIYTGEKL

SEQ ID NO: 16247 - protein, 433 aa, Homo sapiens
LPTCALQRVDRLGVAGAGGRRCRACRARTSVLPGLRAVRRGQGQAAGRVCVAPDSPRLPVPRGDLKGRGREIRSPAAAPSRSSPAQTRPAGRPQQPARLALGERSWQEGRPVCTRFGPLRPGWQDGHAPSRDGASRTPSGTEDQLYPGTLPFPPLWPHSTTTTSPSSPLFWSPLPPRLPTQRLPQVPPLPLPQIQALSSAWVVLPPGKGEEGPGPELHSGCLDGLRSLFEGPPCPYPGAWIPFQVPGTAHPSPATPSGDPSMEEHLSVMYERLRQELPKLFLQSHDYSLYSLDVEFINEILNIRTKGRTWYILSLTLCRFLAWNYFAHLRLEVLQLTRHPENWTLQARWRLVGLPVHLLFLRFYKRDKDEHYRTYDAYSTFYLNSSGLICRHRLDKLMPSHSPPTPVKKLLVGALVALGLSEPEPDLNLCSKP

SEQ ID NO: 16248 - protein, 689 aa, Homo sapiens
MKPVHERSQECLPPKKRDLPVTSEDMGRTTSCSTNHTPSSDASEWSRGVVVAGQSQAGARVSLGGDGAEAITGLTVDQYGMLYKVAVPPATFSPTGLPSVVNMSPLPPTFNVASSLIQHPGIHYPPLHYAQLPSTSLQFIGSPYSLPYAVPPNFLPSPLLSPSANLATSHLPHFVPYASLLAEGATPPPQAPSPAHSFNKAPSATSPSGQLPHHSSTQPLDLAPGRMPIYYQMSRLPAGYTLHETPPAGASPVLTPQESQSALEAAAANGGQRPRERNLVRRESEALDSPNSKGEGQGLVPVVECVVDGQLFSGSQTPRVEVAAPAHRGTPDTDLEVQRVVGALASQDYRVVAAQRKEEPSPLNLSHHTPDHQGEGRGSARNPAELAEKSQARGFYPQSHQEPVKHRPLPKAMVVANGNLVPTGTDSGLLPVGSEILVASSLDVQARATFPDKEPTPPPITSSHLPSHFMKGAIIQLATGELKRVEDLQTQDFVRSAEVSGGLKIDSSTVVDIQESQWPGFVMLHFVVGEQQSKVSIEVPPEHPFFVYGQGWSSCSPGRTTQLFSLPCHRLQVGDVCISISLQSLNSNSVSQASCAPPSQLGPPRERPERTVLGSRELCDSEGKSQPAGEGSRVVEPSQPESGAQACWPAPSFQRYSMQGEEARAALLRPSFIPQEVKLSIEGRSNAGK

SEQ ID NO: 16249 - protein, 552 aa, Homo sapiens
MAALAAAAKKVWSARRLLVLLFTPLALLPVVFALPPKEGRCLFVILLMAVYWCTEALPLSVTALLPIVLFPFMGILPSNKVCPQYFLDTNFLFLSGLIMASAIEEWNLHRRIALKILMLVGVQPARLILGMMVTTSFLSMWLSNTASTAMMLPIANAILKSLFGQKEVRKDPSQESEENTAKTTLGRQRFHWICRLTPGRRMNIVGTSGRASSSPSPTQPVLGAQPHSRAQPLTSSCLASSRGWLWISFLYGGLSFRGWRKNKSEIRTNAEDRARAVIREEYQNLGPIKFAEQAVFILFCMFAILLFTRDPKFIPGWASLFNPGFLSDAVTGVAIVTILFFFPSQRPSLKWWFDFKAPNTETEPLLTWKKAQETVPWNIILLLGGGFAMAKGCEESGLSVWIGGQLHPLENVPPALAVLLITVVIAFFTEFASNTATIIIFLPVLAELAIRLRVHPLYLMIPGTVGCSFAFMLPVSTPPNSIAFASGHLLVKDMVRTGLLMNLMGVLLLSLAMNTWAQTIFQLGTFPDWADMYSVNVTALPPTLANDTFRTL

SEQ ID NO: 16250 - protein, 933 aa, Homo sapiens
KETPPTAHLILPEQHMSLAQQKADKNKINGEPRGGGAGGNSDSDNLDSTDCNSESSSGGKSQELNFVMDVNSSKYPSLLLHSQEEKTSTATSKTQTRLEGEVTPNSLSTSYKTVSLPLSSPNIKLNLTSPKRGQKREEGWKEVVRRSKKLSVPASVVSRIMGRGGCNITAIQDVTGAHIDVDKQKDKNGERMITIRGGTESTRYAVQLINALIQDPAKELEDLIPKNHIRTPASTKSIHANFSSGVGTTAASSKNAFPLGAPTLVTSQATTLSTFQPANKLNKNVPTNVRSSFPVSLPLAYPHPHFALLAAQTMQQIRHPRLPMAQFGGTFSPSPNTWGPFPVRPVNPGNTNSSPKHNNTSRLPNQNGTVLPSESAGLATASCPITVSSVVAASQQLCVTNTRTPSSVRKQLFACVPKTSPPATVISSVTSTCSSLPSVSSAPITSGQAPTTFLPASTSQAQLSSQKMESFSAVPPTKEKVSTQDQPMANLCTPSSTANSCSSSASNTPGAPETHPSSSPTPTSSNTQEEAQPSSVSDLSPMSMPFASNSEPAPLTLTSPRMVAADNQDTSNLPQLAVPAPRVSHRMQPRGSFYSMVPNATIHQDPQSIFVTNPVTLTPPQGPPAAVQLSSAVNIMNGSQMHINPANKSLPPTFGPATLFNHFSSLFDSSQVPANQGWGDGPLSSRVATDASFTVQSAFLGNSVLGHLENMHPDNSKAPGFRPPSQRVSTSPVATSAPPTLGQPKGVSASQDRKIPPPIGTERLARIRQGGSVAQAPAGTSFVAPVGHSGIWSFGVNAVSEGLSGWSQSVMGNHPMHQQLSDPSTFSQHQPMERDDSGMVAPSNIFHQPMASGFVDFSKGLPISMYGGTIIPSHPQLADVPGGPLFNGLHNPDPAWNPMIKVIQNSTECTDAQQIWPGTWAPHIGNMHLKYVN

SEQ ID NO: 16251 - protein, 848 aa, Homo sapiens
MAETLSGLGDSGAAGAAALSSASSETGTRRLSDLRVIDLRAELRKRNVDSSGNKSVLMERLKKAIEDEGGNPDEIEITSEGNKKTSKRSSKGRKPEEEGVEDNGLEENSGDGQIEDKETINNLDTSSSDFTILQEIEEPSLEPENEKILDILGETCKSEPVKEESSELEQPFAQDTSSVGPDRKLAEEEDLFDSAHPEEGDLDLASESTAHAQSSKADSLLAVVKREPAEQPGDGERTDCEPVGLEPAVEQSSAASELAEASSEELAEAPTEAPSPEARDSKEDGRKFDFDACNEVPPAPKESSTSEGADQKMSSPEDDSDTKRLSKEEKGRSSCGRNFWVSGLSSTTRATDLKNLFSKYGKVVGAKVVTNARSPGARCYGFVTMSTAEEATKCINHLHKTELHGKMISVEKAKNEPVGKKTSDKRDSDGKKEKSSNSDRSTNLKRDDKCDRKDDAKKGDDGSGEKSKDQDDQKPGPSERSRATKSGSRGTERTVVMDKSKGVPVISVKTSGSKERASKSQDRKSASREKRSVVSFDKVKEPRKSRDSESHSRVRERSEREQRMQAQWEREERERLEIARERLAFQRQRLERERMERERLERERMHVEHERRREQERIHREREELRRQQELRYEQERRPAVRRPYDLDRRDDAYWPEAKRAALDERYHSDFNRQDRFHDFDHRDRGRYPDHSVDRREGSRSMMGEREGQHYPERHGGPERHGRDSRDGWGGYGSDKRMSEGRGLPPPPRGRRDWGDHGRREDDRSWQGTADGGMMDRDHKRWQGGERSMSGHSGPGHMMNRGGMSGRGSFAPGGASRGHPIPHGGMQGGFGGQSRGSRPSDARFTRRY

SEQ ID NO: 16252 - protein, 669 aa, Homo sapiens
CNTECLYRQTFQAFSEMLQSLVVKDPHLENLDTIIKLPLRFQRLGHLVALMALLCGDPQEKVAEEAAEGIHSLLHITLRLKYITHDKKDQQNLKRALTKCREFLELHSSAAKCFYNCPFRIAQVPEIMGVICAQLSIISQPRVRQQIINTVSLFISRPKYTDIVLSFLLCHPVPYNRHLAEVWRMLSVELPSTTWILWRLLRKLQKCHNEPAQEKMAYVAVAATDALYEVFLGNRLRAATFRLFPQLLMTLLIQIHHSIGLTMSDVDIPSGLYTEQEVPSEVTPLCFAMQATKTLLLRTCCLQEFNIMEKNKGWALLGGKDGHLQGLFLLANALLERNQLLAQKVMYLLVPLLNRGNDKHKLTSAGFFVELLRSPVAKRLPSIYSVARFKDWLQDGNHLFRILGLRGLYNLVGHQEMREDIKSLLPYIVDSLRETDEKIVLSAIQILLQLVRTMDFTTLAAMMRTLFSLFGDVRSDVHRFSVTLFGAAIKSVKNPDKKSIENQVLDSLVPLLLYSQDENDAVAEESRQVLTICAQFLKWKLPQEVYSKDPWHIKPTEAGTICRFFEKKCKGKINILEQTLMYSKNPKLPIRRSAVLFVGLLSKYMDHNELRRMGTDWIEDDLRDLLCDPEPSLCIIASQTLLLVQMARAEPKPKQRVNWLQKLMGRSSA

SEQ ID NO: 16253 - protein, 591 aa, Homo sapiens
MSSLSALFSVSDKTGLVEFARNLTALGLNLVASGGTAKALRDAGLAVRDVSELTGFPEMLGGRVKTLHPAVHAGILARNIPEDNADMARLDFNLIRVVACNLYPFVKTVASPGVTVEEAVEQIDIGGVTLLRAAAKNHARVTVVCEPEDYVVVSTEMQSSESKDTSLETRRQLALKAFTHTAQYDEAISDYFRKQYSKGVSQMPLRYGMNPHQTPAQLYTLQPKLPITVLNGAPGFINLCDALNAWQLVKELKEALGIPAAASFKHVSPAGAAVGIPLSEDEAKVCMVYDLYKTLTPISAAYARARGADRMSSFGDFVALSDVCDVPTAKIISREVSDGIIAPGYEEEALTILSKKKNGNYCVLQMDQSYKPDENEVRTLFGLHLSQKRNNGVVDKSLFSNVVTKNKDLPESALRDLIVATIAVKYTQSNSVCYAKNGQVIGIGAGQQSRIHCTRLAGDKANYWWLRHHPQVLSMKFKTGVKRAEISNAIDQYVTGTIGEDEDLIKWKALFEEVPELLTEAEKKEWVEKLTEVSISSDAFFPFRDNVDRAKRSGVAYIAAPSGSAADKVVIEACDELGIILAHTNLRLFHH

SEQ ID NO: 16254 - protein, 134 aa, Homo sapiens
QLASMVWNNPSQQQFMQFGGSSGSQLPQIQTDVVLPSCKKKAPAETPVKERLFIVFNPHPLPLDVLEDIFCRFGNLIEVYLVSGKNVGYAKYADRISANDAIATLHGKILNGVRLKVMLADSPREESNKRQRTY

SEQ ID NO: 16255 - protein, 120 aa, Homo sapiens
MAAHHRQNTAGRRKVQVSYVIRDEVEKYNRNGVNALQLDPALNRLFTAGRDSIIRIWSVNQHKQDPYIASMEHHTDWVNDIVLCCNGKTLISASSDTTVKVWNAHKGFCMSTLRTHKLLL

SEQ ID NO: 16256 - protein, 611 aa, Homo sapiens
NKDAVNQMAVCPGNAVEPLPSNSENLQNKETEPTVTTSDAAVDLSSFKNVQHLELPKDQGGLGIAISEEDTLSGVIIKSLTEHGVAATDGRLKVGDQILAVDDEIVVGYPIEKFISLLKTAKMTVKLTIHAENPDSQAVPSAAGAASGEKKNSSQSLMVPQSGSPEPESIRNTSRSSTPAIFASDPATCPIIPGCETTIEISKGRTGLGLSIVGGSDTLLVNGIDLRKATHDEAINVLRQTPQRVRLTLYRDEAPYKEEEVCDTLTIELQKKPGKGLGLSIVGKRNDTGVFVSDIVKGGIADADGRLMQGDQILMVNGEDVRNATQEAVAALLKCSLGTVTLEVGRIKAGPFHSERRPSQSSQVSEGSLSSFTFPLSGSSTSESLESSSKKNALASEIQGLRTVEMKKGPTDSLGISIAGGVGSPLGDVPIFIAMMHPTGVAAQTQKLRVGDRIVTICGTSTEGMTHTQAVNLLKNASGSIEMQVVAGGDVSVVTGHQQEPASSSLSFTGLTSSSIFQDDLGPPQCKSITLERGPDGLGFSIVGGYGSPHGDLPIYVKTVFAKGAASEDGRLKRGDQIIAVNGQSLEGVTHEEAVAILKRTKGTVTLMVLS

SEQ ID NO: 16257 - protein, 383 aa, Homo sapiens
PKAEVWDQEFDPVMVILRTVYRRDVQSAMDRYTAFLKQSGKFPGNPWPPYKKRTSLHPSYKGLMRLLHCKTLHIVLFTLLYKILMDHQNLSEHVLCMVLYLIELGLENSAEEESDEEASVGGPERCHDSWFPGSNLVSNMRHFINYVRVRVPETAPEVKRDSPASTSSDNLGSLQNSGTAQVFSLVAERRKKFQEIINRSSSEANQVVRPKTSSKWSAPGSAPQLTTAILEIKESILSLLIKLHHKLSGKQNSYYPPWLDDIEILIQPEIPKYSHGDGITAVERILLKAASQSRMNKRIIEEICRKVTPPVPPKKVTAAEKKTLDKEERRQKARERQQKLLAEFASRQKSFMETAMDVVRQNKNNFLRNQLSNVPRADWVVLP

SEQ ID NO: 16258 - protein, 605 aa, Homo sapiens
MSSVSPIQIPSRLPLLLTHEGVLLPGSTMRTSVDSARNLQLVRSRLLKGTSLQSTILGVIPNTPDPASDAQDLPPLHRIGTAALAVQVVGSNWPKPHYTLLITGLCRFQIVQVLKEKPYPIAEVEQLDRLEEFPNTCKMREELGELSEQFYKYAVQILDAVSLEERFKMTIPLLVRQIEGLKLLQKTRKPKQDDDKRVIAIRPIRRITHISGTLEDEDEDEDNDDIVMLEKKIRTSSMPEQAHKVCVKEIKRLKKMPQSMPEYALTRNYLELMVELPWNKSTTDRLDIRAARILLDNDHYAMEKLKKRVLEYLAVRQLKNNLKGPILCFVGPPGVGKTSVGRSVAKTLGREFHRIALGGVCDQSDIRGHRRTYVGSMPGRIINGLKTVGVNNPVFLLDEVDKLGKSLQGDPAAALLEVLDPEQNHNFTDHYLNVAFDLSQVLFIATANTTATIPAALLDRMEIIQVPGYTQEEKIEIAHRHLIPKQLEQHGLTPQQIQIPQVTTLDIITRYTREAGVRSLDRKLGAICRAVAVKVAEGQHKEAKLDRSDVTEREGCREHILEDEKPESISDTTDLALPPEMPILIDFHALKDILGPPMYEMEIAS

SEQ ID NO: 16259 - protein, 561 aa, Homo sapiens
VQAAIPQTQLMLAGGQITGLTLTPAQQQLLLQQAQAQAQLLAAAVQQHSASQQHSAAGATISASAATPMTQIPLSQPIQIAQDLQQLQQLQQQNLNLQQFVLVHPTTNLQPAQFIISQTPQGQQGLLQAQNLLTQLPQQSQANLLQSQPSITLTSQPATPTRTIAATPIQTLPQSQSTPKRIDTPSLEEPSDLEELEQFAKTFKQRRIKLGFTQGDVGLAMGKLYGNDFSQTTISRFEALNLSFKNMCKLKPLLEKWLNDAENLSSDSSLSSPSALNSPGIEGLSRRRKKRTSIETNIRVALEKSFLENQKPTSEEITMIADQLNMEKEVIRVWFCNRRQKEKRINPPSSGGTSSSPIKAIFPSPTSLVATTPSLVTSSAATTLTVSPVLPLTSAAVTNLSVTGTSDTTSNNTATVISTAPPASSAVTSPSLSPSPSASASTSEASSASETSTTQTTSTPLSSPLGTSQVMVTASGLQTAAAAALQGAAQLPANASLAAMAAAAGLNPSLMAPSQFAAGGALLSLNPGTLSGALSPALMSNSTLATIQGLLHGLENFLTKN

SEQ ID NO: 16260 - protein, 448 aa, Homo sapiens
MAVAIAAARVWRLNRGLSQQQQFSSLDDKPQFPGASAEFIDKLEFIQPNVISGIPIYRVMDRQGQIINPSEDPHLPKEKVLKLYKSMTLLNTMDRILYESQRQGRISFYMTNYGEEGTHVGSAAALDNTDLVFGQYREAGVLMYRDYPLELFMAQCYGNISDLGKGRQMPVHYGCKERHFVTISSPLATQIPQAVGAAYAAKRANANRVVICYFGEGAASEGDAHAGFNFAATLECPIIFFCRNNGYAISTPTSEQYRGDGIAARGPGYGIMSIRVDGNDVFAVYNATKEARRRAVAENQPFLIEAMTYSSSPILPPDPHSREPTLTWGPLPLCRIGHHSTSDDSSAYRSVDEVNYWDKQDHPISRLRHYLLSQGWWDEEQEKAWRKQSRRKVMEAFEQAERKPKPNPNLLFSDVYQEMPAQLRKQQESLARHLQTYGEHYPLDHFDK

SEQ ID NO: 16261 - protein, 421 aa, Homo sapiens
MAAVGAGGSTAAPGPGAVSAGALEPGTASAELLLTWEEAEARGQGLPQPLPDTSVRIPAHRRLKYISLAVLVVQNASLILSIRYARTLPGDRFFATTAVVMAEVLKGLTCLLLLFAQKRGNVKHLVLFLHEAVLVQYVDTLKLAVPSLIYTLQNNLQYVAISNLPAATFQVTYQLKILTTALFSVLMLNRSLSRLQWASLLLLFTGVAIVQAQQAGGGGPRPLDQNPGAGLAAVVASCLSSGFAGVYFEKILKGSSGSVWLRNLQLGLFGTALGLVGLWWAEGTAVATRGFFFGYTPAVWGVVLNQAFGGLLVAVVVKYADNILKGFATSLSIVLSTVASIRLFGFHVDPLFALGAGLVIGAVYLYSLPRGAAKAIASASASASGPCVHQQPPGQPPPPQLSSHRGDLITEPFLPKSVLVK

SEQ ID NO: 16262 - protein, 464 aa, Homo sapiens
MTKKRIAVIGGGVSGLSSIKCCVEEGLEPVCFERTDDIGGLWRFQENPEEGRASIYKSVIINTSKEMMCFSDYPIPDHYPNFMHNAQVLEYFRMYAKEFDLLKYIRFKTTVCSVKKQPDFATSGQWEVVTESEGKKEMNVFDGVMVCTGHHTNAHLPLESFPGIEKFKGQYFHSRDYKNPEGFTGKRVIIIGIGNSGGDLAVEISQTAKQVFLSTRRGAWILNRVGDYGYPADVLFSSRLTHFIWKICGQSLANKYLEKKINQRFDHEMFGLKPKHRALSQHPTLNDDLPNRIISGLVKVKGNVKEFTETAAIFEDGSREDDIDAVIFATGYSFDFPFLEDSVKVVKNKISLYKKVFPPNLERPTLAIIGLIQPLGAIMPISELQGRWATQVFKGLKTLPSQSEMMAEISKAQEEIDKSLTMRKTSDKPKLKNILQIPDYLKTVKIINKESLRNCPGIKGPKET

SEQ ID NO: 16263 - protein, 2002 aa, Homo sapiens
MEERKHETMNPAHVLFDRFVQATTCKGTLKAFQELCDHLELKPKDYRSFYHKLKSKLNYWKAKALWAKLDKRGSHKDYKKGKACTNTKCLIIGAGPCGLRTAIDLSLLGAKVVVIEKRDAFSRNNVLHLWPFTIHDLRGLGAKKFYGKFCAGAIDHISIRQLQLILLKVALILGIEIHVNVEFQGLIQPPEDQENERIGWRALVHPKTHPVSEYEFEVIIGGDGRRNTLEGFRRKEFRGKLAIAITANFINRNTTAEAKVEEISGVAFIFNQKFFQELREATGIDLENIVYYKDDTHYFVMTAKKQSLLDKGVILHDYADTELLLSRENVDQEALLSYAREAADFSTQQQLPSLDFAINHYGQPDVAMFDFTCMYASENAALVREQNGHQLLVALVGDSLLEPFWPMGTGIARGFLAAMDSAWMVRSWSLGTSPLEVLAERESIYRLLPQTTPENVSKNFSQYSIDPVTRYPNINVNFLRPSQVRHLYDTGETKDIHLEMESLVNSRTTPKLTRNESVARSSKLLGWCQRQTDGYAGVNVTDLTMSWKSGLALCAIIHRYRPDLIDFDSLDEQNVEKNNQLAFDIAEKELGISPIMTGKEMASVGEPDKLSMVMYLTQFYEMFKDSLPSSDTLDLNAEEKAVLIASTRSPISFLSKLGQTISRKRSPKDKKEKDLDGAGKRRKTSQSEEEEAPRGHRGERPTLVSTLTDRRMDVAVGNQNKVKYMATQLLAKFEENAPAQSIGIRRQGSMKKEFPQNLGGSDTCYFCQKRVYVMERLSAEGKFFHRSCFKCEYCATTLRLSAYAYDIEDGKFYCKPHYCYRLSGYAQRKRPAVAPLSGKEAKGPLQDGATTDANGRANAVASSTERTPGSGVNGLEEPSIAKRLRGTPERIELENYRLSLRQAEALQEVPEETQAEHNLSSVLDTGAEEDVASSSSESEMEEEGEEEEEEPRLPPSDLGGVPWKEAVRIHALLKGKSEEELEASKSFGPGNEEEEEEEEEYEEEEEEDYDEEEEESSEAGNQRLQQVMHAADPLEIQADVHWTHIREREEEERMAPASESSASGAPLDENDLEEDVDSEPAEIEGEAAEDGDPGDTGAELDDDQHWSDSPSDADRELRLPCPAEGEAELELRVSEDEEKLPASPKHQERGPSQATSPIRSPQESALLFIPVHSPSTEGPQLPPVPAATQEKSPEERLFPEPLLPKEKPKADAPSDLKAVHSPIRSQPVTLPEARTPVSPGSPQPQPPVAASTPPPSPLPICSQPQPSTEATVPSPTQSPIRFQPAPAKTSTPLAPLPVQSQSDTKDRLGSPLAVDEALRRSDLVEEFWMKSAEIRRSLGLTPVDRSKGPEPSFPTPAFRPVSLKSYSVEKSPQDEGLHLLKPLSIPKRLGLPKPEGEPLSLPTPRSPSDRELRSAQEERRELSSSSGLGLHGSSSNMKTLGSQSFNTSDSAMLTPPSSPPPPPPPGEEPATLRRKLREAEPNASVVPPPLPATWMRPPREPAQPPREEVRKSFVESVEEIPFADDVEDTYDDKTEDSSLQEKFFTPPSCWPRPEKPRHPPLAKENGRLPALEGTLQPQKRGLPLVSAEAKELAEERMRAREKSVKSQALRDAMARQLSRMQQMELASGAPRPRKASSAPSQGKERRPDSPTRPTLRGSEEPTLKHEATSEEVLSPPSDSGGPDGSFTSSEGSSGKSKKRSSLFSPRRNKKEKKSKGEGRPPEKPSSNLLEEAAAKPKSLWKSVFSGYKKDKKKKADDKSCPSTPSSGATVDSGKHRVLPVVRAELQLRRQLSFSEDSDLSSDDVLEKSSQKSRREPRTYTEEELNAKLTRRVQKAARRQAKQEELKRLHRAQIIQRQLQQVEERQRRLEERGVAVEKALRGEAGMGKKDDPKLMQEWFKLVQEKNAMVRYESELMIFARELELEDRQSRLQQELRERMAVEDHLKTEEELSEEKQILNEMLEVVEQRDSLVALLEEQRLREREEDKDLEAAMLSKGFSLNWS

SEQ ID NO: 16264 - protein, 778 aa, Homo sapiens
MTMSGERECLKYRLVGSQEELASWGHEYVRHLAGEVAKEWQELDDAEKVQREPLLTLVKEIVPYNMAHNAEHEACDLLMEIEQVDMLEKDIDENAYAKVCLYLTSCVNYVPEPENSALLRCALGVFRKFSRFPEALRLALMLNDMELVEDIFTSCKDVVVQKQMAFMLGRHGVFLELSEDVEEYEDLTEIMSNVQLNSNFLALARELDIMEPKVPDDIYKTHLENNRFGGSGSQVDSARMNLASSFVNGFVNAAFGQDKLLTDDGNKWLYKNKDHGMLSAAASLGMILLWDVDGGLTQIDKYLYSSEDYIKSGALLACGIVNSGVRNECDPALALLSDYVLHNSNTMRLGSIFGLGLAYAGSNREDVLTLLLPVMGDSKSSMEVAGVTALACGMIAVGSCNGDVTSTILQTIMEKSETELKDTYARWLPLGLGLNHLGKGEAIEAILAALEVVSEPFRSFANTLVDVCAYAGSGNVLKVQQLLHICSEHFDSKEKEEDKDKKEKKDKDKKEAPADMGAHQGVAVLGIALIAMGEEIGAEMALRTFGHLLRYGEPTLRRAVPLALALISVSNPRLNILDTLSKFSHDADPEVSYNSIFAMGMVGSGTNNARLAAMLRQLAQYHAKDPNNLFMVRLAQGLTHLGKGTLTLCPYHSDRQLMSQVAVAGLLTVLVSFLDVRNIILGKSHYVLYGLVAAMQPRMLVTFDEELRPLPVSVRVGQAVDVVGQAGKPKTITGFQTHTTPVLLAHGERAELATEEFLPVTPILEGFVILRKNPNYDL

SEQ ID NO: 16265 - protein, 1015 aa, Homo sapiens
MLTALAPPALPGIPRQLPTAPARRQDSSGSSGSYYTAPGSPEPPDVGPDAKGPANWPWVAPGRGAGAQPRLSVSAQNSRQRHGPGSGFPRGPGSGPRPPQPQLRTLPSGEMEVIFGVGPLFGCSGADDREAQQQFTEPAFISPLPPGPASPAAVPRQSQVPDGGSRWATYLELRPRGPSPAAPAQFECVEVALEEGAAPARPRTVPKRQIELRPRPQSPPRAAGAPRPRLLLRTGSLDESLGPLQAAAGFVQTALARKLSPEAPAPSSATFGSTGRSEPETRETARSTHVVLEKAKSRPLRVRDNSAPAKAPRPWPSLRERAIRRDKPAPGTEPLGPVSSSIFLQSEEKIQEARKTRFPREAPDRTVQRARSPPFECRIPSEVPSRAVRPRSPSPPRQTPNGAVRGPRCPSPQNLSPWDRTTRRVSSPLFPEASSEWENQNPAVEETVSRRSPSPPILSQWNQCVAGERSPSLEAPSLWEIPHSAVADAVEPRSSPSPPAFFPWEAPDRPIGTWGPSPQETWDPMGPGSSIAFTQEAQNGLTQEELAPPTPSAPGTPEPTEMQSPSTREISDLAFGGSQQSPEVAAPEPPGSHPVGTLDADKCPEVLGPGEAASGRPRMAIPRPRDVRKLVKTTYAPGFPAGAQGSGLPAPPADPCGEEGGESKTQEPPALGPPAPAHYTSVFIKDFLPVVPHPYEPPEPSFDTVARDASQPNGVLRRRAENSTAKPFKRTEIRLPGALALGRRPEVTSRVRARGPGGENRDVEAQRLVPDGDGRTSPLGGARSSSQRSPVGPAGVRSPRPGSPQMQASPSPGIAPKPKTPPTAPEPAAAVQAPLPREPLALAGRTAPAQPRAASAPPTDRSPQSPSQGARRQPGAAPLGKVLVDPESGRYYFVEAPRQPRLRVLFDPESGQYVEVLLPPSSPGPPHRVYTPLALGLGLYPPAYGPIPSLSLPPSPGPQALGSPQLPWVSEAGPLDGTYYLPVSGTPNPAPPLLLCAPPSSSGPTQPGKGSLFPL

SEQ ID NO: 16266 - protein, 267 aa, Homo sapiens
GRSGLQQGKGNVDGVAATPTAASASCQYRCIECNQEAKELYRDYNHGVLKITICKSCQKPVDKYIEYDPVIILINAILCKAQAYRHILFNTQINIHGKLCIFCLLCEAYLRWWQLQDSNQNTAPDDLIRYAKEWDFYRMFAIAALEQTAYFIGIFTFLWVERPMTAKKKPNFILLLKALLLSSYGKLLLIPAVIWEHDYTSVCLKLIKVFVLTSNFQAIRVTLNINRKLSFLAVLSGLLLESIMVYFFQSMEWDVGSDYAIFKSQDF

SEQ ID NO: 16267 - protein, 1950 aa, Homo sapiens
MPGARRRRRGAAMEGKPRAGVALAPGPSGRRPSARCARRRRPGLLLPGLWLLLLARPASCAPDELSPEQHNLSLYSMELVLKKSTGHSAAQVALTETAPGSQHSSPLHVTAPPSATTFDTAFFNQGKQTKSTADPSIFVATYVSVTSKEVAVNDDEMDNFLPDTHWTTPRMVSPIQYITVSPPGLPREALEPMLTPSLPMVSLQDEEVTSGWQNTTRQPAAYAESASHFHTFRSAFRTSEGIVPTPGRNLVLYPTDAYSHLSSRTLPEIVASLTEGVETTLFLSSRSLMPQPLGDGITIPLPSLGEVSQPPEEVWATSADRYTDVTTVLSQSLEETISPRTYPTVTASHAALAFSRTHSPLLSTPLAFASSASPTDVSSNPFLPSDSSKTSELHSNSALPGPVDNTHILSPVSSFRPYTWCAACTVPSPQQVLATSLMEKDVGSGDGAETLCMTVLEESSISLMSSVVADFSEFEEDPQVFNTLFPSRPIVPLSSRSMEISETSVGISAEVDMSSVTTTQVPPAHGRLSVPASLDPTAGSLSVAETQVTPSSVTTAFFSVITSILLDSSFSVIANKNTPSLAVRDPSVFTPYSLVPSVESSLFSDQERSSFSEHKPRGALDFASSFFSTPPLELSGSISSPSEAPASLSLMPSDLSPFTSQSFSPLVETFTLFDSSDLQSSQLSLPSSTNLEFSQLQPSSELPLNTIMLLPSRSEVSPWSSFPSDSLEFVEASTVSLTDSEAHFTSAFIETTSYLESSLISHESAVTALVPPGSESFDILTAGIQATSPLTTVHTTPILTESSLFSTLTPPDDQISALDGHVSVLASFSKAIPTGTVLITDAYLPSGSSFVSEATPFPLPTELTVVGPSLTPTEVPLNTSTEVSTTSTGAATGGPLDSTLMGDAASQSPPESSAAPPLPSLRPVTAFTLEATVDTPTLATAKPPYVCDITVPDAYLITTVLARRAVQEYIITAIKEVLRIHFNRAVELKVYELFTDFTFLVTSGPFVYTAISVINVLINSKLVRDQTPLILSVKPSFLVPESRFQVQTVLQFVPPSVDTGFCNFTQRIEKGLMTALFEVRKHHQGTYNLTVQILNITISSSRVTPRRGPVNIIFAVKSTQGFLNGSEVSELLRNLSVVEFSFYLGYPVLQIAEPFQYPQLNLSQLLKSSWVRTVLLGVMEKQLQNEVFQAEMERKLAQLLSEVSTRRRMWRRATVAAGNSVVQVVNVSRLEGDDNPVQLIYFVEDQDGERLSAVKSSDLINKMDLQRAAIILGYRIQGVIAQPVDRVKRPSPESQSNNLWVIVGVVIPVLVVMVIVVILYWKLCRTDKLDFQPDTVANIQQRQKLQIPSVKGFDFAKQHLGQHNKDDILIIHEPAPLPGPLKDHTTPSENGDVPSPKSKIPSKNVRHRGRVSPSDADSTVSEESSERDAGDKTPGAVNDGRSHRAPQSGPPLPSSGNEQHSSASIFEHVDRISRPPEASRRVPSKIQLIAMQPIPAPPVQRPSPADRVAESNKINKEIQTALRHKSEIEHHRNKIRLRAKRRGHYEFPVVDDLSSGDTKERHRVYRRAQMQIDKILDPTASVPSVFIEPRKSSRIKRSPKPRRKHQVNGCPADAEKDRLITTDSDGTYRRPPGVHNSAYIGCPSDPDLPADVQTPSSVELGRYPALPFPASQYIPPQPSIEEARQTMHSLLDDAFALVAPSSQPASTAGVGPGVPPGLPANSTPSQEERRATQWGSFYSPAQTANNPCSRYEDYGMTPPTGPLPRPGFGPGLLQSTELVPPDPQQPQASAEAPFAARGIYSEEMPSVARPRPVGGTTGSQIQHLTQVGIASRIGAQPVEIPPSRGSQYGGPGWPSYGEDEAGRREATHMLGHQEYSSSPLFQVPRTSGREPSAPSGNLPHRGLQGPGLGYPTSSTEDLQPGHSSASLIKAIREELLRLSQKQSTVQNFHS

SEQ ID NO: 16268 - protein, 748 aa, Homo sapiens
MEDRGTPINKPPVLGYKDLNLFKLFRLVYHQGGCDNIDSGAVWKQIYMDLGIPILNSAASYNVKTAYRKYLYGFEEYCRSANIQFRTVHHHEPKVKEEKKDLEESMEEALKLDQEMPLTEVKSEPEENIDSNSESEREEIELKSPRGRRRIARDVNSIKKEIEEEKTEDKLKDNDTENKDVDDDYETAEKKENELLLGRKNTPKQKEKKIKKQEDSDKDSDEEEEKSQEREETESKCDSEGEEDEEDMEPCLTGTKVKVKYGRGKTQKIYEASIKSTEIDDGEVLYLVHYYGWNVRYDEWVKADRIIWPLDKGGPKKKQKKKAKNKEDSEKDEKRDEERQKSKRGRPPLKSTLSSNMPYGLSKTANSEGKSDSCSSDSETEDALEKNLINEELSLKDELEKNENLNDDKLDEENPKISAHILKENDRTQMQPLETLKLEVGENEQIVQIFGNKMEKTEEVKKEAEKSPKGKGRRSKTKDLSLEIIKISSFGQNEAGSEPHIEAHSLELSSLDNKNFSSATEDEIDQCVKEKKLKRKILGQSSPEKKIRIENGMEMTNTVSQERTSDCIGSEGMKNLNFEQHFERENEGMPSLIAESNQCIQQLTSERFDSPAEETVNIPLKEDEDAMPLIGPETLVCHEVDLDDLDEKDKTSIEDVAVESSESNSLVSIPPALPPVVQHNFSVASPLTLSQDESRSVKSESDITIEVDSIAEESQEGLCERESANGFETNVASGTCSIIVQERESREK

SEQ ID NO: 16269 - protein, 552 aa, Homo sapiens
FECYPPGMKVQVRYDEWIKADKIVRPADKNVPKIKHRKKIKNKLDKEKDKDEKYSPKNCKLRRLSKPPFQTNPSPEMVSKLDLTDAKNSDTAHIKSIEITSILNGLQASESSAEDSEQEDERGAQDMDNNGKEESKIDHLTNNRNDLISKEEQNSSSLLEENKVHADLVISKPVSKSPERLRKDIEVLSEDTDYEEDEVTKKRKDVKKDTTDKSSKPQIKRGKRRYCNTEECLKTGSPGKKEEKAKNKESLCMENSSNSSSDEDEEETKAKMTPTKKYNGLEEKRKSLRTTGFYSGFSEVAEKRIKLLNNSDERLQNSRAKDRKDVWSSIQGQWPKKTLKELFSDSDTEAAASPPHPAPEEGVAEESLQTVAEEESCSPSVELEKPPPVNVDSKPIEEKTVEVNDRKAEFPSSGSNSVLNTPPTTPESPSSVTVTEGSRQQSSVTVSEPLAPNQEEVRSIKSETDSTIEVDSVAGELQDLQSEGNSSPAGFDASVSSSSSNQPEPEHPEKACTGQKRVKDAQGGGSSSKKQKRSHKATVVNNKKKGKGSKCE

SEQ ID NO: 16270 - protein, 234 aa, Homo sapiens
LVEDTFTIDEVSEVLNGLQAVVHSEVESELINTAYTNVLLLRQLFAQAEKWYLKLQTDISELENRELLEQVAEFEKAEITSSNKKPILDVTKPKLAPLNEGGTAELLNKATNALDEKSKLEKALQDLQLDQGNQKDFIKAQDLSNLENTVAALKSEFQKTLNDKTENQKSLEENLATAKHDLLRVQEQLHMAEKELEKKFQQTAAYRNMKEILTKKNDQIKDLRKRLAQYEPED

SEQ ID NO: 16271 - protein, 1088 aa, Homo sapiens
MDFLRLYLPGLHQALRGALDSLGTFVSYLLGDAVPTVEREAQAAEELGVVAVGKTGKIVEEEAQEDLEGLRGSQNEGAGRLRGPGDDRRHEVGSSAVEQTWGWGDGSSHGSQAERQDSGAGETAKAARCQEPSAHLEARKKSKAGSGACQDRSGQAQERQESHEQEVNREERLRSWEQEEEEEEVRAREPGMARGAESEWTWHGETEGKAGAVGPKAAGDNREMEQGVREADAGETEEPGAEGAGKGEEVVVVEKACESTRAWGTWGPGAEPEDWGILGREEARTTPGREEARAILDGEEARTISGGEEAETASGGEEAETASGGEEAGTASGGEEAGIASGGEAGTASGGEEAGTASGGDEAWTTSGKEEADLLGVRQTEYGAVPGERLLEATGKVWVLEEEGDEEREAEVSPFPKQPQVLGTERTEEAAESQTAGREAVGGQEAGESFEGQVDLRGKEAEMRQDLGIRADRARMEELVQAEEAQEERGSSRDPVAELPSDGEAEGTADLEATPEARPEEELTGEESEAAQTSCGLLGVEWGGLTHSVTKGQGPELMGGAQTPTKQPEEREAGEVELMGVLALSKEEQERSLEAGPRHAGSVKPEASEAFPGAWENRTRKDMERGNTQEDAADGEQREEEETAGGQTLAAEAEGDRESELSEVPEAGGEGLTTQDAGCGTEEGEASVSENQELDGSTGADAGPCPSLGEAYARETEDEEAEADRTSRRGWRLQAVAVGLPDREDAQTGSVAAGIMGGDVVPHISAAGAGEALEGVLGQGWDSKEKEEAAAGEHAGGQEFGLEGSAEEEVTGRGSQVEAFESREGGPWGGRVEAEESAGAEDSCGLDPAGSQTARAEGMGAMVEAGGLLEKWTLLEEEAVGWQEREQREDSEGRCGDYHPEGEAPRLLDAEGLMVTGGRRAEAKETEPESLEHVRGQEEQPTHQAPAEAAPESVGEAETAEAMGSARGGAANSWSEAPLPGSLLDVSVPRSRVHLSRSSSQRRSRPSFRRTPAWEQQEEPPAPNPPEEELSAPEQRPLQLEEPLEPSPLRHDGTPVPARRRPLGHGFGLAHPGMMQELQARLGRPKPQ

SEQ ID NO: 16272 - protein, 990 aa, Homo sapiens
MSEETRQSKLAAAKKKLREYQQRNSPGVPTGAKKKKKIKNGSNPETTTSGGCHSPEDTPKDNAATLQPSDDTVLPGGVPSPGASLTSMAASQNHDADNVPNLMDETKTFSSTESLRQLSQQLNGLVCESATCVNGEGPASSANLKDLESRYQQLAVALDSSYVTNKQLNITIEKLKQQNQEITDQLEEEKKECHQKQGALREQLQVHIQTIGILVSEKAELQTALAHTQHAARQKEGESEDLASRLQYSRRRVGELERALSAVSTQQKKADRYNKELTKERDALRLELYKNTQSNEDLKQEKSELEEKLRVLVTEKAGMQLNLEELQKKLEMTELLLQQFSSRCEAPDANQQLQQAMEERAQLEAHLGQVMESVRQLQMERDKYAENLKGESAMWRQRMQQMSEQVHTLREEKECSMSRVQELETSLAELRNQMAEPPPPEPPAGPSEVEQQLQAEAEHLRKELEGLAGQLQAQVQDNEGLSRLNREQEERLLELERAAELWGEQAEARRQILETMQNDRTTISRALSQNRELKEQLAELQSGFVKLTNENMEITSALQSEQHVKRELGKKLGELQEKLSELKETVELKSQEAQSLQQQRDQYLGHLQQYVAAYQQLTSEKEVLHNQLLLQTQLVDQLQQQEAQGKAVAEMARQELQETQERLEAATQQNQQLRAQLSLMAHPGEGDGLDREEEEDEEEEEEEAVAVPQPMPSIPEDLESREAMVAFFNSAVASAEEEQARLRGQLKEQRVRCRRLAHLLASAQKEPEAAAPAPGTGGDSVCGETHRALQGAMEKLQSRFMELMQEKADLKERVEELEHRCIQLSGETDTIGEYIALYQSQRAVLKERHREKEEYISRLAQDKEEMKVKLLELQELVLRLVGDRNEWHGRFLAAAQNPADEPTSGAPAPQELGAANQQGDLCEVSLAGSVEPAQGEAREGSPRDNPTAQQIMQLLREMQNPRERPGLGSNPCIPFFYRADENDEVKITVI

SEQ ID NO: 16273 - protein, 77 aa, Homo sapiens
MGALGLEGRGGRLQGRGSLLLAVAGATSLVTLLLAVPITVLAVLALVPQDQGGLGFRSCQRRSQKQISAPGSQLPTS

SEQ ID NO: 16274 - protein, 847 aa, Homo sapiens
MSFSEMNRRTLAFRGGGLVTASGGGSTNNNAGGEASAWPPQPQPRQPPPPAPPALQPPNGRGADEEVELEGLEPQDLEASAGPAAGAAEEAKELLLPQDAGGPTSLGGGAGGPLLAERNRRTLAFRGGGGGGLGNNGSSRGRPETSVWPLRHFNGRGPATVDLELDALEGKELMQDGASLSDSTEDEEEGASLGDGSGAEGGSCSSSRRSGGDGGDEVEGSGVGAGEGETVQHFPLARPKSLMQKLQCSFQTSWLKDFPWLRYSKDTGLMSCGWCQKTPADGGSVDLPPVGHDELSRGTRNYKKTLLLRHHVSTEHKLHEANAQESEIPSEEGYCDFNSRPNENSYCYQLLRQLNEQRKKGILCDVSIVVSGKIFKAHKNILVAGSRFFKTLYCFSNKESPNQNNTTHLDIAAVQGFSVILDFLYSGNLVLTSQNAIEVMTVASYLQMSEVVQTCRNFIKDALNISIKSEAPESVVVDYNNRKPVNRDGLSSSRDQKIASFWATRNLTNLASNVKIENDGCNVDEGQIENYQMNDSSWVQDGSPEMAENESEGQTKVFIWNNMGSQGIQETGKTRRKNQTTKRFIYNIPPNNETNLEDCSVMQPPVAYPEENTLLIKEEPDLDGALLSGPDGDRNVNANLLAEAGTSQDGGDAGTSHDFKYGLMPGASNDFKYGLLPESWPKQETWENGESSLIMNKLKCPHCSYVAKYRRTLKRHLLIHTGVRSFSCDICGKLFTRREHVKRHSLVHKKDKKYKCMVCKKIFMLAASVGIRHGSRRYGVCVDCADKSQPGGQEGVDQGQDTEFPRDEEYEENEVGEADEELVDDGEDQNDPSRWDESGEVCMSLDD

SEQ ID NO: 16275 - protein, 1103 aa, Homo sapiens
LRWTPLNSSTIIGYRITVVAAGEGIPIFEDFVDSSVGYYTVTGLEPGIDYDISVITLINGGESAPTTLTQQTAVPPPTDLRFTNIGPDTMRVTWAPPPSIDLTNFLVRYSPVKNEEDVAELSISPSDNAVVLTNLLPGTEYVVSVSSVYEQHESTPLRGRQKTGLDSPTGIDFSDITANSFTVHWIAPRATITGYRIRHHPEHFSGRPREDRVPHSRNSITLTNLTPGTEYVVSIVALNGREESPLLIGQQSTVSDVPRDLEVVAATPTSLLISWDAPAVTVRYYRITYGETGGNSPVQEFTVPGSKSTATISGLKPGVDYTITVYAVTGRGDSPASSKPISINYRTEIDKPSQMQVTDVQDNSISVKWLPSSSPVTGYRVTTTPKNGPGPTKTKTAGPDQTEMTIEGLQPTVEYVVSVYAQNPSGESQPLVQTAVTTIPAPTDLKFTQVTPTSLSAQWTPPNVQLTGYRVRVTPKEKTGPMKEINLAPDSSSVVVSGLMVATKYEVSVYALKDTLTSRPAQGVVTTLENVSPPRRARVTDATETTITISWRTKTETITGFQVDAVPANGQTPIQRTIKPDVRSYTITGLQPGTDYKIYLYTLNDNARSSPVVIDASTAIDAPSNLRFLATTPNSLLVSWQPPRARITGYIIKYEKPGSPPREVVPRPRPGVTEATITGLEPGTEYTIYVIALKNNQKSEPLIGRKKTDELPQLVTLPHPNLHGPEILDVPSTVQKTPFVTHPGYDTGNGIQLPGTSGQQPSVGQQMIFEEHGFRRTTPPTTATPIRHRPRPYPPNVGEEIQIGHIPREDVDYHLYPHGPGLNPNASTGQEALSQTTISWAPFQDTSEYIISCHPVGTDEEPLQFRVPGTSTSATLTGLTRGATYNVIVEALKDQQRHKVREEVVTVGNSVNEGLNQPTDDSCFDPYTVSHYAVGDEWERMSESGFKLLCQCLGFGSGHFRCDSSRWCHDNGVNYKIGEKWDRQGENGQMMSCTCLGNGKGEFKCDPHEATCYDDGKTYHVGEQWQKEYLGAICSCTCFGGQRGWRCDNCRRPGGEPSPEGTTGQSYNQYSQRYHQRTNTNVNCPIECFMPLDVQADREDSRE

SEQ ID NO: 16276 - protein, 623 aa, Homo sapiens
MIVASPTENGQVLRVIPPTQTGMAQVIIPQGQLVDVNSPRDVPEEKPSNRNLPTVRVDTLADNTSNYILHPQTSFPLPKKSVTGMLEEPLLGPLQPLSSNTPIWACRLRSCEKIGDSYRGYCVSETELESVLTFHKQQTQSVWGTRQSPSPAKPATRLMWKSQYVPYDGIPFVNAGSRAVVMECQYGPRRKGFQLKKVSEQESRSCQLYKATCPARIYIKKVQKFPEYRVPTDPKIDKKIIRMEQEKAFNMLKKNLVDAGGVLRWYVQLPTQQAHQYHELETPCLTLSPSPFPVSSLEEEETAVRDENCALPSRLHPQVAHKIQELVSQGIEQVYAVRKQLRKFVERELFKPDEVPERHNLSFFPTVNDIKNHIHEVQKSLRNGDTVYNSEIIPATLQWTTDSGNILKETMTVTFAEGNSPGESITTKVETNQTRGSLSPEPTHLLSSLSSFQPKIFTQLQGLQLQPRYTSPDESPAVVSVNNQPSSSPSGLLDTIGSAVMNNNSLLLGQSHSLQRDTCLTQNNSTASTMGNLPEPDQNLVAMDELVEVGDVEDTGNLEGTVHRILLGDVQTIPIQIIDNHSALIEENPESTISVSQVKQEPKEPALSMEAKKTVDYKKLSAT

SEQ ID NO: 16277 - protein, 456 aa, Homo sapiens
MPPAVGGPVGYTPPDGGWGWAVVIGAFISIGFSYAFPKSITVFFKEIEGIFHATTSEVSWISSIMLAVMYGGGPISSILVNKYGSRIVMIVGGCLSGCGLIAASFCNTVQQLYVCIGVIGGLGLAFNLNPALTMIGKYFYKRRPLANGLAMAGSPVFLCTLAPLNQVFFGIFGWRGSFLILGGLLLNCCVAGALMRPIGPKPTKAGKDKSKASLEKAGKSGVKKDLHDANTDLIGRHPKQEKRSVFQTINQFLDLTLFTHRGFLLYLSGNVIMFFGLFAPLVFLSSYGKSQHYSSEKSAFLLSILAFVDMVARPSMGLVANTKPIRPRIQYFFAASVVANGVCHMLAPLSTTYVGFCVYAGFFGFAFGWLSSVLFETLMDLVGPQRFSSAVGLVTIVECCPVLLGPPLLGRLNDMYGDYKYTYWACGVVLIISGIYLFIGMGINYRLLAKEQKANE

SEQ ID NO: 16278 - protein, 2925 aa, Homo sapiens
MWDPRAARVPPRDLAVLLCNKSNAFFSLGKWNEAFVAAKECLQWDPTYVKGYYRAGYSLLRLHQPYEAARMFFEGLRLVQRSQDQAPVADFLVGVFTTMSSDSIVLQSFLPCFDHIFTTGFPTEVWQSVIEKLAKKGLWHSFLLLSAKKDRLPRNIHVPELSLKSLFEKYVFIGLYEKMEQVPKLVQWLISIGASVETIGPYPLHALMRLCIQARENHLFRWLMDHKPEWKGRINQKDGDGCTVLHVVAAHSPGYLVKRQTEDVQMLLRFGADPTLLDRQSRSVVDVLKRNKNFKAIEKINSHLEKLATCSKDLSGFSNGDGPTSENDIFRKVLEQLVKYMNSGNRLLHKNFLKQEVVQRFLRLLSTLQEIPPDLVCDINQDCATTVFKFLLEKQRWPEVLLLLTRKVSGEPPLGDCLIKDCNFSDLDICTIIPHLSTWDQRKKQLLGCLIDSGALPDGLQESQERPVVTCLKHEDFELAFLLLTKGADPRAISLTEGDTPLHAALHIFLEIKADIGFSFLSHLLDLFWSNPTEFDYLNPNVQDSNGNTLMHILFQKGMLKRVKKLLDLLVKFDINFNLKNKEGKDARHRIKKNDSLLLAWNKALMENRRRSRQDSAAHLGKLSKSTAPGHTSQLKSQGSFKSVPCGATARTLPEGSAVPDSWETLPGTQVTRKEPGALRPCSLRDCLMQDITVLIQQVEVDPSFPEDCLQSSEPLEAGAGKEGKKDDKPTLGAGAPDCSEVGEGHAQVGLGALQLVPDDNRGKEGNDDQDDWSTQEIEACLQDFDNMTWEIECTSEMLKKLSSKVMTKVIKKKIILAIQQLGNGEWTQGLQKRLKHLKGSIQLFEAKLDKGARMLWELAIDFSPRCSENPEKIIATEQNTCAMEKSGRIYTEIIRIWDIVLDHCKLADSIKAICNAYNRGLSCVLRKKLKGINKGQVSANMKIQKRIPRCYVEDTEAEKGREHVNPEYFPPASAVETEYNIMKFHSFSTNMAFNILNDTTATVEYPFRVGELEYAVIDLNPRPLEPIILIGRSGTGKTTCCLYRLWKKFHVYWEKAEQAGSPLLAKQVWLKRRLEVEPGKESPGGEEEEEEEDEEEEDSIEVETVESIDEQEYEACAGGAGVEPAGDGQAAEVCAPEHPHQLEHLHQIFVTKNHVLCQEVQRNFIELSKSTKATSHYKPLDPNIHKLQDLRDENFPLFVTSKQLLLLLDASLPKPFFLRNEDGSLKRTIIGWSAQEESTIPSWQEDEEEAEVDGDYSEEDKAVEMRTGDSDPRVYVTFEVFKNEIWPKMTKGRTAYNPALIWKEIKSFLKGSFEALSCPHGRLTEEVYKKLGRKRCPNFKEDRSEIYSLFSLYQQIRSQKGYFDEEDVLYNISRRLSKLRVLPWSIHELYGDEIQDFTQAELALLMKCINDPNSMFLTGDTAQSIMKGVAFRFSDLRSLFHYASRNTIDKQCAVRKPKKIHQLYQNYRSHSGILNLASGVVDLLQFYFPESFDRLPRDSGLFDGPKPTVLESCSVSDLAILLRGNKRKTQPIEFGAHQVILVANETAKEKIPEELGLALVLTIYEAKGLEFDDVLLYNFFTDSEAYKEWKIISSFTPTSTDSREENRPLVEVPLDKPGSSQGRSLMVNPEMYKLLNGELKQLYTAITRARVNLWIFDENREKRAPAFKYFIRRDFVQVVKTDENKDFDDSMFVKTSTPAEWIAQGDYYAKHQCWKVAAKCYQKGGAFEKEKLALAHDTALSMKSKKVSPKEKQLEYLELAKTYLECKEPTLSLKCLSYAKEFQLSAQLCERLGKIRDAAYFYKRSQCYKDAFRCFEQIQEFDLALKMYCQEELFEEAAIAVEKYEEMLKTKTLPISKLSYSASQFYLEAAAKYLSANKMKEMMAVLSKLDIEDQLVFLKSRKRLAEAADLLNREGRREEAALLMKQHGCLLEAARLTADKDFQASCLLGAARLNVARDSDIEHTKDILREALDICYQTGQLSGIAEAHFLQGVILRDFQKLRDAFFKFDTLNHSAGVVEALYEAASQCEAEPEKILGLAPGGLEILLSLVRALKRVTNNAEKEMVKSCFEFFGISQVDAKYCQIAQNDPGPILRIIFDLDLNLREKKTKDHFLIMTDQVKLALNKHLLGRLCQITRSLLGKTYRGVCMRFIVGLKCEDENCEHFHRPLRRCEAKCLVQSKMNLVAINGLLLEAKKVFPKILAEELKEIDYILSTDMYGLCKSILDVLFPKHFHQRVLSENPMACKEILKPNYKSFRFYRFALKEYIHFLFENESARNRRESTDLWLSAMQAFLLSSNYPEEFEKLLHQEEDNYNRELKALESEKDERGRGRGSRIKGIEGKFGMLAPNRDDENMDKTHLCFIRLLENCIDQFYVYRNPEDYKRLFFRFMNVLIKRCKEPLIPSIGNTVALLEFQFIHCGVVLARLWKNVILCLPKSYIALLHYWEFLFSKKDKELGDVFSIIQEYKPKDVTRAIQDFRFHLSYLAKVLCGYENVNFNVLLDAFSEIDYVVSGEAERTLVLCLVMLVNAEEILQPYCKPLLYRHFREIESRLQLMSMDCPGQVPERLLKVVKRVLVAVNVKSVAEALQDLLFERDEEYLMDCDWRWDPVHTKGSIVRGLYYEEVRLNRLLCLDPVDYFAEPECEFGQDEMDELALEDRDHVLATILSQKQRKASIQRKLRRACLVVSLCISWRRRVGTQMERVREEAREPRAGNFKKADVDRTQCDLCGVKFTRGPENYFSPSKAFEGAASEVAVLSRAELEREECQERNSESYEQHIHLEHHQRQQVAYQKYSEFFHEKVDPAIDEGKLVVQDIEQSVWIHSHVGSKEHSHMLQKVQEHIKRVSDMVEDLYRRKAWAGAEEAMTRLVNILILSVRDARDWLMKTETRLKKEGIVQEDDYENEVEDFGELRPRRRSRKCGKQRKY

SEQ ID NO: 16279 - protein, 392 aa, Homo sapiens
MPFLHGFRRIIFEYQPLVDAILGSLGIQDPERQESLDRPSYVASEESRILVLTELLERKAHSPFYQEGVSNALLKMAELGLTRAADVLLRHGANLNFEDPVTYYTALHIAVLRNQPDMVELLVHHGADVNRRDRIHESSPLDLASEEPERLPCLQRLLDLGADVNAADKHGADVKATTKDGDTVFTCIIFLLGETVGGDKEEAQMINRFCFQVTRLLLAHGADPSECPAHESLTHICLKSFKLHFPLLRFLLESGAAYNCSLHGASCWSGFHIIFERLCSHPGCTEDESHADLLRKAETVLDLMVTNSQKLQLPENFDIHPVGSLAEKIQALHFSLRQLESYPPPLKHLCRVAIRLYLQPWPVDVKVKALPLPDRLKWYLLSEHSGSVEDDI

SEQ ID NO: 16280 - protein, 147 aa, Homo sapiens
MGETEKRIETHRIRCLSKLKMFLLAITCAFVSKTLSGSYMNSMLTQIERQFNIPTSLVGFINGSFEIGNLLLIIFVSYFGTKLHRPIMIGIGCVVMGLGCFLKSLPHFLMNQYEYESTVSVSGNLSSNSFLCMENGTQILRPTQDPS

SEQ ID NO: 16281 - protein, 1177 aa, Homo sapiens
MLQLLVLKIEDPGCFWVIIKGCSPFLDHDVDYQKLNSAMNDFYNSTCQDIEIKPLTLEEGQVCVVYCEELKCWCRAIVKSITSSADQYLAECFLVDFAKNIPVKSKNIRVVVESFMQLPYRAKKFSLYCTKPVTLHIDFCRDSTDIVPAKKWDNAAIQYFQNLLKATTQVEARLCAVEEDTFEVYLYVTIKDEKVCVNDDLVAKNYACYMSPTKNKNLDYLEKPRLNIKSAPSFNKLNPALTLWPMFLQGKDVQGMEDSHGVNFPAQSLQHTWCKGIVGDLRPTATAQDKAVKCNMDSLRDSPKDKSEKKHHCISLKDTNKRVESSVYWPAKRGITIYADPDVPEASALSQKSNEKPLRLTEKKEYDEKNSCVKLLQFLNPDPLRADGISDLQQLQKLKGLQPPVVVLRNKIKPCLTIDSSPLSADLKKALQRNKFPGPSHTESYSWPPIARGCDVVVISHCESNPLLYLLPVLTVLQTGACYKSLPSRNGPLAVIVCPGWKKAQFIFELLGEYSMSSRPLHPVLLTIGLHKEEAKNTKLPRGCDVIVTTPYSLLRLLACQSLLFLRLCHLILDEVEVLFLEANEQMFAILDNFKKNIEVEERESAPHQIVAVGVHWNKHIEHLIKEFMNDPYIVITAMEEAALYGNVQQVVHLCLECEKTSSLLQALDFIPSQAQKTLIFTCSVAETEIVCKVVESSSIFCLKMHKEMIFNLQNVLEQWKKKLSSGSQIILALTDDCVPLLAITDATCVIHFSFPASPKVFGGRLYCMSDHFHAEQGSPAEQGDKKAKSVLLLTEKDASHAVGVLRYLERADAKVPAELYEFTAGVLEAKEDKKAGRPLCPYLKAFGFCKDKRICPDRHRINPETDLPRKLSSQALPSFGYIKIIPFYILNATNYFGRIVDKHMDLYATLNAEMNEYFKDSNKTTVEKVEKFGLYGLAEKTLFHRVQVLEVNQKEDAWALDDILVEFIDEGRTGLVTRDQLLHLPEHFHTLPPQAVEFIVCRVKPADNEIEWNPKVTRYIHHKIVGKLHDAKVILALGNTVWIDPMVHITNLSSLKTSVIDYNVRAEILSMGMGIDNPEHIEQLKKLREDAKIPACEESLSQTPPRVTGTSPAQDQDHPSEEQGGQGTPPAEDAACLQSPQPEDTGAEGGAESKTSSENQKPGGYLVFKRWLSSNR

SEQ ID NO: 16282 - protein, 162 aa, Homo sapiens
MKVTLSALDTSESSFTPLVVIELAQDVKEETKEWLKNRIIAKKKDGVRRLLTSGIVIQVFPLHDSEALKKLEDTWYTRFALKYQPIDSIRGYFGETIALYFGFLEYFTFALIPMAVIGLPYYLFVWEDYDKYVIFASFNLIWSTVILELWKRGCANMTYRWG

SEQ ID NO: 16283 - protein, 322 aa, Homo sapiens
MSASSWPQNGMPPSSLYERLSQRMLDISGDRGVLKDVIREGAGDLVAPDASVLVKYSGYLEHMDRPFDSNYFRKTPRLMKLGEDITLWGMELGLLSMRRGELARFLFKPNYAYGTLGCPPLIPPNTTVLFEIELLDFLDCAESDKFCALSAEQQDQFPLQKVLKVAATEREFGNYLFRQNRFYDAKVRYKRALLLLRRRSAPPEEQHLVEAAKLPVLLNLSFTYLKLDRPTIALCYGEQALIIDQKNAKALFRCGQACLLLTEYQKARDFLVRAQKEQPFNHDINNELKKLASCYRDYVDKEKEMWHRMFAPCGDGSTAGES

SEQ ID NO: 16284 - protein, 895 aa, Homo sapiens
MENPQDIFSSNGGCLSDIVIEKYLVESKESVSHVQLACSMQDCAFPLDGTELCIWNTKDPSHQLLILRGHHQPITAMAFGNKVNPLLICSASLDYVIMWNLDECREKVLQGLVPRGTVMGSLLGKVLCLQLSLDDHVVAVCAGNKIFMLDIEQRFSVTYIERPDVNNRHKVPPPTFLHTFSQTQAVRAELQGHLGPVTAVEFCPWRAGTLISASEDRGFKVWDHCTGSLIYSSSVLSAYPLLSLFIDAESRQLVTGCADGQLWIFSLMDGHHYRRVARVDLRKKTETFSTRRVKSGLCSQPEESQLPSTSALGKGEQVEVTFPVLRLAPCDLSLIPNSACGCLSSENTRCVWIGSSVGLFVFNLANLEVEAALYYKDFQSLSILLAGSCALRNRTADQKVLCLLASLFGGKIAVLEINPAALVRAQQCPSMGQSLSVPASSCVLPTSPLYLGIAKEKSTKAASEQRRAARNVMKDQRLVFHSKVRSSGYASAPHVTMFSPKTNIKSEGKGSSRSRSSCAREAYPVECAVPTKPGPQVAAAPTCTRVCCIQYSGDGQWLACGLANHLLLVFDASLTGTPAVFSGHDGAVNAVCWSQDRRWLLSAARDGTLRMWSARGAELALLLGKDMFSKPIQSAQFYYIDAFILLSSGPEFQLLRYHIDTCKDEIKRYKQKSKSKLICRLSTTGAVDMTSLSAVNDFYSHIVLAAGRNRTVEVFDLNAGCSAAVIAEAHSRPVHQICQNKGSSFTTQQPQAYNLFLTTAIGDGMRLWDLRTLRCERHFEGHPTRGYPCGIAFSPCGRFAACGAEDRHAYVYEMGSSTFSHRLAGHTDTVTGVAFNPSAPQMESRSVAHAGVQWHDLGSLQPPPSRFKQFFCLSLPSSWDYSLPQLPWMVNSSSF

SEQ ID NO: 16285 - protein, 492 aa, Homo sapiens
MEPSSKKLTGRLMLAVGGAVLGSLQFGYNTGVINAPQKVIEEFYNQTWVHRYGESILPTTLTTLWSLSVAIFSVGGMIGSFSVGLFVNRFGRRNSMLMMNLLAFVSAVLMGFSKLGKSFEMLILGRFIIGVYCGLTTGFVPMYVGEVSPTALRGALGTLHQLGIVVGILIAQVFGLDSIMGNKDLWPLLLSIIFIPALLQCIVLPFCPESPRFLLINRNEENRAKSVLKKLRGTADVTHDLQEMKEESRQMMREKKVTILELFRSPAYRQPILIAVVLQLSQQLSGINAVFYYSTSIFEKAGVQQPVYATIGSGIVNTAFTVVSLFVVERAGRRTLHLIGLAGMAGCAILMTIALALLEQLPWMSYLSIVAIFGFVAFFEVGPGPIPWFIVAELFSQGPRPAAIAVAGFSNWTSNFIVGMCFQYVEQLCGPYVFIIFTVLLVLFFIFTYFKVPETKGRTFDEIASGFRQGGASQSDKTPEELFHPLGADSQV

SEQ ID NO: 16286 - protein, 185 aa, Homo sapiens
MGNWESEGQVGEKGAPAGITGQMNPFEEVPEAHRASPREGTSGGERLQDLVKSKMSETSRTAFGGRRAVPPNNSNAAEDDLPTVELQGVVPRGVNLQEFLNVTSVHLFKERWDTNKVDHHTDKYENNKLIVRRGQSFYVQIDFSRPYDPRRDLFRVEYVIGRYPQENKGTYIPVPIVSELQSGKW

SEQ ID NO: 16287 - protein, 351 aa, Homo sapiens
MGVTPHHVCRPPGNVSQVVFHNHSNWSLEDTGALLSSGQKDYVTVQLQNGEIWELSRCSRNKRENTSSLGYEYTGSKKEFPCVDGYIYDQNTWKSTAVTQWNLVCDRKWLAMLIQPLFMFGVLLGSVTFGYFSDRLGRRVVLWATSSSMFLFGIAAAFAVDYYTFMAARFFLAMVASGYLVVGFVYVMEFIGMKSRTWASVHLHSFFAVGTLLVALTGYLVRTWWLYQMILSTVTVPFILCCWVLPETPFWLLSEGRYEEAQKIVDIMAKWNRASSCKLSELLSLDLQGPVSNSPTEVQKHNLSYLFYNWSITKRTLTVWLIWFTGSLGFYSFSLNSVNLGGNEYLNLFLL

SEQ ID NO: 16288 - protein, 316 aa, Homo sapiens
SKDGKSPLHMTAVHGRFTRSQTLIQNGGEIDCVDKDGNTPLHVAARYGHELLINTLITSGADTAKCGIHSMFPLHLAALNAHSDCCRKLLSSGFEIDTPDKFGRTCLHAAAAGGTPLHYAAANCHFHCIETLVTTGANVNETDDWGRTALHYAAASDMDRNKTILGNAHDNSEELERARELKEKEATLCLEFLLQNDANPSIRDKEGYNSIHYAAAYGHRQCLELLLERTNSGFEESDSGATKSPLHLAAYNGHHQALEVLLQSLVDLDIRDEKGRTALDLAAFKGHTECVEALINQGASIFVKDNVTKRTPLHAS

SEQ ID NO: 16289 - protein, 683 aa, Homo sapiens
MALFVRLLALALALALGPAATLAGPAKSPYQLVLQHSRLRGRQHGPNVCAVQKVIGTNRKYFTNCKQWYQRKICGKSTVISYECCPGYEKVPGEKGCPAALPLSNLYETLGVVGSTTTQLYTDRTEKLRPEMEGPGSFTIFAPSNEAWASLPAEVLDSLVSNVNIELLNALRYHMVGRRVLTDELKHGMTLTSMYQNSNIQIHHYPNGIVTVNCARLLKADHHATNGVVHLIDKVISTITNNIQQIIEIEDTFETLRAAVAASGLNTMLEGNGQYTLLAPTNEAFEKIPSETLNRILGDPEALRDLLNNHILKSAMCAEAIVAGLSVETLEGTTLEVGCSGDMLTINGKAIISNKDILATNGVIHYIDELLIPDSAKTLFELAAESDVSTAIDLFRQAGLGNHLSGSERLTLLAPLNSVFKDGTPPIDAHTRNLLRNHIIKDQLASKYLYHGQTLETLGGKKLRVFVYRNSLCIENSCIAAHDKRGRYGTLFTMDRVLTPPMGTVMDVLKGDNRFSMLVAAIQSAGLTETLNREGVYTVFAPTNEAFRALPPRERSRLLGDAKELANILKYHIGDEILVSGGIGALVRLKSLQGDKLEVSLKNNVVSVNKEPVAEPDIMATNGVVHVITNVLQPPANRPQERGDELADSALEIFKQASAFSRASQRSVRLAPVYQKLLERMKH

SEQ ID NO: 16290 - protein, 866 aa, Homo sapiens
MGFPPLLKGQASATRSSLASCSWVVFFLSCLSRHAPEIEGGRRWTELIRTMESRVLLRTFCLIFGLGAVWGLGVDPSLQIDVLTELELGESTTGVRQVPGLHNGTKAFLFQDTPRSIKASTATAEQFFQKLRNKHEFTILVTLKQTHLNSGVILSIHHLDHRYLELESSGHRNEVRLHYRSGSHRPHTEVFPYILADDKWHKLSLAISASHLILHIDCNKIYERVVEKPSTDLPLGTTFWLGQRNNAHGYFKGIMQDVQLLVMPQGFIAQCPDLNRTCPTCNDFHGLVQKIMELQDILAKTSAKLSRAEQRMNRLDQCYCERTCTMKGTTYREFESWIDGCKNCTCLNGTIQCETLICPNPDCPLKSALAYVDGKCCKECKSICQFQGRTYFEGERNTVYSSSGVCVLYECKDQTMKLVESSGCPALDCPESHQITLSHSCCKVCKGYDFCSERHNCMENSICRNLNDRAVCSCRDGFRALREDNAYCEDIDECAEGRHYCRENTMCVNTPGSFMCICKTGYIRIDDYSCTEHDECITNQHNCDENALCFNTVGGHNCVCKPGYTGNGTTCKAFCKDGCRNGGACIAANVCACPQGFTGPSCETDIDECSDGFVQCDSRANCINLPGWYHCECRDGYHDNGMFSPSGESCEDIDECGTGRHSCANDTICFNLDGGYDCRCPHGKNCTGDCIHDGKVKHNGQIWVLENDRCSVCSCQNGFVMCRRMVCDCENPTVDLFCCPECDPRLSSQCLHQNGETLYNSGDTWVQNCQQCRCLQGEVDCWPLPCPDVECEFSILPENECCPRCVTDPCQADTIRNDITKTCLDEMNVVRFTGSSWIKHGTECTLCQCKNGHICCSVDPQCLQEL

SEQ ID NO: 16291 - protein, 1331 aa, Homo sapiens
SLLPGITYSLRVLAFTAVGDGPPSPTIQVKTQQGVPAQPADFQAEVESDTRIQLSWLLPPQERIIMYELVYWAAEDEDQQHKVTFDPTSSYTLEDLKPDTLYRFQLAARSDMGVGVFTPTIEARTAQSMPSGPPRKVEVEPLNSTAVHVYWKLPVPSKQHGQIRGYQVTYVRLENGEPRGLPIIQDVMLAEAQETTISGLTPETTYSVTVAAYTTKGDGARSKPKIVTTTGAVPGRPTMMISTTAMNTALLQWHPPKELPGELLGYRLQYCRADEARPNTIDFGKDDQHFTVTGLHKGTTYIFRLAAKNRAGLGEEFEKEIRTPEDLPSGFPQNLHVTGLTTSTTELAWDPPVLAERNGRIISYTVVFRDINSQQELQNITTDTRFTLTGLKPDTTYDIKVRAWTSKGSGPLSPSIQSRTMPVEQVFAKNFRVAAAMKTSVLLSWEVPDSYKSAVPFKILYNGQSVEVDGHSMRKLIADLQPNTEYSFVLMNRGSSAGGLQHLVSIRTAPDLLPHKPLPASAYIEDGRFDLSMPHVQDPSLVRWFYIVVVPIDRVGGSMLTPRWSTPEELELDELLEAIEQGGEEQRRRRRQAERLKPYVAAQLDVLPETFTLGDKKNYRGFYNRPLSPDLSYQCFVLASLKEPMDQKRYASSPYSDEIVVQVTPAQQQEEPEMLWVTGPVLAVILIILIVIAILLFKRKRTHSPSSKDEQSIGLKDSLLAHSSDPVEMRRLNYQTPGSSVPSCPNTSSMRDHPPIPITDLADNIERLKANDGLKFSQEYESIDPGQQFTWENSNLEVNKPKNRYANVIAYDHSRVILTSIDGVPGSDYINANYIDGYRKQNAYIATQGPLPETMGDFWRMVWEQRTATVVMMTRLEEKSRVKCDQYWPARGTETCGLIQVTLLDTVELATYTVRTFALHKSGSSEKRELRQFQFMAWPDHGVPEYPTPILAFLRRVKACNPLDAGPMVVHCSAGVGRTGCFIVIDAMLERMKHEKTVDIYGHVTCMRSQRNYMVQTEDQYVFIHEALLEAATCGHTEVPARNLYAHIQKLGQVPPGESVTAMELEFKLLASSKAHTSRFISANLPCNKFKNRLVNIMPYELTRVCLQPIRGVEGSDYINASFLDGYRQQKAYIATQGPLAESTEDFWRMLWEHNSTIIVMLTKLREMGREKCHQYWPAERSARYQYFVVDPMAEYNMPQYILREFKVTDARDGQSRTIRQFQFTDWPEQGVPKTGEGFIDFIGQVHKTKEQFGQDGPITVHCSAGVGRTGVFITLSIVLERMRYEGVVDMFQTVKTLRTQRPAMVQTEDQYQLCYRAALEYLGSFDHYAT

SEQ ID NO: 16292 - protein, 210 aa, Homo sapiens
MEKTHRGPGLAPGQIYTYPARCWRKKRRLNILEDPRLRPCEYKIDCEAPLKKEGGLPEGPVLEALLCAETGEKKIELKEEETIMDCQKQQLLEFPHDLEVEDLEDDIPRRKNRAKGKAYGIGGLRKRQDTASLEDRDKPYVCDICGKRYKNRPGLSYHYTHTHLAEEEGEENAERHALPFHRKNNHKQFYKELAWVPEAQRKHTAKKAPD

SEQ ID NO: 16293 - protein, 238 aa, Homo sapiens
MGKCLRYITANTDTEEQSFPVPKAFNTRVEELNLDVLLQKVDHLRMSESGKSESFELLRDHKEKFRDEIEFMWRFARAYGDMYELSTNTQEKKHYANIGKTLSERAINRAPMNGHCHLWYAVLCGYVSEFEGLQNKINYGHLFKEHLDIAIKLLPEEPFLYYLKGRYCYTVSKLSWIEKKMAATLFGKIPSSTVQEALHNFLKAEELCPGYSNPNYMYLAKCYTDLEENQNALKFCNL

SEQ ID NO: 16294 - protein, 1090 aa, Homo sapiens
MERFRLEKKLPGPDEEAVVDLGKTSSTVNTKFEKEELESHRAVYIGVHVPFSKESRRRHRHRGHKHHHRRRKDKESDKEDGRESPSYDTPSQRVQFILGTEDDDEEHIPHDLFTEMDELCYRDGEEYEWKETARWLKFEEDVEDGGDRWSKPYVATLSLHSLFELRSCILNGTVMLDMRASTLDEIADMVLDNMIASGQLDESIRENVREALLKRHHHQNEKRFTSRIPLVRSFADIGKKHSDPHLLERNGILASPQSAPGNLDNSKSGEIKGNGSGGSRENSTVDFSKVDMNFMRKIPTGAEASNVLVGEVDFLERPIIAFVRLAPAVLLTGLTEVPVPTRFLFLLLGPAGKAPQYHEIGRSIATLMTDEIFHDVAYKAKDRNDLLSGIDEFLDQVTVLPPGEWDPSIRIEPPKSVPSQEKRKIPVFHNGSTPTLGETPKEAAHHAGPELQRTGRLFGGLILDIKRKAPFFLSDFKDALSLQCLASILFLYCACMSPVITFGGLLGEATEGRISAIESLFGASLTGIAYSLFAGQPLTILGSTGPVLVFEKILYKFCRDYQLSYLSLRTSIGLWTSFLCIVLVATDASSLVCYITRFTEEAFAALICIIFIYEALEKLFDLGETYAFNMHNNLDKLTSYSCVCTEPPNPSNETLAQWKKDNITAHNISWRNLTVSECKKLRGVFLGSACGHHGPYIPDVLFWCVILFFTTFFLSSFLKQFKTKRYFPTKVRSTISDFAVFLTIVIMVTIDYLVGVPSPKLHVPEKFEPTHPERGWIISPLGDNPWWTLLIAAIPALLCTILIFMDQQITAVIINRKEHKLKKGAGYHLDLLMVGVMLGVCSVMGLPWFVAATVLSISHVNSLKVESECSAPGEQPKFLGIREQRVTGLMIFILMGLSVFMTSVLKFIPMPVLYGVFLYMGVSSLKGIQLFDRIKLFGMPAKHQPDLIYLRYVPLWKVHIFTVIQLTCLVLLWVIKVSAAAVVFPMMVLALVFVRKLMDLCFTKRELSWLDDLMPESKKKKEDDKKKKEKEEAERMLQDDDDTVHLPFEGGSLLQIPVKALKYSPDKPVSVKISFEDEPRKKYVDAETSL

SEQ ID NO: 16295 - protein, 329 aa, Homo sapiens
MAEAATPGTTATTSGAGAAAATAAAASPTPIPTVTAPSLGAGGGGGGSDGSGGGWTKQVTCRYFMHGVCKEGDNCRYSHDLSDSPYSVVCKYFQRGYCIYGDRCRYEHSKPLKQEEATATELTTKSSLAASSSLSSIVGPLVEMNTGEAESRNSNFATVGAGSEDWVNAIEFVPGQPYCGRTAPSCTEAPLQGSVTKEESEKEQTAVETKKQLCPYAAVGECRYGENCVYLHGDSCDMCGLQVLHPMDAAQRSQHIKSCIEAHEKDMELSFAVQRSKDMVCGICMEVVYEKANPSERRFGILSNCNHTYCLKCIRKWRSAKQFESKIIK

SEQ ID NO: 16296 - protein, 302 aa, Homo sapiens
MELRSYQWEVIMPALEGKNIIIWLPTGAGKTRAAAYVAKRHLETVDGAKVVVLVNRVHLVTQHGEEFRRMLDGRWTVTTLSGDMGPRAGFGHLARCHDLLICTAELLQMALTSPEEEEHVELTVFSLIVVDECHHTHKDTVYNVIMSQYLELKLQRAQPLPQVLGLTASPGTGGASKLDGAINHVLQLCANLDTWCIMSPQNCCPQLQEHSQQPCKQYNLCHRRSQDPFGDLLKKLMDQIHDHLEMPELSRKFGTQMYEQQVVKLSEAAALAGLQEQRVYALHLRRYNDALLIHDTVRAVDA

SEQ ID NO: 16297 - protein, 1340 aa, Homo sapiens
MFKGVASSRFLPKGTKTKVNLEEQGRQKVSFSFSLTKKTLQNRFLTALGNEKQSDTPNPPAVPLQVDSTPKMKMEIGDTLSTAEESSPPKSRVELGKIHFKKHLLHVTSRPLLATTTAVASPPTHAAPLPAVIAESTTVDSPPSSPPPPPPPAQATTLSSPAPVTEPVALPHTPITVLMAAPVPLPVDVAVRSLKEPPIIIVPESLEADTKQDTISNSLEEHVTQILNEQADISSKKEDSHIGKDEEIPDSSKISLSCKKTGSKKKSSQSEGIFLGSESDEDSVRTSSSQRSHDLKFSASIEKERDFKKSSAPLKSEDLGKPSRSKTDRDDKYFSYSKLERDTRYVSSRCRSERERRRSRSHSRSERGSRTNLSYSRSERSHYYDSDRRYHRSSPYRERTRYSRPYTDNRARESSDSEEEYKKTYSRRTSSHSSSYRDLRTSSYSKSDRDCKTETSYLEMERRGKYSSKLERESKRTSENEAIKRCCSPPNELGFRRGSSYSKHDSSASRYKSTLSKPIPKSDKFKNSFCCTELNEEIKQSHSFSLQTPCSKGSELRMINKNPEREKAGSPAPSNRLNDSPTLKKLDELPIFKSEFITHDSHDSIKELDSLSKVKNDQLRSFCPIELNINGSPGAESDLATFCTSKTDAVLMTSDDSVTGSELSPLVKACMLSSNGFQNISRCKEKDLDDTCMLHKKSESPFRETEPLVSPHQDKLMSMPVMTVDYSKTVVKEPVDTRVSCCKTKDSDIYCTLNDSNPSLCNSEAENIEPSVMKISSNSFMNVHLESKPVICDSRNLTDHSKFACEEYKQSIGSTSSASVNHFDDLYQPIGSSGIASSLQSLPPGIKVDSLTLLKCGENTSPVLDAVLKSKKSSEFLKHAGKETIVEVGSDLPDSGKGFASRENRRNNGLSGKCLQEAQEEGNSILPERRGRPEISLDERGEGGHVHTSDDSEVVFSSCDLNLTMEDSDGVTYALKCDSSGHAPEIVSTVHEDYSGSSESSNDESDSEDTDSDDSSIPRNRLQSVVVVPKNSTLPMEETSPCSSRSSQSYRHYSDHWEDERLESRRHLYEEKFESIASKACPQTDKFFLHKGTEKNPEISFTQSSRKQIDNRLPELSHPQSDGVDSTSHTDVKSDPLGHPNSEETVKAKIPSRQQEELPIYSSDFEDVPNKSWQQTTFQNRPDSRLGKTELSFSSSCEIPHVDGLHSSEELRNLGWDFSQEKPSTTYQQPDSSYGACGGHKYQQNAEQYGGTRDYWQGNGYWDPRSGRPPGTGVVYDRTQGQVPDSLTDDREEEENWDQQDGSHFSDQSDKFLLSLQKDKGSVQAPEISSNSIKDTLAVN

SEQ ID NO: 16298 - protein, 572 aa, Homo sapiens
MERPEEGKQSPPPQPWGRLLRLGAEEGEPHVLLRKREWTIGRRRGCDLSFPSNKLVSGDHCRIVVDEKSGQVTLEDTSTSGTVINKLKVVKKQTCPLQTGDVIYLVYRKNEPEHRSGGGGISPKGSGPSVASDEVSSFASALPDRKTASFSSLEPQDQEDLEPVKKKMRGDGDLDLNGQLLVAQPRRNAQTVHEDVRAAAGKPDKMEETLTCIICQDLLHDCVSLQPCMHTFCAACYSGWMERSSLCPTCRCPVERICKNHILNNLVEAYLIQHPDKSRSEEDVQSMDARNKITQDMLQPKVRRSFSDEEGSSEDLLELSDVDSESSDISQPYVVCRQCPEYRRQAAQPPHCPAPEGEPGAPQALGDAPSTSVSLTTAVQDYVCPLQGSHALCTCCFQPMPDRRAEREQDPRVAPQQCAVCLQPFCHLYWGCTRTGCYGCLAPFCELNLGDKCLDGVLNNNSYESDILKNYLATRGLTWKNMLTESLVALQRGVFLLSDYRVTGDTVLCYCCGLRSFRELTYQYRQNIPASELPVAVTSRPDCYWGRNCRTQVKAHHAMKFNHICEQTRFKN

SEQ ID NO: 16299 - protein, 1447 aa, Homo sapiens
MGLRPGIFLLELLLLLGQGTPQIHTSPRKSTLEGQLWPETLKNSPFPCNPNKLGVNMPSKSVHSLKPSDIKFVAAIGNLEIPPDPGTGDLEKQDWTERPQQVCMGVMTVLSDIIRYFSPSVPMPVCHTGKRVIPHDGAEDLWIQAQELVRNMKENLQLDFQFDWKLINVFFSNASQCYLCPSAQQAPSLSTVLLSQNGLAAGGVDELMGVLDYLQQEVPRAFVNLVDLSEVAEVSRQYHGTWLSPAPEPCNCSEETTRLAKVVMQWSYQEAWNSLLASSRYSEQESFTVVFQPFFYETTPSLHSEDPRLQDSTTLAWHLWNRMMEPAGEKDEPLSVKHGRPMKCPSQESPYLFSYRNSNYLTRLQKPQDKLEVREGAEIRCPDKDPSDTVPTSVHRLKPADINVIGALGDSLTAGNGAGSTPGNVLDVLTQYRGLSWSVGGDENIGTVTTLANILREFNPSLKGFSVGTGKETSPNAFLNQAVAGGRAEDLPVQARRLVDLMKNDTRIHFQEDWKIITLFIGGNDLCDFCNDLVPRAFVNLVTVLEIVNLRELYQEKKVYCPRMILRSLCPCVLKFDDNSTELATLIEFNKKFQEKTHQLIESGRYDTREDFTVVVQPFFENVDMPKTSEGLPDNSFFAPDCFHFSSKSHSRAASALWNNMLEPVGQKTTRHKFENKINITCPNQVQPFLRTYKNSMQGHGTWLPCRDRAPSALHPTSVHALRPADIQVVAALGDSLTAGNGIGSKPDDLPDVTTQYRGLSYSAGGDGSLENVTTLPNILREFNRNLTGYAVGTGDANDTNAFLNQAVPGAKAEDLMSQVQTLMQKMKDDHRVNFHEDWKVITVLIGGSDLCDYCTDSNLYSAANFVHHLRNALDVLHREVPRVLVNLVDFLNPTIMRQVFLGNPDKCPVQQASVLCNCVLTLRENSQELARLEAFSRAYRSSMRELVGSGRYDTQEDFSVVLQPFFQNIQLPVLADGLPDTSFFAPDCIHPNQKFHSQLARALWTNMLEPLGSKTETLDLRAEMPITCPTQNEPFLRTPRNSNYTYPIKPAIENWGSDFLCTEWKASNSVPTSVHQLRPADIKVVAALGDSLTTAVGARPNNSSDLPTSWRGLSWSIGGDGNLETHTTLPNILKKFNPYLLGFSTSTWEGTAGLNVAAEGARARDMPAQAWDLVERMKNSPDINLEKDWKLVTLFIGVNDLCHYCENPEAHLATEYVQHIQQALDILSEELPRAFVNVVEVMELASLYQGQGGKCAMLAAQNNCTCLRHSQSSLEKQELKKVNWNLQHGISSFSYWHQYTQREDFAVVVQPFFQNTLTPLNERGDTDLTFFSEDCFHFSDRGHAEMAIALWNNMLEPVGRKTTSNNFTHSRAKLKCPSPESPYLYTLRNSRLLPDQAEEAPEVLYWAVPVAAGVGLVVGIIGTVVWRCRRGGRREDPPMSLRTVAL

SEQ ID NO: 16300 - protein, 639 aa, Homo sapiens
MNRKDSKRKSHQECTGKIGGRGRPRQVRRHKTCPSPREISKVMASMNLGLLSEGGCSEDELLEKCIQSFDSAGSLCHEDHMLNMVLAMHSWVLPSADLAARLLTSYQKATGDTQELRRLQICHLVRYWLMRHPEVMHQDPQLEEVIGRFWATVAREGNSAQRRLGDSSDLLSPGGPGPPLPMSSPGLGKKRKVSLLFDHLETGELAQHLTYLEFRSFQAITVMVLSRPGPLQRAQVLDKFIHVAQRLHQLQNFNTLMAVTGGLCHSAISRLKDSHAHLSPDSTKALLELTELLASHNNYARYRRTWAGCAGFRLPVLGVHLKDLVSLHEAQPDRLPDGRLHLPKLNNLYLRLQELVALQGQHPPCSANEDLLHLLTLSLDLFYTEDEIYELSYAREPRCPKSLPPSPFNAPLVVEWAPGVTPKPDRVTLGRHVEQLVESVFKNYDPEGRGTISQEDFERLSGNFPFACHGLHPPPRQGRGSFSREELTGYLLRASAICSKLGLAFLHTFHEVTFRKPTFCDSCSGFLWGVTKQGYRCRECGLCCHKHCRDQVKVECKKRPGAKGDAGPPGAPVPSTPAPHASCGSEENHSYTLSLEPETGCQLRHAWTQTESPHPSWETDTVPCPVMDPPSTASSKLDS

SEQ ID NO: 16301 - protein, 447 aa, Homo sapiens
MDHAEENEILAATQRYYVERPIFSHPVLQERLHTKDKVPDSIADKLKQAFTCTPKKIRNIIYMFLPITKWLPAYKFKEYVLGDLVSGISTGVLQLPQGLAFAMLAAVPPIFGLYSSFYPVIMYCFLGTSRHISIGPFAVISLMIGGVAVRLVPDDIVIPGGVNATNGTEARDALRVKVAMSVTLLSGIIQFCLGVCRFGFVAIYLTEPLVRGFTTAAAVHVFTSMLKYLFGVKTKRYSGIFSVVYSTVAVLQNVKNLNVCSLGVGLMVFGLLLGGKEFNERFKEKLPAPIPLEFFAVVMGTGISAGFNLKESYNVDVVGTLPLGLLPPANPDTSLFHLVYVDAIAIAIVGFSVTISMAKTLANKHGYQVDGNQELIALGLCNSIGSLFQTFSISCSLSRSLVQEGTGGKTQTIWLTTFVSSLFLGLDYGLITAVIIALLTVIYRTQR

SEQ ID NO: 16302 - protein, 979 aa, Homo sapiens
MLCWGNASFGQLGLGGIDEEIVLEPRKSDFFINKRVRDVGCGLRHTVFVLDDGTVYTCGCNDLGQLGHEKSRKKPEQVVALDAQNIVAVSCGEAHTLALNDKGQVYAWGLDSDGQLGLVGSEECIRVPRNIKSLSDIQIVQVACGYYHSLALSKASEVFCWGQNKYGQLGLGTDCKKQTSPQLLKSLLGIPFMQVAAGGAHSFVLTLSGAIFGWGRNKFGQLGLNDENDRYVPNLLKSLRSQKIVYICCGEDHTAALTKEGGVFTFGAGGYGQLGHNSTSHEINPRKVFELMGSIVTEIACGRQHTSAFVPSSGRIYSFGLGGNGQLGTGSTSNRKSPFTVKGNWYPYNGQCLPDIDSEEYFCVKRIFSGGDQSFSHYSSPQNCGPPDDFRCPNPTKQIWTVNEALIQKWLSYPSGRFPVEIANEIDGTFSSSGCLNGSFLAVSNDDHYRTGTRFSGVDMNAARLLFHKLIQPDHPQISQQVAASLEKNLIPKLTSSLPDVEALRFYLTLPECPLMSDSNNFTTIAIPFGTALVNLEKAPLKVLENWWSVLEPPLFLKIVELFKEVVVHLLKLYKIGIPPSERRIFNSFLHTALKVLEILHRVNEKMGQIIQYDKFYIHEVQELIDIRNDYINWVQQQAYGMDVNHGLTELADIPVTICTYPFVFDAQAKTTLLQTDAVLQMQMAIDQAHRQNVSSLFLPVIESVNPCLILVVRRENIVGDAMEVLRKTKNIDYKKPLKVIFVGEDAVDAGGVRKEFFLLIMRELLDPKYGMFRYYEDSRLIWFSDKITVENFGATEVKELVLNGADTAVNKQNRQEFVDAYVDYIFNKSVASLFDAFHAGFHKVCGGKVLLLFQPNELQAMVIGNTNYDWKELEKNTEYKGEYWAEHPTIKIFWEVFHELPLEKKKQFLLFLTGSDRIPILGMKSLKLVIQSTGGGEEYLPVSHTCFNLLDLPKYTEKETLRSKLIQAIDHNEGFSLI

SEQ ID NO: 16303 - protein, 740 aa, Homo sapiens
PLLPAPSGSSAPPHPAKMPSGTEQQTEGTSVTFSPLKSPPQLEREMASPPECSEMPLDLSSKSNRQKLPLPNQRKTPPMPVLTPVHTSSKALLSTVLSRSQRTTQAAGGNVTSCLGSTSSPFVIFPEIVRNGDPSTWVKNSTALISTIPGTYVGVANPVPASLLLNKDPNLGLNRDPRHLPKQEPISIIDQGEPKGTGATCGKKGSQAGAEGQPSTVKRYTPARIAPGLPGCQTKELSLWKPTGPANIYPRCSVNGKPTSTQVLPVGWSPYHQASLLSIGISSAGQLTPSQGAPIRPTSVVSEFSGVPSLSSSEAVHGLPEGQPRPGGSFVPEQDPVTKNKTCRIAAKPYEEQVNPVLLTLSPQTGTLALSVQPSGGDIRMNQGPEESESHLCSDSTPKMEGPQGACGLKLAGDTKPKNQVLATYMSHELVLATPQNLPKMPELPLLPHDSHPKELILDVVPSSRRGSSTERPQLGSQVDLGRVKMEKVDGDVVFNLATCFRADGLPVAPQRGQAEVRAKAGQARVKQESVGVFACKNKWQPDDVTESLPPKKMKCGKEKDSEEQQLQPQAKAVVRSSHRPKCRKLPSDPQESTKKSPRGASDSGKEHNGVRGKHKHRKPTKPESQSPGKRADSHEEGSLEKKAKSSFRDFIPVVLSTRTRSQSDLKARKQKTSSSQSLEHRLRNRNLLLPNKVQGISDSPNGFLPNNLEEPACLENSEKPSGKRKCKTKHMATVSEEAK

SEQ ID NO: 16304 - protein, 433 aa, Homo sapiens
MSRSPDAKEDPVECPLCMEPLEIDDINFFPCTCGYQICRFCWHRIRTDENGLCPACRKPYPEDPAVYKPLSQEELQRIKNEKKQKQNERKQKISENRKHLASVRVVQKNLVFVVGLSQRLADPEVLKRPEYFGKFGKIHKVVINNSTSYAGSQGPSASAYVTYIRSEDALRAIQCVNNVVVDGRTLKASLGTTKYCSYFLKNMQCPKPDCMYLHELGDEAASFTKEEMQAGKHQEYEQKLLQELYKLNPNFLQLSTGSVDKNKNKVTPLQRYDTPIDKPSDSLSIGNGDNSQQISNSDTPSPPPGLSKSNPVIPISSSNHSARSPFEGAVTESQSLFSDNFRHPNPIPSGLPPFPSSPQTSSDWPTAPEPQSLFTSETIPVSSSTDWQAAFGFGSSKQPEDDLGFDPFDVTRKALADLTEPIERKRLAVLKRR

SEQ ID NO: 16305 - protein, 1032 aa, Homo sapiens
MGRESRHYRKRSASRGRSGSRSRSRSPSDKRSKRGDDRRSRSRDRDRRRERSRSRDKRRSRSRDRKRLRRSRSRERDRSRERRRSRSRDRRRSRSRSRGRRSRSSSPGNKSKKTENRSRSKEKTDGGESSKEKKKDKDDKEDEKEKDAGNFDQNKLEEEMRKRKERVEKWREEQRKKAMENIGELKKEIEEMKQGKKWSLEDDDDDEDDPAEAEKEGNEMEGEELDPLDAYMEEVKEEVKKFNMRSVKGGGGNEKKSGPTVTKVVTVVTTKKAVVDSDKKKGELMENDQDAMEYSSEEEEVDLQTALTGYQTKQRKLLEPVDHGKIEYEPFRKNFYVEVPELAKMSQEEVNVFRLEMEGITVKGKGCPKPIKSWVQCGISMKILNSLKKHGYEKPTPIQTQAIPAIMSGRDLIGIAKTGSGKTIAFLLPMFRHIMDQRSLEEGEGPIAVIMTPTRELALQITKECKKFSKTLGLRVVCVYGGTGISEQIAELKRGAEIIVCTPGRMIDMLAANSGRVTNLRRVTYVVLDEADRMFDMGFEPQVMRIVDNVRPDRQTVMFSATFPRAMEALARRILSKPIEVQVGGRSVVCSDVEQQVIVIEEEKKFLKLLELLGHYQESGSVIIFVDKQEHADGLLKDLMRASYPCMSLHGGIDQYDRDSIINDFKNGTCKLLVATSVAARGLDVKHLILVVNYSCPNHYEDYVHRAGRTGRAGNKGYAYTFITEDQARYAGDIIKALELSGTAVPPDLEKLWSDFKDQQKAEGKIIKKSSGFSGKGFKFDETEQALANERKKLQKAALGLQDSDDEDAAVDIDEQIESMFNSKKRVKDMAAPGTSSVPAPTAGNAEKLEIAKRLALRINAQKNLGIESQVDVMQQATNAILRGGTILAPTVSAKTIAEQLAEKINAKLNYVPLEKQEEERQDGGQNESFKRYEEELEINDFPQTARWKVTSKEALQRISEYSEAAITIRGTYFPPGKEPKEGERKIYLAIESANELAVQKAKAEITRLIKEELIRLQNSYQPTNKGRYKVL

SEQ ID NO: 16306 - protein, 299 aa, Homo sapiens
MVEKEEAGGGISEEEAAQYDRQIRLWGLEAQKRLRASRVLLVGLKGLGAEIAKNLILAGVKGLTMLDHEQVTPEDPGAQFLIRTGSVGRNRAEASLERAQNLNPMVDVKVDTEDIEKKPESFFTQFDAVCLTCCSRDVIVKVDQICHKNSIKFFTGDVFGYHGYTFANLGEHEFVEEKTKVAKVSQGVEDGPDTKRAKLDSSETTMVKKKVVFCPVKEALEVDWSSEKAKAALKRTTSDYFLLQGPVSAGPSSQQLLLLRWHEGEWDCGVPWPQVNSRFGSPRDANCSMPTCIPCPLPS

SEQ ID NO: 16307 - protein, 618 aa, Homo sapiens
MVWESQQERGGQGPRRQEGRSREGAIRMVRGSQRRKLQKFTRLCGREEGLRVKRSCPSCGSELGVEEKRGKGNPISIQLFPPELVEHIISFLPVRDLVALGQTCRYFHEVCDGEGVWRRICRRLSPRLQDQGSGVRPWKRAAILNYTKGLYFQAFGGRRRCLSKSVAPLLAHGYRRFLPTKDHVFILDYVGTLFFLKNALVSTLGQMQWKRACRYVVLCRGAKDFASDPRCDTVYRKYLYVLATREPQEVVGTTSSRACDCVEVYLQSSGQRVFKMTFHHSMTFKQIVLVGQETQRALLLLTEEGKIYSLVVNETQLDQPRSYTVQLALRKVSHYLPHLRVACMTSNQSSTLYVTDQGGVYFEVHTPGVYRDLFGTLQAFDPLDQQMPLALSLPAKILFCALGYNHLGLVDEFGRIFMQGNNRYGQLGTGDKMDRGEPTQVCYLQRPITLWCGLNHSLVLSQSSEFSKELLGCGCGAGGRLPGWPKGSASFVKLQVKVPLCACALCATRECLYILSSHDIEQHAPYRHLPASRVVGTPEPSLGARAPQDPGGMAQACEEYLSQIHSCQTLQDRTEKMKEIVGWMPLMAAQKDFFWEALDMLQRAEGGGGGVGPPAPET

SEQ ID NO: 16308 - protein, 147 aa, Homo sapiens
MSSVAVLTQESFAEHRSGLVPQQIKVATLNSEEESDPPTYKDAFPPLPEKAACLESAQEPAGAWGNKIRPIKASVITQVFHVPLEERKYKDMNQFGEGEQAKICLEIMQRTGAHLELSLAKDQGLSIMVSGKLDAVMKARKDIVARL

SEQ ID NO: 16309 - protein, 764 aa, Homo sapiens
MGSNLSPQLCLMPFILGLLSGGVTTTPWSLARPQGSCSLEGVEIKGGSFRLLQEGQALEYVCPSGFYPYPVQTRTCRSTGSWSTLKTQDQKTVRKAECRAIHCPRPHDFENGEYWPRSPYYNVSDEISFHCYDGYTLRGSANRTCQVNGRWSGQTAICDNGAGYCSNPGIPIGTRKVGSQYRLEDSVTYHCSRGLTLRGSQRRTCQEGGSWSGTEPSCQDSFMYDTPQEVAEAFLSSLTETIEGVDAEDGHGPGEQQKRKIVLDPSGSMNIYLVLDGSDSIGASNFTGAKKCLVNLIEKVASYGVKPRYGLVTYATYPKIWVKVSEADSSNADWVTKQLNEINYEDHKLKSGTNTKKALQAVYSMMSWPDDVPPEGWNRTRHVIILMTDGLHNMGGDPITVIDEIRDLLYIGKDRKNPREDYLDVYVFGVGPLVNQVNINALASKKDNEQHVFKVKDMENLEDVFYQMIDESQSLSLCGMVWEHRKGTDYHKQPWQAKISVIRPSKGHESCMGAVVSEYFVLTAAHCFTVDDKEHSIKVSVGGEKRDLEIEVVLFHPNYNINGKKEAGIPEFYDYDVALIKLKNKLKYGQTIRPICLPCTEGTTRALRLPPTTTCQQQKEELLPAQDIKALFVSEEEKKLTRKEVYIKNGDKKGSCERDAQYAPGYDKVKDISEVVTPRFLCTGGVSPYADPNTCRGDSGGPLIVHKRSRFIQVGVISWGVVDVCKNQKRQKQVPAHARDFHINLFQVLPWLKEKLQDEDLGFL

SEQ ID NO: 16310 - protein, 749 aa, Homo sapiens
NIDVTDPESCSRVTGECLRCLHNTQGANCQLCKPGHYGSALNQTCRRCSCHASGVSPMECPPGGGACLCDPVTGACPCLPNVTGLACDRCADGYWNLVPGRGCQSCDCDPRTSQSSHCDQLTGQCPCKLGYGGKRCSECQENYYGDPPGRCIPCDCNRAGTQKPICDPDTGMCRCREGVSGQRCDRCARGHSQEFPTCLQCHLCFDQWDHTISSLSKAVQGLMRLAANMEDKRETLPVCEADFKDLRGNVSEIERILKHPVFPSGKFLKVKDYHDSVRRQIMQLNEQLKAVYEFQDLKDTIERAKNEADLLLEDLQEEIDLQSSVLNASIADSSENIKKYYHISSSAEKKINETSSTINTSANTRNDLLTILDTLTSKGNLSLERLKQIKIPDIQILNEKVCGDPGNVPCVPLPCGGALCTGRKGHRKCRGPGCHGSLTLSTNALQKAQEAKSIIRNLDKQVRGLKNQIESISEQAEVSKNNALQLREKLGNIRNQSDSEEENINLFIKKVKNFLLEENVPPEDIEKVANGVLDIHLPIPSQNLTDELVKIQKHMQLCEDYRTDENRLNEEADGAQKLLVKAKAAEKAANILLNLDKTLNQLQQAQITQGRANSTITQLTANITKIKKNVLQAENQTREMKSELELAKQRSGLEDGLSLLQTKLQRHQDHAVNAKVQAESAQHQAGSLEKEFVELKKQYAILQRKTSTTGLTKETLGKVKQLKDAAEKLAGDTEAKIRRITGCFQNSAR

SEQ ID NO: 16311 - protein, 217 aa, Homo sapiens
PWLGIRISESPEPGQRTFTTLSSVNCPFISTLSTEGCSSNLEIGNDDYVSEPQQEPCPYACVISLGDDSETDTEGDSESCSAREQECEVKLPFNAQRIISLSRNDFQSLLKMHKLTPEQLDCIHDIRRRSKNRIAAQRCRKRKLDCIQNLESEIEKLNHGLWSLNQQPWFANIPCTIVETGWMPCALSGHVRPTEGQIRVKRKPEDGRDIFEGTSCQ

SEQ ID NO: 16312 - protein, 8525 aa, Homo sapiens
MADDEDYEEVVEYYTEEVVYEEVPGETITKIYETTTTRTSDYEQSETSKPALAQPALAQPASAKPVERRKVIRKKVDPSKFMTPYIAHSQKMQDLFSPNKYKEKFEKTKGQPYASTTDTPELRRIKKVQDQLSEVKYRMDGDVAKTICHVDEKAKDIEHAKKVSQQVSKVLYKQNWEDTKDKYLLPPDAPELVQAVKNTAMFSKKLYTEDWEADKSLFYPYNDSPELRRVAQAQKALSDVAYKKGLAEQQAQFTPLADPPDIEFAKKVTNQVSKQKYKEDYENKIKGKWSETPCFEVANARMNADNISTRKYQEDFENMKDQIYFMQTETPEYKMNKKAGVAASKVKYKEDYEKNKGKADYNVLPASENPQLRQLKAAGDALSDKLYKENYEKTKAKSINYCETPKFKLDTVLQNFSSDKKYKDSYLKDILGHYVGSFEDPYHSHCMKVTAQNSDKNYKAEYEEDRGKGFFPQTITQEYEAIKKLDQCKDHTYKVHPDKTKFTQVTDSPVLLQAQVNSKQLSDLNYKAKHESEKFKCHIPPDTPAFIQHKVNAYNLSDNLYKQDWEKSKAKKFDIKVDAIPLLAAKANTKNTSDVMYKKDYEKNKGKMIGVLSINDDPKMLHSLKVAKNQSDRLYKENYEKTKAKSMNYCETPKYQLDTQLKNFSEARYKDLYVKDVLGHYVGSMEDPYHTHCMKVAAQNSDKSYKAEYEEDKGKCYFPQTITQEYEAIKKLDQCKDHTYKVHPDKTKFTAVTDSPVLLQAQLNTKQLSDLNYKAKHEGEKFKCHIPADAPQFIQHRVNAYNLSDNVYKQDWEKSKAKKFDIKVDAIPLLAAKANTKNTSDVMYKKDYEKSKGKMIGALSINDDPKMLHSLKTAKNQSDREYRKDYEKSKTIYTAPLDMLQVTQAKKSQAIASDVDYKHILHSYSYPPDSINVDLAKKAYALQSDVEYKADYNSWMKGCGWVPFGSLEMEKAKRASDILNEKKYRQHPDTLKFTSIEDAPITVQSKINQAQRSDIAYKAKGEEIIHKYNLPPDLPQFIQAKVNAYNISENMYKADLKDLSKKGYDLRTDAIPIRAAKAARQAASDVQYKKDYEKAKGKMVGFQSLQDDPKLVHYMNVAKIQSDREYKKDYEKTKSKYNTPHDMFNVVAAKKAQDVVSNVNYKHSLHHYTYLPDAMDLELSKNMMQIQSDNVYKEDYNNWMKGIGWIPIGSLDVEKVKKAGDALNEKKYRQHPDTLKFTSIVDSPVMVQAKQNTKQVSDILYKAKGEDVKHKYTMSPDLPQFLQAKCNAYNISDVCYKRDWYDLIAKGNNVLGDAIPITAAKASRNIASDYKYKEAYEKSKGKHVGFRSLQDDPKLVHYMNVAKLQSDREYKKNYENTKTSYHTPGDMVSITAAKMAQDVATNVNYKQPLHHYTYLPDAMSLEHTRNVNQIQSDNVYKDEYNSFLKGIGWIPIGSLEVEKVKKAGDALNERKYRQHPDTVKFTSVPDSMGMVLAQHNTKQLSDLNYKVEGEKLKHKYTIDPELPQFIQAKVNALNMSDAHYKADWKKTIAKGYDLRPDAIPIVAAKSSRNIASDCKYKEAYEKAKGKQVGFLSLQDDPKLVHYMNVAKIQSDREYKKGYEASKTKYHTPLDMVSVTAAKKSQEVATNANYRQSYHHYTLLPDALNVEHSRNAMQIQSDNLYKSDFTNWMKGIGWVPIESLEVEKAKKAGEILSEKKYRQHPEKLKFTYAMDTMEQALNKSNKLNMDKRLYTEKWNKDKTTIHVMPDTPDILLSRVNQITMSDKLYKAGWEEEKKKGYDLRPDAIAIKAARASRDIASDYKYKKAYEQAKGKHIGFRSLEDDPKLVHFMQVAKMQSDREYKKGYEKSKTSFHTPVDMLSVVAAKKSQEVATNANYRNVIHTYNMLPDAMSFELAKNMMQIQSDNQYKADYADFMKGIGWLPLGSLEAEKNKKAMEIISEKKYRQHPDTLKYSTLMDSMNMVLAQNNAKIMNEHLYKQAWEADKTKVHIMPDIPQIILAKANAINMSDKLYKLSLEESKKKGYDLRPDAIPIKAAKASRDIASDYKYKYNYEKGKGKMVGFRSLEDDPKLVHSMQVAKMQSDREYKKNYENTKTSYHTPADMLSVTAAKDAQANITNTNYKHLIHKYILLPDAMNIELTRNMNRIQSDNEYKQDYNEWYKGLGWSPAGSLEVEKAKKATEYASDQKYRQHPSNFQFKKLTDSMDMVLAKQNAHTMNKHLYTIDWNKDKTKIHVMPDTPDILQAKQNQTLYSQKLYKLGWEEALKKGYDLPVDAISVQLAKASRDIASDYKYKQGYRKQLGHHVGFRSLQDDPKLVLSMNVAKMQSEREYKKDFEKWKTKFSSPVDMLGVVLAKKCQELVSDVDYKNYLHQWTCLPDQNDVVQAKKVYELQSENLYKSDLEWLRGIGWSPLGSLEAEKNKRASEIISEKKYRQPPDRNKFTSIPDAMDIVLAKTNAKNRSDRLYREAWDKDKTQIHIMPDTPDIVLAKANLINTSDKLYRMGYEELKRKGYDLPVDAIPIKAAKASREIASEYKYKEGFRKQLGHHIGARNIEDDPKMMWSMHVAKIQSDREYKKDFEKWKTKFSSPVDMLGVVLAKKCQTLVSDVDYKNYLHQWTCLPDQSDVIHARQAYDLQSDNLYKSDLQWLKGIGWMTSGSLEDEKNKRATQILSDHVYRQHPDQFKFSSLMDSIPMVLAKNNAITMNHRLYTEAWDKDKTTVHIMPDTPEVLLAKQNKVNYSEKLYKLGLEEAKRKGYDMRVDAIPIKAAKASRDIASEFKYKEGYRKQLGHHIGARAIRDDPKMMWSMHVAKIQSDREYKKDFEKWKTKFSSPVDMLGVVLAKKCQTLVSDVDYKNYLHQWTCLPDQSDVIHARQAYDLQSDNMYKSDLQWMRGIGWVSIGSLDVEKCKRATEILSDKIYRQPPDRFKFTSVTDSLEQVLAKNNAITMNKRLYTEAWDKDKTQIHIMPDTPEIMLARMNKINYSESLYKLANEEAKKKGYDLRSDAIPIVAAKASRDIISDYKYKDGYCKQLGHHIGARNIEDDPKMMWSMHVAKIQSDREYKKDFEKWKTKFSSPVDMLGVVLAKKCQTLVSDVDYKNYLHEWTCLPDQSDVIHARQAYDLQSDNIYKSDLQWLRGIGWVPIGSMDVVKCKRATEILSDNIYRQPPDKLKFTSVTDSLEQVLAKNNALNMNKRLYTEAWDKDKTQIHIMPDTPEIMLARQNKINYSETLYKLANEEAKKKGYDLRSDAIPIVAAKASRDVISDYKYKDGYRKQLGHHIGARNIEDDPKMMWSMHVAKIQSDREYKKDFEKWKTKFSSPVDMLGVVLAKKCQTLVSDVDYKNYLHEWTCLPDQNDVIHARQAYDLQSDNIYKSDLQWLRGIGWVPIGSMDVVKCKRAAEILSDNIYRQPPDKLKFTSVTDSLEQVLAKNNALNMNKRLYTEAWDKDKTQVHIMPDTPEIMLARQNKINYSESLYRQAMEEAKKEGYDLRSDAIPIVAAKASRDIASDYKYKEAYRKQLGHHIGARAVHDDPKIMWSLHIAKVQSDREYKKDFEKYKTRYSSPVDMLGIVLAKKCQTLVSDVDYKHPLHEWICLPDQNDIIHARKAYDLQSDNLYKSDLEWMKGIGWVPIDSLEVVRAKRAGELLSDTIYRQRPETLKFTSITDTPEQVLAKNNALNMNKRLYTEAWDNDKKTIHVMPDTPEIMLAKLNRINYSDKLYKLALEESKKEGYDLRLDAIPIQAAKASRDIASDYKYKEGYRKQLGHHIGARNIKDDPKMMWSIHVAKIQSDREYKKEFEKWKTKFSSPVDMLGVVLAKKCQILVSDIDYKHPLHEWTCLPDQNDVIQARKAYDLQSDAIYKSDLEWLRGIGWVPIGSVEVEKVKRAGEILSDRKYRQPADQLKFTCITDTPEIVLAKNNALTMSKHLYTEAWDADKTSIHVMPDTPDILLAKSNSANISQKLYTKGWDESKMKDYDLRADAISIKSAKASRDIASDYKYKEAYEKQKGHHIGAQSIEDDPKIMCAIHAGKIQSEREYKKEFQKWKTKFSSPVDMLSILLAKKCQTLVTDIDYRNYLHEWTCMPDQNDIIQAKKAYDLQSDSVYKADLEWLRGIGWMPEGSVEMNRVKVAQDLVNERLYRTRPEALSFTSIVDTPEVVLAKANSLQISEKLYQEAWNKDKSNITIPSDTPEMLQAHINALQISNKLYQKDWNDAKQKGYDIRADAIEIKHAKASREIASEYKYKEGYRKQLGHHMGFRTLQDDPKSVWAIHAAKIQSDREYKKAYEKSKGIHNTPLDMMSIVQAKKCQVLVSDIDYRNYLHQWTCLPDQNDVIQAKKAYDLQSDNLYKSDLEWLKGIGWLPEGSVEVMRVKNAQNLLNERLYRIKPEALKFTSIVDTPEVIQAKINAVQISEPLYRDAWEKEKANVNVPADTPLMLQSKINALQISNKRYQQAWEDVKMTGYDLRADAIGIQHAKASRDIASDYLYKTAYEKQKGHYIGCRSAKEDPKLVWAANVLKMQNDRLYKKAYNDHKAKISIPVDMVSISAAKEGQALASDVDYRHYLHHWSCFPDQNDVIQARKAYDLQSDSVYKADLEWLRGIGWMPEGSVEMNRVKVAQDLVNERLYRTRPEALSFTSIVDTPEVVLAKANSLQISEKLYQEAWNKDKSNITIPSDTPEMLQAHINALQISNKLYQKDWNDTKQKGYDIRADAIEIKHAKASREIASEYKYKEGYRKQLGHHMGFRTLQDDPKSVWAIHAAKIQSDREYKKAYEKSKGIHNTPLDMMSIVQAKKCQVLVSDIDYRNYLHQWTCLPDQNDVIQAKKAYDLQSDNLYKSDLEWLKGIGWLPEGSVEVMRVKNAQNLLNERLYRIKPEALKFTSIVDTPEVIQAKINAVQISEPLYRNAWEKEKANVNVPADTPLMLQSKINALQISNKRYQQAWEDVKMTGYDLRADAIGIQHAKASRDIASDYLYKTAYEKQKGHYIGCRSAKEDPKLVWAANVLKMQNDRLYKKAYNDHKAKISIPVDMVSISAAKEGQALASDVDYRHYLHHWSCFPDQNDVIQARKAYDLQSDSVYKADLEWLRGIGWMPEGSVEMNRVKVAQDLVNERLYRTRPEALSFTSIVDTPEVVLAKANSLQISEKLYQEAWNKDKSNITIPSDTPEMLQAHINALQISNKLYQKDWNDTKQKGYDIRADAIEIKHAKASREIASEYKYKEGYRKQLGHHMGFRTLQDDPKSVWAIHAAKIQSDREYKKAYEKSKGIHNTPLDMMSIVQAKKCQVLVSDIDYRNYLHQWTCLPDQNDVIQAKKAYDLQSDNLYKSDLEWLKGIGWLPEGSVEVMRVKNAQNLLNERLYRIKPEALKFTSIVDTPEVIQAKINAVQISEPLYRDAWEKEKANVNVPADTPLMLQSKINALQISNKRYQQAWEDVKMTGYDLRADAIGIQHAKASRDIASDYLYKTAYEKQKGHYIGCRSAKEDPKLVWAANVLKMQNDRLYKKAYNDHKAKISIPVDMVSISAAKEGQALASDVDYRHYLHRWSCFPDQNDVIQARKAYDLQSDALYKADLEWLRGIGWMPQGSPEVLRVKNAQNIFCDSVYRTPVVNLKYTSIVDTPEVVLAKSNAENISIPKYREVWDKDKTSIHIMPDTPEINLARANALNVSNKLYREGWDEMKAGCDVRLDAIPIQAAKASREIASDYKYKLDHEKQKGHYVGTLTARDDNKIRWALIADKLQNEREYRLDWAKWKAKIQSPVDMLSILHSKNSQALVSDMDYRNYLHQWTCMPDQNDVIQAKKAYELQSDNVYKADLEWLRGIGWMPNDSVSVNHAKHAADIFSEKKYRTKIETLNFTPVDDRVDYVTAKQSGEILDDIKYRKDWNATKSKYTLTETPLLHTAQEAARILDQYLYKEGWERQKATGYILPPDAVPFVHAHHCNDVQSELKYKAEHVKQKGHYVGVPTMRDDPKLVWFEHAGQIQNERLYKEDYHKTKAKINIPADMVSVLAAKQGQTLVSDIDYRNYLHQWMCHPDQNDVIQARKAYDLQSDNVYRADLEWLRGIGWIPLDSVDHVRVTKNQEMMSQIKYKKNALENYPNFRSVVDPPEIVLAKINSVNQSDVKYKETFNKAKGKYTFSPDTPHISHSKDMGKLYSTILYKGAWEGTKAYGYTLDERYIPIVGAKHADLVNSELKYKETYEKQKGHYLAGKVIGEFPGVVHCLDFQKMRSALNYRKHYEDTKANVHIPNDMMNHVLAKRCQYILSDLEYRHYFHQWTSLLEEPNVIRVRNAQEILSDNVYKDDLNWLKGIGCYVWDTPQILHAKKSYDLQSQLQYTAAGKENLQNYNLVTDTPLYVTAVQSGINASEVKYKENYHQIKDKYTTVLETVDYDRTRNLKNLYSSNLYKEAWDRVKATSYILPSSTLSLTHAKNQKHLASHIKYREEYEKFKALYTLPRSVDDDPNTARCLRVGKLNIDRLYRSVYEKNKMKIHIVPDMVEMVTAKDSQKKVSEIDYRLRLHEWICHPDLQVNDHVRKVTDQISDIVYKDDLNWLKGIGCYVWDTPEILHAKHAYDLRDDIKYKAHMLKTRNDYKLVTDTPVYVQAVKSGKQLSDAVYHYDYVHSVRGKVAPTTKTVDLDRALHAYKLQSSNLYKTSLRTLPTGYRLPGDTPHFKHIKDTRYMSSYFKYKEAYEHTKAYGYTLGPKDVPFVHVRRVNNVTSERLYRELYHKLKDKIHTTPDTPEIRQVKKTQEAVSELIYKSDFFKMQGHMISLPYTPQVIHCRYVGDITSDIKYKEDLQVLKGFGCFLYDTPDMVRSRHLRKLWSNYLYTDKARKMRDKYKVVLDTPEYRKVQELKTHLSELVYRAAGKKQKSIFTSVPDTPDLLRAKRGQKLQSQYLYVELATKERPHHHAGNQTTALKHAKDVKDMVSEKKYKIQYEKMKDKYTPVPDTPILIRAKRAYWNASDLRYKETFQKTKGKYHTVKDALDIVYHRKVTDDISKIKYKENYMSQLGIWRSIPDRPEHFHHRAVTDTVSDVKYKEDLTWLKGIGCYAYDTPDFTLAEKNKTLYSKYKYKEVFERTKSDFKYVADSPINRHFKYATQLMNEKKYRADYEQRKDKYHLVVDEPRHLLAKTAGDQISQIKYRKNYEKSKDKFTSIVDTPEHLRTTKVNKQISDILYKLEYNKAKPRGYTTIHDTPMLLHVRKVKDEVSDLKYKEVYQRNKSNCTIEPDAVHIKAAKDAYKVNTNLDYKKQYEANKAHWKWTPDRPDFLQAAKSSLQQSDFEYKLDREFLKGCKLSVTDDKNTVLALRNTLIESDLKYKEKHVKERGTCHAVPDTPQILLAKTVSNLVSENKYKDHVKKHLAQGSYTTLPETRDTVHVKEVTKHVSDTNYKKKFVKEKGKSNYSIMLEPPEVKHAMEVAKKQSDVAYRKDAKENLHYTTVADRPDIKKATQAAKQASEVEYRAKHRKEGSHGLSMLGRPDIEMAKKAAKLSSQVKYRENFDKEKGKTPKYNPKDSQLYKVMKDANNLASEVKYKADLKKLHKPVTDMKESLIMNHVLNTSQLASSYQYKKKYEKSKGHYHTIPDNLEQLHLKEATELQSIVKYKEKYEKERGKPMLDFETPTYITAKESQQMQSGKEYRKDYEESIKGRNLTGLEVTPALLHVKYATKIASEKEYRKDLEESIRGKGLTEMEDTPDMLRAKNATQILNEKEYKRDLELEVKGRGLNAMANETPDFMRARNATDIASQIKYKQSAEMEKANFTSVVDTPEIIHAQQVKNLSSQKKYKEDAEKSMSYYETVLDTPEIQRVRENQKNFSLLQYQCDLKNSKGKITVVQDTPEILRVKENQKNFSSVLYKEDVSPGTAIGKTPEMMRVKQTQDHISSVKYKEAIGQGTPIPDLPEVKRVKETQKHISSVMYKENLGTGIPTTVTPEIERVKRNQENFSSVLYKENLGKGIPTPITPEMERVKRNQENFSSILYKENLSKGTPLPVTPEMERVKLNQENFSSVLYKENVGKGIPIPITPEMERVKHNQENFSSVLYKENLGTGIPIPITPEMQRVKHNQENLSSVLYKENMGKGTPLPVTPEMERVKHNQENISSVLYKENMGKGTPLPVTPEMERVKHNQENISSVLYKENMGKGTPLAVTPEMERVKHNQENISSVLYKENVGKATATPVTPEMQRVKRNQENISSVLYKENLGKATPTPFTPEMERVKRNQENFSSVLYKENMRKATPTPVTPEMERAKRNQENISSVLYSDSFRKQIQGKAAYVLDTPEMRRVRETQRHISTVKYHEDFEKHKGCFTPVVTDPITERVKKNMQDFSDINYRGIQRKVVEMEQKRNDQDQETITGLRVWRTNPGSVFDYDPAEDNIQSRSLHMINVQAQRRSREQSRSASALSISGGEEKSEHSEAPDHHLSTYSDGGVFAVSTAYKHAKTTELPQQRSSSVATQQTTVSSIPSHPSTAGKIFRAMYDYMAADADEVSFKDGDAIINVQAIDEGWMYGTVQRTGRTGMLPANYVEAI

SEQ ID NO: 16313 - protein, 318 aa, Homo sapiens
MSAHNRGTELDLSWISKIQVNHPAVLRRAEQIQARRTVKKEWQAAWLLKAVTFIDLTTLSGDDTSSNIQRLCYKAKYPIREDLLKALNMHDKGITTAAVCVYPARVCDAVKALKAAGCNIPVASVAAGFPAGQTHLKTRLEEIRLAVEDGATEIDVVINRSLVLTGQWEALYDEIRQFRKACGEAHLKTILATGELGTLTNVYKASMIAMMAGSDFIKTSTGKETVNATFPVAIVMLRAIRDFFWKTGNKIGFKPAGGIRSAKDSLAWLSLVKEELGDEWLKPELFRIGASTLLSDIERQIYHHVTGRYAAYHDLPMS

SEQ ID NO: 16314 - protein, 1272 aa, Homo sapiens
MVAAAAATEARLRRRTAATAALAGRSGGPHWDWDVTRAGRPGLGAGLRLPRLLSPPLRPRLLLLLLLLSPPLLLLLLPCEAEAAAAAAAVSGSAAAEAKECDRPCVNGGRCNPGTGQCVCPAGWVGEQCQHCGGRFRLTGSSGFVTDGPGNYKYKTKCTWLIEGQPNRIMRLRFNHFATECSWDHLYVYDGDSIYAPLVAAFSGLIVPERDGNETVPEVVATSGYALLHFFSDAAYNLTGFNITYSFDMCPNNCSGRGECKISNSSDTVECECSENWKGEACDIPHCTDNCGFPHRGICNSSDVRGCSCFSDWQGPGCSVPVPANQSFWTREEYSNLKLPRASHKAVVNGNIMWVVGGYMFNHSDYNMVLAYDLASREWLPLNRSVNNVVVRYGHSLALYKDKIYMYGGKIDSTGNVTNELRVFHIHNESWVLLTPKAKEQYAVVGHSAHIVTLKNGRVVMLVIFGHCPLYGYISNVQEYDLDKNTWSILHTQGALVQGGYGHSSVYDHRTRALYVHGGYKAFSANKYRLADDLYRYDVDTQMWTILKDSRFFRYLHTAVIVSGTMLVFGGNTHNDTSMSHGAKCFSSDFMAYDIACDRWSVLPRPDLHHDVNRFGHSAVLHNSTMYVFGGFNSLLLSDILVFTSEQCDAHRSEAACLAAGPGIRCVWNTGSSQCISWALATDEQEEKLKSECFSKRTLDHDRCDQHTDCYSCTANTNDCHWCNDHCVPRNHSCSEGQISIFRYENCPKDNPMYYCNKKTSCRSCALDQNCQWEPRNQECIALPENICGIGWHLVGNSCLKITTAKENYDNAKLFCRNHNALLASLTTQKKVEFVLKQLRIMQSSQSMSKLTLTPWVGLRKINVSYWCWEDMSPFTNSLLQWMPSEPSDAGFCGILSEPSTRGLKAATCINPLNGSVCERPANHSAKQCRTPCALRTACGDCTSGSSECMWCSNMKQCVDSNAYVASFPFGQCMEWYTMSTCPPENCSGYCTCSHCLEQPGCGWCTDPSNTGKGKCIEGSYKGPVKMPSQAPTGNFYPQPLLNSSMCLEDSRYNWSFIHCPACQCNGHSKCINQSICEKCENLTTGKHCETCISGFYGDPTNGGKCQPCKCNGHASLCNTNTGKCFCTTKGVKGDECQLCEVENRYQGNPLRGTCYYTLLIDYQFTFSLSQEDDRYYTAINFVATPDEQNRDLDMFINASKNFNLNITWAASFSAGTQAGEEMPVVSKTNIKEYKDSFSNEKFDFRNHPNITFFVYVSNFTWPIKIQVQTEQ

SEQ ID NO: 16315 - protein, 136 aa, Homo sapiens
LHASSPYFTFTSHCVIPKEWHKASARARSKTYKYSPEKLIYADKKQKRKEKKTADLSQAAFERQFLSSKLSQKNKVGERKGLVLGTRQQRPRSWAAGDSQQHRGPQPVGKRVMTAEVLGQHLASLQKVARQGHPWY

SEQ ID NO: 16316 - protein, 255 aa, Homo sapiens
DSEFPIDMQPNPNLNVSKESLSPAKFDYKLKNIFRLHELPVSCVSMQPHKDILVSCGEDRLWKVLGLPKCNVLLTGFGHTDWLSDCCFHPSERCRCTLYGHTDSVNSIEFFPFSNTLLTSSADKTLSIWDARTGICEQSLYGHMHSINDAIFDPRGHMIASCDACGVTKLWDFRKLLPIVSIDIGPSPGNEVNFDSSGRVLAQASGNGVIHLLDLKSGEIHKLMGHENEAHTVVFSHDGEILFSGGSDGTVRTWS

SEQ ID NO: 16317 - protein, 363 aa, Homo sapiens
MACWPQLRLLLWKNLTFRRRQTCQLLLEVAWPLFIFLILISVRLSYPPYEQHECHFPNKAMPSAGTLPWVQGIICNANNPCFRYPTPGEAPGVVGNFNKSIVARLFSDARRLLLYSQKDTSMKDMRKVLRTLQQIKKSSSNLKLQDFLVDNETFSGFLYHNLSLPKSTVDKMLRADVILHKVFLQGYQLHLTSLCNGSKSEEMIQLGDQEVSELCGLPREKLAAAERVLRSNMDILKPILMDVTCDDIAHGQLTVPRSAAVAATGDAKPNMMGRETLLSICASVPKVEFHERHILKHFSFCVCVSVSLFPAKGIVSFSWASFRIWVLWKAVFWQHGESMAVWEGQLGLGLNIAFEYFTSIDVG

SEQ ID NO: 16318 - protein, 244 aa, Homo sapiens
MTEPGASPEDPWVKVEYAYSDNSLDPGLFVESTRKGSVVSRANSIGSTSASSVPNTDDEDSDYHQEAYKESYKDRRRRAHTQAEQKRRDAIKRGYDDLQTIVPTCQQQDFSIGSQKLSKAIVLQKTIDYIQFLHKEKKKQEEEVSTLRKDVTALKIMKVNYEQIVKAHQDNPHEGEDQVSDQVKFNVFQGIMDSLFQSFNASISVASFQELSACVFSWIEEHCKPQTLREIVIGVLHQLKNQLY

SEQ ID NO: 16319 - protein, 289 aa, Homo sapiens
MPVDNRNHNEGMVTRCIIEVLSNALSKSSAPPITPECRQVLKTSRKDVKDKETTENENTKFEVRLLRDPADASEAHESSSRGEAGAPGEEDIQGPTKADTEKWAEGGGHSRERADEPQWSLYPSDSQVSEEVKTRHSEKSQREDEEEEEGENYQKGERGEDSSEEKHLEEPGETQNAFLNERKQASAIKKEELVARSETHAAGHSQEKTHSREKSSQESGEETGSQENHPQESKGQPRSQEESEEGEEDATSEVDKRRTRPRHHHGRSRPDRSSQGGSLPSEEKGHPQE

SEQ ID NO: 16320 - protein, 1323 aa, Homo sapiens
INDILLAPPTVQGGIAENLAEKLIGVLFEVWLLACTRCFPTPPYWKTAKEMVANWRHHPAVVEQWSKVICALTSRLLRFTYGPSFPAFKVPDEDASLIPPEMDNECVAQTWFRFLHMLSNPVDLSNPAIISSTPKFQEQFLNVSGMPQELNQYPCLKHLPQIFFRAMRGISCLVDAFLGISRPRSDSAPPTPVNRLSMPQSAAVSTTPPHNRRHRAVTVNKATMKTSTVSTAHASKVQHQTSSTSPLSSPNQTSSEPRPLPAPRRPKVNSILNLFGSWLFDAAFVHCKLHNGINRDSSMTAITTQASMEFRRKGSQMSTDTMVSNPMFDASEFPDNYEAGRAEACGTLCRIFCSKKTGEEILPAYLSRFYMLLIQGLQINDYVCHPVLASVILNSPPLFCCDLKGIDVVVPYFISALETILPDRELSKFKSYVNPTELRRSSINILLSLLPLPHHFGTVKSEVVLEGKFSNDDSSSYDKPITFLSLKLRLVNILIGALQTETDPNNTQMILGAMLNIVQDSALLEAIGCQMEMGGGENNLKSHSRTNSGISSASGGSTEPTTPDSERPAQALLRDYALNTDSAAGLLIRSIHLVTQRLNSQWRQDMSISLAALELLSGLAKVKVMVDSGDRKRAISSVCTYIVYQCSRPAPLHSRDLHSMIVAAFQCLCVWLTEHPDMLDEKDCLKEVLEIVELGISGSKSKNNEQEVKYKGDKEPNPASMRVKDAAEATLTCIMQLLGAFPSPSGPASPCSLVNETTLIKYSRLPTINKHSFRYFVLDNSVILAMLEQPLGNEQNDFFPSVTVLVRGMSGRLAWAQQLCLLPRGAKANQKLFVPEPRPVPKNDVGFKYSVKHRPFPEEVDKIPFVKADLSIPDLHEIVTEELEERHEKLRSGMAQQIAYEIHLEQQSEEELQKRSFPDPVTDCKPPPPAQEFQTARLFLSHFGFLSLEALKEPANSRLPPHLIALDSTIPGFFDDIGYLDLLPCRPFDTVFIFYMKPGQKTNQEILKNVESSRTVQPHFLEFLLSLGWSVDVGRHPGWTGHVSTSWSINCCDDGEGSQQEEVISSEDIGASIFNGQKKVLYYADALTEIAFVVPSPVESLTDSLESNISDQDSDSNMDLMPGILKQPSLTLELFPNHTDNLNSSQRLSPSSRMRKLPQGRPVPPLGPETRVSVVWVERYDDIENFPLSELMTEISTGVETTANSSTSLRSTTLEKEVPVIFIHPLNTGLFRIKIQGATGKFNMVIPLVDGMIVSRRALGFLVRQTVINICRRKRLESDSYSPPHVRRKQKITDIVNKYRNKQLEPEFYTSLFQEVGLKNCSS

SEQ ID NO: 16321 - protein, 782 aa, Homo sapiens
MDICEGRLTCPLNSAVVLASYAVQSHFGDYNSSIHHPGYLSDSHFIPDQNEDFLTKVESLHEQHSGLKQSEAESCYINIARTLDFYGVELHSGRDLHNLDLMIGIASAGVAVYRKYICTSFYPWVNILKISFKRKKFFIHQRQKQAESREHIVAFNMLNYRSCKNLWKSCVEHHTFFQAKKLLPQEKNVLSQYWTMGSRNTKKSVNNQYCKKVIGGMVWNPAMRRSLSVEHLETKSLPSRSPPITPNWRSPRLRHEIRKPRHSSADNLANEMTYITETEDVFYTYKGSLAPQDSDSEVSQNRSPHQESLSENNPAQSYLTQKSSSSVSPSSNAPGSCSPDGVDQQLLDDFHRVTKGGSTEDASQYYCDKNDNGDSYLVLIRITPDEDGKFGFNLKGGVDQKMPLVVSRINPESPADTCIPKLNEGDQIVLINGRDISEHTHDQVVMFIKASRESHSRELALVIRRRAVRSFADFKSEDELNQLFPEAIFPMCPEGGDTLEGSMAQLKKGLESGTVLIQFEQLYRKKPGLAITFAKLPQNLDKNRYKDVLPYDTTRVLLQGNEDYINASYVNMEIPAANLVNKYIATQGPLPHTCAQFWQVVWDQKLSLIVMLTTLTERGRTKCHQYWPDPPDVMNHGGFHIQCQSEDCTIAYVSREMLVTNTQTGEEHTVTHLQYVAWPDHGVPDDSSDFLEFVNYVRSLRVDSEPVLVHCSAGIGRTGVLVTMETAMCLTERNLPIYPLDIVRKMRDQRAMMVQTSSQYKFVCEAILRVYEEGLVQMLDPS

SEQ ID NO: 16322 - protein, 543 aa, Homo sapiens
MNCLEGPGKTCGPLASEEELVSACQLEKEEENEGEEEEEEEDEEDLDPDLDPDLEEEENDLGDPAVLGAVHNTQRALLSSPGVKAPGMLGMSLASLHFLWQTLDYLSPIPFWPTFPSTSSPAQHFGPRLPSPDPTLFCSLLTSWPPRFSHLTQLHPRHQRILQQQQHSQTPSPPAKKPWSQQPDPYANLMTRKEKDWVIKVQMVQLQSAKPRLDDYYYQEYYQKLEKKQADEELLGRRNRVESLKLVTPYIPKAEAYESVVRIEGSLGQVAVSTCFSPRRAIDAVPHGTQEQDIEAASSQRLRVLYRIEKMFLQLLEIEEGWKYRPPPPCFSEQQSNQVEKLFQTLKTQEQNNLEEAADGFLQVLSVRKGKALVARLLPFLPQDQAVTILLAITHHLPLLVRRDVADQALQMLFKPLGKCISHLTLHELLQGLQGLTLLPPGSSERPVTVVLQNQFGISLLYALLSHGEQLVSLHSSLEEPNSDHTAWTDMVVLIAWEIAQMPTASLAEPLAFPSNLLPLFCHHVDKQLVQQLEARMEFAWIY

SEQ ID NO: 16323 - protein, 218 aa, Homo sapiens
MLQEWLAAVGDDYAAVVWRPEGEPRFYPDEEGPKHWTKERHQFLMELKQEALTFARNWGADYILFADTDNILTNNQTLRLLMGQGLPVVAPMLDSQTYYSNFWCGITPQGYYRRTAEYFPTKNRQRRGCFRVPMVHSTFLASLRAEGADQLAFYPPHPNYTWPFDDIIVFAYACQAAGVSVHVCNEHRYGYMNVPVKSHQGLEDERVNFIHLILEALG

SEQ ID NO: 16324 - protein, 643 aa, Homo sapiens
MALRKAGDLEPQFTPERRFRLCWYQAHSGRALLGPPPQASPPAGGLALALLLLSWVALGPRSLEGADPGTPGEAEGPACPAACVCSYDDDADELSVFCSSRNLTRLPDGVPGGTQALWLDGNNLSSVPPAAFQNLSSLGFLNLQGGQLGSLEPQALLGLENLCHLHLERNQLRSLALGTFAHTPALASLGLSNNRLSRLEDGLFEGLGSLWDLNLGWNSLAVLPDAAFRGLGSLRELVLAGNRLAYLQPALFSGLAELRELDLSRNALRAIKANVFVQLPRLQKLYLDRNLIAAVAPGAFLGLKALRWLDLSHNRVAGLLEDTFPGLLGLRVLRLSHNAIASLRPRTFKDLHFLEELQLGHNRIRQLAERSFEGLGQLEVLTLDHNQLQEVKAGAFLGLTNVAVMNLSGNCLRNLPEQVFRGLGKLHSLHLEGSCLGRIRPHTFTGLSGLRRLFLKDNGLVGIEEQSLWGLAELLELDLTSNQLTHLPHRLFQGLGKLEYLLLSRNRLAELPADALGPLQRAFWLDVSHNRLEALPNSLLAPLGRLRYLSLRNNSLRTFTPQPPGLERLWLEGNPWDCGCPLKALRDFALQNPSAVPRFVQAICEGDDCQPPAYTYNNITCASPPEVVGLDLRDLSEAHFAPC

SEQ ID NO: 16325 - protein, 580 aa, Homo sapiens
GNNRASHRKELRSSVTCEKRRTRGLSRIVPKSKEFIETESSSSSSSSDSDLESEQEEYPLSKAQTVAASASSGNDQRLKEAAANGGSGPRAPVGSINARTTSDIAKELEEQFYTLVPFGRNELLSPLKDSDEIRSLWVKIDLTLLSRIPEHLPQEPGVLSAPATKDSESAPPSHTSDTPAEKALPKSKRKRKCDNEDDYREIKKSQGEKDSSSRLATSTSNTLSANHCNMNINSVAIPINKNEKMLRSPISPLSDASKHKYTSEDLTSSSRPNGNSLFTSASSSKKPKADSQLQPHGGDLTKAAHNNSENIPLHKSRPQTKPWSPGSNGHRDCKRQKLVFDDMPRSADYFMQEAKRMKHKADAMVEKFGKALNYAEAALSFIECGNAMEQGPMESKSPYTMYSETVELIRYAMRLKTHSGPNATPEDKQLAALCYRCLALLYWRMFRLKRDHAVKYSKALIDYFKNSSKAAQAPSPWGASGNSVGSQGSLSNASALSPSTIVSIPQRIHQMAANHVSITNSILHSYDYWEMADNLAKENREFFNDLDLLMGPVTLHSSMEHLVQYSQQGLHWLRNSAHLS

SEQ ID NO: 16326 - protein, 1423 aa, Homo sapiens
MYFLSGWPKRLLCPLGSPAEAPFHVQSDPQRAFFAVLAAARLSIWYSRPSVLIVTYKEPAKSSTQFGSYKQAEWRPDSTMIAVSTANGYILFFHITSTRGDKYLYEPVYPKGSPQMKGTPHFKEEQCAPALNLEMRKILDLQAPIMSLQSVLEDLLVATSDGLLHLIHWEGMTNGRKAINLCTVPFSVDLQSSRVGSFLGFTDVHIRDMEYCATLDGFAVVFNDGKVGFITPVSSRFTAEQLHGVWPQDVVDGTCVAVNNKYRLMAFGCVSGSVQVYTIDNSTGAMLLSHKLELTAKQYPDIWNKTGAVKLMRWSPDNSVVIVTWEYGGLSLWSVFGAQLICTLGGDFAYRSDGTKKDPLKINSMSWGAEGYHLWVISGFGSQNTEIESDLRSVVKQPSILLFQFIKSVLTVNPCMSNQEQVLLQGEDRLYLNCGEASQTQNPRSSSTHSEHKPSREKSPFADGGLESQGLSTLLGHRHWHVVQISSTYLESNWPIRFSAIDKLGQNIAVVGKFGFAHYSLLTKKWKLFGNITQEQNMIVTGGLAWWNDFMVLACYNINDRQEELRVYLRTSNLDNAFAHVTKAQAETLLLSVFQDMVIVFRADCSICLYSIERKSDGPNTTAGIQVLQEVSMSRYIPHPFLVVSVTLTSVSTENGITLKMPQQARGAESIMLNLAGQLIMMQRDRSGPQIREKDSNPNNQRKLLPFCPPVVLAQSVENVWTTCRANKQKRHLLEALWLSCGGAGMKVWLPLFPRDHRKPHSFLSQRIMLPFHINIYPLAVLFEDALVLGAVNDTLLYDSLYTRNNAREQLEVLFPFCVVERTSQIYLHHILRQLLVRNLGEQALLLAQSCATLPYFPHVLELMLHEVLEEEATSREPIPDPLLPTVAKFITEFPLFLQTVVHCARKTEYALWNYLFAAVGNPKDLFEECLMAQDLDTAASYLIILQNMEVPAVSRQHATLLFNTALEQGKWDLCRHMIRFLKAIGSGESETPPSTPTAQEPSSSGGFEFFRNRSISLSQSAENVPASKFSLQKTLSMPSGPSGKRWSKDSDCAENMYIDMMLWRHARRLLEDVRLKDLGCFAAQLGFELISWLCKERTRAARVDNFVIALKRLHKDFLWPLPIIPASSISSPFKNGKYRTVGEQLLKSQSADPFLNLEMDAGISNIQRSQSWLSNIGPTHHEIDTASSHGPQMQDAFLSPLSNKGDECSIGSATDLTESSSMVDGDWTMVDENFSTLSLTQSELEHISMELASKGPHKSQVQLRYLLHIFMEAGCLDWCIVIGLILRESSIINQILVITQSSEVDGEMLQNIKTGLHAVDRWASTDCPGYKPFLNIIKPQLQKLSEITEEQVQPDAFQPITMGKTPEQTSPRAEESRGSSSHGSIPQGEVGSSNMVSRKEEDTAQAEEEEPFQDGTYDCSVS

SEQ ID NO: 16327 - protein, 704 aa, Homo sapiens
MLPTASSKRRTFAARYFTRSKSLVMGEQSRSPGRMPCPHRLGPVLKAGWLKKQRSIMKNWQQRWFVLRGDQLFYYKDKDEIKPQGFISLQGTQVTELPPGPEDPGKHLFEISPGGAGEREKVPANPEALLLMASSQRDMEDWVQAIRRVIWAPLGGGIFGQRLEETVHHERKYGPRLAPLLVEQCVDFIRERGLTEEGLFRMPGQANLVRDLQDSFDCGEKPLFDSTTDVHTVASLLKLYLRELPEPVVPFARYEDFLSCAQLLTKDEGEGTLELAKQVSNLPQANYNLLRYICKFLDEVQAYSNVNKMSVQNLATVFGPNILRPQVEDPVTIMEGTSLVQHLMTVLIRKHSQLFTAPVPEGPTSPRGGLQCAVGWGSEEVTRDSQGEPGGPGLPAHRTSSLDGAAVAVLSRTAPTGPGSRCSPGKKVQTLPSWKSSFRQPRSLSGSPKGGGSSLEVPIISSGGNWLMNGLSSLRGHRRASSGDRLKDSGSVQRLSTYDNVPAPGLVPGIPSVASMAWSGASSSESSVGGSLSSCTACRASDSSARSSLHTDWALEPSPLPSSSEDPKSLDLDHSMDEAGAGASNSEPSEPDSPTREHARRSEALQGLVTELRAELCRQRTEYERSVKRIEEGSADLRKRMSRLEEELDQEKKKYIMLEIKLRNSERAREDAERRNQLLQREMEEFFSTLGSLTVGAKGARAPK

SEQ ID NO: 16328 - protein, 890 aa, Homo sapiens
MSAEASARPLRVGSRVEVIGKGHRGTVAYVGATLFATGKWVGVILDEAKGKNDGTVQGRKYFTCDEGHGIFVRQSQIQVFEDGADTTSPETPDSSASKVLKREGTDTTAKTSKLPTRPASTGVAGASSSLGPSGSASAGELSSSEPSTPAQTPLAAPIIPTPVLTSPGAVPPLPSPSKEEEGLRAQVRDLEEKLETLRLKRAEDKAKLKELEKHKIQLEQVQEWKSKMQEQQADLQRRLKEARKEAKEALEAKERYMEEMADTADAIEMATLDKEMAEERAESLQQEVEALKERVDELTTDLEILKAEIEEKGSDGAASSYQLKQLEEQNARLKDALVRMRDLSSSEKQEHVKLQKLMEKKNQELEVVRQQRERLQEELSQAESTIDELKEQVDAALGAEEMVEMLTDRNLNLEEKVRELRETVGDLEAMNEMNDELQENARETELELREQLDMAGARVREAQKRVEAAQETVADYQQTIKKYRQLTAHLQDVNRELTNQQEASVERQQQPPPETFDFKIKFAETKAHAKAIEMELRQMEVAQANRHMSLLTAFMPDSFLRPGGDHDCVLVLLLMPRLICKAELIRKQAQEKFELSENCSERPGLRGAAGEQLSFAAGLVYSLSLLQATLHRYEHALSQCSVDVYKKVGSLYPEMSAHERSLDFLIELLHKDQLDETVNVEPLTKAIKYYQHLYSIHLAEQPEDCTMQLADHIKFTQSALDCMSVEVGRLRAFLQGGQEATDIALLLRDLETSCSDIRQFCKKIRRRMPGTDAPGIPAALAFGPQVSDTLLDCRKHLTWVVAVLQEVAAAAAQLIAPLAENEGLLVAALEELAFKASEQVGLDGWVEGVGRVSDQCGAFTSALGSCRSMGPPPAAPMSVCASHATSSSVP

SEQ ID NO: 16329 - protein, 275 aa, Homo sapiens
IGSAREADPALNVETEIEILKKLNHPCIIKIKNFFDAEDYYIVLELMEGGELFDKVVGNKRLKEATCKLYFYQMLLAVQYLHENGIIHRDLKPENVLLSSQEEDCLIKITDFGHSKILGETSLMRTLCGTPTYLAPEVLVSVGTAGYNRAVDCWSLGVILFIWTQVSLKDQITSGKYNFIPEVWAEVSEKALDLVKKLLVVDPKARFTTEEALRHPWLQDEDMKRKFQDLLSEENESTALPQVLAQPSTSRKRPREGEAEGAETTKRPAVCAAVL

SEQ ID NO: 16330 - protein, 1381 aa, Homo sapiens
MPEQERQITAREGASRKILSKLSLPTRAWEPAMKKSFAFDNVGYEGGLDGLGPSSQVATSTVRILGMTCQSCVKSIEDRISNLKGIISMKVSLEQGSATVKYVPSVVCLQQVCHQIGDMGFEASIAEGKAASWPSRSLPAQEAVVKLRVEGMTCQSCVSSIEGKVRKLQGVVRVKVSLSNQEAVITYQPYLIQPEDLRDHVNDMGFEAAIKSKVAPLSLGPIDIERLQSTNPKRPLSSANQNFNNSETLGHQGSHVVTLQLRIDGMHCKSCVLNIEENIGQLLGVQSIQVSLENKTAQVKYDPSCTSPVALQRAIEALPPGNFKVSLPDGAEGSGTDHRSSSSHSPGSPPRNQVQGTCSTTLIAIAGMTCASCVHSIEGMISQLEGVQQISVSLAEGTATVLYNPSVISPEELRAAIEDMGFEASVVSESCSTNPLGNHSAGNSMVQTTDGTPTSVQEVAPHTGRLPANHAPDILAKSPQSTRAVAPQKCFLQIKGMTCASCVSNIERNLQKEAGVLSVLVALMAGKAEIKYDPEVIQPLEIAQFIQDLGFEAAVMEDYAGSDGNIELTITGMTCASCVHNIESKLTRTNGITYASVALATSKALVKFDPEIIGPRDIIKIIELLGGWYFYVQAYKSLRHRSANMDVLIVLATSIAYVYSLVILVVAVAEKAERSPVTFFDTPPMLFVFIALGRWLEHLAKSKTSEALAKLMSLQATEATVVTLGEDNLIIREEQVPMELVQRGDIVKVVPGGKFPVDGKVLEGNTMADESLITGEAMPVTKKPGSTVIAGSINAHGSVLIKATHVGNDTTLAQIVKLVEEAQMSKAPIQQLADRFSGYFVPFIIIMSTLTLVVWIVIGFIDFGVVQRYFPNPNKHISQTEVIIRFAFQTSITVLCIACPCSLGLATPTAVMVGTGVAAQNGILIKGGKPLEMAHKIKTVMFDKTGTITHGVPRVMRVLLLGDVATLPLRKVLAVVGTAEASSEHPLGVAVTKYCKEELGTETLGYCTDFQAVPGCGIGCKVSNVEGILAHSERPLSAPASHLNEAGSLPAEKDAVPQTFSVLIGNREWLRRNGLTISSDVSDAMTDHEMKGQTAILVAIDGVLCGMIAIADAVKQEAALAVHTLQSMGVDVVLITGDNRKTARAIATQVGINKVFAEVLPSHKVAKVQELQNKGKKVAMVGDGVNDSPALAQADMGVAIGTGTDVAIEAADVVLIRNDLLDVVASIHLSKRTVRRIRINLVLALIYNLVGIPIAAGVFMPIGIVLQPWMGSAAMAASSVSVVLSSLQLKCYKKPDLERYEAQAHGHMKPLTASQVSVHIGMDDRWRDSPRATPWDQVSYVSQVSLSSLTSDKPSRHSAAADDDGDKWSLLLNGRDEEQYI

SEQ ID NO: 16331 - protein, 492 aa, Homo sapiens
KGVRLPEPKDKILETPQKMTEKSESKTPGEGKKEDKSRMAEPMKGYMRPTKSRGLTPLLPKSTIQEQERHKQLKSAGIARPEEGRPVVSGTGNDITTPPNKELPPSPEKKTKPLATTQPAKTSTSKAKTQPTSLPKQPAPTTIGGLNKKPMSLASGLVPAAPPKRPAVASARPSILPSKDVKPKPIADAKAPEKRASPSKPASAPASRSGSKSTQTVAKTTTAAAVASTGPSSRSPSTLLPKKPTAIKTEGKPAEVKKMTAKSVPADLSRPKSTSTSSMKKTTTLSGTAPAAGVVPSRVKATPMPSRPSTTPFIDKKPTSAKPSSTTPRLSRLATNTSAPDLKNVRSKVGSTENIKHQPGGGRVQIQNKKVDISKVSSKCGSKANIKHKPGGGDVKIESQKLNFKEKAQAKVGSLDNVGHLPAGGAVKTEGGGSEAPLCPGPPAGEEPAISEAAPEAGAPTSASGLNGHPTLSGGGDQREAQTLDSQIQETN

SEQ ID NO: 16332 - protein, 103 aa, Homo sapiens
MESGAKGCEVVVSGKLRGQRAKSMKFVDGLMIHSGDPVNYYVDTAVRHVLLRQGVLGIKVKIMLPWDPTGKIGPKKPLPDHVSIVEPKDEILPTTPISEQKGG

SEQ ID NO: 16333 - protein, 361 aa, Homo sapiens
MGIIQSILATSRDCYSFKKKPIPKKPTMLALAKILLISTLFYSLLSGSHGKENQDINTTQNIAEVFKTMENKPISLESEANLNSDKENITTSNLKASHSPPLNLPNNSHGITDFSSNSSAEHSLGSLKPTSTISTSPPLIHSFVSKVPWNAPIADEDLLPISAHPNATPALSSENFTWSLVNDTVKTPDNSSITVSILSSEPTSPSVTPLIVEPSGWLTTNSDSFTGFTPYQEKTTLQPTLKFTNNSKLFPNTSDPQKENRNTGIVFGAILGAILGVSLLTLVGYLLCGKRKTDSFSHRRLYDDRNEPVLRLDNAPEPYDVSFGNSSYYNPTLNDSAMPESEENARDGIPMDDIPPLRTSV

SEQ ID NO: 16334 - protein, 1753 aa, Homo sapiens
MDDRCYPVIFPDERNFRPFTSDSLAAIEKRIAIQKEKKKSKDQTGEVPQPRPQLDLKASRKLPKLYGDIPRELIGKPLEDLDPFYRNHKTFMVLNRKRTIYRFSAKHALFIFGPFNSIRSLAIRVSVHSLFSMFIIGTVIINCVFMATGPAKNSNSNNTDIAECVFTGIYIFEALIKILARGFILDEFSFLRDPWNWLDSIVIGIAIVSYIPGITIKLLPLRTFRVFRALKAISVVSRLKVIVGALLRSVKKLVNVIILTFFCLSIFALVGQQLFMGSLNLKCISRDCKNISNPEAYDHCFEKKENSPEFKMCGIWMGNSACSIQYECKHTKINPDYNYTNFDNFGWSFLAMFRLMTQDSWEKLYQQTLRTTGLYSVFFFIVVIFLGSFYLINLTLAVVTMAYEEQNKNVAAEIEAKEKMFQEAQQLLKEEKEALVAMGIDRSSLTSLETSYFTPKKRKLFGNKKRKSFFLRESGKDQPPGSDSDEDCQKKPQLLEQTKRLSQNLSLDHFDEHGDPLQRQRALSAVSILTITMKEQEKSQEPCLPCGENLASKYLVWNCCPQWLCVKKVLRTVMTDPFTELAITICIIINTVFLAMEHHKMEASFEKMLNIGNLVFTSIFIAEMCLKIIALDPYHYFRRGWNIFDSIVALLSFADVMNCVLQKRSWPFLRSFRVLRVFKLAKSWPTLNTLIKIIGNSVGALGSLTVVLVIVIFIFSVVGMQLFGRSFNSQKSPKLCNPTGPTVSCLRHWHMGDFWHSFLVVFRILCGEWIENMWECMQEANASSSLCVIVFILITVIGKLVVLNLFIALLLNSFSNEERNGNLEGEARKTKVQLALDRFRRAFCFVRHTLEHFCHKWCRKQNLPQQKEVAGGCAAQSKDIIPLVMEMKRGSETQEELGILTSVPKTLGVRHDWTWLAPLAEEEDDVEFSGEDNAQRITQPEPEQQKSDVTSILSECSTIDLQDGFGWLPEMVPKKQPERCLPKGFGCCFPCCSVDKRKPPWVIWWNLRKTCYQIVKHSWFESFIIFVILLSSGALIFEDVHLENQPKIQELLNCTDIIFTHIFILEMVLKWVAFGFGKYFTSAWCCLDFIIVIVSVTTLINLMELKSFRTLRALRPLRALSQFEGMKVVVNALIGAIPAILNVLLVCLIFWLVFCILGVYFFSGKFGKCINGTDSVINYTIITNKSQCESGNFSWINQKVNFDNVGNAYLALLQVATFKGWMDIIYAAVDSTEKEQQPEFESNSLGYIYFVVFIIFGSFFTLNLFIGVIIDNFNQQQKKLGGQDIFMTEEQKKYYNAMKKLGSKKPQKPIPRPLNKCQGLVFDIVTSQIFDIIIISLIILNMISMMAESYNQPKAMKSILDHLNWVFVVIFTLECLIKIFALRQYYFTNGWNLFDCVVVLLSIVSTMISTLENQEHIPFPPTLFRIVRLARIGRILRLVRAARGIRTLLFALMMSLPSLFNIGLLLFLIMFIYAILGMNWFSKVNPESGIDDIFNFKTFASSMLCLFQISTSAGWDSLLSPMLRSKESCNSSSENCHLPGIATSYFVSYIIISFLIVVNMYIAVILENFNTATEESEDPLGEDDFDIFYEVWEKFDPEATQFIKYSALSDFADALPEPLRVAKPNKYQFLVMDLPMVSEDRLHCMDILFAFTARVLGGSDGLDSMKAMMEEKFMEANPLKKLYEPIVTTTKRKEEERGAAIIQKAFRKYMMKVTKGDQGDQNDLENGPHSPLQTLCNGDLSSFGVAKGKVHCD

SEQ ID NO: 16335 - protein, 995 aa, Homo sapiens
MKMADAKQKRNEQLKRWIGSETDLEPPVVKRQKTKVKFDDGAVFLAACSSGDTDEVLKLLHRGADINYANVDGLTALHQACIDDNVDMVKFLVENGANINQPDNEGWIPLHAAASCGYLDIAEFLIGQGAHVGAVNSEGDTPLDIAEEEAMEELLQNEVNRQGVDIEAARKEEERIMLRDARQWLNSGHINDVRHAKSGGTALHVAAAKGYTEVLKLLIQAGYDVNIKDYDGWTPLHAAAHWGKEEACRILVDNLCDMEMVNKVGQTAFDVADEDILGYLEELQKKQNLLHSEKRDKKSPLIESTANMDNNQSQKTFKNKETLIIEPEKNASRIESLEQEKVDEEEEGKKDESSCSSEEDEEDDSESEAETDKTKPLASVTNANTSSTQAAPVAVTTPTVSSGQATPTSPIKKFPTTATKISPKEEERKDESPATWRLGLRKTGSYGALAEITASKEGQKEKDTAGVTRSASSPRLSSSLDNKEKEKDSKGTRLAYVAPTIPRRLASTSDIEEKENRDSSSLRTSSSYTRRKWEDDLKKNSSVNEGSTYHKSCSFGRRQDDLISSSVPSTTSTPTVTSAAGLQKSLLSSTSTTTKITTGSSSAGTQSSTSNRLWAEDSTEKEKDSVPTAVTIPVAPTVVNAAASTTTLTTTTAGTVSSTTEVRERRRSYLTPVRDEESESQRKARSRQARQSRRSTQGVTLTDLQEAEKTIGRSRSTRTREQENEEKEKEEKEKQDKEKQEEKKESETSREDEYKQKYSRTYDETYQRYRPVSTSSSTTPSSSLSTMSSSLYASSQLNRPNSLVGITSAYSRGITKENEREGEKREEEKEGEDKSQPKSIRERRRPREKRRSTGVSFWTQDSDENEQEQQSDTEEGSNKKETQTDSISRYETSSTSAGDRYDSLLGRSGSYSYLEERKPYSSRLEKDDSTDFKKRQERFADRSLLEMEKRERRALERRISEMEEELKMLPDLKADNQRLKDENGALIRVISKLSK

SEQ ID NO: 16336 - protein, 221 aa, Homo sapiens
MGDTKEQRILNHVLQHAEPGNAQSVLEAIDTYCEQKEWAMNVGDKKGKIVDAVIQEHQPSVLLELGAYCGYSAVRMARLLSPGARLITIEINPDCAAITQRMVDFAGVKDKVTLVVGASQDIIPQLKKKYDVDTLDMVFLDHWKDRYLPDTLLLEECGLLRKGTVLLADNVICPGAPDFLAHVRGSSCFECTHYQSFLEYREVVDGLEKAIYKGPGSEAGP

SEQ ID NO: 16337 - protein, 613 aa, Homo sapiens
MIQSDKGADPPDKKDMKLSTATNPQNGLSQILRLVLQELSLFYGRDVNGVCLLYDLLHSPWLQALLKIYDCLQEFKEKKLVPATPHAQVLSYEVVELLRETPTSPEIQELRQMLQAPHFKALLSAHDTIAQKDFEPLLPPLPDNIPESEEAMRIVCLVKNQQPLGATIKRHEMTGDILVARIIHGGLAERSGLLYAGDKLVEVNGVSVEGLDPEQVIHILAMSRGTIMFKVVPVSDPPVNSQQMVYVRAMTEYWPQEDPDIPCMDAGLPFQKGDILQIVDQNDALWWQARKISDPATCAGLVPSNHLLKRKQREFWWSQPYQPHTCLKSTLYEETFESDKEEFVGYGQKFFIAGFRRSMRLCRRKSHLSPLHASVCCTGSCYSAVGAPYEEVVRYQRRPSDKYRLIVLMGPSGVGVNELRRQLIEFNPSHFQSAVPHTTRTKKSYEMNGREYHYVSKETFENLIYSHRMLEYGEYKGHLYGTSVDAVQTVLVEGKICVMDLEPQDIQGVRTHELKPYVIFIKPSNMRCMKQSRKNAKVITDYYVDMKFKDEDLQEMENLAQRMETQFGQFFDHVIVNDSLHDACAQLLSAIQKAQEEPQWVPATWISSDTESQ

SEQ ID NO: 16338 - protein, 415 aa, Homo sapiens
MGRAPRAGRLPGIRRWPPRRKKKDLDVPEMPSIPNPFPELCCSPFTSVLSADLFPKANSRKKQVIKVYSEDETSRALDVPSDITARDVCQLLILKNHYIDDHSWTLFEHLPHIGVERTIEDHELVIEVLSNWGIEEENKLYFRKNYAKYEFFKNPMYFFPEHMVSFATETNGEISPTQILQMFLSSSTYPEIHGFLHAKEQGKKSWKKIYFFLRRSGLYFSTKGTSKEPRHLQFFSEFGNSDIYVSLAGKKKHGAPTNYGFCFKPNKAGGPRDLKMLCAEEEQSRTCWVTAIRLLKYGMQLYQNYMHPYQGRSGCSSQSISPMRSISENSLVAMDFSGQKSRVIENPTEALSVAVEEGLAWRKKGCLRLGTHGSPTASSQSSATNMAIHRSQPWFHHKISRDEAQRLIIQQGLVD

SEQ ID NO: 16339 - protein, 1276 aa, Homo sapiens
MVEAAPPGPGPLRRTFLVPEIKSLDQYDFSRAKAAASLAWVLRAAFGGAEHVPPELWEPFYTDQYAQEHVKPPVTRLLLSAELYCRAWRQALPQLETPPNPSALLALLARRGTVPALPERPVREADLRHQPILMGAHLAVIDALMAAFAFEWTKTLPGPLALTSLEHKLLFWVDTTVRRLQEKTEQEAAQRASPAAPADGAAPAQPSCPTRWYWKLVPHAIAFCLKESGSKPPMIRYRKDRVVARRAPCFPTVTSLQDLASGAALAATIHCYCPQLLRLEEVCLKDPMSVADSLYNLQLVQDFCASRLPRGCPLSLEDLLYVPPPLKVNLVVMLAELFMCFEVLKPDFVQVKDLPDGHAASPRGTEASPPQNNSGSSSPVFTFRHPLLSSGGPQSPLRGSTGSLKSSPSMSHMEALGKAWNRQLSRPLSQAVSFSTPFGLDSDVDVVMGDPVLLRSVSSDSLGPPRPAPARTPTQPPPEPGDLPTIEEALQIIHSAEPRLLPDGAADGSFYLHSPEGPSKPSLASPYLPEGTSKPLSDRPTKAPVYMPHPETPSKPSPCLVGEASKPPAPSEGSPKAVASSPAATNSEVKMTSFAERKKQLVKAEAEAGAGSPTSTPAPPEALSSEMSELSARLEEKRRAIEAQKRRIEAIFAKHRQRLGKSAFLQVQPREASGEAEAEAEEADSGPVPGGERPAGEGQGEPTSRPKAVTFSPDLGPVPHEGLGEYNRAVSKLSAALSSLQRDMQRLTDQQQRLLAPPEAPGSAPPPAAWVIPGPTTGPKAASPSPARRVPATRRSPGPGPSQSPRSPKHTRPAELRLAPLTRVLTPPHDVDSLPHLRKFSPSQVPVQTRSSILLAEETPPEEPAARPGLIEIPLGSLADPAAEDEGDGSPAGAEDSLEEEASSEGEPRVGLGFFYKDEDKPEDEMAQKRASLLERQQRRAEEARRRKQWQEVEKEQRREEAARLAQEEAPGPAPLVSAVPMATPAPAARAPAEEEVGPRKGDFTRQEYERRAQLKLMDDLDKVLRPRAAGSGGPGRGGRRATRPRSGCCDDSALARSPARGLLGSRLSKIYSQSTLSLSTVANEAHNNLGVKRPTSRAPSPSGLMSPSRLPGSRERDWENGSNASSPASVPEYTGPRLYKEPSAKSNKFIIHNALSHCCLAGKVNEPQKNRILEEIEKSKANHFLILFRDSSCQFRALYTLSGETEELSRLAGYGPRTVTPAMVEGIYKYNSDRKRFTQIPAKTMSMSVDAFTIQGHLWQGKKPTTPKKGGGTPK

SEQ ID NO: 16340 - protein, 1462 aa, Homo sapiens
MGDAADPREMRKTFIVPAIKPFDHYDFSRAKIACNLAWLVAKAFGTENVPEELQEPFYTDQYDQEHIKPPVVNLLLSAELYCRAGSLILKSDAAKPLLGHDAVIQALAQKGLYVTDQEKLVTERDLHKKPIQMSAHLAMIDTLMMAYTVEMVSIEKVIACAQQYSAFFQATDLPYDIEDAVMYWINKVNEHLKDIMEQEQKLKEHHTVEAPGGQKARYRKEQTLLKQLPCIPLVENLLKDGTDGCALAALIHFYCPDVVRLEDICLKETMSLADSLYNLQLIQEFCQEYLNQCCHFTLEDMLYAASSIKSNYLVFMAELFWWFEVVKPSFVQPRVVRPQGAEPVKDMPSIPVLNAAKRNVLDSSSDFPSRYSRPQAHSSASGGIRRSSSMSYVDGFIGTWPKEKRSSVHGVSFDISFDKEDSVQRSTPNRGITRSISNEGLTLNNSHVSKHIRKNLSFKPINGEEEAESIEEELNIDSHSDLKSCVPLNTNELNSNENIHYKLPNGALQNRILLDEFGNQIETPSIEEALQIIHDTEKSPHTPQPDQIANGFFLHSQEMSILNSNIKLNQSSPDNVTDTKGALSPITDNTEVDTGIHVPSEDIPETMDEDSSLRDYTVSLDSDMDDASKFLQDYDIRTGNTREALSPCPSTVSTKSQPGSSASSSSGVKMTSFAEQKFRKLNHTDGKSSGSSSQKTTPEGSELNIPHVVAWAQIPEETGLPQGRDTTQLLASEMVHLRMKLEEKRRAIEAQKKKMEAAFTKQRQKMGRTAFLTVVKKKGDGISPLREEAAGAEDEKVYTDRAKEKESQKTDGQRSKSLADIKESMENPQAKWLKSPTTPIDPEKQWNLASPSEETLNEGEILEYTKSIEKLNSSLHFLQQEMQRLSLQQEMLMQMREQQSWVISPPQPSPQKQIRDFKPSKQAGLSSAIAPFSSDSPRPTHPSPQSSNRKSASFSVKSQRTPRPNELKITPLNRTLTPPRSVDSLPRLRRFSPSQVPIQTRSFVCFGDDGEPQLKESKPKEEVKKEELESKGTLEQRGHNPEEKEIKPFESTVSEVLSLPVTETVCLTPNEDQLNQPTEPPPKPVFPPTAPKNVNLIEVSLSDLKPPEKADVPVEKYDGESDKEQFDDDQKVCCGFFFKDDQKAENDMAMKRAALLEKRLRREKETQLRKQQLEAEMEHKKEETRRKTEEERQKKEDERARREFIRQEYMRRKQLKLMEDMDTVIKPRPQVVKQKKQRPKSIHRDHIESPKTPIKGPPVSSLSLASLNTGDNESVHSGKRTPRSESVEGFLSPSRCGSRNGEKDWENASTTSSVASGTEYTGPKLYKEPSAKSNKHIIQNALAHCCLAGKVNEGQKKKILEEMEKSDANNFLILFRDSGCQFRSLYTYCPETEEINKLTGIGPKSITKKMIEGLYKYNSDRKQFSHIPAKTLSASVDAITIHSHLWQTKRPVTPKKLLPTKA

SEQ ID NO: 16341 - protein, 330 aa, Homo sapiens
QTREKAKFSDGEKCRREAFRRLGNGVSDDLSSEEDGEARTQMILLRRSVEGASSDNGCEVKNRKSILSRHLNSQVKKTTTRWCHIVRDSDSLAESEFESAAFSQGSRSGVSGGSRSLNMSRRDSESTRHDSETEDMLWDDLLHGPECRSSVTSDSEGAHVNTLHSGTKRDPKEDVFQQNHLFWLQNSSPSSDRVSAIIWEGNECKKMDMSVLEISGIIMSRVNAYQQGVGYQMLGNVVTIGLAFFPFLHRLFREKSLDQLKSISAEEILTLFCGAPPVTPIIVLSIINFFERLCLTWMFFFMMCVAERTYKQVSGEIRKIFYLFLYMIFH

SEQ ID NO: 16342 - protein, 730 aa, Homo sapiens
MAFVCAGLSDTMSAEEDARWLRWVTQQFKTIAGEDGEISLQEFKAALHVKESFFAERFFALFDSDRSGTITLQELQEALTLLIHGSPMDKLKFLFQVYDIDGSGSIDPDELRTVLQSCLRESAISLPDEKLDQLTLALFESADADGNGAITFEELRDELQRFPGVMENLTISAAHWLTAPAPRPRPRRPRQLTRAYWHNHRSQLFCLATYAGLHVLLFGLAASAHRDLGASVMVAKGCGQCLNFDCSFIAVLMLRRCLTWLRATWLAQVLPLDQNIQFHQLMGYVVVGLSLVHTVAHTVNFVLQAQAEASPFQFWELLLTTRPGIGWVHGSASPTGVALLLLLLLMFICSSSCIRRSGHFEVFYWTHLSYLLVWLLLIFHGPNFWKWLLVPGILFFLEKAIGLAVSRMAAVCIMEVNLLPSKVTHLLIKRPPFFHYRPGDYLYLNIPTIARYEWHPFTISSAPEQKDTIWLHIRSQGQWTNRLYESFKASDPLGRGSKRLSRSVTMRKSQRSSKGSEILLEKHKFCNIKCYIDGPYGTPTRRIFASEHAVLIGAGIGITPFASILQSIMYRHQKRKHTCPSCQHSWIEGVQDNMKLHKVDFIWINRDQRSFEWFVSLLTKLEMDQAEEAQYGRFLELHMYMTSALGKNDMKAIGLQMALDLLANKEKKDSITGLQTRTQPGRPDWSKVFQKVAAEKKGKVQVFFCGSPALAKVLKGHCEKFGFRFFQENF

SEQ ID NO: 16343 - protein, 197 aa, Homo sapiens
MKYPLMPLVNDLTFSFLVFWFCLPVGLLLLLIIWLRFLLSQDSEENDSSVCLDWEPWSKGPAEFCWKGTLHGQEKERPCCLVFLESAGQWQWQKWMGETCQGGKRTLATVVPPWNPQLISSSDRHVKASRGPSPSPASQMTSSPAGSRSSLGGHGSSEQAHGEKLANLIQRGLKAGLGRRVWVHIKEARVFPYPGDP

SEQ ID NO: 16344 - protein, 120 aa, Homo sapiens
MALVSGISLDPEAAIGVTKRPPPKWVDGVDEIQYDVGRIKQKMKELASLHDKHLNRPTLDDSSEEEHAIEITTQEITQLFHRCQRAVQALPSRARACSEQEGRLLGNVVASLAQALQELS

SEQ ID NO: 16345 - protein, 600 aa, Homo sapiens
RVAKLVASSLQTPVNPITGARVAQYEREDPLKALAAAEAILEDEEEEKVAQPAGASADLNTSFSGVDEHAPISYEDFVNFPDIHHSNEEYFKKVEELKAAHIETMAKLEKMYQDKLHLKEVQPVVIREDSLSDSSRSVSEKNSYHPVSLMTSFSEPDLGQSSSLYVSSSEEELPNLEKEYPRKNRMMTYAKELINNMWTDFCVEDYIRCKDTGFHAAEKRRKKRKEWVPTITVPEPFQMMIREQKKKEESMKSKSDIEMVHKALKKQEEDPEYKKKFRANPVPASVFLPLYHDLVKQKEERRRSLKEKSKEALLASQKPFKFIAREEQKRAAREKQLRDFLKYKKKTNRFKARPIPRSTYGSTTNDKLKEEELYRNLRTQLRAQEHLQNSSPLPCRSACGCRNPRCPEQAVKLKCKHKVRCPTPDFEDLPERYQKHLSEHKSPKLLTVCKPFDLHASPHASIKREKILADIEADEENLKETRWPYLSPRRKSPVRCAGVNPVPCNCNPPVPTVSSRGREQAVRRSLEEKKMLEEERNRILTKQKQRMKELQKLLTTRAKAYDSHQSLAQISKSRVKCLRPGAMAHACNPSTLRGQDRQIT

SEQ ID NO: 16346 - protein, 436 aa, Homo sapiens
LPFCGIAISNAQLFAASRKEYERSRALLEVVNDLFEEQTDLEKIVKKIMHRAQTLLKCERCSVLLLEDIESPVVKFTKSFELMSPKCSADAENSFKESMEKSSYSDWLINNSIAELVASTGLPVNISDAYQDPRFDAEADQISGFHIRSVLCVPIWNSNHQIIGVAQVLNRLDGKPFDDADQRLFEVLSYHATCSKAEVDKFKAANIPLVSELAIDDIHFDDFSLDVDAMITAALRMFMELGMVQKFKIDYETLCRWLLTVRKNYRMVLYHNWRHAFNVCQLMFAMLTTAGFQDILTEVEILAVIVGCLCHDLDHRGTNNAFQAKSGSALAQLYGTSATLEHHHFNHAVMILQSEGHNIFANLSSKEYSDLMQLLKQSILATDLTLYFERRTEFFELVSKGEYDWNIKNHRDIFRSMLMTACDLGAVTKPWEISRQ

SEQ ID NO: 16347 - protein, 188 aa, Homo sapiens
RAHQVTYSQSPKIATLMKSVSTSLEKKGHVYLVGWQTLGIIAIMDGVECIHTFGADFRDVRGFLIGDHSDMFNQKAELTNQGPQFTFSQEDFLTSILPSLTEIDTVVFIFTLDDNLTEVQTIVEQVKEKTNHIQALAHSTVGQTLLIPLKKLFPSIISITWPLLFFEYEGNFIQRSGFSTLPRLFANS

SEQ ID NO: 16348 - protein, 972 aa, Homo sapiens
MERMNWLSRLASRGPGHRIPQGANLQTPVMADPETCLMVFKNHWSQVVRILERQGPRAAPGGADDLSAVRNHTYQMLTLLAEDRAVPSAPTGPGPLLEFALHEDLLTRVLTWQLQWDELGDGVEERRAEQLKLFEMLVSEARQPLLRHGPVREALLTLLDACGRPVPSSPALDEGLVLLLSQLCVCVAQEPSLLEFFLQPPPEPGAAPRLLLFSRLVPFVHREGTLGQQARDALLLLMALSAGSPTVGRYIADHSYFCPVLATGLSALYSSLPRKIEVPGDDWHCLRREDWLGVPALALFMSSLEFCNAVIQVAHPLVQKQLVDYIHNGFLVPVMGPALHKTSVEEMIASTAYLELFLRSISEPALLRTFLRFLLLHRHDTHTILDTLVARIGSNSRLCMVSLSLFRTLLNLSCEDVLLQLVLRYLVPCNHVMLSQKPAVRDVDLYGRAADKFLSLIPRCCRHHAPSPPRPEHASWARGPGSPSVDSSSVTTVPRPSTPSRLALFLRQQSLGGSESPGPAPCSPGLSASPASSPGRRPTPAEEPGELEDNYLEYLREARRGVDRCVRACRTWSAPYDGERPSPEPSPFGSRTKKRSLLPEEDRNNVGEGEEEELGRRGRAGGAGEGPGHLPPPQLNGVPGSWPEGAKKVRLVPKEGAGELLEGISEGMAGLEGFGQELRELEVALSNGGTGSESPLEPPLPLEEEEAYESFTCPPEPPGPFLSSPLRTLNQLPSQPFTGPFMAVLFAKLENMLQNSVYVNFLLTGLVAQLACHPQPLLRSFLLNTNMVFQPSVKSLLQVLGSVKNKIENFAASQEDFPALLSKAKKYLIARGKLDWAEGPAAGPAPRRSDPLVKSRRPSLGELLLRHAHSPTRARQAAQLVLQPGRDGAGLGLSGGSPGASTPVLLTRGGAPERQGEALRVKNAVYCAVIFPEFLKELAAISQAHAVTSPFLLETSEEGSGPLISGCGPLNP

SEQ ID NO: 16349 - protein, 334 aa, Homo sapiens
MESAAALHFSRPASLLLLLLSLCALVSAQFIVVGPTDPILATVGENTTLRCHLSPEKNAEDMEVRWFRSQFSPAVFVYKGGRERTEEQMEEYRGRTTFVSKDISRGSVALVIHNITAQENGTYRCYFQEGRSYDEAILHLVVAGLGSKPLISMRGHEDGGIRLECISRGWYPKPLTVWRDPYGGVAPALKEVSMPDADGLFMVTTAVIIRDKSVRNMSCSINNTLLGQKKESVIFIPESFMPSVSPCAVALPIIVVILMIPIAVCIYWINKLQKEKKILSGEKEFERETREIALKELEKERVQKEEELQVKEKLQEELRWRRTFLHAELQFFSN

SEQ ID NO: 16350 - protein, 779 aa, Homo sapiens
MEEQGHSEMEIIPSESHPHIQLLKSNRELLVTHIRNTQCLVDNLLKNDYFSAEDAEIVCACPTQPDKVRKILDLVQSKGEEVSEFFLYLLQQLADAYVDLRPWLLEIGFSPSLLTQSKVVVNTDPVSRYTQQLRHHLGRDSKFVLCYAQKEELLLEEIYMDTIMELVGFSNESLGSLNSLACLLDHTTGILNEQGETIFILGDAGVGKSMLLQRLQSLWATGRLDAGVKFFFHFRCRMFSCFKESDRLCLQDLLFKHYCYPERDPEEVFAFLLRFPHVALFTFDGLDELHSDLDLSRVPDSSCPWEPAHPLVLLANLLSGKLLKGASKLLTARTGIEVPRQFLRKKVLLRGFSPSHLRAYARRMFPERALQDRLLSQLEANPNLCSLCSVPLFCWIIFRCFQHFRAAFEGSPQLPDCTMTLTDVFLLVTEVHLNRMQPSSLVQRNTRSPVETLHAGRDTLCSLGQVAHRGMEKSLFVFTQEEVQASGLQERDMQLGFLRALPELGPGGDQQSYEFFHLTLQAFFTAFFLVLDDRVGTQELLRFFQEWMPPAGAATTSCYPPFLPFQCLQGSGPAREDLFKNKDHFQFTNLFLCGLLSKAKQKLLRHLVPAAALRRKRKALWAHLFSSLRGYLKSLPRVQVESFNQVQAMPTFIWMLRCIYETQSQKVGQLAARGICANYLKLTYCNACSADCSALSFVLHHFPKRLALDLDNNNLNDYGVRELQPCFSRLTVLRLSVNQITDGGVKVLSEELTKYKIVTYLGLWKSVDTICFKKQGLLK

SEQ ID NO: 16351 - protein, 977 aa, Homo sapiens
MDVAESPERDPHSPEDEEQPQGLSDDDILRDSGSDQDLDGAGVRASDLEDEESAARGPSQEEEDNHSDEEDRASEPKSQDQDSEVNELSRGPTSSPCEEEGDEGEEDRTSDLRDEASSVTRELDEHELDYDEEVPEEPAPAVQEDEAEKAGAEDDEEKGEGTPREEGKAGVQSVGEKESLEAAKEKKKEDDDGEIDDGEIDDDDLEEGEVKDPSDRKVRPRPTCRFFMKDVVTPLSTLLPPISNSIPFRGQVKGNCTWGMNCRFIHPGVNDKGNYSLITKADPFPPNGAPPLGPHPLMPANPWGGPVVDEILPPPPPEPPTESAWERGLRHAKEVLKKATIRKEQEPDFEEKRFTVTIGEDEREFDKENEVFRDWNSRIPRDVRDTVLEPYADPYYDYEIERFWRGGQYENFRVQYTETEPYHNYRERERERERENRQRERERERERDRERERRQRERERERERERDKERQRRKEEWERERAKRDEKDRQHRDRDREKEREKEKGKPKPRSPQPPSRQAEPPKKEAATTGPQVKRADEWKDPWRRSKSPKKKLGVSVSPSRARRRRKTSASSASASNSSRSSSRSSSYSGSGSSRSRSRSSSYSSYSSRSSRHSSFSGSRSRSRSFSSSPSPSPTPSPHRPSIRTKGEPAPPPGKAGEKSVKKPAPPPAPPQATKTTAPVPEPTKPGDPREARRKERPARTPPRRRTLSGSGSGSGSSYSGSSSRSRSLSVSSVSSVSSATSSSSSAHSVDSEDMYADLASPVSSASSRSPAPAQTRKEKGKSKKEDGVKEEKRKRDSSTQPPKSAKPPAGGKSSQQPSTPQQAPPGQPQQGTFVAHKEIKLTLLNKAADKGSRKRYEPSDKDRQSPPPAKRPNTSPDRGSRDRKSGGRLGSPKPERQRGQNSKAPAAPADRKRQLSPQSKSSSKVTSVPGKASDPGAASTKSGKASTLSRREELLKQLKAVEDAIARKRAKIPGKA

SEQ ID NO: 16352 - protein, 810 aa, Homo sapiens
MMKDCKHPNIVAYFGSYLRRDKLWICMEFCGGGSLQDIYHVTGPLSELQIAYVSRETLQGLYYLHSKGKMHRDIKGANILLTDNGHVKLADFGVSAQITATIAKRKSFIGTPYWMAPEVAAVERKGGYNQLCDLWAVGITAIELAELQPPMFDLHPMRALFLMTKSNFQPPKLKDKMKWSNSFHHFVKMALTKNPKKRPTAEKLLQHPFVTQHLTRSLAIELLDKVNNPDHSTYHDFDDDDPEPLVAVPHRIHSTSRNVREEKTRSEITFGQVKFDPPLRKETEPHHELDLQLEYGQGHQGGYFLGANKSLLKSVEEELHQRGHVAHLEDDEGDDDESKHSTLKAKIPPPLPPKPKSIFIPQEMHSTEDENQGTIKRCPMSGSPAKPSQVPPRPPPPRLPPHKPVALGNGMSSFQLNGERDGSLCQQQNEHRGTNLSRKEKKDVPKPISNGLPPTPKVHMGACFSKVFNGCPLKIHCASSWINPDTRDQYLIFGAEEGIYTLNLNELHETSMEQLFPRRCTWLYVMNNCLLSISGKASQLYSHNLPGLFDYARQMQKLPVAIPAHKLPDRILPRKFSVSAKIPETKWCQKCCVVRNPYTGHKYLCGALQTSIVLLEWVEPMQKFMLIKHIDFPIPCPLRMFEMLVVPEQEYPLVCVGVSRGRDFNQVVRFETVNPNSTSSWFTESDTPQTNVTHVTQLERDTILVCLDCCIKIVNLQGRLKSSRKLSSELTFDFQIESIVCLQDSVLAFWKHGMQGRSFRSNEVTQEISDSTRIFRLLGSDRVVVLESRPTDNPTANSNLYILAGHENSY

SEQ ID NO: 16353 - protein, 288 aa, Homo sapiens
MSDSGEQNYGERESRSASRSGSAHGSGKSARHTPARSRSKEDSRRSRSKSRSRSESRSRSRRSSRRHYTRSRSRSRSHRRSRSRSYSRDYRRRHSHSHSPMSTRRRHVGNRANPDPNCCLGVFGLSLYTTERDLREVFSKYGPIADVSIVYDQQSRRSRGFAFVYFENVDDAKEAKERANGMELDGRRIRVDFSITKRPHTPTPGIYMGRPTYGSSRRRDYYDRGYDRGYDDRDYYSRSYRGGGGGGGGWRAAQDRDQIYRRRSPSPYYSRGGYRSRSRSRSYSPRRY

SEQ ID NO: 16354 - protein, 460 aa, Homo sapiens
MASLLQSDRVLYLVQGEKKVRAPLSQLYFCRYCSELRSLECVSHEVDSHYCPSCLENMPSAEAKLKKNRCANCFDCPGCMHTLSTRATSISTQLPDDPAKTTMKKAYYLACGFCRWTSRDVGMADKSVASGGWQEPENPHTQRMNKLIEYYQQLAQKEKVERDRKKLARRRNYMPLAFSDKYGLGTRLQRPRAGASISTLAGLSLKEGEDQKEIKIEPAQAVDEVEPLPEDYYTRPVNLTEVTTLQQRLLQPDFQPVCASQLYPRHKHLLIKRSLRCRKCEHNLSKPEFNPTSIKFKIQLVAVNYIPEVRIMSIPNLRYMKESQVLLTLTNPVENLTHVTLFECEEGDPDDINSTAKVVVPPKELVLAGKDAAAEYDELAEPQDFQDDPDIIAFRKANKVGIFIKVTPQREEGEVTVCFKMKHDFKNLAAPIRPIEESDQGTEVIWLTQHVELSLGPLLP

SEQ ID NO: 16355 - protein, 761 aa, Homo sapiens
MAMQEKYPTEGISHVTSPSSDVIQKGSSLGTEWQTPVISEPFRSRFSRCSSVADSGDTAIGTSCSDIAEDFCSSSGSPPFQPIKSHVTIPTAHVMPSTLGTSPAKPNSTPVGPSSSKLPLSGLAESVGMTRNGDLGAMKHSPGLSRDLMYFSGATGENGIEQSWFPAVGHERQEEARKFDIPSMESTLNQSAMMETLYSDPHHRVRFHNPRTSTSKELYRVLPEAKKAPGSGAVFERNGPHSNSSGVLPLGLQPAPGLSKPLPSQVWQPSPDTWHPREQSCELSTCRQQLELIRLQMEQMQLQNGAICHHPAAFGPSLPILEPAQWISILNSNEHLLKEKELLIDKQRKHISQLEQKVRESELQVHSALLGRPAPFGDVCLLRLQELQRENTFLRAQFAQKTEALSREKIDLEKKLSASEVEVQLIRESLKVALQKHSEEVKKQEERVKGRDKHINNLKKKCQKESEQNREKQQRIETLERYLADLPTLEDHQKQSQQLKDSELKSTELQEKVTELESLLEETQAICREKEIQLESLRQREAEFSSAGHSLQDKQSVEETSGEGPEVEMESWQKRYDSLQKIVEKQQQKMDQLRSQVQSLEQEVAQEEGTSQALREEAQRRDSALQQLRTAVKELSVQNQDLIEKNLTLQEHLRQAQPGSPPSPDTAQLALELHQELASCLQDLQAVCSIVTQRAQGHDPNLSLLLGIHSQHPETQLDLQKPDVIKRKLEEVQQLRRDIEDLRTTMSDRYAQDMGENCVTQ

SEQ ID NO: 16356 - protein, 761 aa, Homo sapiens
MEALEVDDISPALEVTEEFFSTLDSNLEKAVQQAEVYGIQEVPELVGHEVLSNITDNGAMRNVTSLGKGGMIWDHCKSRLLETKAQNVFPAKEQFMVQRGTTPDNLSWMEQKEASTFNFFNICQRRRDRPRSVNDLLDETSTFKPGHARSRSDITQVDWRVVLKTTPLQQQQQQQPLLQGPHVTRPSFLLPSPNKIEDAQGNTEHKQTFPNILKKGYLEIRKDHDSYWQSCYAELSPYNLYFYSLDSSGNQNLYATYQLSHFQSISVLGNLEARMVDTVLYDNTQLQLKAESPWEALDWGQKLWEVVHAAVPGYMGRQNELTISPGLGHHDDYTQNHSFQKKTSGLLPPSPVLDSSKQYQNILKSGTLYRLTVQNNWKAFTFVLSRAYLMAFQPGKLDEDPLLSYNVDVCLAVQMDNLDGCDSCFQVIFPQDVLRLRAETRQRAQEWMEALKIAANVARSSEQNLQVTLRNKPKDQMGGHELRKNKRQSVTTSFLSILTTLSLERGLTAQSFKCAGCQRSIGLSNGKAKVCNYSGWYYCSSCHVDDSFLIPARIVHNWDTSKYKVSKQAKEFLEYVYEEPLIDIQQENAMLYHHAEPLAAVLRLRQRLKSLRAYLFSCRAAVAEDLRRRIFPREYLLQQIHLYSLADLQQVIEGKLAPFLGKVIKFATSHVYSCSLCSQKGFICEICNNGEILYPFEDISTSRCESCGAVFHSECKEKSVPCPRCVRRELQKKQKSFWQRLNMDESLEEACTMFELSYQNT

SEQ ID NO: 16357 - protein, 1185 aa, Homo sapiens
KKKVLTEADTPSKFDPINYLGEYLIRNNPNYIKDPGMSGYQRLMKEVTEDLKIYVPDTICNRVSKMKENVKQNRKQRESIDKIIVKVANTRKQALQEQFDEWILDPKGMIPKSVIQNVLQEFFQNPDFKLGSHCKQLDITDSTEPRLNKMEFTEYISSHIKDLKSEMFEELLKHLCHSADEFREVIKADMRRQMFAELFLHCDHGKVGFLDRQRTLALLELFYDHSSQMLRSLLRNPRQWPFIEFEEINLTELWGDMDNQKHIYEGFDKVLLEMNTLLSANHASKTQSKLLESPDQPKLNEQRTSTPSPNPPEQQRGVTAEQGPQRISIEEQQQGKKPTAEQELYIESVIEPGTHTESTLEQGSSRRLLTEQETHRESTTEQGQHKGSIEGQGPRRVSVSEQGSSRESVAEQGSRRESIAEQDRHKGSVAEQGSRRMSAAEQGSLRESVIEEPYQKSEQGPYGEIISEEQEDIGSTSQSRKDSILKSTKYGEPITSEYIEVPLQEKRSWEQTYEEEIFLSSELQEEVPTLSRKDHFPETTKKEVQKDKPCEPKSQKIEGKSWSGEFFTCNWKMKYVTFEDEEQANLIYGNSRFTAKLHIQFPKPHPGHEVRLSSKQFQNYIELVVSELRGNEDQVLESVVEFLMNALERSHIESLRNSARRKWLHQIQCAAETSGVSLEPVYSETFKALMQDAEAHGNKKISAHISLLEENLLLPEKGNVLLRNVACTLDDAQFVLNRVLYRDMKGISFTVVDEGKPIHVPQVQYHGNIFFWNQSRNKHDYNGSFLALPLQDAYMRIFGVLAVDTLRDPHEINIFLPHEIRFYQGVANVFSTAYHYVHSREHILHIVITGIGWLYDVTSSITSITTYFVEPSPAQDSDYVLRNMMVTGQLGLTEIHKNPPTIHRKSCIFRDFLFKCTDSSEVVLASACGETHIVVPLRERTGEALGVLDFNIGQNRMLLCQEYKDLQKMMKVVQVACYEILGEFSGEIKKKYILEIENVREVQRAGILFFRIMLLELQESIQLLNSMEFVSLLLYDHTLVTEPNSPQDSKSMELEANVKLVRDILKAVILFFHPELEFSSDFGSWDKCKFYVNKYLVNNICAFDPTAKHVEVNVQLIDEYIRDHSRTEVWKFGNVVIEHLYHWIHICSALMKITKQLNSGITPPLPSKTDNYMYAKMPGEGLQEK

SEQ ID NO: 16358 - protein, 484 aa, Homo sapiens
MARLLRSATWELFPWRGYCSQKAKGELCRDFVEALKAVVGGSHVSTAAVVREQHGRDESVHRCEPPDAVVWPQNVEQVSRLAALCYRQGVPIIPFGTGTGLEGGVCAVQGGVCVNLTHMDRILELNQEDFSVVVEPGVTRKALNAHLRDSGLWFPVDPGADASLCGMAATGASGTNAVRYGTMRDNVLNLEVVLPDGRLLHTAGRGRHFRKSAAGYNLTGLFVGSEGTLGLITATTLRLHPAPEATVAATCAFPSVQAAVDSTVHILQAAVPVARIEFLDEVMMDACNRYSKLNCLVAPTLFLEFHGSQQALEEQLQRTEEIVQQNGASDFSWAKEAEERSRLWTARHNAWYAALATRPGCKGYSTDVCVPISRLPEIVVQTKEDLNASGLTGSIVGHVGDGNFHCILLVNPDDAEELGRVKAFAEQLGRRALALHGTCTGEHGIGMGKRQLLQEEVGAVGVETMRQLKAVLDPQGLMNPGKVL

SEQ ID NO: 16359 - protein, 100 aa, Homo sapiens
MFGLFVEHGPYVVTSNMTLRDRDFPWTTTLSMLYIDNPVGTGFSFTDDTHGYAVNEDDVARDLYSALIQFFQIFPEYKNNDFYVTGESYAGKYVPAIAHL

SEQ ID NO: 16360 - protein, 486 aa, Homo sapiens
MQSWSRVYCSLAKRGHFNRISHGLQGLSAVPLRTYADQPIDADVTVIGSGPGGYVAAIKAAQLGFKALLNNSHYYHMAHGKDFASRGIEMSEVRLNLDKMMEQKSTAVKALTGGIAHLFKQNKVVHVNGYGKITGKNQVTATKADGGTQVIDTKNILIATGSEVTPFPGITIDEDTIVSSTGALSLKKVPEKMVVIGAGVIGVELGSVWQRLGADVTAVEFLGHVGGVGIDMEISKNFQRILQKQGFKFKLNTKVTGATKKSDGKIDVSIEAASGGKAEVITCDVLLVCIGRRPFTKNLGLEELGIELDPRGRIPVNTRFQTKIPNIYAIGDVVAGPMLAHKAEDEGIICVEGMAGGAVHIDYNCVPSVIYTHPEVAWVGKSEEQLKEEGIEYKVGKFPFAANSRAKTNADTDGMVKILGQKSTDRVLGAHILGPGAGEMVNEAALALEYGASCEDIARVCHAHPTLSEAFREANLAASFGKSINF

SEQ ID NO: 16361 - protein, 1357 aa, Homo sapiens
FQARCRAYLVRKAFRHRLWAVLTVQAYARGMIARRLHQRLRAEYLWRLEAEKMRLAEEEKLRKEMSAKKAKEEAERKHQERLAQLAREDAERELKEKEAARRKKELLEQMERARHEPVNHSDMVDKMFGFLGTSGGLPGQEGQAPSGFEDLERGRREMVEEDLDAALPLPDEDEEDLSEYKFAKFAATYFQGTTTHSYTRRPLKQPLLYHDDEGDQLAALAVWITILRFMGDLPEPKYHTAMSDGSEKIPVMTKIYETLGKKTYKRELQALQGEGEAQLPEGQKKSSVRHKLVHLTLKKKSKLTEEVTKRLHDGESTVQGNSMLEDRPTSNLEKLHFIIGNGILRPALRDEIYCQISKQLTHNPSKSSYARGWILVSLCVGCFAPSEKFVKYLRNFIHGGPPGYAPYCEERLRRTFVNGTRTQPPSWLELQATKSKKPIMLPVTFMDGTTKTLLTDSATTAKELCNALADKISLKDRFGFSLYIALFDKVSSLGSGSDHVMDAISQCEQYAKEQGAQERNAPWRLFFRKEVFTPWHSPSEDNVATNLIYQQVVRGVKFGEYRCEKEDDLAELASQQYFVDYGSEMILERLLNLVPTYIPDREITPLKTLEKWAQLAIAAHKKGIYAQRRTDAQKVKEDVVSYARFKWPLLFSRFYEAYKFSGPSLPKNDVIVAVNWTGVYFVDEQEQVLLELSFPEIMAVSSSRGAKTTAPSFTLATIKGDEYTFTSSNAEDIRDLVVTFLEGLRKRSKYVVALQDNPNPGEESGFLSFAKGDLIILDHDTGEQVMNSGWANGINERTKQRGDFPTDSVYVMPTVTMPPREIVALVTMTPDQRQDVVRLLQLRTAEPEVRAKPYTLEEFSYDYFRPPPKHTLSRVMVSKARGKDRLWSHTREPLKQALLKKLLGSEELSQEACLAFIAVLKYMGDYPSKRTRSVNELTDQIFEGPLKAEPLKDEAYVQILKQLTDNHIRYSEERGWELLWLCTGLFPPSNILLPHVQRFLQSRKHCPLAIDCLQRLQKALRNGSRKYPPHLVEVEAIQHKTTQIFHKVYFPDDTDEAFEVESSTKAKDFCQNIATRLLLKSSEGFSLFVKIADKVLSVPENDFFFDFVRHLTDWIKKARPIKDGIVPSLTYQVFFMKKLWTTTVPGKDPMADSIFHYYQELPKYLRGYHKCTREEVLQLGALIYRVKFEEDKSYFPSIPKLLRELVPQDLIRQVSPDDWKRSIVAYFNKHAGKSKEEAKLAFLKLIFKWPTFGSAFFEVKQTTEPNFPEILLIAINKYGVSLIDPKTKDILTTHPFTKISNWSSGNTYFHITIGNLVRGSKLLCETSLGYKMDDLLTSYISQMLTAMSKQRGSRSGK

SEQ ID NO: 16362 - protein, 161 aa, Homo sapiens
KVCYYYDGDIGNYYYGQGHPMKPHRIRMTHNLLLNYGLYRKMEIYRPHKATAEEMTKYHSDEYIKFLRSIRPDNMSEYSKQMQRFNVGEDCPVFDGLFEFCQLSTGGSVAGAVKLNRQQTDMAVNWAGGLHHAKKSEASGFCYVNDIVLAILELLKYVNLY

SEQ ID NO: 16363 - protein, 645 aa, Homo sapiens
MGQTSVSTLSPQPGSVDGLDKASIANSDGPTAGSQTPPFKRKGKLSTIGKIFKPWKWRKKKTSDKFRETSAVLERKISTRQSREELIRRGVLKELPDQDGDVTVNFENSNGHMIPIGEESTREENVVKSEEGNGSVSEKTPPLEEQAEDKKENTENHSETPAAPALPPSAPPKPRPKPKPKKSPVPPKGATAGASHKGDEVPPIKKNTKAPGKQAPVPPPKPASRNTTREAAGSSHSKKTTGSKASASPSTSSTSSRPKASKETVSSKAGTVGTTKGKRKTDKQPITSHLSSDTTTSGTSDLKGEPAETRVESFKLEQTVPGAEEQNTGKFKSMVPPPPVAPAPSPLAPPLPLEDQCITASDTPVVLVSVGADLPVSALDPSQLLWAEEPTNRTTLYSGTGLSVNRENAKCFTTKEELGKTVPQLLTPGLMGESSESFSASEDEGHREYQANDSDSDGPILYTDDEDEDEDEDGSGESALASKIRRRDTLAIKLGNRPSKKELEDKNILQRTSEEERQEIRQQIGTKLVRRLSQRPTTEELEQRNILKQKNEEEEQEAKMELKRRLSRKLSLRPTVAELQARRILRFNEYVEVTDSPDYDRRADKPWARLTPADKAAIRKELNEFKSTEMEVHEESRQFTRFHRP

SEQ ID NO: 16364 - protein, 108 aa, Homo sapiens
MKKKLVVLGLLAVVLVLVIVGLCLWLPSASKEPDNHVYTRAAVAADAKQCSKIGRDALRDGGSAVDAAIAALLCVGLMNAHSMGIGGGLFLTIYNSTTRKAEVINARE

SEQ ID NO: 16365 - protein, 288 aa, Homo sapiens
MSRELAPLLLLLLSIHSALAMRICSFNVRSFGESKQEDKNAMDVIVKVIKRCDIILVMEIKDSNNRICPILMEKLNRNSRRGITYNYVISSRLGRNTYKEQYAFLYKEKLVSVKRSYHYHDYQDGDADVFSREPFVVWFQSPHTAVKDFVIIPLHTTPETSVKEIDELVEVYTDVKHRWKAENFIFMGDFNAGCSYVPKKAWKNIRLRTDPRFVWLIGDQEDTTVKKSTNCAYDRIVLRGQEIVSSVVPKSNSVFDFQKAYKLTEEEVRLPSCLSMPLSWKDELAWAT

SEQ ID NO: 16366 - protein, 600 aa, Homo sapiens
MKNAVIGNNKQKANLIVLGAVPRLLYLLQQETSSTELKTECAVVLGSLAMGTENNVKSLLDCHIIPALLQGLLSPDLKFIEACLRCLRTIFTSPVTPEELLYTGPDHQTILFNHGAVQNIAHLLTSLSYKVRMQALKCFSVLAFENPQVSMTLVNVLVDGELLPQIFVKMLQRDKPIEMQLTSAKCLTYMCRAGAIRTDDNCIVLKTLPCLVRMCSKERLLEERVEGAETLAYLIEPDVELQRIASITDHLIAMLADYFKYPSSVSAITDIKRLDHDLKHAHELRQAAFKLYASLGANDEDIRKKIIETENMMDRIVTGLSESSVKVRLAAVRCLHSLSRSVQQLRTSFQDHAVWKPLMKVLQNAPDEILVVASSMLCNLLLEFSPSKEPILESGAVELLCGLTQSENPALRVNGIWALMNMAFQAEQKIKADILRSLSTEQLFRLLSDSDLNVLMKTLGLLRNLLSTRPHIDKIMSTHGKQIMQAVTLILEGEHNIEVKEQTLCILANIADGTTAKDLIMTNDDILQKIKYYMGHSHVKLQLAAMFCISNLIWNEEEGSQERQDKLRDMGIVDILHKLSQSPDSNLCDKAKMALQQYLA

SEQ ID NO: 16367 - protein, 1584 aa, Homo sapiens
MEDDGSLLPEDELLADALLLEDERDELEDPEFDIKCLLQEAEDDVDPGHSSSVKELDTDADKLKKKTAEDRTQAFHLRQNLSALDKMHEEQELFTEKMRGELRACRQRRDLIDKQQEAVAAEIATEEEAGNMAAVGRLQAVSRRLFAELENERDLQSRTEAVLKESENTMWHIEIQEGRLEAFRTADREEVEATGRRLQVRAAEQLCREQEALGKVERNRLLRIRKSLNTQKELGLRHQKLLEDARKNHKVAVRFLKASLGRIREQEKKEEMECHEYMRRRMDAVVALKGSISANRDTLRKFQAWDRAKAELAEQRVQAEKKAILAQGRDAFRHLVHQRRRQELEAQKRAFEEEQKLRKQEIISRILKEEAEEEKRKKQHPPTSARHRLTLRDKTWNYISDFCKKTTVPTNTYTLDYEAAAGPGPSRLLEVVSSELIQGDPGASSEEETLAEPEISGLWNEDYKPYQVPKEDVDRKPVGGTKMDKDILERTVERLRSRVVHKQVVWGREFQGRPFNSKPELLHFQDFDIGKVYKKKITLVNTTYTINYCKLVGVEEHLRDFIHVDFDPPGPLSAGMSCEVLVTFKPMINKDLEGNISFLAQTGEFSVPLKCSTKKCSLSLDKELIDFGSYVVGETTSRTITLTNVGGLGTTFKFLPASEPCEMDDSQSALKLSSLLTYEDKSLYDKAATSFSEQQLEGTESSQADMQSRKELEKLDKEQEEEQPAEPERLTTVIPPSEEQTEITLGEVTEGEIGPFSSIKVPIVFTPVVPGDVQARFKVTFKNPQCPTLHFRVVGVAIDVPVWVPKPSVDLKICMYDRLYQDSVLVHTRSKAALRLKFEVCKELRAHLELLPKTGYIQAQSSYSVQLKFLPRHSLPEDAGRYFDKETRVLEAPMTIWVADQNKPVGFTVHAIVTTSDLELSPSEVDFGYCTIYEAIRTEISLHNHSLLPQEFGFVRLPKFVDVQPNDGFGTILPLETLQFCVIFQPTKAEEHRFQLTCKSEINRCFKLSCRAVGVHPPLELSHYQIKFAATALYDTSVATVYVINSHLSMSSPTHSKPRIGSEDASPMGPTSFEFLLPPDSPITISPSVGTVWPGKRCLVQVAFRPVLPEKLIRQEALPLLNKEMETKSFRKNMAPQRKDLHGLSFSVLRAQNRDKLFKVSVPHVLEMRKRELRPSSDEYQAARATLLRAFQAKFDTFVVPCVVASGDIKDRKGSEPLSFSPHNTLYLELWCPTVAPSVVVTSHKGKTIFNFGDVAVGHRSIKKISIQNVSPEDLALDFSLLNPNGPFVLLNHSSLLRAGGTQVLVLSFSPHESILAQETLDIITKRGTLTLTLMGTGVASMITCSIEGSVLNMGYVIAGESVSSGFKLQNNSLLPIKFSMHLDSLSSTRGRGQQQLPQFLSSPSQRTEVVGTQNLNGQSVFSVAPVKGVMDPGKTQDFTVTFSPDHESLYFSDKLQVVLFEKKISHQILLKGAACQHMMFVEGGDPLDVPVESLTAIPVFDPRHREEAEELRPILVTLDYIQFDTDTPAPPATRELQVGCIRTTQPSPKKPDHPLMVSALLQLRGDVKETYKVIFVAQVLTGP

SEQ ID NO: 16368 - protein, 695 aa, Homo sapiens
MGQTGKKSEKGPVCWRKRVKSEYMRLRQLKRFRRADEVKSMFSSNRQKILERTEILNQEWKQRRIQPVHILTSCSVTSDLDFPTQVIPLKTLNAVASVPIMYSWSPLQQNFMVEDETVLHNIPYMGDEVLDQDGTFIEELIKNYDGKVHGDRECGFINDEIFVELVNALGQYNDDDDDDDGDDPEEREEKQKDLEDHRDDKESRPPRKFPSDKIFEAISSMFPDKGTAEELKEKYKELTEQQLPGALPPECTPNIDGPNAKSVQREQSLHSFHTLFCRRCFKYDCFLHPFHATPNTYKRKNTETALDNKPCGPQCYQHLEGAKEFAAALTAERIKTPPKRPGGRRRGRLPNNSSRPSTPTINVLESKDTDSDREAGTETGGENNDKEEEEKKDETSSSSEANSRCQTPIKMKPNIEPPENVEWSGAEASMFRVLIGTYYDNFCAIARLIGTKTCRQVYEFRVKESSIIAPAPAEDVDTPPRKKKRKHRLWAAHCRKIQLKKGQNRFPGCRCKAQCNTKQCPCYLAVRECDPDLCLTCGAADHWDSKNVSCKNCSIQRGSKKHLLLAPSDVAGWGIFIKDPVQKNEFISEYCGEIISQDEADRRGKVYDKYMCSFLFNLNNDFVVDATRKGNKIRFANHSVNPNCYAKVMMVNGDHRIGIFAKRAIQTGEELFFDYRYSQADALKYVGIEREMEIP

SEQ ID NO: 16369 - protein, 216 aa, Homo sapiens
MSEVPVARVWLVLLLLTVQVGVTAGAPWQCAPCSAEKLALCPPVSASCSEVTRSAGCGCCPMCALPLGAACGVATARCARGLSCRALPGEQQPLHALTRGQGACVQESDASAPHAAEAGSPESPESTEITEEELLDNFHLMAPSEEDHSILWDAISTYDGSKALHVTNIKKWKCETSMDGEAGLCWCVYPWNGKRIPGSPEIRGDPNCQIYFNVQN

SEQ ID NO: 16370 - protein, 103 aa, Homo sapiens
MAAHLVKRCTCLLREAARQAPAMAPVGRLRLAWVAHKTLTSSATSPISHLPGSLMEPVEKERASTPYIEKQVDHLIKKATRPEELLELLGGSHDLDSNQAAMV

SEQ ID NO: 16371 - protein, 1008 aa, Homo sapiens
MSYDYHQNWGRDGGPRSSGGGYGGGPAGGHGGNRGSGGGGGGGGGGRGGRGRHPGHLKGREIGMWYAKKQGQKNKEAERQERAVVHMDERREEQIVQLLNSVQAKNDKESEAQISWFAPEDHGYGTEVSTKNTPCSENKLDIQEKKLINQEKKMFRIRNRSYIDRDSEYLLQENEPDGTLDQKLLEDLQKKKNDLRYIEMQHFREKLPSYGMQKELVNLIDNHQVTVISGETGCGKTTQVTQFILDNYIERGKGSACRIVCTQPRRISAISVAERVAAERAESCGSGNSTGYQIRLQSRLPRKQGSILYCTTGIILQWLQSDPYLSSVSHIVLDEIHERNLQSDVLMTVVKDLLNFRSDLKVILMSATLNAEKFSEYFGNCPMIHIPGFTFPVVEYLLEDVIEKIRYVPEQKEHRSQFKRGFMQGHVNRQEKEEKEAIYKERWPDYVRELRRRYSASTVDVIEMMEDDKVDLNLIVALIRYIVLEEEDGAILVFLPGWDNISTLHDLLMSQVMFKSDKFLIIPLHSLMPTVNQTQVFKRTPPGVRKIVIATNIAETSITIDDVVYVIDGGKIKETHFDTQNNISTMSAEWVSKANAKQRKGRAGRVQPGHCYHLYNGLRASLLDDYQLPEILRTPLEELCLQIKILRLGGIAYFLSRLMDPPSNEAVLLSIRHLMELNALDKQEELTPLGVHLARLPVEPHIGKMILFGALFCCLDPVLTIAASLSFKDPFVIPLGKEKIADARRKELAKDTRSDHLTVVNAFEGWEEARRRGFRYEKDYCWEYFLSSNTLQMLHNMKGQFAEHLLGAGFVSSRNPKDPESNINSDNEKIIKAVICAGLYPKVAKIRLNLGKKRKMVKVYTKTDGLVAVHPKSVNVEQTDFHYNWLIYHLKMRTSSIYLYDCTEVSPYCLLFFGGDISIQKDNDQETIAVDEWIVFQSPARIAHLVKELRKELDILLQEKIESPHPVDWNDTKSRDCAVLSAIIDLIKTQEKATPRNFPPRFQDGYYS

SEQ ID NO: 16372 - protein, 729 aa, Homo sapiens
MNPFQKNESKETLFSPVSIEEVPPRPPSPPKKPSPTICGSNYPLSIAFIVVNEFCERFSYYGMKAVLILYFLYFLHWNEDTSTSIYHAFSSLCYFTPILGAAIADSWLGKFKTIIYLSLVYVLGHVIKSLGALPILGGQVVHTVLSLIGLSLIALGTGGIKPCVAAFGGDQFEEKHAEERTRYFSVFYLSINAGSLISTFITPMLRGDVQCFGEDCYALAFGVPGLLMVIALVVFAMGSKIYNKPPPEGNIVAQVFKCIWFAISNRFKNRSGDIPKRQHWLDWAAEKYPKQLIMDVKALTRVLFLYIPLPMFWALLDQQGSRWTLQAIRMNRNLGFFVLQPDQMQVLNPLLVLIFIPLFDFVIYRLVSKCGINFSSLRKMAVGMILACLAFAVAAAVEIKINEMAPAQPGPQEVFLQVLNLADDEVKVTVVGNENNSLLIESIKSFQKTPHYSKLHLKTKSQDFHFHLKYHNLSLYTEHSVQEKNWYSLVIREDGNSISSMMVKDTESRTTNGMTTVRFVNTLHKDVNISLSTDTSLNVGEDYGVSAYRTVQRGEYPAVHCRTEDKNFSLNLGLLDFGAAYLFVITNNTNQGLQAWKIEDIPANKMSIAWQLPQYALVTAGEVMFSVTGLEFSYSQAPSSMKSVLQAAWLLTIAVGNIIVLVVAQFSGLVQWAEFILFSCLLLVICLIFSIMGYYYVPVKTEDMRGPADKHIPHIQGNMIKLETKKTKL

SEQ ID NO: 16373 - protein, 1505 aa, Homo sapiens
MVHVARLLLLLLTFFLRTDAETPPRFTRTPVDQTGVSGGVASFICQATGDPRPKIVWNKKGKKVSNQRFEVIEFDDGSGSVLRIQPLRTPRDEAIYECVASNNVGEISVSTRLTVLREDQIPRGFPTIDMGPQLKVVERTRTATMLCAASGNPDPEITWFKDFLPVDTSNNNGRIKQLRSESIGGTPIRGALQIEQSEESDQGKYECVATNSAGTRYSAPANLYVRELREVRRVPPRFSIPPTNHEIMPGGSVNITCVAVGSPMPYVKWMLGAEDLTPEDDMPIGRNVLELNDVRQSANYTCVAMSTLGVIEAIAQITVKALPKPPGTPVVTESTATSITLTWDSGNPEPVSYYIIQHKPKNSEELYKEIDGVATTRYSVAGLSPYSDYEFRVVAVNNIGRGPPSEPVLTQTSEQAPSSAPRDVQARMLSSTTILVQWKEPEEPNGQIQGYRVYYTMDPTQHVNNWMKHNVADSQITTIGNLVPQKTYSVKVLAFTSIGDGPLSSDIQVITQTGVPGQPLNFKAEPESETSILLSWTPPRSDTIANYELVYKDGEHGEEQRITIEPGTSYRLQGLKPNSLYYFRLAARSPQGLGASTAEISARTMQSMFAKNFHVKAVMKTSVLLSWEIPENYNSAMPFKILYDDGKMVEEVDGRATQKLIVNLKPEKSYSFVLTNRGNSAGGLQHRVTAKTAPDVLRTKPAFIGKTNLDGMITVQLPEVPANENIKGYYIIIVPLKKSRGKFIKPWESPDEMELDELLKEISRKRRSIRYGREVELKPYIAAHFDVLPTEFTLGDDKHYGGFTNKQLQSGQEYVFFVLAVMEHAESKMYATSPYSDPVVSMDLDPQPITDEEEGLIWVVGPVLAVVFIICIVIAILLYKSKPDRKRAESDSRKSSIPNNKEIPSHHPTDPVELRRLNFQTPGMASHPPIPILELADHIERLKANDNLKFSQEYESIDPGQQFTWEHSNLEVNKPKNRYANVIAYDHSRVLLSAIEGIPGSDYVNANYIDGYRKQNAYIATQGSLPETFGDFWRMIWEQRSATVVMMTKLEERSRVKCDQYWPSRGTETHGLVQVTLLDTVELATYCVRTFALYKNGSSEKREVRQFQFTAWPDHGVPEHPTPFLAFLRRVKTCNPPDAGPMVVHCSAGVGRTGCFIVIDAMLERIKHEKTVDIYGHVTLMRAQRNYMVQTEDQYIFIHDALLEAVTCGNTEVPARNLYAYIQKLTQIETGENVTGMELEFKRLASSKAHTSRFISANLPCNKFKNRLVNIMPYESTRVCLQPIRGVEGSDYINASFIDGYRQQKAYIATQGPLAETTEDFWRMLWEHNSTIVVMLTKLREMGREKCHQYWPAERSARYQYFVVDPMAEYNMPQYILREFKVTDARDGQSRTVRQFQFTDWPEQGVPKSGEGFIDFIGQVHKTKEQFGQDGPISVHCSAGVGRTGVFITLSIVLERMRYEGVVDIFQTVKMLRTQRPAMVQTEDQYQFSYRAALEYLGSFDHYAT

SEQ ID NO: 16374 - protein, 12 aa, Homo sapiens
LTFGGGTKVEIK

SEQ ID NO: 16375 - protein, 514 aa, Homo sapiens
MVELVISPSLTVNSDCLDKLKFNRADAAVWTLSDRQGITKSAPLRVSQLFSRSCPRVLPRQPSTAMAAYGQTQYSAGIQQATPYTAYPPPAQAYGIPSFSTSPTGQSPYTYQMHGTTGFYQGGNGLGNAAGFGSVHQDYPSYPGFPQSQYPQYYGSSYNPPYVPASSICPSPLSTSTYVLQEASHNVPNQSSESLAGEYNTHNGPSTPAKEGDTDRPHRASDGKLRGRSKRSSDPSPAGDNEIERVFVWDLDETIIIFHSLLTGTFASRYGKDTTTSVRIGLMMEEMIFNLADTHLFFNDLEDCDQIHVDDVSSDDNGQDLSTYNFSADGFHSSAPGANLCLGSGVHGGVDWMRKLAFRYRRVKEMYNTYKNNVGGLIGTPKRETWLQLRAELEALTDLWLTHSLKALNLINSRPNCVNVLVTTTQLIPALAKVLLYGLGSVFPIENIYSATKTGKESCFERIMQRFGRKAVYVVIGDGVEEEQGAKKHNMPFWRISCHADLEALRHALELEYL

SEQ ID NO: 16376 - protein, 202 aa, Homo sapiens
MRMTMEEMKNEAETTSMVSMPLYAVMYPVFNELERVNLSAAQTLRAAFIKAEKENPGLTQDIIMKILEKKSVEVNFTESLLRMAADDVEEYMIERPEPEFQDLNEKARALKQILSKIPDEINDRVRFLQTIKDIASAIKELLDTVNNVFKKYQYQNRRALEHQKKEFVKYSKSFSDTLKTYFKDGKAINVFVSANRLIHQTN

SEQ ID NO: 16377 - protein, 1243 aa, Homo sapiens
MPSSLMLEVPALADFNRAWTELTDWLSLLDQVIKSQRVMVGDLEDINEMIIKQKATMQDLEQRRPQLEELITAAQNLKNKTSNQEARTIITDRIERIQNQWDEVQEHLQNRRQQLNEMLKDSTQWLEAKEEAEQVLGQARAKLESWKEGPYTVDAIQKKITETKQLAKDLRQWQTNVDVANDLALKLLRDYSADDTRKVHMITENINASWRSIHKRVSEREAALEETHRLLQQFPLDLEKFLAWLTEAETTANVLQDATRKERLLEDSKGVKELMKQWQDLQGEIEAHTDVYHNLDENSQKILRSLEGSDDAVLLQRRLDNMNFKWSELRKKSLNIRSHLEASSDQWKRLHLSLQELLVWLQLKDDELSRQAPIGGDFPAVQKQNDVHRAFKRELKTKEPVIMSTLETVRIFLTEQPLEGLEKLYQEPRELPPEERAQNVTRLLRKQAEEVNTEWEKLNLHSADWQRKIDETLERLRELQEATDELDLKLRQAEVIKGSWQPVGDLLIDSLQDHLEKVKALRGEIAPLKENVSHVNDLARQLTTLGIQLSPYNLSTLEDLNTRWKLLQVAVEDRVRQLHEAHRDFGPASQHFLSTSVQGPWERAISPNKVPYYINHETQTTCWDHPKMTELYQSLADLNNVRFSAYRTAMKLRRLQKALCLDLLSLSAACDALDQHNLKQNDQPMDILQIINCLTTIYDRLEQEHNNLVNVPLCVDMCLNWLLNVYDTGRTGRIRVLSFKTGIISLCKAHLEDKYRYLFKQVASSTGFCDQRRLGLLLHDSIQIPRQLGEVASFGGSNIEPSVRSCFQFANNKPEIEAALFLDWMRLEPQSMVWLPVLHRVAAAETAKHQAKCNICKECPIIGFRYRSLKHFNYDICQSCFFSGRVAKGHKMHYPMVEYCTPTTSGEDVRDFAKVLKNKFRTKRYFAKHPRMGYLPVQTVLEGDNMETPVTLINFWPVDSAPASSPQLSHDDTHSRIEHYASRLAEMENSNGSYLNDSISPNESIDDEHLLIQHYCQSLNQDSPLSQPRSPAQILISLESEERGELERILADLEEENRNLQAEYDRLKQQHEHKGLSPLPSPPEMMPTSPQSPRDAELIAEAKLLRQHKGRLEARMQILEDHNKQLESQLHRLRQLLEQPQAEAKVNGTTVSSPSTSLQRSDSSQPMLLRVVGSQTSDSMGEEDLLSPPQDTSTGLEEVMEQLNNSFPSSRGHNVGSLFHMADDLGRAMESLVSVMTDEEGAE

SEQ ID NO: 16378 - protein, 75 aa, Homo sapiens
MMKGEFYVIEYAACDATYNEIVTFERLRPVNQNKTVKKNTFFKCTVDVPEDLREACANENAHKDFKKAVGACRIF

SEQ ID NO: 16379 - protein, 729 aa, Homo sapiens
MNKGWLELESDPGLFTLLVEDFGVKGVQVEEIYDLQSKCQGPVYGFIFLFKWIEERRSRRKVSTLVDDTSVIDDDIVNNMFFAHQLIPNSCATHALLSVLLNCSSVDLGPTLSRMKDFTKGFSPESKGYAIGNAPELAKAHNSHARPEPRHLPEKQNGLSAVRTMEAFHFVSYVPITGRLFELDGLKVYPIDHGPWGEDEEWTDKARRVIMERIGLATAGEPYHDIRFNLMAVVPDRRIKYEARLHVLKVNRQTVLEALQQLIRVTQPELIQTHKSQESQLPEESKSASNKSPLVLEANRAPAASEGNHTDGAEEAAGSCAQAPSHSPPNKPKLVVKPPGSSLNGVHPNPTPIVQRLPAFLDNHNYAKSPMQEEEDLAAGVGRSRVPVRPPQQYSDDEDDYEDDEEDDVQNTNSALRYKGKGTGKPGALSGSADGQLSVLQPNTINVLAEKLKESQKDLSIPLSIKTSSGAGSPAVAVPTHSQPSPTPSNESTDTASEIGSAFNSPLRSPIRSANPTRPSSPVTSHISKVLFGEDDSLLRVDCIRYNRAVRDLGPVISTGLLHLAEDGVLSPLALTEGGKGSSPSIRPIQGSQGSSSPVEKEVVEATDSREKTGMVRPGEPLSGEKYSPKELLALLKCVEAEIANYEACLKEEVEKRKKFKIDDQRRTHNYDEFICTFISMLAQEGMLANLVEQNISVRRRQGVSIGRLHKQRKPDRRKRSRPYKAKRQ

SEQ ID NO: 16380 - protein, 558 aa, Homo sapiens
MADRGGVGEAAAVGASPASVPGLNPTLGWRERLRAGLAGTGASLWFVAGLGLLYALRIPLRLCENLAAGTSSLISGLIFIFEWWYFHKHGTSFIEQVSVSHLQPLMGGTESSISEPGSPSRNRENETSRQNLSECKVWRNPLNLFRGAEYRRYTWVTGKEPLTYYDMNLSAQDHQTFFTCDTDFLRPSDTVMQKAWRERNPPARIKAAYQALELNNDCATAYVLLAEEEATTIVDAERLFKQALKAGETIYRQSQQCQHQSPQHEAQLRRDTNVLVYIKRRLAMCARKLGRIREAVKIMRDLMKEFPPLTMLNIHENLLESLLELQAYPDVQAVLAKYDDISLPKSAAICYTAALLKTRTVSEKFSPETASRRGLSTAEINAVEAIHRAVEFNPHVPKYLLEMKSLILPPEHILKRGDSEAIAYAFFHLQHWKRIEGALNLLQCTWEGTFRMIPYPLEKGHLFYPYPSCTETADRELLPTFHHVSVYPKKELPLFIHFTAGFCSSTAMIAILTHQFPEIMGIFAKAVLGLWCPQPWASSGFEENTQDLKSEDLGLSSG

SEQ ID NO: 16381 - protein, 997 aa, Homo sapiens
MFTYICNHIKYATNRGNLRSAITVFPQRCPGRGDFRIWNSQLVRYAGYRQQDGSVRGDPANVEITELCIQHGWTPGNGRFDVLPLLLQAPDDPPELFLLPPELVLEVPLEHPTLEWFAALGLRWYALPAVSNMLLEIGGLEFPAAPFSGWYMSTEIGTRNLCDPHRYNILEDVAVCMDLDTRTTSSLWKDKAAVEINVAVLHSYQLAKVTIVDHHAATASFMKHLENEQKARGGCPADWAWIVPPISGSLTPVFHQEMVNYFLSPAFRYQPDPWKGSAAKGTGITRKKTFKEVANAVKISASLMGTVMAKRVKATILYGSETGRAQSYAQQLGRLFRKAFDPRVLCMDEYDVVSLEHETLVLVVTSTFGNGDPPENGESFAAALMEMSGPYNSSPRPEQHKSYKIRFNSISCSDPLVSSWRRKRKESSNTDSAGALGTLRFCVFGLGSRAYPHFCAFARAVDTRLEELGGERLLQLGQGDELCGQEEAFRGWAQAAFQAACETFCVGEDAKAAARDIFSPKRSWKRQRYRLSAQAEGLQLLPGLIHVHRRKMFQATIRSVENLQSSKSTRATILVRLDTGGQEGLQYQPGDHIGVCPPNRPGLVEALLSRVEDPPAPTEPVAVEQLEKGSPGGPPPGWVRDPRLPPCTLRQALTFFLDITSPPSPQLLRLLSTLAEEPREQQELEALSQDPRRYEEWKWFRCPTLLEVLEQFPSVALPAPLLLTQLPLLQPRYYSVSSAPSTHPGEIHLTVAVLAYRTQDGLGPLHYGVCSTWLSQLKPGDPVPCFIRGAPSFRLPPDPSLPCILVGPGTGIAPFRGFWQERLHDIESKGLQPTPMTLVFGCRCSQLDHLYRDEVQNAQQRGVFGRVLTAFSREPDNPKTYVQDILRTELAAEVHRVLCLERGHMFVCGDVTMATNVLQTVQRILATEGDMELDEAGDVIGVLRDQQRYHEDIFGLTLRTQEVTSRIRTQSFSLQERQLRGAVPWAFDPPGSDTNSP

SEQ ID NO: 16382 - protein, 798 aa, Homo sapiens
MNTFLAFGREHVERHFRKTGQSVYMHLKRHVREKVRGASGGALPKRRNSKIFLDLDTDDDLNSDDYEYEDEAKLVIFPDHYEIALPNIEELPALVTIACDAVLSSKSPYRKQDPDTWENELPVSKYANNLTQLDNGVRIPPSGWKCARCDLRENLWLNLTDGSVLCGKWFFDSSGGNGHALEHYRDMGYPLAVKLGTITPDGADVYSFQEEEPVLDPHLAKHLAHFGIDMLHMHGTENGLQDNDIKLRVSEWEVIQESGTKLKPMYGPGYTGLKNLGNSCYLSSVMQAIFSIPEFQRAYVGNLPRIFDYSPLDPTQDFNTQMTKLGHGLLSGQYSKPPVKSELIEQVMKEEHKPQQNGISPRMFKAFVSKSHPEFSSNRQQDAQEFFLHLVNLVERNRIGSENPSDVFRFLVEERIQCCQTRKVRYTERVDYLMQLPVAMEAATNKDELIAYELTRREAEANRRPLPELVRAKIPFSACLQAFSEPENVDDFWSSALQAKSAGVKTSRFASFPEYLVVQIKKFTFGLDWVPKKFDVSIDMPDLLDINHLRARGLQPGEEELPDISPPIVIPDDSKDRLMNQLIDPSDIDESSVMQLAEMGFPLEACRKAVYFTGNMGAEVAFNWIIVHMEEPDFAEPLTMPGYGGAASAGASVFGASGLDNQPPEEIVAIITSMGFQRNQAIQALRATNNNLERALDWIFSHPEFEEDSDFVIEMENNANANIISEAKPEGPRVKDGSGTYELFAFISHMGTSTMSGHYICHIKKEGRWVIYNDHKVCASERPPKDLGYMYFYRRIPS

SEQ ID NO: 16383 - protein, 699 aa, Homo sapiens
MDLSALRVEEVQNVINAMQKILECPICLELIKEPVSTKCDHIFCKFCMLKLLNQKKGPSQCPLCKNDITKRSLQESTRFSQLVEELLKIICAFQLDTGLEYANSYNFAKKENNSPEHLKDEVSIIQSMGYRNRAKRLLQSEPENPSLQETSLSVQLSNLGTVRTLRTKQRIQPQKTSVYIELGSDSSEDTVNKATYCSVGDQELLQITPQGTRDEISLDSAKKAACEFSETDVTNTEHHQPSNNDLNTTEKRAAERHPEKYQGEAASGCESETSVSEDCSGLSSQSDILTTQQRDTMQHNLIKLQQEMAELEAVLEQHGSQPSNSYPSIISDSSALEDLRNPEQSTSEKVLTSQKSSEYPISQNPEGLSADKFEVSADSSTSKNKEPGVERSSPSKCPSLDDRWYMHSCSGSLQNRNYPSQEELIKVVDVEEQQLEESGPHDLTETSYLPRQDLEGTPYLESGISLFSDDPESDPSEDRAPESARVGNIPSSTSALKVPQLKVAESAQSPAAAHTTDTAGYNAMEESVSREKPELTASTERVNKRMSMVVSGLTPEEFMLVYKFARKHHITLTNLITEETTHVVMKTDAEFVCERTLKYFLGIAGGKWVVSYFWVTQSIKERKMLNEHDFEVRGDVVNGRNHQGPKRARESQDRKIFRGLEICCYGPFTNMPTGCPPNCGCAARCLDRGQWLPCNWADV

SEQ ID NO: 16384 - protein, 568 aa, Homo sapiens
MEKKWKYCAVYYIIQIHFVKGVWEKTVNTEENVYATLGSDVNLTCQTQTVGFFVQMQWSKVTNKIDLIAVYHPQYGFYCAYGRPCESLVTFTETPENGSKWTLHLRNMSCSVSGRYECMLVLYPEGIQTKIYNLLIQTHVTADEWNSNHTIEIEINQTLEIPCFQNSSSKISSEFTYAWSVEDNGTQETLISQNHLISNSTLLKDRVKLGTDYRLHLSPVQIFDDGRKFSCHIRVGPNKILRSSTTVKVFAKPEIPVIVENNSTDVLVERRFTCLLKNVFPKANITWFIDGSFLHDEKEGIYITNEERKGKDGFLELKSVLTRVHSNKPAQSDNLTIWCMALSPVPGNKVWNISSEKITFLLGSEISSTDPPLSVTESTLDTQPSPASSVSPARYPATSSVTLVDVSALRPNTTPQPSNSSMTTRGFNYPWTSSGTDTKKFSRIPSETYSSSPSGAGSTLHDNVFTSTARAFSEVPTTANGSTKTNHVHITGIVVNKPKDGMSWPVIVAALLFCCMILFGLGVRKWCQYQKEIMERPPPFKPPPPPIKYTCIQEPNESDLPYHEMETL

SEQ ID NO: 16385 - protein, 1378 aa, Homo sapiens
MSLLMFTQLLLCGFLYVRVDGSRLRQEDFPPRIVEHPSDVIVSKGEPTTLNCKAEGRPTPTIEWYKDGERVETDKDDPRSHRMLLPSGSLFFLRIVHGRRSKPDEGSYVCVARNYLGEAVSRNASLEVALLRDDFRQNPTDVVVAAGEPAILECQPPRGHPEPTIYWKKDKVRIDDKEERISIRGGKLMISNTRKSDAGMYTCVGTNMVGERDSDPAELTVFERPTFLRRPINQVVLEEEAVEFRCQVQGDPQPTVRWKKDDADLPRGRYDIKDDYTLRIKKTMSTDEGTYMCIAENRVGKMEASATLTVRAPPQFVVRPRDQIVAQGRTVTFPCETKGNPQPAVFWQKEGSQNLLFPNQPQQPNSRCSVSPTGDLTITNIQRSDAGYYICQALTVAGSILAKAQLEVTDVLTDRPPPIILQGPANQTLAVDGTALLKCKATGDPLPVISWLKEGFTFPGRDPRATIQEQGTLQIKNLRISDTGTYTCVATSSSGETSWSAVLDVTESGATISKNYDLSDLPGPPSKPQVTDVTKNSVTLSWQPGTPGTLPASAYIIEAFSQSVSNSWQTVANHVKTTLYTVRGLRPNTIYLFMVRAINPQGLSDPSPMSDPVRTQDISPPAQGVDHRQVQKELGDVLVRLHNPVVLTPTTVQVTWTVDRQPQFIQGYRVMYRQTSGLQATSSWQNLDAKVPTERSAVLVNLKKGVTYEIKVRPYFNEFQGMDSESKTVRTTEEAPSAPPQSVTVLTVGSYNSTSISVSWDPPPPDHQNGIIQEYKIWCLGNETRFHINKTVDAAIRSVIIGGLFPGIQYRVEVAASTSAGVGVKSEPQPIIIGRRNEVVITENNNSITEQITDVVKQPAFIAGIGGACWVILMGFSIWLYWRRKKRKGLSNYAVTFQRGDGGLMSNGSRPGLLNAGDPSYPWLADSWPATSLPVNNSNSGPNEIGNFGRGDVLPPVPGQGDKTATMLSDGAIYSSIDFTTKTSYNSSSQITQATPYATTQILHSNSIHELAVDLPDPQWKSSIQQKTDLMGFGYSLPDQNKGNNGGKGGKKKKNKNSSKPQKNNGSTWANVPLPPPPVQPLPGTELEHYAVEQQENGYDSDSWCPPLPVQTYLHQGLEDELEEDDDRVPTPPVRGVASSPAISFGQQSTATLTPSPREEMQPMLQAHLDELTRAYQFDIAKQTWHIQSNNQPPQPPVPPLGYVSGALISDLETDVADDDADDEEEALEIPRPLRALDQTPGSSMDNLDSSVTGKAFTSSQRPRPTSPFSTDSNTSAALSQSQRPRPTKKHKGGRMDQQPALPHRREGMTDEEALVPYSKPSFPSPGGHSSSGTASSKGSTGPRKTEVLRAGHQRNASDLLDIGYMGSNSQGQFTGEL

SEQ ID NO: 16386 - protein, 438 aa, Homo sapiens
MENEPGIVSPFKRVFLKGEKSRDKKAHEKVTERRPLHTVVLSLPERVEPDRLLSDYIEKEVKYLGQLTSIPGYLNPSSRTEILHFIDNAKRAHQLPGHLTQEHDAVLSLSAYNVKLAWRDGEDIILRVPIHDIAAVSYVRDDAAHLVVLKTAQDPGISPSQSLCAESSRGLSAGSLSESAVGPVEACCLVILAAESKVAAEELCCLLGQVFQVVYTESTIDFLDRAIFDGASTPTHHLSLHSDDSSTKVDIKETYEVEASTFCFPESVDVGGASPHSKTISESELSASATELLQDYMLTLRTKLSSQEIQQFAALLHEYRNGASIHEFCINLRQLYGDSRKFLLLGLRPFIPEKDSQHFENFLETIGVKDGRGIITDSFGRHRRALSTTSSSTTNGNRATGSSDDRSAPSEGDEWDRMISDISSDIEALGCSMDQDSA

SEQ ID NO: 16387 - protein, 1393 aa, Homo sapiens
MAQPVHSLCSAFGLQCCLLFLLASWGAGATTFQEYQKTGELSTSDHIFPLTPGLVYSIPFDHIVLHSGQRPPELPKSTEIHEQKRHCNTTRHSKPTDKPTGNSKTIDHKSSTDNHEAPPTSEENSSNQGKDPMIRNQRSVDPADSTTTHKESAGKKHITPAPKSKINCRKSTTGKSTVTRKSDKTGRPLEKSMSTLDKTSTSSHKTTTSFHNSGNSQTKQKSTSFPEKITAASKTTYKTTGTPEESEKTEDSRTTVASDKLLTKTTKNIQETISANELTQSLAEPTEHGGRTANENNTPSPAEPTENRERTANENTTLSPAEPIENRERTANENTAPFPAGPTENREMTANENTTLFPAEPTEHGERTANENTTPSPAEPTEHGERTANENTTPSPAEPTEHGERTPFANDKTTSSSAESTEHGERTPLANENTTPSPAEPTENRERTANENTTPSPAGPTENRETTANEKTTLSPVEPTENRETTANEKTTPSPAEPTENGQRTPFANEKTTSSSAEPTEHGERTPLANENTTPSPAEPTENRERTANEKTTPSPAEPTENGDRTPLANEKTTPSLAEPTENGQRTPFANEKTTSSSAEPTEHEERTPLANENTTPSPAEPTENRERTANENTTPSPAGPTENREMTANEKTTLFPAEPTENRERTANEKTTSSPAEPTENGQRTPFANEKTTSSSAEPTEHGERTPLANENTTLSPAEPTENRERTANEKTTPFPAEPTENRERTANENTTPSPAQPTENGDRTPLANEKTTPSLAEPTENGKRTPFANEKTTSSSAEPTEHAERTPLANENTTSSPAEPTENRERTANEKTTQFPAEPTENRESTANEKTTPFPAEPTENREWTANENTTLSPAEPTEHEEMTPLANEKTTLSPAEPTENGERTPFTNEKTTPSSAEPTEHGERTPLANEITTPSRAEPTEHGERIANEKATPSPAKPTEHGETTVNEDTTPSSAEPTENGERTPLANENTTTSPTESTEHGERTANEKTTPSPAEPTEHGERTPSANEKTIPSPAKPTEHEEMTPSANENTTPSPVKPTEHGEKTTLANEKITLSPEGPTEHGAKTTSANEKITPSLAKPTEHGERTTSPNDKITSSAAESTEHRDRATSANVITPAPAEPIKHAKRTTLAHEKMTQVTEKSTEHPEKTTSTTEKTTRTPEKPTLYSEKTICTKGKNTPVPEKPTENLGNTTLTTETIKAPVKSTENPEKTAAVTKTIKPSVKVTGDKSLTTTSSHLNKTEVTHQVPTGSFTLITSRTKLSSITSEATGNESHPYLNKDGSQKGIHAGQMGENDSFPAWAIVIVVLVAVILLLVFLGLIFLVSYMMRTRRTLTQNTQYNDAEDEGGPNSYPVYLMEQQNLGMGQIPSPR

SEQ ID NO: 16388 - protein, 445 aa, Homo sapiens
MLPWTALGLALSLRLALARSGAERGPPASAPRGDLMFLLDSSASVSHYEFSRVREFVGQLVAPLPLGTGALRASLVHVGSRPYTEFPFGQHSSGEAAQDAVRASAQRMGDTHTGLALVYAKEQLFAEASGARPGVPKVLVWVTDGGSSDPVGPPMQELKDLGVTVFIVSTGRGNFLELSAAASAPAEKHLHFVDVDDLHIIVQELRGSILDAMRPQQLHATEITSSGFRLAWPPLLTADSGYYVLELVPSAQPGAARRQQLPGNATDWIWAGLDPDTDYDVALVPESNVRLLRPQILRVRTRPGEAGPGASGPESGAGPAPTQLAALPAPEEAGPERIVISHARPRSLRVSWAPALGSAAALGYHVQFGPLRGGEAQRVEVPAGRNCTTLQGLAPGTAYLVTVTAAFRSGRESALSAKACTPDGPRPRPRPVPRAPTPGTASREP

SEQ ID NO: 16389 - protein, 276 aa, Homo sapiens
TMGLSNILFVMAFLLSGAAPLKIQAYFNETADLPCQFANSQNQSLSELVVFWQDQENLVLNEVYLGKEKFDSVHSKYMGRTSFDSDSWTLRLHNLQIKDKGLYQCIIHHKKPTGMIRIHQMNSELSVLANFSQPEIVPISNITENVYINLTCSSIHGYPEPKKMSVLLRTKNSTIEYDGVMQKSQDNVTELYDVSISLSVSFPDVTSNMTIFCILETDKTRLLSSPFSIGTNTMEREESEQTKKREKIHIPERSDEAQRVFKSSKTSSCDKSDTCF

SEQ ID NO: 16390 - protein, 262 aa, Homo sapiens
MTACPGAEWTQVSAGPPGKGEPAMRGYLVAIFLSAVFLYYVLHCILWGTNVYWVAPVEMKRRNKIQPCLSKPAFASLLRFHQFHPFLCAADFRKIASLYGSDKFDLPYGMRTSAEYFRLALSKLQSCDLFDEFDNIPCKKCVVVGNGGVLKNKTLGEKIDSYDVIIRMNNGPVLGHEEEVGRRTTFRLFYPESVFSDPIHNDPNTTVILTAFKPHDLRWLLELLMGDKINTNGFWKKPALNLIYKPYQIRILDPFIIRTAAY

SEQ ID NO: 16391 - protein, 678 aa, Homo sapiens
MAAPGPLPAAALSPGAPTPRELMHGVAGVTSRAGRDREAGSVLPAGNRGARKASRRSSSRSMSRDNKFSKKDCLSIRNVVASIQTKEGLNLKLISGDVLYIWADVIVNSVPMNLQLGGGPLSRAFLQKAGPMLQKELDDRRRETEEKVGNIFMTSGCNLDCKAVLHAVAPYWNNGAETSWQIMANIIKKCLTTVEVLSFSSITFPMIGTGSLQFPKAVFAKLILSEVFEYSSSTRPITSPLQEVHFLVYTNDDEGCQAFLDEFTNWSRINPNKARIPMAGDTQGVVGTVSKPCFTAYEMKIGAITFQVATGDIATEQVDVIVNSTARTFNRKSGVSRAILEGAGQAVESECAVLAAQPHRDFIITPGGCLKCKIIIHVPGGKDVRKTVTSVLEECEQRKYTSVSLPAIGTGNAGKNPITVADNIIDAIVDFSSQHSTPSLKTVKVVIFQPELLNIFYDSMKKRDLSASLNFQSTFSMTTCNLPEHWTDMNHQLFCMVQLEPGQSEYNTIKDKFTRTCSSYAIEKIERIQNAFLWQSYQVKKRQMDIKNDHKNNERLLFHGTDADSVPYVNQHGFNRSCAGKNAVSYGKGTYFAVDASYSAKDTYSKPDSNGRKHMYVVRVLTGVFTKGRAGLVTPPPKNPHNPTDLFDSVTNNTRSPKLFVVFFDNQAYPEYLITFTA

SEQ ID NO: 16392 - protein, 2145 aa, Homo sapiens
MAAFGLLSYEQRPLKRPRLGPPDVYPQDPKQKEDELTAVNVKQGFNNQPAFTGDEHGSARNIVINPSKIGAYFSSILAEKLKLNTFQDTGKKKPQVNAKDNYWLVTARSQSAIHSWFSDLAGNKPLSILAKKVPILSKKEDVFAYLAKYSVPMVRATWLIKMTCAYYSAISEAKIKKRQAPDPNLEWTQISTRYLREQLAKISDFYHMASSTGDGPVPVPPEVEQAMKQWEYNEKLAFHMFQEGMLEKHEYLTWILDVLEKIRPMDDDLLKLLLPLMLQYSDEFVQSAYLSRRLAYFCARRLSLLLSDSPNLLAAHSPHMMIGPNNSSIGAPSPGPPGPGMSPVQLAFSDFLSCAQHGPLVYGLSCMLQTVTLCCPSALVWNYSTNENKSANPGSPLDLLQVAPSSLPMPGGNTAFNQQVRARIYEVEQQIKQRGRAVEVRWSFDKCQESTAGVTISRVLHTLEVLDRHCFDRTDSSNSMETLYHKIFWANQNKDNQEVAPNDEAVVTLLCEWAVSCKRSGKHRAMAVAKLLEKRQAEIEAERCGESEVLDEKESISSSSLAGSSLPVFQNVLLRFLDTQAPSLSDPNSECEKVEFVNLVLLFCEFIRHDVFSHDAYMCTLISRGDLSVTASTRPRSPVGENADEHYSKDHDVKMEIFSPMPGESCENANTSLGRRMSVNCEKLVKREKPRELIFPSNYDLLRHLQYATHFPIPLDESSSHECNQRTILLYGVGKERDEARHQLKKITKDILKILNKKSTTETGVGDEGQKARKNKQETFPTLETVFTKLQLLSYFDQHQVTSQISNNVLEQITSFASGTSYHLPLAHHIQLIFDLMEPALNINGLIDFAIQLLNELSVVEAELLLKSSSLAGSYTTGLCVCIVAVLRRYHSCLILNPDQTAQVFEGLCGVVKHVVNPSECSSPERCILAYLYDLYVSCSHLRSKFGDLFSSACSKVKQTIYNNVMPANSNLRWDPDFMMDFIENPSARSINYSMLGKILSDNAANRYSFVCNTLMNVCMGHQDAGRINDIANFSSELTACCTVLSSEWLGVLKALCCSSNHVWGFNDVLCTVDVSDLSFHDSLATFIAILIARQCFSLEDVVQHVALPSLLAAACGDADAEPGARMTCRLLLHLFRAPQACFLPQATGKPFPGIRSSCDRHLLAAAHNSIEVGAVFAVLKAIMMLGDAKIGNNSVSSLKNDDFTMRGLRCDGNADDIWTASQNPKSCGKSISIETANLREYARYVLRTICQQEWVGEHCLKEPERLCTDKELILDPVLSNMQAQKLLQLICYPHGIKECTEGDNLQRQHIKRILQNLEQWTLRQSWLELQLMIKQCLKDPGSGSVAEMNNLLDNIAKATIEVFQQSADLNNSSNSGMSLFNPNSIGSADTSSTRQNGIKTFLSSSERRGVWLVAPLIARLPTSVQGRVLKAAGEELEKGQHLGSSSKKERDRQKQKSMSLLSQQPFLSLVLTCLKGQDEQREGLLTSLQNQVNQILSNWREERYQDDIKARQMMHEALQLRLNLVGGMFDTVQRSTQWTTDWALLLLQIITSGTVDMHTNNELFTTVLDMLGVLINGTLASDLSNASPGGSEENKRAYMNLVKKLKKELGDKRSESIDKVRQLLPLPKQTCDVITCEPMGSLIDTKGNKIAGFDSIDKKQGLQVSTKQKVSPWDLFEGQKNPAPLSWAWFGTVRVDRRVIKYEEQHHLLLYHTHPMPKPRSYYLQPLPLPPEEEEEEPTSPVSQEPERKSAELSDQGKTTTDEEKKTKGRKRKTKSSSRVDEYPQSNIYRVPPNYSPISSQMMHHPQSTLWGYNLVGQPQQPGFFLQNQSLTPGGSRLDPAGSFVPTNTKQALSNMLQRRSGAMMQPPSLHAITSQQQLIQMKLLQQQQQQRLLRQAQTRPFQQGQPGDQAALFAAQARPSPQLPQYPGLQQAQTMPQGYTMYGTQMPLQQTSQQQAGSVVLSPSYNSRAYPAAHSNPVLMERLRQIQQQPSGYVQQQASPYLQPLTGSQRLNHQALQQSPLVGGGIDAVLTSAHPNLPSVPLPQDPMRPRQPQVRQQQRLLQMQQPQQPQPQQPPQPQQSSQSQSQTLGLQAMQPQQPLFPRQGLQQTQQQQQTAALVRQLQKQLSSNQPQQGVTPYGHPSHF

SEQ ID NO: 16393 - protein, 271 aa, Homo sapiens
MEEEGKKGKKPGIVSPFKRVFLKGEKSRDKKAHEKVTERRPLHTVVLSLPERVEPDRLLSDYIEKEVKYLGQLTSIPGYLNPSSRTEILHFIDNAKRAHQLPGHLTQEHDAVLSLSAYNVKLAWRDGEDIILRVPIHDIAAVSYVRDDAAHLVVLKTAQDPGISPSQSLCAESSRGLSAGSLSESAVGPVEACCLVILAAESKVAAEELCCLLGQVFQVVYTESTIDFLDRAIFDGASTPTHHLSLHSAASLNLWMWVVHHPTARPSVRAS

SEQ ID NO: 16394 - protein, 1198 aa, Homo sapiens
MAEHPPLLDTTQILSSDISLLSAPIVSADGTQQVILVQVNPGEAFTIRREDGQFQCITGPAQVPMMSPNGSVPPIYVPPGYAPQVIEDNGVRRVVVVPQAPEFHPGSHTVLHRSPHPPLPGFIPVPTMMPPPPRHMYSPVTGAGDMTTQYMPQYQSSQVYGDVDAHSTHGRSNFRDERSSKTYERLQKKLKDRQGTQKDKMSSPPSSPQKCPSPINEHNGLIKGQIAGGINTGSAKIKSGKGKGGTQVDTEIEEKDEETKAFEALLSNIVKPVASDIQARTVVLTWSPPSSLINGETDESSVPELYGYEVLISSTGKDGKYKSVYVGEETNITLNDLKPAMDYHAKVQAEYNSIKGTPSEAEIFTTLSCEPDIPNPPRIANRTKNSLTLQWKAPSDNGSKIQNFVLEWDEGKGNGEFCQCYMGSQKQFKITKLSPAMGCKFRLSARNDYGTSGFSEEVLYYTSGCAPSMPASPVLTKAGITWLSLQWSKPSGTPSDEGISYILEMEEETSGYGFKPKYDGEDLAYTVKNLRRSTKYKFKVIAYNSEGKSNPSEVVEFTTCPDKPGIPVKPSVKGKIHSHSFKITWDPPKDNGGATINKYVVEMAEGSNGNKWEMIYSGATREHLCDRLNPGCFYRLRVYCISDGGQSAVSESLLVQTPAVPPGPCLPPRLQGRPKAKEIQLRWGPPLVDGGSPISCYSVEMSPIEKDEPREVYQGSEVECTVSSLLPGKTYSFRLRAANKMGFGPFSEKCDITTAPGPPDQCKPPQVTCRSATCAQVNWEVPLSNGTDVTEYRLEWGGVEGSMQICYCGPGLSYEIKGLSPATTYYCRVQALSVVGAGPFSEVVACVTPPSVPGIVTCLQEISDDEIENPHYSPSTCLAISWEKPCDHGSEILAYSIDFGDKQSLTVGKVTSYIINNLQPDTTYRIRIQALNSLGAGPFSHMIKLKTKPLPPDPPRLECVAFSHQNLKLKWGEGTPKTLSTDSIQYHLQMEDKNGRFVSLYRGPCHTYKVQRLNESTSYKFCIQACNEAGEGPLSQEYIFTTPKSVPAALKAPKIEKVNDHICEITWECLQPMKGDPVIYSLQVMLGKDSEFKQIYKGPDSSFRYSSLQLNCEYRFRVCAIRQCQDSLGHQDLVGPYSTTVLFISQRTEPPASTNRDTVESTRTRRALSDEQCAAVILVLFAFFSILIAFIIQYFVIK

SEQ ID NO: 16395 - protein, 519 aa, Homo sapiens
MMQGEAHPSASLIDRTIKMRKETEARKVVLAWGLLNVSMAGMIYTEMTGKLISSYYNVTYWPLWYIELALASLFSLNALFDFWRYFKYTVAPTSLVVSPGQQTLLGLKTAVVQTTPPHDLAATQIPPAPPSPSIQGQSVLSYSPSRSPSTSPKFTTSCMTGYSPQLQGLSSGGSGSYSPGVTYSPVSGYNKLASFSPSPPSPYPTTVGPVESSGLRSRYRSSPTVYNSPTDKEDYMTDLRTLDTFLRSEEEKQHRVKLGSPDSTSPSSSPTFWNYSRSMGDYAQTLKKFQYQLACRSQAPCANKDEADLSSKQAAEEVWARVAMNRQLLDHMDSWTAKFRNWINETILVPLVQEIESVSTQMRRMGCPELQIGELSQGGCMSSFRWNRGGDFKGRKWDTDLPTDSAIIMHVFCTYLDSRLPPHPKYPDGKTFTSQHFVQTPNKPDVTNENVFCIYQSAINPPHYELIYQRHVYNLPKGRNNMFHTLLMFLYIIKTKESGMLGRVNLGLSGVNILWIFGE

SEQ ID NO: 16396 - protein, 189 aa, Homo sapiens
PNVVGQLAKQMIGYNLATKQTPKEGVKVNKVMVAEALDISRETYLAILMDRSCNGPVLVGSPQGGVDIEEVAASNPELIFKEQIDIFEGIKDSQAQRMAENLGFVGPLKSQVEAILVNIFGGIVNCAIIANGITKACRELELKVPLVVRLEGTNVQEAQKILNNSGLPITSAIDLEDAAKKAVASVAKK

SEQ ID NO: 16397 - protein, 997 aa, Homo sapiens
MEEMFHKKSEAVRRLVEAAEEAHLKHEFDADLQYEYFNAVLINERDKDGNFLELGKEFILAPNDHFNNLPVNISLSDVQVPTNMYNKDPAIVNGVYWSESLNKVFVDNFDRDPSLIWQYFGSAKGFFRQYPGIKWEPDENGVIAFDCRNRKWYIQAATSPKDVVILVDVSGSMKGLRLTIAKQTVSSILDTLGDDDFFNIIAYNEELHYVEPCLNGTLVQADRTNKEHFREHLDKLFAKGIGMLDIALNEAFNILSDFNHTGQGSICSQAIMLITDGAVDTYDTIFAKYNWPDRKVRIFTYLIGREAAFADNLKWMACANKGFFTQISTLADVQENVMEYLHVLSRPKVIDQEHDVVWTEAYIDSTLPQAQKLTDDQGPVLMTTVAMPVFSKQNETRSKGILLGVVGTDVPVKELLKTIPKYKLGIHGYAFAITNNGYILTHPELRLLYEEGKKRRKPNYSSVDLSEVEWEDRDDVLRNAMVNRKTGKFSMEVKKTVDKGKRVLVMTNDYYYTDIKGTPFSLGVALSRGHGKYFFRGNVTIEEGLHDLEHPDVSLADEWSYCNTDLHPEHRHLSQLEAIKLYLKGKEPLLQCDKELIQEVLFDAVVSAPIEAYWTSLALNKSENSDKGVEVAFLGTRTGLSRINLFVGAEQLTNQDFLKAGDKENIFNADHFPLWYRRAAEQIPGSFVYSIPFSTGPVNKSNVVTASTSIQLLDERKSPVVAAVGIQMKLEFFQRKFWTASRQCASLDGKCSISCDDETVNCYLIDNNGFILVSEDYTQTGDFFGEIEGAVMNKLLTMGSFKRITLYDYQAMCRANKESSDGAHGLLDPYNAFLSAVKWIMTELVLFLVEFNLCSWWHSDMTAKAQKLKQTLEPCDTEYPAFVSERTIKETTGNIACEDCSKSFVIQQIPSSNLFMVVVDSSCLCESVAPITMAPIEIRYNESLKCERLKAQKIRRRPESCHGFHPEENARECGGAPSLQAQTVLLLLPLLLMLFSR

SEQ ID NO: 16398 - protein, 527 aa, Homo sapiens
RSQLQPEPAKTKALQTVIEMKDTKIASLERNIRDLEDEIQMLKANGVLNTEDREEEIKQIEVYKSHSKFMKTKIDQLKQELSKKESELLALQTKLETLSNQNSDCKQHIEVLKESLTAKEQRAAILQTEVDALRLRLEEKESFLNKKTKQLQDLTEEKGTLAGEIRDMKDMLEVKERKINVLQKKIENLQEQLRDKDKQLTNLKDRVKSLQTDSSNTDTALATLEEALSEKERIIERLKEQRERDDRERLEEIESFRKENKDLKEKVNALQAELTEKESSLIDLKEHASSLASAGLKRDSKLKSLEIAIEQKKEECSKLEAQLKKQAEQLFNQMYNPAHNIEDDSRMNPEFADQIKQLDKEASYYRDECGKAQAEVDRLLEILKEVENEKNDKDKKIAELERHMKDQNKKVANLKHNQQLEKKKNAQLLEEVRRREDSMADNSQHLQIEELMNALEKTRQELDATKARLASTQQSLAEKEAHLANLRIERRKQLEEILEMKQEALLAAISEKDANIALLELSASKKK

SEQ ID NO: 16399 - protein, 963 aa, Homo sapiens
MDDRYPALQRAQLRLDFIHANSTTHSFLFGALAELLDNARDAGAERLDVFSVDNEKLQGGFMLCFLDDGCGMSPEEASDIIYFGRSKKRLSTLKFIGQYGNGLKSGSMRIGKDFILFTKKEETMTCVFFSQTFCEEESLSEVVVPMPSWLIRTRESVTDDPQKFAMELSIIYKYSPFKTEAELMQQFDVIYGKCGTLLVIYNLKLLLNGEPELDVKTDKEDILMAGALEDFPARWSFRAYTSVLYFNPWMRIFIQAKRVKTKHLCYCLYRPRKYLYVTSSFKGAFKDEVKKAEEAVKIAESILKEAQIKVNQCDRTSLSSAKDVLQRALEDVEAKQKNLKEKQRELKTARTLSLFYGVNVENRSQAGMFIYSNNRLIKMHEKVGSQLKLKSLLGAGVVGIVNIPLEVMEPSHNKQEFLNVQEYNHLLKVMGQYLVQYCKDTGINNRNLTLFCNEFGYQNDIDVEKPLNSFQYQRRQAMGIPFIIQCDLCLKWRVLPSSTNYQEKEFFDIWICANNPNRLENSCHQVECLPSIPLGTMSTISPSKNEKEKQLRESVIKYQNRLAEQQPQENTKTQKIRLLGDDLKHESLSSFELSASRRGQKRNIEETDSDVEYISETKIMKKSMEEKMNSQQQRIPVALPENVKLAERSQRSQIANITTVWRAQPTEGCLKNAQAASWEMKRKQSLNFVEECKVLTEDENTSDSDIILVSDKSNTDVSLKQEKKEIPLLNQEKQELCNDVLAMKRSSSLPSWKSLLNVPMEDVNLSSGHIARVSVSGSCKVASSPASSQSTPVKETVRKLKSKLREILLYFFPEHQLPSELEEPALSCELEQCPEQMNKKLKMCFNQIQNTYMVQYEKKIKRKLQSIIYDSNTRGIHNEISLGQCENKRKISEDKLKNLRIKLALLLQKLQLGGPEGDLEQTDTYLEALLKEDNLLFQNNLNKVTIDARHRLPLEKNEKTSEN

SEQ ID NO: 16400 - protein, 596 aa, Homo sapiens
MSNQQEKYEAQNIVNSTEESDDAFDTVTIPVPSEEPQESDQTEEHESGIEQFSESHAIHVEEQSDQSFSSLEPDNEQLMEEVISPRQVSYTPQHHEKQYAMQRPNDDSLAFLDKIKSVKESLQESVEDSLATVKVVLIPVGQEIVIPFKVDTILKYLKDHFSHLLGIPHSVLQIRYSGKILKNNETLVQHGVKPQEIVQVEIFSTNPDLYPVRRIDGLTDVSQIITVTVQTGLDQYQQVPVEIVKSDFHKPFLGGFRHKVTGVEYHNAGTQTVPKRIPERLSIFCRDTQTVFQKKNLQQTTNTTSTQMTNIGVYVSNMTDKLVTPGKYFSAAEYHAQRLKAVIVIQTYYRQWHAKIFVENLRRQKSLRLEWETQQELRKIREKEEWIKLDYHRRHNPKTNEDFEFLYNALEFWRQEELTRINQSFTGAERKAALCELLEKETQIIASIGRHRYIAYMANQEAAIQAFLDKCSAPKIWRTPNGKTIEMDTQFTIRARELQNIYKCIMLKNISQDERLDVLLTLKHTVKEHECKLTQEILELIDREVDLMMRGVKHHNLEGLRKRIATLFFHYIKTPLFNPEVAKYLKMGGEYLSMAL

SEQ ID NO: 16401 - protein, 178 aa, Homo sapiens
DLKNVFPPKVAVFEPSEAEISHTQKATLVCLATGFYPDHVELSWWVNGKEVHSGVSTDPQPLKEQPALNDSRYCLSSRLRVSATFWQNPRNHFRCQVQFYGLSENDEWTQDRAKPVTQIVSAEAWGRADCGFTSESYQQGVLSATILYEILLGKATLYAVLVSALVLMAMVKRKDSRG

SEQ ID NO: 16402 - protein, 631 aa, Homo sapiens
MKNAVIGNNKQKANLIVLGAVPRLLYLLQQETSSTELKTECAVVLGSLAMGTENNVKSLLDCHIIPALLQGLLSPDLKFIEACLRCLRTIFTSPVTPEELLYTDATVIPHLMALLSRSRYTQEYICQIFSHCCKGPDHQTILFNHGAVQNIAHLLTSLSYKVRMQALKCFSVLAFENPQVSMTLVNVLVDGELLPQIFVKMLQRDKPIEMQLTSAKCLTYMCRAGAIRTDDNCIVLKTLPCLVRMCSKERLLEERVEGAETLAYLIEPDVELQRIASITDHLIAMLADYFKYPSSVSAITDIKRLDHDLKHAHELRQAAFKLYASLGANDEDIRKKIIETENMMDRIVTGLSESSVKVRLAAVRCLHSLSRSVQQLRTSFQDHAVWKPLMKVLQNAPDEILVVASSMLCNLLLEFSPSKEPILESGAVELLCGLTQSENPALRVNGIWALMNMAFQAEQKIKADILRSLSTEQLFRLLSDSDLNVLMKTLGLLRNLLSTRPHIDKIMSTHGKQIMQAVTLILEGEHNIEVKEQTLCILANIADGTTAKDLIMTNDDILQKIKYYMGHSHVKLQLAAMFCISNLIWNEEEGSQERQDKLRDMGIVDILHKLSQSPDSNLCDKAKMALQQYLA

SEQ ID NO: 16403 - protein, 149 aa, Homo sapiens
MKILEKKSVEVNFTESLLRMAADDVEEYMIERPEPEFQDLNEKARALKQILSKIPDEINDRVRFLQTIKDIASAIKELLDTVNNVFKKYQYQNRRALEHQKKEFVKYSKSFSDTLKTYFKDGKAINVFVSANRLIHQTNLILQTFKTVA

SEQ ID NO: 16404 - protein, 525 aa, Homo sapiens
MEEMFHKKSEAVRRLVEAAEEAHLKHEFDADLQYEYFNAVLINERDKDGNFLELGKEFILAPNDHFNNLPVNISLSDVQVPTNMYNKDPAIVNGVYWSESLNKVFVDNFDRDPSLIWQYFGSAKGFFRQYPGIKWEPDENGVIAFDCRNRKWYIQAATSPKDVVILVDVSGSMKGLRLTIAKQTVSSILDTLGDDDFFNIIAYNEELHYVEPCLNGTLVQADRTNKEHFREHLDKLFAKGIGMLDIALNEAFNILSDFNHTGQGSICSQAIMLITDGAVDTYDTIFAKYNWPDRKVRIFTYLIGREAAFADNLKWMACANKGFFTQISTLADVQENVMEYLHVLSRPKVIDQEHDVVWTEAYIDSTLPQAQKLTDDQGPVLMTTVAMPVFSKQNETRSKGILLGVVGTDVPVKELLKTIPKYKLGIHGYAFAITNNGYILTHPELRLLYEEGKKRRKPNYSSVDLSEVEWEDRDDVLRNAMVNRKTGKFSMEVKKTVDKGFRCGAFQRSWEIFLPRECNHRRRPA

SEQ ID NO: 16405 - protein, 128 aa, Homo sapiens
MAAHLVKRCTCLLREAARQAPAMAPVGRLRLAWVAHKTLTSSATSPISHLPGSLMEPVEKERASTPYIEKQVDHLIKKATRPEELLELLGGSHDLDSNQAAMVLIRLSHLLSEKPEDKGLLIQDAHFH

SEQ ID NO: 16406 - protein, 440 aa, Homo sapiens
MPPGPWESCFWVGGLILWLSVGSSGDAPPTPQPKCADFQSANLFEGTDLKVQFLLFVPSNPSCGQLVEGSSDLQNSGFNATLGTKLIIHGFRVLGTKPSWIDTFIRTLLRATNANVIAVDWIYGSTGVYFSAVKNVLGVSESSIHIIGVSLGAHVGGMVGQLFGGQLGQITGLDPAGPEYTRASVEERLDAGDALFVEAIHTDTDNLGIRIPVGHVDYFVNGGQDQPGCPTFFYAGYSYLICDHMRAVHLYISALENSCPLMAFPCASYKAFLAGRCLDCFNPFLLSCPRIGLVEQGGVKIEPLPKEVKVYLLTTSSAPYCMHHSLVEFHLKELRNKDTNIEVTFLSSNITSSSKITIPKQQRYGKGIIAHATPQCQINQVKFKFQSSNRVWKKDRTTIIGKFCTALLPVNDREKMVCLPEPVNLQASVTVSCDLKIACV

SEQ ID NO: 16407 - protein, 808 aa, Homo sapiens
MAAADAEAVPARGEPQQDCCVKTELLGEETPMAADEGSAEKQAGEAHMAADGETNGSCENSDASSHANAAKHTQDSARVNPQDGTNTLTRIAENGVSERDSEAAKQNHVTADDFVQTSVIGSNGYILNKPALQAQPLRTTSTLASSLPGHAAKTLPGGAGKGRTPSAFPQTPAAPPATLGEGSADTEDRKLPAPGADVKVHRARKTMPKSVVGLHAASKDPREVREARDHKEPKEEINKNISDFGRQQLLPPFPSLHQSLPQNQCYMATTKSQTACLPFVLAAAVSRKKKRRMGTYSLVPKKKTKVLKQRTVIEMFKSITHSTVGSKGEKDLGASSLHVNGESLEMDSDEDDSEELEEDDGHGAEQAAAFPTEDSRTSKESMSEADRAQKMDGESEEEQESVDTGEEEEGGDESDLSSESSIKKKFLKRKGKTDSPWIKPARKRRRRSRKKPSGALGSESYKSSAGSAEQTAPGDSTGYMEVSLDSLDLRVKGILSSQAEGLANGPDVLETDGLQEVPLCSCRMETPKSREITTLANNQCMATESVDHELGRCTNSVVKYELMRPSNKAPLLVLCEDHRGRMVKHQCCPGCGYFCTAGNFMECQPESSISHRFHKDCASRVNNASYCPHCGEESSKAKEVTIAKADTTSTVTPVPGQEKGSALEGRADTTTGSAAGPPLSEDDKLQGAASHVPEGFDPTGPAGLGRPTPGLSQGPGKETLESALIALDSEKPKKLRFHPKQLYFSARQGELQKVLLMLVDGIDPNFKMEHQNKRSPLHAAAEAGHVDICHMLVQFCRLGSPRSRGCLW

SEQ ID NO: 16408 - protein, 1394 aa, Homo sapiens
MARRHERVTRRMWTWAPGLLMMTVVFWGHQGNGQGQGSRLRQEDFPPRIVEHPSDVIVSKGEPTTLNCKAEGRPTPTIEWYKDGERVETDKDDPRSHRMLLPSGSLFFLRIVHGRRSKPDEGSYVCVARNYLGEAVSRNASLEVALLRDDFRQNPTDVVVAAGEPAILECQPPRGHPEPTIYWKKDKVRIDDKEERISIRGGKLMISNTRKSDAGMYTCVGTNMVGERDSDPAELTVFERPTFLRRPINQVVLEEEAVEFRCQVQGDPQPTVRWKKDDADLPRGRYDIKDDYTLRIKKTMSTDEGTYMCIAENRVGKMEASATLTVRAPPQFVVRPRDQIVAQGRTVTFPCETKGNPQPAVFWQKEGSQNLLFPNQPQQPNSRCSVSPTGDLTITNIQRSDAGYYICQALTVAGSILAKAQLEVTDVLTDRPPPIILQGPANQTLAVDGTALLKCKATGDPLPVISWLKEGFTFPGRDPRATIQEQGTLQIKNLRISDTGTYTCVATSSSGETSWSAVLDVTESGATISKNYDLSDLPGPPSKPQVTDVTKNSVTLSWQPGTPGTLPASAYIIEAFSQSVSNSWQTVANHVKTTLYTVRGLRPNTIYLFMVRAINPQGLSDPSPMSDPVRTQDISPPAQGVDHRQVQKELGDVLVRLHNPVVLTPTTVQVTWTVDRQPQFIQGYRVMYRQTSGLQATSSWQNLDAKVPTERSAVLVNLKKGVTYEIKVRPYFNEFQGMDSESKTVRTTEEAPSAPPQSVTVLTVGSYNSTSISVSWDPPPPDHQNGIIQEYKIWCLGNETRFHINKTVDAAIRSVIIGGLFPGIQYRVEVAASTSAGVGVKSEPQPIIIGRRNEVVITENNNSITEQITDVVKQPAFIAGIGGACWVILMGFSIWLYWRRKKRKGLSNYAVTFQRGDGGLMSNGSRPGLLNAGDPSYPWLADSWPATSLPVNNSNSGPNEIGNFGRGDVLPPVPGQGDKTATMLSDGAIYSSIDFTTKTSYNSSSQITQATPYATTQILHSNSIHELAVDLPDPQWKSSIQQKTDLMGFGYSLPDQNKGNNGGKGGKKKKNKNSSKPQKNNGSTWANVPLPPPPVQPLPGTELEHYAVEQQENGYDSDSWCPPLPVQTYLHQGLEDELEEDDDRVPTPPVRGVASSPAISFGQQSTATLTPSPREEMQPMLQAHLDELTRAYQFDIAKQTWHIQSNNQPPQPPVPPLGYVSGALISDLETDVADDDADDEEEALEIPRPLRALDQTPGSSMDNLDSSVTGKAFTSSQRPRPTSPFSTDSNTSAALSQSQRPRPTKKHKGGRMDQQPALPHRREGMTDEEALVPYSKPSFPSPGGHSSSGTASSKGSTGPRKTEVLRAGHQRNASDLLDIGYMGSNSQGQFTGEL

SEQ ID NO: 16409 - protein, 414 aa, Homo sapiens
GLGQFGQLGLGTFLFETSEPKVIENIRDQTISYISCGENHTALITDIGLMYTFGDGRHGKLGLGLENFTNHFIPTLCSNFLRFIVKLVACGGCHMVVFAAPHRGVAKEIEFDEINDTCLSVATFLPYSSLTSGNVLQRTLSARMRRRERERSPDSFSMRRTLPPIEGTLGLSACFLPNSVFPRCSERNLQESVLSEQDLMQPEEPDYLLDEMTKEAEIDNSSTVESLGETTDILNMTHIMSLNSNEKSLKLSPVQKQKKQQTIGELTQDTALTENDDSDEYEEMSEMKEGKACKQHVSQGIFMTQPATTIEAFSDEEDHEFSKTEELKLEDVDEEINAENVESKKKTVGDDESVPTGYHSKTEGAERTNDDSSAETIEKKEKANLEERAICEYNENPKGYMLDDADSSSLEILE

SEQ ID NO: 16410 - protein, 696 aa, Homo sapiens
MGNGMCSRKQKRIFQTLLLLTVVFGFLYGAMLYYELQTQLRKAEAVALKYQQHQESLSAQLQVVYEHRSRLEKSLQKERLEHKKAKEDFLVYKLEAQETLNKGRQDSNSRYSALNVQHQMLKSQHEELKKQHSDLEEEHRKQGEDFSRTFNDHKQKYLQLQQEKEQELSKLKETVYNLREENRQLRKAHQDIHTQLQDVKQQHKNLLSEHEQLVVTLEDHKSALAAAQTQVAEYKQLKDTLNRIPSLRKPDPAEQQNVTQVAHSPQGYNTAREKPTREVQEVSRNNDVWQNHEAVPGRAEDTKLYAPTHKEAEFQAPPEPIQQEVERREPEEHQVEEEHRKALEEEEMEQVGQAEHLEEEHDPSPEEQDREWKEQHEQREAANLLEGHARAEVYPSAKPMIKFQSPYEEQLEQQRLAVQQVEEAQQLREHQEALHQQRLQGHLLRQQEQQQQQVAREMALQRQAELEEGRPQHQEQLRQQAHYDAMDNDIVQGAEDQGIQGEEGAYERDNQHQDEAEGDPGNRHEPREQGPREADPESEADRAAVEDINPADDPNNQGEDEFEEAEQVREENLPDENEEQKQSNQKQENTEVEEHLVMAGNPDQQEDNVDEQYQEEAEEEVQEDLTEEKKRELEHNAEETYGENDENTDDKNNDGEEQEVRDDNRPKGREEHYEEEEEEEEDGAAVAEKSHRRAEM

SEQ ID NO: 16411 - protein, 181 aa, Homo sapiens
MFQQFQASCLVLFFLVGFAQQTLKPQNRKVDCNKGVTGTIYEYGALTLNGEEYIQFKQFAGKHVLFVNVAAYUGLAAQYPELNALQEELKNFGVIVLAFPCNQFGKQEPGTNSEILLGLKTPALRPLIFWAHQANSSGSPURSMISAGTLRNFWWGPMESLSCIGSTRLQSAQSSQTSWST

SEQ ID NO: 16412 - protein, 334 aa, Homo sapiens
MGQTGKKSEKGPVCWRKRVKSEYMRLRQLKRFRRADEVKSMFSSNRQKILERTEILNQEWKQRRIQPVHILTSVSSLRGTRECSVTSDLDFPTQVIPLKTLNAVASVPIMYSWSPLQQNFMVEDETVLHNIPYMGDEVLDQDGTFIEELIKNYDGKVHGDRECGFINDEIFVELVNALGQYNDDDDDDDGDDPEEREEKQKDLEDHRDDKESRPPRKFPSDKIFEAISSMFPDKGTAEELKEKYKELTEQQLPGALPPECTPNIDGPNAKSVQREQSLHSFHTLFCRRCFKYDCFLHPFHATPNTYKRKNTETALDNKPCGPQCYQHLPLLPRN

SEQ ID NO: 16413 - protein, 204 aa, Homo sapiens
KKMGADLLGSVQAKVQKALDVTRESFPNDLQFNILMRFTVDQTQTPSLKTVKPALRDQLHSFWSSKVKVAILKYIETLAKQMDPGDFINSSETRLAVSRVITWTTEPKSSDVRKAAQSVLISLFELNTPEFTMLLGALPKTFQDGATKLLHNHLRNTGNGTQSSMGSPLTRPTPRSPANWSSPLTSPTNTSQNTLSPSAFDYDT

SEQ ID NO: 16414 - protein, 501 aa, Homo sapiens
MRAEEPCAPGAPSALGAQRTPGPELRLSSQLLPELCTFVVRVLFYLGPVYLAGYLGLSITWLLLGALLWMWWRRNRRGKLGRLAAAFEFLDNEREFISRELRGQHLPAWIHFPDVERVEWANKIISQTWPYLSMIMESKFREKLEPKIREKSIHLRTFTFTKLYFGQKCPRVNGVKAHTNTCNRRRVTVDLQICYIGDCEISVELQKIQAGVNGIQLQGTLRVILEPLLVDKPFVGAVTVFFLQKPHLQINWTGLTNLLDAPGINDVSDSLLEDLIATHLVLPNRVTVPVKKGLDLTNLRFPLPCGVIRVHLLEAEQLAQKDNFLGLRGKSDPYAKVSIGLQHFRSRTIYRNLNPTWNEVFEFMVYEVPGQDLEVDLYDEDTDRDDFLGSLQICLGDVMTNRVVDEWFVLNDTTSGRLHLRLEWLSLLTDQEVLTEDHGGLSTAILVVFLESACNLPRNPFDYLNGEYRAKKLSRFARVKQGQQRPFFLCQTICRQEDTYK

SEQ ID NO: 16415 - protein, 4442 aa, Homo sapiens
MKGARWRRVPWVSLSCLCLCLLPHVVPGTTEDTLITGSKTAAPVTSTGSTTATLEGQSTAASSRTSNQDISASSQNHQTKSTETTSKAQTDTLTQMMTSTLFSSPSVHNVMETAPPDEMTTSFPSSVTNTLMMTSKTITMTTSTDSTLGNTEETSTAGTESSTPVTSAVSITAGQEGQSRTTSWRTSIQDTSASSQNHWTRSTQTTRESQTSTLTHRTTSTPSFSPSVHNVTGTVSQKTSPSGETATSSLCSVTNTSMMTSEKITVTTSTGSTLGNPGETSSVPVTGSLMPVTSAALVTFDPEGQSPATFSRTSTQDTTAFSKNHQTQSVETTRVSQINTLNTLTPVTTSTVLSSPSGFNPSGTVSQETFPSGETTTSSPSSVSNTFLVTSKVFRMPTSRDSTLGNTEETSLSVSGTISAITSKVSTIWWSDTLSTALSPSSLPPKISTAFHTQQSEGAETTGRPHERSSFSPGVSQEIFTLHETTTWPSSFSSKGHTTWSQTELPSTSTGAATRLVTGNPSTGTAGTIPRVPSKVSAIGEPGEPTTYSSHSTTLPKTTGAGAQTQWTQETGTTGEALLSSPSYSVTQMIKTATSPSSSPMLDRHTSQQITTAPSTNHSTIHSTSTSPQESPAVSQRGHTQAPQTTQESQTTRSVSPMTDTKTVTTPGSSFTASGHSPSEIVPQDAPTISAATTFAPAPTGDGHTTQAPTTALQAAPSSHDATLGPSGGTSLSKTGALTLANSVVSTPGGPEGQWTSASASTSPDTAAAMTHTHQAESTEASGQTQTSEPASSGSRTTSAGTATPSSSGASGTTPSGSEGISTSGETTRFSSNPSRDSHTTQSTTELLSASASHGAIPVSTGMASSIVPGTFHPTLSEASTAGRPTGQSSPTSPSASPQETAAISRMAQTQRTRTSRGSDTISLASQATDTFSTVPPTPPSITSTGLTSPQTETHTLSPSGSGKTFTTALISNATPLPVTYASSASTGHTTPLHVTDASSVSTGHATPLPVTSPSSVSTGHTTPLPVTDTSSESTGHVTPLPVTSFSSASTGDSTPLPVTDTSSASTGHVTPLPVTSLSSASTGDTTPLPVTDTSSASTGHATSLPVTDTSSVSTGHTTPLPVTDTSSASTGHATSLPVTDTSSVSTGHTTPLHVTDASSASTGQATPLPVTSLSSVSTGDTTPLPVTSPSSASTGHATPLLVTDTSSASTGHATPLPVTDASSVSTDHATSLPVTIPSAASTGHTTPLPVTDTSSASTGQATSLLVTDTSSVSTGDTTPLPVTSTSSASTGHVTPLHVTSPSSASTGHATPLPVTSLSSASTGDTMPLPVTSPSSASTGDTTPLPVTDASSVSTGHTTPLHVTDASSASTGQATPLPVTSLSSVSTGDTTPLPVTSPSSASTGHATPLLVTDTSSASTGHATPLPVTDASSVSTDHATSLPVTIPSAASTGHTTPLPVTDTSSASTGQATSLLVTDTSSVSTGDTTPLPVTSTSSASTGHVTPLHVTSPSSASTGHATPLPVTSLSSASTGDTMPLPVTSPSSASTGDTTPLPVTDASSVSTGHTTPLPVTSPSSASTGHTTPLPVTDTSSASKGDTTPLPVTSPSSASTGHTTPLPVTDTSSASTGDTTPLPVTNASSLSTGHATPLHVTSPSSASTGHATPLPVTSTSSASTGHATPLPVTGLSSATTDDTTRLPVTDVSSASTGQATPLPVTSLSSVSTGDTTPLPVTSPSSASTGHASPLLVTDASSASTGQATPLPVTDTSSVSTAHATPLPVTGLSSASTDDTTRLPVTDVSSASTGQAIPLPVTSPSSASTGDTTPLPVTDASSASTGDTTSLPVTIPSSASSGHTTSLPVTDASSVSTGHATSLLVTDASSVSTGDTTPLPVTDTNSASTGDTTPLHVTDASSVSTGHATSLPVTSLSSASTGDTTPLPVTSPSSASSGHTTPLPVTDASSVPTGHATSLPVTDASSVSTGHATPLPVTDASSVSTGHATPLPVTDTSSVSTGQATPLPVTSLSSASTGDTTPLPVTDTSSASTGQDTPLPVTSLSSVSTGDTTPLPVTNPSSASTGHATPLLVTDASSISTGHATSLLVTDASSVSTGHATALHDTDASSLSTGDTTPLPVTSPSSTSTGDTTPLPVTETSSVSTGHATSLPVTDTSSASTGHATSLPVTDTSSASTGHATPLPVTDTSSASTGQATPLPVTSPSSASTGHAIPLLVTDTSSASTGQATPLPVTSLSSASTGDTTPLPVTDASSVSTGHATSLPVTSLSSVSTGDTTPLPVTSPSSASTGHATPLHVTDASSASTGHATPLPVTSLSSASTGDTTPLPVTSPSSASTGHATPLHVTDASSVSTGDTTPLPVTSSSSASSGHTTPLPVTDASSASTGDTTPLPVTDTSSASTGHATHLPVTGLSSASTGDTTRLPVTNVSSASTGHATPLPVTSTSSASTGDTTPLPGTDTSSVSTGHTTPLLVTDASSVSTGDTTRLPVTSPSSASTGHTTPLPVTDTPSASTGDTTPLPVTNASSLSTRHATSLHVTSPSSASTGHATSLPVTDTSAASTGHATPLPVTSTSSASTGDTTPLPVTDTYSASTGQATPLPVTSLSSVSTGDTTPLPVTSPSSASTGHATPLLVTDASSASTGQATPLPVTSLSSVSTGDTTPLPVTSPSSASTGHATSLPVTDTSSASTGDTTSLPVTDTSSAYTGDTTSLPVTDTSSSSTGDTTPLLVTETSSVSTGDTTPLPVTDTSSASTGHATPLPVTNTSSVSTGHATPLHVTSPSSASTGHTTPLPVTDASSVSTGHATSLPVTDASSVFTGHATSLPVTIPSSASSGHTTPLPVTDASSVSTGHATSLPVTDASSVSTGHATPLPVTDASSVSTGHATPLPLTSLSSVSTGDTTPLPVTDTSSASTGQATPLPVTSLSSVSTGDTTPLPVTDTSSASTGHATSLPVTDTSSASTGHATPLPDTDTSSASTGHATLLPVTDTSSASIGHATSLPVTDTSSISTGHATPLHVTSPSSASTGHATPLPVTDTSSASTGHANPLHVTSPSSASTGHATPLPVTDTSSASTGHATPLPVTSLSSVSTGDTTPLPVTSPSSASTGHTTPLPVTDTSSASTGQATALPVTSTSSASTGDTTPLPVTDTSSASTGQATPLPVTSLSSVSTGDTTPLPVTSPSSASTGHATPLLVTDASSASTGQATPLPVTSLSSVSTGDTTPLPVTSPSSASTGHATSLPVTDTSSASTGDTTSLPVTDTSSAYTGDTTSLPVTDTSSSSTGDTTPLLVTETSSVSTGHATPLLVTDASSASTGHATPLHVTSPSSASTGDTTPVPVTDTSSVSTGHATPLPVTGLSSASTGDTTRLPVTDISSASTGQATPLPVTNTSSVSTGDTMPLPVTSPSSASTGHATPLPVTSTSSASTGHATPVPVTSTSSASTGHTTPLPVTDTSSASTGDTTPLPVTSPSSASTGHTTPLHVTIPSSASTGDTSTLPVTGASSASTGHATPLPVTDTSSVSTGHATPLPVTSLSSVSTGDTTPLPVTDASSASTGQATPLPVTSLSSVSTGDTTPLLVTDASSVSTGHATPLPVTDTSSASTGDTTRLPVTDTSSASTGQATPLPVTSLSSVSTGDTTPLLVTDASSVSTGHATPLPVTDTSSASTGDTTRLPVTDTSSASTGQATPLPVTIPSSSSSGHTTPLPVTSTSSVSTGHVTPLHVTSPSSASTGHVTPLPVTSTSSASTGHATPLLVTDASSVSTGHATPLPVTDASSASTGDTTPLPVTDTSSASTGQATPLPVTSLSSVSTGDTTPLPVTDASSASTGHATPLPVTIPSSVSTGDTMPLPVTSPSSASTGHATPLPVTGLSSASTGDTTPLPVTDTSSASTRHATPLPVTDTSSASTDDTTRLPVTDVSSASTGHATPLPVTSTSSASTGDTTPLPVTDTSSVSTGHATSLPVTSRSSASTGHATPLPVTDTSSVSTGHATPLPVTSTSSVSTGHATPLPVTSPSSASTGHATPVPVTSTSSASTGDTTPLPVTNASSLSTGHATPLHVTSPSSASRGDTSTLPVTDASSASTGHATPLPLTSLSSVSTGDTTPLPVTDTSSASTGQATPLPVTSLSSVSTGDTTPLPVTIPSSASSGHTTSLPVTDASSVSTGHGTPLPVTSTSSASTGDTTPLPVTDTSSASTGHATPLPVTDTSSASTGHATPLPVTSLSSVSTGHATPLAVSSATSASTVSSDSPLKMETPGMTTPSLKTDGGRRTATSPPPTTSQTIISTIPSTAMHTRSTAAPIPILPERGVSLFPYGAGAGDLEFVRRTVDFTSPLFKPATGFPLGSSLRDSLYASQAGTLWPWWLRSGTMLTSPLVGGPHFIRATPTKPSSPRTGAGPMPCFSTRAVGCSGTWPSAQATRCSWASLVEMAISKTAH

SEQ ID NO: 16416 - protein, 2649 aa, Homo sapiens
MAVWEAEQLGGLQRGDLLTPPAPDGDGRTAPLGQPPGAQLYCPACLVTCHSQEAFENHCASSEHAQMVAFDQALPWEHRSPPPGLSKFELCPKPDLCEYGDACTKAHSAQELQEWVRRTQAVELRGQAAWQDGLVPYQERLLAEYQRSSSEVLVLAETLDGVRVTCNQPLMYQAQERKTQYSWTFAVHSEEPLLHVALLKQEPGADFSLVAPGLPPGRLYARGERFRVPSSTADFQVGVRVQAASFGTFEQWVVFDFGRRPVLLQKLGLQLGQGRRPGPCRNLALGHPEEMERWHTGNRHVVPGVERTAEQTALMAKYKGPALALEFNRSSVASGPISPTNYRQRMHQFLYEEEAAQQQLVAKLTLRGQVFLKTALQTPALNMLFAPPGALYAEVPVPSSLMPDTDQGFLLGRAVSTALVAPVPAPDNTVFEVRLERRASSEQALWLLLPARCCLALGLQPEARLVLEVQFQIDPMTFRLWHQAVDTLPEEQLVVPDLPTCALPRPWSVPPLRRGNRKQELAVALIAGWGPGDGRRVPPLLIYGPFGTGKTYTLAMASLEVIRRPETKVLICTHTNSAADIYIREYFHSHVSGGHPEATPLRVMYTDRPLSQTDPVTLQYCCLTDDRQAFRPPTRAELARHRVVVTTTSQARELRVPVGFFSHILIDEAAQMLECEALTPLAYASHGTRLVLAGDHMQVTPRLFSVARARAAEHTLLHRLFLCYQQETHEVARQSRLVFHENYRCTDAIVSFISRHFYVAKGNPIHARGKVPPHPRHYPLMFCHVAGSPDRDMSMASWLNLAEIAQVVEKVQEAYNTWPSCWGGREQRCICVVSHGAQVSALRQELRRRDLGQVSVGSFEILPGRQFRVVVLSTVHTCQSLLSPGALAPEFFTDARVLNTVLTRAQSQLVVVGDAVALCSFGACGKLWESFIRECVERHSVCPEGLSMEQVEQGVAQRRRWPPRGTQAGAAGNWEAAPEPVGDLAEEQAAVVTAMVKAEPGDEALSPASRDITATTAQTEAAAAPAGDAVKEDVVPGACAAGAAAAAGVESTEAEDAEADFWPWDGELNADDAILRELLDESQKVMVTVGEDGLLDTVARPESLQQARLYENLPPAALRKLLHAEPERYRHCSFVPETFERASAIPLDDASSGPIQVRGRLDCGMAFAGDEVLVQLLSGDKAPEGRLRGRVLGVLKRKRHELAFVCRMDTWDPRIMVPINGSVTKIFVAELKDPSQVPIYSLRKGRLQRVGLERLTAEARHSRLFWVQIVLWRQGFYYPLGIVREVLPEASTWEQGLRILGLEYSLRVPPSDQATITKVLQKYHTELGRVAGRREDCRAFLTFTVDPQGACNLDDALSVRDLGPRCEVAVHITDVASFVPRDGVLDVEARRQGAAFYAPGREPVPMLPASLCQDVLSLLPGRDRLAISLFLTMEKASGQLKSLRFAPSVVQSDRQLSYEEAEEVIRQHPGAGRELPARLDSVDACVVAACYFSRLLRRHRLRSDCFYEQPDEDGTLGFRAAHIMVKEYMIQFNRLVAEFLVGSECTRTVTPLRWQPAPRSQQLKALCEKHGDRVPLSLHLGHHLHGGGGSPPDTRLHLLASLWKQVQFAARTQDYEQMVDLVTTDDMHPFLAPAGRDLRKALERSAFGRCARGHQQQGGHYSLQVDWYTWATSPIRRYLDVVLQRQILLALGHGGSAYSARDIDGLCQAFSLQHALAQSYQRRARSLHLAVQLKAQPLDKLGFVVDVEAGSRCFRLLFPSNRETLPDPCPVPYGSLQLAEHPHALAGRPGLRLLWRRRVYSAQGSSPPLPLPGTVPDPHTLAVETALWKQLLELVELQRWPEAAALIQEKGEASQRRELVQVQRSHCGHFLEVARELGSGDTLQVQLGTSLQHGFLVPSPQLWTVAPGFSLCLEHVERPGDCFSGRVYRAPRDRYRDVDEYACVWEPFCALESATGAVAENDSVTLQHLSVSWEASRTPQGQLQGAFRLEAAFLEENCADINFSCCYLCIRLEGLPAPTASPRPGPSSLGPGLNVDPGTYTWVAHGQTQDWDQERRADRQEAPRRVHLFVHHMGMEKVPEEVLRPGTLFTVELLPKQLPDLRKEEAVRGLEEASPLVTSIALGRPVPQPLCRVIPSRFLERQTYNIPGGRHKLNPSQNVAVREALEKPFTVIQGPPGTGKTIVGLHIVFWFHKSNQEQVQPGGPPRGEKRLGGPCILYCGPSNKSVDVLAGLLLRRMELKPLRVYSEQAEASEFPVPRVGSRKLLRKSPREGRPNQSLRSITLHHRIRQAPNPYSSEIKAFDTRLQRGELFSREDLVWYKKVLWEARKFELDRHEVILCTCSCAASASLKILDVRQILVDEAGMATEPETLIPLVQFPQAEKVVLLGDHKQLRPVVKNERLQNLGLDRSLFERYHEDAHMLDTQYRMHEGICAFPSVAFYKSKLKTWQGLRRPPSVLGHAGKESCPVIFGHVQGHERSLLVSTDEGNENSKANLEEVAEVVRITKQLTLGRTVEPQDIAVLTPYNAQASEISKALRREGIAGVAVSSITKSQGSEWRYVLVSTVRTCAKSDLDQRPTKSWLKKFLGFVVDPNQVNVAVTRAQEGLCLIGDHLLLRCCPLWRSLLDFCEAQQTLVPAGQVRVCRRPTMPS

SEQ ID NO: 16417 - protein, 352 aa, Homo sapiens
MACLLETPIRMSVLSRHEKCCNWKQQAESQSHCFRSCSKDATVIPHLMALLSRSRYTQEYICQIFSHCCKGPDHQTILFNHGAVQNIAHLLTSLSYKVRMQALKCFSVLAFENPQVSMTLVNVLVDGELLPQIFVKMLQRDKPIEMQLTSAKCLTYMCRAGAIRTDDNCIVLKTLPCLVRMCSKERLLEERVEGAETLAYLIEPDVELQRIASITDHLIAMLADYFKYPSSVSAITDIKRLDHDLKHAHELRQAAFKLYASLGANDEDIRKKIIETENMMDRIVTGLSESSVKVRLAAVRCLHSLSRSVQQLRTSFQDHAVWKPLMKVLQNAPDEILVVASSMLCNLLLEFS

SEQ ID NO: 16418 - protein, 348 aa, Homo sapiens
MGPRARPALLLLMLLQTAVLQGRLLRSHSLHYLFMGASEQDLGLSLFEALGYVDDQLFVFYDHESRRVEPRTPWVSSRISSQMWLQLSQSLKGWDHMFTVDFWTIMENHNHSKESHTLQVILGCEMQEDNSTEGYWKYGYDGQDHLEFCPDTLDWRAAEPRAWPTKLEWERHKIRARQNRAYLERDCPAQLQQLLELGRGVLDQQVPPLVKVTHHVTSSVTTLRCRALNYYPQNITMKWLKDKQPMDAKEFEPKDVLPNGDGTYQGWITLAVPPGEEQRYTCQVEHPGLDQPLIVIWEPSPSGTLVIGVISGIAVFVVILFIGILFIILRKRQGSRGAMGHYVLAERE

SEQ ID NO: 16419 - protein, 403 aa, Homo sapiens
MTSQRSPLAPLLLLSLHGVAASLEVSESPGSIQVARGQPAVLPCTFTTSAALINLNVIWMVTPLSNANQPEQVILYQGGQMFDGAPRFHGRVGFTGTMPATNVSIFINNTQLSDTGTYQCLVNNLPDIGGRNIGVTGLTVLVPPSAPHCQIQGSQDIGSDVILLCSSEEGIPRPTYLWEKLDNTLKLPPTATQDQVQGTVTIRNISALSSGLYQCVASNAIGTSTCLLDLQVISRAFFYWRSKNKEEEEEEIPNEIREDDLPPKCSSAKAFHTEISSSDNNTLTSSNAYNSRYWSNNPKVHRNTESVSHFSDLGQSFSFHSGNANIPSIYANGTHLVPGQHKTLVVTANRGSSPQVMSRSNGSVSRKPRPPHTHSYTISHATLERIGAVPVMVPAQSRAGSLV

SEQ ID NO: 16420 - protein, 535 aa, Homo sapiens
MLCDEKAQKRRKRKAKESGMALPQGHLTFRDVAIEFSQAEWKCLDPAQRALYKDVMLENYRNLVSLGISLPDLNINSMLEQRREPWSGESEVKIAKNSDGRECIKGVNTGSSYALGSNAEDKPIKKQLGVSFHLHLSELELFPDERVINGCNQVENFINHSSSVSCLQEMSSSVKTPIFNRNDFDDSSFLPQEQKVHLREKPYECNEHSKVFRVSSSLTKHQVIHTVEKPYKCNSCGKVFSRNSHLAEHCRIHTGEKPYKCNVCGKVFSYNSNFARHQRIHTREKPYECNECGKVFSNNSYLARHQRIHAEEKPYKCNECGKGFSHKSSLANHWRIYTGEKPYKCDECGKAFYRIALLVRHQKIHTGEKPYKCNECGKVFIQNSHLAQHWRIHTGEKPYKCNECGKVFNQLSNLARHRRIHTGEKPYKCNECGKAFSEYSGLSAHLVIHTGEKPYKCSECGKAFRHKLSLTNHQRIHTGERPYKCNECGKVFNRIAHLARHRKIHTGEKPYKCNECGKAFSRISYLAQHWTIHMG

SEQ ID NO: 16421 - protein, 316 aa, Homo sapiens
MLQALTGLQFQLKEQLGEKERRLQISQEISAHRTEFHMQFSYKPVLHRLVPARPQIYSSQLPSFTRVPAHLESSARPQLQKAQRQKVNSFMTLDHQIINPTLKWSQPAVPSGGPLVQHAHTTLDSDAGLTENPLTKLLAIGKEDDNAQWHMEDVIEDIIGMESSFKEEGADSPLLMQRTLSGSILDVYSGEQGISPINMGLTSASCPSSLPMKREITETDTRALAKERQKKDNHNLIERRRRYNINYRIKELGTLIPKSNDPDMRWNKGTILKASVEYIKWLQKEQQRARELEHRQKKLEQANRRLLLRIQVFIRM

SEQ ID NO: 16422 - protein, 194 aa, Homo sapiens
MSDSEMDGRTHIPSLLNALLSRNRVMQMSYLKSKEQGYGKLSSDEDLEIIVDQKQLVNEQQESRPLLSPSIDDFLCETKSEAIARPVTSNTAVLTTGLDLLDLSEPVSQTQTKAKKSEPSSKTSSLKKKADGSDLISTDAEQRGQPLRVPETSSLDLDIQTQLEKWDDVKFHGDRNTKGHPMAERKSSSSRTGS

SEQ ID NO: 16423 - protein, 1067 aa, Homo sapiens
MMEADRPEKLFIGGLNLKTDEKALKAEFGKYGHIIKVFLMKDRKTNKSRGFAFVTFESPADAKAAARDMNGKYLDGKAIMVAQTIKPAFKSSRWVPPTPGSGSRSRFSHRTRGGGSSPQRPPSQGRPDDGRGYAGYFDLWPYRAPMPRKRGPPPRHWASPPHKRATPSSLAHSVGCGMRGKAPTVSGQDGYSGLQPRRWAGPPHKRAVPRSSLARIGGSGMPGKAPAVWGQDGYSGPRVREPLPPCRDPGDFVPALRDYSRRYYGHSSVPDYRPLRGDGNQNGYRGRDHEYTDHPSKGSYREPLKSYGGPCGAAPVWGTPPSYGGGCRYEEYQGNSPDACSEGRSSEALPVVLPDAYSRDHSPKAYSGGRSSSSNGYSRSDRYGEEGCYEEYRGRSPDAHSGGRNSSSNSYGQSHHYGGEGRYEEYRGRSHEARSGGRSTDAHSRGRSDDAYSGGHDSSSWSDCCGGGGRYEEYQGRSLDANSGGCSPEAYSGGHDNSSWSDRYGVGGHYEENRGHSLDANSGGRSPDTHSGGHSSSSNSYGQSHRYGGEGRYEYRGRSHDAHSGGCSADAYSGGHDSSSQSNRYGGGGCYEEYRGRSLDANSGGRSPNAYSGGHDSSSWSHRYGGGGRYEEYRGRSLDANSGGRSPDAYSGGHDSSGQSNCYGGGGRYEEYRGRLLDANSGGRSPDAYSGGHDSSSQSNRYGGGGRYEEYRGHSLDANSGGRSPDTYSRGHDSSSQSDHYGGGGRSLDANSSGRLPDAYSGGHDSSSRSHRYGGGGRYEEYRGRSLDANSGGRSPNAYSGGHNSSSRNDPCRGGGRYEENRGHSLDANSGGHSPNAYSGGRDSSSNSYDRSHRYGGGGHYEEYRGRSHDTHSRGRSPDAHSGDHYTEAYSRGRDSFSNSYGRSDHYGRGGCYEEYQGRSPNAYGGGRGLNSSNNSHGRSHRYGGGGRYEEYRGPSPDAHSGGRDSSIKSYGLSDRYGGGGHYEEYQGSLPDAYSGDHDRSSNSYGRSDRYSRGRDRVGRPDRGLPLPMETGSPPLHDSYSRSGCRVPRGGGRQGGRFERGEGRSRY

SEQ ID NO: 16424 - protein, 549 aa, Homo sapiens
MNKTWSLSLKNGDCSCGGPILTLPGRIVENGSEQGSYDADKGIFTIRLPKETPGQHFEGLNMLTALLAPRKSRTAKPLVEEIGASEIPEEVVDDEEFDWEIEQTPCEEVSESALNPQCHYGFGNLRSGVLQRLQDELSDVIDIKDPDFTPAAERRQKRLAAELAKFDPDHYLADFFEDEAIEQILKYNPWWTDKYSKMMAFLEKSQEQENHATLVSFSEEEKYQLRKFVNKSYLLDKRACRQVCYSLIDILLAYCYETRVTEGEKNVESAWNIRKLSPTLCWFETWTNVHDIMVSFGRRVLCYPLYRHFKLVMKAYRDTIKILQLGKSAVLKCLLDIHKIFQENDPAYILNDLYISDYCVWIQKVKSKKLAALAEALKEVSLTKAQLGLELEELEAAALLVQEEETALKAAHSVSGQQTLCSSSEASDSEDSDSSVSSGNEDSGSDSEQDELKDSPSETVSSLQGPFLEESSAFLIVDGGVRRNTAIQESDASQGKPLASSWPLGVSGPLIEELGEQLKTTVQVSEPKGTTAVNRSNIQERDGCQTPNN

SEQ ID NO: 16425 - protein, 482 aa, Homo sapiens
ETNESTEGSRSRSLDIQPSSEGLGPTSEPFPSSDDSPRSALAAATAAAAAAASAAAATAAFTTAKAAALSTKTPAPCSEFMEPSSDPSLLGEPCAGPGFTHNIAHGSLGFEPVYVSCIAQDTCTTTDHSSNPGPVPGSSSGPVLGSSSGAGHGSGSGSGPGCGSVPGSGSGPGPGSGPGSGPGHGSGSHPGPASGPGPDTGPDSELSPCIPPGFRNLVADRVPNYTSWSQHCPWEPQKQPPWEFLQVLEPGARGLWKPPDIKGKLMVCYETLPRGQCLLYNWEEERATNHLDQVPSMQDGSESFFFRHGHRGLLTMQLKSPMPSSTTQKDSYQPPGNVYWPLRGKREAMLEMLLQHQICKEVQAEQEPTRKLFEVESVTHHDYRMELAQAGTPAPTKPHDYRQEQPETFWIQRAPQLPGVSNIRTLDTPFRKNCSFSTPVPLSLGKLLPYEPENYPYQLGEISSLPCPGGRLGGGGGRMTPF

SEQ ID NO: 16426 - protein, 554 aa, Homo sapiens
MFPVAPKPQDSSQPSDRLMTEKQQEEAEWESINVLLMMHGLKPLSLVKRTDLKDLIIFDKQSSQRMRQNLKLLVEETSCQQNMIQELIETNQQLRNELQLEQSRAANQEQRANDLEQIMESVKSKIGELEDESLSRACHQQNKIKDLQKEQKTLQVKCQHYKKKRTEQEETIASLQMEVCRLKKEEEDRIVTQNRVFAYLCKRVPHTVLDRQLLCLIDYYESKIRKIHTQRQYKEDESQSEEENDYRNLDASPTYKGLLMSLQNQLKESKSKIDALSSEKLNLQKDLETRPTQHELRLYKQQVKKLEKALKKNVKLQELINHKKAEDTEKKDEPSKYNQQQALIDQRYFQVLCSINSIIHNPRAPVIIYKQTKGGVQNFNKDLVQDCGFEHLVPVIEMWADQLTSLKDLYKSLKTLSAELVPWLNLKKQDENEGIKVEDLLFIVDTMLEEVENKEKDSNMPHFQTLQAIVSHFQKLFDVPSLNGVYPRMNEVYTRLGEMNNAVRNLQELLELDSSSSLCVLVSTVGKLCRLINEDVNEQVMQVLGPEDLQRYLF

SEQ ID NO: 16427 - protein, 339 aa, Homo sapiens
MSVDNLATVIGVNLIRSKVEDPAVIMRGTPQIQRVMTMMIRDHEVLFPKSKDIPLSPPAQKNDPKKAPVARSSVGWDATEDLRISRTDSFSSMTSDSDTTSPTGQQPSDAFPEDSSKVPREKPGDWKMQSRKRTQTLPNRKCFLTSAFQGANSSKMEIFKNEFWSPSSEAKAGEGHRRTMSQDLRQLSDSQRTSTYDNVPSLPGSPGEEASALSSQACDSKGDTLASPNSETGPGKKNSGEEEIDSLQRMVQELRKEIETQKQMYEEQIKNLEKENYDVWAKVVRLNEELEKEKKKSAALEISLRNMERSREDVEKRNKALEEEVKEFVKSMKEPKTEA

SEQ ID NO: 16428 - protein, 782 aa, Homo sapiens
MAEPPRLPLTFEDVAIYFSEQEWQDLEAWQKELYKHVMRSNYETLVSLDDGLPKPELISWIEHGGEPFRKWRESQKSGNIICSSVDMHFDPGFEEQLFWGSQQAMNSGKTKSHFQLDPESQCSFGSFVSFRPDQGITLGSPQRHDARAPPPLACGPSESTLKEGIPGPRNLDLPGLWDVPAWESTQHPWPVCGESCWENNHLVMHQRGHSKDRTRRAWEKFNKRAETQMPWSSPRVQRHFRCGVCGKSFRRKLCLLRHLAAHTGRGPFRNADGEMCFRHELTHPSHRLPQQGEKPAQCTPCGKRSLPVDSTQARRCQHSREGPASWREGRGASSSVHSGQKPGSRLPQEGNSHQEGDTEALQHGAEGPCSCSECGERSPMSARLASPCRAHTGEKPFQCAHCTKRFRLRRLLQVHQHAHGGERPFSCRKCGKGFAKQCKLTEHIRVHSGEKPFRCAKCGRNFRQRGQLLRHQRLHTDEKPFQCPECGLSFRLESMLRAHRLRHGGERPFSCSECGRGFTHQCKLREHLRVHSGERPFQCLKCDKRFRLKGILKAHQHTHSKERPFSCGECGKGFTRQSKLTEHLRVHSGERPFQCPECNRSFRLKGQLLSHQRLHTGERPFQCPECDKRYRVKADMKAHQLLHSGEMPFSCECGKGFVKHSKLIEHIRTHTGEKPFQCPKCDKSFRLKAQLLSHQGLHTGERPFHCPECDKNFRERGHMLRHQRIHRPERPFACGDCGKGFIYKSKLAEHIRVHTKSCPAPNELDIKKRLSQLFAMIEADWS

SEQ ID NO: 16429 - protein, 841 aa, Homo sapiens
MEWGSESAAVRRHRVGVERREGAAAAPPPEREARAQEPLVDGCSGGGRTRKRSPGGSGGASRGAGTGLSEVRAALGLALYLIALRTLVQLSLQQLVLRGAAGHRGEFDALQARDYLEHITSIGPRTTGSPENEILTVHYLLEQIKLIEVQSNSLHKISVDVQRPTGSFSIDFLGGFTSYYDNITNVVVKLEPRDGAQHAVLANCHFDSVANSPGASDDAVSCSVMLEVLRVLSTSSEALHHAVIFLFNGAEENVLQASHGFITQHPWASLIRAFINLEAAGVGGKELVFQTGPENPWLVQAYVSAAKHPFASVVAQEVFQSGIIPSDTDFRIYRDFGNIPGIDLAFIENGYIYHTKYDTADRILTDSIQRAGDNILAVLKHLATSDMLAAASKYRHGNMVFFDVLGLFVIAYPSRIGSIINYMVVMGVVLYLGKKFLQPKHKTGNYKKDFLCGLGITLISWFTSLVTVLIIAVFISLIGQSLSWYNHFYVSVCLYGTATVAKIILIHTLAKRFYYMNASAQYLGEVFFDISLFVHCCFLVTLTYQGLCSAFISAVWVAFPLLTKLCVHKDFKQHGAQGKFIAFYLLGMFIPYLYALYLIWAVFEMFTPILGRSGSEIPPDVVLASILAGCTMILSSYFINFIYLAKSTKKTMLTLTLVCAITFLLVCSGTFFPYSSNPANPKPKRVFLQHMTRTFHDLEGNAVKRDSGIWINGFDYTGISHITPHIPEINDSIRAHCEENAPLCGFPWYLPVHFLIRKNWYLPAPEVSPRNPPHFRLISKEQTPWDSIKLTFEATACLPILQILDLPASTIMTKPYVLLCSSPQRVNTFSVVSWQWHPSHK

SEQ ID NO: 16430 - protein, 118 aa, Homo sapiens
MPPRPSSGELWGIHLMPPRILVECLLPNGMIVTLECLREATLITIKHELFKEARKYPLHQLLQDESSYIFVSVTQEAEREEFFDETRRLCDLRLFQPFLKVIEPVGNREEKILNREIG

SEQ ID NO: 16431 - protein, 463 aa, Homo sapiens
MGTRSAIAAPRILCSRGLRSGSARATGSGVERSPSAANPTLMTSLRTWPLPWALPSPTCLGPPIPPRRQRIFSFEINVSVAIITFASEPKVLMSVLNDNSRDMTEVISSLENANYKDHENGTGTNTYAALNSVYLMMNNQMRLLGMETMAWQEIRHAIILLTDGKSNMGGSPKTAVDHIREILNINQKRNDYLDIYAIGVGKLDVDWRELNELGSKKDGERHAFILQDTKALHQVFEHMLDVSKLTDTICGVGNMSANASDQERTPWHVTIKPKSQETCRGALISDQWVLTAAHCFRDGNDHSLWRVNVGDPKSQWGKEFLIEKAVISPGFDVFAKKNQGILEFYGDDIALLKLAQKVKMSTHARPICLPCTMEANLALRRPQGSTCRDHENELLNKQSVPAHFVALNGSKLNINLKMGVEWTSCAEVVSQEKTMFPNLTDVREVVTDQFLCSGTQEDESPCK

SEQ ID NO: 16432 - protein, 530 aa, Homo sapiens
MDSQKYCFKENENVTVDKACFLISNITIGPESINLQQEALQRIISTLANKNDEIQNFIDTLHHTLKGVQENSSNILSELDEEFDSLYSILDEVKESMINCIKQEQARKSQELQSQISQCNNALENSEELLEFATRSLDIKEPEEFSKAARQIKDRVTMASAFRLSLKPKVSDNMTHLMVDFSQERQMLQTLKFLPVPKAPEIDPVECLVADNSVTVAWRMPEEDNKIDHFILEHRKTNFDGLPRVKDERCWEIIDNIKGTEYTLSGLKFDSKYMNFRVRACNKAVAGEYSDPVTLETKALNFNLDNSSSHLNLKVEDTCVEWDPTGGKGQESKIKGKENKGRSGTPSPKRTSVGSRPPAVRGSRDRFTGESYTVLGDTAIESGQHYWEVKAQKDCKSYSVGVAYKTLGKFDQLGKTNTSWCIHVNNWLQNTFAAKHNNKVKALDVTVPEKIGVFCDFDGGQLSFYDANSKQLLYSFKTKFTQPVLPGFMVWCGGLSLSTGMQVPSAVRTLQKSENGMTGSASSLNNVVTQ

SEQ ID NO: 16433 - protein, 133 aa, Homo sapiens [sequence omitted]

SEQ ID NO: 16434 - protein, 519 aa, Homo sapiens
MEEHSYIQKELDLQNGSLEEDSVVHSVENDSQNMMESLSPKKYSSSLRFKANGDYSGSYLTLSQPVPAKRSPSPLGTSVRSSPSLAKIQGSKQFSYDGTDKNIPMKPPTPLLNTTSSLSGYPLGRADFDHYTGRDSERALRLSEKPPYSKYSSRHKSHDNVYSLGGLEGRKASGSLLAMWNGSSLSDAGPPPISRSGAASMPSSPKQARKMSIQDSLALQPKLTRHKELASENINLRTRKYSSSSLSHMGAYSRSLPRLYRATENQLTPLSLPPRNSLGNSKRTKLGEKDLPHSVIDNDNYLNFSSLSSGALPYKTSASEGNPYVSSTLSVPASPRVARKMLLASTSSCASDDFDQASYVGTNPSHSLLAGESDRVFATRRNFSCGSVEFDEADLESLRQASGTPQPALRERKSSISSISGRDDLMDYHRRQREERLREQEMERLVIFISTVIDLTVSLTSIYRAALEMDSRICGNIGYSCSLATAAIFLFSPAILLLPISLLIGLFGYLEGLQELMLI

SEQ ID NO: 16435 - protein, 5412 aa, Homo sapiens
MKGARWRRVPWVSLSCLCLCLLPHVVPGTTEDTLITGSKTAAPVTSTGSTTATLEGQSTAASSRTSNQDISASSQNHQTKSTETTSKAQTDTLTQMMTSTLFSSPSVHNVMETAPPDEMTTSFPSSVTNTLMMTSKTITMTTSTDSTLGNTEETSTAGTESSTPVTSAVSITAGQEGQSRTTSWRTSIQDTSASSQNHWTRSTQTTRESQTSTLTHRTTSTPSFSPSVHNVTGTVSQKTSPSGETATSSLCSVTNTSMMTSEKITVTTSTGSTLGNPGETSSVPVTGSLMPVTSAALVTFDPEGQSPATFSRTSTQDTTAFSKNHQTQSVETTRVSQINTLNTLTPVTTSTVLSSPSGFNPSGTVSQETFPSGETTTSSPSSVSNTFLVTSKVFRMPTSRDSTLGNTEETSLSVSGTISAITSKVSTIWWSDTLSTALSPSSLPPKISTAFHTQQSEGAETTGRPHERSSFSPGVSQEIFTLHETTTWPSSFSSKGHTTWSQTELPSTSTGAATRLVTGNPSTGTAGTIPRVPSKVSAIGEPGEPTTYSSHSTTLPKTTGAGAQTQWTQETGTTGEALLSSPSYSVTQMIKTATSPSSSPMLDRHTSQQITTAPSTNHSTIHSTSTSPQESPAVSQRGHTQAPQTTQESQTTRSVSPMTDTKTVTTPGSSFTASGHSPSEIVPQDAPTISAATTFAPAPTGDGHTTQAPTTALQAAPSSHDATLGPSGGTSLSKTGALTLANSVVSTPGGPEGQWTSASASTSPDTAAAMTHTHQAESTEASGQTQTSEPASSGSRTTSAGTATPSSSGASGTTPSGSEGISTSGETTRFSSNPSRDSHTTQSTTELLSASASHGAIPVSTGMASSIVPGTFHPTLSEASTAGRPTGQSSPTSPSASPQETAAISRMAQTQRTRTSRGSDTISLASQATDTFSTVPPTPPSITSTGLTSPQTETHTLSPSGSGKTFTTALISNATPLPVTYASSASTGHTTPLHVTDASSVSTGHATPLPVTSPSSVSTGHTTPLPVTDTSSESTGHVTPLPVTSFSSASTGDSTPLPVTDTSSASTGHVTPLPVTSLSSASTGDTTPLPVTDTSSASTGHATSLPVTDTSSVSTGHTTPLPVTDTSSASTGHATSLPVTDTSSVSTGHTTPLHVTDASSASTGQATPLPVTSLSSVSTGDTTPLPVTSPSSASTGHATPLLVTDTSSASTGHATPLPVTDASSVSTDHATSLPVTIPSAASTGHTTPLPVTDTSSASTGQATSLLVTDTSSVSTGDTTPLPVTSTSSASTGHVTPLHVTSPSSASTGHATPLPVTSLSSASTGDTMPLPVTSPSSASTGDTTPLPVTDASSVSTGHTTPLHVTDASSASTGQATPLPVTSLSSVSTGDTTPLPVTSPSSASTGHATPLLVTDTSSASTGHATPLPVTDASSVSTDHATSLPVTIPSAASTGHTTPLPVTDTSSASTGQATSLLVTDTSSVSTGDTTPLPVTSTSSASTGHVTPLHVTSPSSASTGHATPLPVTSLSSASTGDTMPLPVTSPSSASTGDTTPLPVTDASSVSTGHTTPLPVTSPSSASTGHTTPLPVTDTSSASKGDTTPLPVTSPSSASTGHTTPLPVTDTSSASTGDTTPLPVTNASSLSTGHATPLHVTSPSSASTGHATPLPVTSTSSASTGHATPLPVTGLSSATTDDTTRLPVTDVSSASTGQATPLPVTSLSSVSTGDTTPLPVTSPSSASTGHASPLLVTDASSASTGQATPLPVTDTSSVSTAHATPLPVTGLSSASTDDTTRLPVTDVSSASTGQAIPLPVTSPSSASTGDTTPLPVTDASSASTGDTTSLPVTIPSSASSGHTTSLPVTDASSVSTGHATSLLVTDASSVSTGDTTPLPVTDTNSASTGDTTPLHVTDASSVSTGHATSLPVTSLSSASTGDTTPLPVTSPSSASSGHTTPLPVTDASSVPTGHATSLPVTDASSVSTGHATPLPVTDASSVSTGHATPLPVTDTSSVSTGQATPLPVTSLSSASTGDTTPLPVTDTSSASTGQDTPLPVTSLSSVSTGDTTPLPVTNPSSASTGHATPLLVTDASSISTGHATSLLVTDASSVSTGHATALHDTDASSLSTGDTTPLPVTSPSSTSTGDTTPLPVTETSSVSTGHATSLPVTDTSSASTGHATSLPVTDTSSASTGHATPLPVTDTSSASTGQATPLPVTSPSSASTGHAIPLLVTDTSSASTGQATPLPVTSLSSASTGDTTPLPVTDASSVSTGHATSLPVTSLSSVSTGDTTPLPVTSPSSASTGHATPLHVTDASSASTGHATPLPVTSLSSASTGDTTPLPVTSPSSASTGHATPLHVTDASSVSTGDTTPLPVTSSSSASSGHTTPLPVTDASSASTGDTTPLPVTDTSSASTGHATHLPVTGLSSASTGDTTRLPVTNVSSASTGHATPLPVTSTSSASTGDTTPLPGTDTSSVSTGHTTPLLVTDASSVSTGDTTRLPVTSPSSASTGHTTPLPVTDTPSASTGDTTPLPVTNASSLSTRHATSLHVTSPSSASTGHATSLPVTDTSAASTGHATPLPVTSTSSASTGDTTPLPVTDTYSASTGQATPLPVTSLSSVSTGDTTPLPVTSPSSASTGHATPLLVTDASSASTGQATPLPVTSLSSVSTGDTTPLPVTSPSSASTGHATSLPVTDTSSASTGDTTSLPVTDTSSAYTGDTTSLPVTDTSSSSTGDTTPLLVTETSSVSTGDTTPLPVTDTSSASTGHATPLPVTNTSSVSTGHATPLHVTSPSSASTGHTTPLPVTDASSVSTGHATSLPVTDASSVFTGHATSLPVTIPSSASSGHTTPLPVTDASSVSTGHATSLPVTDASSVSTGHATPLPVTDASSVSTGHATPLPLTSLSSVSTGDTTPLPVTDTSSASTGQATPLPVTSLSSVSTGDTTPLPVTDTSSASTGHATSLPVTDTSSASTGHATPLPDTDTSSASTGHATLLPVTDTSSASIGHATSLPVTDTSSISTGHATPLHVTSPSSASTGHATPLPVTDTSSASTGHANPLHVTSPSSASTGHATPLPVTDTSSASTGHATPLPVTSLSSVSTGDTTPLPVTSPSSASTGHTTPLPVTDTSSASTGQATALPVTSTSSASTGDTTPLPVTDTSSASTGQATPLPVTSLSSVSTGDTTPLPVTSPSSASTGHATPLLVTDASSASTGQATPLPVTSLSSVSTGDTTPLPVTSPSSASTGHATSLPVTDTSSASTGDTTSLPVTDTSSAYTGDTTSLPVTDTSSSSTGDTTPLLVTETSSVSTGHATPLLVTDASSASTGHATPLHVTSPSSASTGDTTPVPVTDTSSVSTGHATPLPVTGLSSASTGDTTRLPVTDISSASTGQATPLPVTNTSSVSTGDTMPLPVTSPSSASTGHATPLPVTSTSSASTGHATPVPVTSTSSASTGHTTPLPVTDTSSASTGDTTPLPVTSPSSASTGHTTPLHVTIPSSASTGDTSTLPVTGASSASTGHATPLPVTDTSSVSTGHATPLPVTSLSSVSTGDTTPLPVTDASSASTGQATPLPVTSLSSVSTGDTTPLLVTDASSVSTGHATPLPVTDTSSASTGDTTRLPVTDTSSASTGQATPLPVTSLSSVSTGDTTPLLVTDASSVSTGHATPLPVTDTSSASTGDTTRLPVTDTSSASTGQATPLPVTIPSSSSSGHTTPLPVTSTSSVSTGHVTPLHVTSPSSASTGHVTPLPVTSTSSASTGHATPLLVTDASSVSTGHATPLPVTDASSASTGDTTPLPVTDTSSASTGQATPLPVTSLSSVSTGDTTPLPVTDASSASTGHATPLPVTIPSSVSTGDTMPLPVTSPSSASTGHATPLPVTGLSSASTGDTTPLPVTDTSSASTRHATPLPVTDTSSASTDDTTRLPVTDVSSASTGHATPLPVTSTSSASTGDTTPLPVTDTSSVSTGHATSLPVTSRSSASTGHATPLPVTDTSSVSTGHATPLPVTSTSSVSTGHATPLPVTSPSSASTGHATPVPVTSTSSASTGDTTPLPVTNASSLSTGHATPLHVTSPSSASRGDTSTLPVTDASSASTGHATPLPLTSLSSVSTGDTTPLPVTDTSSASTGQATPLPVTSLSSVSTGDTTPLPVTIPSSASSGHTTSLPVTDASSVSTGHGTPLPVTSTSSASTGDTTPLPVTDTSSASTGHATPLPVTDTSSASTGHATPLPVTSLSSVSTGHATPLAVSSATSASTVSSDSPLKMETPGMTTPSLKTDGGRRTATSPPPTTSQTIISTIPSTAMHTRSTAAPIPILPERGVSLFPYGAGAGDLEFVRRTVDFTSPLFKPATGFPLGSSLRDSLYFTDNGQIIFPESDYQIFSYPNPLPTGFTGRDPVALVAPFWDDADFSTGRGTTFYQEYETFYGEHSLLVQQAESWIRKMTNNGGYKARWALKVTWVNAHAYPAQWTLGSNTYQAILSTDGSRSYALFLYQSGGMQWDVAQRSGNPVLMGFSSGDGYFENSPLMSQPVWERYRPDRFLNSNSGLQGLQFYRLHREERPNYRLECLQWLKSQPRWPSWGWNQVSCPCSWQQGRRDLRFQPVSIGRWGLGSRQLCSFTSWRGGVCCSYGPWGEFREGWHVQRPWQLAQELEPQSWCCRWNDKPYLCALYQQRRPHVGCATYRPPQPAWMFGDPHITTLDGVSYTFNGLGDFLLVGAQDGNSSFLLQGRTAQTGSAQATNFIAFAAQYRSSSLGPVTVQWLLEPHDAIRVLLDNQTVTFQPDHEDGGGQETFNATGVLLSRNGSEVSASFDGWATVSVIALSNILHASASLPPEYQNRTEGLLGVWNNNPEDDFRMPNGSTIPPGSPEEMLFHFGMTWQINGTGLLGKRNDQLPSNFTPVFYSQLQKNSSWAEHLISNCDGDSSCIYDTLALRNASIGLHTREVSKNYEQANATLNQYPPSINGGRVIEAYKGQTTLIQYTSNAEDANFTLRDSCTDLELFENGTLLWTPKSLEPFTLEILARSAKIGLASALQPRTVVCHCNAESQCLYNQTSRVGNSSLEVAGCKCDGGTFGRYCEGSEDACEEPCFPSVHCVPGKGCEACPPNLTGDGRHCAALGSSFLCQNQSCPVNYCYNQGHCYISQTLGCQPMCTCPPAFTDSRCFLAGNNFSPTVNLELPLRVIQLLLSEEENASMAEVNASVAYRLGTLDMRAFLRNSQVERIDSAAPASGSPIQHWMVISEFQYRPRGPVIDFLNNQLLAAVVEAFLYHVPRRSEEPRNDVVFQPISGEDVRDVTALNVSTLKAYFRCDGYKGYDLVYSPQSGFTCVSPCSRGYCDHGGQCQHLPSGPRCSCVSFSIYTAWGEHCEHLSMKLDAFFGIFFGALGGLLLLGVGTFVVLRFWGCSGARFSYFLNSAEALP

SEQ ID NO: 16436 - protein, 1685 aa, Homo sapiens
MSYWNLEKRNCVQYRRHFLVDNSVFHVERCMSVMQSGTQMIKLKRGTKGLVRLFYLDEHRTRLRWRPSRKSEKAKILIDSIYKVTEGRQSEIFHRQAEGNFDPSCCFTIYHGNHMESLDLITSNPEEARTWITGLKYLMAGISDEDSLAKRQRTHDQWVKQTFEEADKNGDGLLNIEEIHQLMHKLNVNLPRRKVRQMFQEADTDENQGTLTFEEFCVFYKMMSLRRDLYLLLLSYSDKKDHLTVEELAQFLKVEQKMNNVTTDYCLDIIKKFEVSEENKVKNVLGIEGFTNFMRSPACDIFNPLHHEVYQDMDQPLCNYYIASSHNTYLTGDQLLSQSKVDMYARVLQEGCRCVEVDCWDGPDGEPVVHHGYTLTSKILFRDVVETINKHAFVKNEFPVILSIENHCSIQQQRKIAQYLKGIFGDKLDLSSVDTGECKQLPSPQSLKGKILVKGKKLPYHLGDDAEEGEVSDEDSADEIEDECKFKLHYSNGTTEHQVESFIRKKLESLLKESQIRDKEDPDSFTVRALLKATHEGLNAHLKQSPDVKESGKKSHGRSLMTNFGKHKKTTKSRSKSYSTDDEEDTQQSTGKEGGQLYRLGRRRKTMKLCRELSDLVVYTNSVAAQDIVDDGTTGNVLSFSETRAHQVVQQKSEQFMIYNQKQLTRIYPSAYRIDSSNFNPLPYWNAGCQLVALNYQSEGRMMQLNRAKFKANGNCGYVLKPQQMCKGTFNPFSGDPLPANPKKQLILKVISGQQLPKPPDSMFGDRGEIIDPFVEVEIIGLPVDCCKDQTRVVDDNGFNPVWEETLTFTVHMPEIALVRFLVWDHDPIGRDFVGQRTVTFSSLVPGYRHVYLEGLTEASIFVHITINEIYGKNRQLQGLKGLFNKNPRHSSSENNSHYVRKRSIGDRILRRTASAPAKGRKKSKMGFQEMVEIKDSVSEATRDQDGVLRRTTRSLQARPVSMPVDRNLLGALSLPVSETAKDIEGKENSLAEDKDGRRKGKASIKDPHFLNFNKKLSSSSSALLHKDTSQGDTIVSTAHMSVTGEQLGMSSPRGGRTTSNATSNCQENPCPSKSLSPKQHLAPDPVVNPTQDLHGVKIKEKGNPEDFVEGKSILSGSVLSHSNLEIKNLEGNRGKGRAATSFSLSDVSMLCSDIPDLHSTAILQESVISHLIDNVTLTNENEPGSSISALIGQFDETNNQALTVVSHLHNTSVMSGHCPLPSLGLKMPIKHGFCKGKSKSSFLCSSPELIALSSSETTKHATNTVYETTCTPISKTKPDDDLSSKAKTAALESNLPGSPNTSRGWLPKSPTKGEDWETLKSCSPASSPDLTLEDVIADPTLCFNSGESSLVEIDGESENLSLTTCEYRREGTSQLASPLKLKYNQGVVEHFQRGLRNGYCKETLRPSVPEIFNNIQDVKTQSISYLAYQGAGFVHNHFSDSDAKMFQTCVPQQSSAQDMHVPVPKQLAHLPLPALKLPSPCKSKSLGDLTSEDIACNFESKYQCISKSFVTTGIRDKKGVTVKTKSLEPIDALTEQLRKLVSFDQEDNCQVLYSKQDANQLPRALVRKLSSRSQSRVRNIASRAKEKQEANKQKVPNPSNGAGVVLRNKPSAPTPAVNRHSTGSYIAGYLKNTKGGGLEGRGIPEGACTALHYGHVDQFCSDNSVLQTEPSSDDKPEIYFLLRL

SEQ ID NO: 16437 - protein, 321 aa, Homo sapiens
CDQLFESKAELADHQKFPCSTPHSAFSMVEEDFQQKLESENDLQEIHTIQECKECDQVFPDLQSLEKHMLSHTEEREYKCDQCPKAFNWKSNLIRHQMSHDSGKHYECENCAKVFTDPSNLQRHIRSQHVGARAHACPECGKTFATSSGLKQHKHIHSSVKPFISFSQSMYPFPDRDLRSLPLKMEPQSPGEVKKLQKGSSESPFDLTTKRKDEKPLTPVPSKPPVTPATSQDQPLDLSMGSRSRASGTKLTEPRKNHVFGGKKGSNVESRPASDGSLQHARPTPFFMDPIYRVEKRKLTDPLEALKEKYLRPSPGFLFHP

SEQ ID NO: 16438 - protein, 1512 aa, Homo sapiens
MATAVETEACQPTDASWESGGGGDDEMKQALPELESSQQNGGGGGLNIAEPSGGAGREENAGAEAAQSLSHEQPQDSSEAGAAALPRGPEEPERPVRRSFQIPRKSREKKALFQPLTPGSREFEDVVNILHSSYLEPTSVTNFNYRRACLVHNELLEKEFTEKRRELKFDGRLDKELSESYAFLMVDRYQVQTICEKGLHVGQSKITILGSPSMGVYLSRYADLLQANPLDTGAMGDVVIFKIMKGKIKSIYDPMGVKSLESMLNKSALDPTPKHECHVSKNANRITSLLAYRAYELTQYYFYEYGFDELRRRPRHVCPYAVVSFTYKDDIQTPKFVPSSRSNSFNTDRNIDKYNYTLWKGQLLNKGKLLCYISLRSATRAFLPIKLPEKLDVETVMSIDHLKQKIPPALFYKETYLGPNEVLKNGMYCSLYEVVEKTRIGSNMESLLQKLDREKLVLVKPLGDRGYLFLLSPYQMVPPYEYQTAKSRVLHALFLFQEPRSIVTSQKGSTNAAPQERHESMPDVLKIAQFLQFSLIQCRKEFKNISAINFHSVVEKYVSEFFKRGFGSGKREFIMFPYDSRLDDKKFLYSAPRNKSHIDTCLHAYIFRPEVYQLPICKLKELFEENRKLQQFSPLSDYEGQEEEMNGTKMKFGKRNNSRGEAIISGKQRSSHSLDYDKDRVKELINLIQCRKKSVGGDSDTEDMRSKTVLKRKLEDLPENMRKLAKTSNLSENCHLYEESPQPIGSLGHDADLRRQQQDTCNSGIADIHRLFNWLSETLANARHSDASLTDTVNKALGLSTDDAYEELRQKHEYELNSTPDKKDYEQPTCAKVENAQFKGTQSLLLEVDATSKYSVAISTSEVGTDHKLHLKEDPNLISVNNFEDCSLCPSVPIEHGFRRQQSKSNNVEETEIHWKLIPITGGNARSPEDQLGKHGEKQTPGMKSPEEQLVCVPPQEAFPNDPRVINRQRSSDYQFPSSPFTDTLKGTTEDDVLTGQVEEQCVPAAEAEPPAVSETTERTVLGEYNLFSRKIEEILKQKNVSYVSTVSTPIFSTQEKMKRLSEFIYSKTSKAGVQEFVDGLHEKLNTIIIKASAKGGNLPPVSPNDSGAKIASNPLERHVIPVSSSDFNNKHLLEPLCSDPLKDTNSDEQHSTSALTEVEMNQPQHATELMVTSDHIVPGDMAREPVEETTKSPSDVNISAQPALSNFISQLEPEVFNSLVKIMKDVQKNTVKFYIHEEEESVLCKEIKEYLIKLGNTECHPEQFLERRSKLDKLLIIIQNEDIAGFIHKIPGLVTLKKLPCVSFAGVDSLDDVKNHTYNELFVSGGFIVSDESILNPEVVTVENLKNFLTFLEELSTPEGKWQWKVHCKFQKKLKELGRLNAKALSLLTLLNVYQKKHLVEILSYHNCDSQTRNAPELDCLIRLQAQNIQQRHIVFLTEKNIKMLSSYTDNGIVVATAEDFMQNFKNLVGYHNSITEENLPQLGANENLESQSDAVLTLTPLELGVGISQH

SEQ ID NO: 16439 - protein, 811 aa, Homo sapiens
MQQALELALDRAEYVIESARQRPPKRKYLSSGRKSVFQKLYDLYIEECEKEPEVKKLRRNVNLLEKLVMQETLSCLVVNLYPGNEGYSLMLRGKNGSDSETIRLPYEEGELLEYLDAEELPPILVDLLEKSQVNIFHCGCVIAEIRDYRQSSNMKSPGYQSRHILLRPTMQTLICDVHSITSDNHKWTQEDKLLLESQLILATAEPLCLDPSIAVTCTANRLLYNKQKMNTRPMKRCFKRYSRSSLNRQQDLSHCPPPPQLRLLDFLQKRKERKAGQHYDLKISKAGNCVDMWKRSPCNLAIPSEVDVEKYAKVEKSIKSDDSQPTVWPAHDVKDDYVFECEAGTQYQKTKLTILQSLGDPLYYGKIQPCKADEESDSQMSPSHSSTDDHSNWFIIGSKTDAERVVNQYQELVQNEAKCPVKMSHSSSGSASLSQVSPGKETDQTETVSVQSSVLGKGVKHRPPPIKLPSSSGNSSSGNYFTPQQTSSFLKSPTPPPSSKPSSIPRKSSVDLNQVSMLSPAALSPASSSQRSGTPKPSTPTPTPSSTPHPPDAQSSTPSTPSATPTPQDSGFTPQPTLLTQFAQQQRSLSQAMPVTTIPLSTMVTSITPGTTATQVMANSAGLNFINVVGSVCGAQALMSGSNPMLGCNTGAITPAGINLSGLLPSGGLLPNALPSAMQAASQAGVPFGLKNTSSLRPLNLLQLPGGSLIFNTLQQQQQQLSQFTPQQPQQPTTCSPQQPGEQGSEQGSTSQEQALSAQQAAVINLTGVGSFMQSQAAAVAILAASNGYGSSSSTNSSATSSSAYRQPVKK

SEQ ID NO: 16440 - protein, 277 aa, Homo sapiens
MSREFRGHRNCVLTLAYSAPWDLPSTPCAEEAAAGGLLVTGSTDGTAKVWQVASGCCHQTLRGHTGAVLCLVLDTPGHTAFTGSTDATIRAWDILSGEQLRVFREHRGSVICLECSRAAGTLAPGPSTRSLESCGGCSGATHSSSTASRCTARCSTPPRTTAPCASGTCAGSEVPRGPLRPCAASRGSSATRWAAPPRPCSRPDPAGPLQTPAQTPSGSQSAPPCYPRWWRPMAGEGRGARKPGREESPSQASGFSLVARRRWERECSPWGPPPFPF

SEQ ID NO: 16441 - protein, 151 aa, Homo sapiens
MRAVNILVYFFGFFWWFFNVQGFIKDVHEDSLTVVFENNWQPERQVPFNEVRLPPPPDIKKEISEGDEVEVYSRANDQEPCGWWLAKVRMMKGEFYVIEYAACDATYNEIVTFERLRPVNQNKTVKKNTFFKCTVDVPEDLREACANENAH

SEQ ID NO: 16442 - protein, 2753 aa, Homo sapiens
MARKKLKKFTTLEIVLSVLLLVLFIISIVLIVLLAKESLKSTAPDPGTTGTPDPGTTGTPDPGTTGTTHARTTGPPDPGTTGTTPVSAECPVVNELERINCIPDQPPTKATCDQRGCCWNPQGAVSVPWCYYSKNHSYHVEGNLVNTNAGFTARLKNLPSSPVFGSNVDNVLLTAEYQTSNRFHFKLTDQTNNRFEVPHEHVQSFSGNAAASLTYQVEISRQPFSIKVTRRSNNRVLFDSSIGPLLFADQFLQLSTRLPSTNVYGLGEHVHQQYRHDMNWKTWPIFNRDTTPNGNGTNLYGAQTFFLCLEDASGLSFGVFLMNSNAMEVVLQPAPAITYRTIGGILDFYVFLGNTPEQVVQEYLELIGRPALPSYWALGFHLSRYEYGTLDNMREVVERNRAAQLPYDVQHADIDYMDERRDFTYDSVDFKGFPEFVNELHNNGQKLVIIVDPAISNNSSSSKPYGPYDRGSDMKIWVNSSDGVTPLIGEVWPGQTVFPDYTNPNCAVWWTKEFELFHNQVEFDGIWIDMNEVSNFVDGSVSGCSTNNLNNPPFTPRILDGYLFCKTLCMDAVQHWGKQYDIHNLYGYSMAVATAEAAKTVFPNKRSFILTRSTFAGSGKFAAHWLGDNTATWDDLRWSIPGVLEFNLFGIPMVGPDICGFALDTPEELCRRWMQLGAFYPFSRNHNGQGYKDQDPASFGADSLLLNSSRHYLNIRYTLLPYLYTLFFRAHSRGDTVARPLLHEFYEDNSTWDVHQQFLWGPGLLITPVLDEGAEKVMAYVPDAVWYDYETGSQVRWRKQKVEMELPGDKIGLHLRGGYIFPTQQPNTTTLASRKNPLGLIIALDENKEAKGELFWDNGETKDTVANKVYLLCEFSVTQNRLEVNISQSTYKDPNNLAFNEIKILGTEEPSNVTVKHNGVPSQTSPTVTYDSNLKVAIITDIDLLLGEAYTVEWSIKIRDEEKIDCYPDENGASAENCTARGCIWEASNSSGVPFCYFVNDLYSVSDVQYNSHGATADISLKSSVYANAFPSTPVNPLRLDVTYHKNEMLQFKIYDPNKNRYEVPVPLNIPSMPSSTPEGQLYDVLIKKNPFGIEIRRKSTGTIIWDSQLLGFTFSDMFIRISTRLPSKYLYGFGETEHRSYRRDLEWHTWGMFSRDQPPGYKKNSYGVHPYYMGLEEDGSAHGVLLLNSNAMDVTFQPLPALTYRTTGGVLDFYVFLGPTPELVTQQYTELIGRPVMVPYWSLGFQLCRYGYQNDSEIASLYDEMVAAQIPYDVQYSDIDYMERQLDFTLSPKFAGFPALINRMKADGMRVILILDPAISGNETQPYPAFTRGVEDDVFIKYPNDGDIVWGKVWPDFPDVVVNGSLDWDSQVELYRAYVAFPDFFRNSTAKWWKREIEELYNNPQNPERSLKFDGMWIDMNEPSSFVNGAVSPGCRDASLNHPPYMPHLESRDRGLSSKTLCMESQQILPDGSLVQHYNVHNLYGWSQTRPTYEAVQEVTGQRGVVITRSTFPSSGRWAGHWLGDNTAAWDQLKKSIIGMMEFSLFGISYTGADICGFFQDAEYEMCVRWMQLGAFYPFSRNHNTIGTRRQDPVSWDAAFVNISRNVLQTRYTLLPYLYTLMQKAHTEGVTVVRPLLHEFVSDQVTWDIDSQFLLGPAFLVSPVLERNARNVTAYFPRARWYDYYTGVDINARGEWKTLPAPLDHINLHVRGGYILPWQEPALNTHLSRKNPLGLIIALDENKEAKGELFWDDGQTKDTVAKKVYLLCEFSVTQNHLEVTISQSTYKDPNNLAFNEIKILGMEEPSNVTVKHNGVPSQTSPTVTYDSNLKVAIITDINLFLGEAYTVEWSIKIRDEEKIDCYPDENGDSAENCTARGCIWEASNSSGVPFCYFVNDLYSVSDVQYNSHGATADISLKSSVHANAFPSTPVNPLRLDVTYHKNEMLQFKIYDPNNNRYEVPVPLNIPSVPSSTPEGQLYDVLIKKNPFGIEIRRKSTGTIIWDSQLLGFTFNDMFIRISTRLPSKYLYGFGETEHTSYRRDLEWHTWGMFSRDQPPGYKKNSYGVHPYYMGLEEDGSAHGVLLLNSNAMDVTFQPLPALTYRTTGGVLDFYVFLGPTPELVTQQYTELIGRPVMVPYWSLGFQLCRYGYQNDSEISSLYDEMVAAQIPYDVQYSDIDYMERQLDFTLSPKFAGFPALINRMKADGMRVILILDPAISGNETQPYPAFTRGVEDDVFIKYPNDGDIVWGKVWPDFPDVVVNGSLDWDSQVELYRAYVAFPDFFRNSTAKWWKREIEELYNNPQNPERSLKFDGMWIDMNEPSSFVNGAVSPGCRDASLNHPPYMPYLESRDRGLSSKTLCMESQQILPDGSPVQHYNVHNLYGWSQTRPTYEAVQEVTGQRGVVITRSTFPSSGRWAGHWLGDNTAAWDQLKKSIIGMMEFSLFGISYTGADICGFFQDAEYEMCVRWMQLGAFYPFSRNHNTIGTRRQDPVSWDVAFVNISRTVLQTRYTLLPYLYTLMHKAHTEGVTVVRPLLHEFVSDQVTWDIDSQFLLGPAFLVSPVLERNARNVTAYFPRARWYDYYTGVDINARGEWKTLPAPLDHINLHVRGGYILPWQEPALNTHLSRQKFMGFKIALDDEGTAGGWLFWDDGQSIDTYGKGLYYLASFSASQNTMQSHIIFNNYITGTNPLKLGYIEIWGVGSVPVTSVSISVSGMVITPSFNNDPTTQVLSIDVTDRNISLHNFTSLTWISTL

SEQ ID NO: 16443 - protein, 1185 aa, Homo sapiens
CAAPAPLTSAERELQQIRINEVKTEISVESKHQTLQGLAFPLQPEAQRALQQLKQKMVNYIQMKLDLERETIELVHTEPTDVAQLPSRVPRDAARYHFFLYKHTHEGDPLESVVFIYSMPGYKCSIKERMLYSSCKSRLLDSVEQDFHLEIAKKGFCRSALHPLSLLVQAIMLAMTLALGTLPAFLPCELQPHGLVNCNWLFLKSVPHFSMAAPRGNVTSLSLSSNRIHHLHDSDFAHLPSLRHLNLKWNCPPVGLSPMHFPCHMTIEPSTFLAVPTLEELNLSYNNIMTVPALPKSLISLSLSHTNILMLDSASLAGLHALRFLFMDGNCYYKNPCRQALEVAPGALLGLGNLTHLSLKYNNLTVVPRNLPSSLEYLLLSYNRIVKLAPEDLANLTALRVLDVGGNCRRCDHAPNPCMECPRHFPQLHPDTFSHLSRLEGLVLKDSSLSWLNASWFRGLGNLRVLDLSENFLYKCITKTKAFQGLTQLRKLNLSFNYQKRVSFAHLSLAPSFGSLVALKELDMHGIFFRSLDETTLRPLARLPMLQTLRLQMNFINQAQLGIFRAFPGLRYVDLSDNRISGASELTATMGEADGGEKVWLQPGDLAPAPVDTPSSEDFRPNCSTLNFTLDLSRNNLVTVQPEMFAQLSHLQCLRLSHNCISQAVNGSQFLPLTGLQVLDLSHNKLDLYHEHSFTELPRLEALDLSYNSQPFGMQGVGHNFSFVAHLRTLRHLSLAHNNIHSQVSQQLCSTSLRALDFSGNALGHMWAEGDLYLHFFQGLSGLIWLDLSQNRLHTLLPQTLRNLPKSLQVLRLRDNYLAFFKWWSLHFLPKLEVLDLAGNQLKALTNGSLPAGTRLRRLDVSCNSISFVAPGFFSKAKELRELNLSANALKTVDHSWFGPLASALQILDVSANPLHCACGAAFMDFLLEVQAAVPGLPSRVKCGSPGQLQGLSIFAQDLRLCLDEALSWDCFALSLLAVALGLGVPMLHHLCGWDLWYCFHLCLAWLPWRGRQSGRDEDALPYDAFVVFDKTQSAVADWVYNELRGQLEECRGRWALRLCLEERDWLPGKTLFENLWASVYGSRKTLFVLAHTDRVSGLLRASFLLAQQRLLEDRKDVVVLVILSPDGRRSRYVRLRQRLCRQSVLLWPHQPSGQRSFWAQLGMALTRDNHHFYNRNFCQGPTAE

SEQ ID NO: 16444 - protein, 1294 aa, Homo sapiens
MAMGDDKSFDDEESVDGNRPSSAASAFKVPAPKTSGNPANSARKPGSAGGPKVGGASKEGGAGAVDEDDFIKAFTDVPSIQIYSSRELEETLNKIREILSDDKHDWDQRANALKKIRSLLVAGAAQYDCFFQHLRLLDGALKLSAKDLRSQVVREACITVAHLSTVLGNKFDHGAEAIVPTLFNLVPNSAKVMATSGCAAIRFIIRHTHVPRLIPLITSNCTSKSVPVRRRSFEFLDLLLQEWQTHSLERHAAVLVETIKKGIHDADAEARVEARKTYMGLRNHFPGEAETLYNSLEPSYQKSLQTYLKSSGSVASLPQSDRSSSSSQESLNRPFSSKWSTANPSTVAGRVSAGSSKASSLPGSLQRSRSDIDVNAAAGAKAHHAAGQSVRSGRLGAGALNAGSYASLEDTSDKLDGTASEDGRVRAKLSAPLAGMGNAKADSRGRSRTKMVSQSQPGSRSGSPGRVLTTTALSTVSSGVQRVLVNSASAQKRSKIPRSQGCSREASPSRLSVARSSRIPRPSVSQGCSREASRESSRDTSPVRSFQPLASRHHSRSTGALYAPEVYGASGPGYGISQSSRLSSSVSAMRVLNTGSDVEEAVADALKKPARRRYESYGMHSDDDANSDASSACSERSYSSRNGSIPTYMRQTEDVAEVLNRCASSNWSERKEGLLGLQNLLKNQRTLSRVELKRLCEIFTRMFADPHGKRVFSMFLETLVDFIQVHKDDLQDWLFVLLTQLLKKMGADLLGSVQAKVQKALDVTRESFPNDLQFNILMRFTVDQTQTPSLKVKVAILKYIETLAKQMDPGDFINSSETRLAVSRVITWTTEPKSSDVRKAAQSVLISLFELNTPEFTMLLGALPKTFQDGATKLLHNHLRNTGNGTQSSMGSPLTRPTPRSPANWSSPLTSPTNTSQNTLSPSAFDYDTENMNSEDIYSSLRGVTEAIQNFSFRSQEDMNEPLKRDSKKDDGDSMCGGPGMSDPRAGGDATDSSQTALDNKASLLHSMPTHSSPRSRDYNPYNYSDSISPFNKSALKEAMFDDDADQFPDDLSLDHSDLVAELLKELSNHNERVEERKIALYELMKLTQEESFSVWDEHFKTILLLLLETLGDKEPTIRALALKVLREILRHQPARFKNYAELTVMKTLEAHKDPHKEVVRSAEEAASVLATSISPEQCIKVLCPIIQTADYPINLAAIKMQTKVIERVSKETLNLLLPEIMPGLIQGYDNSESSVRKACVFCLVAVHAVIGDELKPHLSQLTGSKMKLLNLYIKRAQTGSGGADPTTDVSGQS

SEQ ID NO: 16445 - protein, 990 aa, Homo sapiens
ECSAQCGLGYRTLDIYCAKYSRLDGKTEKVDDGFCSSHPKPSNREKCSGECNTGGWRYSAWTECSKSCDGGTQRRRAICVNTRNDVLDDSKCTHQEKVTIQRCSEFPCPQWKSGDWSECLVTCGKGHKHRQVWCQFGEDRLNDRMCDPETKPTSMQTCQQPECASWQAGPWGQCSVTCGQGYQLRAVKCIIGTYMSVVDDNDCNAATRPTDTQDCELPSCHPPPAAPETRRSTYSAPRTQWRFGSWTPCSATCGKGTRMRYVSCRDENGSVADESACATLPRPVAKEECSVTPCGQWKALDWSSCSVTCGQGRATRQVMCVNYSDHVIDRSECDQDYIPETDQDCSMSPCPQRTPDSGLAQHPFQNEDYRPRSASPSRTHVLGGNQWRTGPWGACSSTCAGGSQRRVVVCQDENGYTANDCVERIKPDEQRACESGPCPQWAYGNWGECTKLCGGGIRTRLVVCQRSNGERFPDLSCEILDKPPDREQCNTHACPHDAAWSTGPWSSCSVSCGRGHKQRNVYCMAKDGSHLESDYCKHLAKPHGHRKCRGGRCPKWKAGAWSQCSVSCGRGVQQRHVGCQIGTHKIARETECNPYTRPESERDCQGPRCPLYTWRAEEWQECTKTCGEGSRYRKVVCVDDNKNEVHGARCDVSKRPVDRESCSLQPCEYVWITGEWSECSVTCGKGYKQRLVSCSEIYTGKENYEYSYQTTINCPGTQPPSVHPCYLRDCPVSATWRVGNWGSCSVSCGVGVMQRSVQCLTNEDQPSHLCHTDLKPEERKTCRNVYNCELPQNCKEVKRLKGASEDGEYFLMIRGKLLKIFCAGMHSDHPKEYVTLVHGDSENFSEVYGHRLHNPTECPYNGSRRDDCQCRKDYTAAGFSSFQKIRIDLTSMQIITTDLQFARTSEGHPVPFATAGDCYSAAKCPQGRFSINLYGTGLSLTESARWISQGNYAVSDIKKSPDGTRVVGKCGGYCGKCTPSSGTGLEVRVL

SEQ ID NO: 16446 - protein, 377 aa, Homo sapiens
MAEAELHKERLQAIAEKRKRQTEIEGKRQQLDEQILLLQHSKSKVLREKWLLQGIPAGTAEEEEARRRQSEEDEFRVKQLEDNIQRLEQEIQTLESEESQISAKEQIILEKLKETEKSFKDFQKGFSSTDGAVYAMEINVEKDKQTGETKILSTSTIGPEGVHQKGVKVYDDGTKVVYEVRSGGTVVENGVHKLSTKDVEELIQKAGQSSLGGGHVSERTVIADGSLSHPKEHMLCKEAKLEMVHKSRKDHSSGNPGQQAQAPSAAGPEANLDQPVTMIFMGYQNIEDEEETKKVLGYDETIKAELVLIDEDDEKSLREKTVTDVSTIDGNAAELVSGRPVSDTTEPSSPEGKEESLATEPAPGTQKKKRCQCCVVM

SEQ ID NO: 16447 - protein, 173 aa, Homo sapiens
MSQERPTFYRQELNKTIWEVPERYQNLSPVGSGAYGSVCAAFDTKTGLRVAVKKLSRPFQSIIHAKRTYRELRLLKHMKHENVIGLLDVFTPARSLEEFNDVYLVTHLMGADLNNIVKCQKLTDDHVQFLIYQILRGLKYIHSADIIHRDLKPSNLAVNEDCELKFVCSSSAL

SEQ ID NO: 16448 - protein, 922 aa, Homo sapiens
MVQLRKLLRVLTLMKFPCCVLEVLLCALAAAARGQEMYAPHSIRIEGDVTLGGLFPVHAKGPSGVPCGDIKRENGIHRLEAMLYALDQINSDPNLLPNVTLGARILDTCSRDTYALEQSLTFVQALIQKDTSDVRCTNGEPPVFVKPEKVVGVIGASGSSVSIMVANILRLFQIPQISYASTAPELSDDRRYDFFSRVVPPDSFQAQAMVDIVKALGWNYVSTLASEGSYGEKGVESFTQISKEAGGLCIAQSVRIPQERKDRTIDFDRIIKQLLDTPNSRAVVIFANDEDIKQILAAAKRADQVGHFLWVGSDSWGSKINPLHQHEDIAEGAITIQPKRATVEGFDAYFTSRTLENNRRNVWFAEYWEENFNCKLTISGSKKEDTDRKCTGQERIGKDSNYEQEGKVQFVIDAVYAMAHALHHMNKDLCADYRGVCPEMEQAGGKKLLKYIRNVNFNGSAGTPVMFNKNGDAPGRYDIFQYQTTNTSNPGYRLIGQWTDELQLNIEDMQWGKGVREIPASVCTLPCKPGQRKKTQKGTPCCWTCEPCDGYQYQFDEMTCQHCPYDQRPNENRTGCQDIPIIKLEWHSPWAVIPVFLAMLGIIATIFVMATFIRYNDTPIVRASGRELSYVLLTGIFLCYIITFLMIAKPDVAVCSFRRVFLGLGMCISYAALLTKTNRIYRIFEQGKKSVTAPRLISPTSQLAITSSLISVQLLGVFIWFGVDPPNIIIDYDEHKTMNPEQARGVLKCDITDLQIICSLGYSILLMVTCTVYAIKTRGVPENFNEAKPIGFTMYTTCIVWLAFIPIFFGTAQSAEKLYIQTTTLTISMNLSASVALGMLYMPKVYIIIFHPELNVQKRKRSFKAVVTAATMSSRLSHKPSDRPNGEAKTELCENVDPNNCIPPVRKSVQKSVTWYTIPPTV

SEQ ID NO: 16449 - protein, 149 aa, Homo sapiens
MMAVEQMPKKDWYSILGADPSANISDLKQKYQKLILMYHPDKQSTDVPAGTVEECVQKFIEIDQAWKILGNEETKREYDLQRCEDDLRNVGPVDAQVYLEEMSWNEGDHSFYLSCRCGGKYSVSKDEAEEVSLISCDTCSLIIELLHYN

SEQ ID NO: 16450 - protein, 529 aa, Homo sapiens
MEYMAESTDRSPGHILCCECGVPISPNPANICVACLRSKVDISQGIPKQVSISFCKQCQRYFQPPGTWIQCALESRELLALCLKKIKAPLSKVRLVDAGFVWTEPHSKRLKVKLTIQKEVMNGAILQQVFVVDYVVQSQMCGDCHRVEAKDFWKAVIQVRQKTLHKKTFYYLEQLILKYGMHQNTLRIKEIHDGLDFYYSSKQHAQKMVEFLQCTVPCRYKASQRLISQDIHSNTYNYKSTFSVEIVPICKDNVVCLSPKLAQSLGNMNQICVCIRVTSAIHLIDPNTLQVADIDGSTFWSHPFNSLCHPKQLEEFIVMECSIVQDIKRAAGAGMISKKHTLGEVWVQKTSEMNTDKQYFCRTHLGHLLNPGDLVLGFDLANCNLNDEHVNKMNSDRVPDVVLIKKSYDRTKRQRRRNWKLKELARERENMDTDDERQYQDFLEDLEEDEAIRKNVNIYRDSAIPVESDTDDEGAPRISLAEMLEDLHISQDATGEEAKSAPEAADLESEVTEGPSVVVDACNPSTLGG

SEQ ID NO: 16451 - protein, 754 aa, Homo sapiens
LLVLGLLVAGAADGCELVPRHLRGRRATGSAATAASSPAAAAGDSPALMTDPCMSLSPPCFTEEDRFSLEALQTIHKQMDDDKDGGIEVEESDEFIREDMKYKDATNKHSHLHREDKHITIEDLWKRWKTSEVHNWTLEDTLQWLIEFVELPQYEKNFRDNNVKGTTLPRIAVHEPSFMISQLKISDRSHRQKLQLKALDVVLFGPLTRPPHNWMKDFILTVSIVIGVGGCWFAYTQNKTSKEHVAKMMKDLESLQTAEQSLMDLQERLEKAQEENRNVAVEKQNLERKMMDEINYAKEEACRLRELREGAECELSRRQYAEQELEQVRMALKKAEKEFELRSSWSVPDALQKWLQLTHEVEVQYYNIKRQNAEMQLAIAKDEVAASYLIQAEKIKKKRSTVFGTLHVAHSSSLDEVDHKILEAKKALSELTTCLRERLFRWQQIEKICGFQIAHNSGLPSLTSSLYSDHSWVVMPRVSIPPYPIAGGVDDLDEDTPPIVSQFPGTMAKPPGSLARSSSLCRSRRSIVPSSPQPQRAQLAPHAPHPSHPRHPHHPQHTPHSLPSPDPDILSVSSCPALYRNEEEEEAIYFSAEKQWEVPDTASECDSLNSSIGRKQSPPLSLEIYQTLSPRKISRDEVSLEDSSRGDSPVTVDVSWGSPDCVGLTETKSMIFSPASKVYNGILEKSCSMNQLSSGIPVPKPRHTSCSSAGNDSKPVQEAPSVARISSIPHDLCHNGEKSKKPSKIKSLFKKKSK

SEQ ID NO: 16452 - protein, 1094 aa, Homo sapiens
MPCGFSPSPVAHHLVPGPPDTPAQQLRCGWTVGGWLLSLVRGLLPCLPPGARTAEGPIMVLAGPLAVSLLLPSLTLLVSHLSSSQDVSSEPSSEQQLCALSKHPTVAFEDLQPWVSNFTYPGARDFSQLALDPSGNQLIVGARNYLFRLSLANVSLLQATEWASSEDTRRSCQSKGKTEEECQNYVRVLIVAGRKVFMCGTNAFSPMCTSRQVGNLSRTIEKINGVARCPYDPRHNSTAVISSQGELYAATVIDFSGRDPAIYRSLGSGPPLRTAQYNSKWLNEPNFVAAYDIGLFAYFFLRENAVEHDCGRTVYSRVARVCKNDVGGRFLLEDTWTTFMKARLNCSRPGEVPFYYNELQSAFHLPEQDLIYGVFTTNVNSIAASAVCAFNLSAISQAFNGPFRYQENPRAAWLPIANPIPNFQCGTLPETGPNENLTERSLQDAQRLFLMSEAVQPVTPEPCVTQDSVRFSHLVVDLVQAKDTLYHVLYIGTESGTILKALSTASRSLHGCYLEELHVLPPGRREPLRSLRILHSARALFVGLRDGVLRVPLERCAAYRSQGACLGARDPYCGWDGKQQRCSTLEDSSNMSLWTQNITACPVRNVTRDGGFGPWSPWQPCEHLDGDNSGSCLCRARSCDSPRPRCGGLDCLGPAIHIANCSRNGAWTPWSSWALCSTSCGIGFQVRQRSCSNPAPRHGGRICVGKSREERFCNENTPCPVPIFWASWGSWSKCSSNCGGGMQSRRRACENGNSCLGCGVEFKTCNPEGCPEVRRNTPWTPWLPVNVTQGGARQEQRFRFTCRAPLADPHGLQFGRRRTETRTCPADGSGSCDTDALVEVLLRSGSTSPHTVSGGWAAWGPWSSCSRDCELGFRVRKRTCTNPEPRNGGLPCVGDAAEYQDCNPQACPVRGAWSCWTSWSPCSASCGGGHYQRTRSCTSPAPSPGEDICLGLHTEEALCATQACPEGWSPWSEWSKCTDDGAQSRSRHCEELLPGSSACAGNSSQSRPCPYSEIPVILPASSMEEATDCAGKRNRTYLMLRSSQPSGTPLQSLDSFHILLQTAKLCWGPHCFEMGSISSTWWPRASPASWALGS

SEQ ID NO: 16453 - protein, 128 aa, Homo sapiens
IGLMYTFGDGRHGKLGLGLENFTNHFIPTLCSNFLRFIVKLVACGGCHMVVFAAPHRGVAKEIEFDEINDTCLSVATFLPYSSLTSGNVLQRTLSARMRRRERLSLMSSGSLYTINNEMGKQRNKDFN

SEQ ID NO: 16454 - protein, 1217 aa, Homo sapiens
MSDLDSEVLPLPPRYRFRDLLLGDPSFQNDDRLPVEDFSLDSSLSQVQVEFYVNENTFKERLKLFFIKNQRSSLRIRLFNFSLKLLTCLLYIVRVLLDDPALGIGCWGCPKQNYSFNDSSSEINWAPILWVERKMTLWAIQVIVAIISFLETMLLIYLSYKGNIWEQIFRVSFVLEMINTLPFIITIFWPPLRNLFIPVFLNCWLAKHALENMINDFHRAILRTQSAMFNQVLILFCTLLCLVFTGTCGIQHLERAGENLSLLTSFYFCIVTFSTVGYGDVTPKIWPSQLLVVIMICVALVVLPLQFEELVYLWMERQKSGGNYSRHRAQTEKHVVLCVSSLKIDLLMDFLNEFYAHPRLQDYYVVILCPTEMDVQVRRVLQIPLWSQRVIYLQGSALKDQDLMRAKMDNGEACFILSSRNEVDRTAADHQTILRAWAVKDFAPNCPLYVQILKPENKFHVKFADHVVCEEECKYAMLALNCICPATSTLITLLVHTSRGQEGQESPEQWQRMYGRCSGNEVYHIRMGDSKFFREYEGKSFTYAAFHAHKKYGVCLIGLKREDNKSILLNPGPRHILAASDTCFYINITKEENSAFIFKQEEKRKKRAFSGQGLHEGPARLPVHSIIASMGTVAMDLQGTEHRPTQSGGGGGGSKLALPTENGSGSRRPSIAPVLELADSSALLPCDLLSDQSEDEVTPSDDEGLSVVEYVKGYPPNSPYIGSSPTLCHLLPVKAPFCCLRLDKGCKHNSYEDAKAYGFKNKLIIVSAETAGNGLYNFIVPLRAYYRSRKELNPIVLLLDNKPDHHFLEAICCFPMVYYMEGSVDNLDSLLQCGIIYADNLVVVDKESTMSAEEDYMADAKTIVNVQTMFRLFPSLSITTELTHPSNMRFMQFRAKDSYSLALSKLEKRERENGSNLAFMFRLPFAAGRVFSISMLDTLLYQSFVKDYMITITRLLLGLDTTPGSGYLCAMKITEGDLWIRTYGRLFQKLCSSSAEIPIGIYRTESHVFSTSEPHDLRAQSQISVNVEDCEDTREVKGPWGSRAGTGGSSQGRHTGGGDPAEHPLLRRKSLQWARRLSRKAPKQAGRAAAAEWISQQRLSLYRRSERQELSELVKNRMKHLGLPTTGYEDVANLTASDVMNRVNLGYLQDEMNDHQNTLSYVLINPPPDTRLEPSDIVYLIRSDPLAHVASSSQSRKSSCSHKLSSCNPETRDETQL

SEQ ID NO: 16455 - protein, 336 aa, Homo sapiens
MKTLMRHGLAVCLALTTMCTSLLLVYSSLGGQKERPPQQQQQQQQQQQQASATGSSQPAAESSTQQRPGVPAGPRPLDGYLGVADHKPLKMHCRDCALVTSSGHLLHSRQGSQIDQTECVIRMNDAPTRGYGRDVGNRTSLRVIAHSSIQRILRNRHDLLNVSQGTVFIFWGPSSYMRRDGKGQVYNNLHLLSQVLPRLKAFMITRHKMLQFDELFKQETGKDRKISNTWLSTGWFTMTIALELCDRINVYGMVPPDFCRDPNHPSVPYHYYEPFGPDECTMYLSHERGRKGSHHRFITEKRVFKNWARTFNIHFFQPDWKPESLAINHPENKPVF

SEQ ID NO: 16456 - protein, 325 aa, Homo sapiens
MTERRRDELSEEINNLREKVMKQSEENNNLQSQVQKLTEENTTLREQVEPTPEDEDDDIELRGAAAAAAPPPPIEEECPEDLPEKFDGNPDMLAPFMAQCQIFMEKSTRDFSVDRVRVCFVTSMMTGRAARWASAKLERSHYLMHNYPAFMMEMKHVFEDPQRREVAKRKIRRLRQGMGSVIDYSNAFQMIAQDLDWNEPALIDQYHEGLSDHIQEELSHLEVAKSLSALIGQCIHIERRLARAAAARKPRSPPRALVLPHIASHHQVDPTEPVGGARMRLTQEEKERRRKLNLCLYCGTGGHYADNCPAKASKSSPAGNSPAPL

SEQ ID NO: 16457 - protein, 379 aa, Homo sapiens
MASPVAAQAGKLLRALALRPRFLAAGSQAVQLTSRRWLNLQEYQSKKLMSDNGVRVQRFFVADTANEALEAAKRLNAKEIVLKAQILAGGRGKGVFNSGLKGGVHLTKDPNVVGQLAKQMIGYNLATKQTPKEGVKVNKVMVAEALDISRETYLAILMDRSCNGPVLVGSPQGGVDIEEVAASNPELIFKEQIDIFEGIKDSQAQRMAENLGFVGPLKSQAADQITKLYNLFLKIDATQVEVNPFGETPEGQVVCFDAKINFDDNAEFRQKDIFAMDDKSENEPIENEAAKYDLKYIGLDGNIACFVNGAGLAMATCDIIFLNGGKPANFLDLGGGVKEAQVYQAFKLLTADPKQQNLKARNTWAPEYRTQKHVLEAWK

SEQ ID NO: 16458 - protein, 1311 aa, Homo sapiens
MLLFYLLVVLSIDSTKASALTNPNVALFLLADDCDDPLVSALPQASFSSSSELSSSHGPGFARLNRRDGAGGWSPLVSNKYQWLQIDLGERMEVTAVATQGGYGSSNWVTSYLLMFSDSGWNWKQYRQEDSIWGFSGNANADSVVYYRLQPSIKARFLRFIPLEWNPKGRIGMRIEVFGCAYRSEVVDLDGKSSLLYRFDQKSLSPIKDIISLKFKTMQSDGILLHREGPNGDHITLQLRRARLFLLINSGEAKLPSTSTLVNLTLGSLLDDQHWHSVLIQRLGKQVNFTVDEHRHHFHARGEFNLMNLDYEISFGGIPAPGKSVSFPHRNFHGCLENLYYNGVDIIDLAKQQKPQIIAMGNVSFSCSQPQSMPVTFLSSRSYLALPDFSGEEEVSATFQFRTWNKAGLLLFSELQLISGGILLFLSDGKLKSNLYQPGKLPSDITAGVELNDGQWHSVSLSAKKNHLSVAVDGQMASAAPLLGPEQIYSGGTYYFGGCPDKSFGSKCKSPLGGFQGCMRLISISGKVVDLISVQQGSLGNFSDLQIDSCGISDRCLPNYCEHGGECSQSWSTFHCNCTNTGYRGATCHNSIYEQSCEAYKHRGNTSGFYYIDSDGSGPLEPFLLYCNMTETAWTIIQHNGSDLTRVRNTNPENPYAGFFEYVASMEQLQATINRAEHCEQEFTYYCKKSRLVNKQDGTPLSWWVGRTNETQTYWGGSSPDLQKCTCGLEGNCIDSQYYCNCDADRNEWTNDTGLLAYKEHLPVTKIVITDTGRLHSEAAYKLGPLLCQGDRSFWNSASFDTEASYLHFPTFHGELSADVSFFFKTTASSGVFLENLGIADFIRIELRSPTVVTFSFDVGNGPFEISVQSPTHFNDNQWHHVRVERNMKEASLQVDQLTPKTQPAPADGHVLLQLNSQLFVGGTATRQRGFLGCIRSLQLNGMTLDLEERAQVTPEVQPGCRGHCSSYGKLCRNGGKCRERPIGFFCDCTFSAYTGPFCSNEISAYFGSGSSVIYNFQENYLLSKNSSSHAASFHGDMKLSREMIKFSFRTTRTPSLLLFVSSFYKEYLSVIIAKNGSLQIRYKLNKYQEPDVVNFDFKNMADGQLHHIMINREEGVVFIEIDDNRRRQVHLSSGTEFSAVKSLVLGRILEHSDVDQDTALAGAQGFTGCLSAVQLSHVAPLKAALHPSHPDPVTVTGHVTESSCMAQPGTDATSRERTHSFADHSGTIDDREPLANAIKSDSAVIGGLIAVVIFILLCITAIAVRIYQQKRLYKRSEAKRSENVDSAEAVLKSELNIQNAVNENQKEYFF

SEQ ID NO: 16459 - protein, 502 aa, Homo sapiens
MRIFIAFEGSFEPFDVSADETVEVVKLMIKDYFHIPLSEDKQGRRYLELMYAGAALKDSWSLADVGISFCSTLKCFVKEEDKPTLYVFNAVTQDTMPVMESISLLDKTVSDLRTLVTLRCGLPVSVYCLRTPRGLEMYDCNTLKDYQTDIGTTLRLDVWDGWKEFLMGCLLGQKLKVQRYLSKEGPVLKYQKRVALYIAAFCGYIELTEWALKQGARPHEAVGVHPYRAWCHEALHADVSKCPIHAAAEAGQLLILKAFVNYSVLCLECKNAAGQTPLTIVFKHKHKDCVLYLLSKMWSTVSFPKISVPMRIYIKIKQWILRAQSHSLHKSQFCGARVFGAKVGDTVMVDGFTKPKMTSKSWHKAGNSDSQSIVLKLPSLSKQTASSKPVNPLAISQPDTRKQALKFHPLVNASSFSELQKHQQQNQKKITATARKKEKLIKNTYLPQVPLPPVSRVGYSHPSFFYATPSADFLLKSSFSSFLEHSGKTPWENAIYCLAVAR

SEQ ID NO: 16460 - protein, 421 aa, Homo sapiens
MSNQQEKYEAQNIVNSTEESDDAFDTVTIPVPSEEPQESDQTEEHESGIEQFSESHAIHVEEQSDQSFSSLEPDNEQLMEEVISPRQVSYTPQHHEKQYAMQRPNDDSLAFLDKIKSVKESLQESVEDSLATVKVVLIPVGQEIVIPFKVDTILKYLKDHFSHLLGIPHSVLQIRYSGKILKNNETLVQHGVKPQEIVQVEIFSTNPDLYPVRRIDGLTDVSQIITVTVQTGLDQYQQVPVEIVKSDFHKPFLGGFRHKVTGVEYHNAGTQTVPKRIPERLSIFCRDTQTVFQKKNLQQTTNTTSTQMTNIGVYVSNMTDKLVTPGKYFSAAEYHAQRLKAVIVIQTYYRQWHAKIFVENLRRQKSLRLEWETQQELRKIREKEEWIKLDYHRRHNPKTNEDFEFLYNALELFSSKNMENP

SEQ ID NO: 16461 - protein, 265 aa, Homo sapiens [sequence omitted]

SEQ ID NO: 16462 - protein, 4458 aa, Homo sapiens
MKGARWRRVPWVSLSCLCLCLLPHVVPGTTEDTLITGSKTAAPVTSTGSTTATLEGQSTAASSRTSNQDISASSQNHQTKSTETTSKAQTDTLTQMMTSTLFSSPSVHNVMETAPPDEMTTSFPSSVTNTLMMTSKTITMTTSTDSTLGNTEETSTAGTESSTPVTSAVSITAGQEGQSRTTSWRTSIQDTSASSQNHWTRSTQTTRESQTSTLTHRTTSTPSFSPSVHNVTGTVSQKTSPSGETATSSLCSVTNTSMMTSEKITVTTSTGSTLGNPGETSSVPVTGSLMPVTSAALVTFDPEGQSPATFSRTSTQDTTAFSKNHQTQSVETTRVSQINTLNTLTPVTTSTVLSSPSGFNPSGTVSQETFPSGETTTSSPSSVSNTFLVTSKVFRMPTSRDSTLGNTEETSLSVSGTISAITSKVSTIWWSDTLSTALSPSSLPPKISTAFHTQQSEGAETTGRPHERSSFSPGVSQEIFTLHETTTWPSSFSSKGHTTWSQTELPSTSTGAATRLVTGNPSTGTAGTIPRVPSKVSAIGEPGEPTTYSSHSTTLPKTTGAGAQTQWTQETGTTGEALLSSPSYSVTQMIKTATSPSSSPMLDRHTSQQITTAPSTNHSTIHSTSTSPQESPAVSQRGHTQAPQTTQESQTTRSVSPMTDTKTVTTPGSSFTASGHSPSEIVPQDAPTISAATTFAPAPTGDGHTTQAPTTALQAAPSSHDATLGPSGGTSLSKTGALTLANSVVSTPGGPEGQWTSASASTSPDTAAAMTHTHQAESTEASGQTQTSEPASSGSRTTSAGTATPSSSGASGTTPSGSEGISTSGETTRFSSNPSRDSHTTQSTTELLSASASHGAIPVSTGMASSIVPGTFHPTLSEASTAGRPTGQSSPTSPSASPQETAAISRMAQTQRTRTSRGSDTISLASQATDTFSTVPPTPPSITSTGLTSPQTETHTLSPSGSGKTFTTALISNATPLPVTYASSASTGHTTPLHVTDASSVSTGHATPLPVTSPSSVSTGHTTPLPVTDTSSESTGHVTPLPVTSFSSASTGDSTPLPVTDTSSASTGHVTPLPVTSLSSASTGDTTPLPVTDTSSASTGHATSLPVTDTSSVSTGHTTPLPVTDTSSASTGHATSLPVTDTSSVSTGHTTPLHVTDASSASTGQATPLPVTSLSSVSTGDTTPLPVTSPSSASTGHATPLLVTDTSSASTGHATPLPVTDASSVSTDHATSLPVTIPSAASTGHTTPLPVTDTSSASTGQATSLLVTDTSSVSTGDTTPLPVTSTSSASTGHVTPLHVTSPSSASTGHATPLPVTSLSSASTGDTMPLPVTSPSSASTGDTTPLPVTDASSVSTGHTTPLHVTDASSASTGQATPLPVTSLSSVSTGDTTPLPVTSPSSASTGHATPLLVTDTSSASTGHATPLPVTDASSVSTDHATSLPVTIPSAASTGHTTPLPVTDTSSASTGQATSLLVTDTSSVSTGDTTPLPVTSTSSASTGHVTPLHVTSPSSASTGHATPLPVTSLSSASTGDTMPLPVTSPSSASTGDTTPLPVTDASSVSTGHTTPLPVTSPSSASTGHTTPLPVTDTSSASKGDTTPLPVTSPSSASTGHTTPLPVTDTSSASTGDTTPLPVTNASSLSTGHATPLHVTSPSSASTGHATPLPVTSTSSASTGHATPLPVTGLSSATTDDTTRLPVTDVSSASTGQATPLPVTSLSSVSTGDTTPLPVTSPSSASTGHASPLLVTDASSASTGQATPLPVTDTSSVSTAHATPLPVTGLSSASTDDTTRLPVTDVSSASTGQAIPLPVTSPSSASTGDTTPLPVTDASSASTGDTTSLPVTIPSSASSGHTTSLPVTDASSVSTGHATSLLVTDASSVSTGDTTPLPVTDTNSASTGDTTPLHVTDASSVSTGHATSLPVTSLSSASTGDTTPLPVTSPSSASSGHTTPLPVTDASSVPTGHATSLPVTDASSVSTGHATPLPVTDASSVSTGHATPLPVTDTSSVSTGQATPLPVTSLSSASTGDTTPLPVTDTSSASTGQDTPLPVTSLSSVSTGDTTPLPVTNPSSASTGHATPLLVTDASSISTGHATSLLVTDASSVSTGHATALHDTDASSLSTGDTTPLPVTSPSSTSTGDTTPLPVTETSSVSTGHATSLPVTDTSSASTGHATSLPVTDTSSASTGHATPLPVTDTSSASTGQATPLPVTSPSSASTGHAIPLLVTDTSSASTGQATPLPVTSLSSASTGDTTPLPVTDASSVSTGHATSLPVTSLSSVSTGDTTPLPVTSPSSASTGHATPLHVTDASSASTGHATPLPVTSLSSASTGDTTPLPVTSPSSASTGHATPLHVTDASSVSTGDTTPLPVTSSSSASSGHTTPLPVTDASSASTGDTTPLPVTDTSSASTGHATHLPVTGLSSASTGDTTRLPVTNVSSASTGHATPLPVTSTSSASTGDTTPLPGTDTSSVSTGHTTPLLVTDASSVSTGDTTRLPVTSPSSASTGHTTPLPVTDTPSASTGDTTPLPVTNASSLSTRHATSLHVTSPSSASTGHATSLPVTDTSAASTGHATPLPVTSTSSASTGDTTPLPVTDTYSASTGQATPLPVTSLSSVSTGDTTPLPVTSPSSASTGHATPLLVTDASSASTGQATPLPVTSLSSVSTGDTTPLPVTSPSSASTGHATSLPVTDTSSASTGDTTSLPVTDTSSAYTGDTTSLPVTDTSSSSTGDTTPLLVTETSSVSTGDTTPLPVTDTSSASTGHATPLPVTNTSSVSTGHATPLHVTSPSSASTGHTTPLPVTDASSVSTGHATSLPVTDASSVFTGHATSLPVTIPSSASSGHTTPLPVTDASSVSTGHATSLPVTDASSVSTGHATPLPVTDASSVSTGHATPLPLTSLSSVSTGDTTPLPVTDTSSASTGQATPLPVTSLSSVSTGDTTPLPVTDTSSASTGHATSLPVTDTSSASTGHATPLPDTDTSSASTGHATLLPVTDTSSASIGHATSLPVTDTSSISTGHATPLHVTSPSSASTGHATPLPVTDTSSASTGHANPLHVTSPSSASTGHATPLPVTDTSSASTGHATPLPVTSLSSVSTGDTTPLPVTSPSSASTGHTTPLPVTDTSSASTGQATALPVTSTSSASTGDTTPLPVTDTSSASTGQATPLPVTSLSSVSTGDTTPLPVTSPSSASTGHATPLLVTDASSASTGQATPLPVTSLSSVSTGDTTPLPVTSPSSASTGHATSLPVTDTSSASTGDTTSLPVTDTSSAYTGDTTSLPVTDTSSSSTGDTTPLLVTETSSVSTGHATPLLVTDASSASTGHATPLHVTSPSSASTGDTTPVPVTDTSSVSTGHATPLPVTGLSSASTGDTTRLPVTDISSASTGQATPLPVTNTSSVSTGDTMPLPVTSPSSASTGHATPLPVTSTSSASTGHATPVPVTSTSSASTGHTTPLPVTDTSSASTGDTTPLPVTSPSSASTGHTTPLHVTIPSSASTGDTSTLPVTGASSASTGHATPLPVTDTSSVSTGHATPLPVTSLSSVSTGDTTPLPVTDASSASTGQATPLPVTSLSSVSTGDTTPLLVTDASSVSTGHATPLPVTDTSSASTGDTTRLPVTDTSSASTGQATPLPVTSLSSVSTGDTTPLLVTDASSVSTGHATPLPVTDTSSASTGDTTRLPVTDTSSASTGQATPLPVTIPSSSSSGHTTPLPVTSTSSVSTGHVTPLHVTSPSSASTGHVTPLPVTSTSSASTGHATPLLVTDASSVSTGHATPLPVTDASSASTGDTTPLPVTDTSSASTGQATPLPVTSLSSVSTGDTTPLPVTDASSASTGHATPLPVTIPSSVSTGDTMPLPVTSPSSASTGHATPLPVTGLSSASTGDTTPLPVTDTSSASTRHATPLPVTDTSSASTDDTTRLPVTDVSSASTGHATPLPVTSTSSASTGDTTPLPVTDTSSVSTGHATSLPVTSRSSASTGHATPLPVTDTSSVSTGHATPLPVTSTSSVSTGHATPLPVTSPSSASTGHATPVPVTSTSSASTGDTTPLPVTNASSLSTGHATPLHVTSPSSASRGDTSTLPVTDASSASTGHATPLPLTSLSSVSTGDTTPLPVTDTSSASTGQATPLPVTSLSSVSTGDTTPLPVTIPSSASSGHTTSLPVTDASSVSTGHGTPLPVTSTSSASTGDTTPLPVTDTSSASTGHATPLPVTDTSSASTGHATPLPVTSLSSVSTGHATPLAVSSATSASTVSSDSPLKMETPGMTTPSLKTDGGRRTATSPPPTTSQTIISTIPSTAMHTRSTAAPIPILPERGVSLFPYGAGAGDLEFVRRTVDFTSPLFKPATGFPLGSSLRDSLYFTDNGQIIFPESDYQIFSYPNPLPTGFTGRDPVALVAPFWDDADFSTGRGTTFYQSNTYQAILSTDGSRSYALFLYQSGGMQWDVAQRSVEMAISKTAH

SEQ ID NO: 16463 - protein, 767 aa, Homo sapiens
MPWVEPKPRPGPEQKPKLTKPDSATGPQWYQESQESESEGKQPPPGPLAPPKSPEPSGPLASEQDAPLPEGDDAPPRPSMLDDAPRLPLELDDAPLPEEETPEPTAICRHRHRCHTDCLEGLLSRTFQWLGWQVGAHPWIFLLAPLMLTAALGTGFLYLPKDEEEDLEEHYTPVGSPAKAERRFVQGHFTTNDSYRFSASRRSTEANFVSLLVVSYSDSLLDPATFAEVSKLDGAVQDLRVAREKGSQIQYQQVCARYRALCVPPNPILYAWQVNKTLNLSSISFPAYNHGRHPLYLTGFFGGYILGGSLGMGQLLLRAKAMRLLYYLKTEDPEYDVQSKQWLTHLLDQFTNIKNILALKKIEVVHFTSLSRQLEFEATSVTVIPVFHLAYILIILFAVTSCFRFDCIRNKMCVAAFGVISAFLAVVSGFGLLLHIGVPFVIIVANSPFLILGVGVDDMFIMISAWHKTNLADDIRERMSNVYSKAAVSITITTITNILALYTGIMSSFRSVQCFCIYTGMTLLFCYFYNITCFGAFMALDGKREVVCLCWLKKADPKWPSFKKFCCFPFGSVPDEHGTDIHPISLFFRDYFGPFLTRSESKYFVVFIYVLYIISSIYGCFHVQEGLDLRNLASDDSYITPYFNVEENYFSDYGPRVMVIVTKKVDYWDKDVRQKLENCTKIFEKNVYVDKNLTEFWLDAYVQYLKGNSQDPNEKNTFMNNIPDFLSNFPNFQHDINISSSNEIISSRGFIQTTDVSSSAKKKILLF

SEQ ID NO: 16464 - protein, 360 aa, Homo sapiens
MIEDTMTLLSLLGRIMRYFLLRPETLFLLCISLALWSYFFHTDEVKTIVKSSRDAVKMVKGKVAEIMQNDRLGGLDVLEAEFSKTWEFKNHNVAVYSIQGRRDHMEDRFEVLTDLANKTHPSIFGIFDGHGGETAAEYVKSRLPEALKQHLQDYEKDKENSVLSYQTILEQQILSIDREMLEKLTVSYDEAGTTCLIALLSDKDLTVANVGDSRGVLCDKDGNAIPLSHDHKPYQLKERKRIKRAGGFISFNGSWRVQGILAMSRSLGDYPLKNLNVVIPDPDILTFDLDKLQPEFMILASDGLWDAFSNEEAVRFIKERLDEPHFGAKSIVLQSFYRGCPDNITVMVVKFRNSSKTEEQ

SEQ ID NO: 16465 - protein, 399 aa, Homo sapiens
MDFSMVAGAAAYNEKSDLEIYKAFSSEMAKRSKMLSLNNYSVPQSTREEKRENGLEARSPAINLMGFNVEEMYEAHAWIQRILSLQNHHIIENNHILYLGRKEHDILSQLQKTSSVSITEIISPGRTELEIEGARADLIEVVMNIEDMLCKVQEEMARKKERGLWRSLGQWTIQQQKTQDEMKENIIFLKCPVPPTQELLDQKKQFEKCGLQVLKVEKIDNEVLMAAFQRKKKMMEEKLHRQPVSHRLFQQVPYQFCNVVCRVGFQRMYSTPCDPKYGAGIYFTKNLKNLAEKAKKISAADKLIYVFEAEVLTGFFCQGHPLNIVPPPLSPGAIDGHDSVVDNVSSPETFVIFSGMQAIPQYLWTCTQEYVQSQDYSSGPMRPFAQHPWRGFASGSPVD

SEQ ID NO: 16466 - protein, 864 aa, Homo sapiens
MDMFSLDMIISDPAAEASRAGKKQLRGVQNPCPSARARPRHKSLNIKDKISEWEGKKEVPTPAPSRRADGQEDYLPSSTVERRSSDGVRTQVTEAKNGMRPGTESTEKERNKGAVNVGGQDPEPGQDLSQPEREVDPSWGRGREPRLGKLRFQNDPLSVLKQVKKLEQALKDGSAGLDPQLPGTCYSPHCPPDKAEAGSTLPENLGGGSGSEVSQRVHPSDLEGREPTPELVEDRKGSCRRPWDRSLENVYRGSEGSPTKPFINPLPKPRRTFKHAGEGDKDGKPGIGFRKEKRNLPPLPSLPPPPLPSSPPPSSVNRRLWTGRQKSSADHRKSYEFEDLLQSSSESSRVDWYAQTKLGLTRTLSEENVYEDILDPPMKENPYEDIELHGRCLGKKCVLNFPASPTSSIPDTLTKQSLSKPAFFRQNSERRNFKLLDTRKLSRDGTGSPSKISPPSTPSSPDDIFFNLGDPQNGRKKRKIPKLVLRINAIYEVRRGKKRVKRLSQSMESNSGKVTDENSESDSDTEEKLKAHSQRLVNVKSRLKQAPRYPSLARELIEYQERQLFEYFVVVSLHKKQAGAAYVPELTQQFPLKLERSFKFMREAEDQLKAIPQFCFPDAKDWVPVQQFTSETFSFVLTGEDGSRRFGYCRRLLPGGKGKRLPEVYCIVSRLGCFSLFSRILDEVEKRRGISPALVQPLMRSVMEAPFPALGKTILVKNFLPGSGTEVIELCRPLDSRLEHVDFESLFSSLSVRHLVCVFASLLLERRVIFIADKLSTPTSRCCHPPWSTSCARRRPSSSGCSPARCHCSGSCRWKRSLWLTSSTAGSSDRWTMRTPSCPGSFRWPWNTFWNRGTSWLVSRTKGP

SEQ ID NO: 16467 - protein, 348 aa, Homo sapiens
MSLPRFQRVNFGPYDNYIPVSELSKKSWNQQHFALLFPKPQRPGTKRRSKPSQIRDNTVSIIDEEQLRGDRRQPLWMYRSLMRISERPSVYLAARRQPLKPTRTVEVDSKAAEIGKKGEDKTTQKDTTDSESELKQGKKDSKKGKDIEKGKEEKLDAKKDSKKGKKDAEKGKDSATESEDEKGGAKKDNKKDKKDSNKGKDSATESEGEKGGTEKDSKKGKKDSKKGKDSAIELQAVKADEKKDEDGKKDANKGDESKDAKKDAKEIKKGKKDKKKPSSTDSDSKDDVKKESKKDATKDAKKVAKKDTEKESADSKKDAKKNAKKDAKKDAKKNAKKDEKKDAKKKGK

SEQ ID NO: 16468 - protein, 502 aa, Homo sapiens
MTHLNSLDVQLAQELGDFTDDDLDVVFTPKECRTLQPSLPEEGVELDPHVRDCVQTYIREWLIVNRKNQGSPEICGFKKTGSRKDFHKTLPKQTFESETLECSEPAAQAGPRHLNVLCDVSGKGPVTACDFDLRSLQPDKRLENLLQQVSAEDFEKQNEEARRTNRQAELFALYPSVDEEDAVEIRPVPECPKEHLGNRILVKLLTLKFEIEIEPLFASIALYDVKERKKISENFHCDLNSDQFKGFLRAHTPSVAASSQARSAVFSVTYPSSDIYLVVKIEKVLQQGEIGDCAEPYTVIKESDGGKSKEKIEKLKLQAESFCQRLGKYRMPFAWAPISLSSFFNVSTLEREVTDVDSVVGRSSVGERRTLAQSRRLSERALSLEENGVGSNFKTSTLSVSSFFKQEGDRLSDEDLFKFLADYKRSSSLQRRVKSIPGLLRLEISTAPEIINCCLTPEMLPVKPFPENRTRPHKEILEFPTREVYVPHTVYREVFQVSAVAH

SEQ ID NO: 16469 - protein, 479 aa, Homo sapiens
MALPQGLLTFRDVAIEFSQEEWKCLDPAQRTLYRDVMLENYRNLVSLGISSKCTMKEFSSTAQGNTEVIHTGTLQRHERHHIGDFSFQEIEKDIHNFEFQWQEDERNGHEAPMTKIKKLMGSTEQYDHRHAGNKPIKYQLGSSFHSHLSELHIFQPKGKINNQVEKSINDASSVSTAQRISCRPKTHISNNYGDNFLNYSLLTQRQEVRMREKSFQCIESGKAFNYSSLLRKHQIIHLGEKQYKCDVCDKVFIRKRYLARHRRCHTGEKPYKCNECGKSFSQMSSLTYHHRLHTGEKPYKCEECDKAFRHNSALQRHRRIHTGEKPHKCNECGKTFSQKSYLACHRSIHTGKKPYECEECDKAFSFKSNLESHRITHTGEKPYKCNDCGKTFSHMSTLTCHRRLHTGEKPYKCEECDEAFRFKSSLERHRRIHNGEKLYKCNECGKTFSQELSLTCHCRLHSGEKPCKCGECDKAYSFK

SEQ ID NO: 16470 - protein, 298 aa, Homo sapiens
MSDANLDSSKKNFLEGEVDDEESVILTLVPVKDDANMEQMEPSVSSTSDVKLEKPKKYNPGHLLQTNEQFTAPQKARCKIPALPLPTILPPINKVCRDTLRDWCQQLGLSTNGKKIEVYLRLHRHAYPEQRQDMPEMSQETRLQRCSRKRKAVTKRARLQRSYEMNERAEETNTVEVITSAPGAMLASWARIAARAVQPKALNSCSIPVSVEAFLMQASGVRWCVVHGRLLSADTKGWVRLQFHAGQAWVPTTHRRMISLFLLPACIFPSPGIEDNMLCPDCAKRNKKMMKRLMTVEK

SEQ ID NO: 16471 - protein, 1335 aa, Homo sapiens
MLSPTFVLWEVGYPLYIYGSIFIVIVIIWQVKRSHHELSSEPKRSCCRCHQKVRQRARDAASTARRRSREEAEKPQKLLSIIKSQGWLPLERSVRRILCADPCCQICNSVALEIQQLLVGENNQISLTLSGPLQGSSCLEMLSTSSMSLDQSLEFHSWHTRELSLSSVTPTLSQLTDQKSLTQSAAQSTYADGIQDYWADHLQLGQEFQVPDVLRGPNTIASSRIEKPRAPLNQEEMTQSNPSLVQGNQGQHHLNSQVSLLSLNPETLNRMHPMALHMVLPAHLPFLSPEVLRLLEVHVKKWMHFQRWGLPRRVEESLRQLMPNPPLYYQPGNDQPVSFNLKNTPQVSLHRFETISLQTWCSCVAGQPIQTFWVSEWSTMNPEQRHHCQQTPNPMALALPSPALKALSGPHPQSGGQDNDSGSDLQQKYSQLFCGLPSLHSESLVATFMGSQGLPKIENVPKPPLKDPFLFNELSFPQLLPKTSPQSAPPSSPLSPNWMSPSDHQRAQINVPFLTLAEYEALEWHLLQRQLQLQWGWPAALQRSQHTQCLMQHEPCGKAQSPETTTASQTGKSISVLTRELLFFPEHARKLLEFHIQKQLIRHRWGLPQKIQQSIQLLLTSTDQQTVSSSSTALANVSIPQPVALEANGACDVLSPIAAPVSIPRPHLLTQVKAILQSHIDSKCGQIHQGKIPACVHRSWDCRISGVLAVAPFPCIPESQFLELQTASDPDLHHKVMPWMPTALDQQQQALPGTVTEHPKLLRVLSVEAIEKLETTLRHKHLAFLSGLPALYYVALPRALAPAVTSQSVITEMEPSPVEIPAEPLIQMVSFEEQCISLGPCPQGNNESCTDVAKEFQPAVPVKGTMETLPLESQTHPTSPHSLQTHILTKLNFHLRKKVLEIQWGIPIRARKSREQTVAAPENISTQKSLESLNHQGETLLQELPIPPDTLPAPNPEGVHLKEQLANDLKAVQQNQKQSNSKAVPQGSAHSVSKISQPSGDMTEAHMPCVQVEANVNKPSLEEPCGPEPQSPSKSKDPAHVPMLAGNREDPEETKAARDHREGDAGFGRSSTREERRPAEDQRPAGMLPNKTPRGSWRWSRSFHLADPCQHSPQHHPQLKLPQLPPRVPGEKESEKDLQDSQTKLTVILEPATIPENAQTVLPQASQGQPFLSQPTQAKPLQGQTLQGQVLHGLVMPVHAQKKPSLTESSFRNKIKCFLQHINPKTKGKGHEDSMFSAAAKVAKTRKENVAKSLAPAKSPVGRSKTEKPTGCSKAQSRPAQKLVGPAFLDGPQSLDDKLRLHSRQPGSASALGYPRHCPRHCPREACANKPGHPT

SEQ ID NO: 16472 - protein, 131 aa, Homo sapiens
SGILKERYSDFVVHEIGKDGRISHLNDLSIPVDEEVIEDTKEKRTIIHQAIKSLFPGLETKTEDREGKKYIVAYHAAGKKALANPRKHSWPKSRGSYCHFVLYKENKDTMDAINVLSKYLRVKPNIFSYMG

SEQ ID NO: 16473 - protein, 4430 aa, Homo sapiens
MKGARWRRVPWVSLSCLCLCLLPHVVPGTTEDTLITGSKTAAPVTSTGSTTATLEGQSTAASSRTSNQDISASSQNHQTKSTETTSKAQTDTLTQMMTSTLFSSPSVHNVMETAPPDEMTTSFPSSVTNTLMMTSKTITMTTSTDSTLGNTEETSTAGTESSTPVTSAVSITAGQEGQSRTTSWRTSIQDTSASSQNHWTRSTQTTRESQTSTLTHRTTSTPSFSPSVHNVTGTVSQKTSPSGETATSSLCSVTNTSMMTSEKITVTTSTGSTLGNPGETSSVPVTGSLMPVTSAALVTFDPEGQSPATFSRTSTQDTTAFSKNHQTQSVETTRVSQINTLNTLTPVTTSTVLSSPSGFNPSGTVSQETFPSGETTTSSPSSVSNTFLVTSKVFRMPTSRDSTLGNTEETSLSVSGTISAITSKVSTIWWSDTLSTALSPSSLPPKISTAFHTQQSEGAETTGRPHERSSFSPGVSQEIFTLHETTTWPSSFSSKGHTTWSQTELPSTSTGAATRLVTGNPSTGTAGTIPRVPSKVSAIGEPGEPTTYSSHSTTLPKTTGAGAQTQWTQETGTTGEALLSSPSYSVTQMIKTATSPSSSPMLDRHTSQQITTAPSTNHSTIHSTSTSPQESPAVSQRGHTQAPQTTQESQTTRSVSPMTDTKTVTTPGSSFTASGHSPSEIVPQDAPTISAATTFAPAPTGDGHTTQAPTTALQAAPSSHDATLGPSGGTSLSKTGALTLANSVVSTPGGPEGQWTSASASTSPDTAAAMTHTHQAESTEASGQTQTSEPASSGSRTTSAGTATPSSSGASGTTPSGSEGISTSGETTRFSSNPSRDSHTTQSTTELLSASASHGAIPVSTGMASSIVPGTFHPTLSEASTAGRPTGQSSPTSPSASPQETAAISRMAQTQRTRTSRGSDTISLASQATDTFSTVPPTPPSITSTGLTSPQTETHTLSPSGSGKTFTTALISNATPLPVTYASSASTGHTTPLHVTDASSVSTGHATPLPVTSPSSVSTGHTTPLPVTDTSSESTGHVTPLPVTSFSSASTGDSTPLPVTDTSSASTGHVTPLPVTSLSSASTGDTTPLPVTDTSSASTGHATSLPVTDTSSVSTGHTTPLPVTDTSSASTGHATSLPVTDTSSVSTGHTTPLHVTDASSASTGQATPLPVTSLSSVSTGDTTPLPVTSPSSASTGHATPLLVTDTSSASTGHATPLPVTDASSVSTDHATSLPVTIPSAASTGHTTPLPVTDTSSASTGQATSLLVTDTSSVSTGDTTPLPVTSTSSASTGHVTPLHVTSPSSASTGHATPLPVTSLSSASTGDTMPLPVTSPSSASTGDTTPLPVTDASSVSTGHTTPLHVTDASSASTGQATPLPVTSLSSVSTGDTTPLPVTSPSSASTGHATPLLVTDTSSASTGHATPLPVTDASSVSTDHATSLPVTIPSAASTGHTTPLPVTDTSSASTGQATSLLVTDTSSVSTGDTTPLPVTSTSSASTGHVTPLHVTSPSSASTGHATPLPVTSLSSASTGDTMPLPVTSPSSASTGDTTPLPVTDASSVSTGHTTPLPVTSPSSASTGHTTPLPVTDTSSASKGDTTPLPVTSPSSASTGHTTPLPVTDTSSASTGDTTPLPVTNASSLSTGHATPLHVTSPSSASTGHATPLPVTSTSSASTGHATPLPVTGLSSATTDDTTRLPVTDVSSASTGQATPLPVTSLSSVSTGDTTPLPVTSPSSASTGHASPLLVTDASSASTGQATPLPVTDTSSVSTAHATPLPVTGLSSASTDDTTRLPVTDVSSASTGQAIPLPVTSPSSASTGDTTPLPVTDASSASTGDTTSLPVTIPSSASSGHTTSLPVTDASSVSTGHATSLLVTDASSVSTGDTTPLPVTDTNSASTGDTTPLHVTDASSVSTGHATSLPVTSLSSASTGDTTPLPVTSPSSASSGHTTPLPVTDASSVPTGHATSLPVTDASSVSTGHATPLPVTDASSVSTGHATPLPVTDTSSVSTGQATPLPVTSLSSASTGDTTPLPVTDTSSASTGQDTPLPVTSLSSVSTGDTTPLPVTNPSSASTGHATPLLVTDASSISTGHATSLLVTDASSVSTGHATALHDTDASSLSTGDTTPLPVTSPSSTSTGDTTPLPVTETSSVSTGHATSLPVTDTSSASTGHATSLPVTDTSSASTGHATPLPVTDTSSASTGQATPLPVTSPSSASTGHAIPLLVTDTSSASTGQATPLPVTSLSSASTGDTTPLPVTDASSVSTGHATSLPVTSLSSVSTGDTTPLPVTSPSSASTGHATPLHVTDASSASTGHATPLPVTSLSSASTGDTTPLPVTSPSSASTGHATPLHVTDASSVSTGDTTPLPVTSSSSASSGHTTPLPVTDASSASTGDTTPLPVTDTSSASTGHATHLPVTGLSSASTGDTTRLPVTNVSSASTGHATPLPVTSTSSASTGDTTPLPGTDTSSVSTGHTTPLLVTDASSVSTGDTTRLPVTSPSSASTGHTTPLPVTDTPSASTGDTTPLPVTNASSLSTRHATSLHVTSPSSASTGHATSLPVTDTSAASTGHATPLPVTSTSSASTGDTTPLPVTDTYSASTGQATPLPVTSLSSVSTGDTTPLPVTSPSSASTGHATPLLVTDASSASTGQATPLPVTSLSSVSTGDTTPLPVTSPSSASTGHATSLPVTDTSSASTGDTTSLPVTDTSSAYTGDTTSLPVTDTSSSSTGDTTPLLVTETSSVSTGDTTPLPVTDTSSASTGHATPLPVTNTSSVSTGHATPLHVTSPSSASTGHTTPLPVTDASSVSTGHATSLPVTDASSVFTGHATSLPVTIPSSASSGHTTPLPVTDASSVSTGHATSLPVTDASSVSTGHATPLPVTDASSVSTGHATPLPLTSLSSVSTGDTTPLPVTDTSSASTGQATPLPVTSLSSVSTGDTTPLPVTDTSSASTGHATSLPVTDTSSASTGHATPLPDTDTSSASTGHATLLPVTDTSSASIGHATSLPVTDTSSISTGHATPLHVTSPSSASTGHATPLPVTDTSSASTGHANPLHVTSPSSASTGHATPLPVTDTSSASTGHATPLPVTSLSSVSTGDTTPLPVTSPSSASTGHTTPLPVTDTSSASTGQATALPVTSTSSASTGDTTPLPVTDTSSASTGQATPLPVTSLSSVSTGDTTPLPVTSPSSASTGHATPLLVTDASSASTGQATPLPVTSLSSVSTGDTTPLPVTSPSSASTGHATSLPVTDTSSASTGDTTSLPVTDTSSAYTGDTTSLPVTDTSSSSTGDTTPLLVTETSSVSTGHATPLLVTDASSASTGHATPLHVTSPSSASTGDTTPVPVTDTSSVSTGHATPLPVTGLSSASTGDTTRLPVTDISSASTGQATPLPVTNTSSVSTGDTMPLPVTSPSSASTGHATPLPVTSTSSASTGHATPVPVTSTSSASTGHTTPLPVTDTSSASTGDTTPLPVTSPSSASTGHTTPLHVTIPSSASTGDTSTLPVTGASSASTGHATPLPVTDTSSVSTGHATPLPVTSLSSVSTGDTTPLPVTDASSASTGQATPLPVTSLSSVSTGDTTPLLVTDASSVSTGHATPLPVTDTSSASTGDTTRLPVTDTSSASTGQATPLPVTSLSSVSTGDTTPLLVTDASSVSTGHATPLPVTDTSSASTGDTTRLPVTDTSSASTGQATPLPVTIPSSSSSGHTTPLPVTSTSSVSTGHVTPLHVTSPSSASTGHVTPLPVTSTSSASTGHATPLLVTDASSVSTGHATPLPVTDASSASTGDTTPLPVTDTSSASTGQATPLPVTSLSSVSTGDTTPLPVTDASSASTGHATPLPVTIPSSVSTGDTMPLPVTSPSSASTGHATPLPVTGLSSASTGDTTPLPVTDTSSASTRHATPLPVTDTSSASTDDTTRLPVTDVSSASTGHATPLPVTSTSSASTGDTTPLPVTDTSSVSTGHATSLPVTSRSSASTGHATPLPVTDTSSVSTGHATPLPVTSTSSVSTGHATPLPVTSPSSASTGHATPVPVTSTSSASTGDTTPLPVTNASSLSTGHATPLHVTSPSSASRGDTSTLPVTDASSASTGHATPLPLTSLSSVSTGDTTPLPVTDTSSASTGQATPLPVTSLSSVSTGDTTPLPVTIPSSASSGHTTSLPVTDASSVSTGHGTPLPVTSTSSASTGDTTPLPVTDTSSASTGHATPLPVTDTSSASTGHATPLPVTSLSSVSTGHATPLAVSSATSASTVSSDSPLKMETPGMTTPSLKTDGGRRTATSPPPTTSQTIISTIPSTAMHTRSTAAPIPILPERGEAIQEFPSSPMGQAPGTWSSSGGPWTSPPHSSSRRLASPLAPLSVIPSTSQTMARSSSQSQTTRFSPTPTHSQQASQAGTLWPWWLRSGTMLTSPLVGGPHFIRNTRRSMVNTAC

SEQ ID NO: 16474 - protein, 160 aa, Homo sapiens
EYQLLLQVTYRDSKEKRDLRNFLKLLKPPLLWSHGLIRIIRAKATTDCNSLNGVLQCTCEDSYTWFPPSCLDPQNCYLHTAGALPSCECHLNNLSQSVNFCERTKIWGTFKINERFTNDLLNSSSAIYSKYANGIEIQLKKAYERIQGFESVQVTQFRPV

SEQ ID NO: 16475 - protein, 248 aa, Homo sapiens
MEPVEKERASTPYIEKQVDHLIKKATRPEELLELLGGSHDLDSNQAAMVLIRLSHLLSEKPEDKGLLIQDAHFHQLLCLLNSQIASVWHGTLSKLLGSLYALGIPKASKELQSVEQEVRWRMRKLKYKHLAFLAESCATLSQEQHSQELLAELLTHLERRWTEIEDSHTLVTVMMKVGHLSEPLMNRLEDKCLELVEHFGPNELRKVLVMLAAQSRRSVPLLRAISYHLVQKPFSLTKDVLLDVAYAY

SEQ ID NO: 16476 - protein, 353 aa, Homo sapiens
MRAAPLLLARAASLSLGFLFLLFFWLDRSVLAKELKFVTLVFRHGDRSPIDTFPTDPIKESSWPQGFGQLTQLGMEQHYELGEYIRKRYRKFLNESYKHEQVYIRSTDVDRTLMSAMTNLAALFPPEGVSIWNPILLWQPIPVHTVPLSEDQDFIATLGKLSGLHGQDLFGIWSKVYDPLYCESVHNFTLPSWATEDTMTKLRELSELSLLSLYGIHKQKEKSRLQGGVLVNEILNHMKRATQIPSYKKLIMYSAHDTTVSGLQMALDVYNGLLPPYASCHLTELYFEKGEYFVEMYYRNETQHEPYPLMLPGCSPSCPLERFAELVGPVIPQDWSTECMTTNSHQGTEDSTD

SEQ ID NO: 16477 - protein, 186 aa, Homo sapiens
KTTPHPEVPQTKLAPKVPQRTHRPHPKPKTTLSPEELQTELVPATIFEPVSPIKEAPGTTFVPVTDLEPVTFRTEIPATTLATKTSKRTRPPRPRPKTTPSPQAPETKPAPKQTPRAPPKPKTSPRPRIPQTQPVPKVPQRVTAKPKTSPSPEVSYTTPAPLETRGIPFIPMISPSPSQEELQTTL

SEQ ID NO: 16478 - protein, 206 aa, Homo sapiens
MDTIFLWSLLLLFFGSQASRCSAQKNTEFAVDLYQEVSLSHKDNIIFSPLGITLVLEMVQLGAKGKAQQQIRQTLKQQETSAGEEFFVLKSFFSAISEKKQEFTFNLANALYLQEGFTVKEQYLHGNKEFFQSAIKLVDFQDAKACAEMISTWVERKTDGKIKDMFSGEEFGPLTRLVLVNAIYFKGDWKQKFRKEDTQLINFTKK

SEQ ID NO: 16479 - protein, 416 aa, Homo sapiens
MAEEQGRERDSVPKPSVLFLHPDLGVGGAERLVLDAALALQARGCSVKIWTAHYDPGHCFAESRELPVRCAGDWLPRGLGWGGRGAAVCAYVRMVFLALYVLFLADEEFDVVVCDQVSACIPVFRLARRRKKILFYCHFPDLLLTKRDSFLKRLYRAPIDWIEEYTTGMADCILVNSQFTAAVFKETFKSLSHIDPDVLYPSLNVTSFDSVVPEKLDDLVPKGKKFLLLSINRYERKKNLTLALEALVQLRGRLTSQDWERVHLIVAGGYDERVLENVEHYQELKKMVQQSDLGQYVTFLRSFSDKQKISLLHSCTCVLYTPSNEHFGIVPLEAMYMQCPVIAVNSGGPLESIDHSVTGFLCEPDPVHFSEAIEKFIREPSLKATMGLAGRARVKEKFSPEAFTEQLYRYVTKLLV

SEQ ID NO: 16480 - protein, 1030 aa, Homo sapiens
YAEQLVVELKDIIRQKDVQLQQKDEALQEERKAADNKIKKLKLHAKAKLTSLNKYIEEMKAQGGTVLPTEPQSEEQLSKHDKSSTEEEMEIEKIKHKLQEKEELISTLQAQLTQAQAEQPAQKLRVLQRKLEEHEESLVGRAQVVDLLQQELTAAEQRNQILSQQLQQMEAEHNTLRNTVETEREESKILLEKMELEVAERKLSFHNLQEEMHHLLEQFEQAGQAQAELESRYSALEQKHKAEMEEKTSHILSLQKTGQELQSACDALKDQNSKLLQDKNEQAVQSAQTIQQLEDQLQQKSKEISQFLNRLPLQQHETASQTSFPDVYNEGTQAVTEENIASLQKRVVELENEKGALLLSSIELEELKAENEKLSSQITLLEAQNRTGEADREVSEISIVDIANKRSSSAEESGQDVLENTFSQKHKELSVLLLEMKEAQEEIAFLKLQLQGKRAEEADHEVLDQKEMKQMEGEGIAPIKMKVFLEDTGQDFPLMPNEESSLPAVEKEQASTEHQSRTSEEISLNDAGVELKSTKQDGDKSLSAVPDIGQCHQDELERLKSQILELELNFHKAQEIYEKNLDEKAKEISNLNQLIEEFKKNADNNSSAFTALSEERDQLLSQVKELSMVTELRAQVKQLEMNLAEAERQRRLDYESQTAHDNLLTEQIHSLSIEAKSKDVKIEVLQNELDDVQLQFSEQSTLIRSLQSQLQNKESEVLEGAERVRHISSKVEELSQALSQKELEITKMDQLLLEKKRDVETLQQTIEEKDQQVTEISFSMTEKMVQLNEEKFSLGVEIKTLKEQLNLLSRAEEAKKEQVEEDNEVSSGLKQNYDEMSPAGQISKEELQHEFDLLKKENEQRKRKLQAALINRKELLQRVSRLEEELANLKDESKKEIPLSETERGEVEEDKENKEYSEKCVTSKCQEIEIYLKQTISEKEVELQHIRKDLEEKLAAEEQFQALVKQMNQTLQDKTNQIDLLQAEISENQAIIQKLITSNTDASDGDSVALVKETVVISPPCTGSSEHWKP

SEQ ID NO: 16481 - protein, 797 aa, Homo sapiens
MEQLDFETGPNIFDLQIYVKDEVGVTDLQVLTVQVTDVNEPPQFQGNLAEGLHLYIVERANPGFIYQVEAFDPEDTSRNIPLSYFLISPPKSFRMSANGTLFSTTELDFEAGHRSFHLIVEVRDSGGLKASTELQVNIVNLNDEVPRFTSPTRVYTVLEELSPGTIVANITAEDPDDEGFPSHLLYSITTVSKYFMINQLTGTIQVAQRIDRDAGELRQNPTISLEVLVKDRPYGGQENRIQITFIVEDVNDNPATCQKFTFSIMVPERTAKGTLLLDLNKFCFDDDSEAPNNRFNFTMPSGVGSGSRFLQDPAGSGKIVLIGDLDYENPSNLAAGNKYTVIIQVQDVAPPYYKNNVYVYILTSPENEFPLIFDRPSYVFDVSERRPARTRVGQVRATDKDLPQSSLLYSISTGGASLQYPNVFWINPKTGELQLVTKVDCETTPIYILRIQATNNEDTSSVTVTVNILEENDEKPICTPNSYFLALPVDLKVGTNIQNFKLTCTDLDSSPRSFRYSIGPGNVNNHFTFSPNAGSNVTRLLLTSRFDYAGGFDKIWDYKLLVYVTDDNLMSDRKKAEALVETGTVTLSIKVIPHPTTIITTTPRPRVTYQVLRKNVYSPSAWYVPFVITLGSILLLGLLVYLVVLLAKAIHRHCPCKTGKNKEPLTKKGETKTAERDVVVETIQMNTIFDGEAIDPVTGETYEFNSKTGARKWKDPLTQMPKWKESSHQGAAPRRVTAGEGMGSLRSANWEEDELSGKAWAEDAGLGSRNEGGKLGNPKNRNPAFMNRAYPKPHPGK

SEQ ID NO: 16482 - protein, 711 aa, Homo sapiens
MALEKLEDAFNKSKQECYSLKCNLEKERMTTKQLSQELESLKVRIKELEAIESRLEKTEFTLKEDLTKLKTLTVMFVDERKTMSEKLKKTEDKLQAASSQLQVEQNKVTTVTEKLIEETKRALKSKTDVEEKMYSVTKERDDLKNKLKAEEEKGNDLLSRVNMLKNRLQSLEAIEKDFLKNKLNQDSGKSTTALHQENNKIKELSQEVERLKLKLKDMKAIEDDLMKTEDEYETLERRYANERDKAQFLSKELEHVKMELAKYKLAEKTETSHEQWLFKRLQEEEAKSGHLSREVDALKEKIHEYMATEDLICHLQGDHSVLQKKLNQQENRNRDLGREIENLTKELERYRHFSKSLRPSLNGRRISDPQVFSKEVQTEAVDNEPPDYKSLIPLERAVINGQLYEESENQDEDPNDEGSVLSFKCSQSTPCPVNRKLWIPWMKSKEGHLQNGKMQTKPNANFVQPGDLVLSHTPGQPLHIKVTPDHVQNTATLEITSPTTESPHSYTSTAVIPNCGTPKQRITILQNASITPVKSKTSTEDLMNLEQGMSPITMATFARAQTPESCGSLTPERTMSPIQVLAVTGSASSPEQGRSPEPTEISAKHAIFRVSPDRQSSWQFQRSNSNSSSVITTEDNKIHIHLGSPYMQAVASPVRPASPSAPLQDNRTQGLINGALNKTTNKVTSSITITPTATPLPRQSQITVEPLLLPH

SEQ ID NO: 16483 - protein, 79 aa, Homo sapiens
MACLGFQRHKAQLNLATRTWPCTLLFFLLFIPVFCKAMHVAQPAVVLASSRGIASFVSKEKKPSYNRGLCENAPNRARM

SEQ ID NO: 16484 - protein, 163 aa, Homo sapiens
MMVRWALLCEFWGDIAKEFYWKTPCPGPFLRYNFDVTKGKIFIEWMKGATTNICYNVLDRNVHEKKLGDKVAFYWEGNEPGETTQITYHQLLVQVCQFSNVLRKQGIQKGDRVAIYMPMIPELVVAMLACARIGALHSIVFAGFSSESLCERILDSSCSLLIT

SEQ ID NO: 16485 - protein, 294 aa, Homo sapiens
MAGILASGLGVLAHLERLETQVSRSRKQSEELQSVQAQEGALGTKIHKLRRLRDELRAVVRHRRASVKACIANVEPNQTVEINEQEALEEKLENVKAILQAYHFTGLSGKLTSRGVCVCISTAFEGNLLDSYFVDLVIQKPLRIHHHSVPVFIPLEEIAAKYLQTNIQHFLFSLCEYLNAYSGRKYQADRLQSDFAALLTGPLQRNPLCNLLSFTYKLDPGGQSFPFCARLLYKDLTATLPTDVTVTCQGVEVLSTSWEEQRASHETLFCTKPLHQVFASFTRKGEKLDMSLVS

SEQ ID NO: 16486 - protein, 159 aa, Homo sapiens
LMVDRIFSFEINVSVAIITFASEPKVLMSVLNDNSRDMTEVISSLENANYKDHENGTGTNTYAALNSVYLMMNNQMRLLGMETMAWQEIRHAIILLTDGKSNMGGSPKTAVDHIREILNINQKRNDYLAPKPQESGDFPLPHQTSMPSGWASWMWTGEN

SEQ ID NO: 16487 - protein, 311 aa, Homo sapiens
MNASHPETNLPVGYPPQYPPTAFQGPPGYSGYPGPQVSYPPPPAGHSGPGPAGFPVPNQPVYNQPVYNQPVGAAGVPWMPAPQPPLNCPPGLEYLSQIDQILIHQQIELLEVLTGFETNNKYEIKNSFGQRVYFAAEDTDCCTRNCCGPSRPFTLRIIDNMGQEVITLERPLRCSSCCCPCCLQEIEIQAPPGVPIGYVIQTWHPCLPKFTIQNEKREDVLKISGPCVVCSCCGDVDFEIKSLDEQCVVGKISKHWTGILREAFTDADNFGIQFPLDLDVKMKAVMIGACFLIDFMFFESTGSQEQKSGVW

SEQ ID NO: 16488 - protein, 244 aa, Homo sapiens
MNGRSCSMSLHRTSGTPQGPRMVSGHHIPAIRAHSGTPGPSPCGSTSSPTMASLANNLHLKMPSGGGMAPQNNVAESRIHLPALSPRRQMLTNGKPRFQVTQAGGMSGSHTLKPKQQEFGSPFPPNPGKGALGFGPQCKSIGKGSCNNLVVTSSPMMVQRLGLISPPASQVSTACNQISPSLQRAMNAANLNIPPSDTRSLISRESLASTTLSLTESQSASSMKQEWSQGYRALPSLSNHGSQN

SEQ ID NO: 16489 - protein, 504 aa, Homo sapiens
AQNDGQVLFALSSAVFGQRLDETVAYEQKFGPHLVPILVEKCAEFILEHGRNEEGIFRLPGQDNLVKQLRDAFDAGERPSFDRDTDVHTVASLLKLYLRDLPEPVVPWSQYEGFLLCGQLTNADEAKAQQELMKQLSILPRDNYSLLSYICRFLHEIQLNCAVNKMSVDNLATVIGVNLIRSKVEDPAVIMRGTPQIQRVMTMMIRDHEVLFPKSKDIPLSPPAQKNDPKKAPVARSSVGWDATEDLRISRTDSFSSMTSDSDTTSPTGQQPSDAFPEDSSKVPREKPGDWKMQSRKRTQTLPNRKCFLTSAFQGANSSKMEIFKNEFWSPSSEAKAGEGHRRTMSQDLRQLSDSQRTSTYDNVPSLPGSPGEEASALSSQACDSKGDTLASPNSETGPGKKNSGEEEIDSLQRMVQELRKEIETQKQMYEEQIKNLEKENYDVWAKVVRLNEELEKEKKKSAALEISLRNMERSREDVEKRNKALEEEVKEFVKSMKEPKTEA

SEQ ID NO: 16490 - protein, 445 aa, Homo sapiens
MTEVKCQHYKKKRTEQEETIASLQMEVCRLKKEEEDRIVTQNRVFAYLCKRVPHTVLDRQLLCLIDYYESKIRKIHTQRQYKEDESQSEEENDYRNLDASPTYKGLLMSLQNQLKESKSKIDALSSEKLNLQKDLETRPTQHELRLYKQQVKKLEKALKKNVKLQELINHKKAEDTEKKDEPSKYNQQQALIDQRYFQVLCSINSIIHNPRAPVIIYKQTKGGVQNFNKDLVQDCGFEHLVPVIEMWADQLTSLKDLYKSLKTLSAELVPWLNLKKQDENEGIKVEDLLFIVDTMLEEVENKEKDSNMPHFQTLQAIVSHFQKLFDVPSLNGVYPRMNEVYTRLGEMNNAVRNLQELLELDSSSSLCVLVSTVGKLCRLINEDVNEQVMQVLGPEDLQSIIYKLEEHEEFFPAFQAFTNDLLEILEIDDLDAIVPAVKKLKVLSY

SEQ ID NO: 16491 - protein, 935 aa, Homo sapiens
MKPPRPVRTCSKVLVLLSLLAIHQTTTAEKNGIDIYSLTVDSRVSSRFAHTVVTSRVVNRANTVQEATFQMELPKKAFITNFSMIIDGMTYPGIIKEKAEAQAQYSAAVAKGKSAGLVKATGRNMEQFQVSVSVAPNAKITFELVYEELLKRRLGVYELLLKVRPQQLVKHLQMDIHIFEPQGISFLETESTFMTNQLVDALTTWQNKTKAHIRFKPTLSQQQKSPEQQETVLDGNLIIRYDVDRAISGGSIQIENGYFVHYFAPEGLTTMPKNVVFVIDKSGSMSGRKIQQTREALIKILDDLSPRDQFNLIVFSTEATQWRPSLVPASAENVNKARSFAAGIQALGGTNINDAMLMAVQLLDSSNQEERLPEGSVSLIILLTDGDPTVGETNPRSIQNNVREAVSGRYSLFCLGFGFDVSYAFLEKLALDNGGLARRIHEDSDSALQLQDFYQEVANPLLTAVTFEYPSNAVEEVTQNNFRLLFKGSEMVVAGKLQDRGPDVLTATVSGKLPTQNITFQTESSVAEQEAEFQSPKYIFHNFMERLWAYLTIQQLLEQTVSASDADQQALRNQALNLSLAYSFVTPLTSMVVTKPDDQEQSQVAEKPMEGESRNRNVHSGSTFFKYYLQGAKIPKPGLDHTEASFSPRRGWNRQAGAAGSRMNFRPGVLSSRQLGLPGPPDVPDHAAYHPFRRLAILPASAPPATSNPDPAVSRVMNMKIEETTMTTQTPAPIQAPSAILPLPGQSVERLCVDPRHRQGPVNLLSDPEQGVEVTGQYEREKAGFSWIEVTFKNPLVWVHASPEHVVVTRNRRSSAYKWKETLFSVMPGLKMTMDKTGLLLLSDPDKVTIGLLFWDGRGEGLRLLLRDTDRFSSHVGGTLGQFYQEVLWGSPAASDDGRRTLRVQGNDHSATRERRLDYQEGPPGVEISCWSVEL

SEQ ID NO: 16492 - protein, 634 aa, Homo sapiens
MLSSRDQRVVTSEDQVQEGTKVLKLKTKMADKENMKRPAESKNNTVVGKHCIPLKPSNELTNSTVVIDTHKPKDSNQTPHLLLTEDDPQSQHMTLSQAFHLKNNSKKKQMTTEKQKQDANMPKKPVLGSYRGQIVQSKINSFRKPLQVKDESSAATKKLSATIPKATKPQPVNTSSVTVKSNRSSNMTATTKFVSTTSQNTQLVRPPIRSHHSNTRDTVKQGISRTSANVTIRKGPHEKELLQSKTALSSVKTSSSQGIIRNKTLSRSIASEVIARPASLSNDKLMEKSEPVDQRRHTAGKAIVDSRSAQPKETSEERKARLSEWKAGKGRVLKRPPNSVVTQHEPAGQNEKPVGSFWTTMAEEDEQRLFTEKVNNTFSECLNLINEGCPKEDILVTLNDLIKNIPDAKKLVKYWICLALIEPITSPIENIIAIYEKAILAGAQPIEEMRHTIVDILTMKSQEKANLGENMEKSCASKEEVKEVSIEDTGVDVDPEKLEMESKLHRNLLFQDCEKEQDNKTKDPTHDVKTPNTETRTSCLIKYNVSTTPYLQSVKKKVQFDGTNSAFKELKFLTPVRRSRRLQEKTSKLPDMLKDHYPCVSSLEQLTELGRETDAFVCRPNAALCRVYYEADTT

SEQ ID NO: 16493 - protein, 403 aa, Homo sapiens
MKPVKKKKTEEPELEPLCCCEYIDRNGEKNHVATCLCDCQDLDEGCDRWITCKSLQPETCERIMDTISDRLRIPWLRGAKKVNISIIPPLVLLPVFLHVASWHFLLGVVVLTSLPVLALWYYYLTHRRKEQTLFFLSLGLFSLGYMYYVFLQEVVPKGRVGPVQLAVLTCGLFLILLALHRAKKNPGYLSNPASGDRSLSSSQLECLSRKGQEKTKGFPGADMSGSLNNRTTKDDPKGSSKMPAGSPTKAKEDWCAKCQLVRPARAWHCRICGICVRRMDHHCVWINSCVGESNHQAFILALLIFLLTSVYGITLTLDTICRDRSVFTALFYCPGVYANYSSALSFTCVWYSVIITAGMAYIFLIQLINISYNVTEREVQQALRQKTGRRLLCGLIVDTGLLG

SEQ ID NO: 16494 - protein, 443 aa, Homo sapiens
KYGGFYINTGTLQFRQASDTEEDDITDNQKHKPPKVPKIKEDDIEMKKRKRKEEGEKEKKPRKKVPKQLGVVALNSHKSEKKKKRYKDSLSLAAMIRKFQKEKDALKKESNPKVPVTLSTPSLNKPPCAAAALGNDVPDLNLSSGDPDLPIFVSTNEHELFQEAENALEMLDDFDFDRLLDAASDGSPLSESGGENGTTTQPTYTSQVMPKVVPTLPEGLPVLLEKRIEDLRVAAKLFDEEGRKKFFTQDMNNILLDIELQLQELGPVIRSGVYSHLEAFVPCNKETLVKRLKKLHLNVQDDRLREPLQKLKLAVSNVMPEQLFKYQEDCQARSQAKCAKLQTDEEREKNGSEEDDDEKPGKRVIGPRKKFHWDDTIRTLLCNLVEIKLGCYELEPNKSQSAEDYLKSFMETEVKPLWPKGWMQARMLFKESRSVHNHLTSAP

SEQ ID NO: 16495 - protein, 1256 aa, Homo sapiens
MPLPDGARTPGGVCREARGGGYTNRTFEFDDGQCAPRRPCAGDGALLDTAGFKMSDLDSEVLPLPPRYRFRDLLLGDPSFQNDDRVQVEFYVNENTFKERLKLFFIKNQRSSLRIRLFNFSLKLLTCLLYIVRVLLDDPALGIGCWGCPKQNYSFNDSSSEINWAPILWVERKMTLWAIQVIVAIISFLETMLLIYLSYKGNIWEQIFRVSFVLEMINTLPFIITIFWPPLRNLFIPVFLNCWLAKHALENMINDFHRAILRTQSAMFNQVLILFCTLLCLVFTGTCGIQHLERAGENLSLLTSFYFCIVTFSTVGYGDVTPKIWPSQLLVVIMICVALVVLPLQFEELVYLWMERQKSGGNYSRHRAQTEKHVVLCVSSLKIDLLMDFLNEFYAHPRLQDYYVVILCPTEMDVQVRRVLQIPLWSQRVIYLQGSALKDQDLMRAKMDNGEACFILSSRNEVDRTAADHQTILRAWAVKDFAPNCPLYVQILKPENKFHVKFADHVVCEEECKYAMLALNCICPATSTLITLLVHTSRGQEGQESPEQWQRMYGRCSGNEVYHIRMGDSKFFREYEGKSFTYAAFHAHKKYGVCLIGLKREDNKSILLNPGPRHILAASDTCFYINITKEENSAFIFKQEEKRKKRAFSGQGLHEGPARLPVHSIIASMGTVAMDLQGTEHRPTQSGGGGGGSKLALPTENGSGSRRPSIAPVLELADSSALLPCDLLSDQSEDEVTPSDDEGLSVVEYVKGYPPNSPYIGSSPTLCHLLPVKAPFCCLRLDKGCKHNSYEDAKAYGFKNKLIIVSAETAGNGLYNFIVPLRAYYRSRKELNPIVLLLDNKPDHHFLEAICCFPMVYYMEGSVDNLDSLLQCGIIYADNLVVVDKESTMSAEEDYMADAKTIVNVQTMFRLFPSLSITTELTHPSNMRFMQFRAKDSYSLALSKLEKRERENGSNLAFMFRLPFAAGRVFSISMLDTLLYQSFVKDYMITITRLLLGLDTTPGSGYLCAMKITEGDLWIRTYGRLFQKLCSSSAEIPIGIYRTESHVFSTSEPHDLRAQSQISVNVEDCEDTREVKGPWGSRAGTGGSSQGRHTGGGDPAEHPLLRRKSLQWARRLSRKAPKQAGRAAAAEWISQQRLSLYRRSERQELSELVKNRMKHLGLPTTGYEDVANLTASDVMNRVNLGYLQDEMNDHQNTLSYVLINPPPDTRLEPSDIVYLIRSDPLAHVASSSQSRKSSCSHKLSSCNPETRDETQL

SEQ ID NO: 16496 - protein, 261 aa, Homo sapiens
MNPLLILTFVAAALAAPFDDDDKIVGGYNCEENSVPYQVSLNSGYHFCGGSLINEQWVVSAGHCYKSAIKSKFSGRGCEYHRIQVRLGEHNIEVLEGNEQFINAAKIIRHPQYDRKTLNNDIMLIKLSSRAVINARVSTISLPTAPPATGTKCLISGWGNTASSGADYPDELQCLDAPVLSQAKCEASYPGKITSNMFCVGFLEGGKDSCQGDSGGPVVCNGQLQGVVSWGDGCAQKNKPGVYTKVYNYVKWIKNTIAANS

SEQ ID NO: 16497 - protein, 601 aa, Homo sapiens
MMQESGTETKSNGSAIQNGSGGSNHLLECGGLREGRSNGETPAVDIGAADLAHAQQQQQQALQVARQLLLQQQQQQQVSGLKSPKRNDKQPALQQQQVATQQLAFQQQLLQMQQLQQQHLLSLQRQGLLTIQPGQPALPLQPLAQGMIPTELQQLWKEVTSAHTAEETTGNNHSSLDLTTTCVSSSAPSKTSLIMNPHASTNGQLSVHTPKRESLSHEEHPHSHPLYGHGVCKWPGCEAVCEDFQSFLKHLNSEHALDDRSTAQCRVQMQVVQQLELQLAKDKERLQAMMTHLHVKSTEPKAAPQPLNLVSSVTLSKSASEASPQSLPHTPTTPTAPLTPVTQGPSVITTTSMHTVGPIRRRYSDKYNVPISSADIAQNQEFYKNAEVRPPFTYASLIRQAILESPEKQLTLNEIYNWFTRMFAYFRRNAATWKNAVRHNLSLHKCFVRVENVKGAVWTVDEVEFQKRRPQKISGNPSLIKNMQSSHAYCTPLNAALQASMAENSIPLYTTASMGNPTLGNLASAIREELNGAMEHTNSNESDSSPGRSPMQAVHPVHVKEEPLDPEEAEGPLSLVTTANHSPDFDHDRDYEDEPVNEDME

SEQ ID NO: 16498 - protein, 418 aa, Homo sapiens
MHGVCKEGDNCRYSHDLSDSPYSVVCKYFQRGYCIYGDRCRYEHSKPLKQEEATATELTTKSSLAASSSLSSIVGPLVEMNTGEAESRNSNFATVGAGSEDWVNAIEFVPGQPYCGRTAPSCTEAPLQGSVTKEESEKEQTAVETKKQLCPYAAVGECRYGENCVYLHGDSCDMCGLQVLHPMDAAQRSQHIKSCIEAHEKDMELSFAVQRSKDMVCGICMEVVYEKANPSERRFGILSNCNHTYCLKCIRKWRSAKQFESKIIKSCPECRITSNFVIPSEYWVEEKEEKQKLILKYKEAMSNKACRYFDEGRGSCPFGGNCFYKHAYPDGRREEPQRQKVGTSSRYRAQRRNHFWELIEERENSNPFDNDEEEVVTFELGEMLLMLLAAGGDDELTDSEDEWDLFHDELEDFYDLDL

SEQ ID NO: 16499 - protein, 249 aa, Homo sapiens
MEMGRRIHLELRNRTPSDVKELVLDNSRSNEGKLEGLTDEFEELEFLSTINVGLTSIANLPKLNKLKKLELSDNRVSGGLEVLAEKCPNLTHLNLSGNKIKDLSTIEPLKKLENLKSLDLFNCEVTNLNDYRENVFKLLPQLTYLDGYDRDDKEAPDSDAEGYVEGLDDEEEDEDEEEYDEDAQVVEDEEDEDEEEEGEEEDVSGEEEEDEEGYNDGEVDDEEDEEELGEEERGQKRKREPEDEGEDDD

SEQ ID NO: 16500 - protein, 347 aa, Homo sapiens
MGVVQYGDNPATHFNLKTHTNSRDLKTAIEKITQRGGLSNVGRAISFVTKNFFSKANGNRSGAPNVVVVMVDGWPTDKVEEASRLARESGINIFFITIEGAAENEKQYVVEPNFANKAVCRTNGFYSLHVQSWFGLHKTLQPLVKRVCDTDRLACSKTCLNSADIGFVIDGSSSVGTGNFRTVLQFVTNLTKEFEISDTDTRIGAVQYTYEQRLEFGFDKYSSKPDILNAIKRVGYWSGGTSTGAAINFALEQLFKKSKPNKRKLMILITDGRSYDDVRIPAMAAHLKGVITYAIGVAWAAQEELEVIATHPARDHSFFVDEFDNLHQYVPRIIQNICTEFNSQPRN

SEQ ID NO: 16501 - protein, 186 aa, Homo sapiens
MRMTMEEMKNEAETTSMVSMPLYAVMYPVFNELERVNLSAAQTLRAAFIKAEKENPGLTQDIIMKILEKKSVEVNFTESLLRMAADDVEEYMIERPEPEFQDLNEKARALKQILSKIPDEINDRVRFLQTIKDIASAIKELLDTVNNVFKKYQYQNRRALEHQKKEFVKYSKSFSDTLKTYFKDGK

SEQ ID NO: 16502 - protein, 418 aa, Homo sapiens
SKPRASSLLPESTSRRSGPSDGPTAPYQPRRSTVTWDTALMVTALPSSAPRPHQSELELKFDMALRAGAAPTLGHRTLPLLPSLRASLAEIAGRLGPFGFFGTTLSPLRNFSGLSPPGETTSTSSASGVSGSLGFLGTTLSLPPYSLERKLSSPILACRRAAGPSSSACPRATRLRCCREAGSLGPQTRSPWGAPSLAGTRSCCSCARWQGQAQTSYSRAEVAGASKARRPTRPRPRLPLPAAITPWTSARPPQSTCDAASRRPSAARPCLRLASSRALPSRTLCLGSDSTAPPRWGPGAGPVRDQGRPLAPLRPRSSPPLGLGPQAAASHLARSADSRGTARPCCCVPAPTGPRAALWSASSVPRGPQEAAPASRPQDPTRPCPHPLATPQSLLLSCRPRRPCCRSSSWTPADRSTS

SEQ ID NO: 16503 - protein, 609 aa, Homo sapiens
MSIVIPLGVDTAETSYLEMAAGSEPESVEASPVVVEKSNSYPHQLYTSSSHHSHSYIGLPYADHNYGARPPPTPPASPPPSVLISKNEVGIFTTPNFDETSSATTISTSEDGSYGTDVTRCICGFTHDDGYMICCDKCSVWQHIDCMGIDRQHIPDTYLCERCQPRNLDKERAVLLQRRKRENMSDGDTSATESGDEVPVELYTAFQHTPTSITLTASRVSKVNDKRRKKSGEKEQHISKCKKAFREGSRKSSRVKGSAPEIDPSSDGSNFGWETKIKAWMDRYEEANNNQYSEGVQREAQRIALRLGNGNDKKEMNKSDLNTNNLLFKPPVESHIQKNKKILKSAKDLPPDALIIEYRGKFMLREQFEANGYFFKRPYPFVLFYSKFHGLEMCVDARTFGNEARFIRRSCTPNAEVRHEIQDGTIHLYIYSIHSIPKGTEITIAFDFDYGNCKYKVDCACLKENPECPVLKRSSESMENINSGYETRRKKGKKDKDISKEKDTQNQNITLDCEGTTNKMKSPETKQRKLSPLRLSVSNNQEPDFIDDIEEKTPISNEVEMESEEQIAERKRKMVSWEASSLGLVTAALHMVIVAAFTWAFTLFFEVSE

SEQ ID NO: 16504 - protein, 1230 aa, Homo sapiens
MRSKGRARKLATNNECVYGNYPEIPLEEMPDADGVASTPSLNIQEPCSPATSSEAFTPKEGSPYKAPIYIPDDIPIPAEFELRESNMPGAGLGIWTKRKIEVGEKFGPYVGEQRSNLKDPSYGWEILDEFYNVKFCIDASQPDVGSWLKYIRFAGCYDQHNLVACQINDQIFYRVVADIAPGEELLLFMKSEDYPHETMAPDIHEERQYRCEDCDQLFESKAELADHQKFPCSTPHSAFSMVEEDFQQKLESENDLQEIHTIQECKECDQVFPDLQSLEKHMLSHTEEREYKCDQCPKAFNWKSNLIRHQMSHDSGKHYECENCAKVFTDPSNLQRHIRSQHVGARAHACPECGKTFATSSGLKQHKHIHSSVKPFICEVCHKSYTQFSNLCRHKRMHADCRTQIKCKDCGQMFSTTSSLNKHRRFCEGKNHFAAGGFFGQGISLPGTPAMDKTSMVNMSHANPGLADYFGANRHPAGLTFPTAPGFSFSFPGLFPSGLYHRPPLIPASSPVKGLSSTEQTNKSQSPLMTHPQILPATQDILKALSKHPSVGDNKPVELQPERSSEERPFEKISDQSESSDLDDVSTPSGSDLETTSGSDLESDIESDKEKFKENGKMFKDKVSPLQNLASINNKKEYSNHSIFSPSLEEQTAVSGAVNDSIKAIASIAEKYFGSTGLVGLQDKKVGALPYPSMFPLPFFPAFSQSMYPFPDRDLRSLPLKMEPQSPGEVKKLQKGSSESPFDLTTKRKDEKPLTPVPSKPPVTPATSQDQPLDLSMGSRSRASGTKLTEPRKNHVFGGKKGSNVESRPASDGSLQHARPTPFFMDPIYRVEKRKLTDPLEALKEKYLRPSPGFLFHPQMSAIENMAEKLESFSALKPEASELLQSVPSMFNFRAPPNALPENLLRKGKERYTCRYCGKIFPRSANLTRHLRTHTGEQPYRCKYCDRSFSISSNLQRHVRNIHNKEKPFKCHLCDRCFGQQTNLDRHLKKHENGNMSGTATSSPHSELESTGAILDDKEDAYFTEIRNFIGNSNHGSQSPRNVEERMNGSHFKDEKALVTSQNSDLLDDEEVEDEVLLDEEDEDNDITGKTGKEPVTSNLHEGNPEDDYEETSALEMSCKTSPVRYKEEEYKSGLSALDHIRHFTDSLKMRKMEDNQYSEAELSSFSTSHVPEELKQPLHRKSKSQAYAMMLSLSDKESLHSTSHSSSNVWHSMARAAAESSAIQSISHV

SEQ ID NO: 16505 - protein, 769 aa, Homo sapiens
MATEGMILTNHDHQIRVGVLTVSDSCFRNLAEDRSGINLKDLVQDPSLLGGTISAYKIVPDEIEEIKETLIDWCDEKELNLILTTGGTGFAPRDVTPEATKEVIEREAPGMALAMLMGSLNVTPLGMLSRPVCGIRGKTLIINLPGSKKGSQECFQFILPALPHAIDLLRDAIVKVKEVHDELEDLPSPPPPLSPPPTTSPHKQTEDKGVQCEEEEEEKKDSGVASTEDSSSSHITAAAIAAKKHPFYTSPAVVMAHGEQPIPGLINYSHHSTDERIPDSIISRGVQVLPRDTASLSTTPSESPRAQATSRLSTASCPTPKVQSRCSSKENILRASHSAVDITKVARRHRMSPFPLTSMDKAFITVLEMTPVLGTEIINYRDGMGRVLAQDVYAKDNLPPFPASVKDGYAVRAADGPGDRFIIGESQAGEQPTQTVMPGQVMRVTTGAPIPCGADAVVQVEDTELIRESDDGTEELEVRILVQARPGQDIRPIGHDIKRGECVLAKGTHMGPSEIGLLATVGVTEVEVNKFPVVAVMSTGNELLNPEDDLLPGKIRDSNRSTLLATIQEHGYPTINLGIVGDNPDDLLNALNEGISRADVIITSGGVSMGEKDYLKQVLDIDLHAQIHFGRVFMKPGLPTTFATLDIDGVRKIIFALPGNPVSAVVTCNLFVVPALRKMQGILDPRPTIIKARLSCDVKLDPRPEYHRCILTWHHQEPLPWAQSTGNQMSSRLMSMRSANGLLMLPPKTEQYVELHKGEVVDVMVIGRL

SEQ ID NO: 16506 - protein, 482 aa, Homo sapiens
MAFMEKPPAGKVLLDDTVPLTAAIEASQSLQSHTIAGLSLPLPPKKLIGNMDREFIAERQKGLQNYLNVITTNHILSNCELVKKFLDPNNYSANYTEIALQQVSMFFRSEPKWEVVEPLKDIGWRIRKKYFLMKIKNQPKERLVLSWADLGPDKYLSDKDFQCLIKLLPSCLHPYIYRVTFATANESSALLIRMFNEKGTLKDLIYKAKPKDPFLKKYCNPKKIQGLELQQIKTYGRQILEVLKFLHDKGFPYGHLHASNVMLDGDTCRLLDLENSLLGLPSFYRSYFSQFRKINTLESVDVHCFGHLLYEMTYGRPPDSVPVDSFPPAPSMAVVAVLESTLSCEACKNGMPTISRLLQMPLFSDVLLTTSEKPQFKIPTKLKEALRIAKECIEKRLIEEQKQIHQHRRLTRAQSHHGSEEERKKRKILARKKSKRSALENSEEHSAKYSNSNNSAGSGASSPLTSPSSPTPPSTSVEHAPF

SEQ ID NO: 16507 - protein, 403 aa, Homo sapiens
EIDLLRTTVKVPGKRLPRATPATAPGTSPRANGLSVERSNTQLGGGTASGPAEVLSSSPKLDPPPSPHSNRKKHRRKKSTGTPRPDGPSSATEEAEESFEFVVVSLTGQTWHFEASTAEERELWVQSVQAQILASLQGCRSAKDKTRLGNQNAALAVQAVRTVRGNSFCIDCDAPNPDWASLNLGALMCIECSGIHRHLGAHLSRVRSLDLDDWPPELLAVMTAMGNALANSVWEGALGGYSKPGPDACREEKERWIRAKYEQKLFLAPLPSSDVPLGQQLLRAVVEDDLRLLVMLLAHGSKEEVNETYGDGDGRTALHLSSAMANVVFTQLLIWYGVDVRSRDARGLTPLAYARRAGSQECADILIQHGCPGEGCGLAPTPNREPANGTNPSAELHRSPSLL

SEQ ID NO: 16508 - protein, 410 aa, Homo sapiens
MSLPESPHSPATLDYALEDPHQGQRSREKSKATEVMADMFDGRLEPIVFPPPRLPEEGVAPQDPADGGHTFHILVDAGRSHGAIKAGQEVTPPPAEGLEAASASLTTDGSLKNGFPGEETHGLGGEKALETCGAGRSESEVIAEGKAEDVKPEECAMFSAPVDEKPGGEEMDVAEENRAIDEVNREAGPGPGPGPLNVGLHLNPLESIQLELDSVNAEADRALLQVERRFGQIHEYYLEQRNDIIRNIPGFWVTAFRHHPQLSAMIRGQDAEMLSYLTNLEVKELRHPRTGCKFKFFFQRNPYFRNKLIVKVYEVRSFGQVVSFSTLIMWRRGHGPQSFIHRNRHVICSFFTWFSDHSLPESDRIAQIIKEDLWSNPLQYYLLGEDAHRARRRLVREPVEIPRPFGFQCG

SEQ ID NO: 16509 - protein, 1033 aa, Homo sapiens
ISLLEHEKESELKEIEQELHLAQAEIQSLRQAAEDSATEHESDIASLQEDLCRMQNELEDMERIRGDYEMEIASLRAEMEMKSSEPSGSLGLSDYSGLQEELQELRERYHFLNEEYRALQESNSSLTGQLADLESERTQRATERWLQSQTLSMTSAESQTSEMDFLEPDPEMQLLRQQLRDAEEQMHGMKNKCQELCCELEELQHHRQVSEEEQRRLQRELKCAQNEVLRFQTSHSVTQNEELKSRLCTLQKKYDTSQDEQNELLKMQLQLQTELRQLKVMKSTLVENQSEKELLCRLQKLHLQHQNVTCEKEKLLERQQQLQEELQCHEAELQHLRDTVASFKESNEKDTETHAQLQEMKQLYQASKDELERQKHMYDQLEQDLLLCQLELKELKASHPIPEDKGKCANKCDTLLSRLTELQEKYKASQKEMGQLQMEQCELLEDQRRMQEEQGQLQEELHRLTLPLPKSGLLLKSQELLTKLEDLCELQLLYQGMQEEQKKLIQNQDCVLKEQLEIHEELRRFKESHFQEVLENPDDSKLAKSSKCNRNKQSKLLMEQMQALQVMYDAGQAKQELLQQEQGRLLEERKRLQADLQLCLEEMQLLQVQSPSIKMSLESYGKSYGSMVPSNENCRKTYDTTVDDNESYYKSYTSTQTSSKSFLKSYDSSTSASEAYGKSYCTTSNSSITYKKSYGSTSSSDTCQKSFVSSCTDEEPAEPEDMERFEEMVVKVLIKLQAVQAMYQISQEEHSQLQEQMEKLLAKQKDLKEELDACEREFKECMECLEKPMAPQNDKNEIKELQTKLRELQLQYQASMDEQGRLLVVQEQLEGQLQCCQEELRQLREKRPSVVKEARGKNANKNMNKNANGVKMKKVTKPCSDTSESDLETRKSLEVVLYYKASQRKLDGLAKEEEKKEEMEEEKKQVKEEAKEQCGDELVAEPADPEEAKSTEDQEENEEDKEEEEKEEDSEEEEDDADSSLESPEENNPLRLSESKKNMFGLWKPMVFLAIAAVALYVLPNMRQQESEFCLME

SEQ ID NO: 16510 - protein, 466 aa, Homo sapiens
MKSLSLLLAVALGLATAVSAGPAVIECWFVEDASGKGLAKRPGALLLRQGPGEPPPRPDLDPELYLSVHDPAGALQAAFRRYPRGAPAPHCEMSRFVPLPASAKWASGLTPAQNCPRALDGAWLMVSISSPVLSLSSLLRPQPEPQQEPVLITMATVEMGFHHVGQAALELLTSVVLTVLTHTPAPRVRLGQDALLDLSFAYMPPTSEAASSLAPGPPPFGLEWRRQHLGKGHLLLAATPGLNGQMPAAQEGAVAFAAWDDDEPWGPWTGNGTFWLPTVQPFQEGTYLATIHLPYLQGQVTLELAVYKPPKVSLMPATLARAAPGEAPPELLCLVSHFYPSGGLEVEWELRGGPGGRSQKAEGQRWLSALRHHSDGSVSLSGHLQPPPVTTEQHGARYACRIHHPSLPASGRSAEVTLEVAGLSGPSLEDSVGLFLSAFLLLGLFKALGWAAVYLSTCKDSKKKAE

SEQ ID NO: 16511 - protein, 1294 aa, Homo sapiens
MEKSGPSSTISEQQLQRQEGWINTKTDLAEQSLISSEKWLQLHGLKSNKLTLKQILSQIGFPHCEDYVASLGRPVASRYADGLFPQLYRAEDGRVYNLTAKSELIYQFVEHLTQAVESYKQRMDWLTSKSRQIFGVILEQCVTIVLDFGGILEGELDLCREALTMVLQEQVAHITEFNIIRVSQEPVKWQENATPVTEQSIATAISWVEKLTVELTVSEAGRLDALLEAGRDKTIESIYYFVVGDVPEESKELLLQRALEIPCPVYTVSFNARGEGTIAFLKDLSAKTHSRFHAFAERTECVEFPAFSTKDGDNVMTWNSRKLKGKLPPGAGVREDVFLVWQEMEEACSTLAQIQRLVAEPPKPDVATVDCESETTSVEIASNPEDTWDSKTWLQKYGLKAQKLSLYDVLADCSFRHADGVVDIKAKPENESVQTSAETNKKTVHAKYCSRFVHAPWKDGSLVHVNITKEKCKWYSERIHTALARIRRRIKWLQDGSQSLFGRLHNDCIYILIDTSHSMKSKLDLVKDKIIQFIQEQLKYKSKFNFVKFDGQAVAWREQLAEVNEDNLEQAQSWIRDIKIGSSTNTLSALKTAFADKETQAIYLLTDGRPDQPPETVIDQVKRFQEIPIYTISFNYNDEIANRFLKEVAALTGGEFHFYNFGCKDPTPPEAVQNEDLTLLVKEMEQGHSDLEKMQDLYSESLIMDWWYNAEKDGDSKHQKEICSMISTPEKCAKPQSDVDSTQTSSLNMLKGPWGLSDQKVQKKKVLHAESTKTSLLRSQMSSLRSSACSERKDGLSNASSRRTALSDKEMSILLAEEWLDDKSSEKVTREGSQVYDHDSSDVSSENWLKTYGLVAKKLTLMDALSVAAVPHSSTYVPVLDKHVVSKVFDEVFPLAHVCNDTNKMTLINPQGAKLNIYKRKVEQAIQSYEKRLNKIVWRALSQEEKEKLDANKPIQYLENKTVLNQALERLNWPISLKELSMLESEILAGKMYIQQAMELQEAAKKNYANKAPGEQQKLQGNPTKKTKSKRPDPLKGQKVIARCDENGFYFPGVVKKCVSRTQALVGFSYGDTKVVSTSFITPVGGAMPCPLLQVGDYVFAKIVIPKGFDFYVPAIVIALPNKHVATEKFYTVLKCNNRREFCPRSALIKISQNKYALSCSHIKSPPIPEDPEVEDVEARNSAFLFWPLKEADTQDSREPRREKPRRKKRPAKQPLQQAAPSDSDGSSHGISSHGSCQGTHPEPRTAHLHFPAAGRLGLSSHAIIATPPPRAALPCTLQATHSSKGLRSVPETL

SEQ ID NO: 16512 - protein, 941 aa, Homo sapiens
MSSEFLAELHWEDGFAIPVANEENKLLEDQLSKLKDERASLQDELREYEERINSMTSHFKNVKQELSITQSLCKARERETESEEHFKAIAQRELGRVKDEIQRLENEMASILEKKSDKENGIFKATQKLDGLKCQMNWDQQALEAWLEESAHKDSDALTLQKYAQQDDNKIRALTLQLERLTLECNQKRKILDNELTETISAQLELDKAAQDFRKIHNERQELIKQWENTIEQMQKRDGDIDNCALELARIKQETREKENLVKEKIKFLESEIGNNTEFEKRISVADRKLLKCRTAYQDHETSRIQLKGELDSLKATVNRTSSDLEALRKNISKIKKDIHEETARLQKTKNHNEIIQTKLKEITEKTMSVEEKATNLEDMLKEEEKDVKEVDVQLNLIKGVLFKKAQELQTETMKEKAVLSEIEGTRSSLKHLNHQLQKLDFETLKQQEIMYSQDFHIQQVERRMSRLKGEINSEEKQALEAKIVELRKSLEEKKSTCGLLETQIKKLHNDLYFIKKAHSKNSDEKQSLMTKINELNLFIDRSEKELDKAKGFKQDLMIEDNLLKLEVKRTREMLHSKAEEVLSLEKRKQQLYTAMEERTEEIKVHKTMLASQIRYVDQERENISTEFRERLSKIEKLKNRYEILTVVMLPPEGEEEKTQAYYVIKAAQEKEELQREGDCLDAKINKAEKEIYALENTLQVLNSCNNNYKQSFKKVTPSSDEYELKIQLEEQKRAVDEKYRYKQRQIRELQEDIQSMENTLDVIEHLANNVKEKLSEKQAYSFQLSKETEEQKPKLERVTKQCAKLTKEIRLLKDTKDETMEEQDIKLREMKQFHKVIDEMLVDIIEENTEIRIILQTYFQQSGLELPTASTKGSRQSSRSPSHTSLSARSSRSTSTSTSQSSIKVLELKFPASSSLVGSPSRPSSASSSSSNVKSKKSSK

SEQ ID NO: 16513 - protein, 1263 aa, Homo sapiens
MPRKGTQPSTARRREEGPPPPSPDGASSDAEPEPPSGRTESPATAAAMTNEAGAPRLMITHIVNQNFKSYAGEKILGPFHKRFSCIIGPNGSGKSNVIDSMLFVFGYRAQKIRSKKLSVLIHNSDEHKDIQSCTVEVHFQKIIDKEGDDYEVIPNSNFYVSRTACRDNTSVYHISGKKKTFKDVGNLLRSHGIDLDHNRFLILQGEVEQIAMMKPKGQTEHDEGMLEYLEDIIGCGRLNEPIKVLCRRVEILNEHRGEKLNRVKMVEKEKDALEGEKNIAIEFLTLENEIFRKKNHVCQYYIYELQKRIAEMETQKEKIHEDTKEINEKSNILSNEMKAKNKDVKDTEKKLNKITKFIEENKEKFTQLDLEDVQVREKLKHATSKAKKLEKQLQKDKEKVEEFKSIPAKSNNIINETTTRNNALEKEKEKEEKKLKEVMDSLKQETQGLQKEKESREKELMGFSKSVNEARSKMDVAQSELDIYLSRHNTAVSQLTKAKEALIAASETLKERKAAIRDIEGKLPQTEQELKEKEKELQKLTQEETNFKSLVHDLFQKVEEAKSSLAMNRSRGKVLDAIIQEKKSGRIPGIYGRLGDLGAIDEKYDVAISSCCHALDYIVVDSIDIAQECVNFLKRQNIGVATFIGLDKMAVWAKKMTEIQTPENTPRLFDLVKVKDEKIRQAFYFALRDTLVADNLDQATRVAYQKDRRWRVVTLQGQIIEQSGTMTGGGSKVMKGRMGSSLVIEISEEEVNKMESQLQNDSKKAMQIQEQKVQLEERVVKLRHSEREMRNTLEKFTASIQRLIEQEEYLNVQVKELEANVLATAPDKKKQKLLEENVSAFKTEYDAVAEKAGKVEAEVKRLHNTIVEINNHKLKAQQDKLDKINKQLDECASAITKAQVAIKTADRNLQKAQDSVLRTEKEIKDTEKEVDDLTAELKSLEDKAAEVVKNTNAAEESLPEIQKEHRNLLQELKVIQENEHALQKDALSIKLKLEQIDGHIAEHNSKIKYWHKEISKISLHPIEDNPIEEISVLSPEDLEAIKNPDSITNQIALLEARCHEMKPNLGAIAEYKKKEELYLQRVAELDKITYERDSFRQAYEDLRKQRLNEFMAGFYIITNKLKENYQMLTLGGDAELELVDSLDPFSEGIMFSVRPPKKSWKKIFNLSGGEKTLSSLALVFALHHYKPTPLYFMDEIDAALDFKNVSIVAFYIYEQTKNAQFIIISLRNNMFEISDRLIGIYKTYNITKSVAVNPKEIASKGLC

SEQ ID NO: 16514 - protein, 118 aa, Homo sapiens
MAAHLVKRCTCLLREAARQAPAMAPVGRLRLAWVAHKTLTSSATSPISHLPGSLMEPVEKERASTPYIEKQVDHLIKKATRPEELLELLGGSHDLDSNQAAMVLIRLSHLLSEKPEDK

SEQ ID NO: 16515 - protein, 910 aa, Homo sapiens
MGVRGLQGFVGSTCPHICTVVNFKELAEHHRSKYPGCTPTIVVDAMCCLRYWYTPESWICGGQWREYFSALRDFVKTFTAAGIKLIFFFDGMVEQDKRDEWVKRRLKNNREISRIFHYIKSHKEQPGRNMFFIPSGLAVFTRFALKTLGQETLCSLQEADYEVASYGLQHNCLGILGEDTDYLIYDTCPYFSISELCLESLDTVMLCREKLCESLGLCVADLPLLACLLGNDIIPEGMFESFRYKCLSSYTSVKENFDKKGNIILAVSDHISKVLYLYQGEKKLEEILPLGPNKALFYKGMASYLLPGQKSPWFFQKPKGVITLDKQVISTSSDAESREEVPMCSDAESRQEVPMCTGPESRREVPVYTDSEPRQEVPMCSDPEPRQEVPTCTGPESRREVPMCSDPEPRQEVPMCTGPEARQEVPMYTDSEPRQEVPMYTDSEPRQEVPMYTGSEPRQEVPMYTGPESRQEVPMYTGPESRQEVLIRTDPESRQEIMCTGHESKQEVPICTDPISKQEDSMCTHAEINQKLPVATDFEFKLEALMCTNPEIKQEDPTNVGPEVKQQVTMVSDTEILKVARTHHVQAESYLVYNIMSSGEIECSNTLEDELDQALPSQAFIYRPIRQRVYSLLLEDCQDVTSTCLAVKEWFVYPGNPLRHPDLVRPLQMTIPGGTPSLKILWLNQEPEIQVRRLDTLLACFNLSSSREELQAVESPFQALCCLLIYLFVQVDTLCLEDLHAFIAQALCLQGKSTSQLVNLQPDYINPRAVQLGSLLVRGLTTLVLVNSACGFPWKTSDFMPWNVFDGKLFHQKYLQSEKGYAVEVLLEQNRSRLTKFHNLKAVVCKACMKENRRITGRAHWGSHHAGRWGRQGSSYHRTGSGYSRSSQGQPWRDQGPGSRQYEHDQWRRY

SEQ ID NO: 16516 - protein, 137 aa, Homo sapiens
ADVFSREPFVVWFQSPHTAVKDFVIIPLHTTPETSVKEIDELVEVYTDVKHRWKAENFIFMGDFNAGCSYVPKKAWKNIRLRTDPRFVWLIGDQEDTTVKKSTNCAYDRPWMSATTFQLNLNYSLQGPSPTAKNLSL

SEQ ID NO: 16517 - protein, 1298 aa, Homo sapiens
MAAADAEAVPARGEPQQDCCVKTELLGEETPMAADEGSAEKQAGEAHMAADGETNGSCENSDASSHANAAKHTQDSARVNPQDGTNTLTRIAENGVSERDSEAAKQNHVTADDFVQTSVIGSNGYILNKPALQAQPLRTTSTLASSLPGHAAKTLPGGAGKGRTPSAFPQTPAAPPATLGEGSADTEDRKLPAPGADVKVHRARKTMPKSVVGLHAASKDPREVREARDHKEPKEEINKNISDFGRQQLLPPFPSLHQSLPQNQCYMATTKSQTACLPFVLAAAVSRKKKRRMGTYSLVPKKKTKVLKQRTVIEMFKSITHSTVGSKGEKDLGASSLHVNGESLEMDSDEDDSEELEEDDGHGAEQAAAFPTEDSRTSKESMSEADRAQKMDGESEEEQESVDTGEEEEGGDESDLSSESSIKKKFLKRKGKTDSPWIKPARKRRRRSRKKPSGALGSESYKSSAGSAEQTAPGDSTGYMEVSLDSLDLRVKGILSSQAEGLANGPDVLETDGLQEVPLCSCRMETPKSREITTLANNQCMATESVDHELGRCTNSVVKYELMRPSNKAPLLVLCEDHRGRMVKHQCCPGCGYFCTAGNFMECQPESSISHRFHKDCASRVNNASYCPHCGEESSKAKEVTIAKADTTSTVTPVPGQEKGSALEGRADTTTGSAAGPPLSEDDKLQGAASHVPEGFDPTGPAGLGRPTPGLSQGPGKETLESALIALDSEKPKKLRFHPKQLYFSARQGELQKVLLMLVDGIDPNFKMEHQNKRSPLHAAAEAGHVDICHMLVQAGANIDTCSEDQRTPLMEAAENNHLEAVKYLIKAGALVDPKDAEGSTCLHLAAKKGHYEVVQYLLSNGQMDVNCQDDGGWTPMIWATEYKHVDLVKLLLSKGSDINIRDNEENICLHWAAFSGCVDIAEILLAAKCDLHAVNIHGDSPLHIAARENRYDCVVLFLSRDSDVTLKNKEGETPLQCASLNSQVWSALQMSKALQDSAPDRPSPVERIVSRDIARGYERIPIPCVNAVDSEPCPSNYKYVSQNCVTSPMNIDRNITHLQYCVCIDDCSSSNCMCGQLSMRCWYDKDGRLLPEFNMAEPPLIFECNHACSCWRNCRNRVVQNGLRARLQLYRTRDMGWGVRSLQDIPPGTFVCEYVGELISDSEADVREEDSYLFDLDNKDGEVYCIDARFYGNVSRFINHHCEPNLVPVRVFMAHQDLRFPRIAFFSTRLIEAGEQLGFDYGERFWDIKGKLFSCRCGSPKCRHSSAALAQRQASAAQEAQEDGLPDTSSAAAADPL

SEQ ID NO: 16518 - protein, 191 aa, Homo sapiens
MEHKDDDDDDVSFAKWMSSFWGHSWREEDQRGLRERHRLQATSHRKTSLPCPSFYTVNFFILYSQLPVLPRIPSSDCHPRRHSHEDQEFRCRSHVRDYRKYSEDGSFKEPLESKGRSHSKIEKFSESFERQLCFRTKRSASLGPESRKERNERECLRMEIKSRKKVEEERSSRKEEHGEAHMAPLFEKGPE

SEQ ID NO: 16519 - protein, 548 aa, Homo sapiens
VENQSEKELLCRLQKLHLQHQNVTCEKEKLLERQQQLQEELQCHEAELQHLRDTVASFKESNEKDTETHAQLQEMKQLYQASKDELERQKHMYDQLEQDLLLCQLELKELKASHPIPEDKGKCANKCDTLLSRLTELQEKYKASQKEMGQLQMEQCELLEDQRRMQEEQGQLQEELHRLTLPLPKSGLLLKSQELLTKLEDLCELQLLYQGMQEEQKKLIQNQDCVLKEQLEIHEELRRFKESHFQEVLENPDDSKLAKSSKCNRNKQSKLLMEQMQALQVMYDAGQAKQELLQQEQGRLLEERKRLQADLQLCLEEMQLLQVQSPSIKMSLESYGKSYGSMVPSNENCRKTYDTTVDDNESYYKSYTSTQTSSKSFLKSYDSSTSASEAYGKSYCTTSNSSITYKKSYGSTSSSDTCQKSFVSSCTDEEPAEPEDMERFEEMVVKVLIKLQAVQAMYQISQEEHSQLQEQMEKLLAKQKDLKEELDACEREFKECMECLEKPMAPQNDKNENMFGLWKPMVFLAIAAVALYVLPNMRQQESEFCLME

SEQ ID NO: 16520 - protein, 1551 aa, Homo sapiens
MIAEPAHFYLFGLICLCSGSRLRQEDFPPRIVEHPSDLIVSKGEPATLNCKAEGRPTPTIEWYKGGERVETDKDDPRSHRMLLPSGSLFFLRIVHGRKSRPDEGVYVCVARNYLGEAVSHNASLEVAILRDDFRQNPSDVMVAVGEPAVMECQPPRGHPEPTISWKKDGSPLDDKDERITIRGGKLMITYTRKSDAGKYVCVGTNMVGERESEVAELTVLERPSFVKRPSNLAVTVDDSAEFKCEARGDPVPTVRWRKDDGELPKSRYEIRDDHTLKIRKVTAGDMGSYTCVAENMVGKAEASATLTVQVGSEPPHFVVKPRDQVVALGRTVTFQCEATGNPQPAIFWRREGSQNLLFSYQPPQSSSRFSVSQTGDLTITNVQRSDVGYYICQTLNVAGSIITKAYLEVTDVIADRPPPVIRQGPVNQTVAVDGTFVLSCVATGSPVPTILWRKDGVLVSTQDSRIKQLENGVLQIRYAKLGDTGRYTCIASTPSGEATWSAYIEVQEFGVPVQPPRPTDPNLIPSAPSKPEVTDVSRNTVTLSWQPNLNSGATPTSYIIEAFSHASGSSWQTVAENVKTETSAIKGLKPNAIYLFLVRAANAYGISDPSQISDPVKTQDVLPTSQGVDHKQVQRELGNAVLHLHNPTVLSSSSIEVHWTVDQQSQYIQGYKILYRPSGANHGESDWLVFEVRTPAKNSVVIPDLRKGVNYEIKARPFFNEFQGADSEIKFAKTLEEAPSAPPQGVTVSKNDGNGTAILVSWQPPPEDTQNGMVQEYKVWCLGNETRYHINKTVDGSTFSVVIPFLVPGIRYSVEVAASTGAGSGVKSEPQFIQLDAHGNPVSPEDQVSLAQQISDVVKQPAFIAGIGAACWIILMVFSIWLYRHRKKRNGLTSTYAGIRKVTYQRGGEAVSSGGRPGLLNISEPAAQPWLADTWPNTGNNHNDCSISCCTAGNGNSDSNLTTYSRPGQPTPYATTQLIQSNLSNNMNNGSGDSGEKHWKPLGQQKQEVAPVQYNIVEQNKLNKDYRANDTVPPTIPYNQSYDQNTGGSYNSSDRGSSTSGSQGHKKGARTPKVPKQGGMNWADLLPPPPAHPPPHSNSEEYNISVDESYDQEMPCPVPPARMYLQQDELEEEEDERGPTPPVRGAASSPAAVSYSHQSTATLTPSPQEELQPMLQDCPEETGHMQHQPDRRRQPVSPPPPPRPISPPHTYGYISGPLVSDMDTDAPEEEEDEADMEVAKMQTRRLLLRGLEQTPASSVGDLESSVTGSMINGWGSASEEDNISSGRSSVSSSDGSFFTDADFAQAVAAAAEYAGLKVARRQMQDAAGRRHFHASQCPRPTSPVSTDSNMSAAVMQKTRPAKKLKHQPGHLRRETYTDDLPPPPVPPPAIKSPTAQSKTQLEVRPVVVPKLPSMDARTDRSSDRKGSSYKGREVLDGRQVVDMRTNPGDPREAQEQQNDGKGRGNKAAKRDLPPAKTHLIQEDILPYCRPTFPTSNNPRDPSSSSSMSSRGSGSRQREQANVGRRNIAEMQVLGGYERGEDNNEELEETES

SEQ ID NO: 16521 - protein, 247 aa, Homo sapiens
MFETEADEKREMALEEGKGPGAEDSPPSKEPSPGQELPPGQDLPPNKDSPSGQEPAPSQEPLSSKDSATSEGSPPGPDAPPSKDVPPCQGAEGGLSLRVQNSLRRRTHSEGSLLQEPRGPCFASDTTLHCSDGEGAASTWGMPSPSTLKKELGRNGGSMHHLSLFFTGHRKMSGADTVGDDDEASRKRKSKNLAKDMKNKLGIFRRRNESPGAPPAGKADKMMKSFKPTSEEALKWGESLEKLLVHK

SEQ ID NO: 16522 - protein, 699 aa, Homo sapiens
MLHLKVQFLDDSQKIFVVDQKSSGKALFNLSCSHLNLAEKEYFGLEFCSHSGNNVWLELLKPITKQVKMDPGHLREELTRYLFTLQIKKDLALGRLPCSDNCTALMVSHILQSELGDFHEETDRKHLAQTRYLPNQDCLEGKIMHFHQKHIGRSPAESDILLLDIARKLDMYGIRPHPASDGEGMQIHLAVAHMGVLVLRGNTKINTFNWAKIRKLSFKRKHFLIKLHANILVLCKDTLEFTMASRDACKAFWKTCVEYHAFFRLSEEPKSKPKTLLCSKGSSFRYSGRTQRQLLEYGRKGRLKSLPFERKHYPSQYHERQCRSSPDLLSDVSKQVEDLRLAYGGGYYQNVNGVHASEPVLESRRRNSALEVTFATELEHSKPEADPTLLHQSQSSSSFPFIYMDPVFNTEPNPNPDPRDIFSERSSLSSFQTSCKFSGNHMSIYSGLTSKVRPAKQLTYTDVPYIPCTGQQVGIMPPQVFFYVDKPPQVPRWSPIRAEERTSPHSYVEPTAMKPAERSPRNIRMKSFQQDLQVLQEAIARTSGRSNINVGLEEEDPNLEDAFVCNIQEQTPKRSQSQSDMKTIRFPFGSEFRPLGPCPALSHKADLFTDMFAEQELPAVLMDQSTAERYVASESSDSESEILKPDYYALYGKEIRSPMARIRLSSGSLQLDEEDEDAYFNTPTAEDRTSLKPCNYFLA

SEQ ID NO: 16523 - protein, 753 aa, Homo sapiens
MYSPIIYQALCEHVQTQMSLMNDLTSKNIPNGIPAVPCHAPSHSESQATPHSSYGLCTSTPVWSLQRPPCPPKVHSEVQTDGNSQFASQGKTVSATCTDVLRNSFNTSPGVPCSLPKTDISAIPTLQQLGLVNGILPQQGIHKETDLLKCIQTYLSLFRSHGKETHLDSQTHRSPTQSQPAFLATNEEKCAREQIREATSERKDLNIHVRDTKTVKDVQKAKNVNKTAEKVRIIKYLLGELKALVAEQEDSEIQRLITEMEACISVLPTVSGNTDIQVEIALAMQPLRSENAQLRRQLRILNQQLREQQKTQKPSGAVDCNLELFSLQSLNMSLQNQLEESLKSQELLQSKNEELLKVIENQKDENKKFSSIFKDKDQTILENKQQYDIEITRIKIELEEALVNVKSSQFKLETAEKENQILGITLRQRDAEVTRLRELTRTLQTSMAKLLSDLSVDSARCKPGNNLTKSLLNIHDKQLQHDPAPAHTSIMSYLNKLETNYSFTHSEPLSTIKNEETIEPDKTYENVLSSRGPQNSNTRGMEEASAPGIISALSKQDSDEGSETMALIEDEHNLDNTIYIPFARSTPEKKSPLSKRLSPQPQIRAATTQLVSNSGLAVSGKENKLCTPVICSSSTKEAEDAPEKLSRASDMKDTQLLKKIKEAIGKIPAATKEPEEQTACHGPSGCLSNSLQVKGNTVCDGSVFTSDLMSDWSISSFSTFTSRDEQDFRNGLAALDANIARLQKSLRTGLLEK

SEQ ID NO: 16524 - protein, 1235 aa, Homo sapiens
MARAKLPRSPSEGKAGPGGAPAGAAAPEEPHGLSPLLPARGGGSVGSDVGQRLPVEDFSLDSSLSQVQVEFYVNENTFKERLKLFFIKNQRSSLRIRLFNFSLKLLTCLLYIVRVLLDDPALGIGCWGCPKQNYSFNDSSSEINWAPILWVERKMTLWAIQVIVAIISFLETMLLIYLSYKGNIWEQIFRVSFVLEMINTLPFIITIFWPPLRNLFIPVFLNCWLAKHALENMINDFHRAILRTQSAMFNQVLILFCTLLCLVFTGTCGIQHLERAGENLSLLTSFYFCIVTFSTVGYGDVTPKIWPSQLLVVIMICVALVVLPLQFEELVYLWMERQKSGGNYSRHRAQTEKHVVLCVSSLKIDLLMDFLNEFYAHPRLQDYYVVILCPTEMDVQVRRVLQIPLWSQRVIYLQGSALKDQDLMRAKMDNGEACFILSSRNEVDRTAADHQTILRAWAVKDFAPNCPLYVQILKPENKFHVKFADHVVCEEECKYAMLALNCICPATSTLITLLVHTSRGQEGQESPEQWQRMYGRCSGNEVYHIRMGDSKFFREYEGKSFTYAAFHAHKKYGVCLIGLKREDNKSILLNPGPRHILAASDTCFYINITKEENSAFIFKQEEKRKKRAFSGQGLHEGPARLPVHSIIASMVAMDLQGTEHRPTQSGGGGGGSKLALPTENGSGSRRPSIAPVLELADSSALLPCDLLSDQSEDEVTPSDDEGLSVVEYVKGYPPNSPYIGSSPTLCHLLPVKAPFCCLRLDKGCKHNSYEDAKAYGFKNKLIIVSAETAGNGLYNFIVPLRAYYRSRKELNPIVLLLDNKPDHHFLEAICCFPMVYYMEGSVDNLDSLLQCGIIYADNLVVVDKESTMSAEEDYMADAKTIVNVQTMFRLFPSLSITTELTHPSNMRFMQFRAKDSYSLALSKLEKRERENGSNLAFMFRLPFAAGRVFSISMLDTLLYQSFVKDYMITITRLLLGLDTTPGSGYLCAMKITEGDLWIRTYGRLFQKLCSSSAEIPIGIYRTESHVFSTSEPHDLRAQSQISVNVEDCEDTREVKGPWGSRAGTGGSSQGRHTGGGDPAEHPLLRRKSLQWARRLSRKAPKQAGRAAAAEWISQQRLSLYRRSERQELSELVKNRMKHLGLPTTGYEDVANLTASDVMNRVNLGYLQDEMNDHQNTLSYVLINPPPDTRLEPSDIVYLIRSDPLAHVASSSQSRKSSCSHKLSSCNPETRDETQL

SEQ ID NO: 16525 - protein, 1854 aa, Homo sapiens
ANGTECRSGWVGPNGGITNFDNFAFAMLTVFQCITMEGWTDVLYWMNDAMGFELPWVYFVSLVIFGSFFVLNLVLGVLSGEFSKEREKAKARGDFQKLREKQQLEEDLKGYLDWITQAEDIDPENEEEGGEEGKRNTSMPTSETESVNTENVSGEGENRGCCGSLWCWWRRRGAAKAGPSGCRRWGQAISKSKLSRRWRRWNRFNRRRCRAAVKSVTFYWLVIVLVFLNTLTISSEHYNQPDWLTQIQDIANKVLLALFTCEMLVKMYSLGLQAYFVSLFNRFDCFVVCGGITETILVELEIMSPLGISVFRCVRLLRIFKVTRHWTSLSNLVASLLNSMKSIASLLLLLFLFIIIFSLLGMQLFGGKFNFDETQTKRSTFDNFPQALLTVFQILTGEDWNAVMYDGIMAYGGPSSSGMIVCIYFIILFICGNYILLNVFLAIAVDNLADAESLNTAQKEEAEEKERKKIARKESLENKKNNKPEVNQIANSDNKVTIDDYREEDEDKDPYPPCDVPVGEEEEEEEEDEPEVPAGPRPRRISELNMKEKIAPIPEGSAFFILSKTNPIRVGCHKLINHHIFTNLILVFIMLSSAALAAEDPIRSHSFRNTILGYFDYAFTAIFTVEILLKMTTFGAFLHKGAFCRNYFNLLDMLVVGVSLVSFGIQSSAISVVKILRVLRVLRPLRAINRAKGLKHVVQCVFVAIRTIGNIMIVTTLLQFMFACIGVQLFKGKFYRCTDEAKSNPEECRGLFILYKDGDVDSPVVRERIWQNSDFNFDNVLSAMMALFTVSTFEGWPALLYKAIDSNGENIGPIYNHRVEISIFFIIYIIIVAFFMMNIFVGFVIVTFQEQGEKEYKNCELDKNQRQCVEYALKARPLRRYIPKNPYQYKFWYVVNSSPFEYMMFVLIMLNTLCLAMQHYEQSKMFNDAMDILNMVFTGVFTVEMVLKVIAFKPKHYFTDAWNTFDALIVVGSVVDIAITEVNPTESENVPVPTATPGNSEESNRISITFFRLFRVMRLVKLLSRGEGIRTLLWTFIKSFQALPYVALLIAMLFFIYAVIGMQMFGKVAMRDNNQINRNNNFQTFPQAVLLLFRCATGEAWQEIMLACLPGKLCDPESDYNPGEEYTCGSNFAIVYFISFYMLCAFLIINLFVAVIMDNFDYLTRDWSILGPHHLDEFKRIWSEYDPEAKGRIKHLDVVTLLRRIQPPLGFGKLCPHRVACKRLVAMNMPLNSDGTVMFNATLFALVRTALKIKTEGNLEQANEELRAVIKKIWKKTSMKLLDQVVPPAGDDEVTVGKFYATFLIQDYFRKFKKRKEQGLVGKYPAKNTTIALQAGLRTLHDIGPEIRRAISCDLQDDEPEETKREEEDDVFKRNGALLGNHVNHVNSDRRDSLQQTNTTHRPLHVQRPSIPPASDTEKPLFPPAGNSVCHNHHNHNSIGKQVPTSTNANLNNANMSKAAHGKRPSIGNLEHVSENGHHSSHKHDREPQRRSSVKRTRYYETYIRSDSGDEQLPTICREDPEIHGYFRDPHCLGEQEYFSSEECYEDDSSPTWSRQNYGYYSRYPGRNIDSERPRGYHHPQGFLEDDDSPVCYDSRRSPRRRLLPPTPASHRRSSFNFECLRRQSSQEEVPSSPIFPHRTALPLHLMQQQIMAVAGLDSSKAQKYSPSHSTRSWATPPATPPYRDWTPCYTPLIQVEQSEALDQVNGSLPSLHRSSWYTDEPDISYRTFTPASLTVPSSFRNKNSDKQRSADSLVEAVLISEGLGRYARDPKFVSATKHEIADACDLTIDEMESAASTLLNGNVRPRANGDVGPLSHRQDYELQDFGPGYSDEEPDPGRDEEDLADEMICITTL

SEQ ID NO: 16526 - protein, 580 aa, Homo sapiens
MVLVGTQDAISAANPRVIDDSRARKLSTDLKRCTYYETCATYGLNVERVFQDVAQKVVALRKKQQLAIGPCKSLPNSPSHSAVSAASIPAVHINQATNGGGSAFSDYSSSVPSTPSISQRELRIETIAASSTPTPIRKQSKRRSNIFTSRKGADLDREKKAAECKVDSIGSGRAIPIKQGILLKRSGKSLNKEWKKKYVTLCDNGLLTYHPSLHDYMQNIHGKEIDLLRTTVKVPGKRLPRATPATAPGTSPRANGLSVERSNTQLGGGTEAEESFEFVVVSLTGQTWHFEASTAEERELWVQSVQAQILASLQGCRSAKDKTRLGNQNAALAVQAVRTVRGNSFCIDCDAPNPDWASLNLGALMCIECSGIHRHLGAHLSRVRSLDLDDWPPELLAVMTAMGNALANSVWEGALGGYSKPGPDACREEKERWIRAKYEQKLFLAPLPSSDVPLGQQLLRAVVEDDLRLLVMLLAHGSKEEVNETYGDGDGRTALHLSSAMANVVFTQLLIWYGVDVRSRDARGLTPLAYARRAGSQECADILIQHGCPGEGCGLAPTPNREPANGTNPSAELHRSPSLL

SEQ ID NO: 16527 - protein, 230 aa, Homo sapiens
DSSDDWEIPDGQITVGQRIGSGSFGTVYKGKWHGDVAVKMLNVTAPTPQQLQAFKNEVGVLRKTRHVNILLFMGYSTKPQLAIVTQWCEGSSLYHHLHIIETKFEMIKLIDIARQTAQGMDYLHAKSIIHRDLKSNNIFLHEDLTVKIGDFGLATVKSRWSGSHQFEQLSGSILWMAPEVIRMQDKNPYSFQSDVYAFGIVLYELMTGQLPYSNINNRDQVLCPPWEYNK

SEQ ID NO: 16528 - protein, 567 aa, Homo sapiens
MYQGHMQLVNEQQESRPLLSPSIDDFLCETKSEAIARPVTSNTAVLTTGLDLLDLSEPVSQTQTKAKKSEPSSKTSSLKKKADGSDLISTDAEQRGQPLRVPETSSLDLDIQTQLEKWDDVKFHGDRNTKGHPMAERKSSSSRTGSKELLWSSEHRSQPELSGGKSALNSESASELELVAPTQARLTKEHRWGSALLSRNHSLEEEFERAKAAVESDTEFWDKMQAEWEEMARRNWISENQEAQNQVTISASEKGYYFHTENPFKDWPGAFEEGLKRLKEGDLPVTILFMEAAILQDPGDAEAWQFLGITQAENENEQAAIVALQRCLELQPNNLKALMALAVSYTNTGHQQDACDALKNWIKQNPKYKYLVKSKKGSPGLTRRMSKSPVDSSVLEGVKELYLEAAHQNGDMIDPDLQTGLGVLFHLSGEFNRAIDAFNAALTVRPEDYSLWNRLGATLANGDRSEEAVEAYTRALEIQPGFIRSRYNLGISCINLGAYREAVSNFLTALSLQRKSRNQQQVPHPAISGNIWAALRIALSLMDQPELFQAANLGDLDVLLRAFNLDP

SEQ ID NO: 16529 - protein, 292 aa, Homo sapiens
MTVSKFMAIQKALQPDWFQCLSDGEVSCKEATSIKRVRKSVDRSLLFLDNCLRLQEESEVLQKSVIIGVIEGGDVMEERLRSARETAKRPVGGFLLDGFQGNPTTLEARLRLLSSVTAELPEDKPRLISGVSRPDEVLECIERGVDLFESFFPYQVTERGCALTFSFDYQPNPEETLLQQNGTQEEIKCMDQIKKIETTGCNQEITSFEINLKEKKYQEDFNPLVRGCSCYCCKNHTRAYIHHLLVTNELLAGVLLMMHNFEHYFGFFHYIREALKSDKLAQLKELIHRQAS

SEQ ID NO: 16530 - protein, 562 aa, Homo sapiens
MGWYFRLARTEHYSQRLPAVYWDCSQKGRPFHLFRLLIQYHEPELCSYLDTKKITPDSYALNWLGSLFACYCSTEVTQAIWDGYLQQADPFFIYFLMLIILVNAKEVILTQESDSKEEVIKFLENTPSSLNIEDIEDLFSLAQYYCSKTPASFRKDNHHLFGSTLLGIKDDDADLSQALCLAISVSEILQANQLQGEGVRFFVVDCRPAEQYNAGHLSTAFHLDSDLMLQNPSEFAQSVKSLLEAQKQSIESGSIAGGEHLCFMGSGREEEDMYMNMVLAHFLQKNKEYVSIASGGFMALQQHLADINVDGPENGYGHWIASTSGSRSSINSVDGESPNGSSDRGMKSLVNKMTVALKTKSVNVREKVISFIENTSTPVDRMSFNLPWPDRSCTERHVSSSDRVGKPYRGVKPVFSIGDEEEYDTDEIDSSSMSDDDRKEVVNIQTWINKPDVKHHFPCKEVKESGHMFPSHLLVTATHMYCLREIVSRKGLAYIQSRQALNSVVKITSKKKHPELITFKYGNSSASGIEILAIERYLIPNAGDATKAIKQQIMKVLDALES

SEQ ID NO: 16531 - protein, 477 aa, Homo sapiens
METNESTEGSRSRSLDIQPSSEGLGPTSEPFPSSDDSPRSALAAATAAAAAAASAAAATAAFTTAKAAALSTKTPAPCSEFMEPSSDPSLLGEPCAGPGFTHNIAHGSLGFEPVYVSCIAQDTCTTTDHSSNPGPVPGSSSGPVLGSSSGAGHGSGSGSGPGCGSVPGSGSGPGPGSGPGSGPGHGSGSHPGPASGPGPDTGPDSELSPCIPPGFRNLVADRVPNYTSWSQHCPWEPQKQPPWEFLQVLEPGARGLWKPPDIKGKLMVCYETLPRGQCLLYNWEEERATNHLDQVPSMQDGSESFFFRHGHRGLLTMQLKSPMPSSTTQKDSYQPPGNVYWPLRGKREAMLEMLLQHQICKEVQAEQEPTRKLFEVESVTHHDYRMELAQAGTPAPTKEQPETFWIQRAPQLPGVSNIRTLDTPFRKNCSFSTPVPLSLGKLLPYEPENYPYQLGEISSLPCPGGRLGGGGGRMTPF

SEQ ID NO: 16532 - protein, 1150 aa, Homo sapiens
MAVPARTCGASRPGPARTARPWPGCGPHPGPGTRRPTSGPPRPLWLLLPLLPLLAAPGASAYSFPQQHTMQHWARRLEQEVDGVMRIFGGVQQLREIYKDNRNLFEVQENEPQKLVEKVAGDIESLLDRKVQALKRLADAAENFQKAHRWQDNIKEEDIVYYDAKADAELDDPESEDVERGSKASTLRLDFIEDPNFKNKVNYSYAAVQIPTDIYKGSTVILNELNWTEALENVFMENRRQDPTLLWQVFGSATGVTRYYPATPWRAPKKIDLYDVRRRPWYIQGASSPKDMVIIVDVSGSVSGLTLKLMKTSVCEMLDTLSDDDYVNVASFNEKAQPVSCFTHLVQANVRNKKVFKEAVQGMVAKGTTGYKAGFEYAFDQLQNSNITRANCNKMIMMFTDGGEDRVQDVFEKYNWPNRTVRVFTFSVGQHNYDVTPLQWMACANKGYYFEIPSIGAIRINTQEYLDVLGRPMVLAGKEAKQVQWTNVYEDALGLGLVVTGTLPVFNLTQDGPGEKKNQLILGVMGIDVALNDIKRLTPNYTLGANGYVFAIDLNGYVLLHPNLKPQTTNFREPVTLDFLDAELEDENKEEIRRSMIDGNKGHKQIRTLVKSLDERYIDEVTRNYTWVPIRSTNYSLGLVLPPYSTFYLQANLSDQILQVKLPISKLKDFEFLLPSSFESEGHVFIAPREYCKDLNASDNNTEFLKNFIELMEKVTPDSKQCNNFLLHNLILDTGITQQLVERVWRDQDLNTYSLLAVFAATDGGITRVFPNKAAEDWTENPEPFNASFYRRSLDNHGYVFKPPHQDALLRPLELENDTVGILVSTAVELSLGRRTLRPAVVGVKLDLEAWAEKFKVLASNRTHQDQPQKCGPNSHCEMDCEVNNEDLLCVLIDDGGFLVLSNQNHQWDQVGRFFSEVDANLMLALYNNSFYTRKESYDYQAACAPQPPGNLGAAPRGVFVPTVADFLNLAWWTSAAAWSLFQQLLYGLIYHSWFQADPAEAEGSPETRESSCVMKQTQYYFGSVNASYNAIIDCGNCSRLFHAQRLTNTNLLFVVAEKPLCSQCEAGRLLQKETHSDGPEQCELVQRPRYRRGPHICFDYNATEDTSDCGRGASFPPSLGVLVSLQLLLLLGLPPRPQPQVLVHASRRL

SEQ ID NO: 16533 - protein, 782 aa, Homo sapiens
MLQQPGPRPGRQQPSGDRDACRLHPQGRPPALPTMIPAASSTPPGDALFPSVAPQDFWRSQVTGYSGSVTRHLSHRANNFKRHPKRRKCIRPSPPPPPNTPCPLELVDFGDLHPQRSFRELLFNGCILFGIEFSYAMETAYVTPVLLQMGLPDQLYSLVWFISPILGFLLQPLLGAWSDRCTSRFGRRRPFILVLAIGALLGLSLLLNGRDIGIALADVTGNHKWGLLLTVCGVVLMDFSADSADNPSHAYMMDVCSPADQDRGLNIHALLAGLGGGFGYVVGGIHWDKTGFGRALGGQLRVIYLFTAVTLSVTTVLTLVSIPERPLRPPSEKRAAMKSPSLPLPPSPPVLPEEGPGDSLPSHTATNFSSPISPPSPLTPKYGSFISRDSSLTGISEFASSFGTANIDSVLIDCFTGGHDSYLAIPGSVPRPPISVSFPRAPDGFYRQDRGLLEGREGALTSGCDGDILRVGSLDTSKPRSSGILKRPQTLAIPDAAGGGGPETSRRRNVTFSQQVANILLNGVKYESELTGSSERAEQPLSVGRLCSTICNMPKALRTLCVNHFLGWLSFEGMLLFYTDFMGEVVFQGDPKAPHTSEAYQKYNSGVTMGCWGMCIYAFSAAFYSAILEKLEEFLSVRTLYFIAYLAFGLGTGLATLSRNLYVVLSLCITYGILFSTLCTLPYSLLCDYYQSKKFAGSSADGTRRGMGVDISLLSCQYFLAQILVSLVLGPLTSAVGSANGVMYFSSLVSFLGCLYSSLFVIYEIPPSDAADEEHRPLLLNV

SEQ ID NO: 16534 - protein, 608 aa, Homo sapiens
MVTEGFIKDVHEDSLTVVFENNWQPERQVPFNEVRLPPPPDIKKEISEGDEVEVYSRANDQEPCGWWLAKVRMMKGEFYVIEYAACDATYNEIVTFERLRPVNQNKTVKKNTFFKCTVDVPEDLREACANENAHKDFKKAVGACRIFYHPETTQLMILSASEATVKRVNILSDMHLRSIRTKLMLMSRNEEATKHLECTKQLAAAFHEEFVVREDLMGLAIGTHGSNIQQARKVPGVTAIELDEDTGTFRIYGESADAVKKARGFLEFVEDFIQVPRNLVGKVIGKNGKVIQEIVDKSGVVRVRIEGDNENKLPREDGMVPFVFVGTKESIGNVQVLLEYHIAYLKEVEQLRMERLQIDEQLRQIGSRSYSGRGRGRRGPNYTSGYGTNSELSNPSETESERKDELSDWSLAGEDDRDSRHQRDSRRRPGGRGRSVSGGRGRGGPRGGKSSISSVLKDPDSNPYSLLDNTESDQTADTDASESHHSTNRRRRSRRRRTDEDAVLMDGMTESDTASVNENGLVTVADYISRAESQSRQRNLPRETLAKNKKEMAKDVIEEHGPSEKAINGPTSASGDDISKLQRTPGEEKINTLKEENTQEAAVLNGVS

SEQ ID NO: 16535 - protein, 244 aa, Homo sapiens
MTVFFKTLRNHWKKTTAGLCLLTWGGHWLYGKHCDNLLRRAACQEAQVFGNQLIPPNAQVKKATVFLNPAACKGTLFEKNAAPILHLSGMDVTIVKTDYEGQAKKLLELMENTDVIIVAGGDGTLQEVVTGVLRRTDEATFSKIPIGFIPLGETSSLSHTLFAESGNKVQHITDATLAIVKGETVPLDVLQIKGEKEQPVFAMTGLRWGSFRDAGVKVSKYWYLGPLKIKAAHFFSTLKPFPKR

SEQ ID NO: 16536 - protein, 319 aa, Homo sapiens
FYTLPNAVLAGIILSNVIPYLETISNLPSLWRQDQYDCALWMMTFSSSIFLGLDIGLIISVVSAFFITTVRSHRAKILLLGQIPNTNIYRSINDYREIITIPGVKIFQCCSSITFVNVYYLKHKLLKEVDMVKVPLKEEEIFSLFNSSDTNLQGGKICRCFCNCDDLEPLPRILYTERFENKLDPEASSINLIHCSHFESMNTSQTASEDQVPYTVSSVSQKNQGQQYEEVEEVWLPNNSSRNSSPGLPDVAESQGRRSLIPYSDASLLPSVHTIILDFSMVHYVDSRGLVVLRQVSTEEALAGALIPLLPSQPHPDPD

SEQ ID NO: 16537 - protein, 381 aa, Homo sapiens
IFSNLSLDERCLSASLVCKYWRDLCLDFQFWKQLDLSSRQQVTDELLEKIASRSQNIIEINISDCRSMSDNGVCVLAFKCPGLLRYTAYRCKQLSDTSIIAVASHCPLLQKVHVGNQDKLTDEGLKQLGSKCRELKDIHFGQCYKISDEGMIVIAKGCLKLQRIYMQENKLVTDQSVKAFAEHCPELQYVGFMGCSVTSKGVIHLTKLRNLSSLDLRHITELDNETVMEIVKRCKNLSSLNLCLNWIINDRCVEVIAKEGQNLKELYLVSCKITDYALIAIGRYSMTIETVDVGWCKEITDQGATLIAQSSKSLRYLGLMRCDKVRVDYQVVCFLHISIVNSLMSYPLSFSISTPVYYILYIHFICIYAIIAMHCLPAFVN

SEQ ID NO: 16538 - protein, 1445 aa, Homo sapiens
MRRLLEPCWWILFLKITSSVLHYVVCFPALTEGYVGALHENRHGSAVQIRRRKASGDPYWAYSGAYGPEHWVTSSVSCGGRHQSPIDILDQYARVGEEYQELQLDGFDNESSNKTWMKNTGKTVAILLKDDYFVSGAGLPGRFKAEKVEFHWGHSNGSAGSEHSINGRRFPVEMQIFFYNPDDFDSFQTAISENRIIGAMAIFFQVSPRDNSALDPIIHGLKGVVHHEKETFLDPFVLRDLLPASLGSYYRYTGSLTTPPCSEIVEWIVFRRPVPISYHQLEAFYSIFTTEQQDHVKSVEYLRNNFRPQQRLHDRVVSKSAVRDSWNHDMTDFLENPLGTEASKVCSSPPIHMKVQPLNQTALQVSWSQPETIYHPPIMNYMISYSWTKNEDEKEKTFTKDSDKDLKATISHVSPDSLYLFRVQAVCRNDMRSDFSQTMLFQANTTRIFQGTRIVKTGVPTASPASSADMAPISSGSSTWTSSGIPFSFVSMATGMGPSSSGSQATVASVVTSTLLAGLGFGGGGISSFPSTVWPTRLPTAASASKQAARPVLATTEALASPGPDGDSSPTKDGEGTEEGEKDEKSESEDGEREHEEDGEKDSEKKEKSGVTHAAEERNQTEPSPTPSSPNRTAEGGHQTIPGHEQDHTAVPTDQTGGRRDAGPGLDPDMVTSTQVPPTATEEQYAGSDPKRPEMPSKKPMSRGDRFSEDSRFITVNPAEKNTSGMISRPAPGRMEWIIPLIVVSALTFVCLILLIAVLVYWRGCNKIKSKGFPRRFREVPSSGERGEKGSRKCFQTAHFYVEDSSSPRVVPNESIPIIPIPDDMEAIPVKQFVKHIGELYSNNQHGFSEDFEEVQRCTADMNITAEHSNHPENKHKNRYINILAYDHSRVKLRPLPGKDSKHSDYINANYVDGYNKAKAYIATQGPLKSTFEDFWRMIWEQNTGIIVMITNLVEKGRRKCDQYWPTENSEEYGNIIVTLKSTKIHACYTVRRFSIRNTKVKKGQKGNPKGRQNERVVIQYHYTQWPDMGVPEYALPVLTFVRRSSAARMPETGPVLVHCSAGVGRTGTYIVIDSMLQQIKDKSTVNVLGFLKHIRTQRNYLVQTEEQYIFIHDALLEAILGKETEVSSNQLHSYVNSILIPGVGGKTRLEKQFKLVTQCNAKYVECFSAQKECNKEKNRNSSVVPSERARVGLAPLPGMKGTDYINASYIMGYYRSNEFIITQHPLPHTTKDFWRMIWDHNAQIIVMLPDNQSLAEDEFVYWPSREESMNCEAFTVTLISKDRLCLSNEEQIIIHDFILEATQDDYVLEVRHFQCPKWPNPDAPISSTFELINVIKEEALTRDGPTIVHDEYGAVSAGMLCALTTLSQQLENENAVDVFQVAKMINLMRPGVFTDIEQYQFIYKAMLSLVSTKENGNGPMTVDKNGAVLIADESDPAESMESLV

SEQ ID NO: 16539 - protein, 654 aa, Homo sapiens
MDSLPDEFFVRHPAVEDQRKEETENKLEKSSGQLNKQENDIPTDLVPVNLLLEVKKLLNAINTLPKGVVPHIKKFLQEDFSFQTMQREVAANSQNGEEIVPALTLRFLITQLEAALRNIQAGNYTAHQINIGYYLTLLFLYGVALTERGKKEDYTEAENKFLVMKMMIQENEICENFMSLVYFGRGLLRCAQKRYNGGLLEFHKSLQEIGDKNDHWFDIDPTEDEDLPTTFKDLLNNFIKTTESNIMKQTICSYLDCERSCEADILKNTSYKGFFQLMCSKSCCVYFHKICWKKFKNLKYPGENDQSFSGKKCLKEGCTGDMVRMLQCDVPGIVKILFEVVRKDEYITIENLGASYRKLISLKITDTDIRPKISLKFNTKDEMPIFKLDYNYFYHLLHIIIISGTDIVRQIFDEAMPPPLLKKELLIHKNVLESYYNHLWTNHPLGGSWHLLYPPNKELPQSKQFDLCLLLALIKHLNVFPAPKKGWNMEPPSSDISKSADILRLCKYRDILLSEILMNGLTESQFNSIWKKVSDILLRLGMMQEDIDKVKENPIENISLDYHQLSVYLGIPVPEIIQRMLSCYQQGIALQSITGSQRIEIEELQNEEEELSPPLMEYNINVKSHPEIQFAEINKDGTSIPSESSTESLKDLQE

SEQ ID NO: 16540 - protein, 564 aa, Homo sapiens
MSLLMFTQLLLCGFLYVRVDGSRLRQEDFPPRIVEHPSDVIVSKGEPTTLNCKAEGRPTPTIEWYKDGERVETDKDDPRSHRMLLPSGSLFFLRIVHGRRSKPDEGSYVCVARNYLGEAVSRNASLEVALLRDDFRQNPTDVVVAAGEPAILECQPPRGHPEPTIYWKKDKVRIDDKEERISIRGGKLMISNTRKSDAGMYTCVGTNMVGERDSDPAELTVFERPTFLRRPINQVVLEEEAVEFRCQVQGDPQPTVRWKKDDADLPRGRYDIKDDYTLRIKKTMSTDEGTYMCIAENRVGKMEASATLTVRAPPQFVVRPRDQIVAQGRTVTFPCETKGNPQPAVFWQKEGSQNLLFPNQPQQPNSRCSVSPTGDLTITNIQRSDAGYYICQALTVAGSILAKAQLEVTDVLTDRPPPIILQGPANQTLAVDGTALLKCKATGDPLPVISWLKEGFTFPGRDPRATIQEQGTLQIKNLRISDTGTYTCVATSSSGETSWSAVLDVTESGATISKNYDLSDLPGPPSKPQVTDVTKNSVTLSWQPGTPGTLPASAYIIEAFRYVV

SEQ ID NO: 16541 - protein, 518 aa, Homo sapiens
QPLKKRRGSFKMAELDQLPDESSSAKALVSLKEGSLSNTWNEKYSSLQKTPVWKGRNTSSAVEMKFTATMSTPDKKASQKIGFRLRNLLKLPKAHKWCIYEWFYSNIDKPLFEGDNDFCVCLKESFPNLKTRKLTRVEWGKIRRLMGKPRRCSSAFFEEERSALKQKRQKIRLLQQRKVADVSQFKDLPDEIPLPLVIGTKVTARLRGVHDGLFTGQIDAVDTLNATYRVTFDRTGLGTHTIPDYEVLSNEPHETMPIAAFGQKQRPSRFFMTPPRLHYTPPLQSPIIDNDPLLGQSPWRSKISGSDTETLGGFPVEFLIQVTRLSKILMIKKEHIKKLREMNTEAEKLKSYSMPISIEFQRRYATIVLELEQLNKDLNKVLHKVQQYCYELAPDQGLQPADQPTDMRRRCEEEAQEIVRHANSSTGQPCVENENLTDLISRLTAILLQIKCLAEGGDLNSFEFKSLTDSLNDIKSTIDASNISCFQNNVEIHVAHIQSGLSQMGNLHAFAANNTNRD

SEQ ID NO: 16542 - protein, 343 aa, Homo sapiens
MNFQAGGGQSPQQQQSLAAPGGGGAAAQQLVCGGQFGGAGPGAGGGGGPSQQLAGGPPQQFALSNSAAIRAEIQRFESVHPNIYAIYDLIERIEDLALQNQIREHVISIEDSFVNSQEWTLSRSVPELKVGIVGNLSSGKSALVHRYLTGTYVQEESPEGGRFKKEIVVDGQSYLLLIRDEGGPPELQFAAWVDAVVFVFSLEDEISFQTVYNYFLRLCSFRNASEVPMVLVGTQDAISAANPRVIDDSRARKLSTDLKRCTYYETCATYGLNVERVFQDVAQKVVALRKKQQLAIGPCKSLPNSPSHSAVSAASIPAVHINQICATVSNFSSTKRPFQLLPN

SEQ ID NO: 16543 - protein, 122 aa, Homo sapiens
MPNTVSDFWEMVWQEEVSLIVMLTQLREGKEKCVHYWPTEEETYGPFQIRIQDMKECPEYTVRQLTIQYQEERRSVKHILFSAWPDHQTPESAGPLLRLVAEVEESPETAAHPGPIVVHCRC

SEQ ID NO: 16544 - protein, 428 aa, Homo sapiens
MLPRLLLLICAPLCEPAELFLIASPSHPTEGSPVTLTCKMPFLQSSDAQFQFCFFRDTRALGPGWSSSPKLQIAAMWKEDTGSYWCEAQTMASKVLRSRRSQINVHRVPVADVSLETQPPGGQVMEGDRLVLICSVAMGTGDITFLWYKGAVGLNLQSKTQRSLTAEYEIPSVRESDAEQYYCVAENGYGPSPSGLVSITVRIPVSRPILMLRAPRAQAAVEDVLELHCEALRGSPPILYWFYHEDITLGSRSAPSGGGASFNLSLTEEHSGNYSCEANNGLGAQRSEAVTLNFTVPTGARSNHLTSGVIEGLLSTLGPATVALLFCYGLKRKIGRRSARDPLRSLPSPLPQEFTYLNSPTPGQLQPIYENVNVVSGDEVYSLAYYNQPEQESVAETLGTHMEDKVSLDIYSRLRKANITDVDYEDAM

SEQ ID NO: 16545 - protein, 293 aa, Homo sapiens
MTEEEAEWESINVLLMMHGLKPLSLVKRTDLKDLIIFDKQSSQRMRQNLKLLVEETSCQQNMIQELIETNQQLRNELQLEQSRAANQEQRANDLEQIMESVKSKIGELEDESLSRACHQQNKIKDLQKEQKTLQVKCQHYKKKRTEQEETIASLQMEVCRLKKEEEDRIVTQNRVFAYLCKRVPHTVLDRQLLCLIDYYESKIRKIHTQRQYKEDESQSEEENDYRNLDASPTYKGLLMSLQNQLKESKSKIDALSSEKLNLQKDLETRPTQHELRLYKQQVKKLEKALKKNV

SEQ ID NO: 16546 - protein, 3960 aa, Homo sapiens
MSDANKAAIAAEKEALNLKLPPIVHLPENIGVDTPTQSKLLKYRRSKEQQQKINQLVIDGAKRNLDRTLGKRTPLLPPPDYPQTMTSEMKKKGFNYIYMKQCVESSPLVPIQQEWLDHMLRLIPESLKEGKEREELLESLINEVSSDFENSMKRYLVQSVLVKPPVKSLEDEGGPLPESPVGLDYSNPWHSSYVQARNQIFSNLHIIHPTMKMLLDLGYTTFADTVLLDFTGIRAKGPIDCESLKTDLSIQTRNAEEKIMNTWYPKVINLFTKKEALEGVKPEKLDAFYSCVSTLMSNQLKDLLRRTVEGFVKLFDPKDQQRLPIFKIELTFDDDKMEFYPTFQDLEDNVLSLVERIAEALQNVQTIPSWLSGTSTPVNLDTELPEHVLHWAVDTLKAAVHRNLEGARKHYETYVEKYNWLLDGTAVENIETFQTEDHTFDEYTEFIEKFLSLASEIMLLPQWIHYTMVRLDCEDLKTGLTNKAKAFANILLNDIASKYRKENECICSEFEAIKEHALKVPETTEEMMDLISYVEKARTVGIEELILRIQESKRQMSYFLDVFLFPQEDLALNATVLMWPRKINPIFDENDELIENAKHKKENELMAKREKLILEIEKESRRMEEFTEFAELERMQQYVTDVRQLQKRIQESEEAVQFINKEEELFKWELTKYPELDKLKVNIEPYQKFFNFVLKWQRSEKRWMDGGFLDLNGESMEADVEEFSREIFKTLKFFQTKLKKELQEKRKAARKRSLEEEKIEEEPKDNATITMCSTVMEQIKAFKEYIPTVSILCNPGMRARHWKQISEIVGYDLTPDSGTTLRKVLKLNLTPYLEQFEVISAGASKEFSLEKAMNTMIGTWEDIAFHISLYRDTGVCILSSVDEIQAILDDQIIKTQTMRGSPFIKPFEHEIKAWEDRLIRIQETIDEWLKVQAQWLYLEPIFCSEDIMQQMPEEGRQFQTVDRHWRDIMKFCAKDPKVLAATSLTGLLEKLQNCNELLEKIMKGLNAYLEKKRLFFPRFFFLSNDEMLEILSETKDPLRVQPHLKKCFEGIAKLEFLPNLDIKAMYSSEGERVELIALISTSAARGAVEKWLIQVEDLMLRSVHDVIAAARLAYPESARRDWVREWPGQVVLCISQMFWTSETQEVISGGTEGLKKYYKELQNQLNEIVELVRGKLSKQTRTTLGALVTIDVHARDVVMDMIKMGVSHDTDFLWLAQLRYYWENENARVRIINCNVKYAYEYLGNSPRLVITPLTDRCYRTLIGAFYLNLGGAPEGPAGTGKTETTKDLAKALAVQCVVFNCSDGLDYLAMGKFFKGLASSGAWACFDEFNRIELEVLSVVAQQILCIQRAIQQKLVVFVFEGTELKLNPNCFVAITMNPGYAGRSELPDNLKVLFRTVAMMVPNYALIAEISLYSYGFLNARPLSVKIVMTYRLCSEQLSSQFHYDYGMRAVKAVLVAAGNLKLKYPNENEDILLLRSIKDVNEPKFLSHDIPLFNGITSDLFPGIKLPEADYHEFLECAHEACNVHNLQPVKFFLEKIIQTYEMMIVRHGFMLVGEPFAAKTKVLHVLADTLTLMNEHGYGEEEKVIYRTVNPKSITMGQLFGQFDPVSHEWTDGIVANTFREFALSETPDRKWVVFDGPIDTLWIESMNTVLDDNKKLCLMSGEIIQMSPQMSLIFETMDLSQASPATVSRCGMIYLEPSQLGWEPLVSSWLNSLKGPLCEPEYQALLRGLFAWLIPPSLNQRKKKCKELIPTSNSNVVVSLTRLFEVLLCNVVENDPTSKHIRVWIMACFIFSLIWSIGGSCDTDGRRVFDTFIRLIILGKDDENPVPDSVGKWECPFDEKGLVYDYMYELKNKGRWVHWNELIKNTNLGDKQIKIQDIIVPTMDTIRYTFLMDLSITYAKPLLFVGPTGTGKSVYVKDKLMNHLEKDQYFPFYINLSARTSANQVQNIIMARLDKRRKGVFGPPMGKKCIIFIDDMNMPALEKYGAQPPIELLRQFFDCGHWYDLKDTSKITLVDIELIAAMGPPGGGRNPVTPRCIRHFNICSINSFSDETMVRIFSSIVAFYLRTHEFPPEYFVIGNQIVNGTMEIYKQSVENLLPTPTKSHYTFNLRDFSRVIRGCLLIERDAVANKHTMIRLFVHEVLRVFYDRLINDDDRRWLFQLTKTVIKDHFKESFHSIFSHLRKQNAPVTEEDLRNLMFGDYMNPDLEGDDRVYIEIPNIHHFSDVVDQCLDEYNQTHKTRMNLVIFRYVLEHLSRICRVLKQSGGNALLVGLGGSGRQSLTRLATSMAKMHIFQPEISKSYGMNEWREDMKGLLRNVGMKGQKTVFLITDTQIKEEAFLEDIDSVLNTGEVPNIFAADEKQEVMEGVRPVAQAGNKHDELSPLALFAFFVNRCKDNLHVVVAFSPIGDAFRNRLRQFPSLINCCTIDWFQSWPEDALERVAVKFLETLELTEVEQQEIVPICKHFHTSIMDLSERFLHELGRHNYVTATSYLELIGSFRQLLTQKRQAVMEAKQRYMNGLDKLAFAESQVGEMQMELVELQPKLEEAKIENANMMQVIEIESVQVEAKRQFVKLDEEIASGKAEEAQALKNECESDLAEAIPALEAALSALDTLKPADITIVKSMKNPPSGVKLVMAAVCVMKDIKPEKISDPSGTGGKILDYWGPSKKLLGDMNFLRDLKEYDKDNIPVTVMQKIRSEYLMNPEFDPPKVAKASSAAEGLCKWIMAMEVYDRVAKVVAPKKARLSEAQKSLAETMELLNQKRAELAEVEHHLENLQMTFLEKTEEKAALEDQVELCAKKLERASQLIGGLGGEKSRWAQAADDLQITYENLTGDVLVSAGVIAYLGAFTSGFRQTCTKDWSMLCKKKKIPCSEEFLLSKTLGDPVKIRAWNIAGLPTDTFSIDNGVIVNNCRRWPLMIDPQGQANKWIKNSEKENQLSVIKLSDSDYMRTLENCIQFGTPLLLENVGEELDPSLEPLLLRQTFKQGGIDCIRLGEVIIEYSFDFKFYITTKLRNPHYMPELATKVSLLNFMITPEGLEDQLLGIVVAKERPELEEERNALILQSAANKKQLKDIEKKILETLSSSEGNILEDESAIKVLDSAKMMSNEITKKQQIAEKTELKIAESREGYRPIAKHSSVLFFSIADLANIDPMYQYSLTWFVNLYINSIHDSNKSKILEKRLRYLNDHFTYNLYCNICRSLFEKDKLLFSFLLCANLLLARKEIEYQELMFLLTGGVSLKSAEKNPDPTWLQDKSWEEICRASEFPAFRGLRQHFCEHIYEWREIYDSKEPHNAKFPAPMDKNLNELQKIIILRCLRPDKITPAITNYVTDKLGKKFVEPPPFDLTKSYLDSNCTIPLIFVLSPGADPMASLLKFANDKSMSGNKFQAISLGQGQGPIAAKMIKAAIEEGTWVCLQNCHLAVSWMPMLEKICEDFTSETCNSSFRLWLTSYPSSKFPVTILQNGVKMTNEPPTGLRLNLLQSYLTDPVSDPEFFKGCRGKELAWEKLLFGVCFFHALVQERKKFGPLGWNIPYGFNESDLRISIRQLQLFINEYDTIPFEAISYLTGECNYGGRVTDDWDRRLLLTMLADFYNLYIVENPHYKFSPSGNYFAPPKGTYEDYIEFIKKLPFTQHPEIFGLHENVDISKDLQQTKTLFESLLLTQGGSKQTGASGSTDQILLEITKDILNKLPSDFDIEMALRKYPVRYEESMNTVLVQEMERFNNLIITIRNTLRDLEKAIKGVVVMDSALEALSGSLLVGKVPEIWAKRSYPSLKPLGSYITDFLARLNFLQDWYNSGKPCVFWLSGFFFTQAFLTGAMQNYARKYTTPIDLLGYEFEVIPSDTSDTSPEDGVYIHGLYLDGARWDRESGLLAEQYPKLLFDLMPIIWIKPTQKSRIIKSDAYVCPLYKTSERKGTLSTTGHSTNFVIAMLLKTDQPTRHWIKRGVALLCQLDD

SEQ ID NO: 16547 - protein, 1268 aa, Homo sapiens
MASDSPARSLDEIDLSALRDPAGIFELVELVGNGTYGQVYKGRHVKTGQLAAIKVMDVTGDEEEEIKQEINMLKKYSHHRNIATYYGAFIKKNPPGMDDQLWLVMEFCGAGSVTDLIKNTKGNTLKEEWIAYICREILRGLSHLHQHKVIHRDIKGQNVLLTENAEVKLVDFGVSAQLDRTVGRRNTFIGTPYWMAPEVIACDENPDATYDFKSDLWSLGITAIEMAEGAPPLCDMHPMRALFLIPRNPAPRLKSKKWSKKFQSFIESCLVKNHSQRPATEQLMKHPFIRDQPNERQVRIQLKDHIDRTKKKRGEKDETEYEYSGSEEEEEENDSGEPSSILNLPGESTLRRDFLRLQLANKERSEALRRQQLEQQQRENEEHKRQLLAERQKRIEEQKEQRRRLEEQQRREKELRKQQEREQRRHYEEQMRREEERRRAEHEQEYKRKQLEEQRQAERLQRQLKQERDYLVSLQHQRQEQRPVEKKPLYHYKEGMSPSEKPAWAKEIPHLVAVKSQGPALTASQSVHEQPTKGLSGFQEALNVTSHRVEMPRQNSDPTSENPPLPTRIEKFDRSSWLRQEEDIPPKVPQRTTSISPALARKNSPGNGSALGPRLGSQPIRASNPDLRRTEPILESPLQRTSSGSSSSSSTPSSQPSSQGGSQPGSQAGSSERTRVRANSKSEGSPVLPHEPAKVKPEESRDITRPSRPADLTALAKELRELRIEETNRPMKKVTDYSSSSEESESSEEEEEDGESETHDGTVAVSDIPRLIPTGAPGSNEQYNVGMVGTHGLETSHADSFSGSISREGTLMIRETSGEKKRSGHSDSNGFAGHINLPDLVQQSHSPAGTPTEGLGRVSTHSQEMDSGTEYGMGSSTKASFTPFVDPRVYQTSPTDEDEEDEESSAAALFTSELLRQEQAKLNEARKISVVNVNPTNIRPHSDTPEIRKYKKRFNSEILCAALWGVNLLVGTENGLMLLDRSGQGKVYNLINRRRFQQMDVLEGLNVLVTISGKKNKLRVYYLSWLRNRILHNDPEVEKKQGWITVGDLEGCIHYKVVKYERIKFLVIALKNAVEIYAWAPKPYHKFMAFKSFADLQHKPLLVDLTVEEGQRLKVIFGSHTGFHVIDVDSGNSYDIYIPSHIQGNITPHAIVILPKTDGMEMLVCYEDEGVYVNTYGRITKDVVLQWGEMPTSVAYIHSNQIMGWGEKAIEIRSVETGHLDGVFMHKRAQRLKFLCERNDKVFFASVRSGGSSQVFFMTLNRNSMMNW

SEQ ID NO: 16548 - protein, 16 aa, Homo sapiens
NWFDPWGQGTLVTVSS

SEQ ID NO: 16549 - protein, 723 aa, Homo sapiens
MFTPPSESQLVDTGTQTDITFEHIMALTKMSSPSPPVLDPYLLPEEHPSAHEYYDPNDYIGDIHQEMDREELELEEVDLYRMNSQDKLGLTVCYRTDDEDDIGIYISEIDPNSIAAKDGRIREGDRIIQINGIEVQNREEAVALLTSEENKNFSLLIARPELQLDEGWMDDDRNDFLDDLHMDMLEEQHHQAMQFTASVLQQKKHDEDGGTTDTATILSNQHEKDSGVGRTDESTRNDESSEQENNGDDATASSNPLAGQRKLTCSQDTLGSGDLPFSNESFISADCTDADYLGIPVDECERFRELLELKCQVKSATPYGLYYPSGPLDAGKSDPESVDKELELLNEELRSIELECLSIVRAHKMQQLKEQYRESWMLHNSGFRNYNTSIDVRRHELSDITELPEKSDKDSSSAYNTGESCRSTPLTLEISPDNSLRRAAEGISCPSSEGAVGTTEAYGPASKNLLSITEDPEVGTPTYSPSLKELDPNQPLESKERRASDGSRSPTPSQKLGSAYLPSYHHSPYKHAHIPAHAQHYQSYMQLIQQKSAVEYAQSQMSLVSMCKDLSSPTPSEPRMEWKVKIRSDGTRYITKRPVRDRLLRERALKIREERSGMTTDDDAVSEMKMGRYWSKEERKQHLVKAKEQRRRREFMMQSRLDCLKEQQAADDRKEMNILELSHKKMMKKRNKKIFDNWMTIQELLTHGTKSPDGTRVYNSFLSVTTV

SEQ ID NO: 16550 - protein, 1131 aa, Homo sapiens
AGGSLGTGRRRQRLPATGGTTRSPREGEVPGVDYNFLTVKEFLDLEQSGTLLEVGTYEGNYYGTPKPPSQPVSGKVITTDALHSLQSGSKQSTPKRTKSYNDMQNAGIVHAENEEEDDVPEMNSSFTADSGEQEEHTLQETALPPVNSSIIAAPITDPSQKFPQYLPLSAEDNLGPLPENWEMAYTENGEVYFIDHNTKTTSWLDPRCLNKQQKPLEECEDDEGVHTEELDSELELPAGWEKIEDPVYGIYYVDHINRKTQYENPVLEAKRKKQLEQQQQQQQQQQQQQQQQQQQQTEEWTEDHSALVPPVIPNHPPSNPEPAREVPLQGKPFFTRNPSELKGKFIHTKLRKSSRGFGFTVVGGDEPDEFLQIKSLVLDGPAALDGKMETGDVIVSVNDTCVLGHTHAQVVKIFQSIPIGASVDLELCRGYPLPFDPDDPNTSLVTSVAILDKEPIIVNGQETYDSPASHSSKTGKVNGMKDARPSSPADVASNSSHGYPNDTVSLASSIATQPELITVHIVKGPMGFGFTIADSPGGGGQRVKQIVDSPRCRGLKEGDLIVEVNKKNVQALTHNQVVDMLVECPKGSEVTLLVQRGGLPVPKKSPKSQPLERKDSQNSSQHSVSSHRSLHTASPSHSTQVLPEFPPAEAQAPDQTDSSGQKKPDPFKIWAQSRSMYENRPMSPSPASGLSKGEREREINSTNFGECPIPDYQEQDIFLWRKETGFGFRILGGNEPGEPIYIGHIVPLGAADTDGRLRSGDELICVDGTPVIGKSHQLVVQLMQQAAKQGHVNLTVRRKVVFAVPKTENEVPSPASSHHSSNQPASLTEEKRTPQGSQNSLNTVSSGSGSTSGIGSGGGGGSGVVSTVVQPYDVEIRRGENEGFGFVIVSSVSRPEAGTTFAGNACVAMPHKIGRIIEGSPADRCGKLKVGDRILAVNGCSITNKSHSDIVNLIKEAGNTVTLRIIPGDESSNATLLTNAEKIATITTTHTPSQQGTQETRNTTKPKQESQFEFKAPQATQEQDFYTVELERGAKGFGFSLRGGREYNMDLYVLRLAEDGPAERCGKMRIGDEILEINGETTKNMKHSRAIELIKNGGRRVRLFLKRGDGSVPEYGGSNYENIPSFPGMTP

SEQ ID NO: 16551 - protein, 212 aa, Homo sapiens
MALRSMGQFSVFFFFFFWAQKKIASLSHSGFLHWFLLFEAVSSNGVLLFFSRFRWRRRLLVISAPNDEDWAYSQQLSALSGQACNFGLRHITILKLLGVGEEVGGVLELFPINGSSVVEREDVPAHLVKDIRNYFQVSPEYFSMLLVGKDGNVKSWYPSPMWSMVIVYDLIDSMQLRRQEMAIQQSLGMRCPEDEYAGYGYHSYHQGYQDGY

SEQ ID NO: 16552 - protein, 213 aa, Homo sapiens
SWPATSLPVNNSNSGPNEIGNFGRGDVLPPVPGQGDKTATMLSDGAIYSSIDFTTKTSYNSSSQITQATPYATTQILHSNSIHELAVDLPDPQWKSSIQQKTDLMGFGYSLPDQNKGNNALLYIPDYRLAEGLSNRMPHNQSQDFSTTSSHNSSERSGSLSGGKGGKKKKNKNSSKPQKNNGSTWANVPLPPPPVQPLPGTELEHYAVEQQEN

SEQ ID NO: 16553 - protein, 905 aa, Homo sapiens
MTSATSPIILKWDPKSLEIRTLTVERLLEPLVTQVTTLVNTSNKGPSGKKKGRSKKAHVLAASVEQATQNFLEKGEQIAKESQDLKEELVAAVEDVRKQGETMRIASSEFADDPCSSVKRGTMVRAARALLSAVTRLLILADMADVMRLLSHLKIVEEALEAVKNATNEQDLANRFKEFGKEMVKLNYVAARRQQELKDPHCRDEMAAARGALKKNATMLYTASQAFLRHPDVAATRANRDYVFKQVQEAIAGISNAAQATSPTDEAKGHTGIGELAAALNEFDNKIILDPMTFSEARFRPSLEERLESIISGAALMADSSCTRDDRRERIVAECNAVRQALQDLLSEYMNNTGRKEKGDPLNIAIDKMTKKTRDLRRQLRKAVMDHISDSFLETNVPLLVLIEAAKSGNEKEVKEYAQVFREHANKLVEVANLACSISNNEEGVKLVRMAATQIDSLCPQVINAALTLAARPQSKVAQDNMDVFKDQWEKQVRVLTEAVDDITSVDDFLSVSENHILEDVNKCVIALQEGDVDTLDRTAGAIRGRAARVIHIINAEMENYEAGVYTEKVLEATKLLSETVMPRFAEQVEVAIEALSANVPQPFEENEFIDASRLVYDGVRDIRKAVLMIRTPEELEDDSDFEQEDYDVRSRTSVQTEDDQLIAGQSARAIMAQLPQEEKAKIAEQVEIFHQEKSKLDAEVAKWDDSGNDIIVLAKQMCMIMMEMTDFTRGKGPLKNTSDVINAAKKIAEAGSRMDKLARAVADQCPDSACKQDLLAYLQRIALYCHQLNICSKVKAEVQNLGGELIVSGLDSATSLIQAAKNLMNAVVLTVKASYVASTKYQKVYGTAAVNSPVVSWKMKAPEKKPLVKREKPEEFQTRVRRGSQKKHISPVQALSEFKAMDSF

SEQ ID NO: 16554 - protein, 1801 aa, Homo sapiens
MAVPGSFPLLVEGSWGPDPPKNLNTKLQMYFQSPKRSGGGECEVRQDPRSPSRFLVFFYPEDVRQKVLERKNHELVWQGKGTFKLTVQLPATPDEIDHVFEEELLTKESKTKEDVKEPDVSEELDTKLPLDGGLDKMEDIPEECENISSLVAFENLKANVTDIMLILLVENISGLSNDDFQVEIIRDFDVAVVTFQKHIDTIRFVDDCTKHHSIKQLQLSPRLLEVTNTIRVENLPPGADDYSLKLFFENPYNGGGRVANVEYFPEESSALIEFFDRKVLDTIMATKLDFNKMPLSVFPYYASLGTALYGKEKPLIKLPAPFEESLDLPLWKFLQKKNHLIEEINDEMRRCHCELTWSQLSGKVTIRPAATLVNEGRPRIKTWQADTSTTLSSIRSKYKVNPIKVDPTMWDTIKNDVKDDRILIEFDTLKEMVILAGKSEDVQSIEVQVRELIESTTQKIKREEQSLKEKMIISPGRYFLLCHSSLLDHLLTECPEIEICYDRVTQHLCLKGPSADVYKAKCEIQEKVYTMAQKNIQVSPEIFQFLQQVNWKEFSKCLFIAQKILALYELEGTTVLLTSCSSEALLEAEKQMLSALNYKRIEVENKEVLHGKKWKGLTHNLLKKQNSSPNTVIINELTSETTAEVIITGCVKEVNETYKLLFNFVEQNMKIERLVEVKPSLVIDYLKTEKKLFWPKIKKVNVQVSFNPENKQKGILLTGSKTEVLKAVDIVKQVWDSVCVKSVHTDKPGAKQFFQDKARFYQSEIKRLFGCYIELQENEVMKEGGSPAGQKCFSRTVLAPGVVLIVQQGDLARLPVDVVVNASNEDLKHYGGLAAALSKAAGPELQADCDQIVKREGRLLPGNATISKAGKLPYHHVIHAVGPRWSGYEAPRCVYLLRRAVQLSLCLAEKYKYRSIAIPAISSGVFGFPLGRCVETIVSAIKENFQFKKDGHCLKEIYLVDVSEKTVEAFAEAVKTVFKATLPDTAAPPGLPPAAAGPGKTSWEKGSLVSPGGLQMLLVKEGVQNAKTDVVVNSVPLDLVLSRGPLSKSLLEKAGPELQEELDTVGQGVAVSMGTVLKTSSWNLDCRYVLHVVAPEWRNGSTSSLKIMEDIIRECMEITESLSLKSIAFPAIGTGNLGFPKNIFAELIISEVFKFSSKNQLKTLQEVHFLLHPSDHENIQAFSDEFARRANGNLVSDKIPKAKDTQGFYGTVSSPDSGVYEMKIGSIIFQVASGDITKEEADVIVNSTSNSFNLKAGVSKAILECAGQNVERECSQQAQQRKNDYIITGGGFLRCKNIIHVIGGNDVKSSVSSVLQECEKKNYSSICLPAIGTGNAKQHPDKVAEAIIDAIEDFVQKGSAQSVKKVKVVIFLPQVLDVFYANMKKREGTQLSSQQSVMSKLASFLGFSKQSPQKKNHLVLEKKTESATFRVCGENVTCVEYAISWLQDLIEKEQCPYTSEDECIKDFDEKEYQELNELQKKLNINISLDHKRPLIKVLGISRDVMQARDEIEAMIKRVRLAKEQESRADCISEFIEWQYNDNNTSHCFNKMTNLKLEDARREKKKTVDVKINHRHYTVNLNTYTATDTKGHSLSVQRLTKSKVDIPAHWSDMKQQNFCVVELLPSDPEYNTVASKFNQTCSHFRIEKIERIQNPDLWNSYQAKKKTMDAKNGQTMNEKQLFHGTDAGSVPHVNRNGFNRSYAGKNAVAYGKGTYFAVNANYSANDTYSRPDANGRKHVYYVRVLTGIYTHGNHSLIVPPSKNPQNPTDLYDTVTDNVHHPSLFVAFYDYQAYPEYLITFRK

SEQ ID NO: 16555 - protein, 640 aa, Homo sapiens
MLRSTLAQQGTPVYSVAWGPDSEKVLYTAGKQLIIKPLQPNAKVLQWKAHDGIILKVDWNSVNDLILSAGEDCKYKVWDSYGRPLYNSQPHEHPITSVAWAPDGELFAVGSFHTLRLCDKTGWSYALEKPNTGSIFNIAWSIDGTQIAGACGNGHVVFAHVVEQHWEWKNFQVTLTKRRAMQVRNVLNDAVDLLEFRDRVIKASLNYAHLVVSTSLQCYVFSTKNWNTPIIFDLKEGTVSLILQAERHFLLVDGSSIYLYSYEGRFISSPKFPGMRTDILNAQTVSLSNDTIAIRDKADEKIIFLFEASTGKPLGDGKFLSHKNEILEIALDQKGLTNDRKIAFIDKNRDLCITSVKRFGKEEQIIKLGTMVHTLAWNDTCNILCGLQDTRFIVWYYPNTVYVDRDILPKTLYERDASEFSKNPHIVSFVGNQVTIRRADGSLVHISITPYPAILHEYVSSSKWEDAVRLCRFVKEQTMWACLAAMAVANRDMTTAEIAYAAIGEIDKVQYINSIKNLPSKESKMAHILLFSGNIQEAEIVLLQAGLVYQAIQININLYNWERALELAVKYKTHVDTVLAYRQKFLETFGKQETNKRYLHYAEGLQIDWEKIKAKIEMEITKEREQSSSSQSSKSIGLKP

SEQ ID NO: 16556 - protein, 581 aa, Homo sapiens
MEEHSYIQKELDLQNGSLEEDSVVHSVENDSQNMMESLSPKKYSSSLRFKANGDYSGSYLTLSQPVPAKRSPSPLGTSVRSSPSLAKIQGSKQFSYDGTDKNIPMKPPTPLLNTTSSLSGYPLGRADFDHYTGRDSERALRLSEKPPYSKYSSRHKSHDNVYSLGGLEGRKASGSLLAMWNGSSLSDAGPPPISRSGAASMPSSPKQARKMSIQDSLALQPKLTRHKELASENINLRTRKYSSSSLSHMGAYSRSLPRLYRATENQLTPLSLPPRNSLGNSKRTKLGEKDLPHSVIDNDNYLNFSSLSSGALPYKTSASEGNPYVSSTLSVPASPRVARKMLLASTSSCASDDFDQASYVGTNPSHSLLAGESDRVFATRRNFSCGSVEFDEADLESLRQASGTPQPALRERKSSISSISGRDDLMDYHRRQREERLREQEMERLERQRLETILSLCAEYTKPDSRLSTGTTVEDVQKINKELEKLQLSDEESVFEEALMSPDTRYRCHRKDSLPDADLASCGSLSQSSASFFTPRSTRNDELLSDLTRTPPPPSSTFPKASSESSYLSILPKVMLAQQRY

SEQ ID NO: 16557 - protein, 311 aa, Homo sapiens
FLKKYCNPKKIQGLELQQIKTYGRQILEVLKFLHDKGFPYGHLHASNVMLDGDTCRLLDLENSLLGLPSFYRSYFSQFRKINTLESVDVHCFGHLLYEMTYGRPPDSVPVDSFPPAPSMAVVAVLESTLSCEACKNGMPTISRLLQMPLFSDVLLTTSEKPQFKIPTKLKEALRIAKECIEKRLIEEQKQIHQHRRLTRAQSHHGSEEERKKRKILARKKSKRSALENSEEHSAKYSNSNNSGISALPPPPPPPPPPAAPLPPASTEAPAQLSSQAVNGMSRGALLSSIQNFQKGTLRKAKTCDHSAPKIG

SEQ ID NO: 16558 - protein, 440 aa, Homo sapiens
QAERKADNHTAHRIADQTALRVPSQAESSIFSQATNGVAEQNGHSTPGQAGRRASNPADVSDLRADDQVNQTPSEQTKGKASSQANNVQHEQSDGQVSGLTEERTAEQTERRLPTQAERRTSGQIDGRLAMPSDQRGSRQTDHRMAGQSERRASEQMDRRMSGEAERRTSEQITHRLSKLSERRPSVQIDSGSSVPSDQSPSVQIDSGSSVPSDQRPSVQIDRRMSGKVRRRSSEKTDYRLAGLADPGTSEQTDLRLYGLVDHKTSVKTHHQVYGQATELAEHQAIDQAHSNADQPPVDNAHYTESDQTDHLADRQANHKDQLSYYETRGQSEDRIFPQLGNSKEDKEADYRVQPCKFEDSQVDLNSKPSVEMETQNATTIPPYNPVDARFTSNFQAKDQALFPRLPSISSKLNYTSSQEKTQAIVTKSVQEMMKKRDKM

SEQ ID NO: 16559 - protein, 1188 aa, Homo sapiens
MHPQSLAEEEIKTEQEVVEGMDISTRSKDPGSAERTAQKRKFPSPPHSSNGHSPQDTSTSPIKKKKKPGLLNSNNKEQSELRHGPFYYMKQPLTTDPVDVVPQDGRNDFYCWVCHREGQVLCCELCPRVYHAKCLRLTSEPEGDWFCPECEKITVAECIETQSKAMTMLTIEQLSYLLKFAIQKMKQPGTDAFQKPVPLEQHPDYAEYIFHPMDLCTLEKNAKKKMYGCTEAFLADAKWILHNCIIYNGGNHKLTQIAKVVIKICEHEMNEIEVCPECYLAACQKRDNWFCEPCSNPHPLVWAKLKGFPFWPAKALRDKDGQVDARFFGQHDRAWVPINNCYLMSKEIPFSVKKTKSIFNSAMQEMEVYVENIRRKFGVFNYSPFRTPYTPNSQYQMLLDPTNPSAGTAKIDKQEKVKLNFDMTASPKILMSKPVLSGGTGRRISLSDMPRSPMSTNSSVHTGSDVEQDAEKKATSSHFSASEESMDFLDKSTASPASTKTGQAGSLSGSPKPFSPQLSAPITTKTDKTSTTGSILNLNLDRSKAEMDLKELSESVQQQSTPVPLISPKRQIRSRFQLNLDKTIESCKAQLGINEISEDVYTAVEHSDSEDSEKSDSSDSEYISDDEQKSKNEPEDTEDKEGCQMDKEPSAVKKKPKPTNPVEIKEELKSTSPASEKADPGAVKDKASPEPEKDFSEKAKPSPHPIKDKLKGKDETDSPTVHLGLDSDSESELVIDLGEDHSGREGRKNKKEPKEPSPKQDVVGKTPPSTTVGSHSPPETPVLTRSSAQTSAAGATATTSTSSTVTVTAPAPAATGSPVKKQRPLLPKETAPAVQRVVWNSSTVQQKEITQSPSTSTITLVTSTQSSPLVTSSGSMSTLVSSVNADLPIATASADVAADIAKYTSKMMDAIKGTMTEIYNDLSKNTTGSTIAEIRRLRIEIEKLQWLHQQELSEMKHNLELTMAEMRQSLEQERDRLIAEVKKQLELEKQQAVDETKKKQWCANCKKEAIFYCCWNTSYCDYPCQQAHWPEHMKSCTQSATAPQQEADAEVNTETLNKSSQGSSSSTQSAPSETASASKEKETSAEKSKESGSTLDLSGSRETPSSILLGSNQGSVSKRCDKQPAYAPTTTDHQPHPNYPAQKYHSRSNKSSWSSSDEKRGSTRSDHNTSTSTKSLLPKESRLDTFWD

SEQ ID NO: 16560 - protein, 532 aa, Homo sapiens
MFGKWKYEKPDGSPVFIAFRSSTKKSVQYDDVPEYKDRLNLSENYTLSISNARISDEKRFVCMLVTEDNVFEAPTIVKVFKQPSKPEIVSKALFLETEQLKKLGDCISEDSYPDGNITWYRNGKVLHPLEGAVVIIFKKEMDPVTQLYTMTSTLEYKTTKADIQMPFTCSVTYYGPSGQKTIHSEQAVFDIYYPTEQVTIQVLPPKNAIKEGDNITLKCLGNGNPPPEEFLFYLPGQPEGIRSSNTYTLTDVRRNATGDYKCSLIDKKSMIASTAITVHYLDLSLNPSGEVTRQIGDALPVSCTISASRNATVVWMKDNIRLRSSPSFSSLHYQDAGNYVCETALQEVEGLKKRESLTLIVEGKPQIKMTKKTDPSGLSKTIICHVEGFPKPAIQWTITGSGSVINQTEESPYINGRYYSKIIISPEENVTLTCTAENQLERTVNSLNVSAISIPEHDEADEISDENREKVNDQAKLIVGIVVGLLLAALVAGVVYWLYMKKSKTASKHVNKDLGNMEENKKLEENNHKTEA

SEQ ID NO: 16561 - protein, 490 aa, Homo sapiens
MQQLQQQHLLSLQRQGLLTIQPGQPALPLQPLAQGMIPTELQQLWKEVTSAHTAEETTGNNHSSLDLTTTCVSSSAPSKTSLIMNPHASTNGQLSVHTPKRESLSHEEHPHSHPLYGHGVCKWPGCEAVCEDFQSFLKHLNSEHALDDRSTAQCRVQMQVVQQLELQLAKDKERLQAMMTHLHVKSTEPKAAPQPLNLVSSVTLSKSASEASPQSLPHTPTTPTAPLTPVTQGPSVITTTSMHTVGPIRRRYSDKYNVPISSADIAQNQEFYKNAEVRPPFTYASLIRQAILESPEKQLTLNEIYNWFTRMFAYFRRNAATWKNAVRHNLSLHKCFVRVENVKGAVWTVDEVEFQKRRPQKISGNPSLIKNMQSSHAYCTPLNAALQASMAENSIPLYTTASMGNPTLGNLASAIREELNGAMEHTNSNESDSSPGRSPMQAVHPVHVKEEPLDPEEAEGPLSLVTTANHSPDFDHDRDYEDEPVNEDME

SEQ ID NO: 16562 - protein, 519 aa, Homo sapiens
MEEMFHKKSEAVRRLVEAAEEAHLKHEFDADLQYEYFNAVLINERDKDGNFLELGKEFILAPNDHFNNLPVNISLSDVQVPTNMYNKDPAIVNGVYWSESLNKVFVDNFDRDPSLIWQYFGSAKGFFRQYPGIKWEPDENGVIAFDCRNRKWYIQAATSPKDVVILVDVSGSMKGLRLTIAKQTVSSILDTLGDDDFFNIIAYNEELHYVEPCLNGTLVQADRTNKEHFREHLDKLFAKGIGMLDIALNEAFNILSDFNHTGQGSICSQAIMLITDGAVDTYDTIFAKYNWPDRKVRIFTYLIGREAAFADNLKWMACANKGFFTQISTLADVQENVMEYLHVLSRPKVIDQEHDVVWTEAYIDSTLTDDQGPVLMTTVAMPVFSKQNETRSKGILLGVVGTDVPVKELLKTIPKYKLGIHGYAFAITNNGYILTHPELRLLYEEGKKRRKPNYSSVDLSEVEWEDRDDVLRNAMVNRKTGKFSMEVKKTVDKGFRCGAFQRSWEIFLPRECNHRRRPA

SEQ ID NO: 16563 - protein, 839 aa, Homo sapiens
MVQLYNLHPFGSQQVVPCKLEPDRFCGGGRDALFVAAGCKVEAFAVAGQELCQPRCAFSTLGRVLRLAYSEAGISNEISQLESDDFVICQKPLELLGEKSEQSGLSVTLESTGLADEKRKYSHFQHLLYRRFAPDISSYVLSDDIKLHSLQLLPIYQTGSLTSDGKNLSQEKELLSLFCFFSLPHVGYLYMVVKSVELMSVYQYPEKSQQAVLTPQFLHVITSNNLQCFTVRCSAAAAREEDPYMDTTLKACPPVSMDVCALRIQLFIGLKAICHFKNHIILLTKAEPEAIPERRQSPKRLLSRKDTSVKIKIPPVAEAGWNLYIVNTISPVQLYKEMVDYSNTYKTVKTQSCIHLLSEAHLLVRAALMDASQLEPGEKAELLEAFKESCGHLGDCYSRLDSQHSHLTLPYYKMSGLSMAEVLARTDWTVEDGLQKYERGLIFYINHSLYENLDEELNEELAAKVVQMFYVAEPKQVPHILCSPSMKNINPLTAMSYLRKLDTSGFSSILVTLTKAAVALKMGDLDMHRNEMKSHSEMKLVCGFILEPRLLIQQRKGQIVPTELALHLKETQPGLLVASVLGLQKNNKIGIEEADSFFKVLCAKDEDTIPQLLVDFWEAQLVACLPDVVLQELFFKLTSQYIWRLSKRQPPDTTPLRTSEDLINACSHYGLIYPWVHVVISSDSLADKNYTEDLSKLQSLICGPSFDIASIIPFLEPLSEDTIAGLSVHVLCRTRLKEYEQCIDILLERCPEAVIPYANHELKEENRTLWWKKLLPELCQRIKCGGEKYQLYLSSLKETLSIVAVELELKDFMNVLPEDGTATFFLPYLLYCSRKKPLT

SEQ ID NO: 16564 - protein, 1640 aa, Homo sapiens
MLSRLSGLANVVLHELSGDDDTDQNMRAPLDPELHQESDMEFNNTTQEDVQERLAYAEQLVVELKDIIRQKDVQLQQKDEALQEERKAADNKIKKLKLHAKAKLTSLNKYIEEMKAQGGTVLPTEPQSEEQLSKHDKSSTEEEMEIEKIKHKLQEKEELISTLQAQLTQAQAEQPAQSSTEMEEFVMMKQQLQEKEEFISTLQAQLSQTQAEQAAQKLRVLQRKLEEHEESLVGRAQVVDLLQQELTAAEQRNQILSQQLQQMEAEHNTLRNTVETEREESKILLEKMELEVAERKLSFHNLQEEMHHLLEQFEQAGQAQAELESRYSALEQKHKAEMEEKTSHILSLQKTGQELQSACDALKDQNSKLLQDKNEQAVQSAQTIQQLEDQLQQKSKEISQFLNRLPLQQHETASQTSFPDVYNEGTQAVTEENIASLQKRVVELENEKGALLLSSIELEELKAENEKLSSQITLLEAQNRTGEADREVSEISIVDIANKRSSSAEESGQDVLENTFSQKHKELSVLLLEMKEAQEEIAFLKLQLQGKRAEEADHEVLDQKEMKQMEGEGIAPIKMKVFLEDTGQDFPLMPNEESSLPAVEKEQASTEHQSRTSEEISLNDAGVELKSTKQDGDKSLSAVPDIGQCHQDELERLKSQILELELNFHKAQEIYEKNLDEKAKEISNLNQLIEEFKKNADNNSSAFTALSEERDQLLSQVKELSMVTELRAQVKQLEMNLAEAERQRRLDYESQTAHDNLLTEQIHSLSIEAKSKDVKIEVLQNELDDVQLQFSEQSTLIRSLQSQLQNKESEVLEGAERVRHISSKVEELSQALSQKELEITKMDQLLLEKKRDVETLQQTIEEKDQQVTEISFSMTEKMVQLNEEKFSLGVEIKTLKEQLNLLSRAEEAKKEQVEEDNEVSSGLKQNYDEMSPAGQISKEELQHEFDLLKKENEQRKRKLQAALINRKELLQRVSRLEEELANLKDESKKEIPLSETERGEVEEDKENKEYSEKCVTSKCQEIEIYLKQTISEKEVELQHIRKDLEEKLAAEEQFQALVKQMNQTLQDKTNQIDLLQAEISENQAIIQKLITSNTDASDGDSVALVKETVVISPPCTGSSEHWKPELEEKILALEKEKEQLQKKLQEALTSRKAILKKAQEKERHLREELKQQKDDYNRLQEQFDEQSKENENIGDQLRQLQIQVRESIDGKLPSTDQQESCSSTPGLEEPLFKATEQHHTQPVLESNLCPDWPSHSEDASALQGGTSVAQIKAQLKEIEAEKVELELKVSSTTSELTKKSEEVFQLQEQINKQGLEIESLKTVSHEAEVHAESLQQKLESSQLQIAGLEHLRELQPKLDELQKLISKKEEDVSYLSGQLSEKEAALTKIQTEIIEQEDLIKALHTQLEMQAKEHDERIKQLQVELCEMKQKPEEIGEESRAKQQIQRKLQAALISRKEALKENKSLQEELSLARGTIERLTKSLADVESQVSAQNKEKDTVLGRLALLQEERDKLITEMDRSLLENQSLSSSCESLKLALEGLTEDKEKLVKEIESLKSSKIAESTEWQEKHKELQKEYEILLQSYENVSNEAERIQHVVEAVRQEKQELYGKLRSTEANKKETEKQLQEAEQEMEEMKE

SEQ ID NO: 16565 - protein, 615 aa, Homo sapiens
MAQKKYLQAKLTQFLREDRIQLWKPPYTDENKKVGLALKDLAKQYSDRLECCENEVEKVIEEIRCKAIERGTGNDNYRTTGIATIEVFLPPRLKKDRKNLLETRLHITGRELRSKIAETFGLQENYIKIVINKKQLQLGKTLEEQGVAHNVKAMVLELKQSEEDARKNFQLEEEEQNEAKLKEKQIQRTKRGLEILAKRAAETVVDPEMTPYLDIANQTGRSIRIPPSERKALMLAMGYHEKGRAFLKRKEYGIALPCLLDADKYFCECCRELLDTVDNYAVLQLDIVWCYFRLEQLECLDDAEKKLNLAQKCFKNCYGENHQRLVHIKGNCGKEKVLFLRLYLLQGIRNYHSGNDVEAYEYLNKARQLFKELYIDPSKVDNLLQLGFTAQEARLGLRACDGNVDHAATHITNRREELAQIRKEEKEKKRRRLENIRFLKGMGYSTHAAQQVLHAASGNLDEALKILLSNPQMWWLNDSNPETDNRQESPSQENIDRLVYMGFDALVAEAALRVFRGNVQLAAQTLAHNGGSLPPELPLSPEDSLSPPATSPSDSAGTSSASTDEDMETEAVNEILEDIPEHEEDYLDSTLEDEEIIIAEYLSYVENRKSATKKN

SEQ ID NO: 16566 - protein, 351 aa, Homo sapiens
MVEWCLPQDIDLEGVEFKSMASGSHKIQSDFIYFRKGPFFGLACFANMPVESELERGARMKSVGILSPSYTLLYRYMHFLENQVRHQLEMPGHYSHLAAFYEDKKGVLHAGPGRGSSLPPVYWLPSIHRYMYPEMKFFGEQILILWKFALLRKRILIFSPPPVGVVCYRVYCCCCLANVSLPGIGGTIPESKPFFYVNVADIESLEVEVSYVACTTEKIFEEKRELYDVYVDNQNVKTHHDHLQPLLKINSADREKYRRLNEQRQMLLYSQEVEEDYNPCEEDLFVLFFLEQNNRIFQTLLEVSASQDKTLTAEHARGMGLDPQGDRSFLLDLLEAYGIDVMLVIDNPCCP

SEQ ID NO: 16567 - protein, 78 aa, Homo sapiens
MENNIQMIQADTFRHLHHLEVLQLGRNSIRQIEVGAFNGLASLNTLELFDNWLTVIPSGAFEYLSKLRELWLRNNPIE

SEQ ID NO: 16568 - protein, 536 aa, Homo sapiens
MFEQLKPIEPVQKTLPWVGEVAATLQEAMKRDCWREARVKKKPVTFEDVAVNFTQEEWDCLDASQRVLYQDVMSETFKNLTSVARIFLHKPELITKLEQEEEQWREFVHLPNTEGLSEGKKKELREQHPSLRDEGTSDDKVFLACRGAGQCPLSAPAGTMDRTRVLQASQAGPPFFCYTCGKCFSRRSYLYSHQFVHNPKLTNSCSQCGKLFRSPKSLSYHRRMHLGERPFCCTLCDKTYCDASGLSRHRRVHLGYRPHSCSVCGKSFRDQSELKRHQKIHQNQEPVDGNQECTLRIPGTQAEFQTPIARSQRSIQGLLDVNHAPVARSQEPIFRTEGPMAQNQASVLKNQAPVTRTQAPITGTLCQDARSNSHPVKPSRLNVFCCPHCSLTFSKKSYLSRHQKAHLTEPPNYCFHCSKSFSSFSRLVRHQQTHWKQKSYLCPICDLSFGEKEGLMDHWRGYKGKDLCQSSHHKCRVILGQWLGFSHDVPTMAGEEWKHGGDQSPPRIHTPRRRGLREKACKGDKTKEAVSILKHK

SEQ ID NO: 16569 - protein, 957 aa, Homo sapiens
MEGAKPTLQLVYQAVQALYHDPDPSGKERASFWLGELQRSVHAWEISDQLLQIRQDVESCYFAAQTMKMKIQTSFYELPTDSHASLRDSLLTHIQNLKDLSPVIVTQLALAIADLALQMPSWKGCVQTLVEKYSNDVTSLPFLLEILTVLPEEVHSRSLRIGANRRTEIIEDLAFYSSTVVSLLMTCVEKAGTDEKMLMKVFRCLGSWFNLGVLDSNFMANNKLLALLFEVLQQDKTSSNLHEAASDCVCSALYAIENVETNLPLAMQLFQGVLTLETAYHMAVAREDLDKVLNYCRIFTELCETFLEKIVCTPGQGLGDLRTLELLLICAGHPQYEVVEISFNFWYRLGEHLYKTNDEVIHGIFKAYIQRLLHALARHCQLEPDHEGVPEETDDFGEFRMRVSDLVKDLIFLIGSMECFAQLYSTLKEGNPPWEVTEAVLFIMAAIAKSVDPKKPFSNAVCRHSLLFGQNITSEISNCEYLPPVLRENNPTLVEVLEGVVRLPETVHTAVRYTSIELVGEMSEVVDRNPQFLDPVLGYLMKGLCEKPLASAAAKAIHNICSVCRDHMAQHFNGLLEIARSLDSFLLSPEAAVGLLKGTALVLARLPLDKITECLSELCSVQVMALKKLLSQEPSNGISSDPTVFLDRLAVIFRHTNPIVENGQTHPCQKVIQEIWPVLSETLNKHRADNRIVERCCRCLRFAVRCVGKGSAALLQPLVTQMVNVYHVHQHSCFLYLGSILVDEYGMEEGCRQGLLDMLQALCIPTFQLLEQQNGLQNHPDTVDDLFRLATRFIQRSPVTLLRSQVVIPILQWAIASTTLDHRDANCSVMRFLRDLIHTGVANDHEEDFELRKELIGQVMNQLGQQLVSQLLHTCCFCLPPYTLPDVAEVLWEIMQVDRPTFCRWLENSLKGLPKETTVGAVTVTHKQLTDFHKQVTSAEECKQVCWALRDFTRLFR

SEQ ID NO: 16570 - protein, 875 aa, Homo sapiens
MDEEEDNLSLLTALLEENESALDCNSEENNFLTRENGEPDAFDELFDADGDGESYTEEADDGETGETRDEKENLATLFGDMEDLTDEEEVPASQSTENRVLPAPAPRREKTNEELQEELRNLQEQMKALQEQLKVTTIKQTASPARLQKSPVEKSPRPPLKERRVQRIQESTCFSAELDVPALPRTKRVARTPKASPPDPKSSSSRMTSAPSQPLQTISRNKPSGITRGQIVGTPGSSGETTQPICVEAFSGLRLRRPRVSSTEMNKKMTGRKLIRLSQIKEKMAREKLEEIDWVTFGVILKKVTPQSVNSGKTFSIWKLNDLRDLTQCVSLFLFGEVHKALWKTEQGTVVGILNANPMKPKDGSEEVCLSIDHPQKVLIMGEALDLGTCKAKKKNGEPCTQTVNLRDCEYCQYHVQAQYKKLSAKRADLQSTFSGGRIPKKFARRGTSLKERLCQDGFYYGGVSSASYAASIAAAVAPKKKIQTTLSNLVVKGTNLIIQETRQKLGIPQKSLSCSEEFKELMDLPTCGARNLKQHLAKATASGIMGSPKPAIKSISASALLKQQKQRMLEMRRRKSEEIQKRFLQSSSEVESPAVPSSSRQPPAQPPRTGSEFPRLEGAPATMTPKLGRGVLEGDDVLFYDESPPPRPKLSALAEAKKLAAITKLRAKGQVLTKTNPNSIKKKQKDPQDILEVKERVEKNTMFSSQAEDELEPARKKRREQLAYLESEEFQKILKAKSKHTGILKEAEAEMQERYFEPLVKKEQMEEKMRNIREVKCRVVTCKTCAYTHFKLLETCVSEQHEYHWHDGVKRFFKCPCGNRSISLDRLPNKHCSNCGLYKWERDGMLKEKTGPKIGGETLLPRGEEHAKFLNSLK

SEQ ID NO: 16571 - protein, 397 aa, Homo sapiens
MKAQTALSFFLILITSLSGSQGIFPLAFFIYVPMNEQIVIGRLDEDIILPSSFERGSEVVIHWKYQDSYKVHSYYKGSDHLESQDPRYANRTSLFYNEIQNGNASLFFRRVSLLDEGIYTCYVGTAIQVITNKVVLKVGVFLTPVMKYEKRNTNSFLICSVLSVYPRPIITWKMDNTPISENNMEETGSLDSFSINSPLNITGSNSSYECTIENSLLKQTWTGRWTMKDGLHKMQSEHVSLSCQPVNDYFSPNQDFKVTWSRMKSGTFSVLAYYLSSSQNTIINESRFSWNKELINQSDFSMNLMDLNLSDSGEYLCNISSDEYTLLTIHTVHVEPSQETASHNKGLWILVPSAILAAFLLIWSVKCCRERCCVPPGERCPSAPDNGEENVPLSGKV

SEQ ID NO: 16572 - protein, 2570 aa, Homo sapiens
MRKHRHLPLVAVFCLFLSGFPTTHAQQQQAVIEVNKRDIVFLVDGSSALGLANFNAIRDFIAKVIQRLEIGQDLIQVAVAQYADTVRPEFYFNTHPTKREVITAVRKMKPLDGSALYTGSALDFVRNNLFTSSAGYRAAEGIPKLLVLITGGKSLDEISQPAQELKRSSIMAFAIGNKGADQAELEEIAFDSSLVFIPAEFRAAPLQGMLPGLLAPLRTLSGTPEESKRDILFLFDGSANLVGQFPVVRDFLYKIIDELNVKPEGTRIAVAQYSDDVKVESRFDEHQSKPEILNLVKRMKIKTGKALNLGYALDYAQRYIFVKSAGSRIEDGVLQFLVLLVAGRSSDRVDGPASNLKQSGVVPFIFQAKNADPAELEQIVLSPAFILAAESLPKIGDLHPQIVNLLKSVHNGAPAPVSGEKDVVFLLDGSEGVRSGFPLLKEFVQRVVESLDVGQDRVRVAVVQYSDRTRPEFYLNSYMNKQDVVNAVRQLTLLGGPTPNTGAALEFVLRNILVSSAGSRITEGVPQLLIVLTADRSGDDVRNPSVVVKRGGAVPIGIGIGNADITEMQTISFIPDFAVAIPTFRQLGTVQQVISERVTQLTREELSRLQPVLQPLPSPGVGGKRDVVFLIDGSQSAGPEFQYVRTLIERLVDYLDVGFDTTRVAVIQFSDDPKVEFLLNAHSSKDEVQNAVQRLRPKGGRQINVGNALEYVSRNIFKRPLGSRIEEGVPQFLVLISSGKSDDEVDDPAVELKQFGVAPFTIARNADQEELVKISLSPEYVFSVSTFRELPSLEQKLLTPITTLTSEQIQKLLASTRYPPPAVESDAADIVFLIDSSEGVRPDGFAHIRDFVSRIVRRLNIGPSKVRVGVVQFSNDVFPEFYLKTYRSQAPVLDAIRRLRLRGGSPLNTGKALEFVARNLFVKSAGSRIEDGVPQHLVLVLGGKSQDDVSRFAQVIRSSGIVSLGVGDRNIDRTELQTITNDPRLVFTVREFRELPNIEERIMNSFGPSAATPAPPGVDTPPPSRPEKKKADIVFLLDGSINFRRDSFQEVLRFVSEIVDTVYEDGDSIQVGLVQYNSDPTDEFFLKDFSTKRQIIDAINKVVYKGGRHANTKVGLEHLRVNHFVPEAGSRLDQRVPQIAFVITGGKSVEDAQDVSLALTQRGVKVFAVGVRNIDSEEVGKIASNSATAFRVGNVQELSELSEQVLETLHDAMHETLCPGVTDAAKACNLDVILGFDGSRDQNVFVAQKGFESKVDAILNRISQMHRVSCSGGRSPTVRVSVVANTPSGPVEAFDFDEYQPEMLEKFRNMRSQHPYVLTEDTLKVYLNKFRQSSPDSVKVVIHFTDGADGDLADLHRASENLRQEGVRALILVGLERVVNLERLMHLEFGRGFMYDRPLRLNLLDLDYELAEQLDNIAEKACCGVPCKCSGQRGDRGPIGSIGPKGIPGEDGYRGYPGDEGGPGERGPPGVNGTQGFQGCPGQRGVKGSRGFPGEKGEVGEIGLDGLDGEDGDKGLPGSSGEKGNPGRRGDKGPRGEKGERGDVGIRGDPGNPGQDSQERGPKGETGDLGPMGVPGRDGVPGGPGETGKNGGFGRRGPPGAKGNKGGPGQPGFEGEQGTRGAQGPAGPAGPPGLIGEQGISGPRGSGGAAGAPGERGRTGPLGRKGEPGEPGPKGGIGNRGPRGETGDDGRDGVGSEGRRGKKGERGFPGYPGPKGNPGEPGLNGTTGPKGIRGRRGNSGPPGIVGQKGDPGYPGPAGPKGNRGDSIDQCALIQSIKDKCPCCYGPLECPVFPTELAFALDTSEGVNQDTFGRMRDVVLSIVNDLTIAESNCPRGARVAVVTYNNEVTTEIRFADSKRKSVLLDKIKNLQVALTSKQQSLETAMSFVARNTFKRVRNGFLMRKVAVFFSNTPTRASPQLREAVLKLSDAGITPLFLTRQEDRQLINALQINNTAVGHALVLPAGRDLTDFLENVLTCHVCLDICNIDPSCGFGSWRPSFRDRRAAGSDVDIDMAFILDSAETTTLFQFNEMKKYIAYLVRQLDMSPDPKASQHFARVAVVQHAPSESVDNASMPPVKVEFSLTDYGSKEKLVDFLSRGMTQLQGTRALGSAIEYTIENVFESAPNPRDLKIVVLMLTGEVPEQQLEEAQRVILQAKCKGYFFVVLGIGRKVNIKEVYTFASEPNDVFFKLVDKSTELNEEPLMRFGRLLPSFVSSENAFYLSPDIRKQCDWFQGDQPTKNLVKFGHKQVNVPNNVTSSPTSNPVTTTKPVTTTKPVTTTTKPVTTTTKPVTIINQPSVKPAAAKPAPAKPVAAKPVATKMATVRPPVAVKPATAAKPVAAKPAAVRPPAAAAAKPVATKPEVPRPQAAKPAATKPATTKPMVKMSREVQVFEITENSAKLHWERAEPPGPYFYDLTVTSAHDQSLVLKQNLTVTDRVIGGLLAGQTYHVAVVCYLRSQVRATYHGSFSTKKSQPPPPQPARSASSSTINLMVSTEPLALTETDICKLPKDEGTCRDFILKWYYDPNTKSCARFWYGGCGGNENKFGSQKECEKVCAPVLAKPGVISVMGT

SEQ ID NO: 16573 - protein, 117 aa, Homo sapiens
MDMRVPAQLLGLLLLWFPGARCNIQMTQSPSAMSASVGDRVTITCRARQGISNYLAWFQQKPGKVPKHLIYAASSLQSGVPSRFSGSGSGTEFTLTISSLQPEDFATYYCLQHNSYP

SEQ ID NO: 16574 - protein, 1115 aa, Homo sapiens
MEEHSYIQKELDLQNGSLEEDSVVHSVENDSQNMMESLSPKKYSSSLRFKANGDYSGSYLTLSQPVPAKRSPSPLGTSVRSSPSLAKIQGSKQFSYDGTDKNIPMKPPTPLLNTTSSLSGYPLGRADFDHYTGRDSERALRLSEKPPYSKYSSRHKSHDNVYSLGGLEGRKASGSLLAMWNGSSLSDAGPPPISRSGAASMPSSPKQARKMSIQDSLALQPKLTRHKELASENINLRTRKYSSSSLSHMGAYSRSLPRLYRATENQLTPLSLPPRNSLGNSKRTKLGEKDLPHSVIDNDNYLNFSSLSSGALPYKTSASEGNPYVSSTLSVPASPRVARKMLLASTSSCASDDFDQASYVGTNPSHSLLAGESDRVFATRRNFSCGSVEFDEADLESLRQASGTPQPALRERKSSISSISGRDDLMDYHRRQREERLREQEMERLERQRLETILSLCAEYTKPDSRLSTGTTVEDVQKINKELEKLQLSDEESVFEEALMSPDTRYRCHRKDSLPDADLASCGSLSQSSASFFTPRSTRNDELLSDLTRTPPPPSSTFPKASSESSYLSILPKTPEGISEEQRSQELAAMEETRIVILNNLEELKQKIKDINDQMDESFRELDMECALLDGEQKSETTELMKEKEILDHLNRKIAELEKNIVGEKTKDADLLDVESKHFEDLEFQQLEHESRLDEEKENLTQQLLREVAEYQRNIVSRKEKISALKKQANHIVQQAQREQDHFVKEKNNLIMMLQREKENLCNLEKKYSSLSGGKGFPVNPNTLKEGYISVNEINEPCGNSTNLSPSTQFPADADAVATEPATAVLASQPQSKEHFRSLEERKKQHKEGLYLSDTLPRKKTTSSISPHFSSATMGRSITPKAHLPLGQSNSCGSVLPPSLAAMAKDSESRRMLRGYNHQQMSEGHRQKSEFYNRTASESNVYLNSFHYPDHSYKDQAFDTLSLDSSDSMETSISACSPDNISSASTSNIARIEEMERLLKQAHAEKTRLLESREREMEAKKRALEEEKRRREILEKRLQEETSQRQKLIEKEVKIRERQRAQARPLTRYLPVRKEDFDLRSHVETAGHNIDTCYHVSITEKTCRGFLIKMGGKIK

SEQ ID NO: 16575 - protein, 209 aa, Homo sapiens
MWKSVVGHDVSVSVETQGDDWDTDPDFVNDISEKEQRWGAKTIEGSGRTEHINIHQLRNKVSEEHDVLRKKEMESGPKASHGYGGRFGVERDRMDKSAVGHEYVAEVEKHSSQTDAAKGFGGKYGVERDRADKITLVALVAGTGWRRINGTKQLWDMTTRERRRNTSPREIMPRALVASMESRRTEWIRALSASMKWRPRPQLIRRRRP

SEQ ID NO: 16576 - protein, 4510 aa, Homo sapiens
MKGARWRRVPWVSLSCLCLCLLPHVVPGTTEDTLITGSKTAAPVTSTGSTTATLEGQSTAASSRTSNQDISASSQNHQTKSTETTSKAQTDTLTQMMTSTLFSSPSVHNVMETAPPDEMTTSFPSSVTNTLMMTSKTITMTTSTDSTLGNTEETSTAGTESSTPVTSAVSITAGQEGQSRTTSWRTSIQDTSASSQNHWTRSTQTTRESQTSTLTHRTTSTPSFSPSVHNVTGTVSQKTSPSGETATSSLCSVTNTSMMTSEKITVTTSTGSTLGNPGETSSVPVTGSLMPVTSAALVTFDPEGQSPATFSRTSTQDTTAFSKNHQTQSVETTRVSQINTLNTLTPVTTSTVLSSPSGFNPSGTVSQETFPSGETTTSSPSSVSNTFLVTSKVFRMPTSRDSTLGNTEETSLSVSGTISAITSKVSTIWWSDTLSTALSPSSLPPKISTAFHTQQSEGAETTGRPHERSSFSPGVSQEIFTLHETTTWPSSFSSKGHTTWSQTELPSTSTGAATRLVTGNPSTGTAGTIPRVPSKVSAIGEPGEPTTYSSHSTTLPKTTGAGAQTQWTQETGTTGEALLSSPSYSVTQMIKTATSPSSSPMLDRHTSQQITTAPSTNHSTIHSTSTSPQESPAVSQRGHTQAPQTTQESQTTRSVSPMTDTKTVTTPGSSFTASGHSPSEIVPQDAPTISAATTFAPAPTGDGHTTQAPTTALQAAPSSHDATLGPSGGTSLSKTGALTLANSVVSTPGGPEGQWTSASASTSPDTAAAMTHTHQAESTEASGQTQTSEPASSGSRTTSAGTATPSSSGASGTTPSGSEGISTSGETTRFSSNPSRDSHTTQSTTELLSASASHGAIPVSTGMASSIVPGTFHPTLSEASTAGRPTGQSSPTSPSASPQETAAISRMAQTQRTRTSRGSDTISLASQATDTFSTVPPTPPSITSTGLTSPQTETHTLSPSGSGKTFTTALISNATPLPVTYASSASTGHTTPLHVTDASSVSTGHATPLPVTSPSSVSTGHTTPLPVTDTSSESTGHVTPLPVTSFSSASTGDSTPLPVTDTSSASTGHVTPLPVTSLSSASTGDTTPLPVTDTSSASTGHATSLPVTDTSSVSTGHTTPLPVTDTSSASTGHATSLPVTDTSSVSTGHTTPLHVTDASSASTGQATPLPVTSLSSVSTGDTTPLPVTSPSSASTGHATPLLVTDTSSASTGHATPLPVTDASSVSTDHATSLPVTIPSAASTGHTTPLPVTDTSSASTGQATSLLVTDTSSVSTGDTTPLPVTSTSSASTGHVTPLHVTSPSSASTGHATPLPVTSLSSASTGDTMPLPVTSPSSASTGDTTPLPVTDASSVSTGHTTPLHVTDASSASTGQATPLPVTSLSSVSTGDTTPLPVTSPSSASTGHATPLLVTDTSSASTGHATPLPVTDASSVSTDHATSLPVTIPSAASTGHTTPLPVTDTSSASTGQATSLLVTDTSSVSTGDTTPLPVTSTSSASTGHVTPLHVTSPSSASTGHATPLPVTSLSSASTGDTMPLPVTSPSSASTGDTTPLPVTDASSVSTGHTTPLPVTSPSSASTGHTTPLPVTDTSSASKGDTTPLPVTSPSSASTGHTTPLPVTDTSSASTGDTTPLPVTNASSLSTGHATPLHVTSPSSASTGHATPLPVTSTSSASTGHATPLPVTGLSSATTDDTTRLPVTDVSSASTGQATPLPVTSLSSVSTGDTTPLPVTSPSSASTGHASPLLVTDASSASTGQATPLPVTDTSSVSTAHATPLPVTGLSSASTDDTTRLPVTDVSSASTGQAIPLPVTSPSSASTGDTTPLPVTDASSASTGDTTSLPVTIPSSASSGHTTSLPVTDASSVSTGHATSLLVTDASSVSTGDTTPLPVTDTNSASTGDTTPLHVTDASSVSTGHATSLPVTSLSSASTGDTTPLPVTSPSSASSGHTTPLPVTDASSVPTGHATSLPVTDASSVSTGHATPLPVTDASSVSTGHATPLPVTDTSSVSTGQATPLPVTSLSSASTGDTTPLPVTDTSSASTGQDTPLPVTSLSSVSTGDTTPLPVTNPSSASTGHATPLLVTDASSISTGHATSLLVTDASSVSTGHATALHDTDASSLSTGDTTPLPVTSPSSTSTGDTTPLPVTETSSVSTGHATSLPVTDTSSASTGHATSLPVTDTSSASTGHATPLPVTDTSSASTGQATPLPVTSPSSASTGHAIPLLVTDTSSASTGQATPLPVTSLSSASTGDTTPLPVTDASSVSTGHATSLPVTSLSSVSTGDTTPLPVTSPSSASTGHATPLHVTDASSASTGHATPLPVTSLSSASTGDTTPLPVTSPSSASTGHATPLHVTDASSVSTGDTTPLPVTSSSSASSGHTTPLPVTDASSASTGDTTPLPVTDTSSASTGHATHLPVTGLSSASTGDTTRLPVTNVSSASTGHATPLPVTSTSSASTGDTTPLPGTDTSSVSTGHTTPLLVTDASSVSTGDTTRLPVTSPSSASTGHTTPLPVTDTPSASTGDTTPLPVTNASSLSTRHATSLHVTSPSSASTGHATSLPVTDTSAASTGHATPLPVTSTSSASTGDTTPLPVTDTYSASTGQATPLPVTSLSSVSTGDTTPLPVTSPSSASTGHATPLLVTDASSASTGQATPLPVTSLSSVSTGDTTPLPVTSPSSASTGHATSLPVTDTSSASTGDTTSLPVTDTSSAYTGDTTSLPVTDTSSSSTGDTTPLLVTETSSVSTGDTTPLPVTDTSSASTGHATPLPVTNTSSVSTGHATPLHVTSPSSASTGHTTPLPVTDASSVSTGHATSLPVTDASSVFTGHATSLPVTIPSSASSGHTTPLPVTDASSVSTGHATSLPVTDASSVSTGHATPLPVTDASSVSTGHATPLPLTSLSSVSTGDTTPLPVTDTSSASTGQATPLPVTSLSSVSTGDTTPLPVTDTSSASTGHATSLPVTDTSSASTGHATPLPDTDTSSASTGHATLLPVTDTSSASIGHATSLPVTDTSSISTGHATPLHVTSPSSASTGHATPLPVTDTSSASTGHANPLHVTSPSSASTGHATPLPVTDTSSASTGHATPLPVTSLSSVSTGDTTPLPVTSPSSASTGHTTPLPVTDTSSASTGQATALPVTSTSSASTGDTTPLPVTDTSSASTGQATPLPVTSLSSVSTGDTTPLPVTSPSSASTGHATPLLVTDASSASTGQATPLPVTSLSSVSTGDTTPLPVTSPSSASTGHATSLPVTDTSSASTGDTTSLPVTDTSSAYTGDTTSLPVTDTSSSSTGDTTPLLVTETSSVSTGHATPLLVTDASSASTGHATPLHVTSPSSASTGDTTPVPVTDTSSVSTGHATPLPVTGLSSASTGDTTRLPVTDISSASTGQATPLPVTNTSSVSTGDTMPLPVTSPSSASTGHATPLPVTSTSSASTGHATPVPVTSTSSASTGHTTPLPVTDTSSASTGDTTPLPVTSPSSASTGHTTPLHVTIPSSASTGDTSTLPVTGASSASTGHATPLPVTDTSSVSTGHATPLPVTSLSSVSTGDTTPLPVTDASSASTGQATPLPVTSLSSVSTGDTTPLLVTDASSVSTGHATPLPVTDTSSASTGDTTRLPVTDTSSASTGQATPLPVTSLSSVSTGDTTPLLVTDASSVSTGHATPLPVTDTSSASTGDTTRLPVTDTSSASTGQATPLPVTIPSSSSSGHTTPLPVTSTSSVSTGHVTPLHVTSPSSASTGHVTPLPVTSTSSASTGHATPLLVTDASSVSTGHATPLPVTDASSASTGDTTPLPVTDTSSASTGQATPLPVTSLSSVSTGDTTPLPVTDASSASTGHATPLPVTIPSSVSTGDTMPLPVTSPSSASTGHATPLPVTGLSSASTGDTTPLPVTDTSSASTRHATPLPVTDTSSASTDDTTRLPVTDVSSASTGHATPLPVTSTSSASTGDTTPLPVTDTSSVSTGHATSLPVTSRSSASTGHATPLPVTDTSSVSTGHATPLPVTSTSSVSTGHATPLPVTSPSSASTGHATPVPVTSTSSASTGDTTPLPVTNASSLSTGHATPLHVTSPSSASRGDTSTLPVTDASSASTGHATPLPLTSLSSVSTGDTTPLPVTDTSSASTGQATPLPVTSLSSVSTGDTTPLPVTIPSSASSGHTTSLPVTDASSVSTGHGTPLPVTSTSSASTGDTTPLPVTDTSSASTGHATPLPVTDTSSASTGHATPLPVTSLSSVSTGHATPLAVSSATSASTVSSDSPLKMETPGMTTPSLKTDGGRRTATSPPPTTSQTIISTIPSTAMHTRSTAAPIPILPERGVSLFPYGAGAGDLEFVRRTVDFTSPLFKPATGFPLGSSLRDSLYFTDNGQIIFPESDYQIFSYPNPLPTGFTGRDPVALVAPFWDDADFSTGRGTTFYQEYETFYGEHSLLVQQAESWIRKMTNNGGYKARWALKVTWVNAHAYPAQWTLGSNTYQAILSTDGSRSYALFLYQSGGMQWDVAQRSVEMAISKTAH

SEQ ID NO: 16577 - protein, 640 aa, Homo sapiens
MGRRSGLLGLRPGPEPVALERVINKVHLKANHVVKRDVDEHLRIKTVYDKSVEELLPEKKNLVKNKLFPQAISYLEKTFQVRRPAGTILLSRQCATNQYLRKENDPHRYCTGECAAHTKCGPVIVPEEHLQQCRVYRGGKWPHGAVGVPDQEGISDADFVLYVGALATERCSHENIISYAAYCQQEANMDRPIAGYANLCPNMISTQPQEFVGMLSTVKHEVIHALGFSAGLFAFYHDKDGNPLTSRFADGLPPFNYSLGLYQWSDKVVRKVERLWDVRDNKIVRHTVYLLVTPRVVEEARKHFDCPVLEGMELENQGGVGTELNHWEKRLLENEAMTGSHTQNRVLSRITLALMEDTGWYKANYSMAEKLDWGRGMGCDFVRKSCKFWIDQQRQKRQMLSPYCDTLRSNPLQLTCRQDQRAVAVCNLQKFPKPLPQEYQYFDELSGIPAEDLPYYGGSVEIADYCPFSQEFSWHLSGEYQRSSDCRILENQPEIFKNYGAEKYGPHSVCLIQKSAFVMEKCERKLSYPDWGSGCYQVSCSPQGLKVWVQDTSYLCSRAGQVLPVSIQMNGWIHDGNLLCPSCWDFCELCPPETDPPATNLTRALPLDLCSCSSSLVVTLWLLLGNLFPLLAGFLLCIWH

SEQ ID NO: 16578 - protein, 341 aa, Homo sapiens
NNSITEQITDVVKQPAFIAGIGGACWVILMGFSIWLYWRRKKRKGLSNYAVTFQRGDGGLMSNGSRPGLLNAGDPSYPWLADSWPATSLPVNNSNSGPNEIGNFGRGDVLPPVPGQGDKTATMLSDGAIYSSIDFTTKTSYNSSSQITQATPYATTQILHSNSIHELAVDLPDPQWKSSIQQKTDLMGFGYSLPDQNKGNNGGKGGKKKKNKNSSKPQKNNGSTWANVPLPPPPVQPLPGTELEHYAVEQQENGYDSDSWCPPLPVQTYLHQGLEDELEEDDDRVPTPPVRGVASSPAISFGQQSTATLTPSPREEMQPMLQAHLDELTRAYQFDIAKQTW

SEQ ID NO: 16579 - protein, 350 aa, Homo sapiens
MVMWNILKPRTHLLCMTNMFCTRHEGTDSTVFLPHSHNISEWISRRVSLLDEGIYTCYVGTAIQVITNKVVLKVGVFLTPVMKYEKRNTNSFLICSVLSVYPRPIITWKMDNTPISENNMEETGSLDSFSINSPLNITGSNSSYECTIENSLLKQTWTGRWTMKDGLHKMQSEHVSLSCQPVNDYFSPNQDFKVTWSRMKSGTFSVLAYYLSSSQNTIINESRFSWNKELINQSDFSMNLMDLNLSDSGEYLCNISSDEYTLLTIHTVHVEPSQETASHNKGLWILVPSAILAAFLLIWSVKCCRAQLEARRSRHPADGAQQERCCVPPGERCPSAPDNGEENVPLSGKV

SEQ ID NO: 16580 - protein, 112 aa, Homo sapiens
MQKWFSAFDDAIIQRQWRANPSRGGGGVSFTKEVDTNVATGAPPRRQRVPGRACPWREPIRGRRGARPGGGDAGGTPGETVRHCSAPEDPIFRFSSLHSYPFPGTIKSRDMS

SEQ ID NO: 16581 - protein, 241 aa, Homo sapiens
MAGIFKEFFFSTEDLPEVILTLSLISSIGAFLNRHLEDFPIPVPVILFLLGCSFEVLSFTSSQVQRYANAIQWMSPDLFFRIFTPVVFFTTAFDMDTYMLQKLFWQILLISIPGFLVNYILVLWHLASVNQLLLKPTQWLLFSAILVSSDPMLTAAAIRDLGLSRSLISLINGESLMTSVISLITFTSIMDFDQRLQSKRNHTLGELVGMSGIFTLAIVGLLLNSTSFKAAIEETLLLESS

SEQ ID NO: 16582 - protein, 84 aa, Homo sapiens
LIEEQKQIHQHRRLTRAQSHHGSEEERKKRKILARKKSKRSALENSEEHSAKYSNSNNSGSGASSPLTSPSSPTPPSTSEHAPF

SEQ ID NO: 16583 - protein, 1305 aa, Homo sapiens
MASDSPARSLDEIDLSALRDPAGIFELVELVGNGTYGQVYKGRHVKTGQLAAIKVMDVTGDEEEEIKQEINMLKKYSHHRNIATYYGAFIKKNPPGMDDQLWLVMEFCGAGSVTDLIKNTKGNTLKEEWIAYICREILRGLSHLHQHKVIHRDIKGQNVLLTENAEVKLVDFGVSAQLDRTVGRRNTFIGTPYWMAPEVIACDENPDATYDFKSDLWSLGITAIEMAEGAPPLCDMHPMRALFLIPRNPAPRLKSKKWSKKFQSFIESCLVKNHSQRPATEQLMKHPFIRDQPNERQVRIQLKDHIDRTKKKRGEKDETEYEYSGSEEEEEENDSGEPSSILNLPGESTLRRDFLRLQLANKERSEALRRQQLEQQQRENEEHKRQLLAERQKRIEEQKEQRRRLEEQQRREKELRKQQEREQRRHYEEQMRREEERRRAEHEQEYIRRQLEEEQRQLEILQQQLLHEQALLLEYKRKQLEEQRQAERLQRQLKQERDYLVSLQHQRQEQRPVEKKPLYHYKEGMSPSEKPAWAKEIPHLVAVKSQGPALTASQSVHEQPTKGLSGFQEALNVTSHRVEMPRQNSDPTSENPPLPTRIEKFDRSSWLRQEEDIPPKVPQRTTSISPALARKNSPGNGSALGPRLGSQPIRASNPDLRRTEPILESPLQRTSSGSSSSSSTPSSQPSSQGGSQPGSQAGSSERTRVRANSKSEGSPVLPHEPAKVKPEESRDITRPSRPASYKKAIDEDLTALAKELRELRIEETNRPMKKVTDYSSSSEESESSEEEEEDGESETHDGTVAVSDIPRLIPTGAPGSNEQYNVGMVGTHGLETSHADSFSGSISREGTLMIRETSGEKKRSGHSDSNGFAGHINLPDLVQQSHSPAGTPTEGLGRVSTHSQEMDSGTEYGMGSSTKASFTPFVDPRVYQTSPTDEDEEDEESSAAALFTSELLRQEQAKLNEARKISVVNVNPTNIRPHSDTPEIRKYKKRFNSEILCAALWGVNLLVGTENGLMLLDRSGQGKVYNLINRRRFQQMDVLEGLNVLVTISGKKNKLRVYYLSWLRNRILHNDPEVEKKQGWITVGDLEGCIHYKVVKYERIKFLVIALKNAVEIYAWAPKPYHKFMAFKSFADLQHKPLLVDLTVEEGQRLKVIFGSHTGFHVIDVDSGNSYDIYIPSHIQGNITPHAIVILPKTDGMEMLVCYEDEGVYVNTYGRITKDVVLQWGEMPTSVAYIHSNQIMGWGEKAIEIRSVETGHLDGVFMHKRAQRLKFLCERNDKVFFASVRSGGSSQVFFMTLNRNSMMNW

SEQ ID NO: 16584 - protein, 1826 aa, Homo sapiens
MRPGCDLLLRAAATVTAAIMSDSDSEEDSSGGGPFTLAGILFGNISGAGQLEGESVLDDECKKHLAGLGALGLGSLITELTANEELTGTGGALVNDEGWIRSTEDAVDYSDINEVAEDESQRHQQTMGSLQPLYHSDYDEDDYDADCEDIDCKLMPPPPPPPGPMKKDKDQDAITCVSESGEDIILPSIIAPSFLASEKVDFSSYSDSESEMGPQEATQAESEDGKLTLPLAGIMQHDATKLLPSVTELFPEFRPGKVLRFLHLFGPGKNVPSVWRSARRKRKKHRELIQEEQIQEVECSVESEVSQKSLWNYDYAPPPPPEQCLADDEITMMVPVESKFSQSTGDVDKVTDTKPRVAEWRYGPARLWYDMLGVSEDGSGFDYGFKLRKTQHEPVIKSRMMEEFRKLEESNGTDLLADENFLMVTQLHWEDSIIWDGEDIKHKGTKPQGASLAGWLPSIKTRNVMAYNVQQGFAPTLDDDKPWYSIFPIDNEDLVYGRWEDNIIWDAQAMPRLLEPPVLALDPNDENLILEIPDEKEEATSNSPSKESKKESSLKKSRILLGKTGVIREEPQQNMSQPEVKDPWNLSNDEYYFPKQQGLRGTFGGNIIQHSIPAMELWQPFFPTHMGPIKIRQFHRPPLKKYSFGALSQPGPHSVQPLLKHIKKKAKMREQERQASGGGELFFMRTPQDLTGKDGDLILAEYSEENGPLMMQVGMATKIKNYYKRKPGKDPGAPDCKYGETVYCHTSPFLGSLHPGQLLQALENNLFRAPVYLHKMPETDFLIIRTRQGYYIRELVDIFVVGQQCPLFEVPGPNSRRANMHIRDFLQVFIYRLFWKSKDRPRRIRMEDIKKAFPSHSESSIRKRLKLCADFKRTGMDSNWWVLKSDFRLPTEEEIRAKVSPEQCCAYYSMIAAKQRLKDAGYGEKSFFAPEEENEEDFQMKIDDEVHAAPWNTTRAFIAAMKGKCLLEVTGVADPTGCGEGFSYVKIPNKPTQQKDDKEPQAVKKTVTGTDADLRRLSLKNAKQLLRKFGVPEEEIKKLSRWEVIDVVRTMSTEQAHSGEGPMSKFARGSRFSVAEHQERYKEECQRIFDLQNKVLSSTEVLSTDTDSISAEDSDFEEMGKNIENMLQNKKTSSQLSREWEEQERKELRRMLLVAGSAASGNNHRDDVTASMTSLKSSATGHCLKIYRTFRDEEGKEYVRCETVRKPAVIDAYVRIRTTKDEKFIQKFALFDEKHREEMRKERRRIQEQLRRLKRNQEKEKLKGPPEKKPKKMKERPDLKLKCGACGAIGHMRTNKFCPLYYQTNVPPSKPVAMTEEQEEELEKTVIHNDNEELIKVEGTKIVFGKQLIENVHEVRRKSLVLKFPKQQLPPKKKRRVGTTVHCDYLNIPHKSIHRRRTDPMVTLSSILESIINDMRDLPNTHPFHTPVNAKVVKDYYKIITRPMDLQTLRENVRKCLYPSREEFREHLELIVKNSATYNGPKHSLTQISQSMLDLCDEKLKEKEDKLARLEKAINPLLDDDDQVAFSFILDNIVTQKMMAVPDSWPFHHPVNKKFVPDYYKMIVNPVDLETIRKNISKHKYQSRESFLDDVNLILANSVKYNGPESQYTKTAQEIVNICYQTITEYDEHLTQLEKDICTAKEAALEEAELESLDPMTPGPYTSQPPDMYDTNTSLSTSRDASVFQDESNLSVLDISTATPEKQMCQGQGRLGEEDSDVDVEGYDDEEEDGKPKPPAPEGGDGDLADEEEGTVQQPEASVLYEDLLISEGEDDEEDAGSDEEGDNPFSAIQLSESGSDSDVGYGGIRPKQPFMLQHASGEHKDGHGK

SEQ ID NO: 16585 - protein, 960 aa, Homo sapiens
MALLGKRCDVPTNGCGPDRWNSAFTRKDEIITSLVSALDSMCSALSKLNAEVACVAVHDESAFVVGTEKGRMFLNARKELQSDFLRFCRGPPWKDPEAEHPKKVQRGEGGGRSLPRSSLEHGSDVYLLRKMVEEVFDVLYSEALGRASVVPLPYERLLREPGLLAVQGLPEGLAFRRPAEYDPKALMAILEHSHRIRFKLKRPLEDGGRDSKALVELNGVSLIPKGSRDCGLHGQAPKVPPQDLPPTATSSSMASFLYSTALPNHAIRELKQEAPSCPLAPSDLGLSRPMPEPKATGAQDFSDCCGQKPTGPGGPLIQNVHASKRILFSIVHDKSEKWDAFIKETEDINTLRECVQILFNSRYAEALGLDHMVPVPYRKIACDPEAVEIVGIPDKIPFKRPCTYGVPKLKRILEERHSIHFIIKRMFDERIFTGNKFTKDTTKLEPASPPEDTSAEVSRATVLDLAGNARSDKGSMSEDCGPGTSGELGGLRPIKIEPEDLDIIQVTVPDPSPTSEEMTDSMPGHLPSEDSGYGMEMLTDKGLSEDARPEERPVEDSHGDVIRPLRKQVELLFNTRYAKAIGISEPVKVPYSKFLMHPEELFVVGLPEGISLRRPNCFGIAKLRKILEASNSIQFVIKRPELLTEGVKEPIMDSQERDSGDPLVDESLKRQGFQENYDARLSRIDIANTLREQVQDLFNKKYGEALGIKYPVQVPYKRIKSNPGSVIIEGLPPGIPFRKPCTFGSQNLERILAVADKIKFTVTRPFQGLIPKPDEDDANRLGEKVILREQVKELFNEKYGEALGLNRPVLVPYKLIRDSPDAVEVTGLPDDIPFRNPNTYDIHRLEKILKAREHVRMVIINQLQPFAEICNDAKVPAKDSSIPKRKRKRVSEGNSVSSSSSSSSSSSSNPDSVASANQISLVVKLHRFGLRHSSLWPSPLCLAGPSTLGCGPRGRGGTGL

SEQ ID NO: 16586 - protein, 149 aa, Homo sapiens
MGRVFLTGEKANSILKRYPRANGFFEEIRQGNIERECKEEFCTFEEAREAFENNEKTKEFWSTYTKAQQGESNRGSDWFQFYLTFPLIFGLFIILLVIFLIWRCFLRNKTRRQTVTEGHIPFPQHLNIITPPPPPDEVFDSSGLSPGFL

SEQ ID NO: 16587 - protein, 1024 aa, Homo sapiens
MADPEVCCFITKILCAHGGRMALDALLQEIALSEPQLCEVLQVAGPDRFVVLETGGEAGITRSVVATTRARVCRRKYCQRPCDNLHLCKLNLLGRCNYSQSERNLCKYSHEVLSEENFKVLKNHELSGLNKEELAVLLLQSDPFFMPEICKSYKGEGRQQICNQQPPCSRLHICDHFTRGNCRFPNCLRSHNLMDRKVLAIMREHGLNPDVVQNIQDICNSKHMQKNPPGPRAPSSHRRNMAYRARSKSRDRFFQGSQEFLASASASAERSCTPSPDQISHRASLEDAPVDDLTRKFTYLGSQDRARPPSGSSKATDLGGTSQAGTSQRFLENGSQEDLLHGNPGSTYLASNSTSAPNWKSLTSWTNDQGARRKTVFSPTLPAARSSLGSLQTPEAVTTRKGTGLLSSDYRIINGKSGTQDIQPGPLFNNNADGVATDITSTRSLNYKSTSSGHREISSPRIQDAGPASRDVQATGRIADDADPRVALVNGKYKGKTLWASTFVHDIPNGSSQVVDKTTDVEKTGATGFGLTMAVKAEKDMLRTGSQSLRNLVPTTPGESTAPAQVSTLPQSPAALSSSNRAAVWGAQGQNCTQVPVSSASELTRKTTGSAQYSLSDVTSTTSSRVDDHDSEEICLDHLCKGCPLNGSCSKVHFHLPYRWQMLIGKTWTDFEHMETIEKGYCNPGIHLCSVGSYTINFRVMSCDSFPIRRLSTPSSVTKPANSVFTTKWIWYWKNESGTWIQYGEEKDKRKNSNVDSSYLESLYQSCPRGVVPFQAGSRNYELSFQGMIQTNIASKTQKDVIRRPTFVPQWYVQQMKRGPDHQPAKTSSVSLTATFRPQEDFCFLSSKKYKLSEIHHLHPEYVRVSEHFKASMKNFKIEKIKKIENSELLDKFTWKKSQMKEEGKLLFYATSRAYVESICSNNFDSFLHETHENKYGKGIYFAKDAIYSHKNCPYDAKNVVMFVAQVLVGKFTEGNITYTSPPPQFDSCVDTRSNPSVFVIFQKDQVYPQYVIEYTEDKACVIS

SEQ ID NO: 16588 - protein, 459 aa, Homo sapiens
MGVPKFYRWISERYPCLSEVVKEHQIPEFDNLYLDMNGIIHQCSHPNDDDVHFRISDDKIFTDIFHYLEVLFRIIKPRKVFFMAVDGVAPRAKMNQQRGRRFRSAKEAEDKIKKAIEKGETLPTEARFDSNCITPGTEFMARLHEHLKYFVNMKISTDKSWQGVTIYFSGHETPGEGEHKIMEFIRSEKAKPDHDPNTRHCLYGLDADLIMLGLTSHEAHFSLLREEVRFGGKKTQRVCAPEETTFHLLHLSLMREYIDYEFSVLKEKITFKYDIERIIDDWILMGFLVGNDFIPHLPHLHINHDALPLLYGTYVTILPELGGYINESGHLNLPRFEKYLVKLSDFDREHFSEVFVDLKWFESKVGNKYLNEAAGVAAEEARNYKEKKKLKGQENSLCWTALDKNEGEMITSKDNLEDETEDDDLFETEFRQYKRTYYMTKMGVDVVSEYVFANAFILK

SEQ ID NO: 16589 - protein, 1366 aa, Homo sapiens
MADTDLFMECEEEELEPWQKISDVIEDSVVEDYNSVDKTTTAGNPLVQQGGQPLILTQNPAPGLGTMVTQPVLRPVQVMQNANHVTSSPVASQPIFITTQGFPVRNVRPVQNAMNQVGIVLNVQQGQTVRPITLVPAPGTQFVKPTVGVPQVFSQMTPVRPGSTMPVRPTTNTFTTVIPATLTIRSTVPQSQSQQTKSTPSTSTTPTATQPTSLGQLAVQSPGQSNQTTNPKLAPSFPSPPAVSIASFVTVKRPGVTGENSNEVAKLVNTLNTIPSLGQSPGPVVVSNNSSAHGSQRTSGPESSMKVTSSIPVFDLQDGGRKICPRCNAQFRVTEALRGHMCYCCPEMVEYQKKGKSLDSEPSVPSAAKPPSPEKTAPVASTPSSTPIPALSPPTKVPEPNENVGDAVQTKLIMLVDDFYYGRDGGKVAQLTNFPKVATSFRCPHCTKRLKNNIRFMNHMKHHVELDQQNGEVDGHTICQHCYRQFSTPFQLQCHLENVHSPYESTTKCKICEWAFESEPLFLQHMKDTHKPGEMPYVCQPYFPSYVTQVCQYRSSLYSEVDVHFRMIHEDTRHLLCPYCLKVFKNGNAFQQHYMRHQKRNVYHCNKCRLQFLFAKDKIEHKLQHHKTFRKPKQLEGLKPGTKVTIRASRGQPRTVPVSSNDTPPSALQEAAPLTSSMDPLPVFLYPPVQRSIQKRAVRKMSVMGRQTCLECSFEIPDFPNHFPTYVHCSLCRYSTCCSRAYANHMINNHVPRKSPKYLALFKNSVSGIKLACTSCTFVTSVGDAMAKHLVFNPSHRSSSILPRGLTWIAHSRHGQTRDRVHDRNVKNMYPPPSFPTNKAATVKSAGATPAEPEELLTPLAPALPSPASTATPPPTPTHPQALALPPLATEGAECLNVDDQDEGSPVTQEPELASGGGGSGGVGKKEQLSVKKLRVVLFALCCNTEQAAEHFRNPQRRIRRWLRRFQASQGENLEGKYLSFEAEEKLAEWVLTQREQQLPVNEETLFQKATKIGRSLEGGFKISYEWAVRFMLRHHLTPHARRAVAHTLPKDVAENAGLFIDFVQRQIHNQDLPLSMIVAIDEISLFLDTEVLSSDDRKENALQTVGTGEPWCDVVLAILADGTVLPTLVFYRGQMDQPANMPDSILLEAKESGYSDDEIMELWSTRVWQKHTACQRSKGMLVMDCHRTHLSEEVLAMLSASSTLPAVVPAGCSSKIQPLDVCIKRTVKNFLHKKWKEQAREMADTACDSDVLLQLVLVWLGEVLGVIGDCPELVQRSFLVASVLPGPDGNINSPTRNADMQEELIASLEEQLKLSGEHSESSTPRPRSSPEETIEPESLHQLFEGESETESFYGFEEADLDLMEI

SEQ ID NO: 16590 - protein, 441 aa, Homo sapiens
KRRRAASMNRLGCWPARSLPRSGRGSGQRSLGLGGHPSGPRHPGTPAAKRTWESPGVRARDCPLSTSWLSEPPLGPAPHLSMVQAHGGRSRAQPLTLSLGAAMTQPPPEKTPAKKHVRLQERRGSNVALMLDVRSLGAVEPICSVNTPREVTLHFLRTAGHPLTRWALQRQPPSPKQLEEEFLKIPSNFVSPEDLDIPGHASKDRYKTILPNPQSRVCLGRAQSQEDGDYINANYIRGYDGKEKVYIATQGPMPNTVSDFWEMVWQEEVSLIVMLTQLREGKEKCVHYWPTEEETYGPFQIRIQDMKECPEYTVRQLTIQYQEERRSVKHILFSAWPDHQTPESAGPLLRLVAEVEESPETAAHPGPIVVHCSAGIGRTGCFIATRIGCQQLKARGEVDILGIVCQLRLDRGGMIQTAEQYQFLHHTLALYAGQLPEEPSP

SEQ ID NO: 16591 - protein, 131 aa, Homo sapiens
MNKKKVFEEPSISLFALEHCEGRELHLEEAVNSVLNKDLHFYTQSVWVKSGLWIAYEGSNFLGRQILLRPNEIPNWTAFSRWKTIGSLRPMKQPAVYIRIKNRAQGEYLTVTGSLADTRATSVCISPYSGK

SEQ ID NO: 16592 - protein, 969 aa, Homo sapiens
LDTLVAVIECQQPEADLYRFMGRMIITQQMEEIVRPLGPESLLLRGARLKNTKEIFGVAVYTGMETKMALNYKSKSQKRSAVEKSMNTFLIIYLVILISEAVISTILKYTWQAEEKWDEPWYNQKTEHQRNSSKILRFISDFLAFLVLYNFIIPISLYVTVEMQKFLGSFFIGWDLDLYHEESDQKAQVNTSDLNEELGQVEYVFTDKTGTLTENEMQFRECSINGMKYQEINGRLVPEGPTPDSSEGNLSYLSSLSHLNNLSHLTTSSSFRTSPENETELIKEHDLFFKAVSLCHTVQISNVQTDCTGDGPWQSNLAPSQLEYYASSPDEKALVEAAARIGIVFIGNSEETMEVKTLGKLERYKLLHILEFDSDRRRMSVIVQAPSGEKLLFAKGAESSILPKCIGGEIEKTRIHVDEFALKGLRTLCIAYRKFTSKEYEEIDKRIFEARTALQQREEKLAAVFQFIEKDLILLGATAVEDRLQDKVRETIEALRMAGIKVWVLTGDKHETAVSVSLSCGHFHRTMNILELINQKSDSECAEQLRQLARRITEDHVIQHGLVVDGTSLSLALREHEKLFMEVCRNCSAVLCCRMAPLQKAKVIRLIKISPEKPITLAVGDGANDVSMIQEAHVGIGIMGKEGRQAARNSDYAIARFKFLSKLLFVHGHFYYIRIATLVQYFFYKNVCFITPQFLYQFYCLFSQQTLYDSVYLTLYNICFTSLPILIYSLLEQHVDPHVLQNKPTLYRDISKNRLLSIKTFLYWTILGFSHAFIFFFGSYLLIGKDTSLLGNGQMFGNWTFGTLVFTVMVITVTVKMALETHFWTWINHLVTWGSIIFYFVFSLFYGGILWPFLGSQNMYFVFIQLLSSGSAWFAIILMVVTCLFLDIIKKVFDRHLHPTSTEKAQMYSNTVALSDEFIALQPLSRARNQLSKLSLLKQMQVSSAWTPCAVSRKEKQRVHLLEECWNEL

SEQ ID NO: 16593 - protein, 176 aa, Homo sapiens
DDELTYKTLFVPVNEGFVDNMTLSGPDLELHASNATLLSANASQGKLLPAHSGLSLIISDAGPDNSSWAPVQAVLAPEAPPVAAGVGAVLAAGALLGLVAGALYLRARGKPMGFGFSAFQAEDDADDDFSPWQEGTNPTLVSVPNPVFGSDTFCEPFDDSLLEEDFPDTQRILTVK

SEQ ID NO: 16594 - protein, 712 aa, Homo sapiens
MGSGARFPSGTLRVRWLLLLGLVGPVLGAARPGFQQTSHLSSYEIITPWRLTRERREAPRPYSKQVSYVIQAEGKEHIIHLERNKDLLPEDFVVYTYNKEGTLITDHPNIQNHCHYRGYVEGVHNSSIALSDCFGLRGLLHLENASYGIEPLQNSSHFEHIIYRMDDVYKEPLKCGVSNKDIEKETAKDEEEEPPSMTQLLRRRRAVLPQTRYVELFIVVDKERYDMMGRNQTAVREEMILLANYLDSMYIMLNIRIVLVGLEIWTNGNLINIVGGAGDVLGNFVQWREKFLITRRRHDSAQLVLKKGFGGTAGMAFVGTVCSRSHAGGINVFGQITVETFASIVAHELGHNLGMNHDDGRDCSCGAKSCIMNSGASGSRNFSSCSAEDFEKLTLNKGGNCLLNIPKPDEAYSAPSCGNKLVDAGEECDCGTPKECELDPCCEGSTCKLKSFAECAYGDCCKDCRFLPGGTLCRGKTSECDVPEYCNGSSQFCQPDVFIQNGYPCQNNKAYCYNGMCQYYDAQCQVIFGSKAKAAPKDCFIEVNSKGDRFGNCGFSGNEYKKCATGNALCGKLQCENVQEIPVFGIVPAIIQTPSRGTKCWGVDFQLGSDVPDPGMVNEGTKCGAGKICRNFQCVDASVLNYDCDVQKKCHGHGVCNSNKNCHCENGWAPPNCETKGYGGSVDSGPTYNGQMAKIKQTLLDSRGVFLDMFLQ

SEQ ID NO: 16595 - protein, 591 aa, Homo sapiens
MYQGHMQKSKEQGYGKLSSDEDLEIIVDQKQLVNEQQESRPLLSPSIDDFLCETKSEAIARPVTSNTAVLTTGLDLLDLSEPVSQTQTKAKKSEPSSKTSSLKKKADGSDLISTDAEQRGQPLRVPETSSLDLDIQTQLEKWDDVKFHGDRNTKGHPMAERKSSSSRTGSKELLWSSEHRSQPELSGGKSALNSESASELELVAPTQARLTKEHRWGSALLSRNHSLEEEFERAKAAVESDTEFWDKMQAEWEEMARRNWISENQEAQNQVTISASEKGYYFHTENPFKDWPGAFEEGLKRLKEGDLPVTILFMEAAILQDPGDAEAWQFLGITQAENENEQAAIVALQRCLELQPNNLKALMALAVSYTNTGHQQDACDALKNWIKQNPKYKYLVKSKKGSPGLTRRMSKSPVDSSVLEGVKELYLEAAHQNGDMIDPDLQTGLGVLFHLSGEFNRAIDAFNAALTVRPEDYSLWNRLGATLANGDRSEEAVEAYTRALEIQPGFIRSRYNLGISCINLGAYREAVSNFLTALSLQRKSRNQQQVPHPAISGNIWAALRIALSLMDQPELFQAANLGDLDVLLRAFNLDP

SEQ ID NO: 16596 - protein, 867 aa, Homo sapiens
MGPPSLVLCLLSATVFSLLGGSSAFLSHHRLKGRFQRDRRNIRPNIILVLTDDQDVELGSMQVMNKTRRIMEQGGAHFINAFVTTPMCCPSRSSILTGKYVHNHNTYTNNENCSSPSWQAQHESRTFAVYLNSTGYRTAFFGKYLNEYNGSYVPPGWKEWVGLLKNSRFYNYTLCRNGVKEKHGSDYSKDYLTDLITNDSVSFFRTSKKMYPHRPVLMVISHAAPHGPEDSAPQYSRLFPNASQHITPSYNYAPNPDKHWIMRYTGPMKPIHMEFTNMLQRKRLQTLMSVDDSMETIYNMLVETGELDNTYIVYTADHGYHIGQFGLVKGKSMPYEFDIRVPFYVRGPNVEAGCLNPHIVLNIDLAPTILDIAGLDIPADMDGKSILKLLDTERPVNRFHLKKKMRVWRDSFLVERGKLLHKRDNDKVDAQEENFLPKYQRVKDLCQRAEYQTACEQLGQKWQCVEDATGKLKLHKCKGPMRLGGSRALSNLVPKYYGQGSEACTCDSGDYKLSLAGRRKKLFKKKYKASYVRSRSIRSVAIEVDGRVYHVGLGDAAQPRNLTKRHWPGAPEDQDDKDGGDFSGTGGLPDYSAANPIKVTHRCYILENDTVQCDLDLYKSLQAWKDHKLHIDHEIETLQNKIKNLREVRGHLKKKRPEECDCHKISYHTQHKGRLKHRGSSLHPFRKGLQEKDKVWLLREQKRKKKLRKLLKRLQNNDTCSMPGLTCFTHDNQHWQTAPFWTLGPFCACTSANNNTYWCMRTINETHNFLFCEFATGFLEYFDLNTDPYQLMNAVNTLDRDVLNQLHVQLMELRSCKGYKQCNPRTRNMDLDGGSYEQYRQFQRRKWPEMKRPSSKSLGQLWEGWEG

SEQ ID NO: 16597 - protein, 378 aa, Homo sapiens
MRKKWKMGGMKYIFSLLFFLLLEGGKTEQVKHSETYCMFQDKKYRVGERWHPYLEPYGLVYCVNCICSENGNVLCSRVRCPNVHCLSPVHIPHLCCPRCPGDGELSWEHSDGDIFRQPANREARHSYHRSHYDPPPSRQAGGLSRFPGARSHRGALMDSQQASGTIVQIVINNKHKHGQVCVSNGKTYSHGESWHPNLRAFGIVECVLCTCNVTKQECKKIHCPNRYPCKYPQKIDGKCCKVCPGKKAKEELPGQSFDNKGYFCGEETMPVYESVFMEDGETTRKIALETERPPQVEVHVWTIRKGILQHFHIEKISKRMFEELPHFKLVTRTTLSQWKIFTEGEAQISQMCSSRVCRTELEDLVKVLYLERSEKGHC

SEQ ID NO: 16598 - protein, 207 aa, Homo sapiens
DELTRAYQFDIAKQTWHIQSNNQPPQPPVPPLGYVSGALISDLETDVADDDADDEEEALEIPRPLRALDQTPGSSMDNLDSSVTGKAFTSSQRPRPTSPFSTDSNTSAALSQSQRPRPTKKHKGGRMDQQPALPHRREGMTDEEALVPYSKPSFPSPGGHSSSGTASSKGSTGPRKTEVLRAGHQRNASDLLDIGYMGSNSQGQFTE

SEQ ID NO: 16599 - protein, 738 aa, Homo sapiens
MCRPSPSPVSPASNPRTSLVQVKTKACLSGHHSASSTSKPFKTPKDNLLTSSSKQHTVFPAKGSRDKPCVPVPVVSLEKIPNLVKADGANVKMNSTTTTAVSASSTSSSAVSTPPLIKPVLMSKSVPPSPEKILNGKGILPTTIDKKHQNGTKNSNKPYRRLSEREFDPNKHCGVLDPETKKPCTRSLTCKTHSLSHRRAVPGRKKQFDLLLAEHKAKSREKEVKDKEHLLTSTREILPSQSGPAQDSLLGSSGSSGPEPKVASPAKSRPPNSVLPRPSSANSISSSTSSNHSGHTPEPPLPPVGGDLASRLSSDEGEMDGADESEKLDCQFSTHHPRPLAFCSFGSRLMGRGYYVFDRRWDRFRFALNSMVEKHLNSQMWKKIPPAADSPLPSPAAHITTPVPASVLQPFSNPSAVYLPSAPISSRLTSSYIMTSAMLSNAAFVTSPDPSALMSHTTAFPHVAATLSIMDSTFKAPSAVSPIPAVIPSPSHKPSKTKTSKSSKVKDLSTRSDESPSNKKRKPQSSTSSSSSSSSSSLQTSLSSPLSGPHKKNCVLNASSALNSYQAAPPYNSLSVHNSNNGVSPLSAKLEPSGRTSLPGGPADIVRQVGAVGGSSDSCPLSVPSLALHAGDLSLASHNAVSSLPLSFDKSEGKKRKNSSSSSKACKITKMPGMNSVHKKNPPSLLAPVPDPVNSTSSRQVGKNSSLALSQSSPSSISSPGHSRQKNTNRTGRIRTLP

SEQ ID NO: 16600 - protein, 489 aa, Homo sapiens
MHRGGQPLKKRRGSFKMAELDQLPDESSSAKALVSLKEGSLSNTWNEKYSSLQKTPVWKGRNTSSAVEMKFTATMSTPDKKASQKIGFRLRNLLKLPKAHKWCIYEWFYSNIDKPLFEGDNDFCVCLKESFPNLKTRKLTRVEWGKIRRLMGKPRRCSSAFFEEERSALKQKRQKIRLLQQRKVADVSQFKDLPDEIPLPLVIGTKVTARLRGVHDGLFTGQIDAVDTLNATYRVTFDRTGLGTHTIPDYEVLSNEPHETMPIAAFGQKQRPSRFFMTPPRLHYTPPLQSPIIDNDPLLGQSPWRSKISGSDTETLGGFPVEFLIQVTRLSKILMIKKEHIKKLREMNTEAEKLKSYSMPISIEFQRRYATIVLELEQLNKDLNKVLHKVQQYCYELAPDQGLQPADQPTDMRRRCEEEAQEIVRHANSSTGQPCVENENLTDLISRLTAILLQIKCLAEGGDLNSFEFKSLTDSLNDIKSTIDASNIR

SEQ ID NO: 16601 - protein, 1094 aa, Homo sapiens
TDPVDVVPQDGRNDFYCWVCHREGQVLCCELCPRVYHAKCLRLTSEPEGDWFCPECEKITVAECIETQSKAMTMLTIEQLSYLLKFAIQKMKQPGTDAFQKPVPLEQHPDYAEYIFHPMDLCTLEKNAKKKMYGCTEAFLADAKWILHNCIIYNGGNHKLTQIAKVVIKICEHEMNEIEVCPECYLAACQKRDNWFCEPCSNPHPLVWAKLKGFPFWPAKALRDKDGQVDARFFGQHDRAWVPINNCYLMSKEIPFSVKKTKSIFNSAMQEMEVYVENIRRKFGVFNYSPFRTPYTPNSQYQMLLDPTNPSAGTAKIDKQEKVKLNFDMTASPKILMSKPVLSGGTGRRISLSDMPRSPMSTNSSVHTGSDVEQDAEKKATSSHFSASEESMDFLDKSTASPASTKTGQAGSLSGSPKPFSPQLSAPITTKTDKTSTTGSILNLNLDRSKAEMDLKELSESVQQQSTPVPLISPKRQIRSRFQLNLDKTIESCKAQLGINEISEDVYTAVEHSDSEDSEKSDSSDSEYISDDEQKSKNEPEDTEDKEGCQMDKEPSAVKKKPKPTNPVEIKEELKSTSPASEKADPGAVKDKASPEPEKDFSEKAKPSPHPIKDKLKGKDETDSPTVHLGLDSDSESELVIDLGEDHSGREGRKNKKEPKEPSPKQDVVGKTPPSTTVGSHSPPETPVLTRSSAQTSAAGATATTSTSSTVTVTAPAPAATGSPVKKQRPLLPKETAPAVQRVVWNSSTVQQKEITQSPSTSTITLVTSTQSSPLVTSSGSMSTLVSSVNADLPIATASADVAADIAKYTSKMMDAIKGTMTEIYNDLSKNTTGSTIAEIRRLRIEIEKLQWLHQQELSEMKHNLELTMAEMRQSLEQERDRLIAEVKKQLELEKQQAVDETKKKQWCANCKKEAIFYCCWNTSYCDYPCQQAHWPEHMKSCTQSATAPQQEADAEVNTETLNKSSQGSSSSTQSAPSETASASKEKETSAEKSKESGSTLDLSGSRETPSSILLGSNQGSVSKRCDKQPAYAPTTTDHQPHPNYPAQKYHSRSNKSSWSSSDEKRGSTRSDHNTSTSTKSLLPKESRLDTFWD

SEQ ID NO: 16602 - protein, 2409 aa, Homo sapiens
MQEHSTRRRSLSLCPDWESWDPQKPVDNAREAMQQADDWLGVPQVITPEEIIHPDVDEHSVMTYLSQFPKAKLKPGAPLKPKLNPKKARAYGRGIEPTGNMVKQPAKFTVDTISAGQGDVMVFVEDPEGNKEEAQVTPDSDKNKTYSVEYLPKVTGLHKVTVLFAGQHISKSPFEVSVDKAQGDASKVTAKGPGLEAVGNIANKPTYFDIYTAGAGVGDIGVEVEDPQGKNTVELLVEDKGNQVYRCVYKPMQPGPHVVKIFFAGDTIPKSPFVVQVGEACNPNACRASGRGLQPKGVRIRETTDFKVDTKAAGSGELGVTMKGPKGLEELVKQKDFLDGVYAFEYYPSTPGRYSIAITWGGHHIPKSPFEVQVGPEAGMQKVRAWGPGLHGGIVGRSADFVVESIGSEVGSLGFAIEGPSQAKIEYNDQNDGSCDVKYWPKEPGEYAVHIMCDDEDIKDSPYMAFIHPATGGYNPDLVRAYGPGLEKSGCIVNNLAEFTVDPKDAGKAPLKIFAQDGEGQRIDIQMKNRMDGTYACSYTPVKAIKHTIAVVWGGVNIPHSPYRVNIGQGSHPQKVKVFGPGVERSGLKANEPTHFTVDCTEAGEGDVSVGIKCDARVLSEDEEDVDFDIIHNANDTFTVKYVPPAAGRYTIKVLFASQEIPASPFRVKVDPSHDASKVKAEGPGLSKAGVENGKPTHFTVYTKGAGKAPLNVQFNSPLPGDAVKDLDIIDNYDYSHTVKYTPTQQGNMQVLVTYGGDPIPKSPFTVGVAAPLDLSKIKLNGLENRVEVGKDQEFTVDTRGAGGQGKLDVTILSPSRKVVPCLVTPVTGRENSTAKFIPREEGLYAVDVTYDGHPVPGSPYTVEASLPPDPSKVKAHGPGLEGGLVGKPAEFTIDTKGAGTGGLGLTVEGPCEAKIECSDNGDGTCSVSYLPTKPGEYFVNILFEEVHIPGSPFKADIEMPFDPSKVVASGPGLEHGKVGEAGLLSVDCSEAGPGALGLEAVSDSGTKAEVSIQNNKDGTYAVTYVPLTAGMYTLTMKYGGELVPHFPARVKVEPAVDTSRIKVFGPGIEGKDVFREATTDFTVDSRPLTQVGGDHIKAHIANPSGASTECFVTDNADGTYQVEYTPFEKGLHVVEVTYDDVPIPNSPFKVAVTEGCQPSRVQAQGPGLKEAFTNKPNVFTVVTRGAGIGGLGITVEGPSESKINCRDNKDGSCSAEYIPFAPGDYDVNITYGGAHIPGSPFRVPVKDVVDPSKVKIAGPGLGSGVRARVLQSFTVDSSKAGLAPLEVRVLGPRGLVEPVNVVDNGDGTHTVTYTPSQEGPYMVSVKYADEEIPRSPFKVKVLPTYDASKVTASGPGLSSYGVPASLPVDFAIDARDAGEGLLAVQITDQEGKPKRAIVHDNKDGTYAVTYIPDKTGRYMIGVTYGGDDIPLSPYRIRATQTGDASKCLATGPGIASTVKTGEEVGFVVDAKTAGKGKVTCTVLTPDGTEAEADVIENEDGTYDIFYTAAKPGTYVIYVRFGGVDIPNSPFTVMVTEEAYVPVSDMNGLGFKPFDLVIPFAVRKGEITGEVHMPSGKTATPEIVDNKDGTVTVRYAPTEVGLHEMHIKYMGSHIPESPLQFYVNYPNSGSVSAYGPGLVYGVANKTATFTIVTEDAGEGGLDLAIEGPSKAEISCIDNKDGTCTVTYLPTLPGDYSILVKYNDKHIPGSPFTAKITDDSRRCSQVKLGSAADFLLDISETDLSSLTASIKAPSGRDEPCLLKRLPNNHIGISFIPREVGEHLVSIKKNGNHVANSPVSIMVVQSEIGDARRAKVYGRGLSEGRTFEMSDFIVDTRDAGYGGISLAVEGPSKVDIQTEDLEDGTCKVSYFPTVPGVYIVSTKFADEHVPGSPFTVKISGEGRVKESITRTSRAPSVATVGSICDLNLKIPEINSSDMSAHVTSPSGRVTEAEIVPMGKNSHCVRFVPQEMGVHTVSVKYRGQHVTGSPFQFTVGPLGEGGAHKVRAGGPGLERGEAGVPAEFSIWTREAGAGGLSIAVEGPSKAEITFDDHKNGSCGVSYIAQEPGNYEVSIKFNDEHIPESPYLVPVIAPSDDARRLTVMSLQESGLKVNQPASFAIRLNGAKGKIDAKVHSPSGAVEECHVSELEPDKYAVRFIPHENGVHTIDVKFNGSHVVGSPFKVRVGEPGQAGNPALVSAYGTGLEGGTTGIQSEFFINTTRAGPGTLSVTIEGPSKVKMDCQETPEGYKVMYTPMAPGNYLISVKYGGPNHIVGSPFKAKVTGQRLVSPGSANETSSILVESVTRSSTETCYSAIPKASSDASKVTSKGAGLSKAFVGQKSSFLVDCSKAGSNMLLIGVHGPTTPCEEVSMKHVGNQQYNVTYVVKERGDYVLAVKWGEEHIPGSPFHVTVP

SEQ ID NO: 16603 - protein, 522 aa, Homo sapiens
MRRPRGEPGPRAPRPTEGATCAGPGESWSPSPNSMLRVLLSAQTSPARLSGLLLIPPVQPCCLGPSKWGDRPVGGGPSAGPVQGLQRLLEQAKSPGELLRWLGQNPSKVRAHHYSVALRRLGQLLGSRPRPPPVEQVTLQDLSQLIIRNCPSFDIHTIHVCLHLAVLLGFPSDGPLVCALEQERRLRLPPKPPPPLQPLLREARPEELTPHVMVLLAQHLARHRLREPQLLEAIAHFLVVQETQLSSKVVQKLVLPFGRLNYLPLEQQFMPCLERILAREAGVAPLATVNILMSLCQLRCLPFRALHFVFSPGFINYISGTPHALIVRRYLSLLDTAVELELPGYRGPRLPRRQQVPIFPQPLITDRARCKYSHKDIVAEGLRQLLGEEKYRQDLTVPPGYCTDFLLCASSSGAVLPVRTQDPFLPYPPRSCPQGQAASSATTRDPAQRVVLVLRERWHFCRDGRVLLGSRALRERHLGLMGYQLLPLPFEELESQRGLPQLKSYLRQKLQALGLRWGPEGG

SEQ ID NO: 16604 - protein, 676 aa, Homo sapiens
MMQESGTETKSNGSAIQNGSGGSNHLLECGGLREGRSNGETPAVDIGAADLAHAQQQQQQALQVARQLLLQQQQQQQVSGLKSPKRNDKQPALQVPVSVAMMTPQVITPQQMQQILQQQVLSPQQLQVLLQQQQALMLQQQQLQEFYKKQQEQLQLQLLQQQHAGKQPKEQQQVATQQLAFQQQLLQMQQLQQQHLLSLQRQGLLTIQPGQPALPLQPLAQGMIPTELQQLWKEVTSAHTAEETTGNNHSSLDLTTTCVSSSAPSKTSLIMNPHASTNGQLSVHTPKRESLSHEEHPHSHPLYGHGVCKWPGCEAVCEDFQSFLKHLNSEHALDDRSTAQCRVQMQVVQQLELQLAKDKERLQAMMTHLHVKSTEPKAAPQPLNLVSSVTLSKSASEASPQSLPHTPTTPTAPLTPVTQGPSVITTTSMHTVGPIRRRYSDKYNVPISSDIAQNQEFYKNAEVRPPFTYASLIRQAILESPEKQLTLNEIYNWFTRMFAYFRRNAATWKNAVRHNLSLHKCFVRVENVKGAVWTVDEVEFQKRRPQKISGNPSLIKNMQSSHAYCTPLNAALQASMAENSIPLYTTASMGNPTLGNLASAIREELNGAMEHTNSNESDSSPGRSPMQAVHPVHVKEEPLDPEEAEGPLSLVTTANHSPDFDHDRDYEDEPVNEDME

SEQ ID NO: 16605 - protein, 372 aa, Homo sapiens
MAAERQEALREFVAVTGAEEDRARFFLESAGWDLQIALASFYEDGGDEDIVTISQATPSSVSRGTAPSDNRVTSFRDLIHDQDEDEEEEEGQRSRFYAGGSERSGQQIVGPPRKKSPNELVDDLFKGAKEHGAVAVERVTKSPGETSKPRPFAGGGYRLGAAPEEESAYVAGEKRQHSSQDVHVVLKLWKSGFSLDNGELRSYQDPSNAQFLESIRRGEVPAELRRLAHGGQVNLDMEDHRDEDFVKPKGAFKAFTGEGQKLGSTAPQVLSTSSPAQQAENEAKASSSILIDESEPTTNIQIRLADGGRLVQKFNHSHRISDIRLFIVDARPAMAATSFILMTTFPNKELADESQTLKEANLLNAVIVQRLT

SEQ ID NO: 16606 - protein, 534 aa, Homo sapiens
MATGLQVPLPWLATGLLLLLSVQPWAESGKVLVVPIDGSHWLSMREVLRELHARGHQAVVLTPEVNMHIKEENFFTLTTYAISWTQDEFDRHVLGHTQLYFETEHFLKKFFRSMAMLNNMSLVYHRSCVELLHNEALIRHLNATSFDVVLTDPVNLCAAVLAKYLSIPTVFFLRNIPCDLDFKGTQCPNPSSYIPRLLTTNSDHMTFMQRVKNMLYPLALSYICHAFSAPYASLASELFQREVSVVDILSHASVWLFRGDFVMDYPRPIMPNMVFIGGINCANRKPLSQEFEAYINASGEHGIVVFSLGSMVSEIPEKKAMAIADALGKIPQTVLWRYTGTRPSNLANNTILVKWLPQNDLLGHPMTRAFITHAGSHGVYESICNGVPMVMMPLFGDQMDNAKRMETKGAGVTLNVLEMTSEDLENALKAVINDKSYKENIMRLSSLHKDRPVEPLDLAVFWVEFVMRHKGAPHLRPAAHDLTWYQYHSLDVIGFLLAVVLTVAFITFKCCAYGYRKCLGKKGRVKKAHKSKTH

SEQ ID NO: 16607 - protein, 459 aa, Homo sapiens
MAAPCEGQAFAVGVEKNWGAVVRSPEGTPQKIRQLIDEGIAPEEGGVDAKDTSATSQSVNGSPQAEQPSLESTSKEAFFSRVETFSSLKWAGKPFELSPLVCAKYGWVTVECDMLKCSSCQAFLCASLQPAFDFDRYKQRCAELKKALCTAHEKFCFWPDSPSPDRFGMLPLDEPAILVSEFLDRFQSLCHLDLQLPSLRPEDLKTMCLTEDKISLLLHLLEDELDHRTDERKTTIKLGSDIQVHVTACILSVCGWACSSPIPGLEGRPERLPLVPESPRRMMTRSQDATFSPGSEQAEKSPGPIVSRTRSWDSSSPVDRPEPEAASPTTRTRPVTRSMGTGDTPGLEVPSSPLRKAKRARLCSSSSSDTSSRSFFDPTSQHRDWCPWVNITLGKESRENGGTEPDASAPAEPGWKAVLTILLAHKQSSQPAETDSMSLSEKSRKVFRIFRQWESLCSC

SEQ ID NO: 16608 - protein, 919 aa, Homo sapiens
MAPSRFRTQLELVSNVLIFSCTNIVGVCTHYPAEVSQRQAFQETRECIQARLHSQRENQQQERLLLSVLPRHVAMEMKADINAKQEDMMFHKIYIQKHDNVSILFADIEGFTSLASQCTAQELVMTLNELFARFDKLAAENHCLRIKILGDCYYCVSGLPEARADHAHCCVEMGMDMIEAISLVREVTGVNVNMRVGIHSGRVHCGVLGLRKWQFDVWSNDVTLANHMEAGGKAGRIHITKATLNYLNGDYEVEPGCGGERNAYLKEHSIETFLILRCTQKRKEEKAMIAKMNRQRTNSIGHNPPHWGAERPFYNHLGGNQVSKEMKRMGFEDPKDKNAQESANPEDEVDEFLGRAIDARSIDRLRSEHVRKFLLTFREPDLEKKYSKQVDDRFGAYVACASLVFLFICFVQITIVPHSIFMLSFYLTCSLLLTLVVFVSVIYSCVKLFPSPLQTLSRKIVRSKMNSTLVGVFTITLVFLAAFVNMFTCNSRDLLGCLAQEHNISASQVNACHVAESAVNYSLGDEQGFCGSPWPNCNFPEYFTYSVLLSLLACSVFLQISCIGKLVLMLAIELIYVLIVEVPGVTLFDNADLLVTANAIDFFNNGTSQWSLCENLRHRRMEAGTYFPSGVKEQSPEHATKVALKVVTPIIISVFVLALYLHAQQVESTARLDFLWKLQATEEKEEMEELQAYNRRLLHNILPKDVAAHFLARERRNDELYYQSCECVAVMFASIANFSEFYVELEANNEGVECLRLLNEIIADFDEIISEDRFRQLEKIKTIGSTYMAASGLNDSTYDKVGKTHIKALADFAMKLMDQMKYINEHSFNNFQMKIGLNIGPVVAGVIGARKPQYDIWGNTVNVASRMDSTGVPDRIQVTTDMYQVLAANTYQLECRGVVKVKGKGEMMTYFLNGGPPLS

SEQ ID NO: 16609 - protein, 138 aa, Homo sapiens
IDTEGKNAVMRLCFLKARKNTAVTGGANLVSCGGSGYVRFWDIYKKQLLAEFLAHSGVGSIIMSTDKMNRYLTTGDLDGWLKIWNIEAKHWHIENCLFLPKRDTNLVESEIQKEISLFSKEESCLDPTEHSLLNKKNK

SEQ ID NO: 16610 - protein, 171 aa, Homo sapiens
MLLTRKQTCQLGILLSIHRQHSKIDQILIHQQIELLEVLTGFETNNKYEIKNSFGQRVYFAAEDTDCCTRNCCGPSRPFTLRIIDNMGQEVITLERPLRCSSCCCPCCLQEIEIQAPPGVPIGYVIQTWHPCLPKFTIQNEKREDVLKISGPCVVCSCCGDVDFEIKSLDE

SEQ ID NO: 16611 - protein, 667 aa, Homo sapiens
MGSPVHRVSLGDTWSRQMHPDIESERYMQSFDVERLTNILDGGAQNTALRRKVESIIHSYPEFSCKDNYFMTQNERYKAAMRRAFHIRLIARRLGWLEDGRELGYAYRALSGDVALNIHRVFVRALRSLGSEEQIAKWDPLCKNIQIIATYAQTELGHGTYLQGLETEATYDAATQEFVIHSPTLTATKWWPGDLGRSATHALVQAQLICSGARRGMHAFIVPIRSLQDHTPLPGIIIGDIGPKMDFDQTDNGFLQLNHVLPDGTYVKLGTAQSNYLPMVVVRVELLSGEILPILQKACVIAMRYSVIRRQSRLRPSDPEAKVLDYQTQQQKLFPQLAISYAFHFLAVSLLEFFQHSYTAILNQDFSFLPELHALSTGMKAMMSEFCTQGAEMCRRACGGHGYSKLSGLPSLVTKLSASCTYEGENTVLYLQVARFLVKSYLQTQMSPGSTPQRSLSPSVAYLTAPDLARCPAQRAADFLCPELYTTAWAHVAVRLIKDSVQHLQTLTQSGADQHEAWNQTTVIHLQAAKVHCYYVTVKGFTEALEKLENEPAIQQVLKRLCDLHAIHGILTNSGDFLHDAFLSGAQVDMARTAYLDLLRLIRKDAILLTDAFDFTDQCLNSALGCYDGNVYERLFQWAQKSPTNTQENPAYEEYIRPLLQSWRSKL

SEQ ID NO: 16612 - protein, 1029 aa, Homo sapiens
MADKTPGGSQKASSKTRSSDVHSSGSSDAHMDASGPSDSDMPSRTRPKSPRKHNYRNESARESLCDSPHQNLSRPLLENKLKAFSIGKMSTAKRTLSKKEQEELKKKEDEKAAAEIYEEFLAAFEGSDGNKVKTFVRGGVVNAAKEEHETDEKRGKIYKPSSRFADQKNPPNQSSNERPPSLLVIETKKPPLKKGEKEKKKSNLELFKEELKQIQEERDERHKTKGRLSRFEPPQSDSDGQRRSMDAPSRRNRSSGVLDDYAPGSHDVGDPSTTNLYLGNINPQMNEEMLCQEFGRFGPLASVKIMWPRTDEERARERNCGFVAFMNRRDAERALKNLNGKMIMSFEMKLGWGKAVPIPPHPIYIPPSMMEHTLPPPPSGLPFNAQPRERLKNPNAPMLPPPKNKEDFEKTLSQAIVKVVIPTERNLLALIHRMIEFVVREGPMFEAMIMNREINNPMFRFLFENQTPAHVYYRWKLYSILQGDSPTKWRTEDFRMFKNGSFWRPPPLNPYLHGMSEEQETEAFVEEPSKKGALKEEQRDKLEEILRGLTPRKNDIGDAMVFCLNNAEAAEEIVDCITESLSILKTPLPKKIARLYLVSDVLYNSSAKVANASYYRKFFETKLCQIFSDLNATYRTIQGHLQSENFKQRVMTCFRAWEDWAIYPEPFLIKLQNIFLGLVNIIEEKETEDVPDDLDGAPIEEELDGAPLEDVDGIPIDATPIDDLDGVPIKSLDDDLDGVPLDATEDSKKNEPIFKVAPSKWEAVDESELEAQAVTTSKWELFDQHEESEEEENQNQEEESEDEEDTQSSKSEEHHLYSNPIKEEMTESKFSKYSEMSEEKRAKLREIELKVMKFQDELESGKRPKKPGQSFQEQVEHYRDKLLQREKEKELERERERDKKDKEKLESRSKDKKEKDECTPTRKERKRRHSTSPSPSRSSSGRRVKSPSPKSERSERSERSHKESSRSRSSHKDSPRDVSKKAKRSPSGSRTPKRSRRSRSRSPKKSGKKSRSQSRSPHRSHKKSKKNKH

SEQ ID NO: 16613 - protein, 1654 aa, Homo sapiens
MTDRFWDQWYLWYLRLLRLLDRGSFRNDGLKASDVLPILKEKVAFVSGGRDKRGGPILTFPARSNHDRIRQEDLRKLVTYLASVPSEDVCKRGFTVIIDMRGSKWDLIKPLLKTLQEAFPAEIHVALIIKPDNFWQKQKTNFGSSKFIFETSMVSVEGLTKLVDPSQLTEEFDGSLDYNHEEWIELRLSLEEFFNSAVHLLSRLEDLQEMLARKEFPVDVEGSRRLIDEHTQLKKKVLKAPVEELDREGQRLLQCIRCSDGFSGRNCIPGSADFQSLVPKITSLLDKLHSTRQHLHQMWHVRKLKLDQCFQLRLFEQDAEKMFDWISHNKELFLQSHTEIGVSYQYALDLQTQHNHFAMNSMNAYVNINRIMSVASRLSEAGHYASQQIKQISTQLDQEWKSFAAALDERSTILAMSAVFHQKAEQFLSGVDAWCKMCSEGGLPSEMQDLELAIHHHQTLYEQVTQAYTEVSQDGKALLDVLQRPLSPGNSESLTATANYSKAVHQVLDVVHEVLHHQRRLESIWQHRKVRLHQRLQLCVFQQDVQQVLDWIENHGEAFLSKHTGVGKSLHRARALQKRHDDFEEVAQNTYTNADKLLEAAEQLAQTGECDPEEIYKAARHLEVRIQDFVRRVEQRKLLLDMSVSFHTHTKELWTWMEDLQKEMLEDVCADSVDAVQELIKQFQQQQTATLDATLNVIKEGEDLIQQLRSAPPSLGEPSEARDSAVSNNKTPHSSSISHIESVLQQLDDAQVQMEELFHERKIKLDIFLQLRIFEQYTIEVTAELDAWNEDLLRQMNDFNTEDLTLAEQRLQRHTERKLAMNNMTFEVIQQGQDLHQYITEVQASGIELICEKDIDLAAQVQELLEFLHEKQHELELNAEQTHKRLEQCLQLRHLQAEVKQVLGWIRNGESMLNASLVNASSLSEAEQLQREHEQFQLAIEKTHQSALQVQQKAEVLLQAGHYDADAIRECAEKVALHWQQLMLKMEDRLKLVNASVAFYKTSEQVCSVLESLEQEYRRDEDWCGGRDKLGPAAEIDHVIPLISKHLEQKEAFLKACTLARRNAEVFLKYIHRNNVSMPSVASHTRGPEQQVKAILSELLQRENRVLHFWTLKKRRLDQCQQYVVFERSAKQALDWIQETGEFYLSTHTSTGETTEETQELLKEYGEFRVPAKQTKEKVKLLIQLADSFVEKGHIHATEIRKWVTTVDKHYRDFSLRMGKYRYSLEKALGVNTEDNKDLELDIIPASLSDREVKLRDANHEVNEEKRKSARKKEFIMAELLQTEKAYVRDLHECLETYLWEMTSGVEEIPPGILNKEHIIFGNIQEIYDFHNNIFLKELEKYEQLPEDVGHCFVTWADKFQMYVTYCKNKPDSNQLILEHAGTFFDEIQQRHGLANSISSYLIKPVQRITKYQLLLKELLTCCEEGKGELKDGLEVMLSVPKKANDAMHVSMLEGFDENLDVQGELILQDAFQVWDPKSLIRKGRERHLFLFEISLVFSKEIKDSSGHTKYVYKNKLLTSELGVTEHVEGDPCKFALWSGRTPSSDNKTVLKASNIETKQEWIKNIREVIQERIIHLKGALKEPLQLPKTPAKQRNNSKRDGVEDIDSQGDGSSQPDTISIASRTSQNTVDSDKDGNLVPRWHLGPGDPFSTYV

SEQ ID NO: 16614 - protein, 783 aa, Homo sapiens
MGCSLCSLQKQEEQYKLLYEVCQVNGRDLSRATHDQAVEAFKTAKEPIVVQVLRRTPRTKMFTPPSESQLVDTGTQTDITFEHIMALTKMSSPSPPVLDPYLLPEEHPSAHEYYDPNDYIGDIHQEMDREELELEEVDLYRMNSQDKLGLTVCYRTDDEDDIGIYISEIDPNSIAAKDGRIREGDRIIQINGIEVQNREEAVALLTSEENKNFSLLIARPELQLDEGWMDDDRNDFLDDLHMDMLEEQHHQAMQFTASVLQQKKHDEDGGTTDTATILSNQHEKDSGVGRTDESTRNDESSEQENNGDDATASSNPLAGQRKLTCSQDTLGSGDLPFSNESFISADCTDADYLGIPVDECERFRELLELKCQVKSATPYGLYYPSGPLDAGKSDPESVDKELELLNEELRSIELECLSIVRAHKMQQLKEQYRESWMLHNSGFRNYNTSIDVRRHELSDITELPEKSDKDSSSAYNTGESCRSTPLTLEISPDNSLRRAAEGISCPSSEGAVGTTEAYGPASKNLLSITEDPEVGTPTYSPSLKELDPNQPLESKERRASDGSRSPTPSQKLGSAYLPSYHHSPYKHAHIPAHAQHYQSYMQLIQQKSAVEYAQSQMSLVSMCKDLSSPTPSEPRMEWKVKIRSDGTRYITKRPVRDRLLRERALKIREERSGMTTDDDAVSEMKMGRYWSKEERKQHLVKAKEQRRRREFMMQSRLDCLKEQQAADDRKEMNILELSHKKMMKKRNKKIFDNWMTIQELLTHGTKSPDGTRVYNSFLSVTTV

SEQ ID NO: 16615 - protein, 396 aa, Homo sapiens
MSNKDRHIDSSCSSFIKTEPSSPASLTDSVNHHSPGGSSDASGSYSSTMNGHQNGLDSPPLYPSAPILGGSGPVRKLYDDCSSTIVEDPQTKCEYMLNSMPKRLCLVCGDIASGYHYGVASCEACKAFFKRTIQGVRLDRVRGGRQKYKRRIDAENSPYLNPQLVQPAKKPYNKIVSHLLVAEPEKIYAMPDPTVPDSDIKALTTLCDLADRELVVIIGWAKHIPGFSTLSLADQMSLLQSAWMEILILGVVYRSLSFEDELVYADDYIMDEDQSKLAGLLDLNNAILQLVKKYKSMKLEKEEFVTLKAIALANSDSMHIEDVEAVQKLQDVLHEALQDYEAGQHMEDPRRAGKMLMTLPLLRQTSTKAVQHFYNIKLEGKVPMHKLFLEMLEAKV

SEQ ID NO: 16616 - protein, 226 aa, Homo sapiens
MEKRTCALCPKDVEYNVLYFAQSENIAAHENCLLYSSGLVECEDQDPLNPDRSFDVESVKKEIQRGRKLKCKFCHKRGATVGCDLKNCNKNYHFFCAKKDDAVPQSDGVRGIYKLLCQQHAQFPIIAQSAKFSGVKRKRGRKKPLSGNHVQPPETMKCNTFIRQVKEEHGRHTDATVKVPFLKKCKEAGLLNYLLEEILDKVHSIPEKLMDETTSESDQALPKQCA

SEQ ID NO: 16617 - protein, 283 aa, Homo sapiens
MAAHLVKRCTCLLREAARQAPAMAPVGRLRLAWVAHKTLTSSATSPISHLPGSLMEPVEKERASTPYIEKQVDHLIKKATRPEELLELLGGSHDLDSNQAAMIASVWHGTLSKLLGSLYALGIPKASKELQSVEQEVRWRMRKLKYKHLAFLAESCATLSQEQHSQELLAELLTHLERRWTEIEDSHTLVTVMMKVGHLSEPLMNRLEDKCLELVEHFGPNELRKVLVMLAAQSRRSVPLLRAISYHLVQKPFSLTKDVLLDVAYAYGKLSFHQTQVSQRLAT

SEQ ID NO: 16618 - protein, 859 aa, Homo sapiens
MEGAKPTLQLVYQAVQALYHDPDPSGKERASFWLGELQRSVHAWEISDQLLQIRQDVESCYFAAQTMKMKIQTSFYELPTDSHASLRDSLLTHIQNLKDLSPVIVTQLALAIADLALQMPSWKGCVQTLVEKYSNDVTSLPFLLEILTVLPEEVHSRSLRIGANRRTEIIEDLAFYSSTVVSLLMTCVEKAGTDEKMLMKVFRCLGSWFNLGVLDSNFMANNKLLALLFEVLQQDKTSSNLHEAASDCVCSALYAIENVETNLPLAMQLFQGVLTLETAYHMAVAREDLDKVLNYCRIFTELCETFLEKIVCTPGQGLGDLRTLELLLICAGHPQYEVVEISFNFWYRLGEHLYKTNDEVIHGIFKAYIQRLLHALARHCQLEPDHEGVPEETDDFGEFRMRVSDLVKDLIFLIGSMECFAQLYSTLKEGNPPWEVTEAVLFIMAAIAKSVDPENNPTLVEVLEGVVRLPETVHTAVRYTSIELVGEMSEVVDRNPQFLGTALVLARLPLDKITECLSELCSVQVMALKKLLSQEPSNGISSDPTVFLDRLAVIFRHTNPIVENGQTHPCQKVIQEIWPVLSETLNKHRADNRIVERCCRCLRFAVRCVGKGSAALLQPLVTQMVNVYHVHQHSCFLYLGSILVDEYGMEEGCRQGLLDMLQALCIPTFQLLEQQNGLQNHPDTVDDLFRLATRFIQRSPVTLLRSQVVIPILQWAIASTTLDHRDANCSVMRFLRDLIHTGVANDHEEDFELRKELIGQVMNQLGQQLVSQLLHTCCFCLPPYTLPDVAEVLWEIMQVDRPTFCRWLENSLKGLPKETTVGAVTVTHKQLTDFHKQVTSAEECKQVCWALRDFTRLFR

SEQ ID NO: 16619 - protein, 1064 aa, Homo sapiens
MARQVSITFKDLAVRFSEEEWRLLEEGQREFYRDVMRENYETLVSVGTAELLPLSAFLSPSEPGRAVGGGSHADEGQEPAGCGDPQGGQPRHSLHLTALVQLVKEIPEFLFGEVKGAMDSPESESRGASLDGERASPEAAAREPCPLRGLLSCLPDGPTSQPHLATTPTDSSCSSGPTGDGVQGSPLPIKTADKPWPTRKEGPGALGGEPSPPTHSPSRRKSHRGQERGTSEAGISPGNSPLQGLINCLKEILVPGPRHPETSPSFLPPLPSLGTSRLTRADLGPGSPPWAVKTEAVSGDCPLQGLLHCLKELPEAQDRHPSPSGVGNRRLQENPGAWKRGSGGPGYLLTPPPHPDLGAGGLLSVKMENSWVQSPPGPASCQPGRQPLSPSATGDTRGVPQPSWGPEAQAASASSSPLEALEACLKGIPPNGSSPSQLPPTSCSQNPQPGDSRSQKPELQPHRSHSEEATREPVLPLGLQSCVRDGPSRPLAPRGTPTSFSSSSSTDWDLDFGSPVGNQGQHPGKGSPPGSSPLQGLENCLKEIPVPVLRPAWPCSSAADRGPRRAEPRNWTADKEGLRAEACESARLGQGRGEAPTRSLHLVSPQVFTSSCVPACHQRGFKDPGATRPGVWRWLPEGSAPKPSPLHCLESALRGILPVRPLRFACVGGPSPSPSPGSSSSFSGSEGEDPRPEPDLWKPLPQERDRLPSCKPPVPLSPCPGGTPAGSSGGSPGEDPRRTEPRYCSGLGAGTAQDPCPVSQLEKRPRVSEASRGLELGHGRPRVAAKTHERLLPQGPPELPSESPPPELPPPEAAPPVLPASSLQPPCHCGKPLQQELHSLGAALAEKLDRLATALAGLAQEVATMRTQVNRLGRRPQGPGPMGQASWMWTLPRGPRWAHGPGHRHLPYWRQKGPTRPKPKILRGQGESCRAGDLQGLSRGTARRARPLPPDAPPAEPPGLHCSSSQQLLSSTPSCHAAPPAHPLLAHTGGHQSPLPPLVPAALPLQGASPPAASADADVPTSGVAPDGIPERPKEPSSLLGGVQRALQEELWGGEHRDPRWGAH

SEQ ID NO: 16620 - protein, 1347 aa, Homo sapiens
MAEPRRVAFISLSPVRRREAEYPGPEREPEYPREPPRLEPQPYREPARAEPPAPREPAPRSDAQPPSREKPLPQREVSRAEPPMSLQREPPRPEPPPPFPPLPLQPPPPRESASRAEQPPRPPRETVRLELVLKDPTDESCVEFSYPELLLCGEQRKKLIHTEDPFNDEHQERQEVEMLAKKFEMKYGGKPRKHRKDRLQDLIDIGFGYDETDPFIDNSEAYDELVPASLTTKYGGFYINTGTLQFRQASDTEEDDITDNQKHKPPKVPKIKEDDIEMKKRKRKEEGEKEKKPRKKVPKQLGVVALNSHKSEKKKKRYKDSLSLAAMIRKFQKEKDALKKESNPKVPVTLSTPSLNKPPCAAAALGNDVPDLNLSSGDPDLPIFVSTNEHELFQEAENALEMLDDFDFDRLLDAASDGSPLSESGGENGTTTQPTYTSQVMPKVVPTLPEGLPVLLEKRIEDLRVAAKLFDEEGRKKFFTQDMNNILLDIELQLQELGPVIRSGVYSHLEAFVPCNKETLVKRLKKLHLNVQDDRLREPLQKLKLAVSNVMPEQLFKYQEDCQARSQAKCAKLQTDEEREKNGSEEDDDEKPGKRVIGPRKKFHWDDTIRTLLCNLVEIKLGCYELEPNKSQSAEDYLKSFMETEVKPLWPKGWMQARMLFKESRSVHNHLTSAPAKKKVIPAPKPKVKEVMVKTLPLHSFPTMLKECSPKKDQKTPTSLVASVSGPPTSSSTAAIAAASSSSAPAQETICLDDSLDEDLSFHSPSLDLVSEALAVINNGNKGPPVGSRISMPTTKPRPGLREEKLASIMSKLPLATPKKLDSTQTTHSSSLIAGHTGPVPKKPQDLAHTGISSGLIAGSSIQNPKVSLEPLPARLLQQGLQRSSQIHTSSSSQTHVSSSSQAQIAASSHALGTSEAQDASSLTQVTKVHQHSAVQQNYVSPLQATISKSQTNPVVKLSNNPQLSCSSSLIKTSDKPLMYRLPLSTPSPGNGSQGSHPLVSRTVPSTTTSSNYLAKAMVSQISTQGFKSPFSMAASPKLAASPKPATSPKPLPSPKPSASPKPSLSAKPSVSTKLISKSNPTPKPTVSPSSSSPNALVAQGSHSSTNSPVHKQPSGMNISRQSPTLNLLPSSRTSGLPPTKNLQAPSKLTNSSSTGTVGKNSLSGIAMNVPASRGSNLNSSGANRTSLSGGTGSGTQGATKPLSTPHRPSTASGSSVVTASVQSTAGASLLANASPLTLMTSPLSVTNQNVTPFGMLGGLVPVTMPFQFPLEIFGFGTDTAGVTTTSGSTSAAFHHSLTQNLLKGLQPGGAQHAATLSHSPLPAHLQQAFHDGGQSKGDTKLPRKSQ

SEQ ID NO: 16621 - protein, 116 aa, Homo sapiens
METPAQLLFLLLLWLPDTTGEIVLTQSPGTLSLSPGERATLSCRASQSVSSSYLAWYQQKPGQAPRLLIYGASSRATGIPDRFSGSGSGTDFTLTISRLEPEDFAVYYCQQYGSSP

SEQ ID NO: 16622 - protein, 271 aa, Homo sapiens
SVQSPFTRSAQSSPECAAARRPLESDQGDPFTLFNVFNAWVQVKSERSRNSRKWCRRRGIEEHRLYEMANLRRQFKELLEDHGLLAGAQAAQVGDSYSRLQQRRERRALHQLKRQHEEGAGRRRKVLRLQEEQDGGSSDEDRAGPAPPGASDGVDIQDVKFKLRHDLAQLQAAASSAQDLSREQLALLKLVLGRGLYPQLAVPDAFNSSRKDSDQIFHTQAKQGAVLHPTCVFAGSPEVLHAQELEASNCDGSRGMAACWESHSDLADLLV

SEQ ID NO: 16623 - protein, 989 aa, Homo sapiens
MGRKTSRVQQGPPRSPACSAHGERSWGLEFPPFRWLLGIAGRTHLAALPPFQWVLAFEIFIPLVLFFILLGLRQKKPTISVKEAFYTAAPLTSAGILPVMQSLCPDGQRDEFGFLQYANSTVTQLLERLDRVVEEGNLFDPARPSLGSELEALRQHLEALSAGPGTSGSHLDRSTVSSFSLDSVARNPQELWRFLTQNLSLPNSTAQALLAARVDPPEVYHLLFGPSSALDSQSGLHKGQEPWSRLGGNPLFRMEELLLAPALLEQLTCTPGSGELGRILTVPESQKGALQGYRDAVCSGQAAARARRFSGLSAELRNQLDVAKVSQQLGLDAPNGSDSSPQAPPPRRLQALLGDLLDAQKVLQDVDVLSALALLLPQGACTGRTPGPPASGAGGAANGTGAGAVMGPNATAEEGAPSAAALATPDTLQGQCSAFVQLWAGLQPILCGNNRTIEPEALRRGNMSSLGFTSKEQRNLGLLVHLMTSNPKILYAPAGSEVDRVILKANETFAFVGNVTHYAQVWLNISAEIRSFLEQGRLQQHLRWLQQYVAELRLHPEALNLSLDELPPALRQDNFSLPSGMALLQQLDTIDNAACGWIQFMSKVSVDIFKGFPDEESIVNYTLNQAYQDNVTVFASVIFQTRKDGSLPPHVHYKIRQNSSFTEKTNEIRRAYWRPGPNTGGRFYFLYGFVWIQDMMERAIIDTFVGHDVVEPGSYVQMFPYPCYTRDDFLFVIEHMMPLCMVISWVYSVAMTIQHIVAEKEHRLKEVMKTMGLNNAVHWVAWFITGFVQLSISVTALTAILKYGQVLMHSHVVIIWLFLAVYAVATIMFCFLVSVLYSKAKLASACGGIIYFLSYVPYMYVAIREEVAHDKITAFEKCIASLMSTTAFGLGSKYFALYEVAGVGIQWHTFSQSPVEGDDFNLLLAVTMLMVDAVVYGILTWYIEAVHPEVLLAGQWADRSLGVELAVGTHPPPQCHGGGPGLCHGEPAL

SEQ ID NO: 16624 - protein, 569 aa, Homo sapiens
MSEASGNLNSLRMANVALREELNALRGENANLGLQLGRALAEVNSLRGNVSSYIRWPVPIVPVLAEENLEFALSEIEVIPGGELPFLCRPPPRAEPDCISDDLLINVIQDRSTPDGPADPPLLPIPPPPALPPPASKEPPPQPPLAPLERPEIEPFSGDPVYLAEFLMQLETFIADHEVHFPGGAERVAFLISFFTGEAKDWAISVTQEGSPLHANFPRFLDEIRKEFCGPIPPRVAKKAIRKLKQGHCTLGSYADAFQFLAQFLSWDDCRLQNQFLKGLSEFFRKELLWSTEMADLDELILECVEIERKVRVPKPIPLPGVRNIIFPFAPSPNEEESEDEEYYSEDEDQEARRHRLHSKDQRKRMRAFQQEMKEKEEEEMKKEEEMKKKEEKEEEEEEEMKQKEEEEEIRNKNEEEGESKDEEDEDEDGGQKPEGEPQQDPGTEETYGEVEEEPLDEAQDDDLDELMEMEPTFVHASSQTSGPTSGYHAENFLGASPPIIQPSRRRNQNRVPLLEGLPGTNSPFYSSPQLIRRTGRLGQRQVRRRPPVLFRLTPRQGGHRAARGRIRV

SEQ ID NO: 16625 - protein, 448 aa, Homo sapiens
MAEASATGACGEAMAAAEGSSGPAGLTLGRSFSNYRPFEPQALGLSPSWRLTGFSGMKGUGCKVPQEALLKLLAGLTRPDVRPPLGRGLVGGQEEASQEAGLPAGAGPSPTFPALGIGMDSCVIPLRHGGLSLVQTTDFFYPLVEDPYMMGRIACANVLSDLYAMGITECDNMLMLLSVSQSMSEEEREKVTPLMVKGFRDAAEEGGTAVTGGQTVVNPWIIIGGVATVVCQPNEFIMPDSAVVGDVLVLTKPLGTQVAVNAHQWLDNPERWNKVKMVVSREEVELAYQEAMFNMATLNRTAAGLMHTFNAHAATDITGFGILGHSQNLAKQQRNEVSFVIHNLPIIAKMAAVSKASGRFGLLQGTSAETSGGLLICLPREQAARFCSEIKSSKYGEGHQAWIVGIVEKGNRTARIIDKPRVIEVLPRGATAAVLAPDSSNASSEPSS

SEQ ID NO: 16626 - protein, 217 aa, Homo sapiens
VEEENTKKQLPEVQLTEEEEVIKSSLMENEPLPPEILEVILSEWWLKEPIRSTGFILDGFPRYPEEAQFLGDRGFFPDAAVFIQVDDQDIFDRLLPAQIEKWKLKQKKKLERKKLIKDMKAKIRVDTIAKRRAELILERDKKRREPNKEKRKRGISENTTCYKCNHMSPWCEYAGLPYRGLLILYSATATATAGTKHCRSGAKVIVALSKQNIHNQK

SEQ ID NO: 16627 - protein, 286 aa, Homo sapiens
MLSSFPHRKTWRKSKKTVKVTRSYPTFPSLNAWEEFRGLLPVDGEPNPGAGLGVEEGLLCRVVHSPEFNLFLDSVVFESNFIQVKRGRNWRDVYKASNTMALGVTSSVPCLPLPNILLMASVKWHQGQNQTWNRPSIAPNIFLKRILPLRFVELQVCDHYQRILQLRTVTEKIYYLKLHPDHPETVFHFWIRLVQILQKGLSITTKDPRILVTHCLVPKNCSSPSGDSKLVQKKLQASQPSESLIQLMTKGESEALSQIFADLHQQNQLRNQLDQQFRGRTNSLSF

SEQ ID NO: 16628 - protein, 438 aa, Homo sapiens
MGEAPSPAPALWDWDYLDRCFARHRVCISFGLWICASSCWIAAHALLLYLRCAQKPRQDQSALCAACCLLTSLCDTVGALLARQLTIQVFTGAYLAAIDLVNFMFILFPVCGSKFKSNSDREARERKRRRQLRASVFALALPLSLGPCWALWVAVPKASATIRGPQRRLLASLLQENTEILGYLLGSVAAFGSWASRIPPLSRICRGKTFPSIHLWTRLLSALAGLLYASAIVAHDQHPEYLLRATPWFLTSLGRAALDLAIIFLSCVMKSKMRQALGFAKEARESPDTQALLTCAEKEEENQENLDWVPLTTLSHCKSLRTMTAISRYMELTIEPVQQAGCSATRLPGDGQTSAGDASLQDPPSYPPVQVIRARVSSGSSSEVSSINSDLEKYWEALNSEQWDPEDVNLEGSKENVELLGSQVHQDSVRTAHLSDDD

SEQ ID NO: 16629 - protein, 686 aa, Homo sapiens
MAISQHQFYLDRKQSKAKIPSARSLDEIAMDLTETGTQRASKLVTLETKSQFIMASNGSLISSGSQDSEVSEEQKREKILELKKKEKLLQEKLLKKVEELKKICLREAELTGKMPKEYPLNIGEKPPQVRRRVGTAFKLDDNLLPSEEDPALQELESNFLIQQKLVEAAKKLANEPDLCKTVKKKRKQDYTDAMKKLQEIENAINEYRIRCGKKPSQKATVLPEDIIPSESSSLSDTTTYDDPSDAFTFPGQRSSSVPHSPRILPPKSLGIERIHFRKSSINEQFVDTRQSREMLSTHSSPYKTLERRPQGGRSMPTTPVLTRNAYSSSHLEPESSSQHCRQRSGSLESQSHLLSEMDSDKPFFSLSKSQRSSSTEILDDGSSYTSQSSTEYYCVTPVTGPYYTTQTLDTRTRGRRRSKKQNVSTSNSGSMPNLAQKDSLRNGVYSKSQEPPSSSYYIAGYTPYAECDFYYSGGYVYENDTEGQYSVNPSYRSSAHYGYERQRDYSRSFHEDEVDRVPHNPYATLRLPRKAAAKSEHITKNIHKALVAEHLRGWYQRASGQKDQGHSPQTSFDSDRGSQRCLGFAGLQVPCSPSSRASSYSSVSSTNASGNWRTQLTIGLSDYETPAHSSYTSCYGNVYNPLPSPSRQYTEISQLDGTDGNQLEDNLESSEQRLFWHEDSKPGTLV

SEQ ID NO: 16630 - protein, 1001 aa, Homo sapiens
MAFYSCCWVLLALTWHTSAYGPDQRAQKKGDIILGGLFPIHFGVAAKDQDLKSRPESVECIRYNFRGFRWLQAMIFAIEEINSSPALLPNLTLGYRIFDTCNTVSKALEATLSFVAQNKIDSLNLDEFCNCSEHIPSTIAVVGATGSGVSTAVANLLGLFYIPQVSYASSSRLLSNKNQFKSFLRTIPNDEHQATAMADIIEYFRWNWVGTIAADDDYGRPGIEKFREEAEERDICIDFSELISQYSDEEEIQHVVEVIQNSTAKVIVVFSSGPDLEPLIKEIVRRNITGKIWLASEAWASSSLIAMPQYFHVVGGTIGFALKAGQIPGFREFLKKVHPRKSVHNGFAKEFWEETFNCHLQEGAKGPLPVDTFLRGHEESGDRFSNSSTAFRPLCTGDENISSVETPYIDYTHLRISYNVYLAVYSIAHALQDIYTCLPGRGLFTNGSCADIKKVEAWQVPFSNCSRDCLAGTRKGIIEGEPTCCFECVECPDGEYSDETDASACNKCPDDFWSNENHTSCIAKEIEFLSWTEPFGIALTLFAVLGIFLTAFVLGVFIKFRNTPIVKATNRELSYLLLFSLLCCFSSSLFFIGEPQDWTCRLRQPAFGISFVLCISCILVKTNRVLLVFEAKIPTSFHRKWWGLNLQFLLVFLCTFMQIVICVIWLYTAPPSSYRNQELEDEIIFITCHEGSLMALGFLIGYTCLLAAICFFFAFKSRKLPENFNEAKFITFSMLIFFIVWISFIPAYASTYGKFVSAVEVIAILAASFGLLACIFFNKIYIILFKPSRNTIEEVRCSTAAHAFKVAARATLRRSNVSRKRSSSLGGSTGSTPSSSISSKSNSEDPFPQPERQKQQQPLALTQQEQQQQPLTLPQQQRSQQQPRCKQKVIFGSGTVTFSLSFDEPQKNAMAHRNSTHQNSLEAQKSSDTLTRHEPLLPLQCGETDLDLTVQETGLQGPVGGDQRPEVEDPEELSPALVVSSSQSFVISGGGSTVTENVVNS

SEQ ID NO: 16631 - protein, 319 aa, Homo sapiens
MKIELSMQPWNPGYSSEGATAQETYTCPKMIEMEQAEAQLAELDLLASMFPGENELIVNDQLAVAELKDCIEKKTMEGRSSKVYFTINMNLDVSDEKMAMFSLACILPFKYPAVLPEITVRSVLLSRSQQTQLNTDLTAFLQKHCHGDVCILNATEWVREHASGYVSRDTSSSPTTGSTVQSVDLIFTRLWIYSHHIYNKCKRKNILEWAKELSLSGFSMPGKPGVVCVEGPQSACEEFWSRLRKLNWKRILIRHREDIPFDGTNDETERQRKFSIFEEKVFSVNGARGNHMDFGQLYQFLNTKGCGDVFQMFFGVEGQ

SEQ ID NO: 16632 - protein, 426 aa, Homo sapiens
MVGVGLCLRLLLFFRFKRTLDRICVLFLLGWHRKPRSDGSLFIERLYIGSSKTFTSSEKSLTPLQWCRHVLDNPTPEMEAARRSLCFRLEQGYTSRGSPLSPQSSIDSELSTSELEDDSISMGYKLQDLTDVQIMARLQEESLRQDYASTSASVSRHSSSVSLSSGKKGTCSDQEYDQYSLEDEEEFDHLPPPQPRLPRCSPFQRGIPHSQTFSSIRECRRSPSSQYFPSNNYQQQQYYSPQAQTPDQQPNRTNGDKLRRSMPNLARMPSTTAISSNISSPVTVRNSQSFDSSLHGAGNGISRIQSCIPSPGQLQHRVHSVGHFPVSIRQPLKATAYVSPTVQGSSNMPLSNGLQLYSNTGIPTPNKAAASGIMGRSALPRPSLAINGSNLPRSKIAQPVRSFLQPPKPLSSLSTLRDGNWRDGCY

SEQ ID NO: 16633 - protein, 569 aa, Homo sapiens
MSSAPRGPPSVAPLPAGIGRSTAKTPGLPGSLEMGPLTFRDVAIEFSLEEWQCLDTSQQNLYRNVMLDNYRNLVFLGIAVSKPDLITCLEQGKEPCNMKRHAMVAKPPVVCSHFAQDLWPKQGLKDSFQKVILRRYGKYGHENLQLRKGCKSADEHKVHKRGYNGLNQCLTTTQSKIFQCDKYVKVLHKFSNSNIHKKRQTGKKPFKCKECGKSCCILSQLTQHKKTATRVNFYKCKTCGKAFNQFSNLTKHKIIHPEVNPYKCEECGKAFNQSLTLTKHKKIHTEEKPYKCEDCGKVFSVFSVLTKHKIIHTGTKPYNCEECGKGFSIFSTLTKHKIIHTGEKPYKCNECGKAFNWSSTLTKHKRIHTGEKPYKCEECGKAFNQSSTLTRHKIVHTGEKPYKCEECGKAFKRSTTLTKHKRIYTKEKPYKCEECGKAFSVFSTLTKHKIIHTGAKPYKCEECGSAFRAFSTLTEHKRVHTGEKPYKCNECGKAFNWSSTLTKHKRIHTGEKPYKCEECGKAFNRSSNLTRHKKIHTGEKPYKPKRCDSAFDNTPNFSRHKRNHMGEKS

SEQ ID NO: 16634 - protein, 347 aa, Homo sapiens
MERARRRGGGGGRGRGGKNVGGSGLSKSRLYPQAQHSHYPHYAASATPNQAGGAAEIQELASKRVDIQKKRFYLDVKQSSRGRFLKIAEVWIGRGRQDNIRKSKLTLSLSVAAELKDCLGDFIEHYAHLGLKGHRQEHGHSKEQGSRRRQKHSAPSPPVSVGSEEHPHSVLKTDYIERDNRKYYLDLKENQRGRFLRIRQTMMRGTGMIGYFGHSLGQEQTIVLPAQGMIEFRDALVQLIEDYGEGDIEERRGGDDDPLELPEGTSFRVDNKRFYFDVGSNKYGIFLKVSEVRPPYRNTITVPFKAWTRFGENFIKYEEEMRKICNSHKEKRMDGRKASGEEQECLD

SEQ ID NO: 16635 - protein, 94 aa, Homo sapiens
MMKGEFYVIEYAACDATYNEIVTFERLRPVNQNKTVKKNTFFKCTVDVPEDLREACANENAHKDFKKAVGACRIFYHPETTQLMILSASEATVK

SEQ ID NO: 16636 - protein, 828 aa, Homo sapiens
MAAEEADVDIEGDVVAAAGAQPGSGENTASVLQKDHYLDSSWRTENGLIPWTLDNTISEENRAVIEKMLLEEEYYLSKKSQPEKVWLDQKEDDKKYMKSLQKTAKIMVHSPTKPASYSVKWTIEEKELFEQGLAKFGRRWTKISKLIGSRTVLQVKSYARQYFKNKVKCGLDKETPNQKTGHNLQVKNEDKGTKAWTPSCLRGRADPNLNAVKIEKLSDDEEVDITDEVDELSSQTPQKNSSSDLLLDFPNSKMHETNQGEFITSDSQEALFSKSSRGCLQNEKQDETLSSSEITLWTEKQSNGDKKSIELNDQKFNELIKNCNKHDGRGIIVDARQLPSPEPCEIQKNLNDNEMLFHSCQMVEESHEEEELKPPEQEIEIDRNIIQEEEKQAIPEFFEGRQAKTPERYLKIRNYILDQWEICKPKYLNKTSVRPGLKNCGDVNCIGRIHTYLELIGAINFGCEQAVYNRPQTVDKVRIRDRKDAVEAYQLAQRLQSMRTRRRRVRDPWGNWCDAKDLEGQTFEHLSAEELAKRREEEKGRPVKSLKVPRPTKSSFDPFQLIPCNFFSEEKQEPFQVKVASEALLIMDLHAHVSMAEVIGLLGGRYSEVDKVVEVCAAEPCNSLSTGLQCEMDPVSQTQASETLAVRGFSVIGWYHSHPAFDPNPSLRDIDTQAKYQSYFSRGGAKFIGMIVSPYNRNNPLPYSQITCLVISEEISPDGSYRLPYKFEVQQMLEEPQWGLVFEKTRWIIEKYRLSHSSVPMDKIFRRDSDLTCLQKLLECMRKTLSKVTNCFMAEEFLTEIENLFLSNYKSNQENGVTEENCTKELLM

SEQ ID NO: 16637 - protein, 1935 aa, Homo sapiens
MQFVSWATLLTLLVRDLAEMGSPDAAAAVRKDRLHPRQVKLLETLSEYEIVSPIRVNALGEPFPTNVHFKRTRRSINSATDPWPAFASSSSSSTSSQAHYRLSAFGQQFLFNLTANAGFIAPLFTVTLLGTPGVNQTKFYSEEEAELKHCFYKGYVNTNSEHTAVISLCSGMLGTFRSHDGDYFIEPLQSMDEQEDEEEQNKPHIIYRRSAPQREPSTGRHACDTSEHKNRHSKDKKKTRARKWGERINLAGDVAALNSGLATEAFSAYGNKTDNTREKRTHRRTKRFLSYPRFVEVLVVADNRMVSYHGENLQHYILTLMSIVASIYKDPSIGNLINIVIVNLIVIHNEQDGPSISFNAQTTLKNFCQWQHSKNSPGGIHHDTAVLLTRQDICRAHDKCDTLGLAELGTICDPYRSCSISEDSGLSTAFTIAHELGHVFNMPHDDNNKCKEEGVKSPQHVMAPTLNFYTNPWMWSKCSRKYITEFLDTGYGECLLNEPESRPYPLPVQLPGILYNVNKQCELIFGPGSQVCPYMMQCRRLWCNNVNGVHKGCRTQHTPWADGTECEPGKHCKYGFCVPKEMDVPVTDGSWGSWSPFGTCSRTCGGGIKTAIRECNRPEPKNGGKYCVGRRMKFKSCNTEPCLKQKRDFRDEQCAHFDGKHFNINGLLPNVRWVPKYSGILMKDRCKLFCRVAGNTAYYQLRDRVIDGTPCGQDTNDICVQGLCRQAGCDHVLNSKARRDKCGVCGGDNSSCKTVAGTFNTVHYGYNTVVRIPAGATNIDVRQHSFSGETDDDNYLALSSSKGEFLLNGNFVVTMAKREIRIGNAVVEYSGSETAVERINSTDRIEQELLLQVLSVGKLYNPDVRYSFNIPIEDKPQQFYWNSHGPWQACSKPCQGERKRKLVCTRESDQLTVSDQRCDRLPQPGHITEPCGTDCDLRWHVASRSECSAQCGLGYRTLDIYCAKYSRLDGKTEKVDDGFCSSHPKPSNREKCSGECNTGGWRYSAWTECSKSCDGGTQRRRAICVNTRNDVLDDSKCTHQEKVTIQRCSEFPCPQWKSGDWSECLVTCGKGHKHRQVWCQFGEDRLNDRMCDPETKPTSMQTCQQPECASWQAGPWGQCSVTCGQGYQLRAVKCIIGTYMSVVDDNDCNAATRPTDTQDCELPSCHPPPAAPETRRSTYSAPRTQWRFGSWTPCSATCGKGTRMRYVSCRDENGSVADESACATLPRPVAKEECSVTPCGQWKALDWSSCSVTCGQGRATRQVMCVNYSDHVIDRSECDQDYIPETDQDCSMSPCPQRTPDSGLAQHPFQNEDYRPRSASPSRTHVLGGNQWRTGPWGACSSTCAGGSQRRVVVCQDENGYTANDCVERIKPDEQRACESGPCPQWAYGNWGECTKLCGGGIRTRLVVCQRSNGERFPDLSCEILDKPPDREQCNTHACPHDAAWSTGPWSSCSVSCGRGHKQRNVYCMAKDGSHLESDYCKHLAKPHGHRKCRGGRCPKWKAGAWSQCSVSCGRGVQQRHVGCQIGTHKIARETECNPYTRPESERDCQGPRCPLYTWRAEEWQECTKTCGEGSRYRKVVCVDDNKNEVHGARCDVSKRPVDRESCSLQPCEYVWITGEWSECSVTCGKGYKQRLVSCSEIYTGKENYEYSYQTTINCPGTQPPSVHPCYLRDCPVSATWRVGNWGSCSVSCGVGVMQRSVQCLTNEDQPSHLCHTDLKPEERKTCRNVYNCELPQNCKEVKRLKGASEDGEYFLMIRGKLLKIFCAGMHSDHPKEYVTLVHGDSENFSEVYGHRLHNPTECPYNGSRRDDCQCRKDYTAAGFSSFQKIRIDLTSMQIITTDLQFARTSEGHPVPFATAGDCYSAAKCPQGRFSINLYGTGLSLTESARWISQGNYAVSDIKKSPDGTRVVGKCGGYCGKCTPSSGTGLEVRVL

SEQ ID NO: 16638 - protein, 457 aa, Homo sapiens
MLDPSSSEEESDEIVEEESGKEVLGSAPSGARLSPSRTSEGSAGSAGLGGGGAGAGAGVGAGGGGGSGASSGGGAGGLQPSSRAGGGRPSSPSPSVVSEKEKEELERLQKEEEERKKRLQLYVFVMRCIAYPFNAKQPTDMARRQQKISKQQLQTVKDRFQAFLNGETQIMADEAFMNAVQSYYEVFLKSDRVARMVQSGGCSANDSREVFKKHIEKRVRSLPEIDGLSKETVLSSWMAKFDAIYRGEEDPRKQQARMTASAASELILSKEQLYEMFQNILGIKKFEHQLLYNACQLDNPDEQAAQIRRELDGRLQMADQIARERKFPKFVSKEMENMYIEELKSSVNLLMANLESMPVSKGGEFKLQKLKRSHNASIIDMGEESENQLSKSDVVLSFSLEVVIMEVQGLKSLAPNRIVYCTMEVEGGEKLQTDQAEASKPTVIRRNRREQLPHSAI

SEQ ID NO: 16639 - protein, 628 aa, Homo sapiens
MGSGARFPSGTLRVRWLLLLGLVGPVLGAARPGFQQTSHLSSYEIITPWRLTRERREAPRPYSKQVSYVIQAEGKEHIIHLERNKDLLPEDFVVYTYNKEGTLITDHPNIQNHCHYRGYVEGVHNSSIALSDCFGLRGLLHLENASYGIEPLQNSSHFEHIIYRMDDVYKEPLKCGVSNKDIEKETAKDEEEEPPSMTQLLRRRRAVLPQTRYVELFIVVDKERYDMMGRNQTAVREEMILLANYLDSMYIMLNIRIVLVGLEIWTNGNLINIVGGAGDVLGNFVQWREKFLITRRRHDSAQLVLKKGFGGTAGMAFVGTVCSRSHAGGINVFGQITVETFASIVAHELGHNLGMNHDDGRDCSCGAKSCIMNSGASGSRNFSSCSAEDFEKLTLNKGGNCLLNIPKPDEAYSAPSCGNKLVDAGEECDCGTPKECELDPCCEGSTCKLKSFAECAYGDCCKDCRFLPGGTLCRGKTSECDVPEYCNGSSQFCQPDVFIQNGYPCQNNKAYCYNGMCQYYDAQCQVIFGSKAKAAPKDCFIEVNSKGDRFGNCGFSGNEYKKCATGNALCGKLQCENVQEIPVFGIVPAIIQTPSRGTKCWGVDFQLGSDVPDPGMVNEGTKCGAGKK

SEQ ID NO: 16640 - protein, 1235 aa, Homo sapiens
MWNYDCDDPLVSALPQASFSSSSELSSSHGPGFARLNRRDGAGGWSPLVSNKYQWLQIDLGERMEVTAVATQGGYGSSNWVTSYLLMFSDSGWNWKQYRQEDSIWGFSGNANADSVVYYRLQPSIKARFLRFIPLEWNPKGRIGMRIEVFGCAYRSEVVDLDGKSSLLYRFDQKSLSPIKDIISLKFKTMQSDGILLHREGPNGDHITLQLRRARLFLLINSGEAKLPSTSTLVNLTLGSLLDDQHWHSVLIQRLGKQVNFTVDEHRHHFHARGEFNLMNLDYEGNVSFSCSQPQSMPVTFLSSRSYLALPDFSGEEEVSATFQFRTWNKAGLLLFSELQLISGGILLFLSDGKLKSNLYQPGKLPSDITAGVELNDGQWHSVSLSAKKNHLSVAVDGQMASAAPLLGPEQIYSGGTYYFGGCPDKSFGSKCKSPLGGFQGCMRLISISGKVVDLISVQQGSLGNFSDLQIDSCGISDRCLPNYCEHGGECSQSWSTFHCNCTNTGYRGATCHNSIYEQSCEAYKHRGNTSGFYYIDSDGSGPLEPFLLYCNMTETAWTIIQHNGSDLTRVRNTNPENPYAGFFEYVASMEQLQATINRAEHCEQEFTYYCKKSRLVNKQDGTPLSWWVGRTNETQTYWGGSSPDLQKCTCGLEGNCIDSQYYCNCDADRNEWTNDTGLLAYKEHLPVTKIVITDTGRLHSEAAYKLGPLLCQGDRSFWNSASFDTEASYLHFPTFHGELSADVSFFFKTTASSGVFLENLGIADFIRIELRSPTVVTFSFDVGNGPFEISVQSPTHFNDNQWHHVRVERNMKEASLQVDQLTPKTQPAPADGHVLLQLNSQLFVGGTATRQRGFLGCIRSLQLNGMTLDLEERAQVTPEVQPGCRGHCSSYGKLCRNGGKCRERPIGFFCDCTFSAYTGPFCSNEISAYFGSGSSVIYNFQENYLLSKNSSSHAASFHGDMKLSREMIKFSFRTTRTPSLLLFVSSFYKEYLSVIIAKNGSLQIRYKLNKYQEPDVVNFDFKNMADGQLHHIMINREEGVVFIEIDDNRRRQVHLSSGTEFSAVKSLVLGRILEHSDVDQDTALAGAQGFTGCLSAVQLSHVAPLKAALHPSHPDPVTVTGHVTESSCMAQPGTDATSRERTHSFADHSGTIDDREPLANAIKSDSAVIGGLIAVVIFILLCITAIAVRIYQQKRLYKRSEAKRSENVDSAEAVLKSELNIQNAVNENQKEYFF

SEQ ID NO: 16641 - protein, 386 aa, Homo sapiens
MNIMDFNVKKLAADAGTFLSRAVQFTEEKLGQAEKTELDAHLENLLSKAECTKIWTEKIMKQTEVLLQPNPNARIEEFVYEKLDRKAPSRINNPELLGQYMIDAGTEFGPGTAYGNALIKCGETQKRIGTADRELIQTSALNFLTPLRNFIEGDYKTIAKERKLLQNKRLDLDAAKTRLKKAKAAETRNSQLNSARLEGDNIMIWAEEVTKSEQELRITQSEFDRQAEITRLLLEGISSTHAHHLRCLNDFVEAQMTYYAQCYQYMLDLQKQLGSFPSNYLSNNNQTSVTPVPSVLPNAIGSSAMASTSGLVITSPSNLSDLKECSGSRKARVLYDYDAANSTELSLLADEVITVFSVVGMDSDWLMGERGNQKGKVPITYLELLN

SEQ ID NO: 16642 - protein, 796 aa, Homo sapiens
VVVPTLKQHSHPPPLALGSGLHAPHKGPLPQASDPAVARQHRPLPSTPDSSHHAQATPRWRYNKPLPPTPDLPQPHLPPISAPGSSRIYRPLPPLPIIDPPTEPPPLPPKSRGRSRSTRGGHMNSGGHAKTRPACQDWTVPLPASAGRTSWPPATARSTESFTSTSRSKSEVSPGMAFSNMTNFLCPSSPTTPWTPELQGPTSKDEAGVSEHPEAPAREPLRRTTPQQGASGPGRSPVGQARQPEKPSHLHLEKASSWPHRRDSGRPPGDSSGQAVAPSEGANKHKGWSRQGLRRPSILPEGSSDSRGPAVEKHPGPSDTVVFREKKPKEVMGGFSRRCSKLINSSQLLYQEYSDVVLNKEIQSQQRLESLSETPGPSSPRQPRKALVSSESYLQRLSMASSGSLWQEIPVVRNSTVLLSMTHEDQKLQEVKFELIVSEASYLRSLNIAVDHFQLSTSLRATLSNQEHQWLFSRLQDVRDVSATFLSDLEENFENNIFSFQVCDVVLNHAPDFRRVYLPYVTNQTYQERTFQSLMNSNSNFREVLEKLESDPVCQRLSLKSFLILPFQRITRLKLLLQNILKRTQPGSSEEAEATKAHHALEQLIRDCNNNVQSMRRTEELIYLSQKIEFECKIFPLISQSRWLVKSGELTALEFSASPGLRRKLNTRPVHLHLFNDCLLLSRPRESEKLRWISALAMPREELDLLECYNSPQVQCLRAYKPRENDELALEKADVVMVTQQSSDGWLEGVRLSDGERGWFPVQQVEFISNPEVRAQNLKEAHRVKTAKLQLVEQQA

SEQ ID NO: 16643 - protein, 988 aa, Homo sapiens
MVKLDIHTLAHHLKQERLYVNSEKQLIQRLNADVLKTAEKLYRTAWIAKQQRINLDRLIITSAEASPAECCQHAKILEDTQFVDGYKQLGFQETAYGEFLSRLRENPRLIASSLVAGEKLNQENTQSVIYTVFTSLYGNCIMQEDESYLLQVLRYLIEFELKESDNPRRLLRRGTCAFSILFKLFSEGLFSAKLFLTATLHEPIMQLLVEDEDHLETDPNKLIERFSPSQQEKLFGEKGSDRFRQKVQEMVESNEAKLVALVNKFIGYLKQNTYCFPHSLRWIVSQMYKTLSCVDRLEVGEVRAMCTDLLLACFICPAVVNPEQYGIISDAPINEVARFNLMQVGRLLQQLAMTGSEEGDPRTKSSLGKFDKSCVAAFLDVVIGGRAVETPPLSSVNLLEGLSRTVVYITYSQLITLVNFMKSVMSGDQLREDRMALDNLLANLPPAKPGKSSSLEMTPYNTPQLSPATTPANKKNRLPIATRSRSRTNMLMDLHMDHEGSSQETIQEVQPEEVLVISLGTGPQLTPGMMSENEVLNMQLSDGGQGDVPVDENKLHGKPDKTLRFSLCSDNLEGISEGPSNRSNSVSSLDLEGESVSELGAGPSGSNGVEALQLLEHEQATTQDNLDDKLRKFEIRDMMGLTDDRDISETVSETWSTDVLGSDFDPNIDEDRLQEIAGAAAENMLGSLLCLPGSGSVLLDPCTGSTISETTSEAWSVEVLPSDSEAPDLKQEERLQELESCSGLGSTSDDTDVREVSSRPSTPGLSVVSGISATSEDIPNKIEDLRSECSSDFGGKDSVTSPDMDEITHGAHQLTSPPSQSESLLAMFDPLSSHEGASAVVRPKVHYARPSHPPPDPPILEGAVGGNEARLPNFGSHVLTPAEMEAFKQRHSYPERLVRSRSSDIVSSVRRPMSDPSWNRRPGNEERELPPAAAIGATSLVAAPHSSSSSPSKDSSRGETEERKDSDDEKSDRNRPWWRKRFVSAMPK

SEQ ID NO: 16644 - protein, 717 aa, Homo sapiens
MTPPPPPPPPPGPDPAADPAADPCPWPGSLVVLFGATAGALGRDLGSDETDLILLVWQVVEPRSRQVGTLHKSLVRAEAAALSTQCREASGLSADSLARAEPLDKVLQQFSQLVNGDVALLGGGPYMLCTDGQQLLRQVLHPEASRKNLVLPDMFFSFYDLRREFHMQHPSTCPARDLTVATMAQGLGLETDATEDDFGVWEVKTMVAVILHLLKEPSSQLFSKPEVIKQKYETGPCSKADVVDSETVVRARGLPWQSSDQDVARFFKGLNVARGGVALCLNAQGRRNGEALIRFVDSEQRDLALQRHKHHMGVRYIEVYKATGEEFVKIAGGTSLEVARFLSREDQVILRLRGLPFSAGPTDVLGFLGPECPVTGGTEGLLFVRHPDGRPTGDAFALFACEELAQAALRRHKGMLGKRYIELFRSTAAEVQQVLNRYASGPLLPTLTAPLLPIPFPLAPGTGRDCVRLRGLPYTATIEDILSFLGEAAADIRPHGVHMVLNQQGRPSGDAFIQMTSAERALAAAQRCHKKVMKERYVEVVPCSTEEMSRVLMGGTLGRSGMSPPPCKLPCLSPPTYTTFQATPTLIPTETAALYPSSALLPAARVPAAPTPVAYYPGPATQLYLNYTAYYPSPPVSPTTVGYLTTPTAALASAPTSVLSQSGALVRMQGVPYTAGMKDLLSVFQAYQLPADDYTSLMPVGDPPRTVLQAPKEWVCL

SEQ ID NO: 16645 - protein, 1078 aa, Homo sapiens
MGSFLSGEKRPSAPTVGSAMEKKEFPTPPGRVGPGTQTAIVFIKQPSSQDALQGRRALLRCEVEAPGPVHVYWLLDGAPVQDTERRFAQGSSLSFAAVDRLQDSGTFQCVARDDVTGEEARSANASFNIKWIEAGPVVLKHPASEAEIQPQTQVTLRCHIDGHPRPTYQWFRDGTPLSDGQSNHTVSSKERNLTLRPAGPEHSGLYSCCAHSAFGQACSSQNFTLSIADESFARVVLAPQDVVVARYEEAMFHCQFSAQPPPSLQWLFEDETPITNRSRPPHLRRATVFANGSLLLTQVRPRNAGIYRCIGQGQRGPPIILEATLHLAEIEDMPLFEPRVFTAGSEERVTCLPPKGLPEPSVWWEHAGVRLPTHGRVYQKGHELVLANIAESDAGVYTCHAANLAGQRRQDVNITVATVPSWLKKPQDSQLEEGKPGYLDCLTQATPKPTVVWYRNQMLISEDSRFEVFKNGTLRINSVEVYDGTWYRCMSSTPAGSIEAQARVQVLEKLKFTPPPQPQQCMEFDKEATVPCSATGREKPTIKWERADGSSLPEWVTDNAGTLHFARVTRDDAGNYTCIASNGPQGQIRAHVQLTVAVFITFKVEPERTTVYQGHTALLQCEAQGDPKPLIQWKGKDRILDPTKLGPRMHIFQNGSLVIHDVAPEDSGRYTCIAGNSCNIKHTEAPLYVVDKPVPEESEGPGSPPPYKMIQTIGLSVGAAVAYIIAVLGLMFYCKKRCKAKRLQKQPEGEEPEMECLNGGPLQNGQPSAEIQEEVALTSLGSGPAATNKRHSTSDKMHFPRSSLQPITTLGKSEFGEVFLAKAQGLEEGVAETLVLVKSLQSKDEQQQLDFRRELEMFGKLNHANVVRLLGLCREAEPHYMVLEYVDLGDLKQFLRISKSKDEKLKSQPLSTKQKVALCTQVALGMEHLSNNRFVHKDLAARNCLVSAQRQVKVSALGLSKDVYNSEYYHFRQAWVPLRWMSPEAILEGDFSTKSDVWAFGVLMWEVFTHGEMPHGGQADDEVLADLQAGKARLPQPEGCPSKLYRLMQRCWALSPKDRPSFSEIASALGDSTVDSKP

SEQ ID NO: 16646 - protein, 810 aa, Homo sapiens
MEPEINCSELCDSFPGQELDRRPLHDLCKTTITSSHHSSKTISSLSPVLLGIVWTFLSCGLLLILFFLAFTIHCRKNRIVKMSSPNLNIVTLLGSCLTYSSAYLFGIQDVLVGSSMETLIQTRLSMLCIGTSLVFGPILGKSWRLYKVFTQRVPDKRVIIKDLQLLGLVAALLMADVILLMTWVLTDPIQCLQILSVTGKDVSCTSTSTHFCASRYSDVWIALIWGCKGLLLLYGAYLAGLTGHVSSPPVNQSLTIMVGVNLLVLAAGLLFVVTRYLHSWPNLVFGLTSGGIFVCTTTINCFIFIPQLKQWKAFEEENQTIRRMAKYFSTPNKSFHTQYGEEENCHPRGEKSSMERLLTEKNAVIESLQEQVNNAKEKIVRLMSAECTYDLPEGAAPPASSPNKDVQAVASVHTLAAAQGPSGHLSDFQNDPGMAARDSQCTSGPSSYAQSLEGPGKDSSFSPGKEEKISDSKDFSDHLDSGCSQKPWTEQSLGPERGDQVPMNPSQSLLPERGGSDPQRQRHLENSEEPPERRSRVSSVIREKLQEVLQDLGLGPEASLSTAPSCHQQTWKNSAAFSPQKMPLSKELGFSPYMVRRRRAAQRARSHFPGSAPSSVGHRANRTVPGAHSRLHVQNGDSPSLAPQTTDSRVRRPSSRKPSLPSDPQDRPGTLEGSKQSQTEPEGARGSKAAFLRQPSGSGRAPSPAAPCLSKASPDLPEQWQLWPPVPSGCASLSSQHSYFDTESSSSDEFFCRCHRPYCEICFQSSSDSSDSGTSDTDPEPTGGLASWEKLWARSKPIVNFKDDLKPTLV

SEQ ID NO: 16647 - protein, 748 aa, Homo sapiens
QIEKWKLKQKKKLERKKLIKDMKAKIRVDTIAKRRAELILERDKKRRENVVRDDEEISEEELEEDNDDIENILEDEFPKDEEEMSGEEDEEQETDAIERLRGELGEKFEADTHNLQIIQDELERYLIPIISINGARRNHIVQYTLNMKLKPLVENRASIFEKCHPIPAPLAQKMLTFTYKYISSFGYWDPVKLSEGETIKPVENAENPIYPVIHRQYIYFLSSKETKEKFMKNPIKYIRQPKPKPTVPIRIIIVGPPKSGKTTVAKKITSEYGLKHLSIGGALRYVLNNHPETELALMLNWHLHKGMTAPDELAIQALELSLMESVCNTAGVVIDGYPVTKHQMNLLEARSIIPMVIFELSVPSKEIFKRLLLEKENEQRLPYPLHNSAQIVAVNNVKYRKNIGEIRQYYQEQHQNWYVIDGFHSKWWVWNEVIKNVQMVNKYMQTYLERIKAGKAACIDKLCITPQELLSRLGEFEQFCPVSLAESQELFDCSATDSLEFAAEFRGHYYKMSSQEKLNKFLENPELYVPPLAPHPLPSADMIPKRLTLSELKSRFPKCAELQGYCPVTYKDGNQRYEALVPGSINYALEYHNRIYICENKEKLQKFLRSPLKYWEQKLPHKLPPLREPILLTSLPLPGYLEQGIATSLIKAMNAAGCLKPKFPFLSIRRSALLYIALHLKAFNPKGSEYTRKKYKKKMEQFMESCELITYLGAKMTRKYKEPQFRAIDFDHKLKTFLSLRNIDPING

SEQ ID NO: 16648 - protein, 946 aa, Homo sapiens
MKILILGIFLFLCSTPAWAKEKHYYIGIIETTWDYASDHGEKKLISVDTEHSNIYLQNGPDRIGRLYKKALYLQYTDETFRTTIEKPVWLGFLGPIIKAETGDKVYVHLKNLASRPYTFHSHGITYYKEHEGAIYPDNTTDFQRADDKVYPGEQYTYMLLATEEQSPGEGDGNCVTRIYHSHIDAPKDIASGLIGPLIICKKDSLDKEKEKHIDREFVVMFSVVDENFSWYLEDNIKTYCSEPEKVDKDNEDFQESNRMYSVNGYTFGSLPGLSMCAEDRVKWYLFGMGNEVDVHAAFFHGQALTNKNYRIDTINLFPATLFDAYMVAQNPGEWMLSCQNLNHLKAGLQAFFQVQECNKSSSKDNIRGKHVRHYYIAAEEIIWNYAPSGIDIFTKENLTAPGSDSAVFFEQGTTRIGGSYKKLVYREYTDASFTNRKERGPEEEHLGILGPVIWAEVGDTIRVTFHNKGAYPLSIEPIGVRFNKNNEGTYYSPNYNPQSRSVPPSASHVAPTETFTYEWTVPKEVGPTNADPVCLAKMYYSAVEPTKDIFTGLIGPMKICKKGSLHANGRQKDVDKEFYLFPTVFDENESLLLEDNIRMFTTAPDQVDKEDEDFQESNKMHWTFNVECLTTDHYTGGMKQKYTVNQCRRQSEDSTFYLGERTYYIAAVEVEWDYSPQREWEKELHHLQEQNVSNAFLDKGEFYIGSKYKKVVYRQYTDSTFRVPVERKAEEEHLGILGPQLHADVGDKVKIIFKNMATRPYSIHAHGVQTESSTVTPTLPGETLTYVWKIPERSGAGTEDSACIPWAYYSTVDQVKDLYSGLIGPLIVCRRPYLKVFNPRRKLEFALLFLVFDENESWYLDDNIKTYSDHPEKVNKDDEEFIESNKMHAINGRMFGNLQGLTMHVGDEVNWYLMGMGNEIDLHTVHFHGHSFQYKHLLRLTGEYGM

SEQ ID NO: 16649 - protein, 1816 aa, Homo sapiens
MLKLLNQKKGPSQCPLCKNDITKRSLQESTRFSQLVEELLKIICAFQLDTGLEYANSYNFAKKENNSPEHLKDEVSIIQSMGYRNRAKRLLQSEPENPSLQETSLSVQLSNLGTVRTLRTKQRIQPQKTSVYIELGSDSSEDTVNKATYCSVGDQELLQITPQGTRDEISLDSAKKAACEFSETDVTNTEHHQPSNNDLNTTEKRAAERHPEKYQGSSVSNLHVEPCGTNTHASSLQHENSSLLLTKDRMNVEKAEFCNKSKQPGLARSQHNRWAGSKETCNDRRTPSTEKKVDLNADPLCERKEWNKQKLPCSENPRDTEDVPWITLNSSIQKVNEWFSRSDELLGSDDSHDGESESNAKVADVLDVLNEVDEYSGSSEKIDLLASDPHEALICKSERVHSKSVESNIEDKIFGKTYRKKASLPNLSHVTENLIIGAFVTEPQIIQERPLTNKLKRKRRPTSGLHPEDFIKKADLAVQKTPEMINQGTNQTEQNGQVMNITNSGHENKTKGDSIQNEKNPNPIESLEKESAFKTKAEPISSSISNMELELNIHNSKAPKKNRLRRKSSTRHIHALELVVSRNLSPPNCTELQIDSCSSSEEIKKKKYNQMPVRHSRNLQLMEGKEPATGAKKSNKPNEQTSKRHDSDTFPELKLTNAPGSFTKCSNTSELKEFVNPSLPREEKEEKLETVKVSNNAEDPKDLMLSGERVLQTERSVESSSISLVPGTDYGTQESISLLEVSTLGKAKTEPNKCVSQCAAFENPKGLIHGCSKDNRNDTEGFKYPLGHEVNHSRETSIEMEESELDAQYLQNTFKVSKRQSFAPFSNPGNAEEECATFSAHSGSLKKQSPKVTFECEQKEENQGKNESNIKPVQTVNITAGFPVVGQKDKPVDNAKCSIKGGSRFCLSSQFRGNETGLITPNKHGLLQNPYRIPPLFPIKSFVKTKCKKNLLEENFEEHSMSPEREMGNENIPSTVSTISRNNIRENVFKEASSSNINEVGSSTNEVGSSINEIGSSDENIQAELGRNRGPKLNAMLRLGVLQPEVYKQSLPGSNCKHPEIKKQEYEEVVQTVNTDFSPYLISDNLEQPMGSSHASQVCSETPDDLLDDGEIKEDTSFAENDIKESSAVFSKSVQKGELSRSPSPFTHTHLAQGYRRGAKKLESSEENLSSEDEELPCFQHLLFGKVNNIPSQSTRHSTVATECLSKNTEENLLSLKNSLNDCSNQVILAKASQEHHLSEETKCSASLFSSQCSELEDLTANTNTQDPFLIGSSKQMRHQSESQGVGLSDKELVSDDEERGTGLEENNQEEQSMDSNLGEAASGCESETSVSEDCSGLSSQSDILTTQQRDTMQHNLIKLQQEMAELEAVLEQHGSQPSNSYPSIISDSSALEDLRNPEQSTSEKAVLTSQKSSEYPISQNPEGLSADKFEVSADSSTSKNKEPGVERSSPSKCPSLDDRWYMHSCSGSLQNRNYPSQEELIKVVDVEEQQLEESGPHDLTETSYLPRQDLEGTPYLESGISLFSDDPESDPSEDRAPESARVGNIPSSTSALKVPQLKVAESAQSPAAAHTTDTAGYNAMEESVSREKPELTASTERVNKRMSMVVSGLTPEEFMLVYKFARKHHITLTNLITEETTHVVMKTDAEFVCERTLKYFLGIAGGKWVVSYFWVTQSIKERKMLNEHDFEVRGDVVNGRNHQGPKRARESQDRKIFRGLEICCYGPFTNMPTDQLEWMVQLCGASVVKELSSFTLGTGVHPIVVVQPDAWTEDNGFHAIGQMCEAPVVTREWVLDSVALYQCQELDTYLIPQIPHSHY

SEQ ID NO: 16650 - protein, 423 aa, Homo sapiens
MMLSRAKPAVGRGVQHTDKRKKKGRKIPKLEELLSKRDFTGAITLLEFKRHVGEEEEDTNLWIGYCAFHLGDYKRALEEYENATKEENCNSEVWVNLACTYFFLGMYKQAEAAGFKASKSRLQNRLLFHLAHKVVFRGGEGALQVLPPLVDVIPEARLNLVIYYLRQDDVQEAYNLIKDLEPTTPQEYILKGVVNAALGQEMGSRDHMKIAQQFFQLVGGSASECDTIPGRQCMASCFFLLKQFDDVLIYLNSFKSYFYNDDIFNFNYAQAKAATGNTSEGEEAFLLIQSEKMKNDYIYLSWLARCYIMNKKPRLAWELYLKMETSGESFSLLQLIANDCYKMGQFYYSAKAFDVLERLDPNPEYWEGKRGACVGIFQMIIAGREPKETLREVLHLLRSTGNTQVEYMIRIMKKWAKENRVSI

SEQ ID NO: 16651 - protein, 440 aa, Homo sapiens
MHKSSSIWGDAPPTPQPKCADFQSANLFEGTDLKVQFLLFVPSNPSCGQLVEGSSDLQNSGFNATLGTKLIIHGFRVLGTKPSWIDTFIRTLLRATNANVIAVDWIYGSTGVYFSAVKNVIKLSLEISLFLNKLLVLGVSESSIHIIGVSLGAHVGGMVGQLFGGQLGQITGLDPAGPEYTRASVEERLDAGDALFVEAIHTDTDNLGIRIPVGHVDYFVNGGQDQPGCPTFFYAGYSYLICDHMRAVHLYISALENSCPLMAFPCASYKAFLAGRCLDCFNPFLLSCPRIGLVEQGGVKIEPLPKEVKVYLLTTSSAPYCMHHSLVEFHLKELRNKDTNIEVTFLSSNITSSSKITIPKQQRYGKGIIAHATPQCQINQVKFKFQSSNRVWKKDRTTIIGKFCTALLPVNDREKMVCLPEPVNLQASVTVSCDLKIACV

SEQ ID NO: 16652 - protein, 448 aa, Homo sapiens
MEMTEMTGVSLKRGALVVEDNDSGVPVEETKKQKLSECSLTKGQDGLQNDFLSISEDVPRPPDTVSTGKGGKNSEAQLEDEEEEEEDGLSEECEEEESESFADMMKHGLTEADVGITKFVSSHQGFSGILKERYSDFVVHEIGKDGRISHLNDLSIPVDEEDPSEDIFTVLTAEEKQRLEELQLFKNKETSVAIEVIEDTKEKRTIIHQAIKSLFPGLETKTEDREGKKYIVAYHAAGKKALANPRKHSWPKSRGSYCHFVLYKENKDTMDAINVLSKYLRVKPNIFSYMGTKDKRAITVQEIAVLKITAQRLAHLNKCLMNFKLGNFSYQKNPLKLGELQGNHFTVVLRNITGTDDQVQQAMNSLKEIGFINYYGMQRFGTTAVPTYQVGRAILQNSWTEVMDLILKPRSGAEKGYLVKCREEWAKTKDPTAALRKLPVKRYPEIIA

SEQ ID NO: 16653 - protein, 418 aa, Homo sapiens
DAELRLLRHQKLKLDTQMKLSDLHHVTLFQEILLLKNFEKQENILQERVNSLDKEEQYMQWKINETLKEMEEKKNEITKLQEQEKALYAGFQAAIGENNKFANFLMKVLKKKIKRVKKKEVEGDADEDEESEESSEEESSLESDEDESESEDEVFDDSICPTNCDVALFELALHLREKRLDIEEALVEEKKIVDNLKKEYDTLSKKVKIVATNLNAAEEALEAYQREKQQRLNELLVVIPLKLHQIEYVVFGEIPSDLSGTLVFSNHALRRLQERIHELQEENSKQQKLNKEWRERRKQLIREKREMTKTIHKMEETVRQLMISKFGRVVNLEALQTLSVNTTLEELKIRKLRKELANAKEMKMWEEKIAQMRWELMMKTKEHTRKLYQMNDLCIEKKKLDSRLNTLQNQQNPGNGLS

SEQ ID NO: 16654 - protein, 327 aa, Homo sapiens
IQNGNASLFFRRVSLLDEGIYTCYVGTAIQVITNKVVLKVGVFLTPVMKYEKRNTNSFLICSVLSVYPRPIITWKMDNTPISENNMEETGSLDSFSINSPLNITGSNSSYECTIENSLLKQTWTGRWTMKDGLHKMQSEHVSLSCQPVNDYFSPNQDFKVTWSRMKSGTFSVLAYYLSSSQNTIINESRFSWNKELINQSDFSMNLMDLNLSDSGEYLCNISSDEYTLLTIHTVHVEPSQETASHNKGLWILVPSAILAAFLLIWSVKCCRAQLEARRSRHPADGAQQERCCVPPGERCPSAPDNGEENVVRHYFLYQTIYSIKMLL

SEQ ID NO: 16655 - protein, 113 aa, Homo sapiens
MELDFGHFDERDKTSRNMRGSRMNGLPSPTHSAHCSFYRTRTLQALSNEKKAKKVRFYRNGDRYFKGIVYAVSSDRFRSFDALLADLTRSLSDNINLPQGVRYIYTIDGSRKI

SEQ ID NO: 16656 - protein, 182 aa, Homo sapiens
MGLPEERVRSGSGSRGQEEAGAGGRARSWSPPPEVSRSAHVPSLQRYRELHRRSVEEPREFWGDIAKEFYWKTPCPGPFLRYNFDVTKGKIFIEWMKGATTNICYNVLDRNVHEKKLGDKVAFYCGDVVLPCWPGWSQLPDLREGNEPGETTQITYHQLLVQVCQFSNVLRKQGIQKGDRVA

SEQ ID NO: 16657 - protein, 196 aa, Homo sapiens
MTLQWAAVATFLYAEIGLILIFCLPFIPPQRWQKIFSFNVWGKIATFWNKAFLTIIILLIVLFLDAVREVRKYSSVHTIEKSSTSRPDAYEHTQMKLFRSQRNLYISGFSLFFWLVLRRLVTLITQLAKELSNKGVLKTQAENTNKAAKKFMEENEKLKRILKSHGKDEECVLEAENKKLVEDQEKLKTELRKTSD

SEQ ID NO: 16658 - protein, 1130 aa, Homo sapiens
ISLKPKIPLSPEVTHTKPAPEPQTLLPSQSTIGPETPGTKPSTTLALEPATIQPEPLVPTTASKPSERPKTTHRPDAPQIQPGSKPPKQLLPKPQTTAEPDMPPTKSVSEPVPFETEAPSMTIVPTTDIEPVTVRTEATVTTLAPKTSQRTRTRRPRPKHKTTPRPETLQTKLDFGPITPGTSSAPTTTTKRTRRPHPKPKTTPHPEVPQTKLVPATILEPVLRTEASGTTAVPATIFEPVSPIKEAPGTTFVPVTDLEPVTFRTEIPATTLATKTSKRTRPPRPRPKTTPSPQAPETKPVPATVLEPVTLRPEASTTLASKTSQRTRRPRLRTKTTPRPEAPESKPVPTAELKPVTLRTETWVTTQAPKTSQRTRRPRPKTKTTPSPEVPQTKLVPSTDLEPGTLRTEAPKTMVVTTVLEPDTFRTKFPETTLAPKTQRTRRPRPRPKTTSSPEVPQNKSVSVTGFEPVVHSTDAPGTTFALTELQTLILKPVTSPSLEMTESQPVSDVLESVTLSTESPKETIAPAKTDYVYPTAKAPLWPEEPKTEVVESITYVSEPPETTLETSPLPSQSITLPSPDEPQTEPAPKQTPRAPPKPKTSPRPRIPQTQPVPKVPQRVTAKPKTSPSPEVSYTTPAPKDVLLPHKPYPEVSQSEPAPLETRGIPFIPMISPSPSQEELQTTLEETDQSTQEPFTTKIPRTTELAKTTQAPHRFYTTVRPRTSDKPHIRPGVKQAPRPSGADRNVSVDSTHPTKKPGTRRPPLPPRPTHPRRKPLPPNNVTGKPGSAGIISSGPITTPPLRSTPRPTGTPLERIETDIKQPTVPASGEELENITDFSSSPTRETDPLGKPRFKGPHVRYIQKPDNSPCSITDSVKRFPKEEATEGNATSPPQNPPTNLTVVTVEGCPSFVILDWEKPLNDTVTEYEVISRENGSFSGKNKSIQMTNQTFSTVENLKPNTSYEFQVKPKNPLGEGPVSNTVAFSTESADPRVSEPVSAGRDAIWTERPFNSDSYSECKGKQYVKRTWYKKFVGVQLCNSLRYKIYLSDSLTGKFYNIGDQRGHGEDHCQFVDSFLDGRTGQQLTSDQLPIKEGYFRAVRQEPVQFGEIGGHTQINYVQWYECGTTIPGKW

SEQ ID NO: 16659 - protein, 572 aa, Homo sapiens
MLKLLNQKKGPSQCPLCKNDITKRSLQESTRFSQLVEELLKIICAFQLDTGLEYANSYNFAKKENNSPEHLKDEVSIIQSMGYRNRAKRLLQSEPENPSLQETSLSVQLSNLGTVRTLRTKQRIQPQKTSVYIELGSDSSEDTVNKATYCSVGDQELLQITPQGTRDEISLDSAKKAACEFSETDVTNTEHHQPSNNDLNTTEKRAAERHPEKYQGEAASGCESETSVSEDCSGLSSQSDILTTQQRDTMQHNLIKLQQEMAELEAVLEQHGSQPSNSYPSIISDSSALEDLRNPEQSTSEKAVLTSQKSSEYPISQNPEGLSADKFEVSADSSTSKNKEPGVERSSPSKCPSLDDRWYMHSCSGSLQNRNYPSQEELIKVVDVEEQQLEESGPHDLTETSYLPRQDLEGTPYLESGISLFSDDPESDPSEDRAPESARVGNIPSSTSALKVPQLKVAESAQSPAAAHTTDTAGYNAMEESVSREKPELTASTERVNKRMSMVVSGLTPEEFMLVYKFARKHHITLTNLITEETTHVVMKTDAEFVCERTLKYFLGIAGGKWVVSYFWVTQS

SEQ ID NO: 16660 - protein, 505 aa, Homo sapiens
MKRTPTAEEREREAKKLRLLEELEDTWLPYLTPKDDEFYQQWQLKYPKLILREASSVSEELHKEVQEAFLTLHKHGCLFRDLVRIQGKDLLTPVSRILIGNPGCTYKYLNTRLFTVPWPVKGSNIKHTEAEIAAACETFLKLNDYLQIETIQALEELAAKEKANEDAVPLCMSADFPRVGMGSSYNGQDEVDIKSRAAYNVTLLNFMDPQKMPYLKEEPYFGMGKMAVSWHHDENLVDRSAVAVYSYSCEGPEEESEDDSHLEGRDPDIWHVGFKISWDIETPGLAIPLHQGDCYFMLDDLNATHQHCVLAGSQPRFSSTHRVAECSTGTLDYILQRCQLALQNVCDDVDNDDVSLKSFEPAVLKQGEEIHNEVEFEWLRQFWFQGNRYRKCTDWWCQPMAQLEALWKKMEGVTNAVLHEVKREGLPVEQRNEILTAILASLTARQNLRREWHARCQSRIARTLPADQKPECRPYWEKDDASMPLPFDLTDIVSELRGQLLEAKP

SEQ ID NO: 16661 - protein, 654 aa, Homo sapiens
MEMETTEPEPDCVVQPPSPPDDFSCQMRLSEKITPLKTCFKKKDQKRLGTGTLRSLRPILNTLLESGSLDGVFRSRNQSTDENSLHEPMMKKAMEINSSCPPAENNMSVLIPDRTNVGDQIPEAHPSTEAPERVVPIQDHSFPSETLSGTVADSTPAHFQTDLLHPVSSDVPTSPDCLDKVIDYVPGIFQENSFTIQYILDTSDKLSTELFQDKSEEASLDLVFELVNQLQYHTHQENGIEICMDFLQGTCIYGRDCLKHHTVLPYHWQIKRTTTQKWQSVFNDSQEHLERFYCNPENDRMRMKYGGQEFWADLNAMNVYETTEFDQLRRLSTPPSSNVNSIYHTVWKFFCRDHFGWREYPESVIRLIEEANSRGLKEVRFMMWNNHYILHNSFFRREIKRRPLFRSCFILLPYLQTLGGVPTQAPPPLEATSSSQIICPDGVTSANFYPETWVYMHPSQDFIQVPVSAEDKSYRIIYNLFHKTVPEFKYRILQILRVQNQFLWEKYKRKKEYMNRKMFGRDRIINERHLFHGTSQDVVDGICKHNFDPRVCGKHATMFGQGSYFAKKASYSHNFSKKSSKGVHFMFLAKVLTGRYTMGSHGMRRPPPVNPGSVTSDLYDSCVDNFFEPQIFVIFNDDQSYPYFVIQYEEVSNT

SEQ ID NO: 16662 - protein, 50 aa, Homo sapiens
KKSKRSALENSEEHSAKYSNSNNSGSGASSPLTSPSSPTPPSTSVEHAPF

SEQ ID NO: 16663 - protein, 463 aa, Homo sapiens
MQFVSTRPQPQQLGIQGLGLDSGSWSWAQALPPEEVCHQEPALRGEMAEGMPPMQAQEWDMDARRPMPFQFPPFPDRAPVFPDRMMREPQLPTAEISLWTVVAAIQAVERKVDAQASQLLNLEGRTGTAEKKLADCEKTAVEFGNHMESKWAVLGTLLQEYGLLQRRLENLENLLRNRNFWVLRLPPGSKGEAPKVPVTFVDIAVYFSEDEWKNLDEWQKELYNNLVKENYKTLMSLDAEGSVPKPDAPVQAEPREEPCVWEQRHPEEREIPMDPEAGAEPLVPAQDASSQVKREDTLCVRGQRGLEERAIPTESITDSPISAQDLLSRIKQEEHQCVWDQQDLADRDIPTDPNSESLISAHDILSWIKQEEQPYPWGPRDSMDGELGLDSGPSDSLLMVKNPPPAPPQPQPQPQPPQPQLQSQPQPQSLPPIAVAENPGGPPSRGLLDDGFQPHQGAALRVR

SEQ ID NO: 16664 - protein, 468 aa, Homo sapiens
MTSRILLRQQLMREQMQEQERREQQQKLQAAQFMQQRVPVSQTPAINVSVPTTLPSATQVPMEVLKVQTHLENPTKYHIQQAQRQQVKQYLSTTLANKHANQVLSLPCPNQPGDHVMPPVPGSSAPNSPMAMLTLNSNCEKEGFYKFEEQNRAESECPGMNTHSRASCMQMDDVIDDIISLESSYNEEILGLMDPALQMANTLPVSGNLIDLYGNQGLPPPGLTISNSCPANLPNIKRELTESEARALAKERQKKDNHNLIERRRRFNINDRIKELGTLIPKSNDPDMRWNKGTILKASVDYIRKLQREQQRAKELENRQKKLEHANRHLLLRIQELEMQARAHGLSLIPSTGLCSPDLVNRIIKQEPVLENCSQDLLQHHADLTCTTTLDLTDGTITFNNNLGTGTEANQAYSVPTKMGSKLEDILMDDTLSPVGVTDPLLSSVSPGASKTSSRRSSMSMEETEHTC

SEQ ID NO: 16665 - protein, 1135 aa, Homo sapiens
AWWEAVSGSQREGLILAIGLGFAGTTRSPREGEVPGVDYNFLTVKEFLDLEQSGTLLEVGTYEGNYYGTPKPPSQPVSGKVITTDALHSLQSGSKQSTPKRTKSYNDMQNAGIVHAENEEEDDVPEMNSSFTADSGEQEEHTLQETALPPVNSSIIAAPITDPSQKFPQYLPLSAEDNLGPLPENWEMAYTENGEVYFIDHNTKTTSWLDPRCLNKQQKPLEECEDDEGVHTEELDSELELPAGWEKIEDPVYGIYYVDHINRKTQYENPVLEAKRKKQLEQQQQQQQQQQQQQQQQQQQQTEEWTEDHSALVPPVIPNHPPSNPEPAREVPLQGKPFFTRNPSELKGKFIHTKLRKSSRGFGFTVVGGDEPDEFLQIKSLVLDGPAALDGKMETGDVIVSVNDTCVLGHTHAQVVKIFQSIPIGASVDLELCRGYPLPFDPDDPNTSLVTSVAILDKEPIIVNGQETYDSPASHSSKTGKVNGMKDARPSSPADVASNSSHGYPNDTVSLASSIATQPELITVHIVKGPMGFGFTIADSPGGGGQRVKQIVDSPRCRGLKEGDLIVEVNKKNVQALTHNQVVDMLVECPKGSEVTLLVQRGGLPVPKKSPKSQPLERKDSQNSSQHSVSSHRSLHTASPSHSTQVLPEFPPAEAQAPDQTDSSGQKKPDPFKIWAQSRSMYENRPMSPSPASGLSKGEREREINSTNFGECPIPDYQEQDIFLWRKETGFGFRILGGNEPGEPIYIGHIVPLGAADTDGRLRSGDELICVDGTPVIGKSHQLVVQLMQQAAKQGHVNLTVRRKVVFAVPKTENEVPSPASSHHSSNQPASLTEEKRTPQGSQNSLNTVSSGSGSTSGIGSGGGGGSGVVSTVVQPYDVEIRRGENEGFGFVIVSSVSRPEAGTTFGNACVAMPHKIGRIIEGSPADRCGKLKVGDRILAVNGCSITNKSHSDIVNLIKEAGNTVTLRIIPGDESSNATLLTNAEKIATITTTHTPSQQGTQETRNTTKPKQESQFEFKAPQATQEQDFYTVELERGAKGFGFSLRGGREYNMDLYVLRLAEDGPAERCGKMRIGDEILEINGETTKNMKHSRAIELIKNGGRRVRLFLKRGDGSVPEYGGSNYENIPSFPGMTP

SEQ ID NO: 16666 - protein, 193 aa, Homo sapiens
MHGVCKEGDNCRYSHDLSDSPYSVVCKYFQRGYCIYGDRCRYEHSKPLKQEEATATELTTKSSLAASSSLSSIVGPLVEMNTGEAESRNSNFATVGAGSEDWVNAIEFVPGQPYCGRTAPSCTEAPLQGSVTKEESEKEQTAVETKKQLCPYAAVGECRYGENCVYLHGDSCDMCGLQVLHPMDAAQRSQHIK

SEQ ID NO: 16667 - protein, 612 aa, Homo sapiens
MMQESGTETKSNGSAIQNGSGGSNHLLECGGLREGRSNGETPAVDIGAADLAHAQQQQQQALQVARQLLLQQQQQQQVSGLKSPKRNDKQPALQVPVSVAMMTPQVITPQQMQQILQQQVLSPQQLQVLLQQQQALMLQQQLQEFYKKQQEQLQLQLLQQQHAGKQPKEQQQVATQQLAFQQQLLQMQQLQQQHLLSLQRQGLLTIQPGQPALPLQPLAQGMIPTELQQLWKEVTSAHTAEETTGNNHSSLDLTTTCVSSSAPSKTSLIMNPHASTNGQLSVHTPKRESLSHEEHPHSHPLYGHGVCKWPGCEAVCEDFQSFLKHLNSEHALDDRSTAQCRVQMQVVQQLELQLAKDKERLQAMMTHLHVKSTEPKAAPQPLNLVSSVTLSKSASEASPQSLPHTPTTPTAPLTPVTQGPSVITTTSMHTVGPIRRRYSDKYNVPISSADIAQNQEFYKNAEVRPPFTYASLIRQAILESPEKQLTLNEIYNWFTRMFAYFRRNAATWKASMAENSIPLYTTASMGNPTLGNLASAIREELNGAMEHTNSNESDSSPGRSPMQAVHPVHVKEEPLDPEEAEGPLSLVTTANHSPDFDHDRDYEDEPVNEDME

SEQ ID NO: 16668 - protein, 1364 aa, Homo sapiens
MTVFRQENVDDYYDTGEELGSGQFAVVKKCREKSTGLQYAAKFIKKRRTKSSRRGVSREDIEREVSILKEIQHPNVITLHEVYENKTDVILILELVAGGELFDFLAEKESLTEEEATEFLKQILNGVYYLHSLQIAHFDLKPENIMLLDRNVPKPRIKIIDFGLAHKIDFGNEFKNIFGTPEFVAPEIVNYEPLGLEADMWSIGVITYILLSGASPFLGDTKQETLANVSAVNYEFEDEYFSNTSALAKDFIRRLLVKDPKKRMTIQDSLQHPWIKPKDTQQALSRKASAVNMEKFKKFAARKKWKQSVRLISLCQRLSRSFLSRSNMSVARSDDTLDEEDSFVMKAIIHAINDDNVPGLQHLLGSLSNYDVNQPNKHGTPPLLIAAGCGNIQILQLLIKRGSRIDVQDKGGSNAVYWAARHGHVDTLKFLSENKCPLDVKDKSGEMALHVAARYGHADVAQLLCSFGSNPNIQDKEEETPLHCAAWHGYYSVAKALCEAGCNVNIKNREGETPLLTASARGYHDIVECLAEHGADLNACDKDGHIALHLAVRRCQMEVIKTLLSQGCFVDYQDRHGNTPLHVACKDGNMPIVVALCEANCNLDISNKYGRTPLHLAANNGILDVVRYLCLMGASVEALTTDGKTAEDLARSEQHEHVAGLLARLRKDTHRGLFIQQLRPTQNLQPRIKLKLFGHSGSGKTTLVESLKCGLLRSFFRRRRPRLSSTNSSRFPPSPLASKPTVSVSINNLYPGCENVSVRSRSMMFEPGLTKGMLEVFVAPTHHPHCSADDQSTKAIDIQNAYLNAFGGKLKNPLQVVLVATHADIMNVPRPAGGEFGYDKDTSLLKEIRNRFGNDLHISNKLFVLDAGASGSKDMKVLRNHLQEIRSQIVSVCPPMTHLCEKIISTLPSWRKLNGPNQLMSLQQFVYDVQDQLNPLASEEDLRRIAQQLHSTGEINIMQSETVQDVLLLDPRWLCTNVLGKLLSVETPRALHHYRGRYTVEDIQRLVPDSDVEELLQILDAMDICARDLSSGTMVDVPALIKTDNLHRSWADEEDEVMVYGGVRIVPVEHLTPFPCGIFHKVQVNLCRWIHQQSTEGDADIRLWVNGCKLANRGAELLVLLVNHGQGIEVQVRGLETEKIKCCLLLDSVCSTIENVMATTLPGLLTVKHYLSPQQLREHHEPVMIYQPRDFFRAQTLKETSLTNTMGGYKESFSSIMCFGCHDVYSQASLGMDIHASDLNLLTRRKLSRLLDPPDPLGKDWCLLAMNLGLPDLVAKYNTSNGAPKDFLPSPLHALLREWTTYPESTVGTLMSKLRELGRRDAADFLLKASSVFKINLDGNGQEAYASSCNSGTSYNSISSVVSR

SEQ ID NO: 16669 - protein, 710 aa, Homo sapiens
MDFSMVAGAAAYNEKSETGALGENYSWQIPINHNDFKILKNNERQLCEVLQNKFGCISTLVSPVQEGNSKSLQVFRKMLTPRIELSVWKDDLTTHAVDAVVNAANEDLLHGGGLALALVKAGGFEIQEESKQFVARYGKVSAGEIAVTGAGRLPCKQIIHAVGPRWMEWDKQGCTGKLQRAIVSILNYVIYKNTHIKTVAIPALSSGIFQFPLNLCTKTIVETIRVSLQGKPMMSNLKEIHLVSNEDPTVAAFKAASEFILGKSELGQETTPSFNAMVVNNLTLQIVQGHIEWQTADVIVNSVNPHDITVGPVAKSILQQAGVEMKSEFLATKAKQFQRSQLVLVTKGFNLFCKYIYHVLWHSEFPKPQILKHAMKECLEKCIEQNITSISFPALGTGNMEIKKETAAEILFDEVLTFAKDHVKHQLTVKFVIFPTDLEIYKAFSSEMAKRSKMLSLNNYSVPQSTREEKRENGLEARSPAINLMGFNVEEMYEAHAWIQRILSLQNHHIIENNHILYLGRKEHDILSQLQKTSSVSITEIISPGRTELEIEGARADLIEVVMNIEDMLCKVQEEMARKKERGLWRSLGQWTIQQQKTQDEMKENIIFLKCPVPPTQELLDQKKQFEKCGLQVLKVEKIDNEVLMAAFQRKKKMMEEKLHRQPVSHRLFQQVPYQFCNVVCRVGFQRMYSTPCGRCQCLIIGATLWNLVS

SEQ ID NO: 16670 - protein, 231 aa, Homo sapiens
MRGYLVAIFLSAVFLYYVLHCILWGTNVYWVAPVEMKRRNKIQPCLSKPAFASLLRFHQFHPFLCAADFRKIASLYGSDKFDLPYGMRTSAEYFRLALSKLQSCDLFDEFDNIPCKKCVVVGNGGVLKNKTLGEKIDSYDVIIRMNNGPVLGHEEEVGRRTTFRLFYPESVFSDPIHNDPNTTVILTAFKPHDLRWLLELLMGDKINTNGFWKKPALNLIYKPYQIRILDP

SEQ ID NO: 16671 - protein, 574 aa, Homo sapiens
PSSANSISSSTSSNHSGHTPEPPLPPVGGDLASRLSSDEGEMDGADESEKLDCQFSTHHPRPLAFCSFGSRLMGRGYYVFDRRWDRFRFALNSMVEKHLNSQMWKHRNPSHRASGPSPLFRTCLTNLLSLSNIGAAWVSTLESVAPRYPLNLAAQTPGPGGPEPGGMAADGGVEDIRKKRNGQDSFFFNKHLTLHQEPPTQYSLSARKIPPAADSPLPSPAAHITTPVPASVLQPFSNPSAVYLPSAPISSRLTSSYIMTSAMLSNAAFVTSPDPSALMSHTTAFPHVAATLSIMDSTFKAPSAVSPIPAVIPSPSHKPSKTKTSKSSKVKDLSTRSDESPSNKKRKPQSSTSSSSSSSSSSLQTSLSSPLSGPHKKNCVLNASSALNSYQAAPPYNSLSVHNSNNGVSPLSAKLEPSGRTSLPGGPADIVRQVGAVGGSSDSCPLSVPSLALHAGDLSLASHNAVSSLPLSFDKSEGKKRKNSSSSSKACKITKMPGMNSVHKKNPPSLLAPVPDPVNSTSSRQVRDLLAPPSPALGGRGSWAAPLLSRAAPTGNTSLIPVLVFPEGSFHPLL

SEQ ID NO: 16672 - protein, 167 aa, Homo sapiens
MEPAAGSSMEPSADWLATAAARGRVEEVRALLEAGALPNAPNSYGRRPIQVMMMGSARVAELLLLHGAEPNCADPATLTRPVHDAAREGFLDTLVVLHRAGARLDVRDAWGRLPVDLAEELGHRDVARYLRAAAGGTRGSNHARIDAAEGPSEMIGNHLWVCRSRHA

SEQ ID NO: 16673 - protein, 1297 aa, Homo sapiens
MASDSPARSLDEIDLSALRDPAGIFELVELVGNGTYGQVYKGRHVKTGQLAAIKVMDVTGDEEEEIKQEINMLKKYSHHRNIATYYGAFIKKNPPGMDDQLWLVMEFCGAGSVTDLIKNTKGNTLKEEWIAYICREILRGLSHLHQHKVIHRDIKGQNVLLTENAEVKLVDFGVSAQLDRTVGRRNTFIGTPYWMAPEVIACDENPDATYDFKSDLWSLGITAIEMAEGAPPLCDMHPMRALFLIPRNPAPRLKSKKWSKKFQSFIESCLVKNHSQRPATEQLMKHPFIRDQPNERQVRIQLKDHIDRTKKKRGEKDETEYEYSGSEEEEEENDSGEPSSILNLPGESTLRRDFLRLQLANKERSEALRRQQLEQQQRENEEHKRQLLAERQKRIEEQKEQRRRLEEQQRREKELRKQQEREQRRHYEEQMRREEERRRAEHEQEYIRRQLEEEQRQLEILQQQLLHEQALLLEYKRKQLEEQRQAERLQRQLKQERDYLVSLQHQRQEQRPVEKKPLYHYKEGMSPSEKPAWAKEIPHLVAVKSQGPALTASQSVHEQPTKGLSGFQEALNVTSHRVEMPRQNSDPTSENPPLPTRIEKFDRSSWLRQEEDIPPKVPQRTTSISPALARKNSPGNGSALGPRLGSQPIRASNPDLRRTEPILESPLQRTSSGSSSSSSTPSSQPSSQGGSQPGSQAGSSERTRVRANSKSEGSPVLPHEPAKVKPEESRDITRPSRPADLTALAKELRELRIEETNRPMKKVTDYSSSSEESESSEEEEEDGESETHDGTVAVSDIPRLIPTGAPGSNEQYNVGMVGTHGLETSHADSFSGSISREGTLMIRETSGEKKRSGHSDSNGFAGHINLPDLVQQSHSPAGTPTEGLGRVSTHSQEMDSGTEYGMGSSTKASFTPFVDPRVYQTSPTDEDEEDEESSAAALFTSELLRQEQAKLNEARKISVVNVNPTNIRPHSDTPEIRKYKKRFNSEILCAALWGVNLLVGTENGLMLLDRSGQGKVYNLINRRRFQQMDVLEGLNVLVTISGKKNKLRVYYLSWLRNRILHNDPEVEKKQGWITVGDLEGCIHYKVVKYERIKFLVIALKNAVEIYAWAPKPYHKFMAFKSFADLQHKPLLVDLTVEEGQRLKVIFGSHTGFHVIDVDSGNSYDIYIPSHIQGNITPHAIVILPKTDGMEMLVCYEDEGVYVNTYGRITKDVVLQWGEMPTSVAYIHSNQIMGWGEKAIEIRSVETGHLDGVFMHKRAQRLKFLCERNDKVFFASVRSGGSSQVFFMTLNRNSMMNW

SEQ ID NO: 16674 - protein, 396 aa, Homo sapiens
MNFQAGGGQSPQQQQSLAAPGGGGAAAQQLVCGGQFGGAGPGAGGGGGPSQQLAGGPPQQFALSNSAAIRAEIQRFESVHPNIYAIYDLIERIEDLALQNQIREHVISIEDSFVNSQEWTLSRSVPELKVGIVGNLSSGKSALVHRYLTGTYVQEESPEGGRFKKEIVVDGQSYLLLIRDEGGPPELQFAAWVDAVVFVFSLEDEISFQTVYNYFLRLCSFRNASEVPMVLVGTQDAISAANPRVIDDSRARKLSTDLKRCTYYETCATYGLNVERVFQDVAQKVVALRKKQQLAIGPCKSLPNSPSHSAVSAASIPAVHINQATNGGGSAFSDYSSSVPSTPSISQRELRIETIAASSTPTPIRKQSKRRSNIFTICATVSNFSSTKRPFQLLPN

SEQ ID NO: 16675 - protein, 506 aa, Homo sapiens
MGTRSAIAAPRILCSRGLRSGSARATGSGVERSPSAAIFSFEINVSVAIITFASEPKVLMSVLNDNSRDMTEVISSLENANYKDHENGTGTNTYAALNSVYLMMNNQMRLLGMETMAWQEIRHAIILLTDGKSNMGGSPKTAVDHIREILNINQKRNDYLDIYAIGVGKLDVDWRELNELGSKKDGERHAFILQDTKALHQVFEHMLDVSKLTDTICGVGNMSANASDQERTPWHVTIKPKSQETCRGALISDQWVLTAAHCFRDGNDHSLWRVNVGDPKSQWGKEFLIEKAVISPGFDVFAKKNQGILEFYGDDIALLKLAQKVKMSTHARPICLPCTMEANLALRRPQGSTCRDHENELLNKQSVPAHFVALNGSKLNINLKMGVEWTSCAEVVSQEKTMFPNLTDVREVVTDQFLCSGTQEDESPCKGESGGAVFLERRFRFFQVGLVSWGLYNPCLGSADKNSRKRAPRSKVPPPRDFHINLFRMQPWLRQHLGDVLNFLPL

SEQ ID NO: 16676 - protein, 480 aa, Homo sapiens
MREPEELMPDSGAVFTFGKSKFAENNPGKFWFKNDVPVHLSCGDEHSAVVTGNNKLYMFGSNNWGQLGLGSKSAISKPTCVKALKPEKVKLAACGRNHTLVSTEGGNVYATGGNNEGQLGLGDTEERNTFHVISFFTSEHKIKQLSAGSNTSAALTEDGRLFMWGDNSEGQIGLKNVSNVCVPQQVTIGKPVSWISCGYYHSAFVTTDGELYVFGEPENGKLGLPNQLLGNHRTPQLVSEIPEKVIQVACGGEHTVVLTENAVYTFGLGQFGQLGLGTFLFETSEPKVIENIRDQTISYISCGENHTALITDIGLMYTFGDGRHGKLGLGLENFTNHFIPTLCSNFLRFIVKLVACGGCHMVVFAAPHRGVAKEIEFDEINDTCLSVATFLPYSSLTSGNVLQRTLSARMRRRERERSPDSFSMRRTLPPIEGTLGLSACFLPNSVFPRCSERNLQESVLSEQDLMQPEEPDTHHEPEFQ

SEQ ID NO: 16677 - protein, 401 aa, Homo sapiens
MRNKRVLKTKKRRSGRGGQDPGLHPHRSEATAGRSPPTPTVTLGPDCPPPPPPPPPNNNNNNNSKHTGHKSACVPNMTERRRDELSEEINNLREKVMKQSEENNNLQSQVQKLTEENTTLREQVEPTPEDEDDDIELRGAAAAAAPPPPIEEECPEDLPEKFDGNPDMLAPFMAQCQIFMEKSTRDFSVDRVRVCFVTSMMTGRAARWASAKLERSHYLMHNYPAFMMEMKHVFEDPQRREVAKRKIRRLRQGMGSVIDYSNAFQMIAQDLDWNEPALIDQYHEGLSDHIQEELSHLEVAKSLSALIGQCIHIERRLARAAAARKPRSPPRALVLPHIASHHQVDPTEPVGGARMRLTQEEKERRRKLNLCLYCGTGGHYADNCPAKASKSSPAGNSPAPL

SEQ ID NO: 16678 - protein, 408 aa, Homo sapiens
MHLYKPACADIPSPKLGLPKSSESALKCRWHLAVTKTQPQAACKPVRPSGAAEQKYVEKFLRVHGISLQETTRAETGMAYRNLGKSGLRVSCLGLGTWVTFGGQISDEVAERLMTIAYESGVNLFDTAEVYAAGKAEVILGSIIKKKGWRRSSLVITTKLYWGGKAETERGLSRKHIIEGLKGSLQRLQLEYVDVVFANRPDSNTPMEEIVRAMTHVINQGMAMYWGTSRWSAMEIMEAYSVARQFNMIPPVCEQAEYHLFQREKVEVQLPELYHKIGVGAMTWSPLACGIISGKYGNGVPESSRASLKCYQWLKERIVSEEGRKQQNKLKDLSPIAERLGCTLPQLAVAWCLRNEGVSSVLLGSSTPEQLIENLGAIQVLPKMTSHVVNEIDNILRNKPYSKKDYRS

SEQ ID NO: 16679 - protein, 647 aa, Homo sapiens
MLDCGIHPGLEGMDALPYIDLIDPAEIDLLLISHFHLDHCGALPWFLQKTSFKGRTFMTHATKAIYRWLLSDYVKVSNISADDMLYTETDLEESMDKIETINFHEVKEVAGIKFWCYHAGHVLGAAMFMIEIAGVKLLYTGDFSRQEDRHLMAAEIPNIKPDILIIESTYGTHIHEKREEREARFCNTVHDIVNRGGRGLIPVFALGRAQELLLILDEYWQNHPELHDIPIYYASSLAKKCMAVYQTYVNAMNDKIRKQININNPFVFKHISNLKSMDHFDDIGPSVVMASPGMMQSGLSRELFESWCTDKRNGVIIAGYCVEGTLAKHIMSEPEEITTMSGQKLPLKMSVDYISFSAHTDYQQTSEFIRALKPPHVILVHGEQNEMARLKAALIREYEDNDEVHIEVHNPRNTEAVTLNFRGEKLAKVMGFLADKKPEQGQRVSGILVKRNFNYHILSPCDLSNYTDLAMSTVKQTQAIPYTGPFNLLCYQLQKLTGDVEELEIQEKPALKVFKNITVIQEPGMVVLEWLANPSNDMYADTVTTVILEVQSNPKIRKGAVQKVSKKLEMHVYSKRLEIMLQDIFGEDCVSVKDDSILSVTVDGKTANLNLETRTVECEEGSEDDESLREMVELAAQRLYEALTPVH

SEQ ID NO: 16680 - protein, 1884 aa, Homo sapiens
MDLSALRVEEVQNVINAMQKILECPICLELIKEPVSTKCDHIFCKFCMLKLLNQKKGPSQCPLCKNDITKRSLQESTRFSQLVEELLKIICAFQLDTGLEYANSYNFAKKENNSPEHLKDEVSIIQSMGYRNRAKRLLQSEPENPSLQETSLSVQLSNLGTVRTLRTKQRIQPQKTSVYIELGSDSSEDTVNKATYCSVGDQELLQITPQGTRDEISLDSAKKAACEFSETDVTNTEHHQPSNNDLNTTEKRAAERHPEKYQGSSVSNLHVEPCGTNTHASSLQHENSSLLLTKDRMNVEKAEFCNKSKQPGLARSQHNRWAGSKETCNDRRTPSTEKKVDLNADPLCERKEWNKQKLPCSENPRDTEDVPWITLNSSIQKVNEWFSRSDELLGSDDSHDGESESNAKVADVLDVLNEVDEYSGSSEKIDLLASDPHEALICKSERVHSKSVESNIEDKIFGKTYRKKASLPNLSHVTENLIIGAFVTEPQIIQERPLTNKLKRKRRPTSGLHPEDFIKKADLAVQKTPEMINQGTNQTEQNGQVMNITNSGHENKTKGDSIQNEKNPNPIESLEKESAFKTKAEPISSSISNMELELNIHNSKAPKKNRLRRKSSTRHIHALELVVSRNLSPPNCTELQIDSCSSSEEIKKKKYNQMPVRHSRNLQLMEGKEPATGAKKSNKPNEQTSKRHDSDTFPELKLTNAPGSFTKCSNTSELKEFVNPSLPREEKEEKLETVKVSNNAEDPKDLMLSGERVLQTERSVESSSISLVPGTDYGTQESISLLEVSTLGKAKTEPNKCVSQCAAFENPKGLIHGCSKDNRNDTEGFKYPLGHEVNHSRETSIEMEESELDAQYLQNTFKVSKRQSFAPFSNPGNAEEECATFSAHSGSLKKQSPKVTFECEQKEENQGKNESNIKPVQTVNITAGFPVVGQKDKPVDNAKCSIKGGSRFCLSSQFRGNETGLITPNKHGLLQNPYRIPPLFPIKSFVKTKCKKNLLEENFEEHSMSPEREMGNENIPSTVSTISRNNIRENVFKEASSSNINEVGSSTNEVGSSINEIGSSDENIQAELGRNRGPKLNAMLRLGVLQPEVYKQSLPGSNCKHPEIKKQEYEEVVQTVNTDFSPYLISDNLEQPMGSSHASQVCSETPDDLLDDGEIKEDTSFAENDIKESSAVFSKSVQKGELSRSPSPFTHTHLAQGYRRGAKKLESSEENLSSEDEELPCFQHLLFGKVNNIPSQSTRHSTVATECLSKNTEENLLSLKNSLNDCSNQVILAKASQEHHLSEETKCSASLFSSQCSELEDLTANTNTQDPFLIGSSKQMRHQSESQGVGLSDKELVSDDEERGTGLEENNQEEQSMDSNLGEAASGCESETSVSEDCSGLSSQSDILTTQQRDTMQHNLIKLQQEMAELEAVLEQHGSQPSNSYPSIISDSSALEDLRNPEQSTSEKDSHIHGQRNNSMFSKRPREHISVLTSQKSSEYPISQNPEGLSADKFEVSADSSTSKNKEPGVERSSPSKCPSLDDRWYMHSCSGSLQNRNYPSQEELIKVVDVEEQQLEESGPHDLTETSYLPRQDLEGTPYLESGISLFSDDPESDPSEDRAPESARVGNIPSSTSALKVPQLKVAESAQSPAAAHTTDTAGYNAMEESVSREKPELTASTERVNKRMSMVVSGLTPEEFMLVYKFARKHHITLTNLITEETTHVVMKTDAEFVCERTLKYFLGIAGGKWVVSYFWVTQSIKERKMLNEHDFEVRGDVVNGRNHQGPKRARESQDRKIFRGLEICCYGPFTNMPTDQLEWMVQLCGASVVKELSSFTLGTGVHPIVVVQPDAWTEDNGFHAIGQMCEAPVVTREWVLDSVALYQCQELDTYLIPQIPHSHY

SEQ ID NO: 16681 - protein, 1752 aa, Homo sapiens
MSVLISQSVINYVEEENIPALKALLEKCKDVDERNECGQTPLMIAAEQGNLEIVKELIKNGANCNLEDLDNWTALISASKEGHVHIVEELLKCGVNLEHRDMGGWTALMWACYKGRTDVVELLLSHGANPSVTGLYSVYPIIWAAGRGHADIVHLLLQNGAKVNCSDKYGTTPLVWAARKGHLECVKHLLAMGADVDQEGANSMTALIVAVKGGYTQSVKEILKRNPNVNLTDKDGNTALMIASKEGHTEIVQDLLDAGTYVNIPDRSGDTVLIGAVRGGHVEIVRALLQKYADIDIRGQDNKTALYWAVEKGNATMVRDILQCNPDTEICTKDGETPLIKATKMRNIEVVELLLDKGAKVSAVDKKGDTPLHIAIRGRSRKLAELLLRNPKDGRLLYRPNKAGETPYNIDCSHQKSILTQIFGARHLSPTETDGDMLGYDLYSSALADILSEPTMQPPICVGLYAQWGSGKSFLLKKLEDEMKTFAGQQIEPLFQFSWLIVFLTLLLCGGLGLLFAFTVHPNLGIAVSLSFLALLYIFFIVIYFGGRREGESWNWAWVLSTRLARHIGYLELLLKLMFVNPPELPEQTTKALPVRFLFTDYNRLSSVGGETSLAEMIATLSDACEREFGFLATRLFRVFKTEDTQGKKKWKKTCCLPSFVIFLFIIGCIISGITLLAIFRVDPKHLTVNAVLISIASVVGLAFVLNCRTWWQVLDSLLNSQRKRLHNAASKLHKLKSEGFMKVLKCEVELMARMAKTIDSFTQNQTRLVVIIDGLDACEQDKVLQMLDTVRVLFSKGPFIAIFASDPHIIIKAINQNLNSVLRDSNINGHDYMRNIVHLPVFLNSRGLSNARKFLVTSATNGDVPCSDTTGIQEDADRRVSQNSLGEMTKLGSKTALNRRDTYRRRQMQRTITRQMSFDLTKLLVTEDWFSDISPQTMRRLLNIVSVTGRLLRANQISFNWDRLASWINLTEQWPYRTSWLILYLEETEGIPDQMTLKTIYERISKNIPTTKDVEPLLEIDGDIRNFEVFLSSRTPVLVARDVKVFLPCTVNLDPKLREIIADVRAAREQISIGGLAYPPLPLHEGPPRAPSGYSQPPSVCSSTSFNGPFAGGVVSPQPHSSYYSGMTGPQHPFYNRPFFAPYLYTPRYYPGGSQHLISRPSVKTSLPRDQNNGLGSGPAPGPVVLLNSLNVDAVCEKLKQIEGLDQSMLPQYCTTIKKANINGRVLAQCNIDELKKEMNMNFGDWHLFRSTVLEMRNAESHVVPEDPRFLSESSSGPAPHGEPARRASHNELPHTELSSQTPYTLNFSFEELNTLGLDEGAPRHSNLSWQSQTRRTPSLSSLNSQDSSIEISKLTDKVQAEYRDAYREYIAQMSQLEGGPGSTTISGRSSPHSTYYMGQSSSGGSIHSNLEQEKGKDSEPKPDDGRKSFLMKRGDVIDYSSSGVSTNDASPLDPITEEDEKSDQSGSKLLPGKKSSERSSLFQTDLKLKGSGLRYQKLPSDEDESGTEESDNTPLLKDDKDRKAEGKVERVPKSPEHSAEPIRTFIKAKEYLSDALLDKKDSSDSGVRSSESSPNHSLHNEVADDSQLEKANLIELEDDSHSGKRGIPHSLSGLQDPIIARMSICSEDKKSPSECSLIASSPEENWPACQKAYNLNRTPSTVTLNNNSAPANRANQNFDEMEGIRETSQVILRPSSSPNPTTIQNENLKSMTHKRSQRSSYTRLSKDPPELHAAASSESTGFGEERESIL

SEQ ID NO: 16682 - protein, 247 aa, Homo sapiens
MGRTSFDSDSWTLRLHNLQIKDKGLYQCIIHHKKPTGMIRIHQMNSELSVLANFSQPEIVPISNITENVYINLTCSSIHGYPEPKKMSVLLRTKNSTIEYDGVMQKSQDNVTELYDVSISLSVSFPDVTSNMTIFCILETDKTRLLSSPFSIELEDPQPPPDHIPWITAVLPTVIICVMVFCLILWKWKKKKRPRNSYKCGTNTMEREESEQTKKREKIHIPERSDEAQRVFKSSKTSSCDKSDTCF

SEQ ID NO: 16683 - protein, 1115 aa, Homo sapiens
MGPLMVLFCLLFLYPGLADSAPSCPQNVNISGGTFTLSHGWAPGSLLTYSCPQGLYPSPASRLCKSSGQWQTPGATRSLSKAVCKPVRCPAPVSFENGIYTPRLGSYPVGGNVSFECEDGFILRGSPVRQCRPNGMWDGETAVCDNGDHENGTGTNTYAALNSVYLMMNNQMRLLGMETMAWQEIRHAIILLTDGKSNMGGSPKTAVDHIREILNINQKRNDYLDVSKLTDTICGVGNMSANASDQERTPWHVTIKPKSQETCRGALISDQWVLTAAHCFRDGNDHSLWRVNVGDPKSQWGKEFLIEKAVISPGFDVFAKKNQGILEFYGDDIALLKLAQKVKMSTHARPICLPCTMEANLALRRPQGSTCRDHENELLNKQSVPAHFVALNGSKLNINLKMGVEWTSCAEVVSQEKTMFPNLTDVREVVTDQFLCSGTQEDESPCKGGSAIHCPRPHDFENGEYWPRSPYYNVSDEISFHCYDGYTLRGSANRTCQVNGRWSGQTAICDNGAGYCSNPGIPIGTRKVGSQYRLEDSVTYHCSRGLTLRGSQRRTCQEGGSWSGTEPSCQDSFMYDTPQEVAEAFLSSLTETIEGVDAEDGHGPGEQQKRKIVLDPSGSMNIYLVLDGSDSIGASNFTGAKKCLVNLIEKVASYGVKPRYGLVTYATYPKIWVKVSEADSSNADWVTKQLNEINYEDHKLKSGTNTKKALQAVYSMMSWPDDVPPEGWNRTRHVIILMTDGLHNMGGDPITVIDEIRDLLYIGKDRKNPREDYLDVYVFGVGPLVNQVNINALASKKDNEQHVFKVKDMENLEDVFYQMIDESQSLSLCGMVWEHRKGTDYHKQPWQAKISVIRPSKGHESCMGAVVSEYFVLTAAHCFTVDDKEHSIKVSVGGEKRDLEIEVVLFHPNYNINGKKEAGIPEFYDYDVALIKLKNKLKYGQTIRPICLPCTEGTTRALRLPPTTTCQQQKEELLPAQDIKALFVSEEEKKLTRKEVYIKNGDKKGSCERDAQYAPGYDKVKDISEVVTPRFLCTGGVSPYADPNTCRGDSGGPLIVHKRSRFIQVGVISWGVVDVCKNQKRQKQVPAHARDFHINLFQVLPWLKEKLQDEDLGFL

SEQ ID NO: 16684 - protein, 269 aa, Homo sapiens
MSPHPTALLGLVLCLAQTIHTQEDLPRPSISAEPGTVIPLGSHVTFVCRGPVGVQTFRLERDSRSTYNDTEDVSQASPSESEARFRIDSVREGNAGLYRCIYYKPPKWSEQSDYLELLVKGPTQRPSDNSHNEHAPASQGLKAEHLYILIGVSVVFLFCLLLLVLFCLHRQNQIKQGPPRSKDEEQKPQQRPDLAVDVLERTADKATVNGLPEKDRETDTSALAAGSSQEVTYAQLDHWALTQRTARAVSPQSTKPMAESITYAAVARH

SEQ ID NO: 16685 - protein, 819 aa, Homo sapiens
MDFSMVAGAAAYNEKSETGALGENYSWQIPINHNDFKILKNNERQLCEVLQNKFGCISTLVSPVQEGNSKSLQVFRKMLTPRIELSVWKDDLTTHAVDAVVNAANEDLLHGGGLALALVKAGGFEIQEESKQFVARYGKVSAGEIAVTGAGRLPCKQIIHAVGPRWMEWDKQGCTGKLQRAIVSILNYVIYKNTHIKTVAIPALSSGIFQFPLNLCTKTIVETIRVSLQGKPMMSNLKEIHLVSNEDPTVAAFKAASEFILGKSELGQETTPSFNAMVVNNLTLQIVQGHIEWQTADVIVNSVNPHDITVGPVAKSILQQAGVEMKSEFLATKAKQFQRSQLVLVTKGFNLFCKYIYHVLWHSEFPKPQILKHAMKECLEKCIEQNITSISFPALGTGNMEIKKETAAEILFDEVLTFAKDHVKHQLTVKFVIFPTDLEIYKAFSSEMAKRSKMLSLNNYSVPQSTREEKRENGLEARSPAINLMGFNVEEMYEAHAWIQRILSLQNHHIIENNHILYLGRKEHDILSQLQKTSSVSITEIISPGRTELEIEGARADLIEVVMNIEDMLCKVQEEMARKKERGLWRSLGQWTIQQQKTQDEMKENIIFLKCPVPPTQELLDQKKQFEKCGLQVLKVEKIDNEVLMAAFQRKKKMMEEKLHRQPVSHRLFQQVPYQFCNVVCRVGFQRMYSTPCDPKYGAGIYFTKNLKNLAEKAKKISAADKLIYVFEAEVLTGFFCQGHPLNIVPPPLSPGAIDGHDSVVDNVSSPETFVIFSGMQAIPQYLWTCTQEYVQSQDYSSGPMRPFAQHPWRGFASGSPVD

SEQ ID NO: 16686 - protein, 756 aa, Homo sapiens
MGKRGSRSQSQLLNTLTKKQKKHLRDFGEEHPFYDRVSRKEAKPQICQLSESSDSSDSESDSESEPQQVSGYHRLLATLKNVSEEEEEDEEEEEEEDSIVDDAEMNDEDGGSDVSVEEEMAAESTESPENVALSADPEGKEDGEEPPGTSQTSPEEFTDAKHESLFSLETNFLEEESGDNSSLKASQDPFLQHVNKELKEKAIQAVATNPKTTHELKWPILGQLFFSSKFQKLETFKPPKDIDLKSLHLQKPLESTWTKTNSQFLSGPQKSSSPFTPLQKELFLIMNSYRDLFYPERTALKNGEEIRHVYCLHVINHILKANAQVLGNNSRRRSQKFGVGDDDDFRDQGLTRPKVLIVVPFREAALRVVQLFISLLEGDSKKKIIVSNKKRFQGEYGSDPEERPPNLKRPEDYEAVFVGNIDDHFRIGVAILQRSIRLYAPFYSSDILIASPLGLRTIIGGEGEKKRDFDFLSSIELLIIDQADIYLMQNWEHVLHLMNHMNLLPLDSHGVDFSRVRMWSLNNWSKYYRQTLLFGALQDAQINSVFNKYCVNMQGQVAVRNVPMTGSISHVLVQLPHVFQRMEAENLASVIDARFNFFVNKILPQYRDAVMSHTLIYIPSYFDFVRLRNYFKKEELNFTHICEYTQKSGVSRARHFFLQGEKQFLLFTERFHFYKRYTIKGIRNLIFYELPTYPHFYSEICNMLRATNRGEEATWTCTVLYSKYDAQRLAAVVGVERAAQMLQSNKNVHLFITGEK

SEQ ID NO: 16687 - protein, 1230 aa, Homo sapiens
MARAKLPRSPSEGKAGPGGAPAGAAAPEEPHGLSPLLPARGGGSVGSDVGQRLPVEDFSLDSSLSQVQVEFYVNENTFKERLKLFFIKNQRSSLRIRLFNFSLKLLTCLLYIVRVLLDDPALGIGCWGCPKQNYSFNDSSSEINWAPILWVERKMTLWAIQVIVAIISFLETMLLIYLSYKGNIWEQIFRVSFVLEMINTLPFIITIFWPPLRNLFIPVFLNCWLAKHALENMINDFHRAILRTQSAMFNQVLILFCTLLCLVFTGTCGIQHLERAGENLSLLTSFYFCIVTFSTVGYGDVTPKIWPSQLLVVIMICVALVVLPLQFEELVYLWMERQKSGGNYSRHRAQTEKHVVLCVSSLKIDLLMDFLNEFYAHPRLQDYYVVILCPTEMDVQVRRVLQIPLWSQRVIYLQGSALKDQDLMRAKMDNGEACFILSSRNEVDRTAADHQTILRAWAVKDFAPNCPLYVQILKPENKFHVKFADHVVCEEECKYAMLALNCICPATSTLITLLVHTSRGQEGQESPEQWQRMYGRCSGNEVYHIRMGDSKFFREYEGKSFTYAAFHAHKKYGVCLIGLKREDNKSILLNPGPRHILAASDTCFYINITKEENSAFIFKQEEKRKKRAFSGQGLHEGPARLPVHSIIASMGTVAMDLQGTEHRPTQSGGGGGGSKLALPTENGSGSRRPSIAPVLELADSSALLPCDLLSDQSEDEVTPSDDEGLSVVEYVKGYPPNSPYIGSSPTLCHLLPVKAPFCCLRLDKGCKHNSYEDAKAYGFKNKLIIVSAETAGNGLYNFIVPLRAYYRSRKELNPIVLLLDNKPDHHFLEAICCFPMVYYMEGSVDNLDSLLQCGIIYADNLVVVDKESTMSAEEDYMADAKTIVNVQTMFRLFPSLSITTELTHPSNMRFMQFRAKDSYSLALSKLEKRERENGSNLAFMFRLPFAAGRVFSISMLDTLLYQSFVKDYMITITRLLLGLDTTPGSGYLCAMKITEGDLWIRTYGRLFQKLCSSSAEIPIGIYRTESHVFSTSESQISVNVEDCEDTREVKGPWGSRAGTGGSSQGRHTGGGDPAEHPLLRRKSLQWARRLSRKAPKQAGRAAAAEWISQQRLSLYRRSERQELSELVKNRMKHLGLPTTGYEDVANLTASDVMNRVNLGYLQDEMNDHQNTLSYVLINPPPDTRLEPSDIVYLIRSDPLAHVASSSQSRKSSCSHKLSSCNPETRDETQL

SEQ ID NO: 16688 - protein, 537 aa, Homo sapiens
MVLILGRRLNREDLGVRDSPATKRKVFEMDPKSLTGHEFFDFSSGSSHAENILQIFNEFRDSRLFTDVIICVEGKEFPCHRAVLSACSSYFRAMFCNDHRESREMLVEINGILAEAMECFLQYVYTGKVKITTENVQYLFETSSLFQISVLRDACAKFLEEQLDPCNCLGIQRFADTHSLKTLFTKCKNFALQTFEDVSQHEEFLELDKDELIDYICSDELVIGKEEMVFEAVMRWVYRAVDLRRPLLHELLTHVRLPLLHPNYFVQTVEVDQLIQNSPECYQLLHEARRYHILGNEMMSPRTRPRRSTGYSEVIVVVGGCERVGGFNLPYTECYDPVTGEWKSLAKLPEFTKSEYAVCALRNDILVSGGRINSRDVWIYNSQLNIWIRVASLNKGRWRHKMAVLLGKVYVVGGYDGQNRLSSVECYDSFSNRWTEVAPLKEAVSSPAVTSCVGKLFVIGGGPDDNTCSDKVQSYDPETNSWLLRAAIPIAKRCITAVSLNNLIYVAGGLTKAIYCYDPVEDYWMHVQNTFSRQVIT

SEQ ID NO: 16689 - protein, 1229 aa, Homo sapiens
MRGGKCNMLSSLGCLLLCGSITLALGNAQKLPKGKRPNLKVHINTTSDSILLKFLRPSPNVKLEGLLLGYGSNVSPNQYFPLPAEGKFTEAIVDAEPKYLIVVRPAPPPSQKKSCSGKTRSRKPLQLVVGTLTPSSVFLSWGFLINPHHDWTLPSHCPNDRFYTIRYREKDKEKKWIFQICPATETIVENLKPNTVYEFGVKDNVEGGIWSKIFNHKTVVGSKKVNGKIQSTYDQDHTVPAYVPRKLIPITIIKQVIQNVTHKDSAKSPEKAPLGGVILVHLIIPGLNETTVKLPASLMFEISDALKTQLAKNETLALPAESKTPEVEKISARPTTVTPETVPRSTKPTTSSALDVSETTLASSEKPWIVPTAKISEDSKVLQPQTATYDVFSSPTTSDEPEISDSYTATSDRILDSIPPKTSRTLEQPRATLAPSETPFVPQKLEIFTSPEMQPTTPAPQQTTSIPSTPKRRPRPKPPRTKPERTTSAGTITPKISKSPEPTWTTPAPGKTQFISLKPKIPLSPEVTHTKPAPEPQTLLPSQSTIGPETPGTKPSTTLAPRKTKRPGRRPRPRPRPKTTPSPEVPKSKPALEPATIQPEPLVPTTVSEPVPFETEAPSMTIVPTTDIEPVTVRTEATVTTLAPKTSQRTRTRRPRPKHKTTPRPETLQTKLDFGPITPGTSSAPTTTTKRTRRPHPKPKTTPHPEVPQTKLAPKQTPRAPPKPKTSPRPRIPQTQPVPKVPQRVTAKPKTSPSPEVSYTTPAPKDVLLPHKPYPEVSQSEPAPLETRGIPFIPMISPSPSQEELQTTLAPHRFYTTVRPRTSDKPHIRPGVKQAPRPSGADRNVSVDSTHPTKKPGTRRPPLPPRPTHPRRKPLPPNNVTGKPGSAGIISSGPITTPPLRSTPRPTGTPLERIETDIKQPTVPASGEELENITDFSSSPTRETDPLGKPRFKGPHVRYIQKPDNSPCSITDSVKRFPKEEATEGNATSPPQNPPTNLTVVTVEGCPSFVILDWEKPLNDTVTEYEVISRENGSFSGKNKSIQMTNQTFSTVENLKPNTSYEFQVKPKNPLGEGPVSNTVAFSTESADPRVSEPVSAGRDAIWTERPFNSDSYSECKGKQYVKRTWYKKFVGVQLCNSLRYKIYLSDSLTGKFYNIGDQRGHGEDHCQFVDSFLDGRTGQQLTSDQLPIKEGYFRAVRQEPVQFGEIGGHTQINYVQWYECGTTIPGKW

SEQ ID NO: 16690 - protein, 1323 aa, Homo sapiens
MSFLEEARAAGRAVVLALVLLLLPAVPVGASVPPRPLLPLQPGMPHVCAEQELTLVGRRQPCVQALSHTVPVWKAGCGWQAWCVGHERRTVYYMGYRQVYTTEARTVLRCCRGWMQQPDEEGCLSDVGECANANGGCAGRCRDTVGGFYCRWPPPSHQLQGDGETCQDVDECRTHNGGCQHRCVNTPGSYLCECKPGFRLHTDSRTCLAINSCALGNGGCQHHCVQLTITRHRCQCRPGFQLQEDGRHCVRRSPCANRNGSCMHRCQVVRGLARCECHVGYQLAADGKACEDVDECAAGLAQCAHGCLNTQGSFKCVCHAGYELGADGRQCYRIEMEIVNSCEANNGGCSHGCSHTSAGPLCTCPRGYELDTDQRTCIDVDDCADSPCCQQVCTNNPGGYECGCYAGYRLSADGCGCEDVDECASSRGGCEHHCTNLAGSFQCSCEAGYRLHEDRRGCSPLEEPMVDLDGELPFVRPLPHIAVLQDELPQLFQDDDVGADEEEAELRGEHTLTEKFVCLDDSFGHDCSLTCDDCRNGGTCLLGLDGCDCPEGWTGLICNETCPPDTFGKNCSFSCSCQNGGTCDSVTGACRCPPGVSGTNCEDGCPKGYYGKHCRKKCNCANRGRCHRLYGACLCDPGLYGRFCHLTCPPWAFGPGCSEECQCVQPHTQSCDKRDGSCSCKAGFRGERCQAECELGYFGPGCWQACTCPVGVACDSVSGECGKRCPAGFQGEDCGQECPVGTFGVNCSSSCSCGGAPCHGVTGQCRCPPGRTGEDCEADCPEGRWGLGCQEICPACQHAARCDPETGACLCLPGFVGSRCQDVCPAGWYGPSCQTRCSCANDGHCHPATGHCSCAPGWTGFSCQRACDTGHWGPDCSHPCNCSAGHGSCDAISGLCLCEAGYVGPRCEQQCPQGHFGPGCEQRCQCQHGAACDHVSGACTCPAGWRGTFCEHACPAGFFGLDCRSACNCTAGAACDAVNGSCLCPAGRRGPRCAETCPAHTYGHNCSQACACFNGASCDPVHGQCHCAPGWMGPSCLQACPAGLYGDNCRHSCLCQNGGTCDPVSGHCACPEGWAGLACEKECLPRDVRAGCRHSGGCLNGGLCDPHTGRCLCPAGWTGDKCQSPCAKGTFGPHCEGRCACRWGGPCHLATGACLCPPGWRGAPGVRMPACGAGLERPVPSAAAARLALPATTSLGPAAVPLASLAPAASRPAHPAALGRTVRRCASVPVRTRPATLPPGPAHVLLATTAPAASNDVRPGGMGQAVNSCVGVSTGAPVMRPRGPAAAPLGSSGRTATSPVRRAASAPTAPTCVGVGRGRPATL

SEQ ID NO: 16691 - protein, 459 aa, Homo sapiens
MGAARGSPARPRRLPLLSVLLLPLLGGTQTAIVFIKQPSSQDALQGRRALLRCEVEAPGPVHVYWLLDGAPVQDTERRFAQGSSLSFAAVDRLQDSGTFQCVARDDVTGEEARSANASFNIKWIEAGPVVLKHPASEAEIQPQTQVTLRCHIDGHPRPTYQWFRDGTPLSDGQSNHTVSSKERNLTLRPAGPEHSGLYSCCAHSAFGQACSSQNFTLSIADESFARVVLAPQDVVVARYEEAMFHCQFSAQPPPSLQWLFEDETPITNRSRPPHLRRATVFANGSLLLTQVRPRNAGIYRCIGQGQRGPPIILEATLHLAEIEDMPLFEPRVFTAGSEERVTCLPPKGLPEPSVWWEHAGVRLPTHGRVYQKGHELVLANIAESDAGVYTCHAANLAGQRRQDVNITVASEHLCPEGQGEVEGNTGLGVMDRGFPGTHLRSSQFWALQAWESVHYWESV

SEQ ID NO: 16692 - protein, 330 aa, Homo sapiens
MESAAALHFSRPASLLLLLLSLCALVSAQFIVVGPTDPILATVGENTTLRCHLSPEKNAEDMEVRWFRSQFSPAVFVYKGGRERTEEQMEEYRGRTTFVSKDISRGSVALVIHNITAQENGTYRCYFQEGRSYDEAILHLVVAGLGSKPLISMRGHEDGGIRLECISRGWYPKPLTVWRDPYGGVAPALKEVSMPDADGLFMVTTAVIIRDKSVRNMSCSINNTLLGQKKESVIFIPESFMPSVSPCAVALPIIVVILMIPIAVCIYWINKLQKEKKILSGEKEFERETREIALKELEKERVQKEEELQVKEKLQEELRWRRTFLHAGPV

SEQ ID NO: 16693 - protein, 360 aa, Homo sapiens
MVTLITEKLQSQSLDDLTCKAEAGPLQYSAETLNKSGRLFPLELNDQSPWKVFSGGPPVRSQAATGPDFSFLPGLSAAAHTMGLQWQPQSPRPGAGLGAASTVDPSESTGSSTAPPTKRHCRSLSEPEELVRCRSPWRPGSSKVWTPVSKRRCDSGGSATRQGSPGAVLPRSAVWSTGPTSPATPRPSSASGGFVDSSEGSAGSGPLWCSAESCLPSTRRRPSLSQERLAGAGTPLPWASSSPTSTPALGGRRGLLRCRSQPCVLSGKRSRRKRRREEDARWTRPSLDFLKMTQPHSCARECESRVRGLGVSLQHLSGPSSQSRGSTLNENKTPWFEMEGNLAPEDFKKFKKPLLPQLRR

SEQ ID NO: 16694 - protein, 563 aa, Homo sapiens
MAFMEKPPAGKVLLDDTVPLTAAIEASQSLQSHTIVRRYSDFDLLNNSLQIAGLSLPLPPKKLIGNMDREFIAERQKGLQNYLNVITTNHILSNCELVKKFLDPNNYSANYTEIALQQVSMFFRSEPKWEVVEPLKDIGWRIRKKYFLMKIKNQPKERLVLSWADLGPDKYLSDKDFQCLIKLLPSCLHPYIYRVTFATANESSALLIRMFNEKGTLKDLIYKAKPKDPFLKKYCNPKKIQGLELQQIKTYGRQILEVLKFLHDKGFPYGHLHASNVMLDGDTCRLLDLENSLLGLPSFYRSYFSQFRKINTLESVDVHCFGHLLYEMTYGRPPDSVPVDSFPPAPSMAVVAVLESTLSCEACKNGMPTISRLLQMPLFSDVLLTTSEKPQFKIPTKLKEALRIAKECIEKRLIEEQKQIHQHRRLTRAQSHHGSEEERKKRKILARKKSKRSALENSEEHSAKYSNSNNSGSGASSPLTSPSSPTPPSTSAALGLSKRCKERDICITSTSSTSTTTSSSLASCEHRGTCPALVSGCEWHEPRGLAQLHPEFPKRNFEESQNL

SEQ ID NO: 16695 - protein, 275 aa, Homo sapiens
MSRELAPLLLLLLSIHSALAMRICSFNVRSFGESKQEDKNAMDVIVKVIKRCDIILVMEIKDSNNRICPILMEKLNREKLVSVKRSYHYHDYQDGDADVFSREPFVVWFQSPHTAVKDFVIIPLHTTPETSVKEIDELVEVYTDVKHRWKAENFIFMGDFNAGCSYVPKKAWKNIRLRTDPRFVWLIGDQEDTTVKKSTNCAYDRIVLRGQEIVSSVVPKSNSVFDFQKAYKLTEEEALDVSDHFPVEFKLQSSRAFTNSKKSVTLRKKTKSKRS

SEQ ID NO: 16696 - protein, 767 aa, Homo sapiens
MAALSGGGGGGAEPGQALFNGDMEPEAGAGAGAAASSAADPAIPEEVWNIKQMIKLTQEHIEALLDKFGGEHNPPSIYLEAYEEYTSKLDALQQREQQLLESLGNGTDFSVSSSASMDTVTSSSSSSLSVLPSSLSVFQNPTDVARSNPKSPQKPIVRVFLPNKQRTVVPARCGVTVRDSLKKALMMRGLIPECCAVYRIQDGEKKPIGWDTDISWLTGEELHVEVLENVPLTTHNFVRKTFFTLAFCDFCRKLLFQGFRCQTCGYKFHQRCSTEVPLMCVNYDQLDLLFVSKFFEHHPIPQEEASLAETALTSGSSPSAPASDSIGPQILTSPSPSKSIPIPQPFRPADEDHRNQFGQRDRSSSAPNVHINTIEPVNIDDLIRDQGFRGDGGSTTGLSATPPASLPGSLTNVKALQKSPGPQRERKSSSSSEDRNRMKTLGRRDSSDDWEIPDGQITVGQRIGSGSFGTVYKGKWHGDVAVKMLNVTAPTPQQLQAFKNEVGVLRKTRHVNILLFMGYSTKPQLAIVTQWCEGSSLYHHLHIIETKFEMIKLIDIARQTAQGMDYLHAKSIIHRDLKSNNIFLHEDLTVKIGDFGLATVKSRWSGSHQFEQLSGSILWMAPEVIRMQDKNPYSFQSDVYAFGIVLYELMTGQLPYSNINNRDQIIFMVGRGYLSPDLSKVRSNCPKAMKRLMAECLKKKRDERPLFPQILASIELLARSLPKIHRSASEPSLNRAGFQTEDFSLYACASPKTPIQAGGYGEFAAFK

SEQ ID NO: 16697 - protein, 291 aa, Homo sapiens
TKCGGAGHIASDCKFQRPGDPQSAQDKARMDKEYLSLMAELGEAPVPASVGSTSGPATTPLASAPRPAAPANNPPPPSLMSTTQSRPPWMNSGPSESRPYHGMHGGGPGGPGGGPHSFPHPLPSLTGGHGGHPMQHNPNGPPPPWMQPPPPPMNQGPHPPGHHGPPPMVPGKYACGLWGLSPASRKRYDAATTYGHDAAAAAASQWAAPTPSLWSSSPMATTAAAASATPSAQQQYGFQYPLAMAAKYDDYHHERWHRVHPAMATAAGGCRSFSRSPSDARQPHYGAPAPR

SEQ ID NO: 16698 - protein, 268 aa, Homo sapiens
DDRTPDVIALTVAFFLFEFLAATQDIAVDGWALTMLSRENIGFSAADAVTGLKLVEEGVPKEHLALLAVPMVPLQIILPLIISKYTAGPQPLNTFYKAMPYRLLLGLEYALLVWWTPKVEHQGGFPIYYYIVVLLSYALHQVTVYSMYVSIMAFNAKVSDPLIGGTYMTLLNTVSNLGGNWPSTVALWLVDPLTVKECVGASNQNCRTPDAVELCKKLGGSCVTALDGYYVESIICVFIGFGWWFFLGPKFKKLQDEGSSSWKCKRNN

SEQ ID NO: 16699 - protein, 928 aa, Homo sapiens
KKEELELKCEQCEQRLGRAGKLINGLSDEKVRWQETVENLQYMLNNISGDVLVAAGFVAYLGPFTGQYRTVLYDSWVKQLRSHNVPHTSEPTLIGTLGNPVKIRSWQIAGLPNDTLSVENGVINQFSQRWTHFIDPQSQANKWIKNMEKDNGLDVFKLSDRDFLRSMENAIRFGKPCLLENVGEELDPALEPVLLKQTYKQQGNTVLKLGDTVIPYHEDFRMYITTKLPNPHYTPEISTKLTLINFTLSPSGLEDQLLGQVVAEERPDLEEAKNQLIISNAKMRQELKDIEDQILYRLSSSEGNPVDDMELIKVLEASKMKAAEIQAKVRIAEQTEKDIDLTRMEYIPVAIRTQILFFCVSDLANVDPMYQYSLEWFLNIFLSGIANSERADNLKKRISNINRYLTYSLYSNVCRSLFEKHKLMFAFLLCVRIMMNEGKINQSEWRYLLSGGSISIMTENPAPDWLSDRAWRDILALSNLPTFSSFSSDFVKHLSEFRVIFDSLEPHREPLPGIWDQYLDQFQKLLVLRCLRGDKVTNAMQDFVATNLEPRFIEPQTANLSVVFKDSNSTTPLIFVLSPGTDPAADLYKFAEEMKFSKKLSAISLGQGQGPRAEAMMRSSIERGKWVFFQNCHLAPSWMPALERLIEHINPDKVHRDFRLWLTSLPSNKFPVSILQNGSKMTIEPPRGVRANLLKSYSSLGEDFLNSCHKVMEFKSLLLSLCLFHGNALERRKFGPLGFNIPYEFTDGDLRICISQLKMFLDEYDDIPYKVLKYTAGEINYGGRVTDDWDRRCIMNILEDFYNPDVLSPEHSYSASGIYHQIPPTYDLHGYLSYIKSLPLNDMPEIFGLHDNANITFAQNETFALLGTIIQLQPKSSSAGSQGREEVQSAAAGDHTDTARPTQGTQGAGSDVLSAGADGCQPVQQYCA

SEQ ID NO: 16700 - protein, 746 aa, Homo sapiens
LLVLGLLVAGAADGCELVPRHLRGRRATGSAATAASSPAAAAGDSPALMTDPCMSLSPPCFTEEDRFSLEALQTIHKQMDDDKDGGIEVEESDEFIREDMKYKDATNKHSHLHREDKHITIEDLWKRWKTSEVHNWTLEDTLQWLIEFVELPQYEKNFRDNNVKGTTLPRIAVHEPSFMISQLKISDRSHRQKLQLKALDVVLFGPLTRPPHNWMKDFILTVSIVIGVGGCWFAYTQNKTSKEHVAKMMKDLESLQTAEQSLMDLQERLEKAQEENRNVAVEKQNLERKMMDEINYAKEEACRLRELREGAECELSRRQYAEQELEQVRMALKKAEKEFELRSSWSVPDALQKWLQLTHEVEVQYYNIKRQNAEMQLAIAKDEAEKIKKKRSTVFGTLHVAHSSSLDEVDHKILEAKKALSELTTCLRERLFRWQQIEKICGFQIAHNSGLPSLTSSLYSDHSWVVMPRVSIPPYPIAGGVDDLDEDTPPIVSQFPGTMAKPPGSLARSSSLCRSRRSIVPSSPQPQRAQLAPHAPHPSHPRHPHHPQHTPHSLPSPDPDILSVSSCPALYRNEEEEEAIYFSAEKQWEVPDTASECDSLNSSIGRKQSPPLSLEIYQTLSPRKISRDEVSLEDSSRGDSPVTVDVSWGSPDCVGLTETKSMIFSPASKVYNGILEKSCSMNQLSSGIPVPKPRHTSCSSAGNDSKPVQEAPSVARISSIPHDLCHNGEKSKKPSKIKSLFKKKSK

SEQ ID NO: 16701 - protein, 15 aa, Homo sapiens
YFDYWGQGTLVTVSS

SEQ ID NO: 16702 - protein, 221 aa, Homo sapiens
RRRSSEKTDYRLAGLADPGTSEQTDLRLYGLVDHKTSVKTHHQVYGQATELAEHQAIDQAHSNADQPPVDNAHYTESDQTDHLADRQANHKDQLSYYETRGQSEDRIFPQLGNSKEDKEADYRVQPCKFEDSQVDLNSKPSVEMETQNATTIPPYNPVDARFTSNFQAKDQALFPRLPSISSKLNYTSSQEKTQAIVTKSITENLVYEKPEDPLNFMLCQV

SEQ ID NO: 16703 - protein, 1216 aa, Homo sapiens
MARAKLPRSPSEGKAGPGGAPAGAAAPEEPHGLSPLLPARGGGSVGSDVGQRLPVEDFSLDSSLSQVQVEFYVNENTFKERLKLFFIKNQRSSLRIRLFNFSLKLLTCLLYIVRVLLDDPALGIGCWGCPKQNYSFNDSSSEINWAPILWVERKMTLWAIQVIVAIISFLETMLLIYLSYKGNIWEQIFRVSFVLEMINTLPFIITIFWPPLRNLFIPVFLNCWLAKHALENMINDFHRAILRTQSAMFNQVLILFCTLLCLVFTGTCGIQHLERAGENLSLLTSFYFCIVTFSTVGYGDVTPKIWPSQLLVVIMICVALVVLPLQFEELVYLWMERQKSGGNYSRHRAQTEKHVVLCVSSLKIDLLMDFLNEFYAHPRLQDYYVVILCPTEMDVQVRRVLQIPLWSQRVIYLQGSALKDQDLMRAKMDNGEACFILSSRNEVDRTAADHQTILRAWAVKDFAPNCPLYVQILKPENKFHVKFADHVVCEEECKYAMLALNCICPATSTLITLLVHTSRGQEGQESPEQWQRMYGRCSGNEVYHIRMGDSKFFREYEGKSFTYAAFHAHKKYGVCLIGLKREDNKSILLNPGPRHILAASDTCFYINITKEENSAFIFKQEEKRKKRAFSGQGLHEGPARLPVHSIIASMGTVAMDLQGTEHRPTQSGGGGGGSKLALPTENGSGSRRPSIAPVLELADSSALLPCDLLSDQSEDEVTPSDDEGLSVVEYVKGYPPNSPYIGSSPTLCHLLPVKAPFCCLRLDKGCKHNSYEDAKAYGFKNKLIIVSAETAGNGLYNFIVPLRAYYRSRKELNPIVLLLDNKPDHHFLEAICCFPMVYYMEGSVDNLDSLLQCGIIYADNLVVVDKESTMSAEEDYMADAKTIVNVQTMFRLFPSLSITTELTHPSNMRFMQFRAKDSYSLALSKLEKRERENGSNLAFMFRLPFAAGRVFSISMLDTLLYQSFVKDYMITITRLLLGLDTTPGSGYLCAMKITEGDLWIRTYGRLFQKLCSSSAEIPIGIYRTESHVFSTSEPHDLRAQSQISVNVEDCEDTREVKGPWGSRAGTGGSSQGRHTGGGDPAEHPLLRRKSLQWARRLSRKAPKQAGRAAAAEWISQQRLSLYRRSERQELSELVKNRMKHLGLPTTGYDEMNDHQNTLSYVLINPPPDTRLEPSDIVYLIRSDPLAHVASSSQSRKSSCSHKLSSCNPETRDETQL

SEQ ID NO: 16704 - protein, 828 aa, Homo sapiens
MAEAEFKDHSTAMDTEPNPGTSSVSTTTSSTTTTTITTSSSRMQQPQISVYSGSDRHAVQVIQQALHRPPSSAAQYLQQMYAAQQQHLMLHTAALQQQHLSSSQLQSLAAVQASLSSGRPSTSPTGSVTQQSSMSQTSLIFTPATTVAAVQSDIPVVSSSSSSSCQSAATQVQNLTLRSQKLGVLSSSQNGPPKSTSQTQSLTICHNKTTVTSSKISQRDPSPESNKKGESPSLESRSTAVTRTSSIHQLIAPASYSPIQPHSLIKHQQIPLHSPPSKVSHHQLILQQQQQQIQPITLQNSTQDPPPSQHCIPLQNHGLPPAPSNAQSQHCSPIQSHPSPLTVSPNQSQSAQQSVVVSPPPPHSPSQSPTIIIHPQALIQPHPLVSSALQPGPNLQQSTANQVQATAQLNLPSHLPLPASPVVHIGPVQQSALVSPGQQIVSPSHQQYSSLQSSPIPIASPPQMSTSPPAQIPPLPLQSMQSLQVQPEILSQGQVLVQNALVSEEELPAAEALVQLPFQTLPPPQTVAVNLQVQPPAPVDPPVVYQVEDVCEEEMPEESDECVRMDRTPPPPTLSPAAITVGRGEDLTSEHPLLEQVELPAVASVSASVIKSPSDPSHVSVPPPPLLLPAATTRSNSTSMHSSIPSIENKPPQAIVKPQILTHVIEGFVIQEGLEPFPVSRSSLLIEQPVKKRPLLDNQVINSVCVQPELQNNTKHADNSSDTEMEDMIAEETLEEMDSELLKCEFCGKMGYANEFLRSKRFCTMSCAKRYNVSCSKKFALSRWNRKPDNQSLGHRGRRPSGPDGAAREHILRQKKTWLLMKILCHLL

SEQ ID NO: 16705 - protein, 1014 aa, Homo sapiens
MADLEVYKNLSPEKVERCMSVMQSGTQMIKLKRGTKGLVRLFYLDEHRTRLRWRPSRKSEKAKILIDSIYKVTEGRQSEIFHRQAEGNFDPSCCFTIYHGNHMESLDLITSNPEEARTWITGLKYLMAGISDEDSLAKRQRTHDQWVKQTFEEADKNGDGLLNIEEIHQLMHKLNVNLPRRKVRQMFQEADTDENQGTLTFEEFCVFYKMMSLRRDLYLLLLSYSDKKDHLTVEELAQFLKVEQKMNNVTTDYCLDIIKKFEVSEENKVKNVLGIEGFTNFMRSPACDIFNPLHHEVYQDMDQPLCNYYIASSHNTYLTGDQLLSQSKVDMYARVLQEGCRCVEVDCWDGPDGEPVVHHGYTLTSKILFRDVVETINKHAFVKNEFPVILSIENHCSIQQQRKIAQYLKGIFGDKLDLSSVDTGECKQLPSPQSLKGKILVKGKKLPYHLGDDAEEGEVSDEDSADEIEDECKFKLHYSNGTTEHQVESFIRKKLESLLKESQIRDKEDPDSFTVRALLKATHEGLNAHLKQSPDVKESGKKSHGRSLMTNFGKHKKTTKSRSKSYSTDDEEDTQQSTGKEGGQLYRLGRRRKTMKLCRELSDLVVYTNSVAAQDIVDDGTTGNVLSFSETRAHQVVQQKSEQFMIYNQKQLTRIYPSAYRIDSSNFNPLPYWNAGCQLVALNYQSEGRMMQLNRAKFKANGNCGYVLKPQQMCKGTFNPFSGDPLPANPKKQLILKVISGQQLPKPPDSMFGDRGEIIDPFVEVEIIGLPVDCCKDQTRVVDDNGFNPVWEETLTFTVHMPEIALVRFLVWDHDPIGRDFVGQRTVTFSSLVPGYRHVYLEGLTEASIFVHITINEIYGKNRQLQGLKGLFNKNPRHSSSENNSHYVRKRSIGDRILRRTASAPAKGRKKSKMGFQEMVEIKDSVSEATRDQDGVLRRTTRSLQARPVSMPVDRNLLGALSLPVSETAKDIEGKENSLDSSFCRPTEQAKAEMCKVPFPRQLECVMKMEISET

SEQ ID NO: 16706 - protein, 1091 aa, Homo sapiens; identical to SEQ ID NO: 2929

SEQ ID NO: 16707 - protein, 340 aa, Homo sapiens
MESLGLHTVTLSDGTTAYVQQAVKGEKLLEGQVIQLEDGTTAYIHQVTVQKEALSFEDGQPVQLEDGSMAYIHRTPREGYDPSTLEAVQLEDGSTAYIHHPVAVPSESTILAVQTEVGLEDLAAEDDEGFSADAVVALEQYASKVLHDSQIPRNGKGQQVGDRAFRCGYKGCGRLYTTAHHLKVHERAHTGDRPYRCDFPSCGKAFATGYGLKSHVRTHTGEKPYKCPEELCSKAFKTSGDLQKHVRTHTGERPFQCPFEGCGRSFTTSNIRKVHVRTHTGERPYTCPEPHCGRGFTSATNYKNHVRIHTGEKPYVCTVPGCGKRFTEYSSLYKHHVVHT

SEQ ID NO: 16708 - protein, 312 aa, Homo sapiens
MSANTSMVTEFLLLGFSHLADLQGLLFSVFLTIYLLTVAGNFLIVVLVSTDAALQSPMYFFLRTLSALEIGYTSVTVPLLLHHLLTGRRHISRSGCALQMFFFLFFGATECCLLAAMAYDRYAAICEPLRYPLLLSHRVCLQLAGSAWACGVLVGLGHTPFIFSLPFCGPNTIPQFFCEIQPVLQLVCGDTSLNELQIILATALLILCPFGLILGSYGRILVTIFRIPSVAGRRKAFSTCSSHLIMVSLFYGTALFIYIRPKASYDPATDPLVSLFYAVVTPILNPIIYSLRNTEVKAALKRTIQKTVPMEI

SEQ ID NO: 16709 - protein, 548 aa, Homo sapiens
SVSLYLSEDEVRRLIGLDAELYYVRNDLISHYALSFSLLVPSETNFLHFTWHAKSKVEYKLGFQVDNVLAMDMPQVNISVQGEVPRTLSVFRVELSCTGKVDSEVMILMQLNLTVNSSKNFTVLNFKRRKMCYKKLEEVKTSALDKNTSRTIYDPVHAAPTTSTRVFYISVGVCCAVIFLVAIILAVLHLHSMKRIELDDSISASSSSQGLSQPSTQTTQYLRADTPNNATPITSSLGYPTLRIEKNDLRSVTLLEAKGKVKDIAISRERITLKDVLQEGTFGRIFHGILIDEKDPNKEKQAFVKTVKDQASEIQVTMMLTESCKLRGLHHRNLLPITHVCIEEGEKPMVILPYMNWGNLKLFLRQCKLVEANNPQAISQQDLVHMAIQIACGMSYLARREVIHKDLAARNCVIDDTLQVKITDNALSRDLFPMDYHCLGDNENRPVRWMALESLVNNEFSSASDVWAFGVTLWELMTLGQTPYVDIDPFEMAAYLKDGYRIAQPINCPDELFAVMACCWALDPEERPKFQQLVQCLTEFHAALGAYV

SEQ ID NO: 16710 - protein, 345 aa, Homo sapiens
MGLGVSAEQPAGGAEGFHLHGDVEPSSPAALAGLRPYTDYVVGSDQILQESEDFFTLIESHEGKPLKLMVYNSKSDSCREVTVTPNAAWGGEGSLGCGIGYGYLHRIPTQPPSYHKKPPGTPPPSALPLGAPPPDALPPGPTPEDSPSLETGSRQSDYMEALLQAPGSSMEDPLPGPGSPSHSAPDPDGLPHFMETPLQPPPPVQRVMDPGFLDVSGISLLDNSNASVWPSLPSSTELTTTAVSTSGPEDICSSSSSHERGGEATWSGSEFEVSFLDSPGAQAQADHLPQLTLPDSLTSAASPEDGLSAELLEAQAEEEPASTEGLDTGTEAEGLDSQAQISTTE

SEQ ID NO: 16711 - protein, 175 aa, Homo sapiens
MGAAQGKKKTYSPQARFHSENEKQRRNGSAAMYSEIQRERADIGGLMARPEYREWNPELIKPKKLLNPVKASRSHQELHRELLMNHRRGLGVDSKPELQRVLEHRRRNQLIKKKKEELEAKRLQCPFEQELLRRQQRLNQLEKPPEKEEDHAPEFIKVRENLRRIATLTSEEREL

SEQ ID NO: 16712 - protein, 445 aa, Homo sapiens
METRTEDGGLTRRPTLASSWDVAGGALTHSLLLTRAGLGPGDFDWEELLAPPAPGQDLVILKRNHNNKDENPCFLYLRCGPDGGEEIASIGILSSARNMEVYLGEEYCGTSRGKNVCTVLDDSEHEKIILYKKNLKLESSTHACKIKLLSFGERQCVFISKVVVHMRSVFANSSTSSPALGSRIDLDKVQTIMESMGSKLSPGAQQLMDMVRCQQRNCIPIGEQLQSVLGNSGYKHMIGLQSSSTLGTLNKSSSTPFPFRTGLTSGNVTENLQTYIDKSTQLPGGENSTKLDECKVMPQNHSFLENDLKNAMASFLPKKVSDNSNIPNSELLPFLQNLCSQVNHLHVGNKTECQENITKHGERILGVGMEEQSICSYLEKILSKNMELMEKKLMDYIDQRIHELQEHIDDKIALLLDLLQNPNSPPTGIPLRHYDSGERLSNGER

SEQ ID NO: 16713 - protein, 748 aa, Homo sapiens
IAVAFTSKEVCFYDLLSKEEFACQYKLQGLKGTPICMDYWYDPLDANESILSFGDITGKVQAIAFTAALISLFERPASACEDGEATMTINWAELLSGCHKCCHILEHKLHQGDWVRQVTYNASLDAIISSTTSNTNSVVMAWREKSKKRLNMTSFNIAQGIHAFDYHSRLNLIATAGINNKVCLWNPYVVSKPVGVLWGHSASVIAVQFFVERKQLFSFSKDKVLRLWDIQHQLSIQRIACSFPKSQDFRCLFHFDEAHGRLFISFNNQLALLAMKSEASKRVKSHEKAVTCVLYNSILKQVISSDTGSTVSFWMIDTGQKIKQFTGCHGNAEISTMALDANETRLLTGSTDGTVKIWDFNGYCHHTLNVGQDGAVDISQILILKKKILVTGWERYDYASWKTIGRAITVFRPQNFNQFFIQPEEWKGGIQHHDDILCAAFLPPQTLVTGSYDGEIVLWNNSTENAHHVLHPDYQRLLKSKLDTKPQKLLSAGRSQPSHPMADHSTTGVRNFEIDTEGKNAVMRLCFLKARKNTAVTGGANLVSCGGSGYVRFWDIYKKQLLAEFLAHSGVGSIIMSTDKMNRYLTTGDLDGWLKIWNIEEESCLDPTEHSLLNKKNKDDSTYNVRPSEDINLDIKYKERSTCMKETQKPYYGEVIKKSFSTFRSLNIGALEELPEVNKPAFLLDPEKYFRKEPEEERPQILEAPSLFKTLKAVFDEKNLFPKEILHHERKAKQLCQEKSCEVKKNKK

SEQ ID NO: 16714 - protein, 495 aa, Homo sapiens
MSFQCHICAYHTHSLTRQEFWQLLQQNYGTELGLNAEEMENLSLSIEDVQPRSPGRSSLDDSGERDEKLSKSISFTSESISRVSETESFDGNSSKGGLGKEESQNEKQTKKSLLPTLEKKLTRVPSKSLDLNKNEYLSLDKSSTSDSVDEENVPEKDLHGRLFINRIFHISADRMFELLFTSSRFMQKFASSRNIIDVVSTPWTAELGGDQLRTMTYTIVLNSPLTGKCTAATEKQTLYKESREARFYLVDSEVLTHDVPYHDYFYTVNRYCIIRSSKQKCRLRVSTDLKYRKQPWGLVKSLIEKNSWSSLEDYFKQLESDLLIEESVLNQAIEDPGKLTGLRRRRRTFNRTAETVPKLSSQHSSGDVGLGAKGDITGKKKEMENYNVTLIVVMSIFVLLLVLLNVTLFLKLSKIEHAAQSFYRLRLQEEKSLNLASDMVSRAETIQKNKDQAHRLKGVLRDSIVMLEQLKSSLIMLQKTFDLLNKNKTGMAVES

SEQ ID NO: 16715 - protein, 443 aa, Homo sapiens
MLENYRNLVSLGISSKCTMKEFSSTAQGNTEVIHTGTLQRHERHHIGDFSFQEIEKDIHNFEFQWQEDERNGHEAPMTKIKKLMGSTEQYDHRHAGNKPIKYQLGSSFHSHLSELHIFQPKGKINNQVEKSINDASSVSTAQRISCRPKTHISNNYGDNFLNYSLLTQRQEVRMREKSFQCIESGKAFNYSSLLRKHQIIHLGEKQYKCDVCDKVFIRKRYLARHRRCHTGEKPYKCNECGKSFSQMSSLTYHHRLHTGEKPYKCEECDKAFRHNSALQRHRRIHTGEKPHKCNECGKTFSQKSYLACHRSIHTGKKPYECEECDKAFSFKSNLESHRITHTGEKPYKCNDCGKTFSHMSTLTCHRRLHTGEKPYKCEECDEAFRFKSSLERHRRIHNGEKLYKCNECGKTFSQELSLTCHCRLHSGEKPCKCGECDKAYSFK

SEQ ID NO: 16716 - protein, 658 aa, Homo sapiens
MIPCRAALTFARCLIRRKIVTLDSLEDTKLCRCLSTMDLIALGVGSTLGAGVYVLAGEVAKADSGPSIVVSFLIAALASVMAGLCYAEFGARVPKTGSAYLYTYVTVGELWAFITGWNLILSYVIGTSSVARAWSGTFDELLSKQIGQFLRTYFRMNYTGLAEYPDFFAVCLILLLAGLLSFGVKESAWVNKVFTAVNILVLLFVMVAGFVKGNVANWKISEEFLKNISASAREPPSENGTSIYGAGGFMPYGFTGTLAGAATCFYAFVGFDCIATTGEEVRNPQKAIPIGIVTSLLVCFMAYFGVSAALTLMMPYYLLDEKSPLPVAFEYVGWGPAKYVVAAGSLCALSTSLLGSIFPMPRVIYAMAEDGLLFKCLAQINSKTKTPIIATLSSGAVAALMAFLFDLKALVDMMSIGTLMAYSLVAACVLILRYQPGLSYDQPKCSPEKDGLGSSPRVTSKSESQVTMLQRQGFSMRTLFCPSLLPTQQSASLVSFLVGFLAFLVLGLSVLTTYGVHAITRLEAWSLALLALFLVLFVAIVLTIWRQPQNQQKVAFMVPFLPFLPAFSILVNIYLMVQLSADTWVRFSIWMAIGFLIYFSYGIRHSLEGHLRDENNEEDAYPDNVHAAAEEKSAIQANDHHPRNLSSPFIFHEKTSEF

SEQ ID NO: 16717 - protein, 132 aa, Homo sapiens
MKHENVIGLLDVFTPARSLEEFNDVYLVTHLMGADLNNIVKCQKLTDDHVQFLIYQILRGLKYIHSADIIHRDLKPSNLAVNEDCELKILDFGLARHTDDEMTGYVATRWYRAPEIMLNWMHYNQTVDIWSV

SEQ ID NO: 16718 - protein, 741 aa, Homo sapiens
MLERKKPKTAENQKASEENEITQPGGSSAKPGLPCLNFEAVLSPDPALIHSTHSLTNSHAHTGSSDCDISCKGMTERIHSINLHNFSNSVLETLNEQRNRGHFCDVTVRIHGSMLRAHRCVLAAGSPFFQDKLLLGYSDIEIPSVVSVQSVQKLIDFMYSGVLRVSQSEALQILTAASILQIKTVIDECTRIVSQNVGDVFPGIQDSGQDTPRGTPESGTSGQSSDTESGYLQSHPQHSVDRIYSALYACSMQNGSGERSFYSGAVVSHHETALGLPRDHHMEDPSWITRIHERSQQMERYLSTTPETTHCRKQPRPVRIQTLVGNIHIKQEMEDDYDYYGQQRVQILERNESEECTEDTDQAEGTESEPKGESFDSGVSSSIGTEPDSVEQQFGPGAARDSQAEPTQPEQAAEAPAEGGPQTNQLETGASSPERSNEVEMDSTVITVSNSSDKSVLQQPSVNTSIGQPLPSTQLYLRQTETLTSNLRMPLTLTSNTQVIGTAGNTYLPALFTTQPAGSGPKPFLFSLPQPLAGQQTQFVTVSQPGLSTFTAQLPAPQPLASSAGHSTASGQGEKKPYECTLCNKTFTAKQNYVKHMFVHTGEKPHQCSICWRSFSLKDYLIKHMVTHTGVRAYQCSICNKRFTQKSSLNVHMRLHRGEKSYECYICKKKFSHKTLLERHVALHSASNGTPPAGTPPGARAGPPGVVACTEGTTYVCSVCPAKFDQIEQFNDHMRMHVSDG

SEQ ID NO: 16719 - protein, 482 aa, Homo sapiens
MGGGGSALRVCADHRGGINWLSLSPDGQRLLTGSEDGTARLWSTADGQCCALLQGHESYVTFCQLEDEAAFTCSADCTIRRWDVLTGQCLQVYRGHTSIVNRILVANNQLFSSSYDRTARVWSVDKGQMSREFRGHRNCVLTLAYSAPWDLPSTPCAEEAAAGGLLVTGSTDGTAKVWQVASGCCHQTLRGHTGAVLCLVLDTPGHTAFTGSTDATIRAWDILSGEQLRVFREHRGSVICLERERSGGLQSCPSCRPSLLLLAAGEPTRVLWQRGQDRQVLAGRHRGVCAHVHGPQTQRERPQVPRGHLVHGQRGRLRPGLRRAVWRAAEGVPGPHIHHQLHPGARPGALHRLARRRPAPLGRARAPRCPAAPSAHAQPLAALQQQGGLRRRAPAAGLIPRGPCRRQPRHPAAPRAPRPATRGGGARWPARGEERGSPGGRRARRRRLVFLWWPGGAGSGSARPGDRPLFPFRVAPVLPPHP

SEQ ID NO: 16720 - protein, 1227 aa, Homo sapiens
MTQPEPESLGPGTPGFPEQEEDELHRTLGVERFEEILQEAGSRGGEEPGRSYGEEDFEYHRQSSHHIHHPLSTHLPPDARRRKTPQGPGRKPRRRPGASPTGETPTIEEGEEDEDEASEAEGARALTQPSPVSTPSSVQFFLQEDDSADRKAERTSPSSPAPLPHQEATPRASKGAQAGTQVEEAEAEAVAVASGTAGGDDGGASGRPLPKAQPGHRSYNLQERRRIGSMTGAEQALLPRVPTDEIEAQTLATADLDLMKSHRFEDVPGVRRHLVRKNAKGSTQSGREGREPGPTPRARPRAPHKPHEVFVELNELLLDKNQEPQWRETARWIKFEEDVEEETERWGKPHVASLSFRSLLELRRTLAHGAVLLDLDQQTLPGVAHQVVEQMVISDQIKAEDRANVLRALLLKHSHPSDEKDFSFPRNISAGSLGSLLGHHHGQGAESDPHVTEPLMGGVPETRLEVERERELPPPAPPAGITRSKSKHELKLLEKIPENAEATVVLVGCVEFLSRPTMAFVRLREAVELDAVLEVPVPVRFLFLLLGPSSANMDYHEIGRSISTLMSDKQFHEAAYLADEREDLLTAINAFLDCSVVLPPSEVQGEELLRSVAHFQRQMLKKREEQGRLLPTGAGLEPKSAQDKALLQMVEAAGAAEDDPLRRTGRPFGGLIRDVRRRYPHYLSDFRDALDPQCLAAVIFIYFAALSPAITFGGLLGEKTQDLIGVSELIMSTALQGVVFCLLGAQPLLVIGFSGPLLVFEEAFFSFCSSNHLEYLVGRVWIGFWLVFLALLMVALEGSFLVRFVSRFTQEIFAFLISLIFIYETFYKLVKIFQEHPLHGCSASNSSEVDGGENMTWAGARPTLGPGNRSLAGQSGQGKPRGQPNTALLSLVLMAGTFFIAFFLRKFKNSRFFPGRIRRVIGDFGVPIAILIMVLVDYSIEDTYTQKLSVPSGFSVTAPEKRGWVINPLGEKSPFPVWMMVASLLPAILVFILIFMETQITTLIISKKERMLQKGSGFHLDLLLIVAMGGICALFGLPWLAAATVRSVTHANALTVMSKAVAPGDKPKIQEVKEQRVTGLLVALLVGLSIVIGDLLRQIPLAVLFGIFLYMGVTSLNGIQFYERLHLLLMPPKHHPDVTYVKKVRTLRMHLFTALQLLCLALLWAVMSTAASLAFPFILILTVPLRMVVLTRIFTDREMKCLDANEAEPVFDEREGVDEYNEMPMPV

SEQ ID NO: 16721 - protein, 185 aa, Homo sapiens
WGTVFLITTTLVALLKKENEVSVVKEETQGITDTYKLLFAIIKMPAVLTFCLLILTAKVTVYSMYVSIMAFNAKVSDPLIGGTYMTLLNTVSNLGGNWPSTVALWLVDPLTVKECVGASNQNCRTPDAVELCKKLGGSCVTALDGYYVESIICVFIGFGWWFFLGPKFKKLQDEGSSSWKCKRNN

SEQ ID NO: 16722 - protein, 147 aa, Homo sapiens
MGLPEERVRSGSGSRGQEEAGAGGRARSWSPPPEVSRSAHVPSLQRYRELHRRSVEEPREFYWKTPCPGPFLRYNFDVTKGKIFIEWMKGATTNICYNVLDRNVHEKKLGDKVAFYWEGNEPGETTQITYHQLLVQVCQFSNVLRKQ

SEQ ID NO: 16723 - protein, 309 aa, Homo sapiens
MVCWQSVSVWSVAGRVEMTVSKFMAIQKALQPDWFQCLSDGEVSCKEATSIKRVRKSVDRSLLFLDNCLRLQEESEVLQKSVIIGVIEGGDVMEERLRSARETAKRPVGGFLLDGFQGNPTTLEARLRLLSSVTAELPEDKPRLISGVSRPDEVLECIERGVDLFESFFPYQVTERGCALTFSFDYQPNPEETLLQQNGTQEEIKCMDQIKKIETTGCNQEITSFEINLKEKKYQEDFNPLVRGCSCYCCKNHTRAYIHHLLVTNELLAGVLLMMHNFEHYFGFFHYIREALKSDKLAQLKELIHRQAS

SEQ ID NO: 16724 - protein, 447 aa, Homo sapiens
MMLSRAKPAVGRGVQHTDKRKKKGRKIPKLEELLSKRDFTGAITLLEFKRHVGEEEEDTNLWIGYCAFHLGDYKRALEEYENATKEENCNSEVWVNLACTYFFLGMYKQAEAAGFKASKSRLQNRLLFHLAHKAELKSLMDNASSSFEFAKELIRHNLVVFRGGEGALQVLPPLVDVIPEARLNLVIYYLRQDVQEAYNLIKDLEPTTPQEYILKGVVNAALGQEMGSRDHMKIAQQFFQLVGGSASECDTIPGRQCMASCFFLLKQFDDVLIYLNSFKSYFYNDDIFNFNYAQAKAATGNTSEGEEAFLLIQSEKMKNDYIYLSWLARCYIMNKKPRLAWELYLKMETSGESFSLLQLIANDCYKMGQFYYSAKAFDVLERLDPNPEYWEGKRGACVGIFQMIIAGREPKETLREVLHLLRSTGNTQVEYMIRIMKKWAKENRVSI

SEQ ID NO: 16725 - protein, 918 aa, Homo sapiens
MDCQLSILLLLSCSVLDSFGELIPQPSNEVNLLDSKTIQGELGWISYPSHGWEEISGVDEHYTPIRTYQVCNVMDHSQNNWLRTNWVPRNSAQKIYVELKFTLRDCNSIPLVLGTCKETFNLYYMESDDDHGVKFREHQFTKIDTIAADESFTQMDLGDRILKLNTEIREVGPVNKKGFYLAFQDVGACVALVSVRVYFKKCPFTVKNLAMFPDTVPMDSQSLVEVRGSCVNNSKEEDPPRMYCSTEGEWLVPIGKCSCNAGYEERGFMCQACRPGFYKALDGNMKCAKCPPHSSTQEDGSMNCRCENNYFRADKDPPSMACTRPPSSPRNVISNINETSVILDWSWPLDTGGRKDVTFNIICKKCGWNIKQCEPCSPNVRFLPRQFGLTNTTVTVTDLLAHTNYTFEIDAVNGVSELSSPPRQFAAVSITTNQAAPSPVLTIKKDRTSRNSISLSWQEPEHPNGIILDYEVKYYEKQEQETSYTILRARGTNVTISSLKPDTIYVFQIRARTAAGYGTNSRKFEFETSPDSFSISGESSQVVMIAISAAVAIILLTVVIYVLIGRFCGYKSKHGADEKRLHFGNGHLKLPGLRTYVDPHTYEDPTQAVHEFAKELDATNISIDKVVGAGEFGEVCSGRLKLPSKKEISVAIKTLKVGYTEKQRRDFLGEASIMGQFDHPNIIRLEGVVTKSKPVMIVTEYMENGSLDSFLRKHDAQFTVIQLVGMLRGIASGMKYLSDMGYVHRDLAARNILINSNLVCKVSDFGLSRVLEDDPEAAYTTRGGKIPIRWTSPEAIAYRKFTSASDVWSYGIVLWEVMSYGERPYWEMSNQDVIKAVDEGYRLPPPMDCPAALYQLMLDCWQKDRNNRPKFEQIVSILDKLIRNPGSLKIITSAAARPSNLLLDQSNVDITTFRTTVT

SEQ ID NO: 16726 - protein, 553 aa, Homo sapiens
MMKYYDLAKFTIYQIAEMDKGLSELSPMQQALIYSFCENHDKAIEVLDGISWNRAEMTMCALLAKVQMKAKRTKEAVEVLKKALDAISHSDKGPDATAISADCLYNLGLCYMEEGNLQMAFDSFTKAVKANPDFAESFYQRGLCKVKLHKDSSILDFNRAITLNPKHYQAYLSRVAFYGLKGRYSKAILNCNKAIKIYPESVRAYLYRGVLKYYNKTYKLAITDLTTAISMDKNSYTAFYNRALCYTKIRELQMALTDYGIVLLLDATETVKLNTFLNRGLIYVELGQYGFALEDFKQAALISRTNGSLCHATAMCHHRINEFEEAVNFFTWALKINPCFLDAYVGRGNSYMEYGHDEATKQAQKDFLKALHINPAYIKARISFGYNLQAQGKFQKAWNHFTIAIDTDPKNYLAYEGRAVVCLQMGNNFAAMQDINAAMKISTTAEFLTNRGVIHEFMGHKQNAMKDYQDAITLNPKYSLAYFNAGNIYFHHRQFSQEESLGLAWSLSLDSFLRTGGATFSSGVNPLQTLHRRMSILSPLPPTCPRDEMDFTS

SEQ ID NO: 16727 - protein, 20 aa, Homo sapiens
YYYYYYMDVWGKGTTVTVSS

SEQ ID NO: 16728 - protein, 570 aa, Homo sapiens
MESKGASSCRLLFCLLISATVFRPGLGWYTVNSAYGDTIIIPCRLDVPQNLMFGKWKYEKPDGSPVFIAFRSSTKKSVQYDDVPEYKDRLNLSENYTLSISNARISDEKRFVCMLVTEDNVFEAPTIVKVFKQPSKPEIVSKALFLETEQLKKLGDCISEDSYPDGNITWYRNGKVLHPLEGAVVIIFKKEMDPVTQLYTMTSTLEYKTTKADIQMPFTCSVTYYGPSGQKTIHSEQAVFDIYYPTEQVTIQVLPPKNAIKEGDNITLKCLGNGNPPPEEFLFYLPGQPEGIRSSNTYTLTDVRRNATGDYKCSLIDKKSMIASTAITVHYLDLSLNPSGEVTRQIGDALPVSCTISASRNATVVWMKDNIRLRSSPSFSSLHYQDAGNYVCETALQEVEGLKKRESLTLIVEGKPQIKMTKKTDPSGLSKTIICHVEGFPKPAIQWTITGSGSVINQTEESPYINGRYYSKIIISPEENVTLTCTAENQLERTVNSLNVSANENREKVNDQAKLIVGIVVGLLLAALVAGVVYWLYMKKSKTASKHVNKDLGNMEENKKLEENNHKTEA

SEQ ID NO: 16729 - protein, 376 aa, Homo sapiens
MASSGGELGSLFDHHVQRAVCDTRAKYREGRRPRAVKVYTINLESQYLLIQGVPAVGVMKELVERFALYGAIEQYNALDEYPAEDFTEVYLIKFMNLQSARTAKRKMDEQSFFGGLLHVCYAPEFETVEETRKKLQMRKAYVVKTTENKDHYVTKKKLVTEHKDTEDFRQDFHSEMSGFCKAALNTSAGNSNPYLPYSCELPLCYFSSKCMCSSGGPVDRAPDSSKDGRNHHKTMGHYNHNDSLRKTQINSLKNSVACPGAQKAITSSEAVDRFMPRTTQLQERKRRREDDRKLGTFLQTNPTGNEIMIGPLLPDISKVDMHDDSLNTTANLIRHKLKEVRLFLKNYSKTRFGYRIKWRIICGNNSTVIFFHFLVF

SEQ ID NO: 16730 - protein, 92 aa, Homo sapiens
METLPGLLQRPDPGALSAAQLEQLRKFKIQTRIANEKYLRTHKEVEWLISGFFREIFLKRPDNILEFAADYFTDPRLPNKIHMQLIKDKKAA

SEQ ID NO: 16731 - protein, 133 aa, Homo sapiens
TSSQNRPRADPGIQRQDPSGAAFQKPVGADVSLGLVPKEELSTQSLEPVSLGDPNCKIDLSFLIDGSTSIGKRRFRIQKQLLADVAQALDIGPAGPLMGVVQYGPLHWYWKNSPGNGEEWVGRETAPISQLST

SEQ ID NO: 16732 - protein, 157 aa, Homo sapiens
MDTIFLWSLLLLFFGSQASRCSAQKNTEFAVDLYQEVSLSHKDNIIFSPLGITLVLEMVQLGAKGKAQQQIRQTLKQQETSAEKKQEFTFNLANALYLQEGFTVKEQYLHGNKEFFQSAIKLVDFQDAKACAEMISTWVERKTDGKIKDMFSGEEFG

SEQ ID NO: 16733 - protein, 778 aa, Homo sapiens
MIATWMLFSLFTKPPQLSEDDIWLKSEGDNYSATLLEPAASSLSPDHKNMEIEVSVAECKSVPGITSTPHPMDHPSAFYSPPHNGLLTDHHESLDNDVAREIRYLDEVLEANCCDSAVDGTYNGTSSPEPGAVVLVGGLSPPVHEATQPEPTERTASRQAPPHIELSNSSPDPMAEAERTNGHSPSQPRDALGDSLQVPVSPSSTTSSRCSSRDGEFTLTTLKKEAKFELRAFHEDKKPSKLFEDDEHEKEQYCIRKVRPSEEMLELEKERRELIRSQAVKKNPGIAAKWWNPPQEKTIEEQLDEEHLESHKKYKERKERRAQQEQLLLQKQLQQQQQQPPSQLCTAPASSHERASMIDKAKEDIVTEQIDFSAARKQFQLMENSRQAVAKGQSTPRLFSIKPFYRPLGSVNSDKPLTNPRPPSVGGPPEDSGASAAKGQKSPGALETPSAAGSQGNTASQGKEGPYSEPSKRGPLSKLWAEDGEFTSARAVLTVVKDDDHGILDQFSRSVNVSLTQEELDSGLDELSVRSQDTTVLETLSNDFSMDNISDSGASNETTNALQENSLADFSLPQTPQTDNPSEGRGEGVSKSFSDHGFYSPSSTLGDSPLVDDPLEYQAGLLVQNAIQQAIAEQVDKAVSKTSRDGAEQQGPEATVEEAEAAAFGSEKPQSMFEPPQVSSPVQEKRDVLPKILPAEDRALRERGPPQPLPAVQPSGPINMEETRPEGSYFSKYSEAAELRSTASLLATQESDVMVGPFKLRSRKQRTLSMIEEEIRAA

SEQ ID NO: 16734 - protein, 649 aa, Homo sapiens
MDLSALRVEEVQNVINAMQKILECPICLELIKEPVSTKCDHIFCKFCMLKLLNQKKGPSQCPLCKNDITKRSLQESTRFSQLVEELLKIICAFQLDTGLEYANSYNFAKKENNSPEHLKDEVSIIQSMGYRNRAKRLLQSEPENPSLQETSLSVQLSNLGTVRTLRTKQRIQPQKTSVYIELGSDSSEDTVNKATYCSVGDQELLQITPQGTRDEISLDSAKKAACEFSETDVTNTEHHQPSNNDLNTTEKRAAERHPEKYQGSSVSNLHVEPCGTNTHASSLQHENSSLLLTKDRMNVEKAEFCNKSKQPGLARSQHNRWAGSKETCNDRRTPSTEKKVDLNADPLCERKEWNKQKLPCSENPRDTEDVPWITLNSSIQKVNEWFSRSDELLGSDDSHDGESESNAKVADVLDVLNEVDEYSGSSEKIDLLASDPHEALICKSERVHSKSVESNIEDKIFGKTYRKKASLPNLSHVTENLIIGAFVTEPQIIQERPLTNKLKRKRRPTSGLHPEDFIKKADLAVQKTPEMINQGTNQTEQNGQVMNITNSGHENKTKGDSIQNEKNPNPIESLEKESAFKTKAEPISSSISNMELELNIHNSKAPKKNRLRRKSSTRHIHALELVVSRNLSPPNCTELQIDSCSSSEE

SEQ ID NO: 16735 - protein, 646 aa, Homo sapiens
MREPEELMPDSGAVFTFGKSKFAENNPGKFWFKNDVPVHLSCGDEHSAVVTGNNKLYMFGSNNWGQLGLGSKSAISKPTCVKALKPEKVKLAACGRNHTLVSTEGGNVYATGGNNEGQLGLGDTEERNTFHVISFFTSEHKIKQLSAGSNTSAALTEDGRLFMWGDNSEGQIGLKNVSNVCVPQQVTIGKPVSWISCGYYHSAFVTTDGELYVFGEPENGKLGLPNQLLGNHRTPQLVSEIPEKVIQVACGGEHTVVLTENAVYTFGLGQFGQLGLGTFLFETSEPKVIENIRDQTISYISCGENHTALITDIGLMYTFGDGRHGKLGLGLENFTNHFIPTLCSNFLRFIVKLVACGGCHMVVFAAPHRGVAKEIEFDEINDTCLSVATFLPYSSLTSGNVLQRTLSARMRRRERERSPDSFSMRRTLPPIEGTLGLSACFLPNSVFPRCSERNLQESVLSEQDLMQPEEPDYLLDEMTKEAEIDNSSTVESLGETTDILNMTHIMSLNSNEKSLKLSPVQKQKKQQTIGELTQDTALTENDDSDEYEEMSEMKEGKACKQHVSQGIFMTQPATTIEAFSDEEVEIPEEKEGAEDSKGNGIEEQEVEANEENVKVHGGRKEKTEILSDDLTDKAEYSASHSQIVSV

SEQ ID NO: 16736 - protein, 554 aa, Homo sapiens
MMLSRAKPAVGRGVQHTDKRKKKGRKIPKLEELLSKRDFTGAITLLEFKRHVGEEEEDTNLWIGYCAFHLGDYKRALEEYENATKEENCNSEVWVNLACTYFFLGMYKQAEAAGFKASKSRLQNRLLFHLAHKFNDEKKLMSFHQNLQDVTEDQLSLASIHYMRSHYQEAIDIYKRILLDNREYLALNVYVALCYYKLDYYDVSQEVLAVYLQQIPDSTIALNLKACNHFRLYNGRAAEAELKSLMDNASSSFEFAKELIRHNLVVFRGGEGALQVLPPLVDVIPEARLNLVIYYLRQDDVQEAYNLIKDLEPTTPQEYILKGVVNAALGQEMGSRDHMKIAQQFFQLVGGSASECDTIPGRQCMASCFFLLKQFDDVLIYLNSFKSYFYNDDIFNFNYAQAKAATGNTSEGEEAFLLIQSEKMKNDYIYLSWLARCYIMNKKPRLAWELYLKMETSGESFSLLQLIANDCYKMGQFYYSAKAFDVLERLDPNPEYWEGKRGACVGIFQMIIAGREPKETLREVLHLLRSTGNTQVEYMIRIMKKWAKENRVSI

SEQ ID NO: 16737 - protein, 429 aa, Homo sapiens
MARHGCLGLGLFCCVLFAATVGPQPTPSIPGAPATTLTPVPQSEASMLSLNLGLNFKFHLRGPAAVWGSPVTETQPLSLGPGQEPGEEVASGLRTDPLWELLVGSSGNSLTEWGSTEGGSKPRASSLLPESTSRRSGPSDGPTAPYQPRRSTVTWDTALMVTALPSSAPRPHQSELELKFDMALRAGAAPTLGHRTLPLLPSLRASLAEIAGRLGPFGFFGTTLSPLRNFSGLSPPGETTSTSSASGVSGSLGFLGTTLSLPPYSLERKLSSPSPLDPAASLSFASIATTSLDPTVPISGPDDLSPPASLGNPSGQPECGPGSCSVGELPEREGQPPEAPRPLFFLTLEADWAEARARWGLAWEAHVYGRLHRGLPPALPNQPATQHRGGPLQRGPACAWPLPGPCLRGRSAWARTLPHRLAGDRGQGQ

SEQ ID NO: 16738 - protein, 359 aa, Homo sapiens
MAGHLASDFAFSPPPGGGGDGPWGAEPGWVDPLTWLSFQGPPGGPGIGPGVGPGSEVWGIPPCPPPYELCGGMAYCGPQVGVGLVPQGGLETSQPESEAGVGVESNSNGASPEPCTVPPGAVKLEKEKLEQNPEKSQDIKALQKELEQFAKLLKQKRITLGYTQADVGLILGVLFGKVFSQKTICRFEALQLSFKNMCKLRPLLQKWVEEADNNENLQEICKAETLMQARKRKRTSIENRVRGNLENLFLQCPKPTLQISHIAQQLGLEKDVVRVWFCNRRQKGKRSSSDYAQREDFEAAGSPFSGGPVSFPPAPGPHFGTPGYGSPHFTALYSSVPFPEGEVFPPVSVITLGSPMHSN

SEQ ID NO: 16739 - protein, 1273 aa, Homo sapiens
MAMGDDKSFDDEESVDGNRPSSAASAFKVPAPKTSGNPANSARKPGSAGGPKVGGASKEGGAGAVDEDDFIKAFTDVPSIQIYSSRELEETLNKIREILSDDKHDWDQRANALKKIRSLLVAGAAQYDCFFQHLRLLDGALKLSAKDLRSQVVREACITVAHLSTVLGNKFDHGAEAIVPTLFNLVPNSAKVMATSGCAAIRFIIRHTHVPRLIPLITSNCTSKSVPVRRRSFEFLDLLLQEWQTHSLERHAAVLVETIKKGIHDADAEARVEARKTYMGLRNHFPGEAETLYNSLEPSYQKSLQTYLKSSGSVASLPQSDRSSSSSQESLNRPFSSKWSTANPSTVAGRVSAGSSKASSLPGSLQRSRSDIDVNAAAGAKAHHAAGQSVRSGRLGAGALNAGSYASLEDTSDKLDGTASEDGRVRAKLSAPLAGMGNAKADSRGRSRTKMVSQSQPGSRSGSPGRVLTTTALSTVSSGVQRVLVNSASAQKRSKIPRSQGCSREASPSRLSVARSSRIPRPSVSQGCSREASRESSRDTSPVRSFQPLGPGYGISQSSRLSSSVSAMRVLNTGSDVEEAVADALKKPARRRYESYGMHSDDDANSDASSACSERSYSSRNGSIPTYMRQTEDVAEVLNRCASSNWSERKEGLLGLQNLLKNQRTLSRVELKRLCEIFTRMFADPHGKRVFSMFLETLVDFIQVHKDDLQDWLFVLLTQLLKKMGADLLGSVQAKVQKALDVTRESFPNDLQFNILMRFTVDQTQTPSLKVKVAILKYIETLAKQMDPGDFINSSETRLAVSRVITWTTEPKSSDVRKAAQSVLISLFELNTPEFTMLLGALPKTFQDGATKLLHNHLRNTGNGTQSSMGSPLTRPTPRSPANWSSPLTSPTNTSQNTLSPSAFDYDTENMNSEDIYSSLRGVTEAIQNFSFRSQEDMNEPLKRDSKKDDGDSMCGGPGMSDPRAGGDATDSSQTALDNKASLLHSMPTHSSPRSRDYNPYNYSDSISPFNKSALKEAMFDDDADQFPDDLSLDHSDLVAELLKELSNHNERVEERKIALYELMKLTQEESFSVWDEHFKTILLLLLETLGDKEPTIRALALKVLREILRHQPARFKNYAELTVMKTLEAHKDPHKEVVRSAEEAASVLATSISPEQCIKVLCPIIQTADYPINLAAIKMQTKVIERVSKETLNLLLPEIMPGLIQGYDNSESSVRKACVFCLVAVHAVIGDELKPHLSQLTGSKMKLLNLYIKRAQTGSGGADPTTDVSGQS

SEQ ID NO: 16740 - protein, 220 aa, Homo sapiens
MAVFLQLLPLLLSRAQGNPGASLDGRPGDRVNLSCGGVSHPIRWVWAPSFPACKGLSKGRRPILWASSSGTPTVPPLQPFVGRLRSLDSGIRRLELLLSAGDSGTFFCKGRHEDESRTVLHVLGDRTYCKAPGPTHGSVYPQLLIPLLGAGLVLGLGALGLVWWLHRRLPPQPIRPLPRFAPLVKTEPQRPVKEEEPKIPGDLDQEPVRAWGWEGDSQNL

SEQ ID NO: 16741 - protein, 793 aa, Homo sapiens
MMAALYPSTDLSGASSSSLPSSPSSSSPNEVMALKDVREVKEENTLNEKLFLLACDKGDYYMVKKILEENSSGDLNINCVDVLGRNAVTITIENENLDILQLLLDYGCQSADALLVAIDSEVVGAVDILLNHRPKRSSRPTIVKLMERIQNPEYSTTMDVAPVILAAHRNNYEILTMLLKQDVSLPKPHAVGCECTLCSAKNKKDSLRHSRFRLDIYRCLASPALIMLTEEDPILRAFELSADLKELSLVEVEFRNDYEELARQCKMFAKDLLAQARNSRELEVILNHTSSDEPLDKRGLLEERMNLSRLKLAIKYNQKEFVSQSNCQQFLNTVWFGQMSGYRRKPTCKKIMTVLTVGIFWPVLSLCYLIAPKSQFGRIIHTPFMKFIIHGASYFTFLLLLNLYSLVYNEDKKNTMGPALERIDYLLILWIIGMIWSDIKRLWYEGLEDFLEESRNQLSFVMNSLYLATFALKVVAHNKFHDFADRKDWDAFHPTLVAEGLFAFANVLSYLRLFFMYTTSSILGPLQISMGQMLQDFGKFLGMFLLVLFSFTIGLTQLYDKGYTSKEQKDCVGIFCEQQSNDTFHSFIGTCFALFWYIFSLAHVAIFVTRFSYGEELQSFVGAVIVGTYNVVVVIVLTKLLVAMLHKSFQLIANHEDKEWKFARAKLWLSYFDDKCTLPPPFNIIPSPKTICYMISSLSKWICSHTSKGKVKRQNSLKEWRNLKQKRDENYQKVMCCLVHRYLTSMRQKMQSTDQATVENLNELRQDLSKFRNEIRDLLGFRTSKYAMFYPRN

SEQ ID NO: 16742 - protein, 440 aa, Homo sapiens
MASPVAAQAGKLLRALALRPRFLAAGSQAVQLTSRRWLNLQEYQSKKLMSDNGVRVQRFFVADTANEALEAAKRLNAKEIVLKAQILAGGRGKGVFNSGLKGGVHLTKDPNVVGQLAKQMIGYNLATKQTPKEGVKVNKVMVAEALDISRETYLAILMDRSCNGPVLVGSPQGGVDIEEVAASNPELIFKEQIDIFEGIKDSQAQRMAENLGFVGPLKSQAADQITKLYNLFLKIDATQVEVNPFGETPEGQVVCFDAKINFDDNAEFRQKDIFAMDDKSENEPIENEAAKYDLKYIGLDGNIACFVNGAGLAMATCDIIFLNGGKPANFLDLGGGVKEAQVYQAFKLLTADPKVEAILVNIFGGIVNCAIIANGITKACRELELKVPLVVRLEGTFMEKKGSYMHIKQETGNSNENITGIQENVAHQNLSKCAISIFLC

SEQ ID NO: 16743 - protein, 775 aa, Homo sapiens
MSWFNASQLSSFAKQALSQAQKSIDRVLDIQEEEPSIWAETIPYGEPGISSPVSGGWDTSTWGLKSNTEPQSPPIASPKAITKPVRRTVVDESENFFSAFLSPTDVQTIQKSPVVSKPPAKSQRPEEEVKSSLHESLHIGQSRTPETTESQVKDSSLCVSGETLAAGTSSPKTEGKHEETVNKESDMKVPTVSLKVSESVIDVKTTMESISNTSTQSLTAETKDIALEPKEQKHEDRQSNTPSPPVSTFSSGTSTTSDIEVLDHESVISESSASSRQETTDSKSSLHLMQTSFQLLSASACPEYNRLDDFQKLTESCCSSDAFERIDSFSVQSLDSRSVSEINSDDELSGKGYALVPIIVNSSTPKSKTVESAEGKSEEVNETLVIPTEEAEMEESGRSATPVNCEQPDILVSSTPINEGQTVLDKVAEQCEPAESQPEALSEKEDVCKTVEFLNEKLEKREAQLLSLSKEKALLEEAFDNLKDEMFRVKEESSSISSLKDEFTQRIAEAEKKVQLACKERDAAKKEIKNIKEELATRLNSSETADLLKEKDEQIRGLMEEGEKLSKQQLHNSNIIKKLRAKDKENENMVAKLNKKVKELEEELQHLKQVLDGKEEVEKQHRENIKKLNSMVERQEKDLGRLQVDMDELEEKNRSIQAALDSAYKELTDLHKANAAKDSEAQEAALSREMKAKEELSAALEKAQEEARQQQETLAIQVGDLRLALQRTEQAAARKEDYLRHEIGELQQLRENVQLQKNSLLTKFRCLPWSHRILF

SEQ ID NO: 16744 - protein, 517 aa, Homo sapiens
RKWSRQFLLSFWCTVCSAHQGTIFLSLKIQFADQKQEFNKRPTKIGRRSLSRSISQSSTDSYSSAASYTDSSDDETSPRDKQQKNSKGSSDFCVKNIKQAEFGRREIEIAEQEMPALMALRKRAQGEKPLAGAKIVGCTHITAQTAVLMETLGALGAQCRWAACNIYSTLNEVAAALAESGFPVFAWKGESEDDFWWCIDRCVNVEGWQPNMILDDGGDLTHWIYKKYPNMFKKIKGIVEESVTGVHRLYQLSKAGKLCVPAMNVNDSVTKQKFDNLYCCRESILDGLKRTTDMMFGGKQVVVCGYGEVGKGCCAALKAMGSIVYVTEIDPICALQACMDGFRLVKLNEVIRQVDIVITCTGNKNVVTREHLDRMKNSCIVCNMGHSNTEIDVASLRTPELTWERVRSQVDHVIWPDGKRIVLLAEGRLLNLSCSTVPTFVLSITATTQALALIELYNAPEGRYKQDVYLLPKKMDEYVASLHLPTFDAHLTELTDEQAKYLGLNKNGPFKPNYYRY

SEQ ID NO: 16745 - protein, 602 aa, Homo sapiens
MYQGHMQGKGSRAADKAVAMVMKEIPREESAEEKPLLTMTSQLVNEQQESRPLLSPSIDDFLCETKSEAIARPVTSNTAVLTTGLDLLDLSEPVSQTQTKAKKSEPSSKTSSLKKKADGSDLISTDAEQRGQPLRVPETSSLDLDIQTQLEKWDDVKFHGDRNTKGHPMAERKSSSSRTGSKELLWSSEHRSQPELSGGKSALNSESASELELVAPTQARLTKEHRWGSALLSRNHSLEEEFERAKAAVESDTEFWDKMQAEWEEMARRNWISENQEAQNQVTISASEKGYYFHTENPFKDWPGAFEEGLKRLKEGDLPVTILFMEAAILQDPGDAEAWQFLGITQAENENEQAAIVALQRCLELQPNNLKALMALAVSYTNTGHQQDACDALKNWIKQNPKYKYLVKSKKGSPGLTRRMSKSPVDSSVLEGVKELYLEAAHQNGDMIDPDLQTGLGVLFHLSGEFNRAIDAFNAALTVRPEDYSLWNRLGATLANGDRSEEAVEAYTRALEIQPGFIRSRYNLGISCINLGAYREAVSNFLTALSLQRKSRNQQQVPHPAISGNIWAALRIALSLMDQPELFQAANLGDLDVLLRAFNLDP

SEQ ID NO: 16746 - protein, 418 aa, Homo sapiens
MLENHILHKRIYILTFFSQQIFILCHAHFIFFFTVRDFCRQDEKCDYYFSVDADVVLTNPRTLKILIEQNRKIIAPLVTRHGKLWSNFWGALSPDGYYARSEDYVDIVQGNRVGVWNVPYMANVYLIKGKTLRSEMNERNYFVRDKLDPDMALCRNAREMTLQREKDSPTPETFQMLSPPKGVFMYISNRHEFGRLLSTANYNTSHYNNDLWQIFENPVDWKEKYINRDYSKIFTENIVEQPCPDVFWFPIFSEKACDELVEEMEHYGKWSGGKHHDSRISGGYENVPTDDIHMKQVDLENVWLHFIREFIAPVTLKVFAGYYTKGFALLNFVVKYSPERQRSLRPHHDASTFTINIALNNVGEDFQGGGCKFLRYNCSIESPRKGWSFMHPGRLTHLHEGLPVKNGTRYIAVSFIDP

SEQ ID NO: 16747 - protein, 174 aa, Homo sapiens
MLSSKGLTVVDVYQGWCGPCKPVVSLFQKMRIEVGLDLLHFALAEADRLDVLEKYRGKCEPTFLFYAIKDEALSDEDECVSHGKNNGEDEDMVSSERTCTLAIIKPDAVAHGKTDEIIMKIQEAGFEILTNEERTMTEAEVRLFYQHKAGESPSSVRHRNALQCRPWKPGQRRC

SEQ ID NO: 16748 - protein, 1261 aa, Homo sapiens
MSGSKSVSPPGYAAQKTAAPAPRGGPEHRSAWGEADSRANGYPHAPGGSARGSTKKPGGAVTPQQQQRLASRWRSDDDDDPPLSGDDPLAGGFGFSFRSKSAWQERGGDDCGRGSRRQRRGAASGGSTRAPPAGGGGGSAAAAASAGGTEVRPRSVEVGLEERRGKGRAADELEAGAVEGGEGSGDGGSSADSGSGAGPGAVLSLGACCLALLQIFRSKKFPSDKLERLYQRYFFRLNQSSLTMLMAVLVLVCLVMLAFHAARPPLQLPYLAVLAAAVGVILIMAVLCNRAAFHQDHMGLACYALIAVVLAVQVVGLLLPQPRSASEGIWWTVFFIYTIYTLLPVRMRAAVLSGVLLSALHLAIALRTNAQDQFLLKQLVSNVLIFSCTNIVGVCTHYPAEVSQRQAFQETRECIQARLHSQRENQQQERLLLSVLPRHVAMEMKADINAKQEDMMFHKIYIQKHDNVSILFADIEGFTSLASQCTAQELVMTLNELFARFDKLAAENHCLRIKILGDCYYCVSGLPEARADHAHCCVEMGMDMIEAISLVREVTGVNVNMRVGIHSGRVHCGVLGLRKWQFDVWSNDVTLANHMEAGGKAGRIHITKATLNYLNGDYEVEPGCGGERNAYLKEHSIETFLILRCTQKRKEEKAMIAKMNRQRTNSIGHNPPHWGAERPFYNHLGGNQVSKEMKRMGFEDPKDKNAQESANPEDEVDEFLGRAIDARSIDRLRSEHVRKFLLTFREPDLEKKYSKQVDDRFGAYVACASLVFLFICFVQITIVPHSIFMLSFYLTCSLLLTLVVFVSVIYSCVKLFPSPLQTLSRKIVRSKMNSTLVGVFTITLVFLAAFVNMFTCNSRDLLGCLAQEHNISASQVNACHVAESAVNYSLGDEQGFCGSPWPNCNFPEYFTYSVLLSLLACSVFLQISCIGKLVLMLAIELIYVLIVEVPGVTLFDNADLLVTANAIDFFNNGTSQCPEHATKVALKVVTPIIISVFVLALYLHAQQVESTARLDFLWKLQATEEKEEMEELQAYNRRLLHNILPKDVAAHFLARERRNDELYYQSCECVAVMFASIANFSEFYVELEANNEGVECLRLLNEIIADFDEIISEDRFRQLEKIKTIGSTYMAASGLNDSTYDKVGKTHIKALADFAMKLMDQMKYINEHSFNNFQMKIGLNIGPVVAGVIGARKPQYDIWGNTVNVASRMDSTGVPDRIQVTTDMYQVLAANTYQLECRGVVKVKGKGEMMTYFLNGGPPLS

SEQ ID NO: 16749 - protein, 517 aa, Homo sapiens
MSEMSIDRNIHRNLSPGIPVSVQTEESWLQDLSDKVQSRKKASKEKAEPECLASKLREKWVINPEESKLNILYELEFKEDFITLFEPSLRTLPSIGPPSILAYKEESSNLGINFKDEEEETSPKCEFCGSDLRAFFSNVDVSSEPKGHASCCIAFQNLIDYIYEEQIKTKPPKAELIAIDPHAAHGSEVDRLKAKEKALQRKQEQRMARHFAIISREQTHFSEDDSKRLKTISYQLSVDIPEKQIIDDIVFDFQLRNSNMSIICCDSRIACGKVVRNELLEKHYKHGSKFLTSFPDGTTQIFYPSGNLAIIRVPNKVNGFTCIVQEDMPTNPAILAVLDSSGRSSCYHPNGNVWVYINILGGQYSDQAGNRIRAWNWSNSITSSPFVSFKPVFLALNRYIGVRILEQDKISITFLAMGQQARISVGTKVKLPNPEEIPILRYVSGDDLLLLASLIKIRRLFHKLEGCVNFPSSQVWEKLKQPSYLSSLSLKLIALCHSSGIKQDIMKTIRNIINEEI

SEQ ID NO: 16750 - protein, 234 aa, Homo sapiens
MGPGGRVARLLAPLMWRRAVSSVAGSAVGAEPGLRLLAVQRLPVGAAFCRACQTPNFVRGLHSEPGLEERAEGTVNEGRPESDAADHTGPKFDIDMMVSLLRQENARDICVIQVPPEMRYTDYFVIVSGTSTRHLHAMAFYVVKMYKHLKCKRDPHVKIEGKDTDDWLCVDFGSMVIHLMLPETREIYELEKLWTLRSYDDQLAQIAPETVPEDFILGIEDDTSSVTPVELKCE

SEQ ID NO: 16751 - protein, 195 aa, Homo sapiens
MWHMTRNWPLVGKTSLITRFMYDSFDNTYQATIGIDFLSKTMYLEDRTVRLQLWDTAGQERFRSLIPSYIRDSTVAVVVYDITNLNSFQQTSKWIDDVRTERGSDVIIMLVGNKTDLADKRQITIEEGEQRAKELSVMFIETSAKTGYNVKQLFRRVASALPGMENVQEKSKEGMIDIKLDKPQEPPASEGGCSC

SEQ ID NO: 16752 - protein, 599 aa, Homo sapiens
LLVLGLLVAGAADGCELVPRHLRGRRATGSAATAASSPAAAAGDSPALMTDPCMSLSPPCFTEEDRFSLEALQTIHKQMDDDKDGGIEVEESDEFIREDMKYKDATNKHSHLHREDKHITIEDLWKRWKTSEVHNWTLEDTLQWLIEFVELPQYEKNFRDNNVKGTTLPRIAVHEPSFMISQLKISDRSHRQKLQLKALDVVLFGPLTRPPHNWMKDFILTVSIVIGVGGCWFAYTQNKTSKEHVAKMMKDLESLQTAEQSLMDLQERLEKAQEENRNVAVEKQNLERKMMDEINYAKEEACRLRELREGAECELSRRQYAEQELEQVRMALKKAEKEFELRSSWSVPDALQKWLQLTHEVEVQYYNIKRQNAEMQLAIAKDEAEKIKKKRSTVFGTLHVAHSSSLDEVDHKILEAKKALSELTTCLRERLFRWQQIEKICGFQIAHNSGLPSLTSSLYSDHSWVVMPRVSIPPYPIAGGVDDLDEDTPPIVSQFPGTMAKPPGSLARSSSLCRSRRSIVPSSPQPQRAQLAPHAPHPSHPRHPHHPQHTPHSLPSPDPDILSVSSCPALYRNEEEEEAIYFSAEKQCIHLGLGACKSE

SEQ ID NO: 16753 - protein, 312 aa, Homo sapiens
MAAFLKMSVSVNFFRPFTRFLVPFTLHRKRNNLTILQRYMSSKIPAVTYPKNESTPPSEELELDKWKTTMKSSVQEECVSTISSSKDEDPLAATREFIEMWRLLGREVPEHITEEELKTLMECVSNTAKKKYLKYLYTKEKVKKARQIKKEMKAAAREEAKNIKLLETTEEDKQKNFLFLRLWDRNMDIAMGWKGAQAMQFGQPLVFDMAYENYMKRKELQNTVSQLLESEGWNRRNVDPFHIYFCNLKIDGALHRELVKRYQEKWDKLLLTSTEKSHVDLFPKDSIIYLTADSPNVMTTFRHDKVYVIGSF

SEQ ID NO: 16754 - protein, 187 aa, Homo sapiens
MWCASPVAVVAFCAGLLVSHPVLTQGQEAGGRPGADCEVCKEFLNRFYKSLIDRGVNFSLDTIEKELISFCLDTKGKENRLCYYLGATKDAATKILSEVTRPMSVHMPAMKICEKLKKLDSQICELKYEKTLDLASVDLRKMRVAELKQILHSWGEECRACAEKTDYVNLIQELAPKYAATHPKTEL

SEQ ID NO: 16755 - protein, 699 aa, Homo sapiens
MNTFQASVSFQDVTVEFSQEEWQHMGPVERTLYRDVMLENYSHLVSVGYCFTKPELIFTLEQGEDPWLLEKEKGFLSRNSPEDSQPDEISEKSPENQGKHLLQVLFTNKLLTTEQEISGKPHNRDINIFRARMMPCKCDIAGSACQGLSLMAPHCQYSKEKAHERNVCDKWLISIKDGRTNTQEKSFAYSKIVKTLHHKEEVIQHQTIQTLGQDFEYNESRKAFLEKAALVTSNSTHPKGKSYNFNKFGENKYDKSTFIIPQNMNPEKSHYEFNDTGNCFCRITHKTLTGGKSFSQKSHIREHHRVHIGVKPFEYGKSFNRNSTLPVHQRTHATDKYSDYHPCTETFSYQSTFSVHQKVHIRAKPYEYNECGKSCSMNSHLIWPQKSHTGEKPYECPECGKAFSEKSRLRKHQRTHTGEKPYKCDGCDKAFSAKSGLRIHQRTHTGEKPFECHECGKSFNYKSILIVHQRTHTGEKPFECNECGKSFSHMSGLRNHRRTHTGERPYKCDECGKAFKLKSGLRKHHRTHTGEKPYKCNQCGKAFGQKSQLRGHHRIHTGEKPYKCNHCGEAFSQKSNLRVHHRTHTGEKPYQCEECGKTFRQKSNLRGHQRTHTGEKPYECNECGKAFSEKSVLRKHQRTHTGEKPYNCNQCGEAFSQKSNLRVHQRTHTGEKPYKCDKCGRTFSQKSSLREHQKAHPGD

SEQ ID NO: 16756 - protein, 127 aa, Homo sapiens
MKKFNFRKVLDGLTASSPGSGSSSGSNSGGGAGSGSVHPAGTAGVLREEIQETLTSEYFQICKTVRHGFPHQPTALAFDPVQKILAIGTRTGAIRILGRPGVDCYCQHESGAAVLQLQFLINEGALV

SEQ ID NO: 16757 - protein, 203 aa, Homo sapiens
MSDSEMDGRTHIPSLLNALLSRNRVMQMSYLKSKEQGYGKLSSDEDLEIIVDQKQGKGSRAADKAVAMVMKEIPREESAEEKPLLTMTSQLVNEQQESRPLLSPSIDDFLCETKSEAIARPVTSNTAVLTTGLDLLDLSEPVSQTQTKAKKSEPSSKTSSLKKKADGSDLISTDAEQRGQPLRVPETSSLDLDIQTQLEKWDD

SEQ ID NO: 16758 - protein, 269 aa, Homo sapiens
MIEDVQSLLDEEQEQMFAFRSRARSTDTFNYATYHTLEEIYDFLDLLVAENPHLVSKIQIGNTYEGRPIYVLKFSTGGSKRPAIWIDTGIHSREWVTQASGVWFAKKITQDYGQDAAFTAILDTLDIFLEIVTNPDGFAFTHSTNRMWRKTRSHTAGSLCIGVDPNRNWDAGFGLSGASSNPCSETYHGKFANSEVEVKSIVDFVKDHGNIKAFISIHSYSQLLMYPYGYKTEPVPDQDELDQLSKAAVTALASLYGTKFNYGSIIKAI

SEQ ID NO: 16759 - protein, 673 aa, Homo sapiens
MACLLETPIRMSVLSEVTASSRHYVDRLFDPDPQKVLQGVIDMKNAVIGNNKQKANLIVLGAVPRLLYLLQQETSSTELKTECAVVLGSLAMGTENNVKSLLDCHIIPALLQGLLSPDLKFIEACLRCLRTIFTSPVTPEELLYTDATVIPHLMALLSRSRYTQEYICQIFSHCCKGPDHQTILFNHGAVQNIAHLLTSLSYKVRMQALKCFSVLAFENPQVSMTLVNVLVDGELLPQIFVKMLQRDKPIEMQLTSAKCLTYMCRAGAIRTDDNCIVLKTLPCLVRMCSKERLLEERVEGAETLAYLIEPDVELQRIASITDHLIAMLADYFKYPSSVSAITDIKRLDHDLKHAHELRQAAFKLYASLGANDEDIRKKIIETENMMDRIVTGLSESSVKVRLAAVRCLHSLSRSVQQLRTSFQDHAVWKPLMKVLQNAPDEILVVASSMLCNLLLEFSPSKEPILESGAVELLCGLTQSENPALRVNGIWALMNMAFQAEQKIKADILRSLSTEQLFRLLSDSDLNVLMKTLGLLRNLLSTRPHIDKIMSTHGKQIMQAVTLILEGEHNIEVKEQTLCILANIADGTTAKDLIMTNDDILQKIKYYMGHSHVKLQLAAMFCISNLIWNEEEGSQERQDKLRDMGIVDILHKLSQSPDSNLCDKAKMALQQYLA

SEQ ID NO: 16760 - protein, 489 aa, Homo sapiens
YTRLTEYAKIEGPAEKETETMNQASPARKLEEILHLAELCIEVLQQNEEHHAEGREAFAWWPDLLAEHAEKFWALFTVDMDTALEAQPQDSWDSFPLFQLLNNFLRNDTLLCNGKFHKHLQEIFVPLVVRYVDLMESSIAQSIHRGFEQETWQPVKNIANSLPNVALPKVPSLPLNLPQIPNISTASWMPSLYESTNGSATSEDLFWKLDALQMFVFDLHWPEQEFAHHLEQRLKLMASDMLEACVKRTRTAFELKLQKASKTTDLRIPASVCTMFNVLVDAKKQSTKLCALDGGQEQQYHSKIDDLIDNSVKEIISLLVSKFVSVLEGVLSKLSRYDEGTFFSSILSFTVKAAAKYVDVPKPGMDLADTYIMFVRQNQDILREKVNEEMYIEKLFDQWYSSSMKVICVWLTDRLDLQLHIYQLKTLIKIVKKTYRDFRLQGVLEGTLNSKTYDTVHRRLTVEEATASVSEGGGLQGITMKDSDEEEEG

SEQ ID NO: 16761 - protein, 193 aa, Homo sapiens
YGLLQRRLENVENLLRNRNFWILRLPPGSKGEAPKVSRSLENDGVCFTEQEWENLEDWQKELYRNVMESNYETLVSLSSSDSPASASRVAEITEVLGQTEGEAELGTEMLGDLEEEGPGGAHPAGGVMIKQELQYTQEGPADLPGEFSCIAEEQAFLSPEQTELWGGQGSSVLLETGPGDSTLEEPVGSRVPS

SEQ ID NO: 16762 - protein, 1999 aa, Homo sapiens
MTHLNSLDVQLAQELGDFTDDDLDVVFTPKECRTLQPSLPEEGVELDPHVRDCVQTYIREWLIVNRKNQGSPEICGFKKTGSRKDFHKTLPKQTFESETLECSEPAAQAGPRHLNVLCDVSGKGPVTACDFDLRSLQPDKRLENLLQQVSAEDFEKQNEEARRTNRQAELFALYPSVDEEDAVEIRPVPECPKEHLGNRILVKLLTLKFEIEIEPLFASIALYDVKERKKISENFHCDLNSDQFKGFLRAHTPSVAASSQARSAVFSVTYPSSDIYLVVKIEKVLQQGEIGDCAEPYTVIKESDGGKSKEKIEKLKLQAESFCQRLGKYRMPFAWAPISLSSFFNVSTLEREVTDVDSVVGRSSVGERRTLAQSRRLSERALSLEENGVGSNFKTSTLSVSSFFKQEGDRLSDEDLFKFLADYKRSSSLQRRVKSIPGLLRLEISTAPEIINCCLTPEMLPVKPFPENRTRPHKEILEFPTREVYVPHTVYRNLLYVYPQRLNFVNKLASARNITIKIQFMCGEDASNAMPVIFGKSSGPEFLQEVYTAVTYHNKSPDFYEEVKIKLPAKLTVNHHLLFTFYHISCQQKQGASVETLLGYSWLPILLNERLQTGSYCLPVALEKLPPNYSMHSAEKVPLQNPPIKWAEGHKGVFNIEVQAVSSVHTQDNHLEKFFTLCHSLESQVTFPIRVLDQKISEMALEHELKLSIICLNSSRLEPLVLFLHLVLDKLFQLSVQPMVIAGQTANFSQFAFESVVAIANSLHNSKDLSKDQHGRNCLLASYVHYVFRLPEVQRDVPKSGAPTALLDPRSYHTYGRTSAAAVSSKLLQARVMSSSNPDLAGTHSAADEEVKNIMSSKHFHEELALQMVVSTGMVRETVFKYAWFFFELLVKSMAQHVHNMDKRDSFRRTRFSDRFMDDITTIVNVVTSEIAALLVKPQKENEQAEKMNISLAFFLYDLLSLMDRGFVFNLIRHYCSQLSAKLSNLPTLISMRLEFLRILCSHEHYLNLNLFFMNADTAPTSPCPSISSQNSSSCSSFQDQKIASMFDLTSEYRQQHFLTGLLFTELAAALDAEGEGISKVQRKAVSAIHSLLSSHDLDPRCVKPEVKVKIAALYLPLVGIILDALPQLCDFTVADTRRYRTSGSDEEQEGAGAINQNVALAIAGNNFNLKTSGIVLSSLPYKQYNMLNADTTRNLMICFLWIMKNADQSLIRKWIADLPSTQLNRILDLLFICVLCFEYKGKQSSDKVSTQVLQKSRDVKARLEEALLRGEGARGEMMRRRAPGNDRFPGLNENLRWKKEQTHWRQANEKLDKTKAELDQEALISGNLATEAHLIILDMQENIIQASSALDCKDSLLGGVLRVLVNSLNCDQSTTYLTHCFATLRALIAKFGDLLFEEEVEQCFDLCHQVLHHCSSSMDVTRSQACATLYLLMRFSFGATSNFARVKMQVTMSLASLVGRAPDFNEEHLRRSLRTILAYSEEDTAMQMTPFPTQVEELLCNLNSILYDTVKMREFQEDPEMLMDLMYRIAKSYQASPDLRLTWLQNMAEKHTKKKCYTEAAMCLVHAAALVAEYLSMLEDHSYLPVGSVSFQNISSNVLEESVVSEDTLSPDEDGVCAGQYFTESGLVGLLEQAAELFSTGGLYETVNEVYKLVIPILEAHREFRKLTLTHSKLQRAFDSIVNKDHKRMFGTYFRVGFFGSKFGDLDEQEFVYKEPAITKLPEISHRLEAFYGQCFGAEFVEVIKDSTPVDKTKLDPNKAYIQITFVEPYFDEYEMKDRVTYFEKNFNLRRFMYTTPFTLEGRPRGELHEQYRRNTVLTTMHAFPYIKTRISVIQKEEFVLTPIEVAIEDMKKKTLQLAVAINQEPPDAKMLQMVLQGSVGATVNQGPLEVAQVFLAEIPADPKLYRHHNKLRLCFKEFIMRCGEAVEKNKRLITADQREYQQELKKNYNKLKENLRPMIERKIPELYKPIFRVESQKRDSFHRSSFRKCETQLSQGS

SEQ ID NO: 16763 - protein, 819 aa, Homo sapiens
MGSGARFPSGTLRVRWLLLLGLVGPVLGAARPGFQQTSHLSSYEIITPWRLTRERREAPRPYSKQVSYVIQAEGKEHIIHLERNKDLLPEDFVVYTYNKEGTLITDHPNIQNHCHYRGYVEGVHNSSIALSDCFGLRGLLHLENASYGIEPLQNSSHFEHIIYRMDDVYKEPLKCGVSNKDIEKETAKDEEEEPPSMTQLLRRRRAVLPQTRYVELFIVVDKERYDMMGRNQTAVREEMILLANYLDSMYIMLNIRIVLVGLEIWTNGNLINIVGGAGDVLGNFVQWREKFLITRRRHDSAQLVLKKGFGGTAGMAFVGTVCSRSHAGGINVFGQITVETFASIVAHELGHNLGMNHDDGRDCSCGAKSCIMNSGASGSRNFSSCSAEDFEKLTLNKGGNCLLNIPKPDEAYSAPSCGNKLVDAGEECDCGTPKECELDPCCEGSTCKLKSFAECAYGDCCKDCRFLPGGTLCRGKTSECDVPEYCNGSSQFCQPDVFIQNGYPCQNNKAYCYNGMCQYYDAQCQVIFGSKAKAAPKDCFIEVNSKGDRFGNCGFSGNEYKKCATGNALCGKLQCENVQEIPVFGIVPAIIQTPSRGTKCWGVDFQLGSDVPDPGMVNEGTKCGAGKICRNFQCVDASVLNYDCDVQKKCHGHGVCNSNKNCHCENGWAPPNCETKGYGGSVDSGPTYNEMNTALRDGLLVFFFLIVPLIVCAIFIFIKRDQLWRSYFRKKRSQTYESDGKNQANPSRQPGSVPRHVSPVTPPREVPIYANRFAVPTYAAKQPQQFPSRPPPPQPKVSSQGNLIPARPAPAPPLYSSLT

SEQ ID NO: 16764 - protein, 691 aa, Homo sapiens
MALLLTLTSPDLEGTWDTRDKDGFKAQEGPPLAVPEFPVCGLYRIYGVCGSFSSFFIIRCSLCALETLKSPQHDPLEIPEQSLKLIPLVSGKRELTRGQKAGEKPLAAGPGEEELLRGSAPHAQDTQSEELPPSCTISGEKKPPAVSGEATGADAGRLCPPPRSRAPHKDRTLARSRPQTQGEDCSLPVGEVKIGKRSYSPAPGKQKKPNAMGLAPTSSPGAPNSARATHNPVPCGSGRGPCHLANLLSTLAQSNQNRDHKQGPPEVTCQIRKKTRTLYRSDQLEELEKIFQEDHYPDSDKRREIAQTVGVTPQRIMVKGAGSLVAGWSGGGPTIETLELQSERSAVAWVWFQNRRAKWRKMEKLNGKESKDNPAAPGPASSQCSSAAEILPAVPMEPKPDPFPQESPLDTFPEPPMLLTSDQTLAPTQPSEGAQRVVTPPLFSPPPVRRADLPFPLGPVHTPQLMPLLMDVAGSDSSHKDGPCGSWGTSITLPPPCSYLEELEPQDYQQSNQPGPFQFSQAPQPPLFQSPQPKLPYLPTFPFSMPSSLTLPPPEDSLFMFPCGPSGGTSQGYCPGASSGQILMQPPAGNIGTASWSDPCLPELPFPGPFCPQALGHPPGGDGYFPDLFPTPCPQALGRQPSSALSWMPEGARPGTGPLLSKAKEEPPAASLDQPSALEEARGDDKNSHVP

SEQ ID NO: 16765 - protein, 363 aa, Homo sapiens
YEGYDSTANPTVSNVFSTAAFRFGHATIHPLVRRLDASFQEHPDLPGLWLHQAFFSPWTLLRGGYNEWREFCGLPRLETPADLSTAIASRSVADKILDLYKHPDNIDVWLGGLAENFLPRARTGPLFACLIGKQMKALRDGDWFWWENSHVFTDAQRRELEKHSLSRVICDNTGLTRVPMDAFQVGKFPEDFESCDSITGMNLEAWRETFPQDDKCGFPESVENGDFVHCEESGRRVLVYSCRHGYELQGREQLTCTQEGWDFQPPLCKDSGRLPRVTWISMSLAALLIGGFAGLTSTVICRWTRTGTKSTLPISETGGGTPELRCGKHQAVGTSPQRAAAQDSEQESAGMEGRDTHRLPRAL

SEQ ID NO: 16766 - protein, 795 aa, Homo sapiens
MDMFSLDMIISDPAAEASRAGKKQLRGVQNPCPSARARPRHKSLNIKDKISEWEGKKEVPTPAPSRRADGQEDYLPSSTVERRSSDGVRTQVTEAKNGMRPGTESTEKERNKGAVNVGGQDPEPGQDLSQPEREVDPSWGRGREPRLGKLRFQNDPLSVLKQVKKLEQALKDGSAGLDPQLPGTCYSPHCPPDKAEAGSTLPENLGGGSGSEVSQRVHPSDLEGREPTPELVEDRKGSCRRPWDRSLENVYRGSEGSPTKPFINPLPKPRRTFKHAGEGDKDGKPGIGFRKEKRNLPPLPSLPPPPLPSSPPPSSVNRRLWTGRQKSSADHRKSYEFEDLLQSSSESSRVDWYAQTKLGLTRTLSEENVYEDILDPPMKENPYEDIELHGRCLGKKCVLNFPASPTSSIPDTLTKQSLSKPAFFRQNSERRNFKLLDTRKLSRDGTGSPSKISPPSTPSSPDDIFFNLGDPQNGRKKRKIPKLVLRINAIYEVRRGKKRVKRLSQSMESNSGKVTDENSESDSDTEEKLKAHSQRLVNVKSRLKQAPRYPSLARELIEYQERQLFEYFVVVSLHKKQAGAAYVPELTQQFPLKLERSFKFMREAEDQLKAIPQFCFPDAKDWVPVQQFTSETFSFVLTGEDGSRRFGYCRRLLPGGKGKRLPEVYCIVSRLGCFSLFSRILDEVEKRRGISPALVQPLMRSVMEAPFPALGKTILVKNFLPGSGTEVIELCRPLDSRLEHVDFESLFSSLSVRHLVCVFASLLLERRVIFIADKLRYPPWLLLLKRLNDSRSWTL

SEQ ID NO: 16767 - protein, 373 aa, Homo sapiens
MAAEQGQILVIATAAVGGFTLLVILTLFFLITGRCQWYIKAKMKSEEKRRNHLQNGHLRFPGIKTYIDPDTYEDPSLAVHEFAKEIDPSRIRIERVIGAGEFGEVCSGRLKTPGKREIPVAIKTLKGGHMDRQRRDFLREASIMGQFDHPNIIRLEGVVTKSRPVMIVVEYMENGSLDSFLRKHDGHFTVIQLVGMLRGIASGMKYLSDMGYVHRDLAARNILVNSNLVCKVSDFGLSRVLEDDPEAAYTTTGGKIPIRWTAPEAIAYRKFSSASDAWSYGIVMWEVMSYGERPYWEMSNQDVILSIEEGYRLPAPMGCPASLHQLMLHCWQKERNHRPKFTDIVSFLDKLIRNPSALHTLVEDILVSNHESF

SEQ ID NO: 16768 - protein, 347 aa, Homo sapiens
MENEPGIVSPFKRVFLKGEKSRDKKAHEKVTERRPLHTVVLSLPERVEPDRLLSDYIEKEVKYLGQLTSIPGYLNPSSRTEILHFIDNAKRAHQLPGHLTQEHDAVLSLSAYNVKLAWRDGEDIILRVPIHDIAAVSYVRDDAAHLVVLKTDDSSTKVDIKETYEVEASTFCFPESVDVGGASPHSKTISESELSASATELLQDYMLTLRTKLSSQEIQQFAALLHEYRNGASIHEFCINLRQLYGDSRKFLLLGLRPFIPEKDSQHFENFLETIGVKDGRGIITDSFGRHRRALSTTSSSTTNGNRATGSSDDRSAPSEGDEWDRMISDISSDIEALGCSMDQDSA

SEQ ID NO: 16769 - protein, 498 aa, Homo sapiens
ELLKIICAFQLDTGLEYANSYNFAKKENNSPEHLKDEVSIIQSMGYRNRAKRLLQSEPENPSLETSLSVQLSNLGTVRTLRTKQRIQPQKTSVYIELAACEFSETDVTNTEHHQPSNNDLNTTEKRAAERHPEKYQGEAASGCESETSVSEDCSGLSSQSDILTTQQRDTMQHNLIKLQQEMAELEAVLEQHGSQPSNSYPSIISDSSALEDLRNPEQSTSEKAVLTSQKSSEYPISQNPEGLSADKFEVSADSSTSKNKEPGVERSSPSKCPSLDDRWYMHSCSGSLQNRNYPSQEELIKVVDVEEQQLEESGPHDLTETSYLPRQDLEGTPYLESGISLFSDDPESDPSEDRAPESARVGNIPSSTSALKVPQLKVAESAQSPAAAHTTDTAGYNAMEESVSREKPELTASTERVNKRMSMVVSGLTPEEFMLVYKFARKHHITLTNLITEETTHVVMKTDAEFVCERTLKYFLGIAGGKWVVSYFWVTQSIKERK

SEQ ID NO: 16770 - protein, 746 aa, Homo sapiens
MPCLGLLANLCRHNLSVQTHIKTLSNVKSFYRTLITLLAHSSLTVVVFALSILSSLTLNEEVGEKLFHARNIHQTFQLIFNILINGDGTLTRKYSVDLLMDLLKNPKIADYLTRYEHFSSCLHQVLGLLNGKDPDSSSKVLELLLAFCSVTQLRHMLTQMMFEQSPPGSATLGSHTKCLEPTVALLRWLSQPLDGSENCSVLALELFKEIFEDVIDAANCSSADRFVTLLLPTILDQLQFTEQNLDEALTRKKCERIAKAIEVLLTLCGDDTLKMHIAKILTTVKCTTLIEQQFTYGKIDLGFGTKVADSELCKLAADVILKTLDLINKLKPLVPGMEVSFYKILQDPRLITPLAFALTSDNREQVQSGLRILLEAAPLPDFPALVLGESIAANNAYRQQETEHIPRKMPWQSSNHSFPTSIKCLTPHLKDGVPGLNIEELIEKLQSGMVVKDQICDVRISDIMDVYEMKLSTLASKESRLQDLLETKALALAQADRLIAQHRCQRTQAETEARTLASMLREVERKNEELSVLLKAQQVESERAQSDIEHLFQHNRKLESVAEEHEILTKSYMELLQRNESTEKKNKDLQITCDSLNKQIETVKKLNESLKEQNEKSIAQLIEKEEQRKEVQNQLVDREHKLANLHQKTKVQEEKIKTLQKEREDKEETIDILRKELSRTEQIRKELSIKASSLEVQKAQLEGRLEEKESLVKLQQEELNKHSHMIAMIHSLSGGKINPETVNLSI

SEQ ID NO: 16771 - protein, 166 aa, Homo sapiens
MAVWLAQWLGPLLLVSLWGLLAPASLLRRLGEHIQQFQESSAQGLGLSLGPGAAALPKVGWLEQLLDPFNVSDRRSFLQRYWVNDQHWVGQDGPIFLHLGGEGSLGPGSVMRGHPAALAPAWGALVISLEHRFYGLSIPAGGLEMAQLRFLSSRLALSCTAWARSV

SEQ ID NO: 16772 - protein, 331 aa, Homo sapiens
MIEDVQSLLDEEQEQMFAFRSRARSTDTFNYATYHTLEEIYDFLDLLVAENPHLVSKIQIGNTYEGRPIYVLKFSTGGSKRPAIWIDTGIHSREWVTQASGVWFAKKITQDYGQDAAFTAILDTLDIFLEIVTNPDGFAFTHSTNRMWRKTRSHTAGSLCIGVDPNRNWDAGFGLSGASSNPCSETYHGKFANSEVEVKSIVDFVKDHGNIKAFISIHSYSQLLMYPYGYKTEPVPDQDELDQLSKAAVTALASLYGTKFNYGSIIKAIYQASGSTIDWTYSQGIKYSFTFELRDTGRYGFLLPASQIIPTAKETWLALLTIMEHTLNHPY

SEQ ID NO: 16773 - protein, 562 aa, Homo sapiens
MHSKVTIICIRFLFWFLLLCMLIGKSHTEDDIIIATKNGKVRGMNLTVFGGTVTAFLGIPYAQPPLGRLRFKKPQSLTKWSDIWNATKYANSCCQNIDQSFPGFHGSEMWNPNTDLSEDCLYLNVWIPAPKPKNATVLIWIYGGGFQTGTSSLHVYDGKFLARVERVIVVSMNYRVGALGFLALPGNPEAPGNMGLFDQQLALQWVQKNIAAFGGNPKSVTLFGESAGAASVSLHLLSPGSHSLFTRAILQSGSFNAPWAVTSLYEARNRTLNLAKLTGCSRENETEIIKCLRNKDPQEILLNEAFVVPYGTPLSVNFGPTVDGDFLTDMPDILLELGQFKKTQILVGVNKDEGTAFLVYGAPGFSKDNNSIITRKEFQEGLKIFFPGVSEFGKESILFHYTDWVDDQRPENYREALGDVVGDYNFICPALEFTKKFSEWGNNAFFYYFEHRSSKLPWPEWMGVMHGYEIEFVFGLPLERRDNYTKAEEILSRSIVKRWANFAKYGNPNETQNNSTSWPVFKSTEQKYLTLNTESTRIMTKLRAQQCRFWTSFFPKVLEMTG

SEQ ID NO: 16774 - protein, 778 aa, Homo sapiens
MTSSSPAGLEGSDLSSINTMMSAVMSVGKVTENGGSPQGIKSPSKPPGPNRIGRRNQETKEEKSSYNCPLCEKICTTQHQLTMHIRQHNTDTGGADHSCSICGKSLSSASSLDRHMLVHSGERPYKCTVCGQSFTTNGNMHRHMKIHEKDPNSATATAPPSPLKRRRLSSKRKLSHDAESEREDPAPAKKMVEDGQSGDLEKKADEVFHCPVCFKEFVCKYGLETHMETHSDNPLRCDICCVTFRTHRGLLRHNALVHKQLPRDAMGRPFIQNNPSIPAGFHDLGFTDFSCRKFPRISQAWCETNLRRCISEQHRFVCDTCDKAFPMLCSLALHKQTHVAADQGQEKPQATPLPGDALDQKGFLALLGLQHTKDVRPAPAEEPLPDDNQAIQLQTLKCQLPQDPGCTNLLSLSPFEAASLGGSLTVLPATKDSIKHLSLQPFQKGFIIQPDSSIVVKPISGESAIELADIQQILKMAASAPPQISLPPFSKAPAAPLQAIFKHMPPLKPKPLVTPRTVVATSTPPPLINAQQASPGCISPSLPPPPLKLLKGSVEAASNAHLLQSKSGTQPHAATRLSLQQPRAELPGQPEMKTQLEQDSIIEALLPLSMEAKIKQEITEGELKAFMTAPGGKKTPAMRKVLYPCRFCNQVFAFSGVLRAHVRSHLGISPYQCNICDYIAADKAALIRHLRTHSGERPYICKICHYPFTVKANCERHLRKKHLKATRKDIEKNIEYVSSSAAELVDAFCAPDTVCRLCGEDLKHYRALRIHMRTHCGR

SEQ ID NO: 16775 - protein, 354 aa, Homo sapiens
MSNKDRHIDSSCSSFIKTEPSSPASLTDSVNHHSPGGSSDASGSYSSTMNGHQNGLDSPPLYPSAPILGGSGPVRKLYDDCSSTIVEDPQTKCEYMLNSMPKRLCLVCGDIASGYHYGVASCEACKAFFKRTIQGNIEYSCPATNECEITKRRRKSCQACRFMKCLKVGMLKEGVRLDRVRGGRQKYKRRIDAENSPYLNPQLVQPAKKPYNKIVSHLLVAEPEKIYAMPDPTVPDSDIKALTTLCDLADRELVVIIGWAKHIPGFSTLSLADQMSLLQSAWMEILILGVVYRSLSFEDELVYADDYIMDEDQSKLAGLLDLNNAILQLVKKYKSMKLEKEEFVTLKAIALANS

SEQ ID NO: 16776 - protein, 12 aa, Homo sapiens
FTFGPGTKVDIK

SEQ ID NO: 16777 - protein, 574 aa, Homo sapiens
MSLSPPCFTEEDRFSLEALQTIHKQMDDDKDGGIEVEESDEFIREDMKYKDATNKHSHLHREDKHITIEDLWKRWKTSEVHNWTLEDTLQWLIEFVELPQYEKNFRDNNVKGTTLPRIAVHEPSFMISQLKISDRSHRQKLQLKALDVVLFGPLTRPPHNWMKDFILTVSIVIGVGGCWFAYTQNKTSKEHVAKMMKDLESLQTAEQSLMDLQERLEKAQEENRNVAVEKQNLERKMMDEINYAKEEACRLRELREGAECELSRRQYAEQELEQVRMALKKAEKEFELRSSWSVPDALQKWLQLTHEVEVQYYNIKRQNAEMQLAIAKDEVAASYLIQAEKIKKKRSTVFGTLHVAHSSSLDEVDHKILEAKKALSELTTCLRERLFRWQQIEKICGFQIAHNSGLPSLTSSLYSDHSWVVMPRVSIPPYPIAGGVDDLDEDTPPIVSQFPGTMAKPPGSLARSSSLCRSRRSIVPSSPQPQRAQLAPHAPHPSHPRHPHHPQHTPHSLPSPDPDILSVSSCPALYRNEEEEEAIYFSAEKQCMIIVTSKMPLLTELVLCGFWKSEGKLESCTV

SEQ ID NO: 16778 - protein, 343 aa, Homo sapiens
MAAQYGSMSFNPSTPGASYGERAFSAPQTRLQGGPGRQEPRNSQLRIVLVGKTGAGKSATGNSILGRKVFHSGTAAKSITKKCEKRSSSWKETELVVVDTPGIFDTEVPNAETSKEIIRCILLTSPGPHALLLVVPLGRYTEEEHKATEKILKMFGERARSFMILIFTRKDDLGDTNLHDYLREAPEDIQDLMDIFGDRYCALNNKATGAEQEAQRAQLLGLIQRVVRENKEGCYTNRMYQRAEEEIQKQTQAMQELHRVELEREKARIREEYEEKIRKLEDKVEQEKRKKQMEKKLAEQEAHYAVRQQRARTEVESKDGILELIMTALQIASFILLRLFAED

SEQ ID NO: 16779 - protein, 923 aa, Homo sapiens
MWTEEAGATAEAQESGIRNKSSSSSQIPVVGVVTEDDEAQDVFKPMDLNRVIKLLEETDKDGLEEKQLKFVKKLVQCYQNGLPLRDLAQIFKILNLCSGKIKNQPRFIESAYDIIKLCGLPFLKKKVSDEITYAEDTANSIALLGDLMKIPSSELRIQICYQQASSSYKIQMAEVGGLAKTMVQSMTLLENQLVEKLWVLKVLQHLSTSEVNCTIMMKAQAASGICTHLNDPDPSGQLLFRSSEILWNLLEKSSKEEVIQQLSNLECLLALKEVFKNLFMRGFSHYDRQLRNDILVITTIIAQNPEAPMIECGFTKDLILFATFNEVKSQNLLVKGLKLSNSYEDFELKKLLFNVIVILCKDLPTVQLLIDGKVILALFTYVKKPEKQKIIDWSAAQHEELQLHAIATLSSVAPLLIEEYMSCQGNARVLAFLEWCESEDPFFSHGNSFHGTGGRGNKFAQMRYSLRLLRAVVYLEDETVNKDLCEKGTIQQMIGIFKNIISKPNEKEEAIVLEIQSDILLILSGLCENHIQRKEIFGTEGVDIVLHVMKTDPRKLQSGLGYNVLLFSTLDSIWCCILGCYPSEDYFLEKEGIFLLLDLLALNQKKFCNLILGIMVEFCDNPKTAAHVNAWQGKKDQTAASLLIKLWRKEEKELGVKRDKNGKIIDTKKPLFTSFQEEQKIIPLPANCPSIAVMDVSENIRAKIYAILGKLDFENLPGLSAEDFVTLCIIHRYLDFKIGEIWNEIYEEIKLEKLRPVTTDKKALEAITTASENIGKMVASLQSDIIESQACQDMQNEQKVYAKIQATHKQRELANKSWEDFLARTSNAKTLKKAKSLQEKAIEASRYHKRPQNAIFHQTHIKGLNTTVPSGGVVTVESTPARLVGGPLVDTDIALKKLPIRGGALQRVKAVKIVDAPKKSIPT

SEQ ID NO: 16780 - protein, 692 aa, Homo sapiens
MFYFRGCGRWVAVSFTKQQFPLARLSSDSAAPRTPHFDVIVIGGGHAGTEAATAAARCGSRTLLLTHRVDTIGQMSCNPSFGGIGKGHLMREVDALDGLCSRICDQSGVHYKVLNRRKGPAVWGLRAQIDRKLYKQNMQKEILNTPLLTVQEGAVEDLILTEPEPEHTGKCRVSGVVLVDGSTVYAESVILTTGTFLRGMIVIGLETHPAGRLGDQPSIGLAQTLEKLGFVVGRLKTGTPPRIAKESINFSILNKHIPDNPSIPFSFTNETVWIKPEDQLPCYLTHTNPRVDEIVLKNLHLNSHVKETTRGPRYCPSIESKVLRFPNRLHQVWLEPEGMDSDLIYPQGLSMTLPAELQEKMITCIRGLEKAKVIQPGYGVQYDYLDPRQITPSLETHLVQRLFFAGQINGTTGYEEAAAQGVIAGINASLRVSRKPPFVVSRTEGYIGVLIDDLTTLGTSEPYRMFTSRVEFRLSLRPDNADSRLTLRGYKDAGCVSQQRYERACWMKSSLEEGISVLKSIEFLSSKWKKLIPEASISTSRSLPVRALDVLKYEEVDMDSLAKAVPEPLKKYTKCRELAERLKIEATYESVLFHQLQEIKGVQQDEALQLPKDLDYLTIRDVSLSHEVREKLHFSRPQTIGAASRIPGVTPAAIINLLRFVKTTQRRQSAMNESSKTDQYLCDADRLQEREL

SEQ ID NO: 16781 - protein, 659 aa, Homo sapiens
MALLLTLTSPDLEGTWDTRDKDGFKAQEGPPLAVPEFPVCGLYRIYGVCGSFSSFFIIRCSLCALETLKSPQHDPLEIPEQSLKLIPLVSGKRELTRGQKAGEKPLAAGPGEEELLRGSAPHAQDTQSEELPPSCTISGEKKPPAVSGEATGADAGRLCPPPRSRAPHKDRTLARSRPQTQGEDCSLPVGEVKIGKRSYSPAPGKQKKPNAMGLAPTSSPGAPNSARATHNPVPCGSGRGPCHLANLLSTLAQSNQNRDHKQGPPEVTCQIRKKTRTLYRSDQLEELEKIFQEDHYPDSDKRREIAQTVGVTPQRIMVWFQNRRAKWRKMEKLNGKESKDNPAAPGPASSQCSSAAEILPAVPMEPKPDPFPQESPLDTFPEPPMLLTSDQTLAPTQPSEGAQRVVTPPLFSPPPVRRADLPFPLGPVHTPQLMPLLMDVAGSDSSHKDGPCGSWGTSITLPPPCSYLEELEPQDYQQSNQPGPFQFSQAPQPPLFQSPQPKLPYLPTFPFSMPSSLTLPPPEDSLFMFPCGPSGGTSQGYCPGASSGQILMQPPAGNIGTASWSDPCLPELPFPGPFCPQALGHPPGGDGYFPDLFPTPCPQALGRQPSSALSWMPEGARPGTGPLLSKAKEEPPAASLDQPSALEEARGDDKNSHVP

SEQ ID NO: 16782 - protein, 743 aa, Homo sapiens
MCRPSPSPVSPASNPRTSLVQVKTKACLSGHHSASSTSKPFKTPKDNLLTSSSKQHTVFPAKGSRDKPCVPVPVVSLEKIPNLVKADGANVKMNSTTTTAVSASSTSSSAVSTPPLIKPVLMSKSVPPSPEKILNGKGILPTTIDKKHQNGTKNSNKPYRRLSEREFDPNKHCGVLDPETKKPCTRSLTCKTHSLSHRRAVPGRKKQFDLLLAEHKAKSREKEVKDKEHLLTSTREILPSQSGPAQDSLLGSSGSSGPEPKVASPAKSRPPNSVLPRPSSANSISSSTSSNHSGHTPEPPLPPVGGDLASRLSSDEGEMDGADESEKLDCQFSTHHPRPLAFCSFGSRLMGRGYYVFDRRWDRFRFALNSMVEKHLNSQMWKKIPPAADSPLPSPAAHITTPVPASVLQPFSNPSAVYLPSAPISSRLTSSYIMTSAMLSNAAFVTSPDPSALMSHTTAFPHVAATLSIMDSTFKAPSAVSPIPAVIPSPSHKPSKTKTSKSSKVKDLSTRSDESPSNKKRKPQSSTSSSSSSSSSSLQTSLSSPLSGPHKKNCVLNASSALNSYQAAPPYNSLSVHNSNNGVSPLSAKLEPSGRTSLPGGPADIVRQVGAVGGSSDSCPLSVPSLALHAGDLSLASHNAVSSLPLSFDKSEGKKRKNSSSSSKACKITKMPGMNSVHKKNPPSLLAPVPDPVNSTSSRQVRDLLAPPSPALGGRGSWAAPLLSRAAPTGNTSLIPVLVFPEG

SEQ ID NO: 16783 - protein, 545 aa, Homo sapiens
MHQVSATMRSITLSWPQPEQPNGIILDYEIRYYEKEHNEFNSSMARSQTNTARIDGLRPGMVYVVQVRARTVAGYGKFSGKMCFQTLTDDDYKSELREQLPLIAGSAAAGVVFVVSLVAISIVCSRKRAYSKEAVYSDKLQHYSTGRGSPGMKIYIDPFTYEDPNEAVREFAKEIDVSFVKIEEVIGAGEFGEVYKGRLKLPGKREIYVAIKTLKAGYSEKQRRDFLSEASIMGQFDHPNIIRLEGVVTKSRPVMIITEFMENGALDSFLRQNDGQFTVIQLVGMLRGIAAGMKYLAEMNYVHRDLAARNILVNSNLVCKVSDFGLSRYLQDDTSDPTYTSSLGGKIPVRWTAPEAIAYRKFTSASDVWSYGIVMWEVMSFGERPYWDMSNQDVINAIEQDYRLPPPMDCPAALHQLMLDCWQKDRNSRPRFAEIVNTLDKMIRNPASLKTVATITAVPSQPLLDRSIPDFTAFTTVDDWLSAIKMVQYRDSFLTAGFTSLQLVTQMTSEDLLRIGITLAGHQKKILNSIHSMRVQISQSPTAMA

SEQ ID NO: 16784 - protein, 490 aa, Homo sapiens
MVRGARQPQQPRSRLAPRLTGTVEKPPRKRRSRTEFALKEIMSSGGAEDDIPQGERKTVTDFCYLLDKSKQLFNGLRDLPQYGQKQWQSYFGRTFDVYTKLWKFQQQHRQVLDNRYGLKRWQIGEIASKIGQLYYHYYLRTSETSYLNEAFSFYSAIRQRSYYSQVNKEDRPELVVKKLRYYARFIVVCLLLNKMDVVKDLVKELSDEIEDYTHRFNTEDQVEWNLVLQEVAAFIEADPVMVLNDDNTIVITSNRLAETGAPLLEQGMIVGQLSLADALIIGNCNNQVKFSELTVDMFRMLQALEREPMNLASQMNKPGMQESADKPTRRENPHKYLLYKPTFSQLYTFLAASFKELPANSVLLIYLSATGVFPTGRSDSEGPYDFGGVLTNSNRDIINGDAIHKRNQSHKEMHCLHPGDLYPFTRKPLFIIVDSSNSVAYKNFTNLFGQPLVCLLSPTAYPKALQACAEAYGKSVKNIFEKSTVILPSY

SEQ ID NO: 16785 - protein, 444 aa, Homo sapiens
MKRFGSLRSNKKHKDQNRSTERRQSEPHGLFASGLSSSPSTPTQVTKQHTFPLESYKHEPERLENRIYASSSPPDTGQRFCPSSFQSPTRPPLASPTHYAPSKAAALAAALGPAEAGMLEKLEFEDEVEDSESGVYMRFMRSHKCYDIVPTSSKLVVFDTTLQVKKAFFALVANGVRAAPLWESKKQSFVGMLTITDFINILHRYYKSPMVQIYELEEHKIETWRELYLQETFKPLVNISPDASLFDAVYSLIKNKIHRLPVIDPISGNALYILTHKRILKFLQLFMSDMPKPAFMKQNLDELGIGTYHNIAFIHPDTPIIKALNIFVERRISALPVVDESGKVVDIYSKFDVINLAAEKTYNNLDITVTQALQHRSQYFEGVVKCNKLEILETIVDRIVRAEVHRLVVVNEADSIVGIISLSDILQALILTPAGAKQKETETE

SEQ ID NO: 16786 - protein, 318 aa, Homo sapiens
MGEKAVPLLRRRRVKRSCPSCGSELGVEEKRGKGNPISIQLFPPELVEHIISFLPVRDLVALGQTCRYFHEVCDGEGVWRRICRRLSPRLQDQDTKGLYFQAFGGRRRCLSKSVAPLLAHGYRRFLPTKDHVFILDYVGTLFFLKNALVSTLGQMQWKRACRYVVLCRGAKDFASDPRCDTVYRKYLYVLATREPQEVVGTTSSRACDCVEVYLQSSGQRVFKMTFHHSMTFKQIVLVGQETQRALLLLTEEGKIYSLVVNETQLDQPRSYTVQLALRKVSHYLPHLRVACMTSNQSSTLYVTDPILCSWLQPPWPGG

SEQ ID NO: 16787 - protein, 1002 aa, Homo sapiens
MKKFNFRKVLDGLTASSPGSGSSSGSNSGGGAGSGSVHPAGTAGVLREEIQETLTSEYFQICKTVRHGFPHQPTALAFDPVQKILAIGTRTGAIRILGRPGVDCYCQHESGAAVLQLQFLINEGALVSASSDDTLHLWNLRQKRPAILHSLKFNRERITYCHLPFQSKWLYVGTERGNTHIVNIESFILSGYVIMWNKAIELSTKTHPGPVVHLSDSPRDEGKLLIGYENGTVVFWDLKSKRAELRVYYDEAIHSIDWHHEGKQFMCSHSDGSLTLWNLKSPSRPFQTTIPHGKSQREGRKSESCKPILKVEYKTCKNSEPFIIFSGGLSYDKACRRPSLTIMHGKAITVLEMDHPIVEFLTLCETPYPNEFQEPYAVVVLLEKDLIVVDLTQSNFPIFENPYPMDIHESPVTCTAYFADCPPDLILVLYSIGVKHKKQGYSNKEWPISGGAWNLGAQTYPEIIITGHADGSIKFWDASAITLQMLYKLKTSKVFEKQKVGEGKQTCEIVEEDPFAIQMIYWCPESRIFCVSGVSAYVIIYKFSRHEITTEIVSLEVRLQYDVEDIITPEPETSPPFPDLSAQLPSSRSLSGSTNTVASEGVTKDSIPCLNVKTRPVRMPPGYQAELVIQLVWVDGEPPQQITSLAVSSAYGIVAFGNCNGLAVVDFIQKTVLLSMGTIDLYRSSDLYQRQPRSPRKNKQFIAGLTELNDSPVPLELERCKSPTSDHVNGHCTSPTSQSCSSGKRLSSADVSKVNRWGPGRPPFRKAQSAACMEISLPVTTEENRENSYNRSRSSSISSIDKDSKEAITALYFMDSFARKNDSTISPCLFVGTSLGMVLIISLNLPLADEQRFTEPVMVLPSGTFLSLKGAVLTFSCMDRMGGLMQPPYEVWRDPNNIDENEKSWRRKVVMNSSSASQEIGDHQYTIICSEKQAKVFSLPSQTCLYVHNITETSFILQANVVVMCSSACLACFCANGHIMIMRYLPSYKLSGNHNNTSKVQS

SEQ ID NO: 16788 - protein, 661 aa, Homo sapiens
MNLAKVRYKQFSQILKNIGENEGGIDKFSRGYESFGVHRCADGGLYCKEWAPGAEGVFLTGDFNGWNPFSYPYKKLDYGKWELYIPPKQNKSVLVPHGSKLKVVITSKSGEILYRISPWAKYVVREGDNVNYDWIHWDPEHSYEFKHSRPKKPRSLRIYESHVGISSHEGKVASYKHFTCNVLPRIKGLGYNCIQLMAIMEHAYYASFGYQITSFFAASSRYGTPEELQELVDTAHSMGIIVLLDVVHSHASKNSADGLNMFDGTDSCYFHSGPRGTHDLWDSRLFAYSSWEILRFLLSNIRWWLEEYRFDGFRFDGVTSMLYHHHGVGQGFSGDYSEYFGLQVDEDALTYLMLANHLVHTLCPDSITIAEDVSGMPALCSPISQGGGGFDYRLAMAIPDKWIQLLKEFKDEDWNMGDIVYTLTNRRYLEKCIAYAESHDQALVGDKSLAFWLMDAEMYTNMSVLTPFTPVIDRGIQLHKMIRLITHGLGGEGYLNFMGNEFGHPEWLDFPRKGNNESYHYARRQFHLTDDDLLRYKFLNNFDRDMNRLEERYGWLAAPQAYVSEKHEGNKIIAFERAGLLFIFNFHPSKSYTDYRVGTALPGKFKIVLDSDAAEYGGHQRLDHSTDFFSEAFEHNGRPYSLLVYIPSRVALILQNVDLPN

SEQ ID NO: 16789 - protein, 895 aa, Homo sapiens
MVVDEQQRLTAQLTLQRQKIQELTTNAKETHTKLALAEARVQEEEQKATRLEKELQTQTTKFHQDQDTIMAKLTNEDSQNRQLQQKLAALSRQIDELEETNRSLRKAEEELQDIKEKISKGEYGNAGIMAEVEELRKRVLDMEGKDEELIKMEEQCRDLNKRLERETLQSKDFKLEVEKLSKRIMALEKLEDAFNKSKQECYSLKCNLEKERMTTKQLSQELESLKVRIKELEAIESRLEKTEFTLKEDLTKLKTLTVMFVDERKTMSEKLKKTEDKLQAASSQLQVEQNKVTTVTEKLIEETKRALKSKTDVEEKMYSVTKERDDLKNKLKAEEEKGNDLLSRVNMLKNRLQSLEAIEKDFLKNKLNQDSGKSTTALHQENNKIKELSQEVERLKLKLKDMKAIEDDLMKTEDEYETLERRYANERDKAQFLSKELEHVKMELAKYKLAEKTETSHEQWLFKRLQEEEAKSGHLSREVDALKEKIHEYMATEDLICHLQGDHSVLQKKLNQQENRNRDLGREIENLTKELERYRHFSKSLRPSLNGRRISDPQVFSKEVQTEAVDNEPPDYKSLIPLERAVINGQLYEESENQDEDPNDEGSVLSFKCSQSTPCPVNRKLWIPWMKSKEGHLQNGKMQTKPNANFVQPGDLVLSHTPGQPLHIKVTPDHVQNTATLEITSPTTESPHSYTSTAVIPNCGTPKQRITILQNASITPVKSKTSTEDLMNLEQGMSPITMATFARAQTPESCGSLTPERTMSPIQVLAVTGSASSPEQGRSPEPTEISAKHAIFRVSPDRQSSWQFQRSNSNSSSVITTEDNKIHIHLGSPYMQAVASPVRPASPSAPLQDNRTQGLINGALNKTTNKVTSSITITPTATPLPRQSQITVEPLLLPH

SEQ ID NO: 16790 - protein, 711 aa, Homo sapiens
MDADKEKDLQKFLKNVDEISNLIQEMNSDDPVVQQKAVLETEKRLLLMEEDQEEDECRTTLNKTMISPPQTAMKSAEEINSEAFLASVEKDAKERAKRRRENKVLADALKEKGNEAFAEGNYETAILRYSEGLEKLKDMKVLYTNRAQAYMKLEDYEKALVDCEWALKSFSFMQCDEKCTKAYFHMGKANLALKNYSVSRECYKKILEINPKLQTQVKGYLNQVDLQEKADLQEKEAHELLDSGKNTAVTTKNLLETLSKPDQIPLFYAGGIEILTEMINECTEQTLFRMHNGFSIISDNEVIRRCFSTAGNDAVEEMVCVSVLKLWQAVCSRNEENQRVLVIHHDRARLLAALLSSKVLAIRQQSFALLLHLAQTESGRSLIINHLDLTRLLEALVSFLDFSDKEANTAMGLFTDLALEERFQVWFQANLPGVLPALTGVLKTDPKVSSSSALCQCIAIMGNLSAEPTTRRHMAACEEFGDGCLSLLARCEEDVDLFREVIYTLLGLMMNLCLQAPFVSEVWAVEVSRRCLSLLNSQDGGILTRAAGVLSRTLSSSLKIVEEALRAGVVKKMMKFLKTGGETASRYAIKILAICTNSYHEAREEVIRLDKKLSVMMKLLSSEDEVLVGNAALCLGNCMEVPNVASSLLKTDLLQVLLKLAGSDTQKTAVQVNAGIALGKLCTAEPRFAAQLRKLHGLEILNSTMKYISDS

SEQ ID NO: 16791 - protein, 361 aa, Homo sapiens
MKSLSLLLAVALGLATAVSAGPAVIECWFVEDASGKGLAKRPGALLLRQGPGEPPPRPDLDPELYLSVHVVLTVLTHTPAPRVRLGQDALLDLSFAYMPPTSEAASSLAPGPPPFGLEWRRQHLGKGHLLLAATPGLNGQMPAAQEGAVAFAAWDDDEPWGPWTGNGTFWLPTVQPFQEGTYLATIHLPYLQGQVTLELAVYKPPKVSLMPATLARAAPGEAPPELLCLVSHFYPSGGLEVEWELRGGPGGRSQKAEGQRWLSALRHHSDGSVSLSGHLQPPPVTTEQHGARYACRIHHPSLPASGRSAEVTLEVAGLSGPSLEDSVGLFLSAFLLLGLFKALGWAAVYLSTCKDSKKKAE

SEQ ID NO: 16792 - protein, 557 aa, Homo sapiens
MLGGSGSHGRRSLAALSQIAYQRNDDDEEEAARERRRRARQERLRQKQEEESLGQVTDQVEVNAQNSVPDEEAKTTTTNTQVEGDDEAAFLERLARREERRQKRLQEALERQKEFDPTITDASLSLPSRRMQNDTAENETTEKEEKSESRQERYEIEETETVTKSYQKNDWRDAEENKKEDKEKEEEEEEKPKRGSIGENQGEEKGTKVQAKREKLQEDKPTFKKEEIKDEKIKKDKEPKEEVKSFMDRKKGFTEVKSQNGEFMTHKLKHTENTFSRPGGRASVDTKEAEGAPQVEAGKRLEELRRRRGETESEEFEKLKQKQQEAALELEELKKKREERRKVLEEEEQRRKQEEADRKLREEEEKRRLKEEIERRRAEAAEKRQKMPEDGLSDDKKPFKCFTPKGSSLKIEERAEFLNKSVQKSGVKSTHQAAIVSKIDSRLEQYTSAIEGTKSAKPTKPAASDLPVPAEGVRNIKSMWEKGNVFSSPTAAGTPNKETAGLKVGVSSRINEWLTKTPDGNKSPAPKPSDLRPGDVSSKRNLWEKQSVDKVTSPTKV

SEQ ID NO: 16793 - protein, 286 aa, Homo sapiens
QITHRLSKLSERRPSVQIDSGSSVPSDQSPSVQIDSGSSVPSDQRPSVQIDRRMSGKVRRRSSEKTDYRLAGLADPGTSEQTDLRLYGLVDHKTSVKTHHQVYGQATELAEHQAIDQAHSNADQPPVDNAHYTESDQTDHLADRQANHKDQLSYYETRGQSEDRIFPQLGNSKEDKEADYRVQPCKFEDSQVDLNSKPSVEMETQNATTIPPYNPVDARFTSNFQAKDQALFPRLPSISSKLNYTSSQEKTQAIVTKSFMKILTKFHSNTWKNTTFCKYSSRLLKT

SEQ ID NO: 16794 - protein, 1159 aa, Homo sapiens
TNEDSPIIEYYPPDFKTDLNGKQQEWEAVVLIPFIDERLLEAMETCNHSLKKEERKRNQHSECLMCWYDRDTEFIYPSPWPEKFPAIERCCTRYKIISLDAWRVDINKNKITRIDQKALYFCGFPTLKHIRHKFFLKKSGVQVFQQSSRGENMMLEILVDAESDELTVENVASSVLGKSVFVNWPHLEEARVVAVSDGETKFYLEEPPGTQKLYSGRTAPPSKVVHLGDKEQSNWAKEVQGISEHYLRRKGIIINETSAVVYAQLLTGRKYQINQNGEVRLEKQWSKQVVPFVYQTIVKDIRAFDSRFSNIKTLDDLFPLRSMVFMLGTPYYGCTGEVQDSGDVITEGRIRVIFSIPCEPNLDALIQNQHKYSIKYNPGYVLASRLGVSGYLVSRFTGSIFIGRGSRRNPHGDHKANVGLNLKFNKKNEEVPGYTKKVGSEWMYSSAAEQLLAEYLERAPELFSYIAKNSQEDVFYEDDIWPGENENGAEKVQEIITWLKGHPVSTLSRSSCDLQILDAAIVEKIEEEVEKCKQRKNNKKVRVTVKPHLLYRPLEQQHGVIPDRDAEFCLFDRVVNVRENFSVPVGLRGTIIGIKGANREADVLFEVLFDEEFPGGLTIRCSPGRGYRLPTSALVNLSHGSRSETGNQKLTAIVKPQPAVHQHSSSSSVSSGHLGALNHSPQSLFVPTQVPTKDDDEFCNIWQSLQGSGKMQYFQPTIQEKGAVLPQEISQVNQHHKSGFNDNSVKYQQRKHDPHRKFKEECKSPKAECWSQKMSNKQPNSGIENFLASLNISKENEVQSSHHGEPPSEEHLSPQSFAMKGTRMLKEILKIDGSNTVDHKNEIKQIANEIPVSSNRRDEYGLPSQPKQNKKLASYMNKPHSANEYHNVQSMDNMCWPAPSQIPPVSTPVTELSRICSLVGMPQPDFSFLRMPQTMTVCQVKLSNGLLVHGPQCHSENEAKEKAALFALQQLGSLGMNFPLPSQVFANYPSAVPPGTIPPAFPPPTANIMPSSSHLFGSMPWGPSVPVPGKPFHHTLYSGTMPMAGGIPGGVHNQFIPLQVTKKRVANKKNFENKEAQSSQATPVQTSQPDSSNIVKVSPRESSSASLKSSPIAQPASSFQVETASQGHSISHHKSTPISSSRRKSRKLAVNFGVSKPSE

SEQ ID NO: 16795 - protein, 497 aa, Homo sapiens
MDSQKEALQRIISTLANKNDEIQNFIDTLHHTLKGVQENSSNILSELDEEFDSLYSILDEVKESMINCIKQEQARKSQELQSQISQCNNALENSEELLEFATRSLDIKEPEEFSKAARQIKDRVTMASAFRLSLKPKVSDNMTHLMVDFSQERQMLQTLKFLPVPKAPEIDPVECLVADNSVTVAWRMPEEDNKIDHFILEHRKTNFDGLPRVKDERCWEIIDNIKGTEYTLSGLKFDSKYMNFRVRACNKAVAGEYSDPVTLETKALNFNLDNSSSHLNLKVEDTCVEWDPTGGKGQESKIKGKENKGSGTPSPKRTSVGSRPPAVRGSRDRFTGESYTVLGDTAIESGQHYWEVKAQKDCKSYSVGVAYKTLGKFDQLGKTNTSWCIHVNNWLQNTFAAKHNNKVKALDVTVPEKIGVFCDFDGGQLSFYDANSKQLLYSFKTKFTQPVLPGFMVWCGGLSLSTGMQVPSAVRTLQKSENGMTGSASSLNNVVTQ

SEQ ID NO: 16796 - protein, 462 aa, Homo sapiens
MDTKHFLPLDFSTQVNSSLTSPTGRGSMAAPSLHPSLGPGIGSPGQLHSPISTLSSPINGMGPPFSVISSPMGPHSMSVPTTPTLGFSTGSPQLSSPMNPVSSSEDIKPPLGLNGVLKVPAHPSGNMASFTKHICAICGDRSSGKHYGVYSCEGCKGFFKRTVRKDLTYTCRDNKDCLIDKRQRNRCQYCRYQKCLAMGMKREAVQEERQRGKDRNENEVESTSSANEDMPVERILEAELAVEPKTETYVEANMGLNPSSPNDPVTNICQAADKQLFTLVEWAKRIPHFSELPLDDQVILLRAGWNELLIASFSHRSIAVKDGILLATGLHVHRNSAHSAGVGAIFDRVLTELVSKMRDMQMDKTELGCLRAIVLFNPDSKGLSNPAEVEALREKVYASLEAYCKHKYPEQPGRFAKLLLRLPALRSIGLKCLEHLFFFKLIGDTPIDTFLMEMLEAPHQMT

SEQ ID NO: 16797 - protein, 560 aa, Homo sapiens
MQGEAHPSASLIDRTIKMRKETEARKVVLAWGLLNVSMAGMIYTEMTGKLISSYYNVTYWPLWYIELALASLFSLNALFDFWRYFKYTVAPTSLVVSPGQQTLLGLKTAVVQTTPPHDLAATQIPPAPPSPSIQGQSVLSYSPSRSPSTSPKFTTSCMTGYSPQLQGLSSGGSGSYSPGVTYSPVSGYNKLASFSPSPPSPYPTTVGPVESSGLRSRYRSSPTVYNSPTDKEDYMTDLRTLDTFLRSEEEKQHRVKLGSPDSTSPSSSPTFWNYSRSMGDYAQTLKKFQYQLACRSQAPCANKDEADLSSKQAAEEVWARVAMNRQLLDHMDSWTAKFRNWINETILVPLVQEIESVSTQMRRMGCPELQIGEASITSLKQAALVKAPLIPTLNTIVQYLDLTPNQEYLFERIKELSQGGCMSSFRWNRGGDFKGRKWDTDLPTDSAIIMHVFCTYLDSRLPPHPKYPDGKTFTSQHFVQTPNKPDVTNENVFCIYQSAINPPHYELIYQRHVYNLPKGRNNMFHTLLMFLYIIKTKESGMLGRVNLGLSGVNILWIFGE

SEQ ID NO: 16798 - protein, 746 aa, Homo sapiens
MGQTGKKSEKGPVCWRKRVKSEYMRLRQLKRFRRADEVKSMFSSNRQKILERTEILNQEWKQRRIQPVHILTSVSSLRGTRECSVTSDLDFPTQVIPLKTLNAVASVPIMYSWSPLQQNFMVEDETVLHNIPYMGDEVLDQDGTFIEELIKNYDGKVHGDRECGFINDEIFVELVNALGQYNDDDDDDDGDDPEEREEKQKDLEDHRDDKESRPPRKFPSDKIFEAISSMFPDKGTAEELKEKYKELTEQQLPGALPPECTPNIDGPNAKSVQREQSLHSFHTLFCRRCFKYDCFLHPFHATPNTYKRKNTETALDNKPCGPQCYQHLEGAKEFAAALTAERIKTPPKRPGGRRRGRLPNNSSRPSTPTINVLESKDTDSDREAGTETGGENNDKEEEEKKDETSSSSEANSRCQTPIKMKPNIEPPENVEWSGAEASMFRVLIGTYYDNFCAIARLIGTKTCRQVYEFRVKESSIIAPAPAEDVDTPPRKKKRKHRLWAAHCRKIQLKKDGSSNHVYNYQPCDHPRQPCDSSCPCVIAQNFCEKFCQCSSECQNRFPGCRCKAQCNTKQCPCYLAVRECDPDLCLTCGAADHWDSKNVSCKNCSIQRGSKKHLLLAPSDVAGWGIFIKDPVQKNEFISEYCGEIISQDEADRRGKVYDKYMCSFLFNLNNDFVVDATRKGNKIRFANHSVNPNCYAKVMMVNGDHRIGIFAKRAIQTGEELFFDYRYSQADALKYVGIEREMEIP

SEQ ID NO: 16799 - protein, 345 aa, Homo sapiens
MGPRARPALLLLMLLQTAVLQGRLLRSHSLHYLFMGASEQDLGLSLFEALGYVDDQLFVFYDHESRRVEPRTPWVSSRISSQMWLQLSQSLKGWDHMFTVDFWTIMENHNHSKESHTLQVILGCEMQEDNSTEGYWKYGYDGQDHLEFCPDTLDWRAAEPRAWPTKLEWERHKIRARQNRAYLERDCPAQLQQLLELGRGVLDQQEGSESSSLPGKVTTLRCRALNYYPQNITMKWLKDKQPMDAKEFEPKDVLPNGDGTYQGWITLAVPPGEEQRYTCQVEHPGLDQPLIVIWEPSPSGTLVIGVISGIAVFVVILFIGILFIILRKRQGSRGAMGHYVLAERE

SEQ ID NO: 16800 - protein, 568 aa, Homo sapiens
MMAEQVKCASAGVSSGAGSGPVVNAELEVKKLQELVRKLEKQNEQLRSRAASAAAAPHLLLLPPPPPAAPPPAGLQPLGPRSPPAATATAAASGGLGPAFPGTFCLPSPAPSLLCSLAQPPEAPFVYFKPAAGFFGAGGGGPEPGGAGTPPGAAAAPPSPPPTLLDEVELLDLESVAAWRDEDDYTWLYIGSSKTFTSSEKSLTPLQWCRHVLDNPTPEMEAARRSLCFRLEQGYTSRGSPLSPQSSIDSELSTSELEDDSISMGYKLQDLTDVQIMARLQEESLRQDYASTSASVSRHSSSVSLSSGKKGTCSDQEYDQYSLEDEEEFDHLPPPQPRLPRCSPFQRGIPHSQTFSSIRECRRSPSSQYFPSNNYQQQQYYSPQAQTPDQQPNRTNGDKLRRSMPNLARMPSTTAISSNISSPVTVRNSQSFDSSLHGAGNGISRIQSCIPSPGQLQHRVHSVGHFPVSIRQPLKATAYVSPTVQGSSNMPLSNGLQLYSNTGIPTPNKAAASGIMGRSALPRPSLAINGSNLPRSKIAQPVRSFLQPPKPLSSLSTLRDGNWRDGCY

SEQ ID NO: 16801 - protein, 134 aa, Homo sapiens
MTCHKRYKIQKKVREHHRKLRKEAKKRGHKKPRKDPGVPNSAPFKEALLREAELRKQRLEELKQQQKLDRQKELEKKRKLETNPDIKPSNVEPMEKEFGLCKTENKAKSGKQNSKKLYCQELKKVIEASDVVLE

SEQ ID NO: 16802 - protein, 734 aa, Homo sapiens
MDIRHSEFLPCLHCPPFVGPLPVSHVSFSSACPVPLPGSPSLHRGLHPSREEKRDSRMAEEKKLKLSNTVLPSESMKVVAESMGIAQIQEETCQLLTDEVSYRIKEIAQDALKFMHMGKRQKLTTSDIDYALKLKNVEPLYGFHAQEFIPFRFASGGGRELYFYEEKEVDLSDIINTPLPRVPLDVCLKAHWLSIEGCQPAIPENPPPAPKEQQKAEATEPLKSAKPGQEEDGPLKGKGQGATTADGKGKEKKAPPLLEGAPLRLKPRSIHELSVEQQLYYKEITEACVGSCEAKRAEALQSIATDPGLYQMLPRFSTFISEGVRVNVVQNNLALLIYLMRMVKALMDNPTLYLEKYVHELIPAVMTCIVSRQLCLRPDVDNHWALRDFAARLVAQICKHFSTTTNNIQSRITKTFTKSWVDEKTPWTTRYGSIAGLAELGHDVIKTLILPRLQQEGERIRSVLDGPVLSNIDRIGADHVQSLLLKHCAPVLAKLRPPPDNQDAYRAEFGSLGPLLCSQVVKARAQAALQAQQVNRTTLTITQPRPTLTLSQAPQPGPRTPGLLKVPGSIALPVQTLVSARAAAPPQPSPPPTKFIVMSSSSSAPSTQQVLSLSTSAPGSGSTTTSPVTTTVPSVQPIVKLVSTATTAPPSTAPSGPGSVQKYIVVSLPPTGEGKGGPTSHPSPVPPPASSPSPLSGSALCGGKQEAGDSPPPAPGTPKANGSQPNSGSPQPAP

SEQ ID NO: 16803 - protein, 636 aa, Homo sapiens
MGTASSLVSPAGGEVIEDTYGAGGGEACEIPVEVKPKARLLRNSFRRGAGAAAGAGPGSLPRGVGAGGLLGASFKSTGSSVPELEYAAAEYERLRKEYEIFRVSKNQELLSMGRREAKLDTENKRLRAELQALQKTYQKILREKESALEAKYQAMERAATFEHDRDKVKRQFKIFRETKENEIQDLLRAKRELESKLQRLQAQGIQVFDPGESDSDDNCTDVTAAGTQCEYWTGGALGSEPSIGSMIQLQQSFRGPEFAHSSIDVEGPFANVNRDDWDIAVASLLQVTPLFSHSLWSNTVRCYLIYTDETQPEMDLFLKDYSPKLKRMCETMGYFFHAVYFPIDVENQYLTVRKWEIEKSSLVILFIHLTLPSLLLEDCEEAFLKNPEGKPRLIFHRLEDGKVSSDSVQQLIDQVSNLNKTSKAKIIDHSGDPAEGVYKTYICVEKIIKQDILGFENTDLETKDLGSEDSIPEEDDFGDVLWDIHDEQEQMETFQQASNSAHELGFEKYYQRLNDLVAAPAPIPPLLVSGGPGSGKSLLLSKWIQLQQKNSPNTLILSHFVGRPMSTSSESSLIIKRLTLKLMQHSWSVSALTLDPAKLLEEFPRWLEKLSARHQGSIIIVIDSIDQVQVVAYTSS

SEQ ID NO: 16804 - protein, 1098 aa, Homo sapiens
FRPLLPRRLAPVTSPPPLAPTCGRSRRAPVQETYENIPGQSKITFLLQAIRNTTAAEEARQMAAVLLRRLLSSAFDEVYPALPSDVQTAIKSELLMIIQMETQSSMRKKVCDIAAELARNLIDEDGNNQWPEGLKFLFDSVSSQNVGLREAALHIFWNFPGIFGNQQQHYLDVIKRMLVQCMQDQEHPSIRTLSARATAAFILANEHNVALFKHFADLLPGFLQAVNDSCYQNDDSVLKSLVEIADTVPKYLRPHLEATLQLSLKLCGDTSLNNMQRQLALEVIVTLSETAAAMLRKHTNIVAQTIPQMLAMMVDLEEDEDWANADELEDDDFDSNAVAGESALDRMACGLGGKLVLPMIKEHIMQMLQNPDWKYRHAGLMALSAIGEGCHQQMEGILNEIVNFVLLFLQDPHPRVRYAACNAVGQMATDFAPGFQKKFHEKVIAALLQTMEDQGNQRVQAHAAAALINFTEDCPKSLLIPYLDNLVKHLHSIMVLKLQELIQKGTKLVLEQVVTSIASVADTAEEKFVPYYDLFMPSLKHIVENAVQKELRLLRGKTIECISLIGLAVGKEKFMQDASDVMQLLLKTQTDFNDMEDDDPQISYMISAWARMCKILGKEFQQYLPVVMGPLMKTASIKPEVALLDTQDMENMSDDDGWEFVNLGDQQSFGIKTAGLEEKSTACQMLVCYAKELKEGFVEYTEQVVKLMVPLLKFYFHDGVRVAAAESMPLLLECARVRGPEYLTQMWHFMCDALIKAIGTEPDSDVLSEIMHSFAKCIEVMGDGCLNNEHFEELGGILKAKLEEHFKNQELRQVKRQDEDYDEQVEESLQDEDDNDVYILTKVSDILHSIFSSYKEKVLPWFEQLLPLIVNLICPHRPWPDRQWGLCIFDDVIEHCSPASFKYAEYFLRPMLQYVCDNSPEVRQAAAYGLGVMAQYGGDNYRPFCTEALPLLVRVIQSADSKTKENVNATENCISAVGKIMKFKPDCVNVEEVLPHWLSWLPLHEDKEEAVQTFNYLCDLIESNHPIVLGPNNTNLPKIFSIIAEGEMHEAIKHEDPCAKRLANVVRQVQTSGGLWTECIAQLSPEQQAAIQELLNSA

SEQ ID NO: 16805 - protein, 1433 aa, Homo sapiens
MVKLDIHTLAHHLKQERLYVNSEKQLIQRLNADVLKTAEKLYRTAWIAKQQRINLDRLIITSAEASPAECCQHAKILEDTQFVDGYKQLGFQETAYGEFLSRLRENPRLIASSLVAGEKLNQENTQSVIYTVFTSLYGNCIMQEDESYLLQVLRYLIEFELKESDNPRRLLRRGTCAFSILFKLFSEGLFSAKLFLTATLHEPIMQLLVEDEDHLETDPNKLIERFSPSQQEKLFGEKGSDRFRQKVQEMVESNEAKLVALVNKFIGYLKQNTYCFPHSLRWIVSQMYKTLSCVDRLEVGEVRAMCTDLLLACFICPAVVNPEQYGIISDAPINEVARFNLMQVGRLLQQLAMTGSEEGDPRTKSSLGKFDKSCVAAFLDVVIGGRAVETPPLSSVNLLEGLSRTVVYITYSQLITLVNFMKSVMSGDQLREDRMALDNLLANLPPAKPGKSSSLEMTPYNTPQLSPATTPANKKNRLPIATRSRSRTNMLMDLHMDHEGSSQETIQEVQPEEVLVISLGTGPQLTPGMMSENEVLNMQLSDGGQGDVPVDENKLHGKPDKTLRFSLCSDNLEGISEGPSNRSNSVSSLDLEGESVSELGAGPSGSNGVEALQLLEHEQATTQDNLDDKLRKFEIRDMMGLTDDRDISETVSETWSTDVLGSDFDPNIDEDRLQEIAGAAAENMLGSLLCLPGSGSVLLDPCTGSTISETTSEAWSVEVLPSDSEAPDLKQEERLQELESCSGLGSTSDDTDVREVSSRPSTPGLSVVSGISATSEDIPNKIEDLRSECSSDFGGKDSVTSPDMDEITHGAHQLTSPPSQSESLLAMFDPLSSHEGASAVVRPKVHYARPSHPPPDPPILEGAVGGNEARLPNFGSHVLTPAEMEAFKQRHSYPERLVRSRSSDIVSSVRRPMSDPSWNRRPGNEERELPPAAAIGATSLVAAPHSSSSSPSKDSSRGETEERKDSDDEKSDRNRPWWRKRFVSAMPKDDPSPRLSAQAQVAEDILDKYRNAIKRTSPSDGAMANYESTEVMGDGESAHDSPRDEALQNISADDLPDSASQAAHPQDSAFSYRDAKKKLRLALCSADSVAFPVLTHSTRNGLPDHTDPEDNEIVCFLKVQIAEAINLQDKNLMAQLQETMRCVCRFDNRTCRKLLASIAEDYRKRAPYIAYLTRCRQGLQTTQAHLERLLQRVLRDKEVANRYFTTVCVRLLLESKEKKIREFIQDFQKLTAADDKTAQVEDFLQFLYGAMAQDVIWQNASEEQLQDAQLAIERSVMNRIFKLAFYPNQDGDILRDQVLHEHIQRLSKVVTANHRALQIPEVYLREAPWPSAQSEIRTISAYKTPRDKVQCILRMCSTIMNLLSLANEDSVPGADDFVPVLVFVLIKANPPCLLSTVQYISSFYASCLSGEESYWWMQFTAAVEFIKTIDDRK

SEQ ID NO: 16806 - protein, 1042 aa, Homo sapiens
MKSEDYPHETMAPDIHEERQYRCEDCDQLFESKAELADHQKFPCSTPHSAFSMVEEDFQQKLESENDLQEIHTIQECKECDQVFPDLQSLEKHMLSHTEEREYKCDQCPKAFNWKSNLIRHQMSHDSGKHYECENCAKVFTDPSNLQRHIRSQHVGARAHACPECGKTFATSSGLKQHKHIHSSVKPFICEVCHKSYTQFSNLCRHKRMHADCRTQIKCKDCGQMFSTTSSLNKHRRFCEGKNHFAAGGFFGQGISLPGTPAMDKTSMVNMSHANPGLADYFGANRHPAGLTFPTAPGFSFSFPGLFPSGLYHRPPLIPASSPVKGLSSTEQTNKSQSPLMTHPQILPATQDILKALSKHPSVGDNKPVELQPERSSEERPFEKISDQSESSDLDDVSTPSGSDLETTSGSDLESDIESDKEKFKENGKMFKDKVSPLQNLASINNKKEYSNHSIFSPSLEEQTAVSGAVNDSIKAIASIAEKYFGSTGLVGLQDKKVGALPYPSMFPLPFFPAFSQSMYPFPDRDLRSLPLKMEPQSPGEVKKLQKGSSESPFDLTTKRKDEKPLTPVPSKPPVTPATSQDQPLDLSMGSRSRASGTKLTEPRKNHVFGGKKGSNVESRPASDGSLQHARPTPFFMDPIYRVEKRKLTDPLEALKEKYLRPSPGFLFHPQMSAIENMAEKLESFSALKPEASELLQSVPSMFNFRAPPNALPENLLRKGKERYTCRYCGKIFPRSANLTRHLRTHTGEQPYRCKYCDRSFSISSNLQRHVRNIHNKEKPFKCHLCDRCFGQQTNLDRHLKKHENGNMSGTATSSPHSELESTGAILDDKEDAYFTEIRNFIGNSNHGSQSPRNVEERMNGSHFKDEKALVTSQNSDLLDDEEVEDEVLLDEEDEDNDITGKTGKEPVTSNLHEGNPEDDYEETSALEMSCKTSPVRYKEEEYKSGLSALDHIRHFTDSLKMRKMEDNQYSEAELSSFSTSHVPEELKQPLHRKSKSQAYAMMLSLSDKESLHSTSHSSSNVWHSMARAAAESSAIQSISHV

SEQ ID NO: 16807 - protein, 269 aa, Homo sapiens
MTLNLSNNSLSNLAPGAFHGLQHLQVLNLTQNSLLSLESRLFHSLPQLRELDLSSNNISHLPTSLGETWENLTILAVQQNQLQQLDRALLESMPSVRLLLLKDNLWKCNCHLLGLKLWLEKFVYKGGLTDGIICESPDTWKGKDLLRIPHELYQPCPLPAPDPVSSQAQWPGSAHGVVLRPPENHNAGERELLECELKPKPRPANLRHAIATVIITGVVCGIVCLMMLAAAIYGCTYAAITAQYHGGPLAQTNDPGKVEEKERFDSSPA

SEQ ID NO: 16808 - protein, 111 aa, Homo sapiens
MRVESGSAQERGILLESLSTLLEKTTASHEGRAPGNRELTGQCGQLPRSEPSGRSDRGPQPCSARPSHLVSGRRLPCRPLGLPQRGPGTGKRGKGSLFVRPTSCPPRSAVS

SEQ ID NO: 16809 - protein, 466 aa, Homo sapiens
MYSPLCLTQDEFHPFIEALLPHVRAFAYTWFNLQARKRKYFKKHEKRMSKEEERAVKDELLSEKPEVKQKWASRLLAKLRKDIRPEYREDFVLTVTGKKPPCCVLSNPDQKGKMRRIDCLRQADKVWRLDLVMVILFKGIPLESTDGERLVKSPQCSNPGLCVQPHHIGVSVKELDLYLAYFVHAADSSQSESPSQPSDADIKDQPENGHLGFQDSFVTSGVFSVTELVRVSQTPIAAGTGPNFSLSDLESSSYYSMSPGAMRRSLPSTSSTSSTKRLKSVEDEMDSPGEEPFYTGQGRSPGSGSQSSGWHEVEPASPHATPSTLHFPTSPIIQQPGPYFSHPAIRYHPQETLKEFVQLVCPDAGQQAGQVGFLNPNGSSQGKVHNPFLPTPMLPPPPPPPMARPVPLPVPDTKPPTTSTEGGAASPTSPTYSTPSTSPANRFVSVGPRDPSFVNIPQQTQSWYLG

SEQ ID NO: 16810 - protein, 1388 aa, Homo sapiens
MSIPLHSLRFNNTMREENVEPQNKQMAFCRPMTETRADVQILHSHVQLPIVSTSASDPGGTSTQLMTSPVFDTMSAPLMGVPNSGALSPPLMPASDSGALSPLLMPASDSGALSPLLMPALDSGTLSPLLSTSEYGVMSPGMMTIPDFGTMSATLMVAPDSAEISPLAMPAPSSGVVCTPIMSTSSSEAMSTPLMLAPDSGELSPILMQDMNPGVMSTQPVPAPSSEAMSPLQITDEDTEAMSKVLMTALASGEISSLLMSGTDSEAISSLIMSAVASGGTSPQPTSTQNSGGIPTPLMSDLDSGIMSSLLMSSPGSEVMSTPLLSVPDAGEMSTLPKPAPDAEAMSPALMTALPSGVMPTQTMPAPGSGAMSPWSTQNVDSEMMSNPPVRATASGVMSAPPVRALDSGAMSTPLMGAPASGNMSTLQKTVPASGAMTTSLMTVPSSGVMSTEQMSATASRVMSAQLTMAKTSGAMPTGSMKAVAKQYKRATASGKMSTPLRRAPTSGAMSTQPVTATASETMSMPQLTVPASGSMSMLQMRAPVSEAMSMPQMRTMASGLTSAAQMKAMTSGAMSTPLMTAQTSGSTSTLLMRDTASGVMSCPQMRSLASGALSKPLMTPKASGTMFTEKMTTTASEAMPTLLMRDTVSGALSMPQMTDTASGGLSASLMRDTASGAMSTSQMTATVSGGMSMPLMRAQDPGVMPASLMRAKVSGKMLSQPMSTQDPGGMSMSPMKSMTAGGMQMNSPTSDVMSTPTVRAWTSETMSTPLMRTSDPGERPSLLTRASSSGEMSLPLMRAPASGEIATPLRSPAYGAMSAPQMTATASGMMSSMPQVKAPISGAMSMPLTRSTASGGMSMPLMRAPDSRVTSTSQMMPTASGDMCTLPVRAPASGGVSSPLVRAPASGTMSTPLRRPSACETVSTELMRASASGHMSTAQTTAMVSGGMSKPLMRAPASGTMPMPLMSAMASGEMSMPLMETMASGATSTLQTSVANSRSMSLSQTTYTVSGRMATAPIRASASGARSTSFMRASVSGSMPMPLPRATASGCGMGMSMPQMTATDSRGMSTPLMRASGPGTMSTPQTAFGVMSTPEIKATDSGEASTSHINITASGSKPTSHMTATTPETAKPPPKEVPSFGMLTPALCYLLEEQEAARGSCSVEEEMEIDEEKQMKGFLDDSERMAFLVSLHLGAAERWFILQMEVGEPLSHENKSFLRRSQGIYDSLSEIDILSAVLCHPKQGQKSVRQYATDFLLLARHLSWSDAILRTRFLEGLSEAVTTKMGRIFLKVAGSLKELIDRSLYTECQLAEEKDSPGNSSQVLPTACKRNNEEAMGNELSSQQQTEEHQHVSKRCYYLKEHGDPQEGLHDHLGQSTGHHQKAHTNK

SEQ ID NO: 16811 - protein, 502 aa, Homo sapiens
MPVKMLFKELLLLLMMMPLQHYTKTCGFVVYQNDKLFQSKTFTAKSDFSQKIISSKTDENEQDQSASVDMVFSPKYNQKEFQLYSYACVYWNLSAKDWDTYGCQKDKGTDGFLRCRCNHTTNFAVLMTFKKDYQYPKSLDILSNVGCALSVTGLALTVIFQIVTRKVRKTSVTWVLVNLCISMLIFNLLFVFGIENSNKNLQTSDGDINNIDFDNNDIPRTDTINIPNPMCTAIAALLHYFLLVTFTWNALSAAQLYYLLIRTMKPLPRHFILFISLIGWGVPAIVVAITVGVIYSQNGNNPQWELDYRQEKICWLAIPEPNGVIKSPLLWSFIVPVTIILISNVVMFITISIKVLWKNNQNLTSTKKVSSMKKIVSTLSVAVVFGITWILAYLMLVNDDSIRIVFSYIFCLFNTTQGLQIFILYTVRTKVFQSEASKVLMLLSSIGRRKSLPSVTRPRLRVKMYNFLRSLPTLHERFRLLETSPSTEEITLSESDNAKESI

SEQ ID NO: 16812 - protein, 119 aa, Homo sapiens
MMKGEFYVIEYAACDATYNEIVTFERLRPVNQNKTVKKNTFFKCTVDVPEDLREACANENAHKDFKKAVGACRIFYHPETTQLMILSASEATVKRVNILSDMHLRSIRTKLMLMSRNEE

SEQ ID NO: 16813 - protein, 1478 aa, Homo sapiens
MFVSDTVLKERLDPETLESLGLIKQSQQFNQKSVKIKTKLFYKQQKFNLLREENEGYAKLIAELGQDLSGSITSDLILENIKSLIGCFNLDPNRVLDVILEVFECRPEHDDFFISLLESYMSMCEPQTLCHILGFKFKFYQEPNGETPSSLYRVAAVLLQFNLIDLDDLYVHLLPADNCIMDEHKREIAEAKQIVRKLTMVVLSSEKMDEREKEKEKEEEKVEKPPDNQKLGLLEALLKIGDWQHAQNIMDQMPPYYAASHKLIALAICKLIHITIEPLYRRVGVPKGAKGSPVNALQNKRAPKQAESFEDLRRDVFNMFCYLGPHLSHDPILFAKVVRIGKSFMKEFQSDGSKQEDKEKTEVILSCLLSITDQVLLPSLSLMDCNACMSEELWGMFKTFPYQHRYRLYGQWKNETYNSHPLLVKVKAQTIDRAKYIMKRLTKENVKPSGRQIGKLSHSNPTILFDYILSQIQKYDNLITPVVDSLKYLTSLNYDVLAYCIIEALANPEKERMKHDDTTISSWLQSLASFCGAVFRKYPIDLAGLLQYVANQLKAGKSFDLLILKEVVQKMAGIEITEEMTMEQLEAMTGGEQLKAEGGYFGQIRNTKKSSQRLKDALLDHDLALPLCLLMAQQRNGVIFQEGGEKHLKLVGKLYDQCHDTLVQFGGFLASNLSTEDYIKRVPSIDVLCNEFHTPHDAAFFLSRPMYAHHISSKYDELKKSEKGSKQQHKVHKYITSCEMVMAPVHEAVVSLHVSKVWDDISPQFYATFWSLTMYDLAVPHTSYEREVNKLKVQMKAIDDNQEMPPNKKKKEKERCTALQDKLLEEEKKQMEHVQRVLQRLKLEKDNWLLAKSTKNETITKFLQLCIFPRCIFSAIDAVYCARFVELVHQQKTPNFSTLLCYDRVFSDIIYTVASCTENEASRYGRFLCCMLETVTRWHSDRATYEKECGNYPGFLTILRATGFDGGNKADQLDYENFRHVVHKWHYKLTKASVHCLETGEYTHIRNILIVLTKILPWYPKVLNLGQALERRVHKICQEEKEKRPDLYALAMGYSGQLKSRKSYMIPENEFHHKDPPPRNAVASVQNGPGGGPSSSSIGSASKSDESSTEETDKSRERSQCGVKAVNKASSTTPKGNSSNGNSGSNSNKAVKENDKEKGKEKEKEKKEKTPATTPEARVLGKDGKEKPKEERPNKDEKARETKERTPKSDKEKEKFKKEEKAKDEKFKTTVPNAESKSTQEREREKEPSRERDIAKEMKSKENVKGGEKTPVSGSLKSPVPRSDIPEPEREQKRRKIDTHPSPSHSSTVKDSLIELKESSAKLYINHTPPPLSKSKEREMDKKDLDKSRERSREREKKDEKDRKERKRDHSNNDREVPPDLTKRRKEENGTMGVSKHKSESPCESPYPNEKDKEKNKSKSSGKEKGSDSFKSEKMDKISSGGKKESRHDKEKIEKKEKRDSSGGKEEKKHHKSSDKHR

SEQ ID NO: 16814 - protein, 5070 aa, Homo sapiens
MKGARWRRVPWVSLSCLCLCLLPHVVPGTTEDTLITGSKTAAPVTSTGSTTATLEGQSTAASSRTSNQDISASSQNHQTKSTETTSKAQTDTLTQMMTSTLFSSPSVHNVMETAPPDEMTTSFPSSVTNTLMMTSKTITMTTSTDSTLGNTEETSTAGTESSTPVTSAVSITAGQEGQSRTTSWRTSIQDTSASSQNHWTRSTQTTRESQTSTLTHRTTSTPSFSPSVHNVTGTVSQKTSPSGETATSSLCSVTNTSMMTSEKITVTTSTGSTLGNPGETSSVPVTGSLMPVTSAALVTFDPEGQSPATFSRTSTQDTTAFSKNHQTQSVETTRVSQINTLNTLTPVTTSTVLSSPSGFNPSGTVSQETFPSGETTTSSPSSVSNTFLVTSKVFRMPTSRDSTLGNTEETSLSVSGTISAITSKVSTIWWSDTLSTALSPSSLPPKISTAFHTQQSEGAETTGRPHERSSFSPGVSQEIFTLHETTTWPSSFSSKGHTTWSQTELPSTSTGAATRLVTGNPSTGTAGTIPRVPSKVSAIGEPGEPTTYSSHSTTLPKTTGAGAQTQWTQETGTTGEALLSSPSYSVTQMIKTATSPSSSPMLDRHTSQQITTAPSTNHSTIHSTSTSPQESPAVSQRGHTQAPQTTQESQTTRSVSPMTDTKTVTTPGSSFTASGHSPSEIVPQDAPTISAATTFAPAPTGDGHTTQAPTTALQAAPSSHDATLGPSGGTSLSKTGALTLANSVVSTPGGPEGQWTSASASTSPDTAAAMTHTHQAESTEASGQTQTSEPASSGSRTTSAGTATPSSSGASGTTPSGSEGISTSGETTRFSSNPSRDSHTTQSTTELLSASASHGAIPVSTGMASSIVPGTFHPTLSEASTAGRPTGQSSPTSPSASPQETAAISRMAQTQRTRTSRGSDTISLASQATDTFSTVPPTPPSITSTGLTSPQTETHTLSPSGSGKTFTTALISNATPLPVTYASSASTGHTTPLHVTDASSVSTGHATPLPVTSPSSVSTGHTTPLPVTDTSSESTGHVTPLPVTSFSSASTGDSTPLPVTDTSSASTGHVTPLPVTSLSSASTGDTTPLPVTDTSSASTGHATSLPVTDTSSVSTGHTTPLPVTDTSSASTGHATSLPVTDTSSVSTGHTTPLHVTDASSASTGQATPLPVTSLSSVSTGDTTPLPVTSPSSASTGHATPLLVTDTSSASTGHATPLPVTDASSVSTDHATSLPVTIPSAASTGHTTPLPVTDTSSASTGQATSLLVTDTSSVSTGDTTPLPVTSTSSASTGHVTPLHVTSPSSASTGHATPLPVTSLSSASTGDTMPLPVTSPSSASTGDTTPLPVTDASSVSTGHTTPLHVTDASSASTGQATPLPVTSLSSVSTGDTTPLPVTSPSSASTGHATPLLVTDTSSASTGHATPLPVTDASSVSTDHATSLPVTIPSAASTGHTTPLPVTDTSSASTGQATSLLVTDTSSVSTGDTTPLPVTSTSSASTGHVTPLHVTSPSSASTGHATPLPVTSLSSASTGDTMPLPVTSPSSASTGDTTPLPVTDASSVSTGHTTPLPVTSPSSASTGHTTPLPVTDTSSASKGDTTPLPVTSPSSASTGHTTPLPVTDTSSASTGDTTPLPVTNASSLSTGHATPLHVTSPSSASTGHATPLPVTSTSSASTGHATPLPVTGLSSATTDDTTRLPVTDVSSASTGQATPLPVTSLSSVSTGDTTPLPVTSPSSASTGHASPLLVTDASSASTGQATPLPVTDTSSVSTAHATPLPVTGLSSASTDDTTRLPVTDVSSASTGQAIPLPVTSPSSASTGDTTPLPVTDASSASTGDTTSLPVTIPSSASSGHTTSLPVTDASSVSTGHATSLLVTDASSVSTGDTTPLPVTDTNSASTGDTTPLHVTDASSVSTGHATSLPVTSLSSASTGDTTPLPVTSPSSASSGHTTPLPVTDASSVPTGHATSLPVTDASSVSTGHATPLPVTDASSVSTGHATPLPVTDTSSVSTGQATPLPVTSLSSASTGDTTPLPVTDTSSASTGQDTPLPVTSLSSVSTGDTTPLPVTNPSSASTGHATPLLVTDASSISTGHATSLLVTDASSVSTGHATALHDTDASSLSTGDTTPLPVTSPSSTSTGDTTPLPVTETSSVSTGHATSLPVTDTSSASTGHATSLPVTDTSSASTGHATPLPVTDTSSASTGQATPLPVTSPSSASTGHAIPLLVTDTSSASTGQATPLPVTSLSSASTGDTTPLPVTDASSVSTGHATSLPVTSLSSVSTGDTTPLPVTSPSSASTGHATPLHVTDASSASTGHATPLPVTSLSSASTGDTTPLPVTSPSSASTGHATPLHVTDASSVSTGDTTPLPVTSSSSASSGHTTPLPVTDASSASTGDTTPLPVTDTSSASTGHATHLPVTGLSSASTGDTTRLPVTNVSSASTGHATPLPVTSTSSASTGDTTPLPGTDTSSVSTGHTTPLLVTDASSVSTGDTTRLPVTSPSSASTGHTTPLPVTDTPSASTGDTTPLPVTNASSLSTRHATSLHVTSPSSASTGHATSLPVTDTSAASTGHATPLPVTSTSSASTGDTTPLPVTDTYSASTGQATPLPVTSLSSVSTGDTTPLPVTSPSSASTGHATPLLVTDASSASTGQATPLPVTSLSSVSTGDTTPLPVTSPSSASTGHATSLPVTDTSSASTGDTTSLPVTDTSSAYTGDTTSLPVTDTSSSSTGDTTPLLVTETSSVSTGDTTPLPVTDTSSASTGHATPLPVTNTSSVSTGHATPLHVTSPSSASTGHTTPLPVTDASSVSTGHATSLPVTDASSVFTGHATSLPVTIPSSASSGHTTPLPVTDASSVSTGHATSLPVTDASSVSTGHATPLPVTDASSVSTGHATPLPLTSLSSVSTGDTTPLPVTDTSSASTGQATPLPVTSLSSVSTGDTTPLPVTDTSSASTGHATSLPVTDTSSASTGHATPLPDTDTSSASTGHATLLPVTDTSSASIGHATSLPVTDTSSISTGHATPLHVTSPSSASTGHATPLPVTDTSSASTGHANPLHVTSPSSASTGHATPLPVTDTSSASTGHATPLPVTSLSSVSTGDTTPLPVTSPSSASTGHTTPLPVTDTSSASTGQATALPVTSTSSASTGDTTPLPVTDTSSASTGQATPLPVTSLSSVSTGDTTPLPVTSPSSASTGHATPLLVTDASSASTGQATPLPVTSLSSVSTGDTTPLPVTSPSSASTGHATSLPVTDTSSASTGDTTSLPVTDTSSAYTGDTTSLPVTDTSSSSTGDTTPLLVTETSSVSTGHATPLLVTDASSASTGHATPLHVTSPSSASTGDTTPVPVTDTSSVSTGHATPLPVTGLSSASTGDTTRLPVTDISSASTGQATPLPVTNTSSVSTGDTMPLPVTSPSSASTGHATPLPVTSTSSASTGHATPVPVTSTSSASTGHTTPLPVTDTSSASTGDTTPLPVTSPSSASTGHTTPLHVTIPSSASTGDTSTLPVTGASSASTGHATPLPVTDTSSVSTGHATPLPVTSLSSVSTGDTTPLPVTDASSASTGQATPLPVTSLSSVSTGDTTPLLVTDASSVSTGHATPLPVTDTSSASTGDTTRLPVTDTSSASTGQATPLPVTSLSSVSTGDTTPLLVTDASSVSTGHATPLPVTDTSSASTGDTTRLPVTDTSSASTGQATPLPVTIPSSSSSGHTTPLPVTSTSSVSTGHVTPLHVTSPSSASTGHVTPLPVTSTSSASTGHATPLLVTDASSVSTGHATPLPVTDASSASTGDTTPLPVTDTSSASTGQATPLPVTSLSSVSTGDTTPLPVTDASSASTGHATPLPVTIPSSVSTGDTMPLPVTSPSSASTGHATPLPVTGLSSASTGDTTPLPVTDTSSASTRHATPLPVTDTSSASTDDTTRLPVTDVSSASTGHATPLPVTSTSSASTGDTTPLPVTDTSSVSTGHATSLPVTSRSSASTGHATPLPVTDTSSVSTGHATPLPVTSTSSVSTGHATPLPVTSPSSASTGHATPVPVTSTSSASTGDTTPLPVTNASSLSTGHATPLHVTSPSSASRGDTSTLPVTDASSASTGHATPLPLTSLSSVSTGDTTPLPVTDTSSASTGQATPLPVTSLSSVSTGDTTPLPVTIPSSASSGHTTSLPVTDASSVSTGHGTPLPVTSTSSASTGDTTPLPVTDTSSASTGHATPLPVTDTSSASTGHATPLPVTSLSSVSTGHATPLAVSSATSASTVSSDSPLKMETPGMTTPSLKTDGGRRTATSPPPTTSQTIISTIPSTAMHTRSTAAPIPILPERGVSLFPYGAGAGDLEFVRRTVDFTSPLFKPATGFPLGSSLRDSLYFTDNGQIIFPESDYQIFSYPNPLPTGFTGRDPVALVAPFWDDADFSTGRGTTFYQEYETFYGEHSLLVQQAESWIRKMTNNGGYKARWALKVTWVNAHAYPAQWTLGSNTYQAILSTDGSRSYALFLYQSGGMQWDVAQRSGNPVLMGFSSGDGYFENSPLMSQPVWERYRPDRFLNSNSGLQGLQFYRLHREERPNYRLECLQWLKSQPRWPSWGWNQVSCPCSWQQGRRDLRFQPVSIGRWGLGSRQLCSFTSWRGGVCCSYGPWGEFREGWHVQRPWQLAQELEPQSWCCRWNDKPYLCALYQQRRPHVGCATYRPPQPAWMFGDPHITTLDGVSYTFNGLGDFLLVGAQDGNSSFLLQGRTAQTGSAQATNFIAFAAQYRSSSLGPVTVQWLLEPHDAIRVLLDNQTVTFQPDHEDGGGQETFNATGVLLSRNGSEVSASFDGWATVSVIALSNILHASASLPPEYQNRTEGLLGVWNNNPEDDFRMPNGSTIPPGSPEEMLFHFGMTWQINGTGLLGKRNDQLPSNFTPVFYSQLQKNSSWAEHLISNCDGDSSCIYDTLALRNASIGLHTREVSKNYEQANATLNQYPPSINGGRVIEAYKGQTTLIQYTSNAEDANFTLRDSCTDLELFENGTLLWTPKSLEPFTLEILARSAKIGLASALQPRTVVCHCNAESQCLYNQTSRVGNSSLELWGALSCVRTSPAL

SEQ ID NO: 16815 - protein, 756 aa, Homo sapiens
MVKLDIHTLAHHLKQERLYVNSEKQLIQRLNADVLKTAEKLYRTAWIAKQQRINLDRLIITSAEASPAECCQHAKILEDTQFVDGYKQLGFQETAYGEFLSRLRENPRLIASSLVAGEKLNQENTQSVIYTVFTSLYGNCIMQEDESYLLQVLRYLIEFELKESDNPRRLLRRGTCAFSILFKLFSEGLFSAKLFLTATLHEPIMQLLVEDEDHLETDPNKLIERFSPSQQEKLFGEKGSDRFRQKVQEMVESNEAKLVALVNKFIGYLKQNTYCFPHSLRWIVSQMYKTLSCVDRLEVGEVRAMCTDLLLACFICPAVVNPEQYGIISDAPINEVARFNLMQVGRLLQQLAMTGSEEGDPRTKSSLGKFDKSCVAAFLDVVIGGRAVETPPLSSVNLLEGLSRTVVYITYSQLITLVNFMKSVMSGDQLREDRMALDNLLANLPPAKPGKSSSLEMTPYNTPQLSPATTPANKKNRLPIATRSRSRTNMLMDLHMDHEGSSQETIQEVQPEEVLVISLGTGPQLTPGMMSENEVLNMQLSDGGQGDVPVDENKLHGKPDKTLRFSLCSDNLEGISEGPSNRSNSVSSLDLEGESVSELGAGPSGSNGVEALQLLEHEQATTQDNLDDKLRKFEIRDMMGLTDDRDISETVSETWSTDVLGSDFDPNIDEDRLQEIAGAAAENMLGSLLCLPGSGSVLLDPCTGSTISETTSEAWSVEVLPSDSEAPDLKQEERLQELESCSGLGSTSDDTDVREA

SEQ ID NO: 16816 - protein, 601 aa, Homo sapiens
MGVGRQQRGPFQGVRVKNSVKELLLHIRSHKQKASGQAVDDFKTQGVNIEQFRELKNTVSYSGKRKGPDSLSDGPACKRPALLHSQFLTPPQTPTPGESMEDVHLNEPKQESSADLLQNIINIKNECSPVSLNTVQVSWLNPVVVPQSSPAEQCQDFHGGQVFSPPQKCQPFQVRGSQQMIDQASLYQYSPQNQHVEQQPHYTHKPTLEYSPFPIPPQSPAYEPNLFDGPESQFCPNQSLVSLLGDQRESENIANPMQTSSSVQQQNDAHLHSFSMMPSSACEAMVGHEMASDSSNTSLPFSNMGNPMNTTQLGKSLFQWQVEQEESKLANISQDQFLSKDADGDTFLHIAVAQGRRALSYVLARKMNALHMLDIKEHNGQSAFQVAVAANQHLIVQDLVNIGAQVNTTDCWGRTPLHVCAEKGHSQVLQAIQKGAVGSNQFVDLEATNYDGLTPLHCAVIAHNAVVHELQRNQQPHSPEVQELLLKNKSLVDTIKCLIQMGAAVEAKDRKSGRTALHLAAEEANLELIRLFLELPSCLSFVNAKAYNGNTALHVAASLQYRLTQLDAVRLLMRKGADPSTRNLENEQPVHLVPDGPVGEQ

SEQ ID NO: 16817 - protein, 658 aa, Homo sapiens
MMRVQTLREKWAYWRRRQLSLKQADFKDIFKKSTSGSLVEEEDQHMKLSLGGSEMGLSSHLQSSKAGPTRIFTSNTHSSVVLQGFDQLRLEGLLCDVTLMPGDTDDAFPVHRVMMASASDYFKAMFTGGMKEQDLMCIKLHGVSKVGLRKIIDFIYTAKLSLNMDNLQDTLEAASFLQILPVLDFCKVFLISGVTLDNCVEVGRIANTYNLTEVDKYVNSFVLKNFPALLSTGEFLKLPFERLAFVLSSNSLKHCTELELFKATCRWLRLEEPRMDFAAKLMKNIRFPLMTPQELINYVQTVDFMRTDNTCVNLLLEASNYQMMPYMQPVMQSDRTAIRSDTTHLVTLGGVLRQQLVVSKELRMYDEKAHEWKSLAPMDAPRYQHGIAVIGNFLYVVGGQSNYDTKGKTAVDTVFRFDPRYNKWMQVASLNEKRTFFHLSALKGYLYAVGGRNAAGELPTVECYNPRTNEWTYVAKMSEPHYGHAGTVYGGVMYISGGITHDTFQKELMCFDPDTDKWIQKAPMTTVRGLHCMCTVGERLYVIGGNHFRGTSDYDDVLSCEYYSPILDQWTPIAAMLRGQSDVGVAVFENKIYVVGGYSWNNRCMVEIVQKYDPDKDEWHKVFDLPESLGGIRACTLTVFPPEETTPSPSRESPLSAP

SEQ ID NO: 16818 - protein, 525 aa, Homo sapiens
MHSKVTIICIRFLFWFLLLCMLIGKSHTEDDIIIATKNGKVRGMNLTVFGGTVTAFLGIPYAQPPLGRLRFKKPQSLTKWSDIWNATKYANSCCQNIDQSFPGFHGSEMWNPNTDLSEDCLYLNVWIPAPKPKNATVLIWIYGGGFQTGTSSLHVYDGKFLARVERVIVVSMNYRVGALGFLALPGNPEAPGNMGLFDQQLALQWVQKNIAAFGGNPKSVTLFGESAGAASVSLHLLSPGSHSLFTRAILQSGSFNAPWAVTSLYEARNRTLNLAKLTGCSRENETEIIKCLRNKDPQEILLNEAFVVPYGTPLSVNFGPTVDGDFLTDMPDILLELGQFKKTQILVGVNKDEGTAFLVYGAPGFSKDNNSIITRKEFQEGLKIFFPGVSEFGKESILFHYTDWVDDQRPENYREALGDVVGDYNFICPALEFTKKFSEWGNNAFFYYFEHRSSKLPWPEWMGVMHGYEIEFVFGLPLERRDNYTKAEEILSRSIVKRWANFAKYGCSSSTILNYVLETEPVVLI

SEQ ID NO: 16819 - protein, 579 aa, Homo sapiens
MTEKQQEEAEWESINVLLMMHGLKPLSLVKRTDLKDLIIFDKQSSQRMRQNLKLLVEETSCQQNMIQELIETNQQLRNELQLEQSRAANQEQRANDLEQIMESVKSKIGELEDESLSRACHQQNKIKDLQKEQKTLQVKCQHYKKKRTEQEETIASLQMEVCRLKKEEEDRIVTQNRVFAYLCKRVPHTVLDRQLLCLIDYYESKIRKIHTQRQYKEDESQSEEENDYRNLDASPTYKGLLMSLQNQLKESKSKIDALSSEKLNLQKDLETRPTQHELRLYKQQVKKLEKALKKNVKLQELINHKKAEDTEKKDEPSKYNQQQALIDQRYFQVLCSINSIIHNPRAPVIIYKQTKGGVQNFNKDLVQDCGFEHLVPVIEMWADQLTSLKDLYKSLKTLSAELVPWLNLKKQDENEGIKVEDLLFIVDTMLEEVENKEKDSNMPHFQTLQAIVSHFQKLFDVPSLNGVYPRMNEVYTRLGEMNNAVRNLQELLELDSSSSLCVLVSTVGKLCRLINEDVNEQVMQVLGPEDLQSIIYKLEEHEEFFPAFQAFTNDLLEILEIDDLDAIVPAVKKLKVLSY

SEQ ID NO: 16820 - protein, 1181 aa, Homo sapiens
MFTLSLLSRGHGKLGQDKQKLEVYFEPEDYLNWRSPEDYVPVSKPQDKNNASQHSWSLFLPKTFSTRKGALILYSEGFAISAWTPKERRKGPYCPRGPWRKLDLELHTLQDLKEAILAYGRQQGEQDRAWQPYLHFRSQLESQAQRQIQPGHSAKRYLRGLLRTWPPDAMYRLWCAGYIKDSVLLQDSQLNVPKKLRPQQDLSGVPPKYHLLPVFPSFWIQQGKSFEQRQQGLDEGEAGAAGHVDQGPLAKNHGSQGTRLPPRRKQPWQEDETQAEDTSIENHLCLYASKESYNEKTQQTSRKAFGHGRIDHSWLPSDKSHITFCGGAFPNRKADLSDKQRNVKLHKARSSHLLQVLPAERSLFPPVASATGSRIITPGEVKKKKAPKALKLPPISEEPPRVLEPLKSQFKANEPPTELFILPVEIHYHTKQPPKEKAHRRGAPHPESEPESSEESTPVWRPPLKHASLETPWELTVHLPVDASRDTLSPQDDDAPPHDVAPPLDLLPPIKGKKSPESQKGVDSPRTSDHNSPPSLPNMRVPRRALPAAQEDSSDPTLGHFLLGPDGEKVCLSLPGHTQTEALPSGKAYESVNSNISHEEEGPSSQHFLKANTEPRANLHMNLYETSPLTQTTEKQGAQQSLEAAAQKTGEPQSCINKALICSNRKEFYTRKLHIDMTPFLKESGNALDYQEEAGRPLRETHHNDQDPEPRSMTLDSPRASRTEHIQTPEADIVQKVGRDYDVHHLHRGLLGYGPESPERLSAVYTSLLPREREGKAEPRLFSQETSANISHERDLINEAKRKEKPKKDKTKGPKSEREGKVYGQAEAAIGKSKDSKAKKKLEKKTRPQRKRTQKERNLEIAAELSGPDVSYEETEDTSNRGSFASDSFVEDPWLSPKYDAQESQVSLDGRSSPSQIATVTGNMESKEERRCEDPSKALLTKREQEKASWDRLRAERAEMRWLEVEKKRREQEEQRQLQQEQLERAKKMEEELELEQQRRTEEIRLRKQRLQEEQQRQEEEERKQQLRLKAAQERARQQQEEFRRKLRELQRKKQQEEAERAEAEKQRQEELEMQLEEEQKHLMEMAEEERLEYQRRKQEAEEKARLEAEERRQKEEEAARLALEEATKQAQEQARQKAALEKHFHFYQELHKEASGLQWTQNISRPWVYSYFQFLQIPRP

SEQ ID NO: 16821 - protein, 283 aa, Homo sapiens
MKHENVIGLLDVFTPARSLEEFNDVYLVTHLMGADLNNIVKCQKLTDDHVQFLIYQILRGLKYIHSADIIHRDLKPSNLAVNEDCELKILDFGLARHTDDEMTGYVATRWYRAPEIMLNWMHYNQTVDIWSVGCIMAELLTGRTLFPGTDHIDQLKLILRLVGTPGAELLKKISSESARNYIQSLTQMPKMNFANVFIGANPLAVDLLEKMLVLDSDKRITAAQALAHAYFAQYHDPDDEPVADPYDQSFESRDLLIDEWKSLTYDEVISFVPPPLDQEEMES

SEQ ID NO: 16822 - protein, 693 aa, Homo sapiens
MALCNGDSKLENAGGDLKDGHHHYEGAVVILDAGAQYGKVIDRRVRELFVQSEIFPLETPAFAIKEQGFRAIIISGGPNSVYAEDAPWFDPAIFTIGKPVLGICYGMQMMNKVFGGTVHKKSVREDGVFNISVDNTCSLFRGLQKEEVVLLTHGDSVDKVADGFKVVARSGNIVAGIANESKKLYGAQFHPEVGLTENGKVILKNFLYDIAGCSGTFTVQNRELECIREIKERVGTSKVLVLLSGGVDSTVCTALLNRALNQEQVIAVHIDNGFMRKRESQSVEEALKKLGIQVKVINAAHSFYNGTTTLPISDEDRTPRKRISKTLNMTTSPEEKRKIIGDTFVKIANEVIGEMNLKPEEVFLAQGTLRPDLIESASLVASGKAELIKTHHNDTELIRKLREEGKVIEPLKDFHKDEVRILGRELGLPEELVSRHPFPGPGLAIRVICAEEPYICKDFPETNNILKIVADFSASVKKPHTLLQRVKACTTEEDQEKLMQITSLHSLNAFLLPIKTVGVQGDCRSYSYVCGISSKDEPDWESLIFLARLIPRMCHNVNRVVYIFGPPVKEPPTDVTPTFLTTGVLSTLRQADFEAHNILRESGYAGKISQMPVILTPLHFDRDPLQKQPSCQRSVVIRTFITSDFMTGIPATPGNEIPVEVVLKMVTEIKKIPGISRIMYDLTSKPPGTTEWE

SEQ ID NO: 16823 - protein, 737 aa, Homo sapiens
MGQTGKKSEKGPVCWRKRVKSEYMRLRQLKRFRRADEVKSMFSSNRQKILERTEILNQEWKQRRIQPVHILTSCSVTSDLDFPTQVIPLKTLNAVASVPIMYSWSPLQQNFMVEDETVLHNIPYMGDEVLDQDGTFIEELIKNYDGKVHGDRECGFINDEIFVELVNALGQYNDDDDDDDGDDPEEREEKQKDLEDHRDDKESRPPRKFPSDKIFEAISSMFPDKGTAEELKEKYKELTEQQLPGALPPECTPNIDGPNAKSVQREQSLHSFHTLFCRRCFKYDCFLHPFHATPNTYKRKNTETALDNKPCGPQCYQHLEGAKEFAAALTAERIKTPPKRPGGRRRGRLPNNSSRPSTPTINVLESKDTDSDREAGTETGGENNDKEEEEKKDETSSSSEANSRCQTPIKMKPNIEPPENVEWSGAEASMFRVLIGTYYDNFCAIARLIGTKTCRQVYEFRVKESSIIAPAPAEDVDTPPRKKKRKHRLWAAHCRKIQLKKDGSSNHVYNYQPCDHPRQPCDSSCPCVIAQNFCEKFCQCSSECQNRFPGCRCKAQCNTKQCPCYLAVRECDPDLCLTCGAADHWDSKNVSCKNCSIQRGSKKHLLLAPSDVAGWGIFIKDPVQKNEFISEYCGEIISQDEADRRGKVYDKYMCSFLFNLNNDFVVDATRKGNKIRFANHSVNPNCYAKVMMVNGDHRIGIFAKRAIQTGEELFFDYRYSQADALKYVGIEREMEIP

SEQ ID NO: 16824 - protein, 797 aa, Homo sapiens
MDERREEQIVQLLNSVQAKNDKESEAQISWFAPEDHGYGTEVSTKNTPCSENKLDIQEKKLINQEKKMFRIRNRSYIDRDSEYLLQENEPDGTLDQKLLEDLQKKKNDLRYIEMQHFREKLPSYGMQKELVNLIDNHQVTVISGETGCGKTTQVTQFILDNYIERGKGSACRIVCTQPRRISAISVAERVAAERAESCGSGNSTGYQIRLQSRLPRKQGSILYCTTGIILQWLQSDPYLSSVSHIVLDEIHERNLQSDVLMTVVKDLLNFRSDLKVILMSATLNAEKFSEYFGNCPMIHIPGFTFPVVEYLLEDVIEKIRYVPEQKEHRSQFKRGFMQGHVNRQEKEEKEAIYKERWPDYVRELRRRYSASTVDVIEMMEDDKVDLNLIVALIRYIVLEEEDGAILVFLPGWDNISTLHDLLMSQVMFKSDKFLIIPLHSLMPTVNQTQVFKRTPPGVRKIVIATNIAETSITIDDVVYVIDGGKIKETHFDTQNNISTMSAEWVSKANAKQRKGRAGRVQPGHCYHLYNGLRASLLDDYQLPEILRTPLEELCLQIKILRLGGIAYFLSRLMDPPSNEAVLLSIRHLMELNALDKQEELTPLGVHLARLPVEPHIGKMILFGALFCCLDPVLTIAASLSFKDPFVIPLGKEKIADARRKELAKDTRSDHLTVVNAFEGWEEARRRGFRYEKDYCWEYFLSSNTLQMLHNMKGQFAEHLLGAGFVSSRNPKDPESNINSDNEKIIKAVICAGLYPKVAKIRLNLGKKRKMVKVYTKTDGLVAVHPKSVNVEQTDFHY

SEQ ID NO: 16825 - protein, 837 aa, Homo sapiens
MVVDEQQRLTAQLTLQRQKIQELTTNAKETHTKLALAEARVQEEEQKATRLEKELQTQTTKFHQDQDTIMAKLTNEDSQNRQLQQKLAALSRQIDELEETNRSLRKAEEELQDIKEKISKGEYGNAGIMAEVEELRKRVLDMEGKDEELIKMEEQCRDLNKRLERETLQSKDFKLEVEKLSKRIMALEKLEDAFNKSKQECYSLKCNLEKERMTTKQLSQELESLKVRIKELEAIESRLEKTEFTLKEDLTKLKTLTVMFVDERKTMSEKLKKTEDKLQAASSQLQVEQNKVTTVTEKLIEETKRALKSKTDVEEKMYSVTKERDDLKNKLKAEEEKGNDLLSRVNMLKNRLQSLEAIEKDFLKNKLNQDSGKSTTALHQENNKIKELSQEVERLKLKLKDMKAIEDDLMKTEDEYETLERRYANERDKAQFLSKELEHVKMELAKYKLAEKTETSHEQWLFKRLQEEEAKSGHLSREVDALKEKIHEYMATEDLICHLQGDHSVLQKKLNQQENRNRDLGREIENLTKELERYRHFSKSLRPSLNGRRISDPQVFSKEVQTEAVDNEPPDYKSLIPLERAVINGQLYEESENQDEDPNDEGSVLSFKCSQSTPCPVNRKLWIPWMKSKEGHLQNGKMQTKPNANFVQPGDLVLSHTPGQPLHIKVTPDHVQNTATLEITSPTTESPHSYTSTAVIPNCGTPKQRITILQNASITPVKSKTSTEDLMNLEQGMSPITMATFARAQTPESCGSLTPERTMSPIQVLAVTGSASSPEQGRSPEPTEISAKHAIFRVSPDRQSSWQFQRSNSNSSSVITTEDNKIHIHLGSPYMQAVASP

SEQ ID NO: 16826 - protein, 96 aa, Homo sapiens
MTCHKRYKIQKKVREHHRKLRKEAKKRGHKKPRKDPGVPNSAPFKEALLREAELRKQRLEELKQQQKLDRQKELEKKRKLETNPDIKPSNVEPMEK

SEQ ID NO: 16827 - protein, 325 aa, Homo sapiens
MTQQPLRGVTSLRFNQDQSCFCCAMETGVRIYNVEPLMEKGHLVLIWDDAREGKDSKEKLVLEFTFTKPVLSVRMRHDKIVIVLKNRIYVYSFPDNPRKLFEFDTRDNPKGLCDLCPSLEKQLLVFPGHKCGSLQLVDLASTKPGTSSAPFTINAHQSDIACVSLNQPGTVVASASQKGTLIRLFDTQSKEKLVELRRGTDPATLYCINFSHDSSFLCASSDKGTVHIFALKDTRLNRRSALARVGKVGPMIGQYVDSQWSLASFTVPAESACICAFGRNTSKNVNSVIAICVDGTFHKYVFTPDGNCNREAFDVYLDICDDDDF

SEQ ID NO: 16828 - protein, 616 aa, Homo sapiens
MEKIIQVAKTSAAQAIHPGCGFLSENMEFAELCKQEGIIFIGPPPSAIRDMGIKSTSKSIMAAAGVPVVEGYHGEDQSDQCLKEHARRIGYPVMIKAVRGGGGKGMRIVRSEQEFQEQLESARREAKKSFNDDAMLIEKFVDTPRHVEVQVFGDHHGNAVYLFERDCSVQRRHQKIIEEAPAPGIKSEVRKKLGEAAVRAAKAVNYVGAGTVEFIMDSKHNFCFMEMNTRLQVEHPVTEMITGTDLVEWQLRIAAGEKIPLSQEEITLQGHAFEARIYAEDPSNNFMPVAGPLVHLSTPRADPSTRIETGVRQGDEVSVHYDPMIAKLVVWAADRQAALTKLRYSLRQYNIVGLHTNIDFLLNLSGHPEFEAGNVHTDFIPQHHKQLLLSRKAAAKESLCQAALGLILKEKAMTDTFTLQAHDQFSPFSSSSGRRLNISYTRNMTLKDGKNNVAIAVTYNHDGSYSMQIEDKTFQVLGNLYSEGDCTYLKCSVNGVASKAKLIILENTIYLFSKEGSIEIDIPVPKYLSSVSSQETQGGPLAPMTGTIEKVFVKAGDKVKAGDSLMVMIAMKMEHTIKSPKDGTVKKVFYREGAQANRHTPLVEFEEEESDKRESE

SEQ ID NO: 16829 - protein, 247 aa, Homo sapiens
MAEAEFKDHSTAMDTEPNPGTSSVSTTTSSTTTTTITTSSSRMQQPQISVYSGSDRHAVQVIQQALHRPPSSAAQYLQQMYAAQQQHLMLHTAALQQQHLSSSQLQSLAAVQASLSSGRPSTSPTGSVTQQSSMSQTSINLSTSPTPAQLISRSQASSSTSGSITQQTMLLGSTSPTLTASQAQMYLRAQMLIFTPATTVAAVQSDIPVVSSSSSSSCQSAATQVQNLTLRSQKLGVLSSSQNGPPK

SEQ ID NO: 16830 - protein, 865 aa, Homo sapiens
MSDVSTSVQSKFARLAKKKENITYMKREQLTETDKDIAPVLDLKCKDVSAIMNKFKVLMEIQDLMFEEMRETLKNDLKAVLGGKATIPEVKNSENSSSRTEFQQIINLALQKTGMVGKIEGENSKIGDDNENLTFKLEVNELSGKLDNTNEYNSNDGKKLPQGESRSYEVMGSMEETLCNIDDRDGNRNVHLEFTERESRKDGEDEFVKEMREERKFQKLKNKEEVLKASREEKVLMDEGAVLTLVADLSSATLDISKQWSNVFNILRENDFEPKFLCEVKLAFKCDGEIKTFSDLQSLRKFASQKSSVKELLKDVLPQKEEINQGGRKYGIQEKRDKTLIDSKHRAGEITSDGLSFLFLKEVKVAKPEEMKNLETQEEEFSELEELDEEASGMEDDEDTSGLEEEEEEPSGLEEEEEEEASGLEEDEASGLEEEEEQTSEQDSTFQGHTLVDAKHEVEITSDGMETTFIDSVEDSESEEEEEGKSSETGKVKTTSLTEKKASRRQKEIPFSYLVGDSGKKKLVKHQVVHKTQEEEETAVPTSQGTGTPCLTLCLASPSKSLEMSHDEHKKHSHTNLSISTGVTKLKKTEEKKHRTLHTEELTSKEADLTEETEENLRSSVINSIREIKEEIGNLKSSHSGVLEIENSVDDLSSRMDILEERIDSLEDQIEEFSKDTMQMTKQIISKERQRDIEERSRSCNIRLIGIPEKESYENRAEDIIKEIIDENFAELKKGSSLEIVSACRVPSKIDEKRLTPRHILVKFWNSSDKEKIIRASRERREITYQGTRIRLTADLSLDTLDARSKWSNVFKVLLEKGFNPRILYPAKMAFDFRGKTKVFLSIEEFRDYVLHMPTLRELLGNNIP

SEQ ID NO: 16831 - protein, 538 aa, Homo sapiens
MGTASSLVSPAGGEVIEDTYGAGGGEACEIPVEALQKTYQKILREKESALEAKYQAMERAATFEHDRDKVKRQFKIFRETKENEIQDLLRAKRELESKLQRLQAQGIQVFDPGESDSDDNCTDVTAAGTQCEYWTGGALGSEPSIGSMIQLQQSFRGPEFAHSSIDVEGPFANVNRDDWDIAVASLLQVTPLFSHSLWSNTVRCYLIYTDETQPEMDLFLKDYSPKLKRMCETMGYFFHAVYFPIDVENQYLTVRKWEIEKSSLVILFIHLTLPSLLLEDCEEAFLKNPEGKPRLIFHRLEDGKVSSDSVQQLIDQVSNLNKTSKAKIIDHSGDPAEGVYKTYICVEKIIKQDILGFENTDLETKDLGSEDSIPEEDDFGDVLWDIHDEQEQMETFQQASNSAHELGFEKYYQRLNDLVAAPAPIPPLLVSGGPGSGKSLLLSKWIQLQQKNSPNTLILSHFVGRPMSTSSESSLIIKRLTLKLMQHSWSVSALTLDPAKLLEEFPRWLEKLSARHQGSIIIVIDSIDQVQVVAYTSS

SEQ ID NO: 16832 - protein, 142 aa, Homo sapiens
SLINEQWVVSAGHCYKSRIQVRLGEHNIEVLEGNEQFINAAKIIRHPQYDRKTLNNDIMLIKLSSRAVINARVSTISLPTAPPATGTKCLISGWGNTASSGADYPDELQCLDAPVLSQAKCEASYPGKITSNMFCVGFLEGG

SEQ ID NO: 16833 - protein, 203 aa, Homo sapiens
MGLPEERVRSGSGSRGQEEAGAGGRARSWSPPPEVSRSAHVPSLQRYRELHRRSVEEPREFWGDIAKEFYWKTPCPGPFLRYNFDVTKGKIFIEWMKGATTNICYNVLDRNVHEKKLGDKVAFYWSTSGNSSYRYTCREGNEPGETTQITYHQLLVQVCQFSNVLRKQGIQKGDRVAIYMPMIPELVVAMLACARIGALHSIV

SEQ ID NO: 16834 - protein, 123 aa, Homo sapiens
MMKGEFYVIEYAACDATYNEIVTFERLRPVNQNKTVKKNTFFKCTVDVPEDLREACANENAHKDFKKAVGACRIFYHPETTQLMILSASEATVKRVNILSDMHLRSIRTKLMLMSRNEEATKH

SEQ ID NO: 16835 - protein, 142 aa, Homo sapiens
AAHLWPQLTGLGRIERGQPCNACGDQCPGFALHKWRKICLHCKCPQEEHMVTVMPLEMEKTISKLMFDFQRNSTSDDDSGCALEEYAWVPPGLKPEQVHQYYSCLPEEKVPYVNSPGEKLRIKQLLHQLPPHDNEVRYCNSL

SEQ ID NO: 16836 - protein, 73 aa, Homo sapiens
MKVDREERANLSSQALQMSLDYGFVTPLTSMSIRGMADQDGLKPTIDKPSEDSPPLEMLGPRRTPIPSGCQTE

SEQ ID NO: 16837 - protein, 229 aa, Homo sapiens
MTRFGVRLYKLLVITVATKESDGFHRFMQSAKYFNYTVKVLGQGEEWRGGDGINSIGGGQKVRLMKEVMEHYADQDDLVVMFTECFDVIFAGGPEEVLKKFQKANHKVVFAADGILWPDKRLADKYPVVHIGKRYLNSGGFIGYAPYVNRIVQQWNLQDNDDDQLFYTKVYIDPLKREAINITLDHKCKIFQTLNGAVDEVVLKFENGKARAKNTFYETLPVAINGNGP

SEQ ID NO: 16838 - protein, 1305 aa, Homo sapiens
MSVLISQSVINYVEEENIPALKALLEKCKDVDERNECGQTPLMIAAEQGNLEIVKELIKNGANCNLEDLDNWTALISASKEGHVHIVEELLKCGVNLEHRDMGGWTALMWACYKGRTDVVELLLSHGANPSVTGLQYSVYPIIWAAGRGHADIVHLLLQNGAKVNCSDKYGTTPLVWAARKGHLECVKHLLAMGADVDQEGANSMTALIVAVKGGYTQSVKEILKRNPNVNLTDKDGNTALMIASKEGHTEIVQDLLDAGTYVNIPDRSGDTVLIGAVRGGHVEIVRALLQKYADIDIRGQDNKTALYWAVEKGNATMVRDILQCNPDTEICTKDGETPLIKATKMRNIEVVELLLDKGAKVSAVDKKGDTPLHIAIRGRSRKLAELLLRNPKDGRLLYRPNKAGETPYNIDCSHQKSILTQIFGARHLSPTETDGDMLGYDLYSSALADILSEPTMQPPICVGLYAQWGSGKSFLLKKLEDEMKTFAGQQIEPLFQFSWLIVFLTLLLCGGLGLLFAFTVHPNLGIAVSLSFLALLYIFFIVIYFGGRREGESWNWAWVLSTRLARHIGYLELLLKLMFVNPPELPEQTTKALPVRFLFTDYNRLSSVGGETSLAEMIATLSDACEREFGFLATRLFRVFKTEDTQGKKKWKKTCCLPSFVIFLFIIGCIISGITLLAIFRVDPKHLTVNAVLISIASVVGLAFVLNCRTWWQVLDSLLNSQRKRLHNAASKLHKLKSEGFMKVLKCEVELMARMAKTIDSFTQNQTRLVVIIDGLDACEQDKVLQMLDTVRVLFSKGPFIAIFASDPHIIIKAINQNLNSVLRDSNINGHDYMRNIVHLPVFLNSRGLSNARKFLVTSATNGDVPCSDTTGIQEDADRRVSQNSLGEMTKLGSKTALNRRDTYRRRQMQRTITRQMSFDLTKLLVTEDWFSDISPQTMRRLLNIVSVTGRLLRANQISFNWDRLASWINLTEQWPYRTSWLILYLEETEGIPDQMTLKTIYERISKNIPTTKDVEPLLEIDGDIRNFEVFLSSRTPVLVARDVKVFLPCTVNLDPKLREIIADVRAAREQISIGGLAYPPLPLHEGPPRAPSGYSQPPSVCSSTSFNGPFAGGVVSPQPHSSYYSGMTGPQHPFYNRGSGPAPGPVVLLNSLNVDAVCEKLKQIEGLDQSMLPQYCTTIKKANINGRVLAQCNIDELKKEMNMNFGDWHLFRSTVLEMRNAESHVVPEDPRFLSESSSGPAPHGEPARRASHNELPHTELSSQTPYTLNFSFEELNTLGLDEGAPRHSNLSWQSQTRRTPSLS

SEQ ID NO: 16839 - protein, 115 aa, Homo sapiens
MHSTQDKSLHLEGDPNPSAAPTSTCAPRKMPKRISISKQLASVKALRKCSDLEKAIATTALIFRNSSDSDGKLEKAIAKDLLQTQFRNFAEPCEDSRRSWPSAKLEESTLSRHWI

SEQ ID NO: 16840 - protein, 433 aa, Homo sapiens
MKPGATGESDLAEVLPQHKFDSKSLEAYLNQHLSGFGAEREATLTIAQYRAGKSNPTFYLQKGFQTYVLRKKPPGSLLPKAHQIDREFKVQKALFSIGFPVPKPILYCSDTSVIGTEFYVMEHVQGRIFRDLTIPGLSPAERSAIYVATVETLAQLHSLNIQSLQLEGYGIGAGYCKRQVSTWTKQYQAAAHQDIPAMQQLSEWLMKNLPDNDNEENLIHGDFRLDNIVFHPKECRVIAVLDWELSTIGHPLSDLAHFSLFYFWPRTVPMINQGSYSENSGIPSMEELISIYCRCRGINSILPNWNFFLALSYFKMAGIAQGVYSRYLLGNNSSEDSFLFANIVQPLAETGLQLSKRTFSTVLPQIDTTGQLFVQTRKGQEVLIKVKHFMKQHILPAEKTQGIWRFCTCMEVRNRRNSGLSLFFKGTLPLASV

SEQ ID NO: 16841 - protein, 1514 aa, Homo sapiens
MEPRSMEYFCAQVQQKDVGGRLQVGQELLLYLGAPGAISDLEEDLGRLGKTVDALTGWVGSSNYRVSLMGLEILSAFVDRLSTRFKSYVAMVIVALIDRMGDAKDKVRDEAQTLILKLMDQVAPPMYIWEQLASGFKHKNFRSREGVCLCLIETLNIFGAQPLVISKLIPHLCILFGDSNSQVRDAAILAIVEIYRHVGEKVRMDLYKRGIPPARLEMIFAKFDEVQSSGGMILSVCKDKSFDDEESVDGNRPSSAASAFKVPAPKTSGNPANSARKPGSAGGPKVGAGASKEGGAGAVDEDDFIKAFTDVPSIQIYSSRELEETLNKIREILSDDKHDWDQRANALKKIRSLLVAGAAQYDCFFQHLRLLDGALKLSAKDLRSQVVREACITVAHLSTVLGNKFDHGAEAIVPTLFNLVPNSAKVMATSGCAAIRFIIRHTHVPRLIPLITSNCTSKSVPVRRRSFEFLDLLLQEWQTHSLERHAAVLVETIKKGIHDADAEARVEARKTYMGLRNHFPGEAETLYNSLEPSYQKSLQTYLKSSGSVASLPQSDRSSSSSQESLNRPFSSKWSTANPSTVAGRVSAGSSKASSLPGSLQRSRSDIDVNAAAGAKAHHAAGQSVRSGRLGAGALNAGSYASLEDTSDKLDGTASEDGRVRAKLSAPLAGMGNAKADSRGRSRTKMVSQSQPGSRSGSPGRVLTTTALSTVSSGVQRVLVNSASAQKRSKIPRSQGCSREASPSRLSVARSSRIPRPSVSQGCSREASRESSRDTSPVRSFQPLGPGYGISQSSRLSSSVSAMRVLNTGSDVEEAVADALLLGDIRTKKKPARRRYESYGMHSDDDANSDASSACSERSYSSRNGSIPTYMRQTEDVAEVLNRCASSNWSERKEGLLGLQNLLKNQRTLSRVELKRLCEIFTRMFADPHGKVFSMFLETLVDFIQVHKDDLQDWLFVLLTQLLKKMGADLLGSVQAKVQKALDVTRESFPNDLQFNILMRFTVDQTQTPSLKVKVAILKYIETLAKQMDPGDFINSSETRLAVSRVITWTTEPKSSDVRKAAQSVLISLFELNTPEFTMLLGALPKTFQDGATKLLHNHLRNTGNGTQSSMGSPLTRPTPRSPANWSSPLTSPTNTSQNTLSPSAFDYDTENMNSEDIYSSLRGVTEAIQNFSFRSQEDMNEPLKRDSKKDDGDSMCGGPGMSDPRAGGDATDSSQTALDNKASLLHSMPTHSSPRSRDYNPYNYSDSISPFNKSALKEAMFDDDADQFPDDLSLDHSDLVAELLKELSNHNERVEERKIALYELMKLTQEESFSVWDEHFKTILLLLLETLGDKEPTIRALALKVLREILRHQPARFKNYAELTVMKTLEAHKDPHKEVVRSAEEAASVLATSISPEQCIKVLCPIIQTADYPINLAAIKMQTKVIERVSKETLNLLLPEIMPGLIQGYDNSESSVRKACVFCLVAVHAVIGDELKPHLSQLTGSKMKLLNLYIKRAQTGSGGADPTTDVSGQS

SEQ ID NO: 16842 - protein, 626 aa, Homo sapiens
MYQGHMQKSKEQGYGKLSSDEDLEIIVDQKQGKGSRAADKAVAMVMKEIPREESAEEKPLLTMTSQLVNEQQESRPLLSPSIDDFLCETKSEAIARPVTSNTAVLTTGLDLLDLSEPVSQTQTKAKKSEPSSKTSSLKKKADGSDLISTDAEQRGQPLRVPETSSLDLDIQTQLEKWDDVKFHGDRNTKGHPMAERKSSSSRTGSKELLWSSEHRSQPELSGGKSALNSESASELELVAPTQARLTKEHRWGSALLSRNHSLEEEFERAKAAVESDTEFWDKMQAEWEEMARRNWISENQEAQNQVTISASEKGYYFHTENPFKDWPGAFEEGLKRLKEGDLPVTILFMEAAILQDPGDAEAWQFLGITQAENENEQAAIVALQRCLELQPNNLKALMALAVSYTNTGHQQDACDALKNWIKQNPKYKYLVKSKKGSPGLTRRMSKSPVDSSVLEGVKELYLEAAHQNGDMIDPDLQTGLGVLFHLSGEFNRAIDAFNAALTVRPEDYSLWNRLGATLANGDRSEEAVEAYTRALEIQPGFIRSRYNLGISCINLGAYREAVSNFLTALSLQRKSRNQQQVPHPAISGNIWAALRIALSLMDQPELFQAANLGDLDVLLRAFNLDP

SEQ ID NO: 16843 - protein, 506 aa, Homo sapiens
MEMETTEPEPDCVVQPPSPPDDFSCQMRLSEKITPLKTCFKKKDQKRLGTGTLRSLRPILNTLLESGSLDGVFRSRNQSTDENSLHEPMMKKAMEINSSCPPAENNMSVLIPDRTNVGDQIPEAHPSTEAPERVVPIQDHSFPSETLSGTVADSTPAHFQTDLLHPVSSDVPTSPDCLDKVIDYVPGIFQENSFTIQYILDTSDKLSTELFQDKSEEASLDLVFELVNQLQYHTHQENGIEICMDFLQGTCIYGRDCLKHHTVLPYHWQIKRTTTQKWQSVFNDSQEHLERFYCNPENDRMRMKYGGQEFWADLNAMNVYETTEFDQLRRLSTPPSSNVNSIYHTVWKFFCRDHFGWREYPESVIRLIEEANSRGLKEVRFMMWNNHYILHNSFFRREIKRRPLFRSCFILLPYLQTLGGVPTQAPPPLEATSSSQIICPDGVTSANFYPETWVYMHPSQDFIQVPVSAEDKSYRIIYNLFHKTVPEFKYRILQILRVQNQFLWEK

SEQ ID NO: 16844 - protein, 121 aa, Homo sapiens
MKRRNKIQPCLSKPAFASLLRFHQFHPFLCAADFRKIASLYGSDKFDLPYGMRTSAEYFRLALSKLQSCDLFDEFDNIPCKKCVVVGNGGVLKNKTLGEKIDSYDVIIRMNNGPVLGHEEE

SEQ ID NO: 16845 - protein, 622 aa, Homo sapiens
MDLSALRVEEVQNVINAMQKILECPICLELIKEPVSTKCDHIFCKSLQESTRFSQLVEELLKIICAFQLDTGLEYANSYNFAKKENNSPEHLKDEVSIIQSMGYRNRAKRLLQSEPENPSLQETSLSVQLSNLGTVRTLRTKQRIQPQKTSVYIELGSDSSEDTVNKATYCSVGDQELLQITPQGTRDEISLDSAKKAACEFSETDVTNTEHHQPSNNDLNTTEKRAAERHPEKYQGSSVSNLHVEPCGTNTHASSLQHENSSLLLTKDRMNVEKAEFCNKSKQPGLARSQHNRWAGSKETCNDRRTPSTEKKVDLNADPLCERKEWNKQKLPCSENPRDTEDVPWITLNSSIQKVNEWFSRSDELLGSDDSHDGESESNAKVADVLDVLNEVDEYSGSSEKIDLLASDPHEALICKSERVHSKSVESNIEDKIFGKTYRKKASLPNLSHVTENLIIGAFVTEPQIIQERPLTNKLKRKRRPTSGLHPEDFIKKADLAVQKTPEMINQGTNQTEQNGQVMNITNSGHENKTKGDSIQNEKNPNPIESLEKESAFKTKAEPISSSISNMELELNIHNSKAPKKNRLRRKSSTRHIHALELVVSRNLSPPNCTELQIDSCSSSE

SEQ ID NO: 16846 - protein, 4400 aa, Homo sapiens
MKGARWRRVPWVSLSCLCLCLLPHVVPGTTEDTLITGSKTAAPVTSTGSTTATLEGQSTAASSRTSNQDISASSQNHQTKSTETTSKAQTDTLTQMMTSTLFSSPSVHNVMETAPPDEMTTSFPSSVTNTLMMTSKTITMTTSTDSTLGNTEETSTAGTESSTPVTSAVSITAGQEGQSRTTSWRTSIQDTSASSQNHWTRSTQTTRESQTSTLTHRTTSTPSFSPSVHNVTGTVSQKTSPSGETATSSLCSVTNTSMMTSEKITVTTSTGSTLGNPGETSSVPVTGSLMPVTSAALVTFDPEGQSPATFSRTSTQDTTAFSKNHQTQSVETTRVSQINTLNTLTPVTTSTVLSSPSGFNPSGTVSQETFPSGETTTSSPSSVSNTFLVTSKVFRMPTSRDSTLGNTEETSLSVSGTISAITSKVSTIWWSDTLSTALSPSSLPPKISTAFHTQQSEGAETTGRPHERSSFSPGVSQEIFTLHETTTWPSSFSSKGHTTWSQTELPSTSTGAATRLVTGNPSTGTAGTIPRVPSKVSAIGEPGEPTTYSSHSTTLPKTTGAGAQTQWTQETGTTGEALLSSPSYSVTQMIKTATSPSSSPMLDRHTSQQITTAPSTNHSTIHSTSTSPQESPAVSQRGHTQAPQTTQESQTTRSVSPMTDTKTVTTPGSSFTASGHSPSEIVPQDAPTISAATTFAPAPTGDGHTTQAPTTALQAAPSSHDATLGPSGGTSLSKTGALTLANSVVSTPGGPEGQWTSASASTSPDTAAAMTHTHQAESTEASGQTQTSEPASSGSRTTSAGTATPSSSGASGTTPSGSEGISTSGETTRFSSNPSRDSHTTQSTTELLSASASHGAIPVSTGMASSIVPGTFHPTLSEASTAGRPTGQSSPTSPSASPQETAAISRMAQTQRTRTSRGSDTISLASQATDTFSTVPPTPPSITSTGLTSPQTETHTLSPSGSGKTFTTALISNATPLPVTYASSASTGHTTPLHVTDASSVSTGHATPLPVTSPSSVSTGHTTPLPVTDTSSESTGHVTPLPVTSFSSASTGDSTPLPVTDTSSASTGHVTPLPVTSLSSASTGDTTPLPVTDTSSASTGHATSLPVTDTSSVSTGHTTPLPVTDTSSASTGHATSLPVTDTSSVSTGHTTPLHVTDASSASTGQATPLPVTSLSSVSTGDTTPLPVTSPSSASTGHATPLLVTDTSSASTGHATPLPVTDASSVSTDHATSLPVTIPSAASTGHTTPLPVTDTSSASTGQATSLLVTDTSSVSTGDTTPLPVTSTSSASTGHVTPLHVTSPSSASTGHATPLPVTSLSSASTGDTMPLPVTSPSSASTGDTTPLPVTDASSVSTGHTTPLHVTDASSASTGQATPLPVTSLSSVSTGDTTPLPVTSPSSASTGHATPLLVTDTSSASTGHATPLPVTDASSVSTDHATSLPVTIPSAASTGHTTPLPVTDTSSASTGQATSLLVTDTSSVSTGDTTPLPVTSTSSASTGHVTPLHVTSPSSASTGHATPLPVTSLSSASTGDTMPLPVTSPSSASTGDTTPLPVTDASSVSTGHTTPLPVTSPSSASTGHTTPLPVTDTSSASKGDTTPLPVTSPSSASTGHTTPLPVTDTSSASTGDTTPLPVTNASSLSTGHATPLHVTSPSSASTGHATPLPVTSTSSASTGHATPLPVTGLSSATTDDTTRLPVTDVSSASTGQATPLPVTSLSSVSTGDTTPLPVTSPSSASTGHASPLLVTDASSASTGQATPLPVTDTSSVSTAHATPLPVTGLSSASTDDTTRLPVTDVSSASTGQAIPLPVTSPSSASTGDTTPLPVTDASSASTGDTTSLPVTIPSSASSGHTTSLPVTDASSVSTGHATSLLVTDASSVSTGDTTPLPVTDTNSASTGDTTPLHVTDASSVSTGHATSLPVTSLSSASTGDTTPLPVTSPSSASSGHTTPLPVTDASSVPTGHATSLPVTDASSVSTGHATPLPVTDASSVSTGHATPLPVTDTSSVSTGQATPLPVTSLSSASTGDTTPLPVTDTSSASTGQDTPLPVTSLSSVSTGDTTPLPVTNPSSASTGHATPLLVTDASSISTGHATSLLVTDASSVSTGHATALHDTDASSLSTGDTTPLPVTSPSSTSTGDTTPLPVTETSSVSTGHATSLPVTDTSSASTGHATSLPVTDTSSASTGHATPLPVTDTSSASTGQATPLPVTSPSSASTGHAIPLLVTDTSSASTGQATPLPVTSLSSASTGDTTPLPVTDASSVSTGHATSLPVTSLSSVSTGDTTPLPVTSPSSASTGHATPLHVTDASSASTGHATPLPVTSLSSASTGDTTPLPVTSPSSASTGHATPLHVTDASSVSTGDTTPLPVTSSSSASSGHTTPLPVTDASSASTGDTTPLPVTDTSSASTGHATHLPVTGLSSASTGDTTRLPVTNVSSASTGHATPLPVTSTSSASTGDTTPLPGTDTSSVSTGHTTPLLVTDASSVSTGDTTRLPVTSPSSASTGHTTPLPVTDTPSASTGDTTPLPVTNASSLSTRHATSLHVTSPSSASTGHATSLPVTDTSAASTGHATPLPVTSTSSASTGDTTPLPVTDTYSASTGQATPLPVTSLSSVSTGDTTPLPVTSPSSASTGHATPLLVTDASSASTGQATPLPVTSLSSVSTGDTTPLPVTSPSSASTGHATSLPVTDTSSASTGDTTSLPVTDTSSAYTGDTTSLPVTDTSSSSTGDTTPLLVTETSSVSTGDTTPLPVTDTSSASTGHATPLPVTNTSSVSTGHATPLHVTSPSSASTGHTTPLPVTDASSVSTGHATSLPVTDASSVFTGHATSLPVTIPSSASSGHTTPLPVTDASSVSTGHATSLPVTDASSVSTGHATPLPVTDASSVSTGHATPLPLTSLSSVSTGDTTPLPVTDTSSASTGQATPLPVTSLSSVSTGDTTPLPVTDTSSASTGHATSLPVTDTSSASTGHATPLPDTDTSSASTGHATLLPVTDTSSASIGHATSLPVTDTSSISTGHATPLHVTSPSSASTGHATPLPVTDTSSASTGHANPLHVTSPSSASTGHATPLPVTDTSSASTGHATPLPVTSLSSVSTGDTTPLPVTSPSSASTGHTTPLPVTDTSSASTGQATALPVTSTSSASTGDTTPLPVTDTSSASTGQATPLPVTSLSSVSTGDTTPLPVTSPSSASTGHATPLLVTDASSASTGQATPLPVTSLSSVSTGDTTPLPVTSPSSASTGHATSLPVTDTSSASTGDTTSLPVTDTSSAYTGDTTSLPVTDTSSSSTGDTTPLLVTETSSVSTGHATPLLVTDASSASTGHATPLHVTSPSSASTGDTTPVPVTDTSSVSTGHATPLPVTGLSSASTGDTTRLPVTDISSASTGQATPLPVTNTSSVSTGDTMPLPVTSPSSASTGHATPLPVTSTSSASTGHATPVPVTSTSSASTGHTTPLPVTDTSSASTGDTTPLPVTSPSSASTGHTTPLHVTIPSSASTGDTSTLPVTGASSASTGHATPLPVTDTSSVSTGHATPLPVTSLSSVSTGDTTPLPVTDASSASTGQATPLPVTSLSSVSTGDTTPLLVTDASSVSTGHATPLPVTDTSSASTGDTTRLPVTDTSSASTGQATPLPVTSLSSVSTGDTTPLLVTDASSVSTGHATPLPVTDTSSASTGDTTRLPVTDTSSASTGQATPLPVTIPSSSSSGHTTPLPVTSTSSVSTGHVTPLHVTSPSSASTGHVTPLPVTSTSSASTGHATPLLVTDASSVSTGHATPLPVTDASSASTGDTTPLPVTDTSSASTGQATPLPVTSLSSVSTGDTTPLPVTDASSASTGHATPLPVTIPSSVSTGDTMPLPVTSPSSASTGHATPLPVTGLSSASTGDTTPLPVTDTSSASTRHATPLPVTDTSSASTDDTTRLPVTDVSSASTGHATPLPVTSTSSASTGDTTPLPVTDTSSVSTGHATSLPVTSRSSASTGHATPLPVTDTSSVSTGHATPLPVTSTSSVSTGHATPLPVTSPSSASTGHATPVPVTSTSSASTGDTTPLPVTNASSLSTGHATPLHVTSPSSASRGDTSTLPVTDASSASTGHATPLPLTSLSSVSTGDTTPLPVTDTSSASTGQATPLPVTSLSSVSTGDTTPLPVTIPSSASSGHTTSLPVTDASSVSTGHGTPLPVTSTSSASTGDTTPLPVTDTSSASTGHATPLPVTDTSSASTGHATPLPVTSLSSVSTGHATPLAVSSATSASTVSSDSPLKMETPGMTTPSLKTDGGRRTATSPPPTTSQTIISTIPSTAMHTRSTAAPIPILPERGVSLFPYGAGAGDLEFVRRTVDFTSPLFKPATGFPLGSSLRDSLYASQAGTLWPWWLRSGTMLTSPLVGGPHFIRNTRRSMVNTAC

SEQ ID NO: 16847 - protein, 1323 aa, Homo sapiens
MASDSPARSLDEIDLSALRDPAGIFELVELVGNGTYGQVYKGRHVKTGQLAAIKVMDVTGDEEEEIKQEINMLKKYSHHRNIATYYGAFIKKNPPGMDDQLWLVMEFCGAGSVTDLIKNTKGNTLKEEWIAYICREILRGLSHLHQHKVIHRDIKGQNVLLTENAEVKLVDFGVSAQLDRTVGRRNTFIGTPYWMAPEVIACDENPDATYDFKSDLWSLGITAIEMAEGAPPLCDMHPMRALFLIPRNPAPRLKSKKWSKKFQSFIESCLVKNHSQRPATEQLMKHPFIRDQPNERQVRIQLKDHIDRTKKKRGEKDETEYEYSGSEEEEEENDSGEPSSILNLPGESTLRRDFLRLQLANKERSEALRRQQLEQQQRENEEHKRQLLAERQKRIEEQKEQRRRLEEQQRREKELRKQQEREQRRHYEEQMRREEERRRAEHEQEYKRKQLEEQRQAERLQRQLKQERDYLVSLQHQRQEQRPVEKKPLYHYKEGMSPSEKPAWAKEVEERSRLNRQSSPAMPHKVANRISDPNLPPRSESFSISGVQPARTPPMLRPVDPQIPHLVAVKSQGPALTASQSVHEQPTKGLSGFQEALNVTSHRVEMPRQNSDPTSENPPLPTRIEKFDRSSWLRQEEDIPPKVPQRTTSISPALARKNSPGNGSALGPRLGSQPIRASNPDLRRTEPILESPLQRTSSGSSSSSSTPSSQPSSQGGSQPGSQAGSSERTRVRANSKSEGSPVLPHEPAKVKPEESRDITRPSRPADLTALAKELRELRIEETNRPMKKVTDYSSSSEESESSEEEEEDGESETHDGTVAVSDIPRLIPTGAPGSNEQYNVGMVGTHGLETSHADSFSGSISREGTLMIRETSGEKKRSGHSDSNGFAGHINLPDLVQQSHSPAGTPTEGLGRVSTHSQEMDSGTEYGMGSSTKASFTPFVDPRVYQTSPTDEDEEDEESSAAALFTSELLRQEQAKLNEARKISVVNVNPTNIRPHSDTPEIRKYKKRFNSEILCAALWGVNLLVGTENGLMLLDRSGQGKVYNLINRRRFQQMDVLEGLNVLVTISGKKNKLRVYYLSWLRNRILHNDPEVEKKQGWITVGDLEGCIHYKVVKYERIKFLVIALKNAVEIYAWAPKPYHKFMAFKSFADLQHKPLLVDLTVEEGQRLKVIFGSHTGFHVIDVDSGNSYDIYIPSHIQGNITPHAIVILPKTDGMEMLVCYEDEGVYVNTYGRITKDVVLQWGEMPTSVAYIHSNQIMGWGEKAIEIRSVETGHLDGVFMHKRAQRLKFLCERNDKVFFASVRSGGSSQVFFMTLNRNSMMNW

SEQ ID NO: 16848 - protein, 1051 aa, Homo sapiens
MKSEDYPHETMAPDIHEERQYRCEDCDQLFESKAELADHQKFPCSTPHSAFSMVEEDFQQKLESENDLQEIHTIQECKECDQVFPDLQSLEKHMLSHTEEREYKCDQCPKAFNWKSNLIRHQMSHDSGKHYECENCAKVFTDPSNLQRHIRSQHVGARAHACPECGKTFATSSGLKQHKHIHSSVKPFICEVCHKSYTQFSNLCRHKRMHADCRTQIKCKDCGQMFSTTSSLNKHRRFCEGKNHFAAGGFFGQGISLPGTPAMDKTSMVNMSHANPGLADYFGANRHPAGLTFPTAPGFSFSFPGLFPSGLYHRPPLIPASSPVKGLSSTEQTNKSQSPLMTHPQILPATQDILKALSKHPSVGDNKPVELQPERSSEERPFEKISDQSESSDLDDVSTPSGSDLETTSGSDLESDIESDKEKFKENGKMFKDKVSPLQNLASINNKKEYSNHSIFSPSLEEQTAVSGAVNDSIKAIASIAEKYFGSTGLVGLQDKKVGALPYPSMFPLPFFPAFSQSMYPFPDRDLRSLPLKMEPQSPGEVKKLQKGSSESPFDLTTKRKDEKPLTPVPSKPPVTPATSQDQPLDLSMGSRSRASGTKLTEPRKNHVFGGKKGSNVESRPASDGSLQHARPTPFFMDPIYRVEKRKLTDPLEALKEKYLRPSPGFLFHPQFQLPDQRTWMSAIENMAEKLESFSALKPEASELLQSVPSMFNFRAPPNALPENLLRKGKERYTCRYCGKIFPRSANLTRHLRTHTGEQPYRCKYCDRSFSISSNLQRHVRNIHNKEKPFKCHLCDRCFGQQTNLDRHLKKHENGNMSGTATSSPHSELESTGAILDDKEDAYFTEIRNFIGNSNHGSQSPRNVEERMNGSHFKDEKALVTSQNSDLLDDEEVEDEVLLDEEDEDNDITGKTGKEPVTSNLHEGNPEDDYEETSALEMSCKTSPVRYKEEEYKSGLSALDHIRHFTDSLKMRKMEDNQYSEAELSSFSTSHVPEELKQPLHRKSKSQAYAMMLSLSDKESLHSTSHSSSNVWHSMARAAAESSAIQSISHV

SEQ ID NO: 16849 - protein, 352 aa, Homo sapiens
MKMASFLAFLLLNFRVCLLLLQLLMPHSAQFSVLGPSGPILAMVGEDADLPCHLFPTMSAETMELKWVSSSLRQVVNVYADGKEVEDRQSAPYRGRTSILRDGITAGKAALRIHNVTASDSGKYLCYFQDGDFYEKALVELKVAALGSDLHVDVKGYKDGGIHLECRSTGWYPQPQIQWSNNKGENIPTVEAPVVADGVGLYAVAASVIMRGSSGEGVSCTIRSSLLGLEKTASISIADPFFRSAQRWIAALAGTLPVLLLLLGGAGYFLWQQQEEKKTQFRKKKREQELREMAWSTMKQEQSTRVKLLEELRWRSIQYASRGERHSAYNEWKKALFKPGEEMLQMRLHFVK

SEQ ID NO: 16850 - protein, 134 aa, Homo sapiens
MRMTMEEMKNEAETTSMVSMPLYAVMYPVFNELERVNLSAAQTLRAAFIKAEKENPGLTQDIIMKILEKKSVEVNFTESLLRMAADDVEEYMIERPEPEFQDLNEKARALKQILSKIPDEINDRVRFLQTIKDI

SEQ ID NO: 16851 - protein, 1162 aa, Homo sapiens
MKKFNFRKVLDGLTASSPGSGSSSGSNSGGGAGSGSVHPAGTAGVLREEIQETLTSEYFQICKTVRHGFPHQPTALAFDPVQKILAIGTRTGAIRILGRPGVDCYCQHESGAAVLQLQFLINEGALVSASSDDTLHLWNLRQKRPAILHSLKFNRERITYCHLPFQSKWLYVGTERGNTHIVNIESFILSGYVIMWNKAIELSTKTHPGPVVHLSDSPRDEGKLLIGYENGTVVFWDLKSKRAELRVYYDEAIHSIDWHHEGKQFMCSHSDGSLTLWNLKSPSRPFQTTIPHGKSQREGRKSESCKPILKVEYKTCKNSEPFIIFSGGLSYDKACRRPSLTIMHGKAITVLEMDHPIVEFLTLCETPYPNEFQEPYAVVVLLEKDLIVVDLTQSNFPIFENPYPMDIHESPVTCTAYFADCPPDLILVLYSIGVKHKKQGYSNKEWPISGGAWNLGAQTYPEIIITGHADGSIKFWDASAITLQMLYKLKTSKVFEKQKVGEGKQTCEIVEEDPFAIQMIYWCPESRIFCVSGVSAYVIIYKFSRHEITTEIVSLEVRLQYDVEDIITPEPETSPPFPDLSAQLPSSRSLSGSTNTVASEGVTKDSIPCLNVKTRPVRMPPGYQAELVIQLVWVDGEPPQQITSLAVSSAYGIVAFGNCNGLAVVDFIQKTVLLSMGTIDLYRSSDLYQRQPRSPRKNKQFIAGLTELNDSPVPLELERCKSPTSDHVNGHCTSPTSQSCSSGKRLSSADVSKVNRWGPGRPPFRKAQSAACMEISLPVTTEENRENSYNRSRSSSISSIDKDSKEAITALYFMDSFARKNDSTISPCLFVGTSLGMVLIISLNLPLADEQRFTEPVMVLPSGTFLSLKGAVLTFSCMDRMGGLMQPPYEVWRDPNNIDENEKSWRRKVVMNSSSASQEIGDHQYTIICSEKQAKVFSLPSQTCLYVHNITETSFILQANVVVMCSSACLACFCANGHIMIMSLPSLRPMLDVNYLPLTDMRIARTFCFTNEGQALYLVSPTEIQRLTYSQEMCDNLQDMLGDLFTPIETPEAQNRGFLKGLFGGSGQTFDREELFGEASAGKASRSLAQHIPGPGSIEGMKGAAGGVMGELTRARIALDERGQRLGELEEKTAGMMTSAEAFSKHAHELMLKYKDKKWYQF

SEQ ID NO: 16852 - protein, 864 aa, Homo sapiens
MGNRGMEDLIPLVNRLQDAFSAIGQNADLDLPQIAVVGGQSAGKSSVLENFVGRDFLPRGSGIVTRRPLVLQLVNATTEYAEFLHCKGKKFTDFEEVRLEIEAETDRVTGTNKGISPVPINLRVYSPHVLNLTLVDLPGMTKVPVGDQPPDIEFQIRDMLMQFVTKENCLILAVSPANSDLANSDALKVAKEVDPQGQRTIGVITKLDLMDEGTDARDVLENKLLPLRRGYIGVVNRSQKDIDGKKDITAALAAERKFFLSHPSYRHLADRMGTPYLQKVLNQQLTNHIRDTLPGLRNKLQSQLLSIEKEVEEYKNFRPDDPARKTKALLQMVQQFAVDFEKRIEGSGDQIDTYELSGGARINRIFHERFPFELVKMEFDEKELRREISYAIKNIHGIRTGLFTPDLAFEATVKKQVQKLKEPSIKCVDMVVSELTATIRKCSEKLQQYPRLREEMERIVTTHIREREGRTKEQVMLLIDIELAYMNTNHEDFIGFANAQQRSNQMNKKKTSGNQDEILVIRKGWLTINNIGIMKGGSKEYWFVLTAENLSWYKDDEEKEKKYMLSVDNLKLRDVEKGFMSSKHIFALFNTEQRNVYKDYRQLELACETQEEVDSWKASFLRAGVYPERVGDKEKASETEENGSDSFMHSMDPQLERQVETIRNLVDSYMAIVNKTVRDLMPKTIMHLMINNTKEFIFSELLANLYSCGDQNTLMEESAEQAQRRDEMLRMYHALKEALSIIGDINTTTVSTPMPPPVDDSWLQVQSVPAGRRSPTSSPTPQRRAPAVPPARPGSRGPAPGPPPAGSALGGAPPVPSRPGASPDPFGPPPQVPSRPNRAPPGVPSRSGQASPSRPESPRPPFDL

SEQ ID NO: 16853 - protein, 1074 aa, Homo sapiens
MLSCLKEEMPPQELTRRLATVITHVDEIMQQEVRPLMAVEIIEQLHRQFAILSGGRGEDGAPIITFPEFSGFKHIPDEDFLNVMTYLTSIPSVEAASIGFIVVIDRRRDKWSSVKASLTRIAVAFPGNLQLIFILRPSRFIQRTFTDIGIKYYRNEFKTKVPIIMVNSVSDLHGYIDKSQLTRELGGTLEYRHGQWVNHRTAIENFALTLKTTAQMLQTFGSCLATAELPRSMLSTEDLLMSHTRQRDKLQDELKLLGKQGTTLLSCIQEPATKCPNSKLNLNQLENVTTMERLLVQLDETEKAFSHFWSEHHLKLNQCLQLQHFEHDFCKAKLALDNLLEEQAEFTGIGDSVMHVEQILKEHKKLEEKSQEPLEKAQLLALVGDQLIQSHHYAADAIRPRCVELRHLCDDFINGNKKKWDILGKSLEFHRQLDKVSQWCEAGIYLLASQAVDKCQSREGVDIALNDIATFLGTVKEYPLLSPKEFYNEFELLLTLDAKAKAQKVLQRLDDVQEIFHKRQVSLMKLAAKQTRPVQPVAPHPESSPKWVSSKTSQPSTSVPLARPLRTSEEPYTETELNSRGKEDDETKFEVKSEEIFESHHERGNPELEQQARLGDLSPRRRIIRDLLETEEIYIKEIKSIIDGYITPMDFIWLKHLIPDVLQNNKDFLFGNIRELYEFHNRTFLKELEKCAENPELLAHCFLKRKEDLQIYFKYHKNLPRARAIWQECQDCAYFGVCQRQLDHNLPLFKYLKGPSQRLIKYQMLLKGLLDFESPEDMEIDPGELGGSAKDGPKRTKDSAFSTELQQALAVIEDLIKSCELAVDLAAVTECPDDIGKLGKLLLHGPFSVWTIHKDRYKMKDLIRFKPSQRQIYLFERGIVFCKIRMEPGDQGLSPHYSFKKTMKLMTLSIRQLGRGSHRKFEIASRNGLEKYILQAASKEIRDCWFSEISKLLMEQQNNIKDQGNPQFEMSTSKGSGAGSGPWIKNMERATTSKEDPASSTGGIKGCSSREFSSMDTFEDCEGAEDMEKESSALSLAGLFQSDDSHETCSSKSAFLERGESSQGEKEERDEEET

SEQ ID NO: 16854 - protein, 166 aa, Homo sapiens
MGGCMHSTQDKSLHLEGDPNPSAAPTSTCAPRKMPKRISISKQLASVKALRKCSDLEKAIATTALIFRNSSDSDGKLEKAIAKDLLQTQFRNFAELPFTFYHEWKQPEVLTTCRCLILNFPAIRIGQETKPKYREILSELDEHTENKLDFEDFMILLLSITVMSDL

SEQ ID NO: 16855 - protein, 492 aa, Homo sapiens
MEMKADINAKQEDMMFHKIYIQKHDNVSILFADIEGFTSLASQCTAQELVMTLNELFARFDKLAAENHCLRIKILGDCYYCVSGLPEARADHAHCCVEMGMDMIEAISLVREVTGVNVNMRVGIHSGRVHCGVLGLRKWQFDVWSNDVTLANHMEAGGKAGRIHITKATLNYLNGDYEVEPGCGGERNAYLKEHSIETFLILRCTQKRKEEKAMIAKMNRQRTNSIGHNPPHWGAERPFYNHLGGNQVSKEMKRMGFEDPKDKNAQESANPEDEVDEFLGRAIDARSIDRLRSEHVRKFLLTFREPDLEKKYSKQVDDRFGAYVACASLVFLFICFVQITIVPHSIFMLSFYLTCSLLLTLVVFVSVIYSCVKLFPSPLQTLSRKIVRSKMNSTLVGVFTITLVFLAAFVNMFTCNSRDLLGCLAQEHNISASQVNACHVAESAVNYSLGDEQGFCGSPWPNCNFPEYFTYSVLLSLLACSVFLQISCIGKL

SEQ ID NO: 16856 - protein, 1440 aa, Homo sapiens
GRFYFLYGFVWIQDMMERAIIDTFVGHDVVEPGSYVQMFPYPCYTRDDFLFVIEHMMPLCMVISWVYSVAMTIQHIVAEKEHRLKEVMKTMGLNNAVHWVAWFITGFVQLSISVTALTAILKYGQVLMHSHVVIIWLFLAVYAVATIMFCFLVSVLYSKAKLASACGGIIYFLSYVPYMYVAIREEVAHDKITAFEKCIASLMSTTAFGLGSKYFALYEVAGVGIQWHTFSQSPVEGDDFNLLLAVTMLMVDAVVYGILTWYIEAVHPGMYGLPRPWYFPLQKSYWLGSGRTEAWEWSWPWARTPRLSVMEEDQACAMESRRFEETRGMEEEPTHLPLVVCVDKLTKVYKDDKKLALNKLSLNLYENQVVSFLGHNGAGKTTTMSILTGLFPPTSGSATIYGHDIRTEMDEIRKNLGMCPQHNVLFDRLTVEEHLWFYSRLKSMAQEEIRREMDKMIEDLELSNKRHSLVQTLSGGMKRKLSVAIAFVGGSRAIILDEPTAGVDPYARRAIWDLILKYKPGRTILLSTHHMDEADLLGDRIAIISHGKLKCCGSPLFLKGTYGDGYRLTLVKRPAEPGGPQEPGLASSPPGRAPLSSCSELQVSQFIRKHVASCLLVSDTSTELSYILPSEAAKKGAFERLFQHLERSLDALHLSSFGLMDTTLEEVFLKVSEEDQSLENSEADVKESRKDVLPGAEGPASGEGHAGNLARCSELTQSQASLQSASSVGSARGDEGAGYTDVYGDYRPLFDNPQDPDNVSLQEVEAEALSRVGQGSRKLDGGWLKVRQFHGLLVKRFHCARRNSKALFSQILLPAFFVCVAMTVALSVPEIGDLPPLVLSPSQYHNYTQPRGNFIPYANEERREYRLRLSPDASPQQLVSTFRLPSGVGATCVLKSPANGSLGPTLNLSSGESRLLAARFFDSMCLESFTQGLPLSNFVPPPPSPAPSDSPASPDEDLQAWNVSLPPTAGPEMWTSAPSLPRLVREPVRCTCSAQGTGFSCPSSVGGHPPQMRVVTGDILTDITGHNVSEYLLFTSDRFRLHRYGAITFGNVLKSIPASFGTRAPPMVRKIAVRRAAQVFYNNKGYHSMPTYLNSLNNAILRANLPKSKGNPAAYGITVTNHPMNKTSASLSLDYLLQGTDVVIAIFIIVAMSFVPASFVVFLVAEKSTKAKHLQFVSGCNPIIYWLANYVWDMLNYLVPATCCVIILFVFDLPAYTSPTNFPAVLSLFLLYGWSITPIMYPASFWFEVPSSAYVFLIVINLFIGITATVATFLLQLFEHDKDLKVVNSYLKSCFLIFPNYNLGHGLMEMAYNEYINEYYAKIGQFDKMKSPFEWDIVTRGLVAMAVEGVVGFLLTIMCQYNFLRRPQRMPVSTKPVEDDVDVASERQRVLRGDADNDMVKIENLTKVGSGHVGWGLGGVGQGQGGGAPAVEVEPGWAGP

SEQ ID NO: 16857 - protein, 284 aa, Homo sapiens
MPIRALCTICSDFFDHSRDVAAIHCGHTFHLQCLIQWFETAPSRTCPQCRIQVGKRTIINKLFFDLAQEEENVLDAEFLKLQTVYSELDQAKLELKSAQKDLQSADKEIMSLKKKLTMLQETLNLPPVASETVDRLVLESPAPVEVNLKLRRPSFRDDIDLNATFDVDTPPARPSSSQHGYYEKLCLEKSHSPIQDVPKKICKGPRKESQLSLGGQSCAGEPDEELVGAFPIFVRNAILGQKQPKRPRSESSCSKDVVRTGFDGLGGRTKFIQPVSFSCDVELS

SEQ ID NO: 16858 - protein, 857 aa, Homo sapiens
MKMKIQTSFYELPTDSHASLRDSLLTHIQNLKDLSPVIVTQLALAIADLALQMPSWKGCVQTLVEKYSNDVTSLPFLLEILTVLPEEVHSRSLRIGANRRTEIIEDLAFYSSTVVSLLMTCVEKAGTDEKMLMKVFRCLGSWFNLGVLDSNFMANNKLLALLFEVLQQDKTSSNLHEAASDCVCSALYAIENVETNLPLAMQLFQGVLTLETAYHMAVAREDLDKVLNYCRIFTELCETFLEKIVCTPGQGLGDLRTLELLLICAGHPQYEVVEISFNFWYRLGEHLYKTNDEVIHGIFKAYIQRLLHALARHCQLEPDHEGVPEETDDFGEFRMRVSDLVKDLIFLIGSMECFAQLYSTLKEGNPPWEVTEAVLFIMAAIAKSVDPENNPTLVEVLEGVVRLPETVHTAVRYTSIELVGEMSEVVDRNPQFLDPVLGYLMKGLCEKPLASAAAKAIHNICSVCRDHMAQHFNGLLEIARSLDSFLLSPEAAVGLLKGTALVLARLPLDKITECLSELCSVQVMALKKLLSQEPSNGISSDPTVFLDRLAVIFRHTNPIVENGQTHPCQKVIQEIWPVLSETLNKHRADNRIVERCCRCLRFAVRCVGKGSAALLQPLVTQMVNVYHVHQHSCFLYLGSILVDEYGMEEGCRQGLLDMLQALCIPTFQLLEQQNGLQNHPDTVDDLFRLATRFIQRSPVTLLRSQVVIPILQWAIASTTLDHRDANCSVMRFLRDLIHTGVANDHEEDFELRKELIGQVMNQLGQQLVSQLLHTCCFCLPPYTLPDVAEVLWEIMQVDRPTFCRWLENSLKGLPKETTVGAVTVTHKQLTDFHKQVTSAEECKQVCWALRDFTRLFR

SEQ ID NO: 16859 - protein, 144 aa, Homo sapiens
MGSNLSPQLCLMPFILGLLSGGVTTTPWSLARPQGSCSLEGVEIKGGSFRLLQEGQALEYVCPSGFYPYPVQTRTCRSTGSWSTLKTQDQKTVRKAECRAIHCPRPHDFENGEYWPRSPYYNVSDEISFHCYDGYTLRGSANRT

SEQ ID NO: 16860 - protein, 703 aa, Homo sapiens
MQSAKYFNYTVKVLGQGEEWRGGDGINSIGGGQKVRLMKEVMEHYADQDDLVVMFTECFDVIFAGGPEEVLKKFQKANHKVVFAADGILWPDKRLADKYPVVHIGKRYLNSGGFIGYAPYVNRIVQQWNLQDNDDDQLFYTKVYIDPLKREAINITLDHKCKIFQTLNGAVDEVVLKFENGKARAKNTFYETLPVAINGNGPTKILLNYFGNYVPNSWTQDNGCTLCEFDTVDLSAVDVHPNVSIGVFIEQPTPFLPRFLDILLTLDYPKEALKLFIHNKEVYHEKDIKVFFDKAKHEIKTIKIVGPEENLSQAEARNMGMDFCRQDEKCDYYFSVDADVVLTNPRTLKILIEQNRKIIAPLVTRHGKLWSNFWGALSPDGYYARSEDYVDIVQGNRVGVWNVPYMANVYLIKGKTLRSEMNERNYFVRDKLDPDMALCRNAREMTLQREKDSPTPETFQMLSPPKGVFMYISNRHEFGRLLSTANYNTSHYNNDLWQIFENPVDWKEKYINRDYSKIFTENIVEQPCPDVFWFPIFSEKACDELVEEMEHYGKWSGGKHHDSRISGGYENVPTDDIHMKQVDLENVWLHFIREFIAPVTLKVFAGYYTKGFALLNFVVKYSPERQRSLRPHHDASTFTINIALNNVGEDFQGGGCKFLRYNCSIESPRKGWSFMHPGRLTHLHEGLPVKNGTRYIAVSFIDP

SEQ ID NO: 16861 - protein, 1234 aa, Homo sapiens
MHPQSLAEEEIKTEQEVVEGMDISTRSKDPGSAERTAQKRKFPSPPHSSNGHSPQDTSTSPIKKKKKPGLLNSNNKEQSELRHGPFYYMKQPLTTDPVDVVPQDGRNDFYCWVCHREGQVLCCELCPRVYHAKCLRLTSEPEGDWFCPECEKITVAECIETQSKAMTMLTIEQLSYLLKFAIQKMKQPGTDAFQKPVPLEQHPDYAEYIFHPMDLCTLEKNAKKKMYGCTEAFLADAKWILHNCIIYNGGNHKLTQIAKVVIKICEHEMNEIEVCPECYLAACQKRDNWFCEPCSNPHPLVWAKLKGFPFWPAKALRDKDGQVDARFFGQHDRAWVPINNCYLMSKEIPFSVKKTKSIFNSAMQEMEVYVENIRRKFGVFNYSPFRTPYTPNSQYQMLLDPTNPSAGTAKIDKQEKVKLNFDMTASPKILMSKPVLSGGTGRRISLSDMPRSPMSTNSSVHTGSDVEQDAEKKATSSHFSASEESMDFLDKSTASPASTKTGQAGSLSGSPKPFSPQLSAPITTKTDKTSTTGSILNLNLDRSKAEMDLKELSESVQQQSTPVPLISPKRQIRSRFQLNLDKTIESCKAQLGINEISEDVYTAVEHSDSEDSEKSDSSDSEYISDDEQKSKNEPEDTEDKEGCQMDKEPSAVKKKPKPTNPVEIKEELKSTSPASEKADPGAVKDKASPEPEKDFSEKAKPSPHPIKDKLKGKDETDSPTVHLGLDSDSESELVIDLGEDHSGREGRKNKKEPKEPSPKQDVVGKTPPSTTVGSHSPPETPVLTRSSAQTSAAGATATTSTSSTVTVTAPAPAATGSPVKKQRPLLPKETAPAVQRVVWNSSSKFQTSSQKWHMQKMQRQQQQQQQQNQQQQPQSSQGTRYQTRQAVKAVQQKEITQSPSTSTITLVTSTQSSPLVTSSGSMSTLVSSVNADLPIATASADVAADIAKYTSKMMDAIKGTMTEIYNDLSKNTTGSTIAEIRRLRIEIEKLQWLHQQELSEMKHNLELTMAEMRQSLEQERDRLIAEVKKQLELEKQQAVDETKKKQWCANCKKEAIFYCCWNTSYCDYPCQQAHWPEHMKSCTQSATAPQQEADAEVNTETLNKSSQGSSSSTQSAPSETASASKEKETSAEKSKESGSTLDLSGSRETPSSILLGSNQGSVSKRCDKQPAYAPTTTDHQPHPNYPAQKYHSRSNKSSWSSSDEKRGSTRSDHNTSTSTKSLLPKESRLDTFWD

SEQ ID NO: 16862 - protein, 233 aa, Homo sapiens
MGKSESQMDITDINTPKPKKKQRWTPLEISLSVLVLLLTIIAVTMIALYATYDDGICKSSDCIKSAARLIQNMDATTEPCTDFFKYACGGWLKRNVIPETSSRYGNFDILRDELEVVLKDVLQEPKTEDIVAVQKAKALYRSCINESAIDSRGGEPLLKLLPDIYGWPVATENWEQKYGASWTAEKAIAQLNSKYGKKVLINLFVGTDDKNSVNHVIHIDQPRLGLPSRDYYE

SEQ ID NO: 16863 - protein, 365 aa, Homo sapiens
MAGSAMSSKFFLVALAIFFSFAQVVIEANSWWSLGMNNPVQMSEVYIIGAQPLCSQLAGLSQGQKKLCHLYQDHMQYIGEGAKTGIKECQYQFRHRRWNCSTVDNTSVFGRVMQIGSRETAFTYAVSAAGVVNAMSRACREGELSTCGCSRAARPKDLPRDWLWGGCGDNIDYGYRFAKEFVDARERERIHAKGSYESARILMNLHNNEAGRRTVYNLADVACKCHGVSGSCSLKTCWLQLADFRKVGDALKEKYDSAAAMRLNSRGKLVQVNSRFNSPTTQDLVYIDPSPDYCVRNESTGSLGTQGRLCNKTSEGMDGCELMCCGRGYDQFKTVQTERCHCKFHWCCYVKCKKCTEIVDQFVCK

SEQ ID NO: 16864 - protein, 425 aa, Homo sapiens
DYGTKGDSPLHSIRWLRVILDEGHAIRNPNAQQTKAVLDLESERRWVLTGTPIQNSLKDLWSLLSFLKLKPFIDREWWHRTIQRPVTMGDEGGLRRLQSLIKNITLRRTKTSKIKGKPVLELPERKVFIQHITLSDEERKIYQSVKNEGRATIGRYFNEGTVLAHYADVLGLLLRLRQICCHTYLLTNAVSSNGPSAFSLGNDTPEELRKKLIRKMKLILSSGSDEECAICLDSLTVPVITHCAHVFCKPCICQVIQNEQPHAKCPLCRNDIHEDNLLECPPEELARDSEKKSDMEWTSSSKINALMHALTDLRKKNPNIKSLVVSQFTTFLSLIEIPLKASGFVFTRLDGSMAQKKRVESIQCFQNTEAGSPTIMLLSLKAGGVGLNLSAASRVFLMDPAWNPAAEDQCFDRCHRLGQKQEVII

SEQ ID NO: 16865 - protein, 969 aa, Homo sapiens
MRENYETLVSVGTAELLPLSAFLSPSEPGRAVGGGSHADEGQEPAGCGDPQGGQPRHSLHLTALVQLVKEIPEFLFGEVKGAMDSPESESRGASLDGERASPEAAAAREPCPLRGLLSCLPDGPTSQPHLATTPTDSSCSSGPTGDGVQGSPLPIKTADKPWPTRKEGPGALGGEPSPPTHSPSRRKSHRGQERGTSEAGISPGNSPLQGLINCLKEILVPGPRHPETSPSFLPPLPSLGTSRLTRADLGPGSPPWAVKTEAVSGDCPLQGLLHCLKELPEAQDRHPSPSGVGNRRLQENPGAWKRGSGGPGYLLTPPPHPDLGAGGLLSVKMENSWVQSPPGPASCQPGRQPLSPSATGDTRGVPQPSWGPEAQAASASSSPLEALEACLKGIPPNGSSPSQLPPTSCSQNPQPGDSRSQKPELQPHRSHSEEATREPVLPLGLQSCVRDGPSRPLAPRGTPTSFSSSSSTDWDLDFGSPVGNQGQHPGKGSPPGSSPLQGLENCLKEIPVPVLRPAWPCSSAADRGPRRAEPRNWTADKEGSAPKPSPLHCLESALRGILPVRPLRFACVGGPSPSPSPGSSSSFSGSEGEDPRPEPDLWKPLPQERDRLPSCKPPVPLSPCPGGTPAGSSGGSPGEDPRRTEPRYCSGLGAGTAQDPCPVSQLEKRPRVSEASRGLELGHGRPRVAAKTHERLLPQGPPELPSESPPPELPPPEAAPPVLPASSLQPPCHCGKPLQQELHSLGAALAEKLDRLATALAGLAQEVATMRTQVNRLGRRPQGPGPMGQASWMWTLPRGPRWAHGPGHRHLPYWRQKGPTRPKPKILRGQGESCRAGDLQGLSRGTARRARPLPPDAPPAEPPGLHCSSSQQLLSSTPSCHAAPPAHPLLAHTGGHQSPLPPLVPAALPLQGASPPAASADADVPTSGVAPDGIPERPKEPSSLLGGVQRALQEELWGGEHRDPRWGAH

SEQ ID NO: 16866 - protein, 347 aa, Homo sapiens
EINYAKEEACRLRELREGAECELSRRQYAEQELEQVRMALKKAEKEFELRSSWSVPDALQKWLQLTHEVEVQYYNIKRQNAEMQLAIAKDEAEKIKKKRSTVFGTLHVAHSSSLDEVDHKILEAKKALSELTTCLRERLFRWQQIEKICGFQIAHNSGLPSLTSSLYSDHSWVVMPRVSIPPYPIAGGVDDLDEDTPPIVSQFPGTMAKPPGSLARSSSLCRSRRSIVPSSPQPQRAQLAPHAPHPSHPRHPHHPQHTPHSLPSPDPDILSVSSCPALYRNEEEEEAIYFSAEKQWNTRECAVGDSQGPHVHGLVRFDKDFGSYSEYERKHWEVSRKCQTQLQNVTP

SEQ ID NO: 16867 - protein, 260 aa, Homo sapiens
FTQSPKKSVADLLGSFEGKRRLLLITAPKAENNMYVQQRDEYLESFCKMATRKISVITIFGPVNNSTMKIDHFQLDNEKPMRVVDDEDLVDQRLISELRKEYGMTYNDFFMVLTDVDLRVKQYYEVPITMKSVFDLIDTFQSRIKDMEKQKKEGIVCKEDKKQSLENFLSRFRWRRRLLVISAPNDEDWAYSQQLSALSGQACNFGSSVVEREDVPAHLVKDIRNYFQVSPEYFSMLLVGKDGNVKSWYPSPMWSMVIVY

SEQ ID NO: 16868 - protein, 297 aa, Homo sapiens
MRSWNSLFCLNSSRPPGHIVYPKHQAGHTGKQADHLGSQAFYPGRQHDYLVPPAGTAGIPVQNQPGRPEGVPWMPAPPPPLNCPPGLEYLSQIDMILIHQQIELLEVLFSFESSNMYEIKNSFGQRIYFAAEDTNFCIRNCCGRSRPFTLRITDNVGREVITLERPLRCNCCCCPCCLQEIEIQAPPGVPVGYVTQTWHPCLTKFTIKNQKREDVLKISGPCIVCSCIAGVDFEITSLDEQIVVGRISKHWSGFLREAFTDADNFGIQFPRDLDVKMKAVMIGACFLIDYMFFERTR

SEQ ID NO: 16869 - protein, 359 aa, Homo sapiens
TNKLEQPRGQEFWADLNAMNVYETTEFDQLRRLSTPPSSNVNSIYHTVWKFFCRDHFGWREYPESVIRLIEEANSRGLKEVRFMMWNNHYILHNSFFRREIKRRPLFRSCFILLPYLQTLGGVPTQAPPPLEATSSSQIICPDGVTSANFYPETWVYMHPSQDFIQVPVSAEDKSYRIIYNLFHKTVPEFKYRILQILRVQNQFLWEKYKRKKEYMNRKMFGRDRIINERHLFHGTSQDVVDGICKHNFDPRVCGKHATMFGQGSYFAKKASYSHNFSKKSSKGVHFMFLAKVLTGRYTMGSHGMRRPPPVNPGSVTSDLYDSCVDNFFEPQIFVIFNDDQSYPYFVIQYEEVSNTVSI

SEQ ID NO: 16870 - protein, 12 aa, Homo sapiens
ITFGQGTRLEIK

SEQ ID NO: 16871 - protein, 1129 aa, Homo sapiens
MKKFNFRKVLDGLTASSPGSGSSSGSNSGGGAGSGSVHPAGTAGVLREEIQETLTSEYFQICKTVRHGFPHQPTALAFDPVQKILAIGTRTGAIRILGRPGVDCYCQHESGAAVLQLQFLINEGALVSASSDDTLHLWNLRQKRPAILHSLKFNRERITYCHLPFQSKWLYVGTERGNTHIVNIESFILSGYVIMWNKAIELSTKTHPGPVVHLSDSPRDEGKLLIGYENGTVVFWDLKSKRAELRVYYDEAIHSIDWHHEGKQFMCSHSDGSLTLWNLKSPSRPFQTTIPHGKSQREGRKSESCKPILKVEYKTCKNSEPFIIFSGGLSYDKACRRPSLTIMHGKAITVLEMDHPIVEFLTLCETPYPNEFQEPYAVVVLLEKDLIVVDLTQSNFPIFENPYPMDIHESPVTCTAYFADCPPDLILVLYSIGVKHKKQGYSNKEWPISGGAWNLGAQTYPEIIITGHADGSIKFWDASAITLQMLYKLKTSKVFEKQKVGEGKQTCEIVEEDPFAIQMIYWCPESRIFCVSGVSAYVIIYKFSRHEITTEIVSLEVRLQYDVEDIITPEPETSPPFPDLSAQLPSSRSLSGSTNTVASEGVTKDSIPCLNVKTRPVRMPPGYQAELVIQLVWVDGEPPQQITSLAVSSAYGIVAFGNCNGLAVVDFIQKTVLLSMGTIDLYRSSDLYQRQPRSPRKNKQFIADNFCMRGLSNFYPDLTKRIRTSYQSLTELNDSPVPLELERCKSPTSENRENSYNRSRSSSISSIDKDSKEAITALYFMDSFARKNDSTISPCLFVGTSLGMVLIISLNLPLADEQRFTEPVMVLPSGTFLSLKGAVLTFSCMDRMGGLMQPPYEVWRDPNNIDENEKSWRRKVVMNSSSASQEIGDHQYTIICSEKQAKVFSLPSQTCLYVHNITETSFILQANVVVMCSSACLACFCANGHIMIMSLPSLRPMLDVNYLPLTDMRIARTFCFTNEGQALYLVSPTEIQRLTYSQEMCDNLQDMLGDLFTPIETPEAQNRGFLKGLFGGSGQTFDREELFGEASAGKASRSLAQHIPGPGSIEGMKGAAGGVMGELTRARIALDERGQRLGELEEKTAGMMTSAEAFSKHAHELMLKYKDKKWYQF

SEQ ID NO: 16872 - protein, 190 aa, Homo sapiens
MQQALELALDRAEYVIESARQRPPKRKYLSSGRKSVFQKLYDLYIEECEKEPEVKQKLRRNVNLLEKLVMQETLSCLVVNLYPGNEGYSLMLRGKNGSDSETIRLPYEEGELLEYLDAEELPPILVDLLEKSQVNIFHCGCVIAEIRDYRQSSNMKSPGYQSRHILLRPTMQTLICDVHSITSDNHKWTQ

SEQ ID NO: 16873 - protein, 520 aa, Homo sapiens
MAVYWCTEALPLSVTALLPIVLFPFMGILPSNKVCPQYFLDTNFLFLSGLIMASAIEEWNLHRRIALKILMLVGVQPARLILGMMVTTSFLSMWLSNTASTAMMLPIANAILKSLFGQKEVRKDPSQESEENTAAVRRNGLHTVPTEMQFLASTEAKDHPGETEVPLDLPADSRKEDEYRRNIWKGFLISIPYSASIGGTATLTGTAPNLILLGQLKSFFPQCDVVNFGSWFIFAFPLMLLFLLAGWLWISFLYGGLSFRGWRKNKSEIRTNAEDRARAVIREEYQNLGPIKFLSDAVTGVAIVTILFFFPSQRPSLKWWFDFKAPNTETEPLLTWKKAQETVPWNIILLLGGGFAMAKGCEESGLSVWIGGQLHPLENVPPALAVLLITVVIAFFTEFASNTATIIIFLPVLAELAIRLRVHPLYLMIPGTVGCSFAFMLPVSTPPNSIAFASGHLLVKDMVRTGLLMNLMGVLLLSLAMNTWAQTIFQLGTFPDWADMYSVNVTALPPTLANDTFRTL

SEQ ID NO: 16874 - protein, 912 aa, Homo sapiens
MKRGIRRDPFRKRKLGGRAKKVREPTAVNSFYREASLPSVWASLRRREMVRSGARPGQVLSSGRHTGPAKLTNGKKATYLRKIPRFNADSGYSIHSDSESQAETVHGLDGCASLLRDILRNEDSASSDNKKQIPNEASARSERDTSDLEQNWSLQDHYRMYSPIIYQALCEHVQTQMSLMNDLTSKNIPNGIPAVPCHAPSHSESQATPHSSYGLCTSTPVWSLQRPPCPPKVHSEVQTDGNSQFASQGKTVSATCTDVLRNSFNTSPGVPCSLPKTDISAIPTLQQLGLVNGILPQQGIHKETDLLKCIQTYLSLFRSHGKETHLDSQTHRSPTQSQPAFLATNEEKCAREQIREATSERKDLNIHVRDTKTVKDVQKAKNVNKTAEKVRIIKYLLGELKALVAEQEDSEIQRLITEMEACISVLPTVSGNTDIQVEIALAMQPLRSENAQLRRQLRILNQQLREQQKTQKPSGAVDCNLELFSLQSLNMSLQNQLEESLKSQELLQSKNEELLKVIENQKDENKKFSSIFKDKDQTILENKQQYDIEITRIKIELEEALVNVKSSQFKLETAEKENQILGITLRQRDAEVTRLRELTRTLQTSMAKLLSDLSVDSARCKPGNNLTKSLLNIHDKQLQHDPAPAHTSIMSYLNKLETNYSFTHSEPLSTIKNEETIEPDKTYENVLSSRGPQNSNTRGMEEASAPGIISALSKQDSDEGSETMALIEDEHNLDNTIYIPFARSTPEKKSPLSKRLSPQPQIRAATTQLVSNSGLAVSGKENKLCTPVICSSSTKEAEDAPEKLSRASDMKDTQLLKKIKEAIGKIPAATKEPEEQTACHGPSGCLSNSLQVKGNTVCDGSVFTSDLMSDWSISSFSTFTSRDEQDFRNGLAALDANIARLQKSLRTGLLEK

SEQ ID NO: 16875 - protein, 156 aa, Homo sapiens
VFLDPFDACGLIVAKYFSLPSVVFARGIFCHYLEEGAQCPAPLSYVPRLLLGFSDAMTFKERVWNHIMHLEEHLFCPYFFKNVLEIASEILQTPVTAYDLYSHTSIWLLRTDFVLEYPKPVMPNMIFIGGINCHQGKPVPMGQDLLLSPHWNMSQA

SEQ ID NO: 16876 - protein, 439 aa, Homo sapiens
MKSILDGLADTTFRTITTDLLGSPFQEKMTAGDNPQLVPADQVNITEFYNKSLSSFKENEENIQCGENFMDIECFMVLNPSQQLAIAVLSLTLGTFTVLENLLVLCVILHSRSLRCRPSYHFIGSLAVADLLGSVIFVYSFIDFHVFHRKDSRNVFLFKLGGVTASFTASVGSLFLTAIDRYISIHRPLAYKRIVTRPKAVVAFCLMWTIAIVIAVLPLLGWNCEKLQSVCSDIFPHIDETYLMFWIGVTSVLLLFIVYAYMYILWKAHSHAVRMIQRGTQKSIIIHTSEDGKVQVTRPDQARMDIRLAKTLVLILVVLIICWGPLLAIMVYDVFGKMNKLIKTVFAFCSMLCLLNSTVNPIIYALRSKDLRHAFRSMFPSCEGTAQPLDNSMGDSDCLHKHANNAASVHRAAESCIKSTVKIAKVTMSVSTDTSAEAL

SEQ ID NO: 16877 - protein, 287 aa, Homo sapiens
MGNKAKIAKCPLRTKTGHILKSTQDTCIGSEKLLQKKPVGSETSQAKGEKNGMTFSSTKDLCKQCIDKDCLHIQKEISPATPNMQKTRNTVNTSLVGKQKPHKKHITAENMKSSLVCLTQDQLQQILMTVNQGNRSLSLTENGKEAKSQYSLYLNSISNQPKDENIMGLFKKTEMVSSVPAENKSVLNEHQETSKQCEQKIAIENEWKPADIFSTLGERECDRSSLEAKKAQWRKELDEQVALKKKEKEVSEKWNDPWKKSESDKIIWEKHQILDQSRLFKHSITVS

SEQ ID NO: 16878 - protein, 1088 aa, Homo sapiens
MAFYSCCWVLLALTWHTSAYGPDQRAQKKGDIILGGLFPIHFGVAAKDQDLKSRPESVECIRYNFRGFRWLQAMIFAIEEINSSPALLPNLTLGYRIFDTCNTVSKALEATLSFVAQNKIDSLNLDEFCNCSEHIPSTIAVVGATGSGVSTAVANLLGLFYIPQVSYASSSRLLSNKNQFKSFLRTIPNDEHQATAMADIIEYFRWNWVGTIAADDDYGRPGIEKFREEAEERDICIDFSELISQYSDEEEIQHVVEVIQNSTAKVIVVFSSGPDLEPLIKEIVRRNITGKIWLASEAWASSSLIAMPQYFHVVGGTIGFALKAGQIPGFREFLKKVHPRKSVHNGFAKEFWEETFNCHLQEGAKGPLPVDTFLRGHEESGDRFSNSSTAFRPLCTGDENISSVETPYIDYTHLRISYNVYLAVYSIAHALQDIYTCLPGRGLFTNGSCADIKKVEAWQVLKHLRHLNFTNNMGEQVTFDECGDLVGNYSIINWHLSPEDGSIVFKEVGYYNVYAKKGERLFINEEKILWSGFSREPLTFVLSVLQVPFSNCSRDCLAGTRKGIIEGEPTCCFECVECPDGEYSDETDASACNKCPDDFWSNENHTSCIAKEIEFLSWTEPFGIALTLFAVLGIFLTAFVLGVFIKFRNTPIVKATNRELSYLLLFSLLCCFSSSLFFIGEPQDWTCRLRQPAFGISFVLCISCILVKTNRVLLVFEAKIPTSFHRKWWGLNLQFLLVFLCTFMQIVICVIWLYTAPPSSYRNQELEDEIIFITCHEGSLMALGFLIGYTCLLAAICFFFAFKSRKLPENFNEAKFITFSMLIFFIVWISFIPAYASTYGKFVSAVEVIAILAASFGLLACIFFNKIYIILFKPSRNTIEEVRCSTAAHAFKVAARATLRRSNVSRKRSSSLGGSTGSTPSSSISSKSNSEDPFPQPERQKQQQPLALTQQEQQQQPLTLPQQQRSQQQPRCKQKVIFGSGTVTFSLSFDEPQKNAMAHRNSTHQNSLEAQKSSDTLTRHEPLLPLQCGETDLDLTVQETGLQGPVGGDQRPEVEDPEELSPALVVSSSQSFVISGGGSTVTENVVNS

SEQ ID NO: 16879 - protein, 777 aa, Homo sapiens
MLPRPLRLLLDTSPPGGVVLSSFRSRDPEEGGGPGGLVVGGGQEEEEEEEEEAPVSVWDEEEDGAVFTVTSRQYRPLDPLVPMPPPRSSRRLRAGTLEALVRHLLDTRTSGTDVSFMSAFLATHRAFTSTPALLGLMADRLEALESHPTDELERTTEVAISVLSTWLASHPEDFGSEAKGQLDRLESFLLQTGYAAGKGVGGGSADLIRNLRSRVDPQAPDLPKPLALPGDPPADPTDVLVFLADHLAEQLTLLDAELFLNLIPSQCLGGLWGHRDRPGHSHLCPSVRATVTQFNKVAGAVVSSVLGATSTGEGPGEVTIRPLRPPQRARLLEKWIRVAEECRLLRNFSSVYAVVSALQSSPIHRLRAAWGEATRDSLRVFSSLCQIFSEEDNYSQSRELLVQEVKLQSPLEPHSKKAPRSGSRGGGVVPYLGTFLKDLVMLDAASKDELENGYINFDKRRKEFAVLSELRRLQNECRGYNLQPDHDIQRWLQGLRPLTEAQSHRVSCEVEPPGSSDPPAPRVLRPTLVISQWTEVLGSVGVPTPLVSCDRPSTGGDEAPTTPAPLLTRLAQHMKWPSVSSLDSALESSPSLHSPADPSHLSPPASSPRPSRGHRRSASCGSPLSGGAEEASGGTGYGGEGSGPGASDCRIIRVQMELGEDGSVYKSILVTSQDKAPSVISRVLKKNNRDSAVASEYELVQLLPGERELTIPASANVFYAMDGASHDFLLRQRRRSSTATPGVTSGPSASGTPPSEGGGGSFPRIKATGRKIARALF

SEQ ID NO: 16880 - protein, 2633 aa, Homo sapiens
MPVTEKDLAEDAPWKKIQQNTFTRWCNEHLKCVNKRIGNLQTDLSDGLRLIALLEVLSQKRMYRKYHQRPTFRQMQLENVSVALEFLDRESIKLVSIDSKAIVDGNLKLILGLVWTLILHYSISMPVWEDEGDDDAKKQTPKQRLLGWIQNKIPYLPITNFNQNWQDGKALGALVDSCAPGLCPDWESWDPQKPVDNAREAMQQADDWLGVPQVITPEEIIHPDVDEHSVMTYLSQFPKAKLKPGAPLKPKLNPKKARAYGRGIEPTGNMVKQPAKFTVDTISAGQGDVMVFVEDPEGNKEEAQVTPDSDKNKTYSVEYLPKVTGLHKVTVLFAGQHISKSPFEVSVDKAQGDASKVTAKGPGLEAVGNIANKPTYFDIYTAGAGVGDIGVEVEDPQGKNTVELLVEDKGNQVYRCVYKPMQPGPHVVKIFFAGDTIPKSPFVVQVGEACNPNACRASGRGLQPKGVRIRETTDFKVDTKAAGSGELGVTMKGPKGLEELVKQKDFLDGVYAFEYYPSTPGRYSIAITWGGHHIPKSPFEVQVGPEAGMQKVRAWGPGLHGGIVGRSADFVVESIGSEVGSLGFAIEGPSQAKIEYNDQNDGSCDVKYWPKEPGEYAVHIMCDDEDIKDSPYMAFIHPATGGYNPDLVRAYGPGLEKSGCIVNNLAEFTVDPKDAGKAPLKIFAQDGEGQRIDIQMKNRMDGTYACSYTPVKAIKHTIAVVWGGVNIPHSPYRVNIGQGSHPQKVKVFGPGVERSGLKANEPTHFTVDCTEAGEGDVSVGIKCDARVLSEDEEDVDFDIIHNANDTFTVKYVPPAAGRYTIKVLFASQEIPASPFRVKVDPSHDASKVKAEGPGLSKAGVENGKPTHFTVYTKGAGKAPLNVQFNSPLPGDAVKDLDIIDNYDYSHTVKYTPTQQGNMQVLVTYGGDPIPKSPFTVGVAAPLDLSKIKLNGLENRVEVGKDQEFTVDTRGAGGQGKLDVTILSPSRKVVPCLVTPVTGRENSTAKFIPREEGLYAVDVTYDGHPVPGSPYTVEASLPPDPSKVKAHGPGLEGGLVGKPAEFTIDTKGAGTGGLGLTVEGPCEAKIECSDNGDGTCSVSYLPTKPGEYFVNILFEEVHIPGSPFKADIEMPFDPSKVVASGPGLEHGKVGEAGLLSVDCSEAGPGALGLEAVSDSGTKAEVSIQNNKDGTYAVTYVPLTAGMYTLTMKYGGELVPHFPARVKVEPAVDTSRIKVFGPGIEGKDVFREATTDFTVDSRPLTQVGGDHIKAHIANPSGASTECFVTDNADGTYQVEYTPFEKGLHVVEVTYDDVPIPNSPFKVAVTEGCQPSRVQAQGPGLKEAFTNKPNVFTVVTRGAGIGGLGITVEGPSESKINCRDNKDGSCSAEYIPFAPGDYDVNITYGGAHIPGSPFRVPVKDVVDPSKVKIAGPGLGSGVRARVLQSFTVDSSKAGLAPLEVRVLGPRADDTDSQSWRSPLKALSEFFKGDPKGDFNKTGLVEPVNVVDNGDGTHTVTYTPSQEGPYMVSVKYADEEIPRSPFKVKVLPTYDASKVTASGPGLSSYGVPASLPVDFAIDARDAGEGLLAVQITDQEGKPKRAIVHDNKDGTYAVTYIPDKTGRYMIGVTYGGDDIPLSPYRIRATQTGDASKCLATGPGIASTVKTGEEVGFVVDAKTAGKGKVTCTVLTPDGTEAEADVIENEDGTYDIFYTAAKPGTYVIYVRFGGVDIPNSPFTVMATDGEVTAVEEAPVNACPPGFRPWVTEEAYVPVSDMNGLGFKPFDLVIPFAVRKGEITGEVHMPSGKTATPEIVDNKDGTVTVRYAPTEVGLHEMHIKYMGSHIPESPLQFYVNYPNSGSVSAYGPGLVYGVANKTATFTIVTEDAGEGGLDLAIEGPSKAEISCIDNKDGTCTVTYLPTLPGDYSILVKYNDKHIPGSPFTAKITDDSRRCSQVKLGSAADFLLDISETDLSSLTASIKAPSGRDEPCLLKRLPNNHIGISFIPREVGEHLVSIKKNGNHVANSPVSIMVVQSEIGDARRAKVYGRGLSEGRTFEMSDFIVDTRDAGYGGISLAVEGPSKVDIQTEDLEDGTCKVSYFPTVPGVYIVSTKFADEHVPGSPFTVKISGEGRVKESITRTSRAPSVATVGSICDLNLKIPEINSSDMSAHVTSPSGRVTEAEIVPMGKNSHCVRFVPQEMGVHTVSVKYRGQHVTGSPFQFTVGPLGEGGAHKVRAGGPGLERGEAGVPAEFSIWTREAGAGGLSIAVEGPSKAEITFDDHKNGSCGVSYIAQEPGNYEVSIKFNDEHIPESPYLVPVIAPSDDARRLTVMSLQESGLKVNQPASFAIRLNGAKGKIDAKVHSPSGAVEECHVSELEPDKYAVRFIPHENGVHTIDVKFNGSHVVGSPFKVRVGEPGQAGNPALVSAYGTGLEGGTTGIQSEFFINTTRAGPGTLSVTIEGPSKVKMDCQETPEGYKVMYTPMAPGNYLISVKYGGPNHIVGSPFKAKVTGQRLVSPGSANETSSILVESVTRSSTETCYSAIPKASSDASKVTSKGAGLSKAFVGQKSSFLVDCSKAGSNMLLIGVHGPTTPCEEVSMKHVGNQQYNVTYVVKERGDYVLAVKWGEEHIPGSPFHVTVP

SEQ ID NO: 16881 - protein, 629 aa, Homo sapiens
MGNLKSVAQEPGPPCGLGLGLGLGLCGKQGPATPAPEPSRAPASLLPPAPEHSPPSSPLTQPPEGPKFPRVKNWEVGSITYDTLSAQAQQDGPCTPRRCLGSLVFPRKLQGRPSPGPPAPEQLLSQARDFINQYYSSIKRSGSQAHEQRLQEVEAEVAATGTYQLRESELVFGAKQAWRNAPRCVGRIQWGKLQVFDARDCRSAQEMFTYICNHIKYATNRGNLRSAITVFPQRCPGRGDFRIWNSQLVRYAGYRQQDGSVRGDPANVEITELCIQHGWTPGNGRFDVLPLLLQAPDDPPELFLLPPELVLEVPLEHPTLEWFAALGLRWYALPAVSNMLLEIGGLEFPAAPFSGWYMSTEIGTRNLCDPHRYNILEDVAVCMDLDTRTTSSLWKDKAAVEINVAVLHSYQLAKVTIVDHHAATASFMKHLENEQKARGGCPADWAWIVPPISGSLTPVFHQEMVNYFLSPAFRYQPDPWKGSAAKGTGITRKKTFKEVANAVKISASLMGTVMAKRVKATILYGSETGRAQSYAQQLGRLFRKAFDPRVLCMDEYDVVSLEHETLVLVVTSTFGNGDPPENGEGLTLWPRLECSSTITAHCSLNLLDSSNPPTSTSQVVGTTGACHDA

SEQ ID NO: 16882 - protein, 217 aa, Homo sapiens
MDPQCTMGLSNILFVMAFLLSANFSQPEIVPISNITENVYINLTCSSIHGYPEPKKMSVLLRTKNSTIEYDGVMQKSQDNVTELYDVSISLSVSFPDVTSNMTIFCILETDKTRLLSSPFSIELEDPQPPPDHIPWITAVLPTVIICVMVFCLILWKWKKKKRPRNSYKCGTNTMEREESEQTKKREKIHIPERSDEAQRVFKSSKTSSCDKSDTCF

SEQ ID NO: 16883 - protein, 568 aa, Homo sapiens
MVKRSCPSCGSELGVEEKRGKGNPISIQLFPPELVEHIISFLPVRDLVALGQTCRYFHEVCDGEGVWRRICRRLSPRLQDQGSGVRPWKRAAILNYTKGLYFQAFGGRRRCLSKSVAPLLAHGYRRFLPTKDHVFILDYVGTLFFLKNALVSTLGQMQWKRACRYVVLCRGAKDFASDPRCDTVYRKYLYVLATREPQEVVGTTSSRACDCVEVYLQSSGQRVFKMTFHHSMTFKQIVLVGQETQRALLLLTEEGKIYSLVVNETQLDQPRSYTVQLALRKVSHYLPHLRVACMTSNQSSTLYVTDQGGVYFEVHTPGVYRDLFGTLQAFDPLDQQMPLALSLPAKILFCALGYNHLGLVDEFGRIFMQGNNRYGQLGTGDKMDRGEPTQVCYLQRPITLWCGLNHSLVLSQSSEFSKELLGCGCGAGGRLPGWPKGSASFVKLQVKVPLCACALCATRECLYILSSHDIEQHAPYRHLPASRVVGTPEPSLGARAPQDPGGMAQACEEYLSQIHSCQTLQDRTEKMKEIVGWMPLMAAQKDFFWEALDMLQRAEGGGGGVGPPAPET

SEQ ID NO: 16884 - protein, 5360 aa, Homo sapiens
MKGARWRRVPWVSLSCLCLCLLPHVVPGTTEDTLITGSKTAAPVTSTGSTTATLEGQSTAASSRTSNQDISASSQNHQTKSTETTSKAQTDTLTQMMTSTLFSSPSVHNVMETAPPDEMTTSFPSSVTNTLMMTSKTITMTTSTDSTLGNTEETSTAGTESSTPVTSAVSITAGQEGQSRTTSWRTSIQDTSASSQNHWTRSTQTTRESQTSTLTHRTTSTPSFSPSVHNVTGTVSQKTSPSGETATSSLCSVTNTSMMTSEKITVTTSTGSTLGNPGETSSVPVTGSLMPVTSAALVTFDPEGQSPATFSRTSTQDTTAFSKNHQTQSVETTRVSQINTLNTLTPVTTSTVLSSPSGFNPSGTVSQETFPSGETTTSSPSSVSNTFLVTSKVFRMPTSRDSTLGNTEETSLSVSGTISAITSKVSTIWWSDTLSTALSPSSLPPKISTAFHTQQSEGAETTGRPHERSSFSPGVSQEIFTLHETTTWPSSFSSKGHTTWSQTELPSTSTGAATRLVTGNPSTGTAGTIPRVPSKVSAIGEPGEPTTYSSHSTTLPKTTGAGAQTQWTQETGTTGEALLSSPSYSVTQMIKTATSPSSSPMLDRHTSQQITTAPSTNHSTIHSTSTSPQESPAVSQRGHTQAPQTTQESQTTRSVSPMTDTKTVTTPGSSFTASGHSPSEIVPQDAPTISAATTFAPAPTGDGHTTQAPTTALQAAPSSHDATLGPSGGTSLSKTGALTLANSVVSTPGGPEGQWTSASASTSPDTAAAMTHTHQAESTEASGQTQTSEPASSGSRTTSAGTATPSSSGASGTTPSGSEGISTSGETTRFSSNPSRDSHTTQSTTELLSASASHGAIPVSTGMASSIVPGTFHPTLSEASTAGRPTGQSSPTSPSASPQETAAISRMAQTQRTRTSRGSDTISLASQATDTFSTVPPTPPSITSTGLTSPQTETHTLSPSGSGKTFTTALISNATPLPVTYASSASTGHTTPLHVTDASSVSTGHATPLPVTSPSSVSTGHTTPLPVTDTSSESTGHVTPLPVTSFSSASTGDSTPLPVTDTSSASTGHVTPLPVTSLSSASTGDTTPLPVTDTSSASTGHATSLPVTDTSSVSTGHTTPLPVTDTSSASTGHATSLPVTDTSSVSTGHTTPLHVTDASSASTGQATPLPVTSLSSVSTGDTTPLPVTSPSSASTGHATPLLVTDTSSASTGHATPLPVTDASSVSTDHATSLPVTIPSAASTGHTTPLPVTDTSSASTGQATSLLVTDTSSVSTGDTTPLPVTSTSSASTGHVTPLHVTSPSSASTGHATPLPVTSLSSASTGDTMPLPVTSPSSASTGDTTPLPVTDASSVSTGHTTPLHVTDASSASTGQATPLPVTSLSSVSTGDTTPLPVTSPSSASTGHATPLLVTDTSSASTGHATPLPVTDASSVSTDHATSLPVTIPSAASTGHTTPLPVTDTSSASTGQATSLLVTDTSSVSTGDTTPLPVTSTSSASTGHVTPLHVTSPSSASTGHATPLPVTSLSSASTGDTMPLPVTSPSSASTGDTTPLPVTDASSVSTGHTTPLPVTSPSSASTGHTTPLPVTDTSSASKGDTTPLPVTSPSSASTGHTTPLPVTDTSSASTGDTTPLPVTNASSLSTGHATPLHVTSPSSASTGHATPLPVTSTSSASTGHATPLPVTGLSSATTDDTTRLPVTDVSSASTGQATPLPVTSLSSVSTGDTTPLPVTSPSSASTGHASPLLVTDASSASTGQATPLPVTDTSSVSTAHATPLPVTGLSSASTDDTTRLPVTDVSSASTGQAIPLPVTSPSSASTGDTTPLPVTDASSASTGDTTSLPVTIPSSASSGHTTSLPVTDASSVSTGHATSLLVTDASSVSTGDTTPLPVTDTNSASTGDTTPLHVTDASSVSTGHATSLPVTSLSSASTGDTTPLPVTSPSSASSGHTTPLPVTDASSVPTGHATSLPVTDASSVSTGHATPLPVTDASSVSTGHATPLPVTDTSSVSTGQATPLPVTSLSSASTGDTTPLPVTDTSSASTGQDTPLPVTSLSSVSTGDTTPLPVTNPSSASTGHATPLLVTDASSISTGHATSLLVTDASSVSTGHATALHDTDASSLSTGDTTPLPVTSPSSTSTGDTTPLPVTETSSVSTGHATSLPVTDTSSASTGHATSLPVTDTSSASTGHATPLPVTDTSSASTGQATPLPVTSPSSASTGHAIPLLVTDTSSASTGQATPLPVTSLSSASTGDTTPLPVTDASSVSTGHATSLPVTSLSSVSTGDTTPLPVTSPSSASTGHATPLHVTDASSASTGHATPLPVTSLSSASTGDTTPLPVTSPSSASTGHATPLHVTDASSVSTGDTTPLPVTSSSSASSGHTTPLPVTDASSASTGDTTPLPVTDTSSASTGHATHLPVTGLSSASTGDTTRLPVTNVSSASTGHATPLPVTSTSSASTGDTTPLPGTDTSSVSTGHTTPLLVTDASSVSTGDTTRLPVTSPSSASTGHTTPLPVTDTPSASTGDTTPLPVTNASSLSTRHATSLHVTSPSSASTGHATSLPVTDTSAASTGHATPLPVTSTSSASTGDTTPLPVTDTYSASTGQATPLPVTSLSSVSTGDTTPLPVTSPSSASTGHATPLLVTDASSASTGQATPLPVTSLSSVSTGDTTPLPVTSPSSASTGHATSLPVTDTSSASTGDTTSLPVTDTSSAYTGDTTSLPVTDTSSSSTGDTTPLLVTETSSVSTGDTTPLPVTDTSSASTGHATPLPVTNTSSVSTGHATPLHVTSPSSASTGHTTPLPVTDASSVSTGHATSLPVTDASSVFTGHATSLPVTIPSSASSGHTTPLPVTDASSVSTGHATSLPVTDASSVSTGHATPLPVTDASSVSTGHATPLPLTSLSSVSTGDTTPLPVTDTSSASTGQATPLPVTSLSSVSTGDTTPLPVTDTSSASTGHATSLPVTDTSSASTGHATPLPDTDTSSASTGHATLLPVTDTSSASIGHATSLPVTDTSSISTGHATPLHVTSPSSASTGHATPLPVTDTSSASTGHANPLHVTSPSSASTGHATPLPVTDTSSASTGHATPLPVTSLSSVSTGDTTPLPVTSPSSASTGHTTPLPVTDTSSASTGQATALPVTSTSSASTGDTTPLPVTDTSSASTGQATPLPVTSLSSVSTGDTTPLPVTSPSSASTGHATPLLVTDASSASTGQATPLPVTSLSSVSTGDTTPLPVTSPSSASTGHATSLPVTDTSSASTGDTTSLPVTDTSSAYTGDTTSLPVTDTSSSSTGDTTPLLVTETSSVSTGHATPLLVTDASSASTGHATPLHVTSPSSASTGDTTPVPVTDTSSVSTGHATPLPVTGLSSASTGDTTRLPVTDISSASTGQATPLPVTNTSSVSTGDTMPLPVTSPSSASTGHATPLPVTSTSSASTGHATPVPVTSTSSASTGHTTPLPVTDTSSASTGDTTPLPVTSPSSASTGHTTPLHVTIPSSASTGDTSTLPVTGASSASTGHATPLPVTDTSSVSTGHATPLPVTSLSSVSTGDTTPLPVTDASSASTGQATPLPVTSLSSVSTGDTTPLLVTDASSVSTGHATPLPVTDTSSASTGDTTRLPVTDTSSASTGQATPLPVTSLSSVSTGDTTPLLVTDASSVSTGHATPLPVTDTSSASTGDTTRLPVTDTSSASTGQATPLPVTIPSSSSSGHTTPLPVTSTSSVSTGHVTPLHVTSPSSASTGHVTPLPVTSTSSASTGHATPLLVTDASSVSTGHATPLPVTDASSASTGDTTPLPVTDTSSASTGQATPLPVTSLSSVSTGDTTPLPVTDASSASTGHATPLPVTIPSSVSTGDTMPLPVTSPSSASTGHATPLPVTGLSSASTGDTTPLPVTDTSSASTRHATPLPVTDTSSASTDDTTRLPVTDVSSASTGHATPLPVTSTSSASTGDTTPLPVTDTSSVSTGHATSLPVTSRSSASTGHATPLPVTDTSSVSTGHATPLPVTSTSSVSTGHATPLPVTSPSSASTGHATPVPVTSTSSASTGDTTPLPVTNASSLSTGHATPLHVTSPSSASRGDTSTLPVTDASSASTGHATPLPLTSLSSVSTGDTTPLPVTDTSSASTGQATPLPVTSLSSVSTGDTTPLPVTIPSSASSGHTTSLPVTDASSVSTGHGTPLPVTSTSSASTGDTTPLPVTDTSSASTGHATPLPVTDTSSASTGHATPLPVTSLSSVSTGHATPLAVSSATSASTVSSDSPLKMETPGMTTPSLKTDGGRRTATSPPPTTSQTIISTIPSTAMHTRSTAAPIPILPERGVSLFPYGAGAGDLEFVRRTVDFTSPLFKPATGFPLGSSLRDSLYFTDNGQIIFPESDYQIFSYPNPLPTGFTGRDPVALVAPFWDDADFSTGRGTTFYQSNTYQAILSTDGSRSYALFLYQSGGMQWDVAQRSGNPVLMGFSSGDGYFENSPLMSQPVWERYRPDRFLNSNSGLQGLQFYRLHREERPNYRLECLQWLKSQPRWPSWGWNQVSCPCSWQQGRRDLRFQPVSIGRWGLGSRQLCSFTSWRGGVCCSYGPWGEFREGWHVQRPWQLAQELEPQSWCCRWNDKPYLCALYQQRRPHVGCATYRPPQPAWMFGDPHITTLDGVSYTFNGLGDFLLVGAQDGNSSFLLQGRTAQTGSAQATNFIAFAAQYRSSSLGPVTVQWLLEPHDAIRVLLDNQTVTFQPDHEDGGGQETFNATGVLLSRNGSEVSASFDGWATVSVIALSNILHASASLPPEYQNRTEGLLGVWNNNPEDDFRMPNGSTIPPGSPEEMLFHFGMTWQINGTGLLGKRNDQLPSNFTPVFYSQLQKNSSWAEHLISNCDGDSSCIYDTLALRNASIGLHTREVSKNYEQANATLNQYPPSINGGRVIEAYKGQTTLIQYTSNAEDANFTLRDSCTDLELFENGTLLWTPKSLEPFTLEILARSAKIGLASALQPRTVVCHCNAESQCLYNQTSRVGNSSLEVAGCKCDGGTFGRYCEGSEDACEEPCFPSVHCVPGKGCEACPPNLTGDGRHCAALGSSFLCQNQSCPVNYCYNQGHCYISQTLGCQPMCTCPPAFTDSRCFLAGNNFSPTVNLELPLRVIQLLLSEEENASMAEVNASVAYRLGTLDMRAFLRNSQVERIDSAAPASGSPIQHWMVISEFQYRPRGPVIDFLNNQLLAAVVEAFLYHVPRRSEEPRNDVVFQPISGEDVRDVTALNVSTLKAYFRCDGYKGYDLVYSPQSGFTCVSPCSRGYCDHGGQCQHLPSGPRCSCVSFSIYTAWGEHCEHLSMKLDAFFGIFFGALGGLLLLGVGTFVVLRFWGCSGARFSYFLNSAEALP

SEQ ID NO: 16885 - protein, 412 aa, Homo sapiens
MTQKGSMKPVKKKKTEEPELEPLCCCEYIDRNGEKNHVATCLCDCQDLDEGCDRWITCKSLQPETCERIMDTISDRLRIPWLRGAKKVNISIIPPLVLLPVFLHVASWHFLLGVVVLTSLPVLALWYYYLTHRRKEQTLFFLSLGLFSLGYMYYVFLQEVVPKGRVGPVQLAVLTCGLFLILLALHRAKKNPGYLSNPASGDRSLSSSQLECLSRKGQEKTKGFPGADMSGSLNNRTTKDDPKGSSKMPAGSPTKAKEDWCAKCQLVRPARAWHCRICGICVRRMDHHCVWINSCVGESNHQAFILALLIFLLTSVYGITLTLDTICRDRSVFTALFYCPGVYANYSSALSFTCVWYSVIITAGMAYIFLIQLINISYNVTEREVQQALRQKTGRRLLCGLIVDTGKVLAHL

SEQ ID NO: 16886 - protein, 349 aa, Homo sapiens
MKVLSEGQLKLCVVQPVHLTSWLLIFFILKSISCLKPARLPIYQRKPFIAAWNAPTDQCLIKYNLRLNLKMFPVIGSPLAKARGQNVTIFYVNRLGYYPWYTSQGVPINGGLPQNISLQVHLEKADQDINYYIPAEDFSGLAVIDWEYWRPQWARNWNSKDVYRQKSRKLISDMGKNVSATDIEYLAKVTFEESAKAFMKETIKLGIKSRPKGLWGYYLYPDCHNYNVYAPNYSGSCPEDEVLRNNELSWLWNSSAALYPSIGVWKSLGDSENILRFSKFRVHESMRISTMTSHDYALPVFVYTRLGYRDEPLFFLSKQDLVSTIGESAALGAAGIVIWGDMNLTASKV

SEQ ID NO: 16887 - protein, 419 aa, Homo sapiens
MAGSGCAWGAEPPRFLEAFGRLWQVQSRLGSGSSASVYRVRCCGNPGSPPGALKQFLPPGTTGAAASAAEYGFRKERAALEQLQGHRNIVTLYGVFTIHFSPNVPSRCLLLELLDVSVSELLLYSSHQGCSMWMIQHCARDVLEALAFLHHEGYVHADLKPRNILWSAENECFKLIDFGLSFKEGNQDVKYIQTDGYRAPEAELQNCLAQAGLQSDTECTSAVDLWSLGIILLEMFSGMKLKHTVRSQEWKANSSAIIDHIFASKAVVNAAIPAYHLRDLIKSMLHDDPSRRIPAEMALCSPFFSIPFAPHIEDLVMLPTPVLRLLNVLDDDYLENEEEYEDVVEDVKEECQKYGPVVSLLVPKENPGRGQVFVEYANAGDSKAAQKLLTGRMFDGKFVVATFYPLSAYKRGYLYQTLL

SEQ ID NO: 16888 - protein, 983 aa, Homo sapiens
MDTEPNPGTSSVSTTTSSTTTTTITTSSSRMQQPQISVYSGSDRHAVQVIQQALHRPPSSAAQYLQQMYAAQQQHLMLHTAALQQQHLSSSQLQSLAAVQASLSSGRPSTSPTGSVTQQSSMSQTSINLSTSPTPAQLISRSQASSSTSGSITQQTMLLGSTSPTLTASQAQMYLRAQMLIFTPATTVAAVQSDIPVVSSSSSSSCQSAATQVQNLTLRSQKLGVLSSSQNGPPKSTSQTQSLTICHNKTTVTSSKISQRDPSPESNKKGESPSLESRSTAVTRTSSIHQLIAPASYSPIQPHSLIKHQQIPLHSPPSKVSHHQLILQQQQQQIQPITLQNSTQDPPPSQHCIPLQNHGLPPAPSNAQSQHCSPIQSHPSPLTVSPNQSQSAQQSVVVSPPPPHSPSQSPTIIIHPQALIQPHPLVSSALQPGPNLQQSTANQVQATAQLNLPSHLPLPASPVVHIGPVQQSALVSPGQQIVSPSHQQYSSLQSSPIPIASPPQMSTSPPAQIPPLPLQSMQSLQVQPEILSQGQVLVQNALVSEEELPAAEALVQLPFQTLPPPQTVAVNLQVQPPAPVDPPVVYQVEDVCEEEMPEESDECVRMDRTPPPPTLSPAAITVGRGEDLTSEHPLLEQVELPAVASVSASVIKSPSDPSHVSVPPPPLLLPAATTRSNSTSMHSSIPSIENKPPQAIVKPQILTHVIEGFVIQEGLEPFPVSRSSLLIEQPVKKRPLLDNQVINSVCVQPELQNNTKHADNSSDTEMEDMIAEETLEEMDSELLKCEFCGKMGYANEFLRSKRFCTMSCAKRYNVSCSKKFALSRWNRKPDNQSLGHRGRRPSGPDGAAREHILRQLPITYPSAEEDLASHEDSVPSAMTTRLRRQSERERERELRDVRIRKMPENSDLLPVAQTEPSIWTVDDVWAFIHSLPGCQDIADEFRAQEIDGQALLLLKEDHLMSAMNIKLGPALKICARINSLKES

SEQ ID NO: 16889 - protein, 102 aa, Homo sapiens
MLSVRRVSEDICSRIYESAQRIDSITFLPSSGFHLKWKIQTRIANEKYLRTHKEVEWLISGFFREIFLKRPDNILEFAADYFTDPRLPNKIHMQLIKDKKAA

SEQ ID NO: 16890 - protein, 117 aa, Homo sapiens
MDMRVPAQLLGLLLLWLPGARCAIWMTQSPSLLSASTGDRVTISCRMSQGISSYLAWYQQKPGKAPELLIYAASTLQSGVPSRFSGSGSGTDFTLTISCLQSEDFATYYCQQYYSFP

SEQ ID NO: 16891 - protein, 1000 aa, Homo sapiens
MKKFNFRKVLDGLTASSPGSGSSSGSNSGGGAGSGSVHPAGTAGVLREEIQETLTSEYFQICKTVRHGFPHQPTALAFDPVQKILAIGTRTGAIRILGRPGVDCYCQHESGAAVLQLQFLINEGALVSASSDDTLHLWNLRQKRPAILHSLKFNRERITYCHLPFQSKWLYVGTERGNTHIVNIESFILSGYVIMWNKAIELSTKTHPGPVVHLSDSPRDEGKLLIGYENGTVVFWDLKSKRAELRVYYDEAIHSIDWHHEGKQFMCSHSDGSLTLWNLKSPSRPFQTTIPHGKSQREGRKSESCKPILKVEYKTCKNSEPFIIFSGGLSYDKACRRPSLTIMHGKAITVLEMDHPIVEFLTLCETPYPNEFQEPYAVVVLLEKDLIVVDLTQSNFPIFENPYPMDIHESPVTCTAYFADCPPDLILVLYSIGVKHKKQGYSNKEWPISGGAWNLGAQTYPEIIITGHADGSIKFWDASAITLQMLYKLKTSKVFEKQKVGEGKQTCEIVEEDPFAIQMIYWCPESRIFCVSGVSAYVIIYKFSRHEITTEIVSLEVRLQYDVEDIITPEPETSPPFPDLSAQLPSSRSLSGSTNTVASEGVTKDSIPCLNVKTRPVRMPPGYQAELVIQLVWVDGEPPQQITSLAVSSAYGIVAFGNCNGLAVVDFIQKTVLLSMGTIDLYRSSDLYQRQPRSPRKNKQFIADNFCMRGLSNFYPDLTKRIRTSYQSLTELNDSPVPLELERCKSPTSGLATRTPESALGFYRNEISAMRQRNQVYHLPENRENSYNRSRSSSISSIDKDSKEAITALYFMDSFARKNDSTISPCLFVGTSLGMVLIISLNLPLADEQRFTEPVMVLPSGTFLSLKGAVLTFSCMDRMGGLMQPPYEVWRDPNNIDENEKSWRRKVVMNSSSASQEIGDHQYTIICSEKQAKVFSLPSQTCLYVHNITETSFILQANVVVMCSSACLACFCANGHIMIMRYLPSYKLSGNHNNTSKVQS

SEQ ID NO: 16892 - protein, 223 aa, Homo sapiens
IDLRYEAQNLEHFQVNFRNVKAVKFPTPLRPFVTREVLVETYEESVPVSSYQQAGIPVDLKRKIARLGINMLLKMIFVDNFVHADLHPGNILVQGANGLSSSQEAQLQQADICDTLVVAVPSSLCPLRLVLLDAGIVAELQAPDLRNFRAVFMAVVMGQLHVSSLLSSVFKLLMTHKVKLESNFASIVFAIMVLEGLGRSLDPKLDILEAARPFLLTGPVCPP

SEQ ID NO: 16893 - protein, 995 aa, Homo sapiens
MAEAEFKDHSTAMDTEPNPGTSSVSTTTSSTTTTTITTSSSRMQQPQISVYSGSDRHAVQVIQQALHRPPSSAAQYLQQMYAAQQQHLMLHTAALQQQHLSSSQLQSLAAVQASLSSGRPSTSPTGSVTQQSSMSQTSINLSTSPTPAQLISRSQASSSTSGSITQQTMLLGSTSPTLTASQAQMYLRAQMLIFTPATTVAAVQSDIPVVSSSSSSSCQSAATQVQNLTLRSQKLGVLSSSQNGPPKSTSQTQSLTICHNKTTVTSSKISQRDPSPESNKKGESPSLESRSTAVTRTSSIHQLIAPASYSPIQPHSLIKHQQIPLHSPPSKVSHHQLILQQQQQQIQPITLQNSTQDPPPSQHCIPLQNHGLPPAPSNAQSQHCSPIQSHPSPLTVSPNQSQSAQQSVVVSPPPPHSPSQSPTIIIHPQALIQPHPLVSSALQPGPNLQQSTANQVQATAQLNLPSHLPLPASPVVHIGPVQQSALVSPGQQIVSPSHQQYSSLQSSPIPIASPPQMSTSPPAQIPPLPLQSMQSLQVQPEILSQGQVLVQNALVSEEELPAAEALVQLPFQTLPPPQTVAVNLQVQPPAPVDPPVVYQVEDVCEEEMPEESDECVRMDRTPPPPTLSPAAITVGRGEDLTSEHPLLEQVELPAVASVSASVIKSPSDPSHVSVPPPPLLLPAATTRSNSTSMHSSIPSIENKPPQAIVKPQILTHVIEGFVIQEGLEPFPVSRSSLLIEQPVKKRPLLDNQVINSVCVQPELQNNTKHADNSSDTEMEDMIAEETLEEMDSELLKCEFCGKMGYANEFLRSKRFCTMSCAKRYNVSCSKKFALSRWNRKPDNQSLGHRGRRPSGPDGAAREHILRQLPITYPSAEEDLASHEDSVPSAMTTRLRRQSERERERELRDVRIRKMPENSDLLPVAQTEPSIWTVDDVWAFIHSLPGCQDIADEFRAQEIDGQALLLLKEDHLMSAMNIKLGPALKICARINSLKES

SEQ ID NO: 16894 - protein, 854 aa, Homo sapiens
MSLSEEQARSFLDQNPDFARQYFGKKLSPENVAAACEDGCPPDCDSLRDLCQVEESTALLELVQDMQESINMERVVFKVLRRLCTLLQADRCSLFMYRQRNGVAELATRLFSVQPDSVLEDCLVPPDSEIVFPLDIGVVGHVAQTKKMVNVEDVAECPHFSSFADELTDYKTKNMLATPIMNGKDVVAVIMAVNKLNGPFFTSEDEDVFLKYLNFATLYLKIYHLSYLHNCETRRGQVLLWSANKVFEELTDIERQFHKAFYTVRAYLNCERYSVGLLDMTKEKEFFDVWSVLMGESQPYSGPRTPDGREIVFYKVIDYVLHGKEEIKVIPTPSADHWALASGLPSYVAESGFICNIMNASADEMFKFQEGALDDSGWLIKNVLSMPIVNKKEEIVGVATFYNRKDGKPFDEQDEVLMESLTQFLGWSVMNTDTYDKMNKLENRKDIAQDMVLYHVKCDRDEIQLILPTRARLGKEPADCDEDELGEILKEELPGPTTFDIYEFHFSDLECTELDLVKCGIQMYYELGVVRKFQIPQEVLVRFLFSISKGYRRITYHNWRHGFNVAQTMFTLLMTGKLKSYYTDLEAFAMVTAGLCHDIDHRGTNNLYQMKSQNPLAKLHGSSILERHHLEFGKFLLSEETLNIYQNLNRRQHEHVIHLMDIAIIATDLALYFKKRAMFQKIVDESKNYQDKKSWVEYLSLETTRKEIVMAMMMTACDLSAITKPWEVQSKVALLVAAEFWEQGDLERTVLDQQPIPMMDRNKAAELPKLQVGFIDFVCTFVYKEFSRFHEEILPMFDRLQNNRKEWKALADEYEAKVKALEEKEEEERVAAKKVGTEICNGGPAPKSSTCCIL

SEQ ID NO: 16895 - protein, 744 aa, Homo sapiens
MRVCSYECLPWEEAMRTELQLESRSSGSEREERQRLETILSLCAEYTKPDSRLSTGTTVEDVQKINKELEKLQLSDEESVFEEALMSPDTRYRCHRKDSLPDADLASCGSLSQSSASFFTPRSTRNDELLSDLTRTPPPPSSTFPKASSESSYLSILPKTPEGISEEQRSQELAAMEETRIVILNNLEELKQKIKDINDQMDESFRELDMECALLDGEQKSETTELMKEKEILDHLNRKIAELEKNIVGEKTKEKVKLDAEREKLERLQELYSEQKTQLDNCPESMREQLQQQLKRDADLLDVESKHFEDLEFQQLEHESRLDEEKENLTQQLLREVAEYQRNIVSRKEKISALKKQANHIVQQAQREQDHFVKEKNNLIMMLQREKENLCNLEKKYSSLSGGKGFPVNPNTLKEAHLPLGQSNSCGSVLPPSLAAMAKDSESRRMLRGYNHQQMSEGHRQKSEFYNRTASESNVYLNSFHYPDHSYKDQAFDTLSLDSSDSMETSISACSPDNISSASTSNIARIEEMERLLKQAHAEKTRLLESREREMEAKKRALEEEKRRREILEKRLQEETSQRQKLIEKEVKIRERQRAQARPLTRYLPVRKEDFDLRSHVETAGHNIDTCYHVSITEKTCRGFLIKMGGKIKTWKKRWFVFDRNKRTFSYYADKHETKLKGVIYFQAIEEVYYDHLKNANKSPNPLLTFSVKTHDRIYYMVAPSPEAMRIWMDVIVTGAEGYTHFLL

SEQ ID NO: 16896 - protein, 121 aa, Homo sapiens
PLYAVMYPVFNELERVNLSAAQTLRAAFIKAEKENPGLTQDIIMKILEKKSVEVNFTESLLRMAADDVEEYMIERPEPEFQDLNEKARALKQILSKIPDEINDRVRFLQTIKHLNTKRKNL

SEQ ID NO: 16897 - protein, 1651 aa, Homo sapiens
MKWKHVPFLVMISLLSLSPNHLFLAQLIPDPEDVERGNDHGTPIPTSDNDDNSLGYTGSRLRQEDFPPRIVEHPSDLIVSKGEPATLNCKAEGRPTPTIEWYKGGERVETDKDDPRSHRMLLPSGSLFFLRIVHGRKSRPDEGVYVCVARNYLGEAVSHNASLEVAILRDDFRQNPSDVMVAVGEPAVMECQPPRGHPEPTISWKKDGSPLDDKDERITIRGGKLMITYTRKSDAGKYVCVGTNMVGERESEVAELTVLERPSFVKRPSNLAVTVDDSAEFKCEARGDPVPTVRWRKDDGELPKSRYEIRDDHTLKIRKVTAGDMGSYTCVAENMVGKAEASATLTVQEPPHFVVKPRDQVVALGRTVTFQCEATGNPQPAIFWRREGSQNLLFSYQPPQSSSRFSVSQTGDLTITNVQRSDVGYYICQTLNVAGSIITKAYLEVTDVIADRPPPVIRQGPVNQTVAVDGTFVLSCVATGSPVPTILWRKDGVLVSTQDSRIKQLENGVLQIRYAKLGDTGRYTCIASTPSGEATWSAYIEVQEFGVPVQPPRPTDPNLIPSAPSKPEVTDVSRNTVTLSWQPNLNSGATPTSYIIEAFSHASGSSWQTVAENVKTETSAIKGLKPNAIYLFLVRAANAYGISDPSQISDPVKTQDVLPTSQGVDHKQVQRELGNAVLHLHNPTVLSSSSIEVHWTVDQQSQYIQGYKILYRPSGANHGESDWLVFEVRTPAKNSVVIPDLRKGVNYEIKARPFFNEFQGADSEIKFAKTLEEAPSAPPQGVTVSKNDGNGTAILVSWQPPPEDTQNGMVQEYKVWCLGNETRYHINKTVDGSTFSVVIPFLVPGIRYSVEVAASTGAGSGVKSEPQFIQLDAHGNPVSPEDQVSLAQQISDVVKQPAFIAGIGAACWIILMVFSIWLYRHRKKRNGLTSTYAGIRKVPSFTFTPTVTYQRGGEAVSSGGRPGLLNISEPAAQPWLADTWPNTGNNHNDCSISCCTAGNGNSDSNLTTYSRPADCIANYNNQLDNKQTNLMLPESTVYGDVDLSNKINEMKTFNSPNLKDGRFVNPSGQPTPYATTQLIQSNLSNNMNNGSGDSGEKHWKPLGQQKQEVAPVQYNIVEQNKLNKDYRANDTVPPTIPYNQSYDQNTGGSYNSSDRGSSTSGSQGHKKGARTPKVPKQGGMNWADLLPPPPAHPPPHSNSEEYNISVDESYDQEMPCPVPPARMYLQQDELEEEEDERGPTPPVRGAASSPAAVSYSHQSTATLTPSPQEELQPMLQDCPEETGHMQHQPDRRRQPVSPPPPPRPISPPHTYGYISGPLVSDMDTDAPEEEEDEADMEVAKMQTRRLLLRGLEQTPASSVGDLESSVTGSMINGWGSASEEDNISSGRSSVSSSDGSFFTDADFAQAVAAAAEYAGLKVARRQMQDAAGRRHFHASQCPRPTSPVSTDSNMSAAVMQKTRPAKKLKHQPGHLRRETYTDDLPPPPVPPPAIKSPTAQSKTQLEVRPVVVPKLPSMDARTDRSSDRKGSSYKGREVLDGRQVVDMRTNPGDPREAQEQQNDGKGRGNKAAKRDLPPAKTHLIQEDILPYCRPTFPTSNNPRDPSSSSSMSSRGSGSRQREQANVGRRNIAEMQVLGGYERGEDNNEELEETES

SEQ ID NO: 16898 - protein, 1256 aa, Homo sapiens
MSKVIQKKNHWTSRVHECTVKRGPQGELGVTVLGGAEHGEFPYVGAVAAVEAAGLPGGGEGPRLGEGELLLEVQGVRVSGLPRYDVLGVIDSCKEAVTFKAVRQGGRLNKDLRHFLNQRFQKGSPDHELQQTIRDNLYRHAVPCTTRSPREGEVPGVDYNFLTVKEFLDLEQSGTLLEVGTYEGNYYGTPKPPSQPVSGKVITTDALHSLQSGSKQSTPKRTKSYNDMQNAGIVHAENEEEDDVPEMNSSFTADSGEQEEHTLQETALPPVNSSIIAAPITDPSQKFPQYLPLSAEDNLGPLPENWEMAYTENGEVYFIDHNTKTTSWLDPRCLNKQQKPLEECEDDEGVHTEELDSELELPAGWEKIEDPVYGIYYVDHINRKTQYENPVLEAKRKKQLEQQQQQQQQQQQQQQQQQQQQTEEWTEDHSALVPPVIPNHPPSNPEPAREVPLQGKPFFTRNPSELKGKFIHTKLRKSSRGFGFTVVGGDEPDEFLQIKSLVLDGPAALDGKMETGDVIVSVNDTCVLGHTHAQVVKIFQSIPIGASVDLELCRGYPLPFDPDDPNTSLVTSVAILDKEPIIVNGQETYDSPASHSSKTGKVNGMKDARPSSPADVASNSSHGYPNDTVSLASSIATQPELITVHIVKGPMGFGFTIADSPGGGGQRVKQIVDSPRCRGLKEGDLIVEVNKKNVQALTHNQVVDMLVECPKGSEVTLLVQRGGLPVPKKSPKSQPLERKDSQNSSQHSVSSHRSLHTASPSHSTQVLPEFPPAEAQAPDQTDSSGQKKPDPFKIWAQSRSMYENRPMSPSPASGLSKGEREREINSTNFGECPIPDYQEQDIFLWRKETGFGFRILGGNEPGEPIYIGHIVPLGAADTDGRLRSGDELICVDGTPVIGKSHQLVVQLMQQAAKQGHVNLTVRRKVVFAVPKTENEVPSPASSHHSSNQPASLTEEKRTPQGSQNSLNTVSSGSGSTSGIGSGGGGGSGVVSTVVQPYDVEIRRGENEGFGFVIVSSVSRPEAGTTFAGNACVAMPHKIGRIIEGSPADRCGKLKVGDRILAVNGCSITNKSHSDIVNLIKEAGNTVTLRIIPGDESSNATLLTNAEKIATITTTHTPSQQGTQETRNTTKPKQESQFEFKAPQATQEQDFYTVELERGAKGFGFSLRGGREYNMDLYVLRLAEDGPAERCGKMRIGDEILEINGETTKNMKHSRAIELIKNGGRRVRLFLKRGDGSVPEYGGSNYENIPSFPGMTP

SEQ ID NO: 16899 - protein, 659 aa, Homo sapiens
MEVTASSRHYVDRLFDPDPQKVLQGVIDMKNAVIGNNKQKANLIVLGAVPRLLYLLQQETSSTELKTECAVVLGSLAMGTENNVKSLLDCHIIPALLQGLLSPDLKFIEACLRCLRTIFTSPVTPEELLYTDATVIPHLMALLSRSRYTQEYICQIFSHCCKGPDHQTILFNHGAVQNIAHLLTSLSYKVRMQALKCFSVLAFENPQVSMTLVNVLVDGELLPQIFVKMLQRDKPIEMQLTSAKCLTYMCRAGAIRTDDNCIVLKTLPCLVRMCSKERLLEERVEGAETLAYLIEPDVELQRIASITDHLIAMLADYFKYPSSVSAITDIKRLDHDLKHAHELRQAAFKLYASLGANDEDIRKKIIETENMMDRIVTGLSESSVKVRLAAVRCLHSLSRSVQQLRTSFQDHAVWKPLMKVLQNAPDEILVVASSMLCNLLLEFSPSKEPILESGAVELLCGLTQSENPALRVNGIWALMNMAFQAEQKIKADILRSLSTEQLFRLLSDSDLNVLMKTLGLLRNLLSTRPHIDKIMSTHGKQIMQAVTLILEGEHNIEVKEQTLCILANIADGTTAKDLIMTNDDILQKIKYYMGHSHVKLQLAAMFCISNLIWNEEEGSQERQDKLRDMGIVDILHKLSQSPDSNLCDKAKMALQQYLA

SEQ ID NO: 16900 - protein, 138 aa, Homo sapiens
MKRPKLKKASKRMTCHKRYKIQKKVREHHRKLRKEAKKRGHKKPRKDPGVPNSAPFKEALLREAELRKQRLEELKQQQKLDRQKELEKKRKLETNPDIKPSNVEPMEKEFGLCKTENKAKSGKQNSKKLYCQELKKVS

SEQ ID NO: 16901 - protein, 125 aa, Homo sapiens
MAVFLQLLPLLLSRAQGNPGASLDGRPGDRVNLSCGGVSHPIRWVWAPSFPACKGLSKGRRPILWASSSGTPTVPPLQPFVGRLRSLDSAPDPAAGRWVGARTGSFGPGLVAAQAPAPATDSTTP

SEQ ID NO: 16902 - protein, 739 aa, Homo sapiens
HDSNKSKILEKRLRYLNDHFTYNLYCNICRSLFEKDKLLFSFLLCANLLLARKEIEYQELMFLLTGGVSLKSAEKNPDPTWLQDKSWEEICRASEFPAFRGLRQHFCEHIYEWREIYDSKEPHNAKFPAPMDKNLNELQKIIILRCLRPDKITPAITNYVTDKLGKKFVEPPPFDLTKSYLDSNCTIPLIFVLSPGADPMASLLKFANDKSMSGNKFQAISLGQGQGPIAAKMIKAAIEEGTWVCLQNCHLAVSWMPMLEKICEDFTSETCNSSFRLWLTSYPSSKFPVTILQNGVKMTNEPPTGLRLNLLQSYLTDPVSDPEFFKGCRGKELLFINEYDTIPFEAISYLTGECNYGGRVTDDWDRRLLLTMLADFYNLYIVENPHYKFSPSGNYFAPPKGTYEDYIEFIKKLPFTQHPEIFGLHENVDISKDLQQTKTLFESLLLTQGGSKQTGASGSTDQILLEITKDILNKLPSDFDIEMALRKYPVRYEESMNTVLVQEMERFNNLIITIRNTLRDLEKAIKGVVVMDSALEALSGSLLVGKVPEIWAKRSYPSLKPLGSYITDFLARLNFLQDWYNSGKPCVFWLSGFFFTQAFLTGAMQNYARKYTTPIDLLGYEFEVIPSDTSDTSPEDGVYIHGLYLDGARWDRESGLLAEQYPKLLFDLMPIIWIKPTQKSRIIKSDAYVCPLYKTSERKGTLSTTGHSTNFVIAMLLKTDQPTRHWIKRGVALLCQLDD

SEQ ID NO: 16903 - protein, 1057 aa, Homo sapiens
DLLDAGTYVNIPDRSGDTVLIGAVRGGHVEIVRALLQKYADIDIRGQDNKTALYWAVEKGNATMVRDILQCNPDTEICTKDGETPLIKATKMRNIEVVELLLDKGAKVSAVDKKGDTPLHIAIRGRSRKLAELLLRNPKDGRLLYRPNKAGETPYNIDCSHQKSILTQIFGARHLSPTETDGDMLGYDLYSSALADILSEPTMQPPICVGLYAQWGSGKSFLLKKLEDEMKTFAGQQIEPLFQFSWLIVFLTLLLCGGLGLLFAFTVHPNLGIAVSLSFLALLYIFFIVIYFGGRREGESWNWAWVLSTRLARHIGYLELLLKLMFVNPPELPEQTTKALPVRFLFTDYNRLSSVGGETSLAEMIATLSDACEREFGFLATRLFRVFKTEDTQGKKKWKKTCCLPSFVIFLFIIGCIISGITLLAIFRVDPKHLTVNAVLISIASVVGLAFVLNCRTWWQVLDSLLNSQRKRLHNAASKLHKLKSEGFMKVLKCEVELMARMAKTIDSFTQNQTRLVVIIDGLDACEQDKVLQMLDTVRVLFSKGPFIAIFASDPHIIIKAINQNLNSVLRDSNINGHDYMRNIVHLPVFLNSRGLSNARKFLVTSATNGDVPCSDTTGIQEDADRRVSQNSLGEMTKLGSKTALNRRDTYRRRQMQRTITRQMSFDLTKLLVTEDWFSDISPQTMRRLLNIVSVTGRLLRANQISFNWDRLASWINLTEQWPYRTSWLILYLEETEGIPDQMTLKTIYERISKNIPTTKDVEPLLEIDGDIRNFEVFLSSRTPVLVARDVKVFLPCTVNLDPKLREIIADVRAAREQISIGGLAYPPLPLHEGPPRAPSGYSQPPSVCSSTSFNGPFAGGVVSPQPHSSYYSGMTGPQHPFYNRGSGPAPGPVVLLNSLNVDAVCEKLKQIEGLDQSMLPQYCTTIKKANINGRVLAQCNIDELKKEMNMNFGDWHLFRSTVLEMRNAESHVVPEDPRFLSESSSGPAPHGEPARRASHNELPHTELSSQTPYTLNFSFEELNTLGLDEGAPRHSNLSWQEENAGLEIDSSSEDPD

SEQ ID NO: 16904 - protein, 1299 aa, Homo sapiens
AVPTNGTVNNVAQEPVNTLGDISGNKTPDLSNQNSSDQANEEWETASESSDFNERRERDEKKNADLNAQTVVKVGENVLPPKREIAKRSFSSQRPVDRQNRRGNNGPPKSGRNFSGPRNERRSGPPSKSGKRGPFDDQPAGTTGVDLINGSSAHHQEGVPNGTGQKNSKDSTGKKREDPKPGPKKPKEKVDALSQFDLNNYASVVIIDDHPEVTVIEDPQSNLNDDGFTEVVSKKQQKRLQDEERRKKEEQVIQVWNKKNANEKGRSQTSKLPPRFAKKQATGIQQAQSSASVPPLASAPLPPSTSASVPASTSAPLPATLTPVPASTSAPVPASTLAPVLASTSAPVPASPLAPVSASASVSASVPASTSAAAITSSSAPASAPAPTPILASVSTPASVTILASASIPILASALASTSAPTPAPAASSPAAPVITAPTIPASAPTASVPLAPASASAPAPAPTPVSAPNPAPPAPAQTQAQTHKPVQNPLQTTSQSSKQPPPSIRLPSAQTPNGTDYVASGKSIQTPQSHGTLTAELWDNKVAPPAVLNDISKKLGPISPPQPPSVSAWNKPLTSFGSAPSSEGAKNGQESGLEIGTDTIQFGAPASNGNENEVVPVLSEKSADKIPEPKEQRQKQPRAGPIKAQKLPDLSPVENKEHKPGPIGKERSLKNRKVKDAQQVEPEGQEKPSPATVRSTDPVTTKETKAVSEMSTEIGTMISVSSAEYGTNAKMESARKAWENSPNVREKGSPVTSTAPPIATGVSSSASGPSTANYNSFSSASMPQIPVASVTPTASLSGAGTYTTSSLSTKSTTTSDPPNICKVKPQQLQTSSLPSASHFSQLSCMPSLIAQQQQNPQVYVSQSAAAQIPAFYMDTSHLFNTQHARLAPPSLAQQQGFQPGLSQPTSVQQIPIPIYAPLQGQHQAQLSLGAGPAVSQAQELFSSSLQPYRSQPAFMQSSLSQPSVVLSGTAIHNFPTVQHQELAKAQSGLAFQQTSNTQPIPILYEHQLGQASGLGGSQLIDTHLLQARANLTQASNLYSGQVQQPGQTNFYNTAQSPSALQQVTVPLPASQLSLPNFGSTGQPLIALPQTLQPPLQHTTPQAQAQSLSRPAQVSQPFRGLIPAGTQHSMIATTGKMSEMELKAFGSGIDIKPGTPPIAGRSTTPTSSPFRATSTSPNSQSSKMNSIVYQKQFQSAPATVRMTQPFPTQFAPQAKQRAEVLQSTQRFFSEQQQSKQIGGGKAQKVDSDSSKPPETLTDPPGVCQEKVEEKPPPAPSIATKPVRTGPIKPQAIKTEETKS

SEQ ID NO: 16905 - protein, 203 aa, Homo sapiens
VYKCIKRLDGCVYAIKRSMKTFTELSNENSALHEVYAHAVLGHHPHVVRYYSSWAEDDHMIIQNEYCNGGSLQAAISENTKSGNHFEEPKLKDILLQISLGLNYIHNSSMVHLDIKPSNIFICHKMQSESSGVIEEVENEADWFLSANVMYKIGDLGHATSINKPKVEEGDSRFLANEILQENMIQPDAEQRPSAAALARNTV

SEQ ID NO: 16906 - protein, 407 aa, Homo sapiens
MASRSLGGLSGIRGGGGGGGKKSLSARNAAVERRNLITVCRFSVKTLIDRSCFETIDDSSPEFNNFAAILEQILSHRLKGQVTWFGYESPRSFWDYIRVACRKVSQNCICSIENMENVSSSRAKGRAWIRVALMEKHLSEYISTALRDFKTTRRFYEDGAIVLGEEANMLAGMLLGLNAIDFSFCLKGEGLDGSFPAVIDYTPYLKYIQSSDSISSDEEELRTLGSSGSESSTPENVGPPFLMDENSWFNKCKRVKQKYQLTLEQKGYLEELLRLRENQLSESVSQNKILLQRIEDSDLAHKLEKEQLEYIIVELQDQLKSYQSLDQLSAEVSLSQTSLDPGQSQEGDGKQDTLNVMSEGKEDTPSLLGLCGSLTSVASYKSLTSLKSNDYLASPTTEMTSPGLTPS

SEQ ID NO: 16907 - protein, 623 aa, Homo sapiens
MDLSALRVEEVQNVINAMQKILECPICLELIKEPVSTKCDHIFCKFCMLKLLNQKKGPSQCPLCKNDITKRSLQESTRFSQLVEELLKIICAFQLDTGLEYANSYNFAKKENNSPEHLKDEVSIIQSMGYRNRAKRLLQSEPENPSLETSLSVQLSNLGTVRTLRTKQRIQPQKTSVYIELGSDSSEDTVNKATYCSVGDQELLQITPQGTRDEISLDSAKKAACEFSETDVTNTEHHQPSNNDLNTTEKRAAERHPEKYQGEAASGCESETSVSEDCSGLSSQSDILTTQQRDTMQHNLIKLQQEMAELEAVLEQHGSQPSNSYPSIISDSSALEDLRNPEQSTSEKAVLTSQKSSEYPISQNPEGLSADKFEVSADSSTSKNKEPGVERSSPSKCPSLDDRWYMHSCSGSLQNRNYPSQEELIKVVDVEEQQLEESGPHDLTETSYLPRQDLEGTPYLESGISLFSDDPESDPSEDRAPESARVGNIPSSTSALKVPQLKVAESAQSPAAAHTTDTAGYNAMEESVSREKPELTASTERVNKRMSMVVSGLTPEEFMLVYKFARKHHITLTNLITEETTHVVMKTDAEFVCERTLKYFLGIAGGKWVVSYFWVTQSIKERK

SEQ ID NO: 16908 - protein, 230 aa, Homo sapiens
MSIVIPLGVDTAETSYLEMAAGSEPESVEASPVVVEKSNSYPHQLYTSSSHHSHSYIGLPYADHNYGARPPPTPPASPPPSVLISKNEVGIFTTPNFDETSSATTISTSEDGSYGTDVTRCICGFTHDDGYMICCDKCSVWQHIDCMGIDRQHIPDTYLCERCQPRNLDKERAVLLQRRKRENMSDGDTSATESGDEVPVELYTAFQHTPTSITLTASRVSKVNDKRRKK

SEQ ID NO: 16909 - protein, 532 aa, Homo sapiens
MRSERPMVWCCLFVRSQRKRKQSTQDEDAVSLCSLDISEPSNKRVKPLSRVTSLANLIPPVKATPLKRFSQTLQRSISFRSESRPDILAPRPWSRNAAPSSTKRRDSKLWSETFDVCVNQMLTSKEIKRQEAIFELSQGEEDLIEDLKLAKKAYHDPMLKLSIMTEQELNQIFGTLDSLIPLHEELLSQLRDVRKPDGSTEHVGPILVGWLPCLSSYDSYCSNQVAAKALLDHKKQDHRVQDFLQRCLESPFSRKLDLWNFLDIPRSRLVKYPLLLREILRHTPNDNPDQQHLEEAINIIQGIVAEINTKTGESECRYYKERLLYLEEGQKDSLIDSSRVLCCHGELKNNRGVKLHVFLFQEVLVITRAVTHNEQLCYQLYRQPIPVKDLLLEDLQDGEVRLGGSLRGAFSNNERIKNFFRVSFKNGSQSQTHSLQANDTFNKQQWLNCIRQAKETVLCAAGQAGVLDSEGSFLNPTTGSRELQGETKLEQMDQSDSESDCSMDTSEVSLDCERMEQTDSSCGNSRHGESNV

SEQ ID NO: 16910 - protein, 146 aa, Homo sapiens
MRMTMEEMKNEAETTSMVSMPLYAVMYPVFNELERVNLSAAQTLRAAFIKAEKENPGLTQDIIMKILEKKSVEVNFTESLLRMAADDVEEYMIERPEPEFQDLNEKARALKQILSKIPDEINDRVRFLQTIKDIASAIKELLDTVN

SEQ ID NO: 16911 - protein, 598 aa, Homo sapiens
MAAASAVSVLLVAAERNRWHRLPSLLLPPRTWVWRQRTMKYTTATDEAYSIGPAPSQQSYLSMEKIIQVAKTSAAQAIHPGCGFLSENMEFAELCKQEGIIFIGPPPSAIRDMGIKSTSKSIMAAAGVPVVEGYHGEDQSDQCLKEHARRIGYPVMIKAVRGGGGKGMRIVRSEQEFQEQLESARREAKKSFNDDAMLIEKFVDTPRHVEVQVFGDHHGNAVYLFERDCSVQRRHQKIIEEAPAPGIKSEVRKKLGEAAVRAAKAVNYVGAGTVEFIMDSKHNFCFMEMNTRLQVEHPVTEMITGTDLVEWQLRIAAGEKIPLSQEEITLQGHAFEARIYAEDPSNNFMPVAGPLVHLSTPRADPSTRIETGVRQGDEVSVHYDPMIAKLVVWAADRQAALTKLRYSLRQYNIVGLHTNIDFLLNLSGHPEFEAGNVHTDFIPQHHKQLLLSRKAAAKESLCQAALGLILKEKAMTDTFTLQAHDQFSPFSSSSGRRLNISYTRNMTLKDGKNNVAIAVTYNHDGSYSMQIEDKTFQVLGNLYSEGDCTYLKCSVNGVASKAKLIILENTIYLFSKEGSIEIDIPVPKYLSSVSSQET

SEQ ID NO: 16912 - protein, 165 aa, Homo sapiens
VDVYQGWCGPCKPVVSLFQKMRIEVGLDLLHFALAEADRLDVLEKYRGKCEPTFLFYAIKDEALSDEDECVSHGKNNGEDEDMVSSERTCTLAIIKPDAVAHGKTDEIIMKIQEAGFEILTNEERTMTEAEVRLFYQHKAGESPSSVRHRNALQCRPWKPGQRRC

SEQ ID NO: 16913 - protein, 117 aa, Homo sapiens
MDMRVPAQLLGLLLLWLPGAKCDIQMTQSPSTLSASVGDRVTITCRASQSISSWLAWYQQKPGKAPKLLIYKASSLESGVPSRFSGSGSGTEFTLTISSLQPDDFATYYCQQYNSYS

SEQ ID NO: 16914 - protein, 4444 aa, Homo sapiens
MKGARWRRVPWVSLSCLCLCLLPHVVPGTTEDTLITGSKTAAPVTSTGSTTATLEGQSTAASSRTSNQDISASSQNHQTKSTETTSKAQTDTLTQMMTSTLFSSPSVHNVMETAPPDEMTTSFPSSVTNTLMMTSKTITMTTSTDSTLGNTEETSTAGTESSTPVTSAVSITAGQEGQSRTTSWRTSIQDTSASSQNHWTRSTQTTRESQTSTLTHRTTSTPSFSPSVHNVTGTVSQKTSPSGETATSSLCSVTNTSMMTSEKITVTTSTGSTLGNPGETSSVPVTGSLMPVTSAALVTFDPEGQSPATFSRTSTQDTTAFSKNHQTQSVETTRVSQINTLNTLTPVTTSTVLSSPSGFNPSGTVSQETFPSGETTTSSPSSVSNTFLVTSKVFRMPTSRDSTLGNTEETSLSVSGTISAITSKVSTIWWSDTLSTALSPSSLPPKISTAFHTQQSEGAETTGRPHERSSFSPGVSQEIFTLHETTTWPSSFSSKGHTTWSQTELPSTSTGAATRLVTGNPSTGTAGTIPRVPSKVSAIGEPGEPTTYSSHSTTLPKTTGAGAQTQWTQETGTTGEALLSSPSYSVTQMIKTATSPSSSPMLDRHTSQQITTAPSTNHSTIHSTSTSPQESPAVSQRGHTQAPQTTQESQTTRSVSPMTDTKTVTTPGSSFTASGHSPSEIVPQDAPTISAATTFAPAPTGDGHTTQAPTTALQAAPSSHDATLGPSGGTSLSKTGALTLANSVVSTPGGPEGQWTSASASTSPDTAAAMTHTHQAESTEASGQTQTSEPASSGSRTTSAGTATPSSSGASGTTPSGSEGISTSGETTRFSSNPSRDSHTTQSTTELLSASASHGAIPVSTGMASSIVPGTFHPTLSEASTAGRPTGQSSPTSPSASPQETAAISRMAQTQRTRTSRGSDTISLASQATDTFSTVPPTPPSITSTGLTSPQTETHTLSPSGSGKTFTTALISNATPLPVTYASSASTGHTTPLHVTDASSVSTGHATPLPVTSPSSVSTGHTTPLPVTDTSSESTGHVTPLPVTSFSSASTGDSTPLPVTDTSSASTGHVTPLPVTSLSSASTGDTTPLPVTDTSSASTGHATSLPVTDTSSVSTGHTTPLPVTDTSSASTGHATSLPVTDTSSVSTGHTTPLHVTDASSASTGQATPLPVTSLSSVSTGDTTPLPVTSPSSASTGHATPLLVTDTSSASTGHATPLPVTDASSVSTDHATSLPVTIPSAASTGHTTPLPVTDTSSASTGQATSLLVTDTSSVSTGDTTPLPVTSTSSASTGHVTPLHVTSPSSASTGHATPLPVTSLSSASTGDTMPLPVTSPSSASTGDTTPLPVTDASSVSTGHTTPLHVTDASSASTGQATPLPVTSLSSVSTGDTTPLPVTSPSSASTGHATPLLVTDTSSASTGHATPLPVTDASSVSTDHATSLPVTIPSAASTGHTTPLPVTDTSSASTGQATSLLVTDTSSVSTGDTTPLPVTSTSSASTGHVTPLHVTSPSSASTGHATPLPVTSLSSASTGDTMPLPVTSPSSASTGDTTPLPVTDASSVSTGHTTPLPVTSPSSASTGHTTPLPVTDTSSASKGDTTPLPVTSPSSASTGHTTPLPVTDTSSASTGDTTPLPVTNASSLSTGHATPLHVTSPSSASTGHATPLPVTSTSSASTGHATPLPVTGLSSATTDDTTRLPVTDVSSASTGQATPLPVTSLSSVSTGDTTPLPVTSPSSASTGHASPLLVTDASSASTGQATPLPVTDTSSVSTAHATPLPVTGLSSASTDDTTRLPVTDVSSASTGQAIPLPVTSPSSASTGDTTPLPVTDASSASTGDTTSLPVTIPSSASSGHTTSLPVTDASSVSTGHATSLLVTDASSVSTGDTTPLPVTDTNSASTGDTTPLHVTDASSVSTGHATSLPVTSLSSASTGDTTPLPVTSPSSASSGHTTPLPVTDASSVPTGHATSLPVTDASSVSTGHATPLPVTDASSVSTGHATPLPVTDTSSVSTGQATPLPVTSLSSASTGDTTPLPVTDTSSASTGQDTPLPVTSLSSVSTGDTTPLPVTNPSSASTGHATPLLVTDASSISTGHATSLLVTDASSVSTGHATALHDTDASSLSTGDTTPLPVTSPSSTSTGDTTPLPVTETSSVSTGHATSLPVTDTSSASTGHATSLPVTDTSSASTGHATPLPVTDTSSASTGQATPLPVTSPSSASTGHAIPLLVTDTSSASTGQATPLPVTSLSSASTGDTTPLPVTDASSVSTGHATSLPVTSLSSVSTGDTTPLPVTSPSSASTGHATPLHVTDASSASTGHATPLPVTSLSSASTGDTTPLPVTSPSSASTGHATPLHVTDASSVSTGDTTPLPVTSSSSASSGHTTPLPVTDASSASTGDTTPLPVTDTSSASTGHATHLPVTGLSSASTGDTTRLPVTNVSSASTGHATPLPVTSTSSASTGDTTPLPGTDTSSVSTGHTTPLLVTDASSVSTGDTTRLPVTSPSSASTGHTTPLPVTDTPSASTGDTTPLPVTNASSLSTRHATSLHVTSPSSASTGHATSLPVTDTSAASTGHATPLPVTSTSSASTGDTTPLPVTDTYSASTGQATPLPVTSLSSVSTGDTTPLPVTSPSSASTGHATPLLVTDASSASTGQATPLPVTSLSSVSTGDTTPLPVTSPSSASTGHATSLPVTDTSSASTGDTTSLPVTDTSSAYTGDTTSLPVTDTSSSSTGDTTPLLVTETSSVSTGDTTPLPVTDTSSASTGHATPLPVTNTSSVSTGHATPLHVTSPSSASTGHTTPLPVTDASSVSTGHATSLPVTDASSVFTGHATSLPVTIPSSASSGHTTPLPVTDASSVSTGHATSLPVTDASSVSTGHATPLPVTDASSVSTGHATPLPLTSLSSVSTGDTTPLPVTDTSSASTGQATPLPVTSLSSVSTGDTTPLPVTDTSSASTGHATSLPVTDTSSASTGHATPLPDTDTSSASTGHATLLPVTDTSSASIGHATSLPVTDTSSISTGHATPLHVTSPSSASTGHATPLPVTDTSSASTGHANPLHVTSPSSASTGHATPLPVTDTSSASTGHATPLPVTSLSSVSTGDTTPLPVTSPSSASTGHTTPLPVTDTSSASTGQATALPVTSTSSASTGDTTPLPVTDTSSASTGQATPLPVTSLSSVSTGDTTPLPVTSPSSASTGHATPLLVTDASSASTGQATPLPVTSLSSVSTGDTTPLPVTSPSSASTGHATSLPVTDTSSASTGDTTSLPVTDTSSAYTGDTTSLPVTDTSSSSTGDTTPLLVTETSSVSTGHATPLLVTDASSASTGHATPLHVTSPSSASTGDTTPVPVTDTSSVSTGHATPLPVTGLSSASTGDTTRLPVTDISSASTGQATPLPVTNTSSVSTGDTMPLPVTSPSSASTGHATPLPVTSTSSASTGHATPVPVTSTSSASTGHTTPLPVTDTSSASTGDTTPLPVTSPSSASTGHTTPLHVTIPSSASTGDTSTLPVTGASSASTGHATPLPVTDTSSVSTGHATPLPVTSLSSVSTGDTTPLPVTDASSASTGQATPLPVTSLSSVSTGDTTPLLVTDASSVSTGHATPLPVTDTSSASTGDTTRLPVTDTSSASTGQATPLPVTSLSSVSTGDTTPLLVTDASSVSTGHATPLPVTDTSSASTGDTTRLPVTDTSSASTGQATPLPVTIPSSSSSGHTTPLPVTSTSSVSTGHVTPLHVTSPSSASTGHVTPLPVTSTSSASTGHATPLLVTDASSVSTGHATPLPVTDASSASTGDTTPLPVTDTSSASTGQATPLPVTSLSSVSTGDTTPLPVTDASSASTGHATPLPVTIPSSVSTGDTMPLPVTSPSSASTGHATPLPVTGLSSASTGDTTPLPVTDTSSASTRHATPLPVTDTSSASTDDTTRLPVTDVSSASTGHATPLPVTSTSSASTGDTTPLPVTDTSSVSTGHATSLPVTSRSSASTGHATPLPVTDTSSVSTGHATPLPVTSTSSVSTGHATPLPVTSPSSASTGHATPVPVTSTSSASTGDTTPLPVTNASSLSTGHATPLHVTSPSSASRGDTSTLPVTDASSASTGHATPLPLTSLSSVSTGDTTPLPVTDTSSASTGQATPLPVTSLSSVSTGDTTPLPVTIPSSASSGHTTSLPVTDASSVSTGHGTPLPVTSTSSASTGDTTPLPVTDTSSASTGHATPLPVTDTSSASTGHATPLPVTSLSSVSTGHATPLAVSSATSASTVSSDSPLKMETPGMTTPSLKTDGGRRTATSPPPTTSQTIISTIPSTAMHTRSTAAPIPILPERGVSLFPYGAGAGDLEFVRRTVDFTSPLFKPATGFPLGSSLRDSLYASQAGTLWPWWLRSGTMLTSPLVGGPHFIRATPTKPSSPRTGAGPMPCFSTRAVGCSGTWPSAQWRWLFRKQPTDVPASVGEVSP

SEQ ID NO: 16915 - protein, 2515 aa, Homo sapiens
MARKLSVLEVLLIIFCLIVVTIDILLLLLVLEETSDTSFTPECPEIPQSERIDCTPDQEVTEDICRWQYKCCWSPVADANVPRCFFPWNWGYEASNGHTNTSTGFTAQLKRLPSPSLFGNDVATTLFTAEYQTSNRFHFKITDFNNIRYEVSHENINLVDGIADASNLSYYVEVTDKPFSIKIMRTSNRRVLLDTSIGPLQFAQQYLQLSFRLPSANVYGLGEHVHQQYRHNMTWKTWPIFTRDATPTEGMINLYGAHTFFLCLEDARGSSFGVFLMNSNAMEVTLQPAPAITYRTIGGILDFYVFLGNTPEQVVQEYLELVGRPFFPPYWSLGFQLSRRDYGGINKLKEVVSRNRLAEIPYDVQYSDIDYMDGKKDFTVDEVAYSGLPDFVKELHDNGQKYLIIMNPGISKNSNYEPYNNGSLKRVWILGSNGFAVGEGYPGPTVFPDYTNPVCTEWWTDQVAKFHDHLEFDGVWIEMNEVSSLLQASNNQCESNNLNFPPFLPRVLDHLLFARTLCMDTEFHGGLHYDIHSLYGHSMARTTNLALETIFMNNRSFILSRSTFAGSGKFAAHWLGDNAATWDDLRWSIPTILEFNLFGIPMVGANICGYNNNVTEELCRRWMQLGAFYPLPRNHNGPGFRDQDPAAFGVDSLLLKSSRHYLNIRYTLLPYLYTLFYHAHTRGETVARPLVHEFYQDSATWDVHEQFLWGPGLLITPVLYEGVDEVKAYIPDATWYDYETGVAISWRKQLVNMLLPGDKIGLHLRGGYIFPTQKPNTTTEASRRNSLGLIIALDYKREAKGELYWDDGVSKDAVTEKKYILYDFSVTSNHLQAKIINNNYMDTDNLMFTDITILGMDKQPANFIVLLNNVATSSPSVVYNASTKVVTITDLQGLVLGQEFSIRWNLPVSDLEKFNCYPDDPTASEESCRQRGCLWEDTSTPGVPTCYYDTIPNYVASDIQYLNTSITADLSLPMAPESAAAAASDSLSAKISFLHLKVIYHTATMLQVKIYDPTNKRYEVPVPLNTPPQPVGDPENRLYDVRIQNNPFGIQIQRKNSSTVIWDSQLPGFIFNDMFLSISTRLPSQYIYGFGETEHTTFRRNMNWNTWGMFAHDEPPAYKKNSYGVHPYYMALEEDGSAHGVLLLNSNAMDVTLQPTPALTYRTTGGILDFYIVLGPTPELVTQQYTELIGRPAMIPYWALGFHLSRYGYQNDAEISSLYDAMVAAQIPYDVQHVDIDYMNRKLDFTLSANFQNLSLLIEQMKKNGMRFILILDPAISGNETQYLPFIRGQENNVFIKWPDTNDIVWGKVWPDLPNVIVDGSLDHETQVKLYRAYVAFPDFFRNSTAAWWKKEIEELYANPREPEKSLKFDGLWIDMNEPSNFVDGSVRGCSNEMLNNPPYMPYLESRDKGLSSKTLCMESQQILPDSSPVEHYNVHNLYGWSQTRPTYEAVQEVTGQRGVIITRSTFPSSGRWGGHRLGNNTAAWDQLGKSIIGMMEFSLFGIPYTGADICGFFGDAEYEMCVRWMQLGAFYPFSRNHNNIGTRRQDPVAWNSTFEMLSRKVLETRYTLLPYLYTLMHKAHVEGSTVVRPLLHEFTDDRTTWDIDRQFMLGPAILISPVLETSTFEISAYFPRARWYDYSTGTSSTSTGQRKILKAPLDHINLHVRGGYILPWQEPAMNTHSSRQNFMGLIVALDDNGTAEGQVFWDDGQSIDTYENGNYFLANFIAAQNILQIQTIHNKYLSDSNPLKVGYIRIWGVNTYVTQVSFTYDNRQFMETNFKSEPYNQILTIQLTDKTINLEKLTEVTWIDGGPVLPTPTKTSTIPMSSHPSPSTTNATSSETITSSASANTTTGTTDTVPITTTSFPSTTSVTTNTTVPDTTSPFPTSTTNASTNATVPITTTPFPTSTIGVTTNATVPNTTAPFPTNASTASTNATVPITTTCFATSTIGVTTNATVPDTTAPFPTNTTTASTNATIPITTTPFATSTISVTTSTTVPDTTAPFPTSTTSASTNATPVPITTTLFATSTIGVTTGTTVPDTTAPFPTSTTSTSTSATVPITTTPSPTNTADANTSNTVPNTTMPSPTSSTTVSTIATVPISVTPSLTSTADATISTTVLIATTSSLTGTTDVSTSTTINNISTPVQTNTTNASTSTNVANITATSHTSTDDTVPNNTVPVTAIPSLANTGVDTTSNSFSIMTTSFSESTNAMNTTVIMATTSPTSTDVASTNNDASMTNFLLATMSAGNITSNSISITTTSFGNSVPFVTTPSPSTDATTTSNNTNPGMTTYYQTSPTIPTHTLTSIPSSITSILSMFPTSNTFTTDKITNFTTPTNANTIIFNTLDTKSTMVIDATVTTTSTKDNTMSPDTTVTSIDKFTTHITQFATPHSATTTTLALSHTSLAPTNLSNLGTMDITDADNSSSVTGNTTHISVSNLTTASVTITATGLDSQTPHMVINSVATYLPITATSATTDTTNITKYALNTTTPDSTVHTSATAPTYIANAINATQVP

SEQ ID NO: 16916 - protein, 61 aa, Homo sapiens
LGGRSSCEDPGCPRDEERAPRQTKQNRSSLEVANLSQFPPEEDGVHEVQVPPGRRQYILKN

SEQ ID NO: 16917 - protein, 508 aa, Homo sapiens
MEKWDGNEGTSAFHMPEWMIQFADQKQEFNKRPTKIGRRSLSRSISQSSTDSYSSAASYTDSSDDETSPRDKQQKNSKGSSDFCVKNIKQAEFGRREIEIAEQEMPALMALRKRAQGEKPLAGAKIVGCTHITAQTAVLMETLGALGAQCRWAACNIYSTLNEVAAALAESGFPVFAWKGESEDDFWWCIDRCVNVEGWQPNMILDDGGDLTHWIYKKYPNMFKKIKGIVEESVTGVHRLYQLSKAGKLCVPAMNVNDSVTKQKFDNLYCCRESILDGLKRTTDMMFGGKQVVVCGYGEVGKGCCAALKAMGSIVYVTEIDPICALQACMDGFRLVKLNEVIRQVDIVITCTGNKNVVTREHLDRMKNSCIVCNMGHSNTEIDVASLRTPELTWERVRSQVDHVIWPDGKRIVLLAEGRLLNLSCSTVPTFVLSITATTQALALIELYNAPEGRYKQDVYLLPKKMDEYVASLHLPTFDAHLTELTDEQAKYLGLNKNGPFKPNYYRY

SEQ ID NO: 16918 - protein, 453 aa, Homo sapiens
MEDIQTNAELKSTQEQSVPAESAAVLNDYSLTKSHEMENVDSGEGPANEDEDIGDDSMKVKDEYSERDENVLKSEPMGNAEEPEIPYSYSREYNEYENIKLERHVVSFDSSRPTSGKMNCDVCGLSCISFNVLMVHKRSHTVEKPYKCEFCGRSYKQRSSLEEHKERCRTFLQSTDPGDTASAEARHIKAEMGSERALVLDRLASNVAKRKSSMPQKFIGEKRHCFDVNYNSSYMYEKESELIQTRMMDQAINNAISYLGAEALRPLVQTPPAPTSEMVPVISSMYPIALTRAEMSNGAPQELEKKSIHLPEKSVPSERGLSPNNSGHDSTDTDSNHEERQNHIYQQNHMVLSRARNGMPLLKEVPRSYELLKPPPICPRDSVKVINKEGEVMDVYRCDHCRVLFLDYVMFTIHMGCHGFRDPFECNMCGYRSHDRYEFSSHIARGEHRALLK

SEQ ID NO: 16919 - protein, 1003 aa, Homo sapiens
MKSEDYPHETMAPDIHEERQYRCEDCDQLFESKAELADHQKFPCSTPHSAFSMVEEDFQQKLESENDLQEIHTIQECKECDQVFPDLQSLEKHMLSHTEEREYKCDQCPKAFNWKSNLIRHQMSHDSGKHYECENCAKVFTDPSNLQRHIRSQHVGARAHACPECGKTFATSSGLKQHKHIHSSVKPFICEVCHKSYTQFSNLCRHKRMHADCRTQIKCKDCGQMFSTTSSLNKHRRFCEGKNHFAAGGFFGQGISLPGTPAMDKTSMVNMSHANPGLADYFGANRHPAGLTFPTAPGFSFSFPGLFPSGLYHRPPLIPASSPVKGLSSTEQTNKSQSPLMTHPQILPATQDILKALSKHPSVGDNKPVELQPERSSEERPFEKISDQSESSDLDDVSTPSGSDLETTSGSDLESDIESDKEKFKENGKMFKDKVSPLQNLASINNKKEYSNHSIFSPSLEEQTAVSGAVNDSIKAIASIAEKYFGSTGLVGLQDKKVGALPYPSMFPLPFFPAFSQSMYPFPDRDLRSLPLKMEPQSPGEVKKLQKGSSESPFDLTTKRKDEKPLTPVPSKPPVTPATSQDQPLDLSMGSRSRASGTKLTEPRKNHVFGGKKGSNVESRPASDGSLQHARPTPFFMDPIYRVEKRKLTDPLEALKEKYLRPSPGFLFHPQMSAIENMAEKLESFSALKPEASELLQSVPSMFNFRAPPNALPENLLRKGKERYTCRYCGKIFPRSANLTRHLRTHTGEQPYRCKYCDRSFSISSNLQRHVRNIHNKEKPFKCHLCDRCFGQQTNLDRHLKKHENGNMSGTATSSPHSELESTGAILDDKEDAYFTEIRNFIGNSNHGSQSPRNVEERMNGSHFKDEKALVTSQNSDLLDDEEVEDEVLLDEEDEDNDITGKTGKEPVTSNLHEGNPEDDYEETSALEMSCKTSPVRYKEEEYKSGLSALDHIRHFTDSLKMRKMEDNQYSEAELSSFSTSHVPEELKQPLHRKSKSQEESKA

SEQ ID NO: 16920 - protein, 1562 aa, Homo sapiens
MPGEAARAELLLPEADRPGPRTDLSCDAAAATTILGGDRREPCALTPGPSHLALTFLPSKPGARPQPEGASWDAGPGGAPSAWADPGEGGPSPMLLPEGLSSQALSTEAPLPATLEPRIVMGEETCQALLSPRAARTALRDQEGGHASPDPPPELCSQGDLSVPSPPPDPDSFFTPPSTPTKTTYALLPACGPHGDARDSEAELRDELLDSPPASPSGSYITADGDSWASSPSCSLSLLAPAEGLDFPSGWGLSPQGSMVDERELHPAGTPEPPSSESSLSADSSSSWGQEGHFFDLDFLANDPMIPAALLPFQGSLIFQVEAVEVTPLSPEEEEEEAVADPDPGGDLAGEGEEDSTSASFLQSLSDLSITEGMDEAFAFRDDTSAASSDSDSASYAEADDERLYSGEPHAQATLLQDSVQKTEEESGGGAKGLQAQDGTVSWAVEAAPQTSDRGAYLSQRQELISEVTEEGLALGQESTATVTPHTLQVAPGLQVEVATRVTPQAGEEETDSTAGQESAAMAMPQPSQEGISEILGQESVTAEKLPTPQEETSLTLCPDSPQNLKEEGGLDLPSGRKPVAAATIVPRQAKEDLTLPQDSAMTPPLPLQDTDLSSAPKPVAAATIVSQQAEEGLTLPQDSVMTPPLPLQDTELSSAPKPVAAATLVSQQAEEGLTLPQDSAMTPPLPLQDTDLSSAPKPVAAATLVSQQAEEGLTLPQDSAMTPPLPLQDTDLSSAPKPVAAATLVSQQAEEGLTLPQDSAMTPPLPLQDTDLSSAPKPVAAATIVSQQAEEGLTLPQDSAMTPPLPLQDTDLSSAPKPVAAATIVSQQAEEGLTLPQDSAMTPPLPLQDTDLSSAPKPVAAATPVSQQAEEGLTLPQDSAMTPPLPLQDTDLSSAPKPVAAATPVSQQAEEGLTLPQDSAMTAPLPLQDTGPTSGPEPLAVATPQTLQAEAGCAPGTEPVATMAQQEVGEALGPRPAPEEKNAALPTVPEPAALDQVQQDDPQPAAEAGTPWAAQEDADSTLGMEALSLPEPASGAGEEIAEALSRPGREACLEARAHTGDGAKPDSPQKETLEVENQQEGGLKPLAQEHGPRSALGGAREVPDAPPAACPEVSQARLLSPAREERGLSGKSTPEPTLPSAVATEASLDSCPESSVGAVSSLDRGCPDAPAPTSAPTSQQPEPVLGLGSVEQPHEVPSVLGTPLLQPPENLAKGQPSTPVDRPLGPDPSAPGTLAGAALPPLEPPAPCLCQDPQEDSVEDEEPPGSLGLPPPQAGVQPAAAAVSGTTQPLGTGPRVSLSPHSPLLSPKVASMDAKDLALQILPPCQVPPPSGPQSPAGPQGLSAPEQQEDEDSLEEDSPRALGSGQHSDSHGESSAELDEQDILAPQTVQCPAQAPAGGSEETIAKAKQSRSEKKARKAMSKLGLRQIQGVTRITIQKSKNILFVIAKPDVFKSPASDTYVVFGEAKIEDLSQQVHKAAAEKFKVPSEPSALVPESAPRPRVRLECKEEEEEEEEEVDEAGLELRDIELVMAQANVSRAKAVRALRDNHSDIVNAIMELTM

SEQ ID NO: 16921 - protein, 407 aa, Homo sapiens
MTSQRSPLAPLLLLSLHGVAASLEVSESPGSIQVARGQPAVLPCTFTTSAALINLNVIWMVTPLSNANQPEQVILYQGGQMFDGAPRFHGRVGFTGTMPATNVSIFINNTQLSDTGTYQCLVNNLPDIGGRNIGVTGLTVLVPPSAPHCQIQGSQDIGSDVILLCSSEEGIPRPTYLWEKLDNTLKLPPTATQDQVQGTVTIRNISALSSAQPRNIGLIAGAIGTGAVIIIFCIALILGAFFYWRSKNKEEEEEEIPNEIREDDLPPKCSSAKAFHTEISSSDNNTLTSSNAYNSRYWSNNPKVHRNTESVSHFSDLGQSFSFHSGNANIPSIYANGTHLVPGQHKTLVVTANRGSSPQVMSRSNGSVSRKPRPPHTHSYTISHATLERIGAVPVMVPAQSRAGSLV

SEQ ID NO: 16922 - protein, 360 aa, Homo sapiens
MVQAHGGRSRAQPLTLSLGAAMTQPPPEKTPAKKHVRLQERRGSNVALMLDVRSLGAVEPICSVNTPREVTLHFLRTAGHPLTRWALQRQPPSPKQLEEEFLKIPSNFVSPEDLDIPGHASKDRYKTILPNPQSRVCLGRAQSQEDGDYINANYIRGYDGKEKVYIATQGPMPNTVSDFWEMVWQEEVSLIVMLTQLREGKEKCVHYWPTEEETYGPFQIRIQDMKECPEYTVRQLTIQYQEERRSVKHILFSAWPDHQTPESAGPLLRLVAEVEESPETAAHPGPIVVHCSAGIGRTGCFIATRIGCQQLKARGEVDILGIVCQLRLDRGGMIQTAEQYQFLHHTLALYAGQLPEEPSP

SEQ ID NO: 16923 - protein, 515 aa, Homo sapiens
MQAMEGEVLLPALYEEEEEEEEEEEEVEEEEEQVQKGGSVGSLSVNKHRGLSLTETELEELRAQVLQLVAELEETRELAGQHEDDSLELQGLLEDERLASAQQAEVFTKQIQQLQGELRSLREEISLLEHEKESELKEIEQELHLAQAEIQSLRQAAEDSATEHESDIASLQEDLCRMQNELEDMERIRGDYEMEIASLRAEMEMKSSEPSGSLGLSDYSGLQEELQELRERYHFLNEEYRALQESNSSLTGQLADLESERTQRATERWLQSQTLSMTSAESQTSEMDFLEPDPEMQLLRQQLRDAEEQMHGMKNKCQELCCELEELQHHRQVSEEEQRRLQRELKCAQNEVLRFQTSHSVTQELLCRLQKLHLQHQNVTCEKEKLLERQQQLQEELQCHEAELQHLRDTVASFKESNEKDTETHAQLQEMKQLYQASKDELERQKHMYDQLEQDLLLCQLELKELKASHPIPEDKGKCANKSSPTPNPPIFSLPLVGLVVISALLWCWWAETSS

SEQ ID NO: 16924 - protein, 454 aa, Homo sapiens
MMKGEFYVIEYAACDATYNEIVTFERLRPVNQNKTVKKNTFFKCTVDVPEDLREACANENAHKDFKKAVGACRIFYHPETTQLMILSASEATVKRVNILSDMHLRSIRTKLMLMSRNEEATKHLECTKQLAAAFHEEFVVREDLMGLAIGTHGSNIQQARKVPGVTAIELDEDTGTFRIYGESADAVKKARGFLEFVEDFIQVPRNLVGKVIGKNGKVIQEIVDKSGVVRVRIEGDNENKLPREDGMVPFVFVGTKESIGNVQVLLEYHIAYLKEVEQLRMERLQIDEQLRQIGSRSYSGRGRGRRGPNYTSGYGTNSELSNPSETESERKDELSDWSLAGEDDRDSRHQRDSRRRPGGRGRSVSGGRGRGGPRGGKSSISSVLKDPDSNPYSLLDNTESDQTADTDASESHHSTNRRRRSRRRRTDEDAVLMDGMTESDTASVNENGLGKRCD

SEQ ID NO: 16925 - protein, 834 aa, Homo sapiens
MMKEVLSTGQGNREVIHTGTLQRHQSYHIGDFCFQEIEKEIHNIEFQCQEDERNGHEAPTTKIKKLTGSTDQHDHRHAGNKPIKDQLGSSFYSHLPELHIFQIKGEIANQLEKSTSDASSVSTSQRISCRPQIHISNNYGNNPLNSSLLPQKQEVHMREKSFPCNESGKAFNCSSLLRKHQIPHLGDKQYKCDVCGKLFNHKQYLACHRRCHTGEKPYKCKECGKSFSYKSSLTCHHRLHTGVKPYKCNECGKVFRQNSALVIHKAIHTGEKPYKCNECGKAFNQQSHLSRHQRLHTGVKPYKCKICEKAFACHSYLANHTRIHSGEKTYKCNECGKAFNHQSSLARHHILHTGEKPYKCEECDKVFSQKSTLERHKRIHTGEKPYKCKVCDTAFTCNSQLARHRRIHTGEKTYKCNECRKTFSRRSSLLCHRRLHSGEKPYKCNQCGNTFRHRASLVYHRRLHTLEKSYKCTVCNKVFMRNSVLAVHTRIHTAKKPYKCNECGKAFNQQSHLSRHRRLHTGEKPYKCEACDKVFGQKSALESHKRIHTGEKPYRCQVCDTAFTWNSQLARHTRIHTGEKTYKCNECGKTFSYKSSLVWHRRLHGGEKSYKCKVCDKAFVCRSYVAKHTRIHSGMKPYKCNECSKTFSNRSSLVCHRRIHSGEKPYKCSECSKTFSQKATLLCHRRLHSGEKPYKCNDCGNTFRHWSSLVYHRRLHTGEKSYKCTVCDKAFVRNSYLARHIRIHTAEKPYKCNECGKAFNEQSHLSRHHRIHTGEKPYKCEACDKVFSRKSHLKRHRIIHTGEKPYKCNECGKAFSDRSTLIHHQAIHGIGKFD

SEQ ID NO: 16926 - protein, 249 aa, Homo sapiens
MDKQNSQMNASHPETNLPVGYPPQYPPTAFQGPPGYSGYPGPQVSYPPPPAGHSGPGPAGFPVPNQPVYNQPVYNQPVGAAGVPWMPAPQPPLNCPPGLEYLSQIDQILIHQQIELLEVLTGFETNNKYEIKNSFGQRVYFAAEDTDCCTRNCCGPSRPFTLRIIDNMGQEVITLERPLRCSSCCCPCCLQEIEIQAPPGVPIGYVIQTWHPCLPKFTIQNEKREDVLKISGPCVVCSCCGDVDFEIKS

SEQ ID NO: 16927 - protein, 1777 aa, Homo sapiens
MRGGKCNMLSSLGCLLLCGSITLALGNAQKLPKGKRPNLKVHINTTSDSILLKFLRPSPNVKLEGLLLGYGSNVSPNQYFPLPAEGKFTEAIVDAEPKYLIVVRPAPPPSQKKSCSGKTRSRKPLQLVVGTLTPSSVFLSWGFLINPHHDWTLPSHCPNDRFYTIRYREKDKEKKWIFQICPATETIVENLKPNTVYEFGVKDNVEGGIWSKIFNHKTVVGSKKVNGKIQSTYDQDHTVPAYVPRKLIPITIIKQVIQNVTHKDSAKSPEKAPLGGVILVHLIIPGLNETTVKLPASLMFEISDALKTQLAKNETLALPAESKTPEVEKISARPTTVTPETVPRSTKPTTSSALDVSETTLVLSKRTPETLQTILIPQFELPLSTLAPKSLPEFPEAKTPFPFEKPRGTLASSEKPWIVPTAKISEDSKVLQPQTATYDVFSSPTTSDEPEISDSYTATSDRILDSIPPKTSRTLEQPRATLAPSETPFVPQKLEIFTSPEMQPTTPAPQQTTSIPSTPKRRPRPKPPRTKPERTTSAGTITPKISKSPEPTWTTPAPGKTQFISLKPKIPLSPEVTHTKPAPEPQTLLPSQSTIGPETPGTKPSTTLAPRKTKRPGRRPRPRPRPKTTPSPEVPKSKPALEPATIQPEPLVPTTASKPSERPKTTHRPDAPQIQPGSKPPKQLLPKPQTTAEPDMPPTKSVSEPVPFETEAPSMTIVPTTDIEPVTVRTEATVTTLAPKTSQRTRTRRPRPKHKTTPRPETLQTKLDFGPITPGTSSAPTTTTKRTRRPHPKPKTTPHPEVPQTKLVPATILEPVLRTEASGTTAAPKVPQRTHRPHPKPKTTLSPEELQTELVPATIFEPVSPIKEAPGTTFVPVTDLEPVTFRTEIPATTLATKTSKRTRPPRPRPKTTPSPQAPETKPVPATVLEPVTLRPEASTTLASKTSQRTRRPRLRTKTTPRPEAPESKPVPTAELKPVTLRTETWVTTQAPKTSQRTRRPRPKTKTTPSPEVPQTKLVPSTDLEPGTLRTEAPKTMVVTTVLEPDTFRTKFPETTLAPKTQRTRRPRPRPKTTSSPEVPQNKSVSVTGFEPVVHSTDAPGTTFALTELQTLILKPVTSPSLEMTESQPVSDVLESVTLSTESPKETIAPAKTDYVYPTAKAPLWPEEPKTEVVESITYVSEPPETTLETSPLPSQSITLPSPDEPQTEPAPKQTPRAPPKPKTSPRPRIPQTQPVPKVPQRVTAKPKTSPSPEVSYTTPAPKDVLLPHKPYPEVSQSEPAPLETRGIPFIPMISPSPSQEELQTTLEETDQSTQEPFTTKIPRTTELAKTTQAPHRFYTTVRPRTSDKPHIRPVLNRTTTRPTRPKPSGMPSGNGVGTGVKQAPRPSGADRNVSVDSTHPTKKPGTRRPPLPPRPTHPRRKPLPPNNVTGKPGSAGIISSGPITTPPLRSTPRPTGTPLERIETDIKQPTVPASGEELENITDFSSSPTRETDPLGKPRFKGPHVRYIQKPDNSPCSITDSVKRFPKEEATEGNATSPPQNPPTNLTVVTVEGCPSFVILDWEKPLNDTVTEYEVISRENGSFSGKNKSIQMTNQTFSTVENLKPNTSYEFQVKPKNPLGEGPVSNTVAFSTESADPRVSEPVSAGRDAIWTERPFNSDSYSECKGKQYVKRTWYKKFVGVQLCNSLRYKIYLSDSLTGKFYNIGDQRGHGEDHCQFVDSFLDGRTGQQLTSDQLPIKEGYFRAVRQEPVQFGEIGGHTQINYVQWYECGTTIPGKW

SEQ ID NO: 16928 - protein, 835 aa, Homo sapiens
SDEEDEERPARKRRQVERATEDGEEDEEMIESIENLEDLKGHSVREWVSMAGPRLEIHHRFKNFLRTHVDSHGHNVFKERISDMCKENRESLVVNYEDLAAREHVLAYFLPEAPAELLQIFDEAALEVVLAMYPKYDRITNHIHVRISHLPLVEELRSLRQLHLNQLIRTSGVVTSCTGVLPQLSMVKYNCNKCNFVLGPFCQSQNQEVKPGSCPECQSAGPFEVNMEETIYQNYQRIRIQESPGKVAAGRLPRSKDAILLADLVDSCKPGDEIELTGIYHNNYDGSLNTANGFPVFATVILANHVAKKDNKVAVGELTDEDVKMITSLSKDQQIGEKESSRNASLAEAGIGAIPSQLLAIEPSLRRSGVPIGEVGVSQRQEARSFSSANTHWFLEDLLGPSCRDTMIFASIAPSIYGHEDIKRGLALALFGGEPKNPGGKHKVRGDINVLLCGDPGTAKSQFLKYIEKVSSRAIFTTGQGASAVGLTAYVQRHPVSREWTLEAGALVLADRGVCLIDEFDKMNDQDRTSIHEAMEQQSISISKAGIVTSLQARCTVIAAANPIGGRYDPSLTFSENVDLTEPIISRFDILCVVRDTVDPVQDEMLARFVVGSHVRHHPSNKEEEGLANGSAAEPAMPNTYGVEPLPQEVLKKYIIYAKERVHPKLNQMDQDKVAKMYSDLRKESMATGSIPITVRHIESMIRMAEAHARIHLRDYVIEDDVNMAIRVMLESFIDTQKFSVMRSMRKTFARYLSFRRDNNELLLFILKQLVAEQVTYQRNRFGAQQDTIEVPEKDLVDKARQINIHNLSAFYDSELFRMNKFSHDLKRKMILQQF

SEQ ID NO: 16929 - protein, 152 aa, Homo sapiens
MNVSETSFVGCVQNTTTEDQLLFGCRLKGMHTVNSKWLSVGTHYFITVMASGPSPCPLGLRLNVTVKQQFCQESLSSEFCSGHGKCLSEAWSKTYSCHCQPPFSGKYCQELDACSFKPCKNNGSCINKRENWDEQAYECVCHPPFTGLLGGK

SEQ ID NO: 16930 - protein, 792 aa, Homo sapiens
MGAPACALALCVAVAIVAGASSESLGTEQRVVGRAAEVPGPEPGQQEQLVFGSGDAVELSCPPPGGGPMGPTVWVKDGTGLVPSERVLVGPQRLQVLNASHEDSGAYSCRQRLTQRVLCHFSVRVTDAPSSGDDEDGEDEAEDTGVDTGAPYWTRPERMDKKLLAVPAANTVRFRCPAAGNPTPSISWLKNGREFRGEHRIGGIKLRHQQWSLVMESVVPSDRGNYTCVVENKFGSIRQTYTLDVLERSPHRPILQAGLPANQTAVLGSDVEFHCKVYSDAQPHIQWLKHVEVNGSKVGPDGTPYVTVLKTAGANTTDKELEVLSLHNVTFEDAGEYTCLAGNSIGFSHHSAWLVVLPAEEELVEADEAGSVYAGILSYGVGFFLFILVVAAVTLCRLRSPPKKGLGSPTVHKISRFPLKRQQVSLESNASMSSNTPLVRIARLSSGEGPTLANVSELELPADPKWELSRARLTLGKPLGEGCFGQVVMAEAIGIDKDRAAKPVTVAVKMLKDDATDKDLSDLVSEMEMMKMIGKHKNIINLLGACTQGGPLYVLVEYAAKGNLREFLRARRPPGLDYSFDTCKPPEEQLTFKDLVSCAYQVARGMEYLASQKCIHRDLAARNVLVTEDNVMKIADFGLARDVHNLDYYKKTTNLVLWGPALGDLHAGGLPVPRHPCGGALQAAEGGPPHGQARQLHTRPVHDHAGVLACRALPEAHLQAAGGGPGPCPYRDVHRRVPGPVGAFRAVLPGWPGHPQLQLLRGRLRVCPRPAAPGPTQQWGLADVKGHWSPTM

SEQ ID NO: 16931 - protein, 413 aa, Homo sapiens
MQMDNRLPPKKVPGFCSFRYGLSFLVHCCNVIITAQRACLNLTMVVMVNSTDPHGLPNTSTKKLLDNIKNPMYNWSPDIQGIILSSTSYGVIIIQVPVGYFSGIYSTKKMIGFALCLSSVLSLLIPPAAGIGVAWVVVCRAVQGAAQGIVATAQFEIYVKWAPPLERGRLTSMSTSGFLLGPFIVLLVTGVICESLGWPMVFYIFGACGCAVCLLWFVLFYDDPKDHPCISISEKEYITSSLVQQNGFLSSLPYLFAWICGNLAGQLSDFFLTRNILSVIAVRKLFTAAGFLLPAIFGVCLPYLSSTFYSIVIFLILAGATGSFCLGGVFINGLDIAPRYFGFIKACSTLTGMIGGLIASTLTGLILKQDPESAWFKTFILMAAINVTGLIFYLIVATAEIQDWAKEKQHTRL

SEQ ID NO: 16932 - protein, 614 aa, Homo sapiens
MGNLKSVAQEPGPPCGLGLGLGLGLCGKQGPATPAPEPSRAPASLLPPAPEHSPPSSPLTQPPEGPKFPRVKNWEVGSITYDTLSAQAQQDGPCTPRRCLGSLVFPRKLQGRPSPGPPAPEQLLSQARDFINQYYSSIKRSGSQAHEQRLQEVEAEVAATGTYQLRESELVFGAKQAWRNAPRCVGRIQWGKLQVFDARDCRSAQEMFTYICNHIKYATNRGNLRSAITVFPQRCPGRGDFRIWNSQLVRYAGYRQQDGSVRGDPANVEITELCIQHGWTPGNGRFDVLPLLLQAPDDPPELFLLPPELVLEVPLEHPTLEWFAALGLRWYALPAVSNMLLEIGGLEFPAAPFSGWYMSTEIGTRNLCDPHRYNILEDVAVCMDLDTRTTSSLWKDKAAVEINVAVLHSYQLAKVTIVDHHAATASFMKHLENEQKARGGCPADWAWIVPPISGSLTPVFHQEMVNYFLSPAFRYQPDPWKGSAAKGTGITRKKTFKEVANAVKISASLMGTVMAKRVKATILYGSETGRAQSYAQQLGRLFRKAFDPRVLCMDEYDVVSLEHETLVLVVTSTFGNGDPPENGERWGFAMLPRLVSNSWVQAIHLPRPPKVLRL

SEQ ID NO: 16933 - protein, 583 aa, Homo sapiens
MVMKEIPREESAEEKPLLTMTSQLVNEQQESRPLLSPSIDDFLCETKSEAIARPVTSNTAVLTTGLDLLDLSEPVSQTQTKAKKSEPSSKTSSLKKKADGSDLISTDAEQRGQPLRVPETSSLDLDIQTQLEKWDDVKFHGDRNTKGHPMAERKSSSSRTGSKELLWSSEHRSQPELSGGKSALNSESASELELVAPTQARLTKEHRWGSALLSRNHSLEEEFERAKAAVESDTEFWDKMQAEWEEMARRNWISENQEAQNQVTISASEKGYYFHTENPFKDWPGAFEEGLKRLKEGDLPVTILFMEAAILQDPGDAEAWQFLGITQAENENEQAAIVALQRCLELQPNNLKALMALAVSYTNTGHQQDACDALKNWIKQNPKYKYLVKSKKGSPGLTRRMSKSPVDSSVLEGVKELYLEAAHQNGDMIDPDLQTGLGVLFHLSGEFNRAIDAFNAALTVRPEDYSLWNRLGATLANGDRSEEAVEAYTRALEIQPGFIRSRYNLGISCINLGAYREAVSNFLTALSLQRKSRNQQQVPHPAISGNIWAALRIALSLMDQPELFQAANLGDLDVLLRAFNLDP

SEQ ID NO: 16934 - protein, 1139 aa, Homo sapiens
MQTPEVPAERSPRRRSISGTSTSEKPNSMDTANTSPFKVPGFFSKRLKGSIKRTKSQSKLDRNTSFRLPSLRSTDDRSRGLPKLKESRSHESLLSPCSTVECLDLGRGEPVSVKPLHSSILGQDFCFEVTYLSGSKCFSCNSASERDKWMENLRRTVQPNKDNCRRAENVLRLWIIEAKDLAPKKKYFCELCLDDTLFARTTSKTKADNIFWGEHFEFFSLPPLHSITVHIYKDVEKKKKKDKNNYVGLVNIPTASVTGRQFVEKWYPVSTPTPNKGKTGGPSIRIKSRFQTITILPMEQYKEFAEFVTSNYTMLCSVLEPVISVRNKEELACALVHILQSTGRAKDFLTDLVMSEVDRCGEHDVLIFRENTIATKSIEEYLKLVGQQYLHDALGEFIKALYESDENCEVDPSKCSSSELIDHQSNLKMCCELAFCKIINSYCVFPRELKEVFASWKQQCLNRGKQDISERLISASLFLRFLCPAIMSPSLFNLMQEYPDDRTSRTLTLIAKVIQNLANFAKFGNKEEYMAFMNDFLEHEWGGMKRFLLEISNPDTISNTPGFDGYIDLGRELSVLHSLLWEVVSQLDKGENSFLQATVAKLGPLPRVLADITKSLTNPTPIQQQLRRFTEHNSSPNVSGSLSSGLQKIFEDPTDSDLHKLKSPSQDNTDSYFRGKTLLLVQQASSQSMTYSEKDERESSLPNGRSVSLMDLQDTHAAQVEHASVMLDVPIRLTGSQLSITQVASIKQLRETQSTPQSAPQVRRPLHPALNQPGGLQPLSFQNPVYHLNNPIPAMPKASIDSSLENLSTASSRSQSNSEDFKLSGPSNSSMEDFTKRSTQSEDFSRRHTVPDRHIPLALPRQNSTGQAQIRKVDQGGLGARAKAPPSLPHSASLRSTGSMSVVSAALVAEPVQNGSRSRQQSSSSRESPVPKVRAIQRQQTQQVQSPVDSATMSPVERTAAWVLNNGQYEEDVEETEQNLDEAKHAEKYEQEITKLKERLRVSSRRLEEYERRLLVQEQQMQKLLLEYKARLEDSEERLRRQQEEKDSQMKSIISRLMAVEEELKKDHAEMQAVIDAKQKIIDAQEKRIVSLDSANTRLMSALTQVKERYSMQVRNGISPTNPTKLSITENGEFKNSSC

SEQ ID NO: 16935 - protein, 246 aa, Homo sapiens
MGPRARPALLLLMLLQTAVLQGRLLQSHTLQVILGCEMQEDNSTEGYWKYGYDGQDHLEFCPDTLDWRAAEPRAWPTKLEWERHKIRARQNRAYLERDCPAQLQQLLELGRGVLDQQVTTLRCRALNYYPQNITMKWLKDKQPMDAKEFEPKDVLPNGDGTYQGWITLAVPPGEEQRYTCQVEHPGLDQPLIVIWEPSPSGTLVIGVISGIAVFVVILFIGILFIILRKRQGSRGAMGHYVLAERE

SEQ ID NO: 16936 - protein, 606 aa, Homo sapiens
MSLKLPRNWDFNLKVEAAKIARSRSVMTGEQMAAFHPSSTPNPLERPIKMGWLKKQRSIVKNWQQRYFVLRAQQLYYYKDEEDTKPQGCMYLPGCTIKEIATNPEEAGKFVFEIIPVFGQRLDETVAYEQKFGPHLVPILVEKCAEFILEHGRNEEGIFRLPGQDNLVKQLRDAFDAGERPSFDRDTDVHTVASLLKLYLRDLPEPVVPWSQYEGFLLCGQLTNADEAKAQQELMKQLSILPRDNYSLLSYICRFLHEIQLNCAVNKMSVDNLATVIGVNLIRSKVEDPAVIMRGTPQIQRVMTMMIRDHEVLFPKSKDIPLSPPAQKNDPKKAPVARSSVGWDATEDLRISRTDSFSSMTSDSDTTSPTGQQPSDAFPEDSSKVPREKPGDWKMQSRKRTQTLPNRKCFLTSAFQGANSSKMEIFKNEFWSPSSEAKAGEGHRRTMSQDLRQLSDSQRTSTYDNVPSLPGSPGEEASALSSQACDSKGDTLASPNSETGPGKKNSGEEEIDSLQRMVQELRKEIETQKQMYEEQIKNLEKENYDVWAKVVRLNEELEKEKKKSAALEISLRNMERSREDVEKRNKALEEEVKEFVKSMKEPKTEA

SEQ ID NO: 16937 - protein, 246 aa, Homo sapiens
MAFLRSMWGVLSALGRSGAELCTGCGSRLRSPFSFVYLPRWFSSVLASCPKKPVSSYLRFSKEQLPIFKAQNPDAKTTELIRRIAQRWRELPDSKKKIYQDAYRAEWQVYKEEISRFKEQLTPSQIMSLEKEIMDKHLKRKAMTKKKELTLLGKPKRPRSAYNVYVAERFQEAKGDSPQEKLKTVKENWKNLSDSEKELYIQHAKEDETRYHNEMKSWEEQMIEVGRKDLLRRTIKKQRKYGAEEC

SEQ ID NO: 16938 - protein, 547 aa, Homo sapiens
MQFPSPPAARSSPAPQAASSSEAAAPATGQPGPSCPVPGTSRRGRPGTPPAGRVEEEEEEEEEDVDKDPHPTQNTCLRCRHFSLRERKREPRRTMGGCEVREFLLQFGFFLPLLTAWPGDCSHVSNNQVVLLDTTTVLGELGWKTYPLNGWDAITEMDEHNRPIHTYQVCNVMEPNQNNWLRTNWISRDAAQKIYVEMKFTLRDCNSIPWVLGTCKETFNLFYMESDESHGIKFKPNQYTKIDTIAADESFTQMDLGDRILKLNTEIREVGPIERKGFYLAFQDIGACIALVSVRVFYKKCPFTVRNLAMFPDTIPRVDSSSLVEVRGSCVKSAEERDTPKLYCGADGDWLVPLGRCICSTGYEEIEGSCHACRPGFYKAFAGNTKCSKCPPHSLTYMEATSVCQCEKGYFRAEKDPPSMACTRPPSAPRNVVFNINETALILEWSPPSDTGGRKDLTYSVICKKCGLDTSQCEDCGGGLRFIPRHTGLINNSVIVLDFVSHVNYTFEIEAMNGVSELSFSPKPFTAITVTTDQDGKFHCCSLKTDP

SEQ ID NO: 16939 - protein, 993 aa, Homo sapiens
MAAEWASRFWLWATLLIPAAAVYEDQVGKFDWRQQYVGKVKFASLEFSPGSKKLVVATEKNVIAALNSRTGEILWRHVDKGTAEGAVDAMLLHGQDVITVSNGGRIMRSWETNIGGLNWEITLDSGSFQALGLVGLQESVRYIAVLKKTTLALHHLSSGHLKWVEHLPESDSIHYQMVYSYGSGVVWALGVVPFSHVNIVKFNVEDGEIVQQVRVSTPWLQHLSGACGVVDEAVLVCPDPSSRSLQTLALETEWELRQIPLQSLDLEFGSGFQPRVLPTQPNPVDASRAQFFLHLSPSHYALLQYHYGTLSLLKNFPQTALVSFATTGEKTVAAVMACRNEVQKSSSSEDGSMGSFSEKSSSKDSLACFNQTYTINLYLVETGRRLLDTTITFSLEQSGTRPERLYIQVFLKKDDSVGYRALVQTEDHLLLFLQQLAGKVVLWSREESLAEVVCLEMVDLPLTGAQAELEGEFGKKADGLLGMFLKRLSSQLILLQAWTSHLWKMFYDARKPRSQIKNEINIDTLARDEFNLQKMMVMVTASGKLFGIESSSGTILWKQYLPNVKPDSSFKLMVQRTTAHFPHPPQCTLLVKDKESGMSSLYVFNPIFGKWSQVAPPVLKRPILQSLLLPVMDQDYAKVLLLIDDEYKVTAFPATRNVLRQLHELAPSIFFYLVDAEQGRLCGYRLRKDLTTELSWELTIPPEVQRIVKVKGKRSSEHVHSQGRVMGDRSVLYKSLNPNLLAVVTESTDAHHERTFIGIFLIDGVTGRIIHSSVQKKAKGPVHIVHSENWVVYQYWNTKARRNEFTVLELYEGTEQYNATAFSSLDRPQLPQVLQQSYIFPSSISAMEATITERGITSRHLLIGLPSGAILSLPKALLDPRRPEIPTEQSREENLIPYSPDVQIHAERFINYNQTVSRMRGIYTAPSGLESTCLVVAYGLDIYQTRVYPSKQFDVLKDDYDYVLISSVLFGLVFATMITKRLAQVKLLNRAWR

SEQ ID NO: 16940 - protein, 695 aa, Homo sapiens
KNSDTAHIKSIEITSILNGLQASESSAEDSEQEDERGAQDMDNNGKEESKIDHLTNNRNDLISKEEQNSSSLLEENKVHADLVISKPVSKSPERLRKDIEVLSEDTDYEEDEVTKKRKDVKKDTTDKSSKPQIKRGKRRYCNTEECLKTGSPGKKEEKAKNKESLCMENSSNSSSDEDEEETKAKMTPTKKYNGLEEKRKSLRTTGFYSGFSEVAEKRIKLLNNSDERLQNSRAKDRKDVWSSIQGQWPKKTLKELFSDSDTEAAASPPHPAPEEGVAEESLQTVAEEESCSPSVELEKPPPVNVDSKPIEEKTVEVNDRKAEFPSSGSNSVLNTPPTTPESPSSVTVTEGSRQQSSVTVSEPLAPNQEEVRSIKSETDSTIEVDSVAGELQDLQSEGNSSPAGFDASVSSSSSNQPEPEHPEKACTGQKRVKDAQGGGSSSKKQKRSHKATVVNNKKKGKGTNSSDSEELSAGESITKSQPVKSVSTGMKSHSTKSPARTQSPGKCGKNGDKDPDLKEPSNRLPKVYKWSFQMSDLENMTSAERITILQEKLQEIRKHYLSLKSEVASIDRRRKRLKKKERESAATSSSSSSPSSSSITAAVMLTLAEPSMSSASQNGMLQPLPEDVLHSQNEAFLKRRGPPTDGDKPAPSPSASLRRRPAADCRRGGGVARERKCPEPGSASWRAAAVWESLE

SEQ ID NO: 16941 - protein, 472 aa, Homo sapiens
MWRLPGARAALRVIRTAVEKLSRAEAGSQTAAGAMERAVVRCVPSEPKLSLSFALADGSHKNMQRDQSEPLGRVLSRIATNALKGHAKAAAAKKSRKSRPNASGGAACSGPGPEPAVFCEPVVKLYYREEAVAEDVLNVDAWQDGAVLQIGDVKYKVERNPPAFTELQLPRYIMAGFPVCPKLSLEFGDPASSLFRWYKEAKPGAAEPEVGVPSSLSPSSPSSSWTETDVEERVYTPSNADIGLRLKLHCTPGDGQRFGHSRELESVCVVEAGPGTCTFDHRHLYTKKVTEDALIRTVSYNILADTYAQTEFSRTVLYPYCAPYALELDYRQNLIQKELTGYNADVICLQEVDRAVFSDSLVPALEAFGLEGVFRIKQHEGLATFYRKSKFSLLSQHDISFYEALESDPLHKELLEKLVLYPSAQEKVLQRSSVLQVSVLQSTKDSSKRICVANTHLYWHPKGRFYLVSQVT

SEQ ID NO: 16942 - protein, 165 aa, Homo sapiens
MARLHEHLKYFVNMKISTDKSWQGVTIYFSGHETPGEGEHKIMEFIRSEKAKPDHDPNTRHCLYGLDADLIMLGLTSHEAHFSLLREEVRFGGKKTQRVCAPEETTFHLLHLSLMREYIDYEFSVLKEKITFKYDIERIIDDWILMGFLVGNDFIPHLPHLHINH

SEQ ID NO: 16943 - protein, 1606 aa, Homo sapiens
MIAEPAHFYLFGLICLCSGSRLRQEDFPPRIVEHPSDLIVSKGEPATLNCKAEGRPTPTIEWYKGGERVETDKDDPRSHRMLLPSGSLFFLRIVHGRKSRPDEGVYVCVARNYLGEAVSHNASLEVAILRDDFRQNPSDVMVAVGEPAVMECQPPRGHPEPTISWKKDGSPLDDKDERITIRGGKLMITYTRKSDAGKYVCVGTNMVGERESEVAELTVLERPSFVKRPSNLAVTVDDSAEFKCEARGDPVPTVRWRKDDGELPKSRYEIRDDHTLKIRKVTAGDMGSYTCVAENMVGKAEASATLTVQVGSEPPHFVVKPRDQVVALGRTVTFQCEATGNPQPAIFWRREGSQNLLFSYQPPQSSSRFSVSQTGDLTITNVQRSDVGYYICQTLNVAGSIITKAYLEVTDVIADRPPPVIRQGPVNQTVAVDGTFVLSCVATGSPVPTILWRKDGVLVSTQDSRIKQLENGVLQIRYAKLGDTGRYTCIASTPSGEATWSAYIEVQEFGVPVQPPRPTDPNLIPSAPSKPEVTDVSRNTVTLSWQPNLNSGATPTSYIIEAFSHASGSSWQTVAENVKTETSAIKGLKPNAIYLFLVRAANAYGISDPSQISDPVKTQDVLPTSQGVDHKQVQRELGNAVLHLHNPTVLSSSSIEVHWTVDQQSQYIQGYKILYRPSGANHGESDWLVFEVRTPAKNSVVIPDLRKGVNYEIKARPFFNEFQGADSEIKFAKTLEEAPSAPPQGVTVSKNDGNGTAILVSWQPPPEDTQNGMVQEYKVWCLGNETRYHINKTVDGSTFSVVIPFLVPGIRYSVEVAASTGAGSGVKSEPQFIQLDAHGNPVSPEDQVSLAQQISDVVKQPAFIAGIGAACWIILMVFSIWLYRHRKKRNGLTSTYAGIRKVTYQRGGEAVSSGGRPGLLNISEPAAQPWLADTWPNTGNNHNDCSISCCTAGNGNSDSNLTTYSRPADCIANYNNQLDNKQTNLMLPESTVYGDVDLSNKINEMKTFNSPNLKDGRFVNPSGQPTPYATTQLIQSNLSNNMNNGSGDSGEKHWKPLGQQKQEVAPVQYNIVEQNKLNKDYRANDTVPPTIPYNQSYDQNTGGSYNSSDRGSSTSGSQGHKKGARTPKVPKQGGMNWADLLPPPPAHPPPHSNSEEYNISVDESYDQEMPCPVPPARMYLQQDELEEEEDERGPTPPVRGAASSPAAVSYSHQSTATLTPSPQEELQPMLQDCPEETGHMQHQPDRRRQPVSPPPPPRPISPPHTYGYISGPLVSDMDTDAPEEEEDEADMEVAKMQTRRLLLRGLEQTPASSVGDLESSVTGSMINGWGSASEEDNISSGRSSVSSSDGSFFTDADFAQAVAAAAEYAGLKVARRQMQDAAGRRHFHASQCPRPTSPVSTDSNMSAAVMQKTRPAKKLKHQPGHLRRETYTDDLPPPPVPPPAIKSPTAQSKTQLEVRPVVVPKLPSMDARTDRSSDRKGSSYKGREVLDGRQVVDMRTNPGDPREAQEQQNDGKGRGNKAAKRDLPPAKTHLIQEDILPYCRPTFPTSNNPRDPSSSSSMSSRGSGSRQREQANVGRRNIAEMQVLGGYERGEDNNEELEETES

SEQ ID NO: 16944 - protein, 490 aa, Homo sapiens
MAELTVEVRGSNGAFYKVYSRANDQEPCGWWLAKVRMMKGEFYVIEYAACDATYNEIVTFERLRPVNQNKTVKKNTFFKCTVDVPEDLREACANENAHKDFKKAVGACRIFYHPETTQLMILSASEATVKRVNILSDMHLRSIRTKLMLMSRNEEATKHLECTKQLAAAFHEEFVVREDLMGLAIGTHGSNIQQARKVPGVTAIELDEDTGTFRIYGESADAVKKARGFLEFVEDFIQVPRNLVGKVIGKNGKVIQEIVDKSGVVRVRIEGDNENKLPREDGMVPFVFVGTKESIGNVQVLLEYHIAYLKEVEQLRMERLQIDEQLRQIGSRSYSGRGRGRRGPNYTSGYGTNSELSNPSETESERKDELSDWSLAGEDDRDSRHQRDSRRRPGGRGRSVSGGRGRGGPRGGKSSISSVLKDPDSNPYSLLDNTESDQTADTDASESHHSTNRRRRSRRRRTDEDAVLMDGMTESDTASVNENGLGKRCD

SEQ ID NO: 16945 - protein, 1521 aa, Homo sapiens
VTDIMLILLVENISGLSNDDFQVEIIRDFDVAVVTFQKHIDTIRFVDDCTKHHSIKQLQLSPRLLEVTNTIRVENLPPGADDYSLKLFFENPYNGGGRVANVEYFPEESSALIEFFDRKVLDTIMATKLDFNKMPLSVFPYYASLGTALYGKEKPLIKLPAPFEESLDLPLWKFLQKKNHLIEEINDEMRRCHCELTWSQLSGKVTIRPAATLVNEGRPRIKTWQADTSTTLSSIRSKYKVNPIKVDPTMWDTIKNDVKDDRILIEFDTLKEMVILAGKSEDVQSIEVQVRELIESTTQKIKREEQSLKEKMIISPGRYFLLCHSSLLDHLLTECPEIEICYDRVTQHLCLKGPSADVYKAKCEIQEKVYTMAQKNIQVSPEIFQFLQQVNWKEFSKCLFIAQKILALYELEGTTVLLTSCSSEALLEAEKQMLSALNYKRIEVENKEVLHGKKWKGLTHNLLKKQNSSPNTVIINELTSETTAEVIITGCVKEVNETYKLLFNFVEQNMKIERLVEVKPSLVIDYLKTEKKLFWPKIKKVNVQVSFNPENKQKGILLTGSKTEVLKAVDIVKQVWDSVCVKSVHTDKPGAKQFFQDKARFYQSEIKRLFGCYIELQENEVMKEGGSPAGQKCFSRTVLAPGVVLIVQQGDLARLPVDVVVNASNEDLKHYGGLAAALSKAAGPELQADCDQIVKREGRLLPGNATISKAGKLPYHHVIHAVGPRWSGYEAPRCVYLLRRAVQLSLCLAEKYKYRSIAIPAISSGVFGFPLGRCVETIVSAIKENFQFKKDGHCLKEIYLVDVSEKTVEAFAEAVKTVFKATLPDTAAPPGLPPAAAGPGKTSWEKGSLVSPGGLQMLLVKEGVQNAKTDVVVNSVPLDLVLSRGPLSKSLLEKAGPELQEELDTVGQGVAVSMGTVLKTSSWNLDCRYVLHVVAPEWRNGSTSSLKIMEDIIRECMEITESLSLKSIAFPAIGTGNLGFPKNIFAELIISEVFKFSSKNQLKTLQEVHFLLHPSDHENIQAFSDEFARRANGNLVSDKIPKAKDTQGFYGTVSSPDSGVYEMKIGSIIFQVASGDITKEEADVIVNSTSNSFNLKAGVSKAILECAGQNVERECSQQAQQRKNDYIITGGGFLRCKNIIHVIGGNDVKSSVSSVLQECEKKNYSSICLPAIGTGNAKQHPDKVAEAIIDAIEDFVQKGSAQSVKKVKVVIFLPQVLDVFYANMKKREGTQLSSQQSVMSKLASFLGFSKQSPQKKNHLVLEKKTESATFRVCGENVTCVEYAISWLQDLIEKEQCPYTSEDECIKDFDEKEYQELNELQKKLNINISLDHKRPLIKVLGISRDVMQARDEIEAMIKRVRLAKEQESRADCISEFIEWQYNDNNTSHCFNKMTNLKLEDARREKKKTVDVKINHRHYTVNLNTYTATDTKGHSLSVQRLTKSKVDIPAHWSDMKQQNFCVVELLPSDPEYNTVASKFNQTCSHFRIEKVSLLLECSFWMVEISSVMVLYKIHFHSLPITFF

SEQ ID NO: 16946 - protein, 875 aa, Homo sapiens
MSRHHSRFERDYRVGWDRREWSVNGTHGTTSICSVTSGAGGGTASSLSVRPGLLPLPVVPSRLPTPATAPAPCTTGSSEAITSLVASSASAVTTKAPGISKGDSQSQGLATSIRWGQTPINQSTPWDTDEPPSKQMRESDNPGTGPWVTTVAAGNQPTLIAHSYGVAQPPTFSPAVNVQAPVIGVTPSLPPHVGPQLPLMPGHYSLPQPPSQPLSSVVVNMPAQALYASPQPLAVSTLPGVGQVARPGPTAVGNGHMAGPLLPPPPPAQPSATLPSGAPATNGPPTTDSAHGLQMLRTIGVGKYEFTDPGHPREMLKELNQQRRAKAFTDLKIVVEGREFEVHQNVLASCSLYFKDLIQRSVQDSGQGGREKLELVLSNLQADVLELLLEFVYTGSLVIDSANAKTLLEAASKFQFHTFCKVCVSFLEKQLTASNCLGVLAMAEAMQCSELYHMAKAFALQIFPEVAAQEEILSISKDDFIAYVSNDSLNTKAEELVYETVIKWIKKDPATRTQYAAELLAVVRLPFIHPSYLLNVVDNEELIKSSEACRDLVNEAKRYHMLPHARQEMQTPRTRPRLSAGVAEVIVLVGGRQMVGMTQRSLVAVTCWNPQNNKWYPLASLPFYDREFFSVVSAGDNIYLSGGMESGVTLADVWCYMSLLDNWNLVSRMTVPRCRHNSLVYDGKIYTLGGLGVAGNVDHVERYDTITNQWEAVAPLPKAVHSAAATVCGGKIYVFGGVNEAGRAAGVLQSYVPQTNTWSFIESPMIDNKYAPAVTLNGFVFILGGAYARATTIYDPEKGNIKAGPNMNHSRQFCSAVVLDGKIYATGGIVSSEGPALGNMEAYEPTTNTWTLLPHMPCPVFRHGCVVIKKYIQSG

SEQ ID NO: 16947 - protein, 1026 aa, Homo sapiens
MKKFNFRKVLDGLTASSPGSGSSSGSNSGGGAGSGSVHPAGTAGVLREEIQETLTSEYFQICKTVRHGFPHQPTALAFDPVQKILAIGTRTGAIRILGRPGVDCYCQHESGAAVLQLQFLINEGALVSASSDDTLHLWNLRQKRPAILHSLKFNRERITYCHLPFQSKWLYVGTERGNTHIVNIESFILSGYVIMWNKAIELSTKTHPGPVVHLSDSPRDEGKLLIGYENGTVVFWDLKSKRAELRVYYDEAIHSIDWHHEGKQFMCSHSDGSLTLWNLKSPSRPFQTTIPHGKSQREGRKSESCKPILKVEYKTCKNSEPFIIFSGGLSYDKACRRPSLTIMHGKAITVLEMDHPIVEFLTLCETPYPNEFQEPYAVVVLLEKDLIVVDLTQSNFPIFENPYPMDIHESPVTCTAYFADCPPDLILVLYSIGVKHKKQGYSNKEWPISGGAWNLGAQTYPEIIITGHADGSIKFWDASAITLQMLYKLKTSKVFEKQKVGEGKQTCEIVEEDPFAIQMIYWCPESRIFCVSGVSAYVIIYKFSRHEITTEIVSLEVRLQYDVEDIITPEPETSPPFPDLSAQLPSSRSLSGSTNTVASEGVTKDSIPCLNVKTRPVRMPPGYQAELVIQLVWVDGEPPQQITSLAVSSAYGIVAFGNCNGLAVVDFIQKTVLLSMGTIDLYRSSDLYQRQPRSPRKNKQFIADNFCMRGLSNFYPDLTKRIRTSYQSLTELNDSPVPLELERCKSPTSDHVNGHCTSPTSQSCSSGKRLSSADVSKVNRWGPGRPPFRKAQSAACMEISLPVTTEENRENSYNRSRSSSISSIDKDSKEAITALYFMDSFARKNDSTISPCLFVGTSLGMVLIISLNLPLADEQRFTEPVMVLPSGTFLSLKGAVLTFSCMDRMGGLMQPPYEVWRDPNNIDENEKSWRRKVVMNSSSASQEIGDHQYTIICSEKQAKVFSLPSQTCLYVHNITETSFILQANVVVMCSSACLACFCANGHIMIMRYLPSYKLSGNHNNTSKVQS

SEQ ID NO: 16948 - protein, 427 aa, Homo sapiens
MVCWQDLEESLRMKLSLTKVVNGCRLGKIKNLGKTGDHTMDIPGCLLYTKTGSAPHLTHHTLHNIHGVPAMAQLTLSSLAEHHEVLTEYKEGVGKFIGMPESLLYCSLHDPVSPCPAGYVTNKSVSVWSVAGRVEMTVSKFMAIQKALQPDWFQCLSDGEVSCKEATSIKRVRKSVDRSLLFLDNCLRLQEESEVLQKSVIIGVIEGGDVMEERLRSARETAKRPVGGFLLDGFQGNPTTLEARLRLLSSVTAELPEDKPRLISGVSRPDEVLECIERGVDLFESFFPYQVTERGCALTFSFDYQPNPEETLLQQNGTQEEIKCMDQIKKIETTGCNQEITSFEINLKEKKYQEDFNPLVRGCSCYCCKNHTRAYIHHLLVTNELLAGVLLMMHNFEHYFGFFHYIREALKSDKLAQLKELIHRQAS

SEQ ID NO: 16949 - protein, 1129 aa, Homo sapiens
MAGIFKEFFFSTEDLPEVILTLSLISSIGAFLNRHLEDFPIPVPVILFLLGCSFEVLSFTSSQVQRYANAIQWMSPDLFFRIFTPVVFFTTAFDMDTYMLQKLFWQILLISIPGFLVNYILVLWHLASVNQLLLKPTQWLLFSAILVSSDPMLTAAAIRDLGLSRSLISLINGESLMTSVISLITFTSIMDFDQRLQSKRNHTLAEEIVGGICSYIIASFLFGILSSKLIQFWMSTVFGDDVNHISLIFSILYLIFYICELVGMSGIFTLAIVGLLLNSTSFKAAIEETLLLEFLTLLLISPVLSRVGHEFSWRWIFIMVCSEMKGMPNINMALLLAYSDLYFGSDKEKSQILFHGVLVCLITLVVNRFILPVAVTILGLRDATSTKYKSVCCTFQHFQELTKSAASALKFDKDLANADWNMIEKAITLENPYMLNEEETTEHQKVKCPHCNKEIDEIFNTEAMELANRRLLSAQIASYQRQYRNEILSQSAVQVLVGAAESFGEKKGKCMSLDTIKNYSESQKTVTFARKLLLNWVYNTRKEKEGPSKYFFFRICHTIVFTEEFEHVGYLVILMNIFPFIISWISQLNVIYHSELKHTNYCFLTLYILEALLKIAAMRKDFFSHAWNIFELAITLIGILHVILIEIDTIKYIFNETEVIVFIKVVQFFRILRIFKLIAPKLLQIIDKRMSHQKTFWYGILKGYVQGEADIMTIIDQITSSKQIKQMLLKQVIRNMEHAIKELGYLEYDHPEIAVTVKTKEEINVMLNMATEILKAFGLKGIISKTEGAGINKLIMAKKKEVLDSQSIIRPLTVEEVLYHIPWLDKNKDYINFIQEKAKVVTFDCGNDIFEEGDEPKGIYIIISGMVKLEKSKPGLGIDQMVESKEKDFPIIDTDYMLSGEIIGEINCLTNEPMKYSATCKTVVETCFIPKTHLYDAFEQCSPLIKQKMWLKLGLAITARKIREHLSYEDWNYNMQLKLSNIYVVDIPMSTKTDIYDENLIYVILIHGAVEDCLLRKTYRAPFLIPITCHQIQSIEDFTKVVIIQTPINMKTFRRNIRKFVPKHKSYLTPGLIGSVGTLEEGIQEERNVKEDGAHSAATARSPQPCSLLGTKFNCKESPRINLRKVRKE

SEQ ID NO: 16950 - protein, 759 aa, Homo sapiens
MDLSALRVEEVQNVINAMQKILECPICLELIKEPVSTKCDHIFCKFCMLKLLNQKKGPSQCPLCKNDITKRSLQESTRFSQLVEELLKIICAFQLDTGLEYANSYNFAKKENNSPEHLKDEVSIIQSMGYRNRAKRLLQSEPENPSLQETSLSVQLSNLGTVRTLRTKQRIQPQKTSVYIELGSDSSEDTVNKATYCSVGDQELLQITPQGTRDEISLDSAKKAACEFSETDVTNTEHHQPSNNDLNTTEKRAAERHPEKYQGEAASGCESETSVSEDCSGLSSQSDILTTQQRDTMQHNLIKLQQEMAELEAVLEQHGSQPSNSYPSIISDSSALEDLRNPEQSTSEKVLTSQKSSEYPISQNPEGLSADKFEVSADSSTSKNKEPGVERSSPSKCPSLDDRWYMHSCSGSLQNRNYPSQEELIKVVDVEEQQLEESGPHDLTETSYLPRQDLEGTPYLESGISLFSDDPESDPSEDRAPESARVGNIPSSTSALKVPQLKVAESAQSPAAAHTTDTAGYNAMEESVSREKPELTASTERVNKRMSMVVSGLTPEEFMLVYKFARKHHITLTNLITEETTHVVMKTDAEFVCERTLKYFLGIAGGKWVVSYFWVTQSIKERKMLNEHDFEVRGDVVNGRNHQGPKRARESQDRKIFRGLEICCYGPFTNMPTDQLEWMVQLCGASVVKELSSFTLGTGVHPIVVVQPDAWTEDNGFHAIGQMCEAPVVTREWVLDSVALYQCQELDTYLIPQIPHSHY

SEQ ID NO: 16951 - protein, 606 aa, Homo sapiens
MACLLETPIRMSVLSEVTASSRHYVDRLFDPDPQKVLQGVIDMKNAVIGNNKQKANLIVLGAVPRLLYLLQQETSSTELKTECAVVLGSLAMGTENNVKSLLDCHIIPALLQGLLSPDLKFIEACLRCLRTIFTSPVTPEELLYTDATVIPHLMALLSRSRYTQEYICQIFSHCCKGPDHQTILFNHGAVQNIAHLLTSLSYKVRMQALKCFSVLAFENPQVSMTLVNVLVDGELLPQIFVKMLQRDKPIEMQLTSAKCLTYMCRAGAIRTDDNCIVLKLDHDLKHAHELRQAAFKLYASLGANDEDIRKKIIETENMMDRIVTGLSESSVKVRLAAVRCLHSLSRSVQQLRTSFQDHAVWKPLMKVLQNAPDEILVVASSMLCNLLLEFSPSKEPILESGAVELLCGLTQSENPALRVNGIWALMNMAFQAEQKIKADILRSLSTEQLFRLLSDSDLNVLMKTLGLLRNLLSTRPHIDKIMSTHGKQIMQAVTLILEGEHNIEVKEQTLCILANIADGTTAKDLIMTNDDILQKIKYYMGHSHVKLQLAAMFCISNLIWNEEEGSQERQDKLRDMGIVDILHKLSQSPDSNLCDKAKMALQQYLA

SEQ ID NO: 16952 - protein, 724 aa, Homo sapiens
MTSGSVFFYILIFGKYFSHGGGQDVKCSLGYFPCGNITKCLPQLLHCNGVDDCGNQADEDNCVVGSVPVQCLCQGLELDCDETNLRAVPSVSSNVTAMSLQWNLIRKLPPDCFKNYHDLQKLYLQNNKITSISIYAFRGLNSLTKLYLSHNRITFLKPGVFEDLHRLEWLIIEDNHLSRISPPTFYGLNSLILLVLMNNVLTRLPDKPLCQHMPRLHWLDLEGNHIHNLRNLTFISCSNLTVLVMRKNKINHLNENTFAPLQKLDELDLGSNKIENLPPLIFKDLKELSQLNLSYNPIQKIQANQFDYLVKLKSLSLEGIEISNIQQRMFRPLMNLSHIYFKKFQYCGYAPHVRSCKPNTDGISSLENLLASIIQRVFVWVVSAVTCFGNIFVICMRPYIRSENKLYAMSIISLCCADCLMGIYLFVIGGFDLKFRGEYNKHAQLWMESTHCQLVGSLAILSTEVSVLLLTFLTLEKYICIVYPFRCVRPGKCRTITVLILIWITGFIVAFIPLSNKEFFKNYYGTNGVCFPLHSEDTESIGAQIYSVAIFLGINLAAFIIIVFSYGSMFYSVHQSAITATEIRNQVKKEMILAKRFFFIVFTDALCWIPIFVVKFLSLLQVEIPGTITSWVVIFILPINSALNPILYTLTTRPFKEMIHRFWYNYRQRKSMDSKGQKTYAPSFIWVEMWPLQEMPPELMKPDLFTYPCEMSLISQSTRLNSYS

SEQ ID NO: 16953 - protein, 225 aa, Homo sapiens
MKGYQSLVFNFFFLKLSAENESTPIQQLLEHFLRQLQRKDPHGFFAFPVTDAIAPGYSMIIKHPMDFGTMKDKIVANEYKSVTEFKADFKLMCDNAMTYNRPDTVYYKLAKKILHAGFKMMSKERLLALKRSMSFMQDMDFSQQAALLGNEDTAVEEPVPEVVPVQVETAKKSKKPSREVISCMFEPEGNACSLTDSTAEEHVLALVEHAADEARDRINRFLPGG

SEQ ID NO: 16954 - protein, 1230 aa, Homo sapiens
MPRKGTQPSTARRREEGPPPPSPDGASSDAEPEPPSGRTESPATAAETASEELDNRSLEEILNSIPPPPPPAMTNEAGAPRLMITHIVNQNFKSYAGEKILGPFHKRFSCIIGPNGSGKSNVIDSMLFVFGYRAQKIRSKKLSVLIHNSDEHKDIQSCTVEVHFQKIIDKEGDDYEVIPNSNFYVSRTACRDNTSVYHISGKKKTFKDVGNLLRSHGIDLDHNRFLILQGEVEQIAMMKPKGQTEHDEGMLEYLEDIIGCGRLNEPIKVLCRRVEILNEHRGEKLNRVKMVEKEKDALEGEKNIAIEFLTLENEIFRKKNHVCQYYIYELQKRIAEMETQKEKIHEDTKEINEKSNILSNEMKAKNKDVKDTEKKLNKITKFIEENKEKFTQLDLEDVQVREKLKHATSKAKKLEKQLQKDKEKVEEFKSIPAKSNNIINETTTRNNALEKEKEKEEKKLKEVMDSLKQETQGLQKEKESREKELMGFSKSVNEARSKMDVAQSELDIYLSRHNTAVSQLTKAKEALIAASETLKERKAAIRDIEGKLPQTEQELKEKEKELQKLTQEETNFKSLVHDLFQKVEEAKSSLAMNRSRGKVLDAIIQEKKSGRIPGIYGRLGDLGAIDEKYDVAISSCCHALDYIVVDSIDIAQECVNFLKRQNIGVATFIGLDKMAVWAKKMTEIQTPENTPRLFDLVKVKDEKIRQAFYFALRDTLVADNLDQATRVAYQKDRRWRVVTLQGQIIEQSGTMTGGGSKVMKGRMGSSLVIEISEEEVNKMESQLQNDSKKAMQIQEQKVQLEERVVKLRHSEREMRNTLEKFTASIQRLIEQEEYLNVQVKELEANVLATAPDKKKQKLLEENVSAFKTEYDAVAEKAGKVEAEVKRLHNTIVEINNHKLKAQQDKLDKINKQLDECASAITKAQVAIKTADRNLQKAQDSVLRTEKEIKDTEKEVDDLTAELKSLEDKAAEVVKNTNAAEISKISLHPIEDNPIEEISVLSPEDLEAIKNPDSITNQIALLEARCHEMKPNLGAIAEYKKKEELYLQRVAELDKITYERDSFRQAYEDLRKQRLNEFMAGFYIITNKLKENYQMLTLGGDAELELVDSLDPFSEGIMFSVRPPKKSWKKIFNLSGGEKTLSSLALVFALHHYKPTPLYFMDEIDAALDFKNVSIVAFYIYEQTKNAQFIIISLRNNMFEISDRLIGIYKTYNITKSVAVNPKEIASKGLC

SEQ ID NO: 16955 - protein, 576 aa, Homo sapiens
MMTPQVITPQQMQQILQQQVLSPQQLQVLLQQQQALMLQQQLQEFYKKQQEQLQLQLLQQQHAGKQPKEQQQVATQQLAFQQQLLQMQQLQQQHLLSLQRQGLLTIQPGQPALPLQPLAQGMIPTELQQLWKEVTSAHTAEETTGNNHSSLDLTTTCVSSSAPSKTSLIMNPHASTNGQLSVHTPKRESLSHEEHPHSHPLYGHGVCKWPGCEAVCEDFQSFLKHLNSEHALDDRSTAQCRVQMQVVQQLELQLAKDKERLQAMMTHLHVKSTEPKAAPQPLNLVSSVTLSKSASEASPQSLPHTPTTPTAPLTPVTQGPSVITTTSMHTVGPIRRRYSDKYNVPISSADIAQNQEFYKNAEVRPPFTYASLIRQAILESPEKQLTLNEIYNWFTRMFAYFRRNAATWKNAVRHNLSLHKCFVRVENVKGAVWTVDEVEFQKRRPQKISGNPSLIKNMQSSHAYCTPLNAALQASMAENSIPLYTTASMGNPTLGNLASAIREELNGAMEHTNSNESDSSPGRSPMQAVHPVHVKEEPLDPEEAEGPLSLVTTANHSPDFDHDRDYEDEPVNEDME

SEQ ID NO: 16956 - protein, 1008 aa, Homo sapiens
MSWMFKRDPVWKYLQTVQYGVHGNFPRLSYPTFFPRFEFQDVIPPDDFLTSDEEVDSVLFGSLRGHVVGLRYYTGVVNNNEMVALQRDPNNPYDKNAIKVNNVNGNQVGHLKKELAGALAYIMDNKLAQIEGVVPFGANNAFTMPLHMTFWGKEENRKAVSDQLKKHGFKLGPAPKTLGFNLESGWGSGRAGPSYSMPVHAAVQMTTEQLKTEFDKLFEDLKEDDKTHEMEPAEAIETPLLPHQKQALAWMVSRENSKELPPFWEQRNDLYYNTITNFSEKDRPENVHGGILADDMGLGKTLTAIAVILTNFHDGRPLPIERVKKNLLKKEYNVNDDSMKLGGNNTSEKADGLSKDASRCSEQPSISDIKEKSKFRMSELSSSRPKRRKTAVQYIESSDSEEIETSELPQKMKGKLKNVQSETKGRAKGSSKVIEDVAFACALTSSVPTTKKKMLKKGACAVEGSKKTDVEERPRTTLIICPLSVLSNWIDQFGQHIKSDVHLNFYVYYGPDRIREPALLSKQDIVLTTYNILTHDYGTKGDSPLHSIRWLRVILDEGHAIRNPNAQQTKAVLDLESERRWVLTGTPIQNSLKDLWSLLSFLKLKPFIDREWWHRTIQRPVTMGDEGGLRRLQSLIKNITLRRTKTSKIKGKPVLELPERKVFIQHITLSDEERKIYQSVKNEGRATIGRYFNEGTVLAHYADVLGLLLRLRQICCHTYLLTNAVSSNGPSGNDTPEELRKKLIRKMKLILSSGSDEECAICLDSLTVPVITHCAHVFCKPCICQVIQNEQPHAKCPLCRNDIHEDNLLECPPEELARDSEKKSDMEWTSSSKINALMHALTDLRKKNPNIKSLVVSQFTTFLSLIEIPLKASGFVFTRLDGSMAQKKRVESIQCFQNTEAGSPTIMLLSLKAGGVGLNLSAASRVFLMDPAWNPAAEDQCFDRCHRLGQKQEVIITKFIVKDSVEENMLKIQNKKRELAAGAFGTKKPNADEMKQAKINEIRTLIDL

SEQ ID NO: 16957 - protein, 256 aa, Homo sapiens
KAKNVNKTAEKVRIIKYLLGELKALVAEQEDSEIQRLITEMEACISVLPTVSGNTDIQVEIALAMQPLRSENAQLRRQLRILNQQLREQQKTQKPSGAVDCNLELFSLQSLNMSLQNQLEESLKSQELLQSKNEELLKVIENQKDENKKFSSIFKDKDQTILENKQQYDIEITRIKIELEEALVNVKSSQFKLETAEKENQILGITLRQRDAEVTRLRELTRLFKTVDLNVLQSLTQKPNTVHELRKSRTALNKEE

SEQ ID NO: 16958 - protein, 394 aa, Homo sapiens
MENTDSDNLLRRAACQEAQVFGNQLIPPNAQVKKATVFLNPAACKGKARTLFEKNAAPILHLSGMDVTIVKTDYEGQAKKLLELMENTDVIIVAGGDGTLQEVVTGVLRRTDEATFSKIPIGFIPLGETSSLSHTLFAESGNKVQHITDATLAIVKGETVPLDVLQIKGEKEQPVFAMTGLRWGSFRDAGVKVSKYWYLGPLKIKAAHFFSTLKEWPQTHQASISYTGPTERPPNEPEETPVQRPSLYRRILRRLASYWAQPQDALSQEVSPEVWKDVQLSTIELSITTRNNQLDPTSKEDFLNICIEPDTISKGDFITIGSRKVRNPKLHVEGTECLQASQCTLLIPEGAGGSFSIDSEEYEAMPVEVKLLPRKLQFFCDPRKREQMLTSPTQ

SEQ ID NO: 16959 - protein, 232 aa, Homo sapiens
MITSELPVLQDSTNETTAHSDAGSELEETEVKGKRKRGRPGRPPSTNKKPRKSPGEKSRIEAGIRGAGRGRANGHPQQNGEGEPVTLFEVVKLGKSAMQSVVDDWIESYKQDRDIALLDLINFFIQCSGCRGTVRIEMFRNMQNAEIIRKMTEEFDEDSGDYPLTMPGPQWKKFRSNFCEFIGVLIRQCQYSIIYDEYMMDTVISLLTGLSDSQVRAFRHTSTLAGQVLGTR

SEQ ID NO: 16960 - protein, 1014 aa, Homo sapiens
KQSTPKRTKSYNDMQNAGIVHAENEEEDDVPEMNSSFTADSGEQEEHTLQETALPPVNSSIIAAPITDPSQKFPQYLPLSAEDNLGPLPENWEMAYTENGEVYFIDHNTKTTSWLDPRCLNKQQKPLEECEDDEGVHTEELDSELELPAGWEKIEDPVYGIYYVDHINRKTQYENPVLEAKRKKQLEQQQQQQQQQQQQQQQQQQQQTEEWTEDHSALVPPVIPNHPPSNPEPAREVPLQGKPFFTRNPSELKGKFIHTKLRKSSRGFGFTVVGGDEPDEFLQIKSLVLDGPAALDGKMETGDVIVSVNDTCVLGHTHAQVVKIFQSIPIGASVDLELCRGYPLPFDPDDPNTSLVTSVAILDKEPIIVNGQETYDSPASHSSKTGKVNGMKDARPSSPADVASNSSHGYPNDTVSLASSIATQPELITVHIVKGPMGFGFTIADSPGGGGQRVKQIVDSPRCRGLKEGDLIVEVNKKNVQALTHNQVVDMLVECPKGSEVTLLVQRGGLPVPKKSPKSQPLERKDSQNSSQHSVSSHRSLHTASPSHSTQVLPEFPPAEAQAPDQTDSSGQKKPDPFKIWAQSRSMYENRLPDYQEQDIFLWRKETGFGFRILGGNEPGEPIYIGHIVPLGAADTDGRLRSGDELICVDGTPVIGKSHQLVVQLMQQAAKQGHVNLTVRRKVVFAVPKTENEVPSPASSHHSSNQPASLTEEKRTPQGSQNSLNTVSSGSGSTSGIGSGGGGGSGVVSTVVQPYDVEIRRGENEGFGFVIVSSVSRPEAGTTFAGNACVAMPHKIGRIIEGSPADRCGKLKVGDRILAVNGCSITNKSHSDIVNLIKEAGNTVTLRIIPGDESSNATLLTNAEKIATITTTHTPSQQGTQETRNTTKPKQESQFEFKAPQATQEQDFYTVELERGAKGFGFSLRGGREYNMDLYVLRLAEDGPAERCGKMRIGDEILEINGETTKNMKHSRAIELIKNGGRRVRLFLKRGDGSVPEYGGSNYENIPSFPGMTP

SEQ ID NO: 16961 - protein, 508 aa, Homo sapiens
MLGSKKKYIVNGNSGIKAQIQFADQKQEFNKRPTKIGRRSLSRSISQSSTDSYSSAASYTDSSDDETSPRDKQQKNSKGSSDFCVKNIKQAEFGRREIEIAEQEMPALMALRKRAQGEKPLAGAKIVGCTHITAQTAVLMETLGALGAQCRWAACNIYSTLNEVAAALAESGFPVFAWKGESEDDFWWCIDRCVNVEGWQPNMILDDGGDLTHWIYKKYPNMFKKIKGIVEESVTGVHRLYQLSKAGKLCVPAMNVNDSVTKQKFDNLYCCRESILDGLKRTTDMMFGGKQVVVCGYGEVGKGCCAALKAMGSIVYVTEIDPICALQACMDGFRLVKLNEVIRQVDIVITCTGNKNVVTREHLDRMKNSCIVCNMGHSNTEIDVASLRTPELTWERVRSQVDHVIWPDGKRIVLLAEGRLLNLSCSTVPTFVLSITATTQALALIELYNAPEGRYKQDVYLLPKKMDEYVASLHLPTFDAHLTELTDEQAKYLGLNKNGPFKPNYYRY

SEQ ID NO: 16962 - protein, 334 aa, Homo sapiens
MGPRARPALLLLMLLQTAVLQGRLLRSHSLHYLFMGASEQDLGLSLFEALGYVDDQLFVFYDHESRRVEPRTPWVSSRISSQMWLQLSQSLKGWDHMFTVDFWTIMENHNHSKESHTLQVILGCEMQEDNSTEGYWKYGYDGQDHLEFCPDTLDWRAAEPRAWPTKLEWERHKIRARQNRAYLERDCPAQLQQLLELGRGVLDQQVTTLRCRALNYYPQNITMKWLKDKQPMDAKEFEPKDVLPNGDGTYQGWITLAVPPGEEQRYTCQVEHPGLDQPLIVIWEPSPSGTLVIGVISGIAVFVVILFIGILFIILRKRQGSRGAMGHYVLAERE

SEQ ID NO: 16963 - protein, 164 aa, Homo sapiens
MKLYSLSVLYKGEAKVVLLKAAYDVSSFSFFQRSSVQEFMTFTSQLIVERSSKGTRASVKEQDYLCHVYVRNDSLAGVVIADNEYPSRVAFTLLEKVLDEFSKQVDRIDWPVGSPATIHYPALDGHLSRYQNPREADPMTKVQAELDETKIILARKQNSCCAIM

SEQ ID NO: 16964 - protein, 143 aa, Homo sapiens
MDQFGDILEGEVDHSFFDSDFEEGKKCETNSVFDKQNDDPKERIDKDTKNVNSNTGMQTTENYLTEKGNERNVKFPPEHPVENDVTQTVSSFSLPASSRSKKLCDVTTGLKIHVSIPNRIPKIVKEGEDDYYTDGEESSDDGK

SEQ ID NO: 16965 - protein, 320 aa, Homo sapiens
MPRLRVHGACLPTKSVLFLFYHRLTMLREASDEIVAEKEAEVKLPEDSSCTEDLSSCTSVPEMNEDGNRKESNCAKDLRSQPPTRIPTLVDKETNTDEAANDNMAVRPKERSSLSSRQHPFVRSSVIVRSQTFSPGERNQYICRLNRSDSDSSTLAKKSLFVRNSTERRSLRVKRTVCQSVLRRTTQECPVRTSLDLELDLQASLTRQSRLNDELQALRDLRQKLEELKAQGETDLPPGVLEDERFQRLLKQAEKQAEQSKEEQKQGLNAEKLMRQVSKDVCRLREQSQKVPRQVQSFREKIAYFTRAKISIPSLPADDV

SEQ ID NO: 16966 - protein, 950 aa, Homo sapiens
MVFSRRGGLGARDLLLWLLLLAAWEVGSGQLHYSIPEEAKHGTFVGRVAQDLGLELAELVPRLFRVASKTHRDLLEVNLQNGILFVNSRIDREELCQWSAECSIHLELIADRPLQVFHVEVKVKDINDNPPVFRGREQIIFIPESRLLNSRFPIEGAADADIGANALLTYTLSPSDYFSLDVEASDELSKSLWLELRKYLDREETPELHLLLTATDGGKPELQGTVELLITVLDVNDNAPLFDQAVYRVHLLETTANGTLVTTLNASDADEGVNGEVVFSFDSGISRDIQEKFKVDSSSGEIRLIDKLDYEETKSYEIQVKAVDKGSPPMSNHCKVLVKVLDVNDNAPELAVTSLYLPIREDAPLSTVIALITVSDRDSGANGQVTCSLMPHVPFKLVSTFKNYYSLVLDSALDRESLSVYELVVTARDGGSPSLWATARVSVEVADVNDNAPAFAQPEYTVFVKENNPPGCHIFTVSARDADAQENALVSYSLVERRVGERALSNYVSVHAESGKVYALQPLDHEELELLQFQVSARDAGVPPLGSNVTLQVFVLDENDNAPALLAPRVGGTIGAVSELVPRLVGAGHVVAKVRAVDADSGYNAWLSYELQPAAGGARIPFRVGLYTGEISTTRVLDEADLSRYRLLVLVKDHGEPALTATATVLVSLVESGQAPKASSRASVGVAGPEAALVDVNVYLIIAICAVSSLLVLTLLLYTALRCSVPPTEGAYVPGKPTLVCSSALGSWSNSQQRRQRVCSSEGPPKTDLMAFSPGLSPSLNTSERNEQPEANLDLSGNPRQPNPDWRYSASLRAGMHSSVHLEEAGILRAGPGGPDQQWPTVSSATPEPEAGEVSPPVGAGVNSNSWTFKYGPGNPKQSGPGELPDKFIIPGSPAIISIRQEPTNSQIDKSDFITFGKKEETKKKKKKKKGNKTQEKKEKGNSTTDNSDQ

SEQ ID NO: 16967 - protein, 586 aa, Homo sapiens
MYGFVNHALELLVIRNYGPEVWEDIKKEAQLDEEGQFLVRIIYDDSKTYDLVAAASKVLNLNAGEILQMFGKMFFVFCQESGYDTILRVLGSNVREFLQNLDALHDHLATIYPGMRAPSFRCTDAEKGKGLILHYYSEREGLQDIVIGIIKTVAQQIHGTEIDMKVIQQRNEECDHTQFLIEEKESKEEDFYEDLDRFEENGTQESRISPYTFCKAFPFHIIFDRDLVVTQCGNAIYRVLPQLQPGNCSLLSVFSLVRPHIDISFHGILSHINTVFVLRSKEGLLDVEKLECEDELTGTEISCLRLKGQMIYLPEADSILFLCSPSVMNLDDLTRRGLYLSDIPLHDATRDLVLLGEQFREEYKLTQELEILTDRLQLTLRALEDEKKKTDTGIVGFNAFCSKHASGEGAMKIVNLLNDLYTRFDTLTDSRKNPFVYKVETVGDKYMTVSGLPEPCIHHARSICHLALDMMEIAGQVQVDGESVQITIGIHTGEVVTGVIGQRMPRYCLFGNTVNLTSRTETTGEKGKINVSEYTYRCLMSPENSDPQFHLEHRGPVSMKGKKEPMQVWFLSRKNTGTEETKQDDD

SEQ ID NO: 16968 - protein, 572 aa, Homo sapiens; identical to SEQ ID NO: 5158

SEQ ID NO: 16969 - protein, 138 aa, Homo sapiens
MAGQRVLLLVGFLLPGVLLSEAAKILTISTVGGSHYLLMDRVSQILQDHGHNVTMLNHKRGPFMPDFKKEEKSYQVISWLAPEDHQREFKKSFDFFLEETLGGRGKFENLLNVLEYLALQCSHFLNRKDIMDSLKNEN

SEQ ID NO: 16970 - protein, 872 aa, Homo sapiens
MSQGILSPPAGLLSDDDVVVSPMFESTAADLGSVVRKNLLSDCSVVSTSLEDKQQVPSEDSMEKEDQGCVRIENVETLVLQAPKDSFALKSNERGIGQATHRFTFSQIFGPEVGQASFFNLTVKEMVKDVLKGQNWLIYTYGVTNSGKTHTIQGTIKDGGILPRSLALIFNSLQGQLHPTPDLKPLLSNEVIWLDSKQIRQEEMKKLSLLNGGLQEEELSTSLKRSVYIESRIGTSTSFDSGIAGLSSISQCTSSSQLDETSHRWAQPDTAPLPVPANIRFSIWISFFEIYNELLYDLLEPPSQQRKRQTLRLCEDQNGNPYVKDLNWIHVQDAEEAWKLLKVGRKNQSFASTHLNQNSSRSHSIFSIRILHLQGEGDIVPKISELSLCDLAGSERCKDQKSGERLKEAGNINTSLHTLGRCIAALRQNQQNRSKQNLVPFRDSKLTRVFQGFFTGRGRSCMIVNVNPCASTYDETLHVAKFSAIASQLVHAPPMQLGFPSLHSFIKEHSLQVSPSLEKGAKADTGLDDDIENEADISMYGKEELLQVVEAMKTLLLKERQEKLQLEMHLRDEICNEMVEQMQQREQWCSEHLDTQKELLEEMYEEKLNILKESLTSFYQEEIQERDEKIEELEALLQEARQQSVAHQQSGSELALRRSQRLAASASTQQLQEVKAKLQQCKAELNSTTEELHKYQKMLEPPPSAKPFTIDVDKKLEEGQKNIRLLRTELQKLGESLQSAERACCHSTGAGKLRQALTTCDDILIKQDQTLAELQNNMVLVKLDLRKKAACIAEQYHTVLKLQGQVSAKKRLGTNQENQQPNQQPPGKKPFLRNLLPRTPTCQSSTDCSPYARILRSRRSPLLKSGPFGKKY

SEQ ID NO: 16971 - protein, 135 aa, Homo sapiens
MPIKPVGWICGQVLKNFSGRIEGIQKAIMDLVDEFKDEFPTILRLSQSNQKREPAQKTSKIRMAIALAKINRATLIRGLNSISRSSKSVAKLLHPQLACRLLELRDISGRLLREVNAPRQPLYNIQEKKMGLQLS

SEQ ID NO: 16972 - protein, 432 aa, Homo sapiens
MTRKQAVNSSRPGRPPKRSLGVLQENARLLTHAVPGLLSPGLITPTGITAAAMAEAMKLQKMKLMAMNTLQGNGSQNGTESEPDDLNSNTGGSESSWDKDKMQSPFAAPGPQHGIAHAALAGQPGIGGAPTLNPLQQNHLLTNRLDLPFMMMPHPLLPVSLPPASVAMAMNQMNHLNTIANMAAAAQIHSPLSRAGTSVIKERIPESPSPAPSLEENHRPGSQTSSHTSSSVSSSPSQMDHHLERMEEVPVQIPIMKSPLDKIQLTPGQALPAGFPGPFIFADSLSSVETLLTNIQGLLKVALDNARIQEKQIQQEKKELRLELYREREIRENLERQLAVELQSRTTMQKRLKKEKKTKRKLQEALEFESKRREQVEQALKQATTSDSGLRMLKDTGIPDIEIENNGTPHDSAAMQGGNYYCLEMAQQLYSA

SEQ ID NO: 16973 - protein, 881 aa, Homo sapiens
MCLVKSWFLSIRSRWYHGKLDRTIAEERLRQAGKSGSYLIRESDRRPGSFVLSFLSQMNVVNHFRIIAMCGDYYIGGRRFSSLSDLIGYYSHVSCLLKGEKLLYPVAPPEPVEDRRRVRAILPYTKVPDTDEISFLKGDMFIVHNELEDGWMWVTNLRTDEQGLIVEDLVEEVGREEDPHEGKIWFHGKISKQEAYNLLMTVGQVCSFLVRPSDNTPGDYSLYFRTNENIQRFKICPTPNNQFMMGGRYYNSIGDIIDHYRKEQIVEGYYLKEPVPMQDQEQVLNDTVDGKEIYNTIRRKTKDAFYKNIVKKGYLLKKGKGKRWKNLYFILEGSDAQLIYFESEKRATKPKGLIDLSVCSVYVVHDSLFGRPNCFQIVVQHFSEEHYIFYFAGETPEQAEDWMKGLQAFCNLRKSSPGTSNKRLRQVSSLVLHIEEAHKLPVKHFTNPYCNIYLNSVQVAKTHAREGQNPVWSEEFVFDDLPPDINRFEITLSNKTKKSKDPDILFMRCQLSRLQKGHATDEWFLLSSHIPLKGIEPGSLRVRARYSMEKIMPEEEYSEFKELILQKELHVVYALSHVCGQDRTLLASILLRIFLHEKLESLLLCTLNDREISMEDEATTLFRATTLASTLMEQYMKATATQFVHHALKDSILKIMESKQSCELSPSKLEKNEDVNTNLTHLLNILSELVEKIFMASEILPPTLRYIYGCLQKSVQHKWPTNTTMRTRVVSGFVFLRLICPAILNPRMFNIISDSPSPIAARTLILVAKSVQNLANLVEFGAKEPYMEGVNPFIKSNKHRMIMFLDELGNVPELPDTTEHSRTDLSRDLAALHEICVAHSDELRTLSNERGAQQHVLKKLLAITELLQQKQNQYTKTNDVR

SEQ ID NO: 16974 - protein, 476 aa, Homo sapiens
MKPGATGESDLAEVLPQHKFDSKSLEAYLNQHLSGFGAEREATLTIAQYRAGKSNPTFYLQKGFQTYVLRKKPPGSLLPKAHQIDREFKVQKALFSIGFPVPKPILYCSDTSVIGTEFYVMEHVQGRIFRDLTIPGLSPAERSAIYVATVETLAQLHSLNIQSLQLEGYGIGAGYCKRQVSTWTKQYQAAAHQDIPAMQQLSEWLMKNLPDNDNEENLIHGDFRLDNIVFHPKECRVIAVLDWELSTIGHPLSDLAHFSLFYFWPRTVPMINQGSYSENSGIPSMEELISIYCRCRGINSILPNWNFFLALSYFKMAGIAQGVYSRYLLGNNSSEDSFLFANIVQPLAETGLQLSKRTFSTVLPQIDTTGQLFVQTRKGQEVLIKVKHFMKQHILPAEKEVTEFYVQNENSVDKWGKPLVIDKLKEMAKVEGLWNLFLPAVSGLSHVDYALIAEETGKCFFAPDVFNCQAPGYYIN

SEQ ID NO: 16975 - protein, 115 aa, Homo sapiens
MFPPSGSTGLIPPSHFQARPLSTLPRMAPTWLSDIPLVQPPGHQDVSERRLDTQRPQVTMWERDVSSDRQEPGRRGRSWGLEGSQALSQQAEVIVRQLQELRRLEEEVRLLRETS

SEQ ID NO: 16976 - protein, 2366 aa, Homo sapiens
MDEEEDGAGAEESGQPRSFMRLNDLSGAGGRPGPGSAEKDPGSADSEAEGLPYPALAPVVFFYLSQDSRPRSWCLRTVCNPWFERISMLVILLNCVTLGMFRPCEDIACDSQRCRILQAFDDFIFAFFAVEMVVKMVALGIFGKKCYLGDTWNRLDFFIVIAGMLEYSLDLQNVSFSAVRTVRVLRPLRAINRVPSMRILVTLLLDTLPMLGNVLLLCFFVFFIFGIVGVQLWAGLLRNRCFLPENFSLPLSVDLERYYQTENEDESPFICSQPRENGMRSCRSVPTLRGDGGGGPPCGLDYEAYNSSSNTTCVNWNQYYTNCSAGEHNPFKGAINFDNIGYAWIAIFQVITLEGWVDIMYFVMDAHSFYNFIYFILLIIVGSFFMINLCLVVIATQFSETKQRESQLMREQRVRFLSNASTLASFSEPGSCYEELLKYLVYILRKAARRLAQVSRAAGVRVGLLSSPAPLGGQETQPSSSCSRSHRRLSVHHLVHHHHHHHHHYHLGNGTLRAPRASPEIQDRDANGSRRLMLPPPSTPALSGAPPGGAESVHSFYHADCHLEPVRCQAPPPRSPSEASGRTVGSGKVYPTVHTSPPPETLKEKALVEVAASSGPPTLTSLNIPPGPYSSMHKLLETQSTGACQSSCKISSPCLKADSGACGPDSCPYCARAGAGEVELADREMPDSDSEAVYEFTQDAQHSDLRDPHSRRQRSLGPDAEPSSVLAFWRLICDTFRKIVDSKYFGRGIMIAILVNTLSMGIEYHEQPEELTNALEISNIVFTSLFALEMLLKLLVYGPFGYIKNPYNIFDGVIVVISVWEIVGQQGGGLSVLRTFRLMRVLKLVRFLPALQRQLVVLMKTMDNVATFCMLLMLFIFIFSILGMHLFGCKFASERDGDTLPDRKNFDSLLWAIVTVFQILTQEDWNKVLYNGMASTSSWAALYFIALMTFGNYVLFNLLVAILVEGFQAEEISKREDASGQLSCIQLPVDSQGGDANKSESEPDFFSPSLDGDGDRKKCLALVSLGEHPELRKSLLPPLIIHTAATPMSLPKSTSTGLGEALGPASRRTSSSGSAEPGAAHEMKSPPSARSSPHSPWSAASSWTSRRSSRNSLGRAPSLKRRSPSGERRSLLSGEGQESQDEEESSEEERASPAGSDHRHRGSLEREAKSSFDLPDTLQVPGLHRTASGRGSASEHQDCNGKSASGRLARALRPDDPPLDGDDADDEGNLSKGERVRAWIRARLPACCLERDSWSAYIFPPQSRFRLLCHRIITHKMFDHVVLVIIFLNCITIAMERPKIDPHSAERIFLTLSNYIFTAVFLAEMTVKVVALGWCFGEQAYLRSSWNVLDGLLVLISVIDILVSMVSDSGTKILGMLRVLRLLRTLRPLRVISRAQGLKLVVETLMSSLKPIGNIVVICCAFFIIFGILGVQLFKGKFFVCQGEDTRNITNKSDCAEASYRWVRHKYNFDNLGQALMSLFVLASKDGWVDIMYDGLDAVGVDQQPIMNHNPWMLLYFISFLLIVAFFVLNMFVGVVVENFHKCRQHQEEEEARRREEKRLRRLEKKRRSKEKQMAEAQCKPYYSDYSRFRLLVHHLCTSHYLDLFITGVIGLNVVTMAMEHYQQPQILDEALKICNYIFTVIFVLESVFKLVAFGFRRFFQDRWNQLDLAIVLLSIMGITLEEIEVNASLPINPTIIRIMRVLRIARVLKLLKMAVGMRALLDTVMQALPQVGNLGLLFMLLFFIFAALGVELFGDLECDETHPCEGLGRHATFRNFGMAFLTLFRVSTGDNWNGIMKDTLRDCDQESTCYNTVISPIYFVSFVLTAQFVLVNVVIAVLMKHLEESNKEAKEEAELEAELELEMKTLSPQPHSPLGSPFLWPGVEGPDSPDSPKPGALHPAAHARSASHFSLEHPTDRQLFDTISLLIQGSLEWELKLMDELAGPGGQPSAFPSAPSLGGSDPQIPLAEMEALSLTSEIVSEPSCSLALTDDSLPDDMHTLLLSALESNMQPHPTELPGPDLLTVRKSGVSRTHSLPNDSYMCRHGSTAEGPLGHRGWGLPKAQSGSVLSVHSQPADTSYILQLPKDAPHLLQPHSAPTWGTIPKLPPPGRSPLAQRPLRRQAAIRTDSLDVQGLGSREDLLAEVSGPSPPLARAYSFWGQSSTQAQQHSRSHSKISKHMTPPAPCPGPEPNWGKGPPETRSSLELDTELSWISGDLLPPGGQEEPPSPRDLKKCYSVEAQSCQRRPTSWLDEQRRHSIAVSCLDSGSQPHLGTDPSNLGGQPLGGPGSRPKKKLSPPSITIDPPESQGPRTPPSPGICLRRRAPSSDSKDPLASGPPDSMAASPSPKKDVLSLSGLSSDPADLDP

SEQ ID NO: 16977 - protein, 260 aa, Homo sapiens
SRQDFFPPVVGHSNSSPRHSEAATAQREEWKMFIGGLSWDTTKKDLKDYFSKFGEVVDCTLKLDPITGRSRGFGFVLFKESESVDKVMDQKEHKLNGKVIDPKRAKAMKTKEPVKKIFVGGLSPDTPEEKIREYFGGFGEVESIELPMDNKTNKRRGFCFITFKEEEPVKKIMEKKYHNVGLSKCEIKVAMSKEQYQQQQQWGSRGGFAGRARGRGGGPSQNWNQGYSNYWNQGYGNYGYNSQGYGGYGGYDYTGYNNYY

SEQ ID NO: 16978 - protein, 407 aa, Homo sapiens
MRWVWALLKNASLAGAPKYIEHFSKFSPSPLSMKQFLDFGSSNACEKTSFTFLRQELPVRLANIMKEINLLPDRVLSTPSVQLVQSWYVQSLLDIMEFLDKDPEDHRTLSQFTDALVTIRNRHNDVVPTMAQGVLEYKDTYGDDPVSNQNIQYFLDRFYLSRISIRMLINQHTLIFDGSTNPAHPKHIGSIDPNCNVSEVVKDAYDMAKLLCDKYYMASPDLEIQEINAANSKQPIHMVYVPSHLYHMLFELFKNAMRATVESHESSLILPPIKVMVALGEEDLSIKMSDRGGGVPLRKIERLFSYMYSTAPTPQPGTGGTPLAGFGYGLPISRLYAKYFQGDLQLFSMEGFGTDAVIYLKALSTDSVERLPVYNKSAWRHYQTIQEAGDWCVPSTEPKNTSTYRVS

SEQ ID NO: 16979 - protein, 1580 aa, Homo sapiens
MWPSQLLIFMMLLAPIIHGGKHSERHPALAAPLRHAERSPGGALPPRHLLQQPAAERTAAHRGQGPRGATRGVRGPGAQGAQIAAQAFSRAPIPMAVVRRELSCESYPIELRCPGTDVIMIESANYGRTDDKICDSDPAQMENIRCYLPDAYKIMSQRCNNRTQCAVVAGPDVFPDPCPGTYKYLEVQYECVPYKVEQKVFLCPGLLKGVYQSEHLFESDHQSGAWCKDPLQASDKIYYMPWTPYRTDTLTEYSSKDDFIAGRPTTTYKLPHRVDGTGFVVYDGALFFNKERTRNIVKFDLRTRIKSGEAIIANANYHDTSPYRWGGKSDIDLAVDENGLWVIYATEQNNGKIVISQLNPYTLRIEGTWDTAYDKRSASNAFMICGILYVVKSVYEDDDNEATGNKIDYIYNTDQSKDSLVDVPFPNSYQYIAAVDYNPRDNLLYVWNNYHVVKYSLDFGPLDSRSGQAHHGQVSYISPPIHLDSELERPSVKDISTTGPLGMGSTTTSTTLRTTTLSPGRSTTPSVSGRRNRSTSTPSPAVEVLDDMTTHLPSASSQIPALEESCEAVEAREIMWFKTRQGQIAKQPCPAGTIGVSTYLCLAPDGIWDPQGPDLSNCSSPWVNHITQKLKSGETAANIARELAEQTRNHLNAGDITYSVRAMDQLVGLLDVQLRNLTPGGKDSAARSLNKLQKRERSCRAYVQAMVETVNNLLQPQALNAWRDLTTSDQLRAATMLLHTVEESAFVLADNLLKTDIVRENTDNIKLEVARLSTEGNLEDLKFPENMGHGSTIQLSANTLKQNGRNGEIRVAFVLYNNLGPYLSTENASMKLGTEALSTNHSVIVNSPVITAAINKEFSNKVYLADPVVFTVKHIKQSEENFNPNCSFWSYSKRTMTGYWSTQGCRLLTTNKTHTTCSCNHLTNFAVLMAHVEVKHSDAVHDLLLDVITWVGILLSLVCLLICIFTFCFFRGLQSDRNTIHKNLCISLFVAELLFLIGINRTDQPIACAVFAALLHFFFLAAFTWMFLEGVQLYIMLVEVFESEHSRRKYFYLVGYGMPALIVAVSAAVDYRSYGTDKVCWLRLDTYFIWSFIGPATLIIMLNVIFLGIALYKMFHHTAILKPESGCLDNINYEDNRPFIKSWVIGAIALLCLLGLTWAFGLMYINESTVIMAYLFTIFNSLQGMFIFIFHCVLQKKVRKEYGKCLRTHCCSGKSTESSIGSGKTSGSRTPGRYSTGSQSRIRRMWNDTVRKQSESSFITGDINSSASLNRGAMANHLISNALLRPHGTNNPYNTLLGEPAVCNNPSVSMYNAQEGLLNNARDTSVMDTLPLNGNHGNSYSIASGEYLSNCVQIIDRGYNHNETALEKKILKELTSNYIPSYLNNHERSSEQNRNLMNKLVNNLGSGREDDAIVLDDATSFNHEESLGLELIHEESDAPLLPPRVYSTENHQPHHYTRRRIPQDHSESFFPLLTNEHTEDLQSPHRDSLYTSMPTLAGVAATESVTTSTQTEPPPAKCGDAEDVYYKSMPNLGSRNHVHQLHTYYQLGRGSSDGFIVPPNKDGTPPEGSSKGPAHLVTSL

SEQ ID NO: 16980 - protein, 665 aa, Homo sapiens
MVPWVRTMGQKLKQRLRLDVGREICRQYPLFCFLLLCLSAASLLLNRYIHILMIFWSFVAGVVTFYCSLGPDSLLPNIFFTIKYKPKQLGLQELFPQGHSCAVCGKVKCKRHRPSLLLENYQPWLDLKISSKVDASLSEVLELVLENFVYPWYRDVTDDESFVDELRITLRFFASVLIRRIHKVDIPSIITKKLLKAAMKHIEVIVKARQKVKNTEFLQQAALEEYGPELHVALRSRRDELHYLRKLTELLFPYILPPKATDCRSLTLLIREILSGSVFLPSLDFLADPDTVNHLLIIFIDDSPPEKATEPASPLVPFLQKFAEPRNKKPSVLKLELKQIREQQDLLFRFMNFLKQEGAVHVLQFCLTVEEFNDRILRPELSNDEMLSLHEELQKIYKTYCLDESIDKIRFDPFIVEEIQRRKIIKSVPGKLMKEKGQHLEPFIMNFINSCESPKPKPSRPELTILSPTSENNKKLFNDLFKNNANRAENTERKQNQNYFMEVMTVEGVYDYLMYVGRVVFQVPDWLHHLLMGTRILFKNTLEMYTDYYLQCKLEQLFQEHRLVSLITLLRDAIFCENTEPRSLQDKQKGAKQTFEEMMNYIPDLLVKCIGEETKYESIRLLFDGLQQPVLNKQLTYVLLDIVIQELFPELNKVQKEVTSVTSWM

SEQ ID NO: 16981 - protein, 158 aa, Homo sapiens
MFPPSGSTGLIPPSHFQARPLSTLPRMAPTWLSDIPLVQPPGHQDVSERRLDTQRPQVTMWERDVSSDRQEPGRRGRSWGLEGSQALSQQAEVIVRQLQELRRLEEEVRLLRETSLQQKMRLEAQAMELEALARAEKAGRAEAEGLRAALAGAEVVRK

SEQ ID NO: 16982 - protein, 732 aa, Homo sapiens
MGRRSRGRRLQQQQRPEDAEDGAEGGGKRGEAGWEGGYPEIVKENKLFEHYYQELKIVPEGEWGQFMDALREPLPATLRITGYKRYPEELAWHTNLSRKILRKSPHLEKFHQFLVSETESGNISRQEAVSMIPPLLLNVRPHHKILDMCAAPGSKTTQLIEMLHADMNVPFPEGFVIANDVDNKRCYLLVHQAKRLSSPCIMVVNHDASSIPRLQIDVDGRKEILFYDRILCDVPCSGDGTMRKNIDVWKKWTTLNSLQLHGLQLRIATRGAEQLAEGGRMVYSTCSLNPIEDEAVIASLLEKSEGALELADVSNELPGLKWMPGITQWKVMTKDGQWFTDWDAVPHSRHTQIRPTMFPPKDPEKLQAMHLERCLRILPHHQNTGGFFVAVLVKKSSMPWNKRQPKLQGKSAETRESTQLSPADLTEGKPTDPSKLESPSFTGTGDTEIAHATEDLENNGSKKDGVCGPPPSKKMKLFGFKEDPFVFIPEDDPLFPPIEKFYALDPSFPRMNLLTRTTEGKKRQLYMVSKELRNVLLNNSEKMKVINTGIKVWCRNNSGEEFDCAFRLAQEGIYTLYPFINSRIITVSMEDVKILLTQENPFFRKLSSETYSQAKDLAKGSIVLKYEPDSANPDALQCPIVLCGWRGKASIRTFVPKNERLHYLRMMGLEVLGEKKKEGVILTNESAASTGQPDNDVTEGQRAGEPNSPDAEEANSPDVTAGCDPAGVHPPR

SEQ ID NO: 16983 - protein, 238 aa, Homo sapiens
MSRVPSPPPPAEMSSGPVAESWCYTQIKVVKFSYMWTINNFSFCREEMGEVIKSSTFSSGANDKLKWCLRVNPKGLDEESKDYLSLYLLLVSCPKSEVRAKFKFSILNAKGEETKAMESQRAYRFVQGKDWGFKKFIRRDFLLDEANGLLPDDKLTLFCEVSVVQDSVNISGQNTMNMVKVPECRLADELGGLWENSRFTDCCLCVAGQEFQAHKAILAARSPVFSAMFEHEMEESKK

SEQ ID NO: 16984 - protein, 663 aa, Homo sapiens
MGDSGSRRSTLVSRLPIFRRSINRRHDSLPSSPSSSNTVGVHSSSPSSTNSSSGSTGKRRSIFRTPSISFHHKKGSEPKQEPTNQNLSISNGAQPGHSNMQKLSLEEHIKTRGRHSVGFSSSRNKKITRSLTEDFEREKEHSTNKNVFINCLSSGKSEGDDSGFTEDQTRRSVKQSTRKLLPKSFSSHYKFSKPVLQSQSISLVQQSEFSLEVTQYQEREPVLVRASPSCSVDVTERAGSSLQSPLLSADLTTAQTPSEFLALTEDSVSEMDAFSKSGSMASHCDNFGHNDSTSQMSLNSAAVTKTTTELTGTVPCAIMSPGKYRLEGQCSTESNSLPETSAANQKEVLLQIAELPATSVSHSESNLPADSEREENIGLQNGETMLGTNSPRKLGFYEQHKAIAEHVKGIHPISDSKIIPTSGDHHIFNKTSHGYEANPAKVLASSLSPFREGRFIERRLRSSSEGTAGSSRMILKPKDGNIEEVNSLRKQRAGSSSSKMNSLDVLNNLGSCELDEDDLMLDLEFLEEQSLHPSVCREDSYHSVVSCAAVVLTPMEPMIEMKKREEPEFPEPSKQNLSLKLTKDVDQEARCSHISRMPNSPSADWPLQGVEENGGIDSLPFRLMLQDCTAVKTLLLKMKRVLQEVHLSRMSVSNSTNKNCIIF

SEQ ID NO: 16985 - protein, 547 aa, Homo sapiens
MSSDEEKYSLPVVQNDSSRGSSVSSNLQEEYEELLHYAIVTPNIEPCASQSSHPKGELVPDVRISTIHDILHSQESSPVLSPRKPSHPVMDFFSSHLLADSSSPATNSSHTDAHEILVSDFLVSDENLQKMENVLDLWSSGLKTNIISELSKWRLNFIDWHRMEMRKEKEKHAAHLKQLCNQINELKELQKTFEISIGRKDEVISSLSHAIGKQKEKIELMRTFFHWRIGHVRARQDVYEGKLADQYYQRTLLKKVWKVWRSVVQKQWKDVVERACQARAEEVCIQISNDYEAKVAMLSGALENAKAEIQRMQHEKEHFEDSMKKAFMRGVCALNLEAMTIFQNRNDAGIDSTNNKKEEYGPGVQGKEHSAHLDPSAPPMPLPVTSPLLPSPPAAVGGASATAVPSAASMTSTRAASASSVHVPVSALGAGSAATAASEEMYVPRVVTSAQQKAGRTITARITGRCDFASKNRISSSLAIMGVSPPMSSVVVEKHHPVTVQTIPQATAAKYPRTIHPESSTSASRSLGTRSAHTQSLTSVHSIKVVD

SEQ ID NO: 16986 - protein, 739 aa, Homo sapiens
MSCVSSYAGFDLSDPEKEKVGILAIQLKERNVVHSEIIITLLSNAVAQFKKYKCPRMKSHLMVQMGEEYYYAKDYTKALKLLDYVMCDYRSEGWWTLLTSVLTTALKCSYLMAQLKDYITYSLELLGRASTLKDDQKSRIEKNLINVLMNESPDPEPDCDILAVKTAQKLWADRISLAGSNIFTIGVQDFVPFVQCKAKFHAPSFHVDVPVQFDIYLKADCPHPIRFSKLCVSFNNQEYNQFCVIEEASKANEVLENLTQGKMCLVPGKTRKLLFKFVAKTEDVGKKIEITSVDLALGNETGRCVVLNWQGGGGDAASSQEALQAARSFKRRPKLPDNEVHWDSIIIQASTMIISRVPNISVHLLHEPPALTNEMYCLVVTVQSHEKTQIRDVKLTAGLKPGQDANLTQKTHVTLHGTELCDESYPALLTDIPVGDLHPGEQLEKMLYVRCGTVGSRMFLVYVSYLINTTVEEKEIVCKCHKDETVTIETVFPFDVAVKFVSTKFEHLERVYADIPFLLMTDLLSASPWALTIVSSELQLAPSMTTVDQLESQVDNVILQTGESASECFCLQCPSLGNIEGGVATGHYIISWKRTSAMENIPIITTVITLPHVIVENIPLHVNADLPSFGRVRESLPVKYHLQNKTDLVQDVEISVEPSDAFMFSGLKQIRLRILPGTEQEMLYNFYPLMAGYQQLPSLNINLLRFPNFTNQLLRRFIPTSIFVKPQGRLMDDTSIAAA

SEQ ID NO: 16987 - protein, 616 aa, Homo sapiens
MEPPGRRRGRAQPPLLLPLSLLALLALLGGGGGGGAAALPAGCKHDGRPRGAGRAAGAAEGKVVCSSLELAQVLPPDTLPNRTVTLILSNNKISELKNGSFSGLSLLERLDLRNNLISSIDPGAFWGLSSLKRLDLTNNRIGCLNADIFRGLTNLVRLNLSGNLFSSLSQGTFDYLASLRSLEFQTEYLLCDCNILWMHRWVKEKNITVRDTRCVYPKSLQAQPVTGVKQELLTCDPPLELPSFYMTPSHRQVVFEGDSLPFQCMASYIDQDMQVLWYQDGRIVETDESQGIFVEKNMIHNCSLIASALTISNIQAGSTGNWGCHVQTKRGNNTRTVDIVVLESSAQYCPPERVVNNKGDFRWPRTLAGITAYLQCTRNTHGSGIYPGNPQDERKAWRRCDRGGFWADDDYSRCQYANDVTRVLYMFNQMPLNLTNAVATARQLLAYTVEAANFSDKMDVIFVAEMIEKFGRFTKEEKSKELGDVMVDIASNIMLADERVLWLAQREAKACSRIVQCLQRIATYRLAGGAHVYSTYSPNIALEAYVIKSTGFTGMTCTVFQKVAASDRTGLSDYGRRDPEGNLDKQLSFKCNVSNTFSSLALKVCYILQSFKTIYS

SEQ ID NO: 16988 - protein, 3961 aa, Homo sapiens
MTTMLQKSDSNASFLRAARAGNLDKVVEYLKGGIDINTCNQNGLNALHLAAKEGHVGLVQELLGRGSSVDSATKKGNTALHIASLAGQAEVVKVLVKEGANINAQSQNGFTPLYMAAQENHIDVVKYLLENGANQSTATEDGFTPLAVALQQGHNQAVAILLENDTKGKVRLPALHIAARKDDTKSAALLLQNDHNADVQSKMMVNRTTESGFTPLHIAAHYGNVNVATLLLNRGAAVDFTARNGITPLHVASKRGNTNMVKLLLDRGGQIDAKTRDGLTPLHCAARSGHDQVVELLLERGAPLLARTKNGLSPLHMAAQGDHVECVKHLLQHKAPVDDVTLDYLTALHVAAHCGHYRVTKLLLDKRANPNARALNGFTPLHIACKKNRIKVMELLVKYGASIQAITESGLTPIHVAAFMGHLNIVLLLLQNGASPDVTNIRGETALHMAARAGQVEVVRCLLRNGALVDARAREEQTPLHIASRLGKTEIVQLLLQHMAHPDAATTNGYTPLHISAREGQVDVASVLLEAGAAHSLATKKGFTPLHVAAKYGSLDVAKLLLQRRAAADSAGKNGLTPLHVAAHYDNQKVALLLLEKGASPHATAKNGYTPLHIAAKKNQMQIASTLLNYGAETNIVTKQGVTPLHLASQEGHTDMVTLLLDKGANIHMSTKSGLTSLHLAAQEDKVNVADILTKHGADQDAHTKLGYTPLIVACHYGNVKMVNFLLKQGANVNAKTKNGYTPLHQAAQQGHTHIINVLLQHGAKPNATTANGNTALAIAKRLGYISVVDTLKVVTEEVTTTTTTITEKHKLNVPETMTEVLDVSDEEGDDTMTGDGGEYLRPEDLKELGDDSLPSSQFLDGMNYLRYSLEGGRSDSLRSFSSDRSHTLSHASYLRDSAVMDDSVVIPSHQVSTLAKEAERNSYRLSWGTENLDNVALSSSPIHSGFLVSFMVDARGGAMRGCRHNGLRIIIPPRKCTAPTRVTCRLVKRHRLATMPPMVEGEGLASRLIEVGPSGAQFLGPVIVEIPHFAALRGKERELVVLRSENGDSWKEHFCDYTEDELNEILNGMDEVLDSPEDLEKKRICRIITRDFPQYFAVVSRIKQDSNLIGPEGGVLSSTVVPQVQAVFPEGALTKRIRVGLQAQPMHSELVKKILGNKATFSPIVTLEPRRRKFHKPITMTIPVPKASSDVMLNGFGGDAPTLRLLCSITGGTTPAQWEDITGTTPLTFVNECVSFTTNVSARFWLIDCRQIQESVTFASQVYREIICVPYMAKFVVFAKSHDPIEARLRCFCMTDDKVDKTLEQQENFAEVARSRDVEVLEGKPIYVDCFGNLVPLTKSGQHHIFSFFAFKENRLPLFVKVRDTTQEPCGRLSFMKEPKSTRGLVHQAICNLNITLPIYTKESESDQEQEEEIDMTSEKNDETESTETSVLKSHLVNEVPVLASPDLLSEVSEMKQDLIKMTAILTTDVSDKAGSIKVKELVKAAEEEPGEPFEIVERVKEDLEKVNEILRSGTCTRDESSVQSSRSERGLVEEEWVIVSDEEIEEARQKAPLEITEYPCVEVRIDKEIKGKVEKDSTGLVNYLTDDLNTCVPLPKEQLQTVQDKAGKKCEALAVGRSSEKEGKDIPPDETQSTQKQHKPSLGIKKPVRRKLKEKQKQKEEGLQASAEKAELKKGSSEESLGEDPGLAPEPLPTVKATSPLIEETPIGSIKDKVKALQKRVEDEQKGRSKLPIRVKGKEDVPKKTTHRPHPAASPSLKSERHAPGSPSPKTERHSTLSSSAKTERHPPVSPSSKTEKHSPVSPSAKTERHSPASSSSKTEKHSPVSPSTKTERHSPVSSTKTERHPPVSPSGKTDKRPPVSPSGRTEKHPPVSPGRTEKRLPVSPSGRTDKHQPVSTAGKTEKHLPVSPSGKTEKQPPVSPTSKTERIEETMSVRELMKAFQSGQDPSKHKTGLFEHKSAKQKQPQEKGKVRVEKEKGPILTQREAQKTENQTIKRGQRLPVTGTAESKRGVRVSSIGVKKEDAAGGKEKVLSHKIPEPVQSVPEEESHRESEVPKEKMADEQGDMDLQISPDRKTSTDFSEVIKQELEDNDKYQQFRLSEETEKAQLHLDQVLTSPFNTTFPLDYMKDEFLPALSLQSGALDGSSESLKNEGVAGSPCGSLMEGTPQISSEESYKHEGLAETPETSPESLSFSPKKSEEQTGETKESTKTETTTEIRSEKEHPTTKDITGGSEERGATVTEDSETSTESFQKEATLGSPKDTSPKRQDDCTGSCSVALAKETPTGLTEEAACDEGQRTFGSSAHKTQTDSEVQESTATSDETKALPLPEASVKTDTGTESKPQGVIRSPQGLELALPSRDSEVLSAVADDSLAVSHKDSLEASPVLEDNSSHKTPDSLEPSPLKESPCRDSLESSPVEPKMKAGIFPSHFPLPAAVAKTELLTEVASVRSRLLRDPDGSAEDDSLEQTSLMESSGKSPLSPDTPSSEEVSYEVTPKTTDVSTPKPAVIHECAEEDDSENGEKKRFTPEEEMFKMVTKIKMFDELEQEAKQKRDYKKEPKQEESSSSSDPDADCSVDVDEPKHTGSGEDESGVPVLVTSESRKVSSSSESEPELAQLKKGADSGLLPEPVIRVQPPSPLPSSMDSNSSPEEVQFQPVVSKQYTFKMNEDTQEEPGKSEEEKDSESHLAEDRHAVSTEAEDRSYDKLNRDTDQPKICDGHGCEAMSPSSSAAPVSSGLQSPTGDDVDEQPVIYKESLALQGTHEKDTEGEELDVSRAESPQADCPSESFSSSSSLPHCLVSEGKELDEDISATSSIQKTEVTKTDETFENLPKDCPSQDSSITTQTDRFSMDVPVSDLAENDEIYDPQITSPYENVPSQSFFSSEESKTQTDANHTTSFHSSEVYSVTITSPVEDVVVASSSSGTVLSKESNFEGQDIKMESQQESTLWEMQSDSVSSSFEPTMSATTTVVGEQISKVIITKTDVDSDSWSEIREDDEAFEARVKEEEQKIFGLMVDRQSQGTTPDTTPARTPTEEGTPTSEQNPFLFQEGKLFEMTRSGAIDMTKRSYADESFHFFQIGQESREETLSEDVKEGATGADPLPLETSAESLALSESKETVDDEADLLPDDVSEEVEEIPASDAQLNSQMGISASTETPTKEAVSVGTKDLPTVQTGDIPPLSGVKQISCPDSSEPAVQVQLDFSTLTRSVYSDRGDDSPDSSPEEQKSVIEIPTAPMENVPFTESKSKIPVRTMPTSTPAPPSAEYESSVSEDFLSSVDEENKADEAKPKSKLPVKVPLQRVEQQLSDLDTSVQKTVAPQGQDMASIAPDNRSKSESDASSLDSKTKCPVKTRSYTETETESRERAEELELESEEGATRPKILTSRLPVKSRSTTSSCRGGTSPTKESKEHFFDLYRNSIEFFEEISDEASKLVDRLTQSEREQEIVSDDESSSALEVSVIENLPPVETEHSVPEDIFDTRPIWDESIETLIERIPDENGHDHAEDPQDEQERIEERLAYIADHLGFSWTELARELDFTEEQIHQIRIENPNSLQDQSHALLKYWLERDGKHATDTNLVECLTKINRMDIVHLMETNTEPLQERISHSYAEIEQTITLDHSEGFSVLQEELCTAQHKQKEEQAVSKESETCDHPPIVSEEDISVGYSTFQDGVPKTEGDSSATALFPQTHKEQVQQDFSGKMQDLPEESSLEYQQEYFVTTPGTETSETQKAMIVPSSPSKTPEEVSTPAEEEKLYLQTPTSSERGGSPIIQEPEEPSEHREESSPRKTSLVIVESADNQPETCERLDEDAAFEKGDDMPEIPPETVTEEEYIDEHGHTVVKKVTRKIIRRYVSSEGTEKEEIMVQGMPQEPVNIEEGDGYSKVIKRVVLKSDTEQSEVTLCEPSILSSTSQFQAEPVEGRRVSKVVKTTVVLGERMEKHLGDSSLATDLPSAKDDFEEV

SEQ ID NO: 16989 - protein, 180 aa, Homo sapiens
MAGTARHDREMAIQAKKKLTTATDPIERLRLQCLARGSAGIKGLGRVFRIMDDDNNRTLDFKEFMKGLNDYAVVMEKEEVEELFRRFDKDGNGTIDFNEFLLTLRPPMSRARKEVIMQAFRKLDKTGDGVITIEDLREVYNAKHHPKYQNGEWSEEQVFRKFLDNFDSPYDKDGLVSKRA

SEQ ID NO: 16990 - protein, 520 aa, Homo sapiens
MGIRGLMSFVEDHSNEFFTDLKLRDTKIVIDGYALFHRLCFSSNLDLRYGGDYDSFADVVQKFFESLFACNICPYVVLDGGCDISDKKLTTLKDRAREKIQMAHSLSVGGSGYVCPLLIREVFIQVLIKLRVCFVQCFSEADRDIMTLANHWNCPVLSSDSDFCIFDLKTGFCPLNSFQWRNMNTIKGTQNYIPAKCFSLDAFCHHFSNMNKALLPLFAVLCGNDHVNLPIMETFLSKARLPLGATSSKGRRHHRILGLLNWLSHFANPTEALDNVLKYLPKKDRENVKELLCCSMEEYQQSQVKLQDFFQCGTYVCPDALNLGLPEWVLVALAKGQLSPFISDALVLRRTILPTQVENMQQPNAHRISQPIRQIIYGLLLNASPHLDKTSWNALPPQPLAFSEVERINKNIRTSIIDAVELAKDHSDLSRLTELSLRRRQMLLLETLKVKQTILEPIPTSLKLPIAVSCYWLQHTETKAKLHHLQSLLLTMLVGPLIAIINSPGNVDPVPRQAQCLAPR

SEQ ID NO: 16991 - protein, 1042 aa, Homo sapiens
MLCWGYWSLGQPGISTNLQGIVAEPQVCGFISDRSVKEVACGGNHSVFLLEDGEVYTCGLNTKGQLGHEREGNKPEQIGALADQHIIHVACGESHSLALSDRGQLFSWGAGSDGQLGLMTTEDSVAVPRLIQKLNQQTILQVSCGNWHCLALAADGQFFTWGKNSHGQLGLGKEFPSQASPQRVRSLEGIPLAQVAAGGAHSFALSLSGAVFGWGMNNAGQLGLSDEKDRESPCHVKLLRTQKVVYISCGEEHTAVLTKSGGVFTFGAGSCGQLGHDSMNDEVNPRRVLELMGSEVTQIACGRQHTLAFVPSSGLIYAFGCGARGQLGTGHTCNVKCPSPVKGYWAAHSGQLSARADRFKYHIVKQIFSGGDQTFVLCSKYENYSPAVDFRTMNQAHYTSLINDETIAVWRQKLSEHNNANTINGVVQILSSAACWNGSFLEKKIDEHFKTSPKIPGIDLNSTRVLFEKLMNSQHSMILEQILNSFESCLIPQLSSSPPDVEAMRIYLILPEFPLLQDSKYYITLTIPLAMAILRLDTNPSKVLDNWWSQVCPKYFMKLVNLYKGAVLYLLRGRKTFLIPVLFNNYITAALKLLEKLYKVNLKVKHVEYDTFYIPEISNLVDIQEDYLMWFLHQAGMDTVTLCSYPFIFDAQAKTKMLQTDAELQMQVAVNGANLQNVFMLLTLEPLLARSPFLVLHVRRNNLVGDALRELSIHSDIDLKKPLKVIFDGEEAVDAGGVTKEFFLLLLKELLNPIYGMFTYYQDSNLLWFSDTCFVEHNWFHLIGITCGLAIYNSTVVDLHFPLALYKKLLNVKPGLEDLKELSPTEGRSLQELLDYPGEDVEETFCLNFTICRESYGVIEQKKLIPGGDNVTVCKDNRQEFVDAYVNYVFQISVHEWYTAFSSGFLKVCGGKVLELFQPSELRAMMVGNSNYNWEELEETAIYKGDYSATHPTVKLFWETFHEFPLEKKKKFLLFLTGSDRIPIYGMASLQIVIQSTASGEEYLPVAHTCYNLLDLPKYSSKEILSARLTQALDNYEGFSLA

SEQ ID NO: 16992 - protein, 473 aa, Homo sapiens
MKEPKSTRGLVHQAICNLNITLPIYTKESESDQEQEEEIDMTSEKNPQDEQERIEERLAYIADHLGFSWTELARELDFTEEQIHQIRIENPNSLQDQSHALLKYWLERDGKHATDTNLVECLTKINRMDIVHLMETNTEPLQERISHSYAEIEQTITLDHSEGFSVLQEELCTAQHKQKEEQAVSKESETCDHPPIVSEEDISVGYSTFQDGVPKTEGDSSATALFPQTHKEQVQQDFSGKMQDLPEESSLEYQQEYFVTTPGTETSETQKAMIVPSSPSKTPEEVSTPAEEEKLYLQTPTSSERGGSPIIQEPEEPSEHREESSPRKTSLVIVESADNQPETCERLDEDAAFEKELTEELGELEASSDEEAMVTTRVVRRRVIIQGDDMPEIPPETVTEEEYIDEHGHTVVKKVTRKIIRRYVSSEGTEKEEIMVQGMPQEPVNIEEGDGYSKVIKRVVLKSDTEQSEDNNE

SEQ ID NO: 16993 - protein, 868 aa, Homo sapiens
RMYHRVLVHSNCLSLQEVEDFCRLRCLCVAFQLHLPLSQRACSRVITCSWIRNSDSFLKMNKWCEYFILSNLNVFGCWNLNLNHVSDLYDEQLLKNIAFYYEFESTQEPHLNLGDSIRRDYEDLWNVVSHLVKEFNVGKSFPLRTTRRHFLRQEKSVIQEISLEKMPSVGFIPMTSAVIDEFVGDMMKDLPILKSDDPVVPSLFKQKTSDELLHWHAQRLLSDDYDRIKCHVDEQSRDPHVLDFLKKIQDYQQFYGKSLESISTKVIVTQTTRPKEDSSGASGEILQNTKPHQITKKSKKKSFLKEDQNKAQQNDDLLFSIEEEMKNNLHSGIRKLEDYLTSCASNSVKFGVEMLGLIACFKAWKKHCRGEGKISKDLSIAVQMMKRIHSLLERYPEILEAEHHQYIAKCLKYLGFNDLANSLDPTLIGDDKNKKKYSIDIGPARFQLQYMGHYLIRDERKDRDPRVQDFIPNAWQQELLDVVDKNESAVIVAPTSSGKTYASYYCMEKVLRESDVGVVVYVAPAKSLVGQVAATVENRFTKTLPAGRTLCGAFTRDYCHNVLNCQVHYLGREVGAKFWELLLVIIRCPFLVLSATINNPNLLTKWLQSVKQYWKQADKIMEEKCISEKQADKCLNFLQDHSYKNQSYEVRLVLCGERYNDLEKHICSVKHDDVYFDHFHPCAALTTDIIEKYGFPPDLTLTPQESIQLYDTMAQVWETWPRAQELCPEEFILFKNKIVIKKLDARKYEENLKAELTNWIKNGQVKKVKRVLKNLSPDSLSSSKDMVKMFPLLVEKLRQMDKLPAIFFLFKNDDVGKRAGSVCTFLEKTETKSHPHTECHSYVFAIDEVLEKVRKTQKRITKKNPKKA

SEQ ID NO: 16994 - protein, 459 aa, Homo sapiens
MSQLKIVTNHLYLYEIARRHPYFYAPELLFFAKRYKAAFTECCQAADKAACLLPKLDELRDEGKASSAKQRLKCASLQKFGERAFKAWAVARLSQRFPKAEFAEVSKLVTDLTKVHTECCHGDLLECADDRADLAKYICENQDSISSKLKECCEKPLLEKSHCIAEVENDEMPADLPSLAADFVESKDVCKNYAEAKDVFLGMFLYEYARRHPDYSVVLLLRLAKTYETTLEKCCAAADPHECYAKVFDEFKPLVEEPQNLIKQNCELFEQLGEYKFQNALLVRYTKKVPQVSTPTLVEVSRNLGKVGSKCCKHPEAKRMPCAEDYLSVVLNQLCVLHEKTPVSDRVTKCCTESLVNRRPCFSALEVDETYVPKEFNAETFTFHADICTLSEKERQIKKQTALVELVKHKPKATKEQLKAVMDDFAAFVEKCCKADDKETCFAEEGKKLVAASQAALGL

SEQ ID NO: 16995 - protein, 685 aa, Homo sapiens
MVSRCSCLGVQCLLLSLLLLAAWEVGSGQLHYSVYEEARHGTFVGRIAQDLGLELAELVQRLFRVASKRHGDLLEVNLQNGILFVNSRIDREELCGRSVECSIHLEVIVDRPLQVFHVDVEVKDINDNPPRFSVTEQKLSIPESRLLDSRFPLEGASDADVGENALLTYKLSPNEYFVLDIINKKDKDKFPVLVLRKLLDREENPQLKLLLTATDGGKPEFTGSVSLLILVLDANDNAPIFDRPVYEVKMYENQVNQTLVIRLNASDSDEGINKEMMYSFSSLVPPTIRRKFWINERTGEIKVNDAIDFEDSNTYEIHVDVTDKGNPPMVGHCTVLVELLDENDNSPEVIVTSLSLPVKEDAQVGTVIALISVSDHDSGANGQVTCSLTPHVPFKLVSTYKNYYSLVLDSALDRERVSAYELVVTARDGGSPPLWATASVSVEVADVNDNAPAFAQSEYTVFVKENNPPGCHIFTVSAWDADAQENALVSYSLVERRLGERSLSSYVSVHAESGKVYALQPLDHEELELLQFQPRQPNPDWRYSASLRAGMHSSVHLEEAGILRAGPGGPDQQWPTVSSATPEPEAGEVSPPVGAGVNSNSWTFKYGPGNPKQSGPGELPDKFIIPGSPAIISIRQEPTNSQIDKSDFITFGKKEETKKKKKKKKGNKTQEKKEKGNSTTDNSDQ

SEQ ID NO: 16996 - protein, 1817 aa, Homo sapiens
MRTGWATPRRPAGLLMLLFWFFDLAEPSGRAANDPFTIVHGNTGKCIKPVYGWIVADDCDETEDKLWKWVSQHRLFHLHSQKCLGLDITKSVNELRMFSCDSSAMLWWKCEHHSLYGAARYRLALKDGHGTAISNASDVWKKGGSEESLCDQPYHEIYTRDGNSYGRPCEFPFLIDGTWHHDCILDEDHSGPWCATTLNYEYDRKWGICLKPENGCEDNWEKNEQFGSCYQFNTQTALSWKEAYVSCQNQGADLLSINSAAELTYLKEKEGIAKIFWIGLNQLYSARGWEWSDHKPLNFLNWDPDRPSAPTIGGSSCARMDAESGLWQSFSCEAQLPYVCRKPLNNTVELTDVWTYSDTRCDAGWLPNNGFCYLLVNESNSWDKAHAKCKAFSSDLISIHSLADVEVVVTKLHNEDIKEEVWIGLKNINIPTLFQWSDGTEVTLTYWDENEPNVPYNKTPNCVSYLGELGQWKVQSCEEKLKYVCKRKGEKLNDASSDKMCPPDEGWKRHGETCYKIYEDEVPFGTNCNLTITSRFEQEYLNDLMKKYDKSLRKYFWTGLRDVDSCGEYNWATVGGRRRAVTFSNWNFLEPASPGGCVAMSTGKSVGKWEVKDCRSFKALSICKKMSGPLGPEEASPKPDDPCPEGWQSFPASLSCYKVFHAERIVRKRNWEEAERFCQALGAHLSSFSHVDEIKEFLHFLTDQFSGQHWLWIGLNKRSPDLQGSWQWSDRTPVSTIIMPNEFQQDYDIRDCAAVKVFHRPWRRGWHFYDDREFIYLRPFACDTKLEWVCQIPKGRTPKTPDWYNPDRAGIHGPPLIIEGSEYWFVADLHLNYEEAVLYCASNHSFLATITSFVGLKAIKNKIANISGDGQKWWIRISEWPIDDHFTYSRYPWHRFPVTFGEECLYMSAKTWLIDLGKPTDCSTKLPFICEKYNVSSLEKYSPDSAAKVQCSEQWIPFQNKCFLKIKPVSLTFSQASDTCHSYGGTLPSVLSQIEQDFITSLLPDMEATLWIGLRWTAYEKINKWTDNRELTYSNFHPLLVSGRLRIPENFFEEESRYHCALILNLQKSPFTGTWNFTSCSERHFVSLCQKYSEVKSRQTLQNASETVKYLNNLYKIIPKTLTWHSAKRECLKSNMQLVSITDPYQQAFLSVQALLHNSSLWIGLFSQDDELNFGWSDGKRLHFSRWAETNGQLEDCVVLDTDGFWKTVDCNDNQPGAICYYSGNETEKEVKPVDSVKCPSPVLNTPWIPFQNCCYNFIITKNRHMATTQDEVHTKCQKLNPKSHILSIRDEKENNFVLEQLLYFNYMASWVMLGITYRNKSLMWFDKTPLSYTHWRAGRPTIKNEKFLAGLSTDGFWDIQTFKVIEEAVYFHQHSILACKIEMVDYKEEYNTTLPQFMPYEDGIYSVIQKKVTWYEALNMCSQSGGHLASVHNQNGQLFLEDIVKRDGFPLWVGLSSHDGSESSFEWSDGSTFDYIPWKGQTSPGNCVLLDPKGTWKHEKCNSVKDGAICYKPTKSKKLSRLTYSSRCPAAKENGSRWIQYKGHCYKSDQALHSFSEAKKLCSKHDHSATIVSIKDEDENKFVSRLMRENNNITMRVWLGLSQHSVDCPSSTWIQFQDSCYIFLQEAIKVESIEDVRNQCTDHGADMISIHNEEENAFILDTLKKQWKGPDDILLGMFYDTDDASFKWFDNSNMTFDKWTDQDDDEDLVDTCAFLHIKTGEWKKGNCEVSSVEGTLCKTAIPYKRKYLSDNHILISALVIASTVILTVLGAIIWFLYKKHSDSRFTTVFSTAPQSPYNEDCVLVVGEENEYPVQFD

SEQ ID NO: 16997 - protein, 115 aa, Homo sapiens
QKSTLAIDPATSKEIPLPSPAFDFVILLDVSDTSSMSRMNDIIDQQDPGLSGSLATRVGCNMQFCSARGLWRNLKNIFTEKHTTSKATWATKSCQGWAELKNCPIKLLTKISVNV

SEQ ID NO: 16998 - protein, 686 aa, Homo sapiens
MIHFHPLILPHERSFLGYASFKVGELLKSKEQLLVLSLRTSDGGKVVGTIEVSVVKMGEIEDGEADHITTDVQGQKCALVCECTAPESVSGKDNLPFLNSVLKNPVCKLYRFPTSDNKWMRIREQMSESILSFHIPKELISLHIKEDLCRNQEIKELGELSPHWDNLRKNVLTHCDQMVNMYQDILTELSKETGSSFKSSSSKGEKTLEFVPINLHLQRMQVHSPHLKDALYDVITVGAPAAHFQGFKNGGLRKLLHRFETERRNTGYQFIYYSPENTAKAKEVLSNINQLQPLIATHADLLLNSASQHSPDSLKNSLKMLSEKTELFVHAFKDQLVRSALLALYTARPGGILKKPPSPKSSTEESSPQDQPPVMRGQDSIPHHSDYDEEEWDRVWANVGKSLNCIIAMVDKLIERDGGSEGSGGNNDGEKEPSLTDAIPSHPREDWYEQLYPLILTLKDCMGEVVNRAKQSLTFVLLQELAYSLPQCLMLTLRRDIVFSQALAGLVCGFIIKLQTSLYDPGFLQQLHTVGLIVQYEGLLSTYSDEIGMLEDMAVGISDLKKVAFKIIEAKSNDVLPVITGRREHYVVEVKLPARMFESLPLQIKEGQLLHVYPVLFNVGINEQQTLAERFGDVSLQESINQENFELLQEYYKIFMEKMPPDYISHFQEQNDLKALLENLLQNIQS

SEQ ID NO: 16999 - protein, 1863 aa, Homo sapiens
MTTMLQKSDSNASFLRAARAGNLDKVVEYLKGGIDINTCNQNGLNALHLAAKEGHVGLVQELLGRGSSVDSATKKGNTALHIASLAGQAEVVKVLVKEGANINAQSQNGFTPLYMAAQENHIDVVKYLLENGANQSTATEDGFTPLAVALQQGHNQAVAILLENDTKGKVRLPALHIAARKDDTKSAALLLQNDHNADVQSKMMVNRTTESGFTPLHIAAHYGNVNVATLLLNRGAAVDFTARNGITPLHVASKRGNTNMVKLLLDRGGQIDAKTRDGLTPLHCAARSGHDQVVELLLERGAPLLARTKNGLSPLHMAAQGDHVECVKHLLQHKAPVDDVTLDYLTALHVAAHCGHYRVTKLLLDKRANPNARALNGFTPLHIACKKNRIKVMELLVKYGASIQAITESGLTPIHVAAFMGHLNIVLLLLQNGASPDVTNIRGETALHMAARAGQVEVVRCLLRNGALVDARAREEQTPLHIASRLGKTEIVQLLLQHMAHPDAATTNGYTPLHISAREGQVDVASVLLEAGAAHSLATKKGFTPLHVAAKYGSLDVAKLLLQRRAAADSAGKNGLTPLHVAAHYDNQKVALLLLEKGASPHATAKNGYTPLHIAAKKNQMQIASTLLNYGAETNIVTKQGVTPLHLASQEGHTDMVTLLLDKGANIHMSTKSGLTSLHLAAQEDKVNVADILTKHGADQDAHTKLGYTPLIVACHYGNVKMVNFLLKQGANVNAKTKNGYTPLHQAAQQGHTHIINVLLQHGAKPNATTANGNTALAIAKRLGYISVVDTLKVVTEEVTTTTTTITEKHKLNVPETMTEVLDVSDEEGDDTMTGDGGEYLRPEDLKELGDDSLPSSQFLDGMNYLRYSLEGGRSDSLRSFSSDRSHTLSHASYLRDSAVMDDSVVIPSHQVSTLAKEAERNSYRLSWGTENLDNVALSSSPIHSGRASPCLERDNSSFLVSFMVDARGGAMRGCRHNGLRIIIPPRKCTAPTRVTCRLVKRHRLATMPPMVEGEGLASRLIEVGPSGAQFLGKLHLPTAPPPLNEGESLVSRILQLGPPGTKFLGPVIVEIPHFAALRGKERELVVLRSENGDSWKEHFCDYTEDELNEILNGMDEVLDSPEDLEKKRICRIITRDFPQYFAVVSRIKQDSNLIGPEGGVLSSTVVPQVQAVFPEGALTKRIRVGLQAQPMHSELVKKILGNKATFSPIVTLEPRRRKFHKPITMTIPVPKASSDVMLNGFGGDAPTLRLLCSITGGTTPAQWEDITGTTPLTFVNECVSFTTNVSARFWLIDCRQIQESVTFASQVYREIICVPYMAKFVVFAKSHDPIEARLRCFCMTDDKVDKTLEQQENFAEVARSRDVEVLEGKPIYVDCFGNLVPLTKSGQHHIFSFFAFKENRLPLFVKVRDTTQEPCGRLSFMKEPKSTRGLVHQAICNLNITLPIYTKESESDQEQEEEIDMTSEKNPQDEQERIEERLAYIADHLGFSWTELARELDFTEEQIHQIRIENPNSLQDQSHALLKYWLERDGKHATDTNLVECLTKINRMDIVHLMETNTEPLQERISHSYAEIEQTITLDHSEGFSVLQEELCTAQHKQKEEQAVSKESETCDHPPIVSEEDISVGYSTFQDGVPKTEGDSSATALFPQTHKEQVQQDFSGKMQDLPEESSLEYQQEYFVTTPGTETSETQKAMIVPSSPSKTPEEVSTPAEEEKLYLQTPTSSERGGSPIIQEPEEPSEHREESSPRKTSLVIVESADNQPETCERLDEDAAFEKGDDMPEIPPETVTEEEYIDEHGHTVVKKVTRKIIRRYVSSEGTEKEEIMVQGMPQEPVNIEEGDGYSKVIKRVVLKSDTEQSEDNNE

SEQ ID NO: 17000 - protein, 912 aa, Homo sapiens
MFARKPPGAAPLGAMPVPDQPSSASEKTSSLSPGLNTSNGDGSETETTSAILASVKEQELQFERLTRELEAERQIVASQLERCKLGSETGSMSSMSSAEEQFQWQSQDGQKDIEDELTTGLELVDSCIRSLQESGILDPQDYSTGETGSRASYSSQHGHLGPELRALQSPEHHIDPIYEDRVYQKPPMRSLSQSQGDPLPPAHTGTYRTSTAPSSPGVDSVPLQRTGSQHGPQNAAAATFQRASYAAGPASNYADPYRQLQYCPSVESPYSKSGPALPPEGTLARSPSIDSIQKDPREFGWRDPELPEVIQMLQHQFPSVQSNAAAYLQHLCFGDNKIKAEIRRQGGIQLLVDLLDHRMTEVHRSACGALRNLVYGKANDDNKIALKNCGGIPALVRLLRKTTDLEIRELVTGVLWNLSSCDALKMPIIQDALAVLTNAVIIPHSGWENSPLQDDRKIQLHSSQVLRNATGCLRNVSSAGEEARRRMRECDGLTDALLYVIQSALGSSEIDSKTVENCVCILRNLSYRLAAETSQGQHMGTDELDGLLCGEANGKDAESSGCWGKKKKKKKSQDQWDGVGPLPDCAEPPKGIQMLWHPSIVKPYLTLLSECSNPDTLEGAAGALQNLAAGSWKGWAEDVAGMAYALRSLPEGAPCLPQWSVYIRAAVRKEKGLPILVELLRIDNDRVVCAVATALRNMALDVRNKELIGKYAMRDLVHRLPGGNNSNNTASKAMSDDTVTAVCCTLHEVITKNMENAKALRDAGGIEKLVGISKSKGDKHSPKVVKAASQVLNSMWQYRDLRSLYKKDGWSQYHFVASSSTIERDRQRPYSSSRTPSISPVRVSPNNRSASAPASPREMISLKERKTDYECTGSNATYHGAKGEHTSRKDAMTGAHSASMCRPYKGTPQRCS

SEQ ID NO: 17001 - protein, 1402 aa, Homo sapiens
MEVCLVEELPPTTELEEGLRNGVYLAKLAKFFAPKMVSEKKIYDVEQTRYKKSGLHFRHTDNTVQWLRAMESIGLPKIFYPETTDVYDRKNIPRMIYCIHALSLYLFKLGIAPQIQDLLGKVDFTEEEISNMRKELEKYGIQMPSFSKIGGILANELSVDEAALHAAVIAINEAVEKGIAEQTVVTLRNPNAVLTLVDDNLAPEYQKELWDAKKKKEENARLKNSCISEEERDAYEELLTQAEIQGNINKVNRQAAVDHINAVIPEGDPENTLLALKKPEAQLPAVYPFAAAMYQNELFNLQKQNTMNYLAHEELLIAVEMLSAVALLNQALESNDLVSVQNQLRSPAIGLNNLDKAYVERYANTLLSVKLEVLSQGQDNLSWNEIQNCIDMVNAQIQEENDRVVAVGYINEAIDEGNPLRTLETLLLPTANISDVDPAHAQHYQDVLYHAKSQKLGDSESVSKVLWLDEIQQAVDDANVDKDRAKQWVTLVVDVNQCLEGKKSSDILSVLKSSTSNANDIIPECADKYYDALVKAKELKSERVSSDGSWLKLNLHKKYDYYYNTDSKESSWVTPESCLYKESWLTGKEIEDIIEEVTVGYIRENIWSASEELLLRFQATSSGPILREEFEARKSFLHEQEENVVKIQAFWKGYKQRKEYMHRRQTFIDNTDSIVKIQSWFRMATARKSYLSRLQYFRDHNNEIVKIQSLLRANKARDDYKTLVGSENPPLTVIRKFVYLLDQSDLDFQEELEVARLREEVVTKIRANQQLEKDLNLMDIKIGLLVKNRITLEDVISHSKKLNKKKGGEMEILNNTDNQGIKSLSKERRKTLETYQQLFYLLQTNPLYLAKLIFQMPQNKSTKFMDTVIFTLYNYASNQREEYLLLKLFKTALEEEIKSKVDQVQDIVTGNPTVIKMVVSFNRGARGQNTLRQLLAPVVKEIIDDKSLIINTNPVEVYKAWVNQLETQTGEASKLPYDVTTEQALTYPEVKNKLEASIENLRRVTDKVLNSIISSLDLLPYGLRYIAKVLKNSIHEKFPDATEDELLKIVGNLLYYRYMNPAIVAPDGFDIIDMTAGGQINSDQRRNLGSVAKVLQHAASNKLFEGENEHLSSMNNYLSETYQEFRKYFKEACNVPEPEEKFNMDKYTDLVTVSKPVIYISIEEIISTHSLLLEHQDAIAPEKNDLLSELLGSLGEVPTVESFLGEGAVDPNDPNKANTLSQLSKTEISLVLTSKYDIEDGEAIDSRSLMIKTKKLIIDVIRNQPGNTLTEILETPATAQQEVDHATDMVSRAMIDSRTPEEMKHSQSMIEDAQLPLEQKKRKIQRNLRTLEQTGHVSSENKYQDILNEIAKDIRNQRIYRKLRKAELAKLQQTLNALNKKAAFYEEQINYYDTYIKTCLDN

SEQ ID NO: 17002 - protein, 93 aa, Homo sapiens
CFPNRLPQLMLQSLSTSEELQRQFHLFQLQRLDKLFLEQEDEEEKRLEEEEVRTIQSWTWDHIGDCSGRGWAGLSCSLGSRYCMCPPCRCGCC

SEQ ID NO: 17003 - protein, 693 aa, Homo sapiens
MEGPHLPNKKKHKKQAVKTEPEKKSQSTKLSVVHEKKSQEGKPKEHTEPKSLPKQASDTGSNDAHNKKAVSRSAEQQPSEKSTEPKTKPQDMISAGGESVAGITAISGKPGDKKKEKKSLTPAVPVESKPDKPSGKSGMDAALDDLIDTLGGPEETEEENTTYTGPEVSDPMSSTYIEELGKREVTIPPKYRELLAKKEGITGPPADSSKPIGPDDAIDALSSDFTCGSPTAAGKKTEKEESTEVLKAQSAGTVRSAAPPQEKKRKVEKDTMSDQALEALSASLGTRQAEPELDLRSIKEVDEAKAKEEKLEKCGEDDETIPSEYRLKPATDKDGKPLLPEPEEKPKPRSESELIDELSEDFDRSECKEKPSKPTEKTEESKAAAPAPVSEAVCRTSMCSIQSAPPEPATLKGTVPDDAVEALADSLGKKEADPEDGKPVMDKVKEKAKEEDREKLGEKEETIPPDYRLEEVKDKDGKPLLPKESKEQLPPMSEDFLLDALSEDFSGPQNASSLKFEDAKLAAAISEVVSQTPASTTQAGAPPRDTSSDKDLDDALDKLSDSLGQRQPDPDENKPMEDKVKEKAKAEHRDKLGERDDTIPPEYRHLLDDNGQDKPVKPPTKKSEDSKKPADDQDPIDALSGDLDSCPSTTETSQNTAKDKCKKAASSSKAPKNGGKAKDSAKTTEETSKPKDD

SEQ ID NO: 17004 - protein, 123 aa, Homo sapiens
MLGAMQVSKYGDLANWMIPGKMVKGMGGAMDLVSSAKTKVVVTMEHSAKGNAHKIMEKCTLPLTGKQCVNRIITEKAVFDVDKKKGLTLIELWEGLTVDDVQKSTGCDFAVSPKLMPMQQIAN

SEQ ID NO: 17005 - protein, 321 aa, Homo sapiens
MTTIPRKGSSHLPGSLHTCKLKLQEDRRQQEKSVIAQPIFVFEKGEQTFKRPAEDTLYEAAEPECNGFPTKRVRSSSFTFHITDSQSQGVRKNNVFMTSALVQSSVDIKSAEQGPVKHSKHVIRPAILQLPQARSCAKVRKTFGHKALESCKTKEKTNNKISEGNSYLLSENLSRARISVQLSTNQDFLGATSVGCQPNEDKCSFKSCSSNFVFGENMVERVLGTQKLTQPQLENDSYAKEKPFKSIPKFPVNFLSSRTDSIKNTSLIESAAAFSSQPSRKCLLEKIDVITGEETEHNVLKVCISCFTLSGSIYILGIKLT

SEQ ID NO: 17006 - protein, 644 aa, Homo sapiens
MEVQLGLGRVYPRPPSKTYRGAFQNLFQSVREVIQNPGPRHPEAASAAPPGASLLLLQQQQQQQQQQQQQQQQQQQQQQQETSPRQQQQQQGEDGSPQAHRRGPTGYLVLDEEQQPSQPQSALECHPERGCVPEPGAAVAASKGLPQQLPAPPDEDDSAAPSTLSLLGPTFPGLSSCSADLKDILSEASTMQLLQQQQQEAVSEGSSSGRAREASGAPTSSKDNYLGGTSTISDNAKELCKAVSVSMGLGVEALEHLSPGEQLRGDCMYAPLLGVPPAVRPTPCAPLAECKGSLLDDSAGKSTEDTAEYSPFKGGYTKGLEGESLGCSGSAAAGSSGTLELPSTLSLYKSGALDEAAAYQSRDYYNFPLALAGPPPPPPPPHPHARIKLENPLDYGSAWAAAAAQCRYGDLASLHGAGAAGPGSGSPSAAASSSWHTLFTAEEGQLYGPCGGGGGGGGGGGGGGGGGGGGGGGEAGAVAPYGYTRPPQGLAGQESDFTAPDVWYPGGMVSRVPYPSPTCVKSEMGPWMDSYSGPYGDMRLETARDHVLPIDYYFPPQKTCLICGDEASGCHYGALTCGSCKVFFKRAAEGKQKYLCASRNDCTIDKFRRKNCPSCRLRKCYEAGMTLGEKFRVGNCKHLKMTRP

SEQ ID NO: 17007 - protein, 437 aa, Homo sapiens
MQPAEEGPSVPKIYKQRSPYSVLKTFPSKRPALAKRYERPTLVELPHVRAPPPPPPPFAPHAAVSISSSEPPPQQFQAQSSYPPGPGRAAAAASSSSPSCTPATSQGHLRTPAQPPPASPAASSSSSFAAVVRYGPGAAAAAGTGGTGSDSASLELSAESRMILDAFAQQCSRVLSLLNCGGKLLDSNHSQSMISCVKQEGSSYNERQEHCHIGKGVHSQTSDNVDIEMQYMQRKQQTSAFLRVFTDSLQNYLLSGSFPTPNPSSASEYGHLADVDPLSTSPVHTLGGWTSPATSESHGHPSSSTLPEEEEEEDEEGYCPRCQELEQEVISLQQENEELRRKLESIPVPCQTVLDYLKMVLQHHNQLLIPQPADQPTEGSKQLLNNYPVYITSKQWDEAVNSSKKDGRRLLRYLIRFVFTTDELKYSCGLGKRKRIH

SEQ ID NO: 17008 - protein, 354 aa, Homo sapiens
MQLTRCCFVFLVQGSLYLVICGQDDGPPGSEDPERDDHEGQPRPRVPRKRGHISPKSRPMANSTLLGLLAPPGEAWGILGQPPNRPNHSPPPSAKVKKIFGWGDFYSNIKTVALNLLVTGKIVDHGNGTFSVHFQHNATGQGNISISLVPPSKAVEFHQEQQIFIEAKASKIFNCRMEWEKVERGRRTSLCTHDPAKICSRDHAQSSATWSCSQPFKVVCVYIAFYSTDYRLVQKGPSLLSGDVRHTPLLQTTLRSPPWRLETAGTGAAHQWTPTVCRSASHSAVETAGRRRKQWGQRPWAPSPPPLAELSAGTGGTLTPLLLLSSCGEPDAGDSWRARPSWHTVLPAPGMDSF

SEQ ID NO: 17009 - protein, 534 aa, Homo sapiens
MEEEMQPAEEGPSVPKIYKQRSPYSVLKTFPSKRPALAKRYERPTLVELPHVRAPPPPPPPFAPHAAVSISSSEPPPQQFQAQSSYPPGPGRAAAAASSSSPSCTPATSQGHLRTPAQPPPASPAASSSSSFAAVVRYGPGAAAAAGTGGTGSDSASLELSAESRMILDAFAQQCSRVLSLLNCGGKLLDSNHSQSMISCVKQEGSSYNERQEHCHIGKGVHSQTSDNVDIEMQYMQRKQQTSAFLRVFTDSLQNYLLSGSFPTPNPSSASEYGHLADVDPLSTSPVHTLGGWTSPATSESHGHPSSSTLPEEEEEEDEEGYCPRCQELEQEVISLQQENEELRRKLESIPVPCQTVLDYLKMVLQHHNQLLIPQPADQPTEGSKQLLNNYPVYITSKQWDEAVNSSKKDGRRLLRYLIRFVFTTDELKYSCGLGKRKRSVQSGETGPERRPLDPVKVTCLREFIRMHCTSNPDWWMPSEEQINKVFSDAVGHARQGRAVGTFLHNGGSFYEGIDHQASQDEVFNKSSQDGSGD

SEQ ID NO: 17010 - protein, 1397 aa, Homo sapiens
MLETVRIRKAGYAVRRPFQDFYKRYKVLMRNLALPEDVRGKCTSLLQLYDASNSEWQLGKTKVFLRESLEQKLEKRREEEVSHAAMVIRAHVLGFLARKQYRKVLYCVVIIQKNYRAFLLRRRFLHLKKAAIVFQKQLRGQIARRVYRQLLAEKREQEEKKKQEEEEKKKREEEERERERERREAELRAQQEEETRKQQELEALQKSQKEAELTRELEKQKENKQVEEILRLEKEIEDLQRMKEQQELSLTEASLQKLQERRDQELRRLEEEACRAAQEFLESLNFDEIDECVRNIERSLSVGSEFSSELAESACEEKPNFNFSQPYPEEEVDEGFEADDDAFKDSPNPSEHGHSDQRTSGIRTSDDSSEEDPYMNDTVVPTSPSADSTVLLAPSVQDSGSLHNSSSGESTYCMPQNAGDLPSPDGDYDYDQDDYEDGAITSGSSVTFSNSYGSQWSPDYRCSVGTYNSSGAYRFSSEGAQSSFEDSEEDFDSRFDTDDELSYRRDSVYSCVTLPYFHSFLYMKGGLMNSWKRRWCVLKDETFLWFRSKQEALKQGWLHKKGGGSSTLSRRNWKKRWFVLRQSKLMYFENDSEEKLKGTVEVRTAKEIIDNTTKENGIDIIMADRTFHLIAESPEDASQWFSVLSQVHASTDQEIQEMHDEQANPQNAVGTLDVGLIDSVCASDSPDRPNSFVIITANRVLHCNADTPEEMHHWITLLQRSKGDTRVEGQEFIVRGWLHKEVKNSPKMSSLKLKKRWFVLTHNSLDYYKSSEKNALKLGTLVLNSLCSVVPPDEKIFKETGYWNVTVYGRKHCYRLYTKLLNEATRWSSAIQNVTDTKAPIDTPTQQLIQDIKENCLNSDVVEQIYKRNPILRYTHHPLHSPLLPLPYGDINLNLLKDKGYTTLQDEAIKIFNSLQQLESMSDPIPIIQGILQTGHDLRPLRDELYCQLIKQTNKVPHPGSVGNLYSWQILTCLSCTFLPSRGILKYLKFHLKRIREQFPGSEMEKYALFTYESLKKTKCREFVPSRDEIEALIHRQEMTSTVYCHGGGSCKITINSHTTAGEVVEKLIRGLAMEDSRNMFALFEYNGHVDKAIESRTVVADVLAKFEKLAATSEVGDLPWKFYFKLYCFLDTDNVPKDSVEFAFMFEQAHEAVIHGHHPAPEENLQVLAALRLQYLQGDYTLHAAIPPLEEVYSLQRLKARISQSTKTFTPCERLEKRRTSFLEGTLRRSFRTGSVVRQKVEEEQMLDMWIKEEVSSARASIIDKWRKFQGMNQEQAMAKYMALIKEWPGYGSTLFDVECKEGGFPQELWLGVSADAVSVYKRGEGRPLEVFQYEHILSFGAPLANTYKIVVDERELLFETSEVVDVAKLMKAYISMIVKKRYSTTRSASSQGSSR

SEQ ID NO: 17011 - protein, 841 aa, Homo sapiens
MTLQELVHKAASCYMDRVAVCFDECNNQLPVYYTYKTVVNAASELSNFLLLHCDFQGIREIGLYCQPGIDLPSWILGILQVPAAYVPIEPDSPPSLSTHFMKKCNLKYILVEKKQINKFKSFHETLLNYDTFTVEHNDLVLFRLHWKNTEVNLMLNDGKEKYEKEKIKSISSEHVNEEKAEEHMDLRLKHCLAYVLHTSGTTGIPKIVRVPHKCIVPNIQHFRVLFDITQEDVLFLASPLTFDPSVVEIFLALSSGASLLIVPTSVKLLPSKLASVLFSHHRVTVLQATPTLLRRFGSQLIKSTVLSATTSLRVLALGGEAFPSLTVLRSWRGEGNKTQIFNVYGITEVSSWATIYRIPEKTLNSTLKCELPVQLGFPLLGTVVEVRDTNGFTIQEGSGQVFLGGRNRVCFLDDEVTVPLGTMRATGDFVTVKDGEIFFLGRKDSQIKRHGKRLNIELVQQVAEELQQVESCAVTWYNQEKLILFMVSKDASVKEYIFKELQKYLPSHAVPDELVLIDSLPFTSHGKIDVSELNKIYLNYINLKSENKLSGKEDLWEKLQYLWKSTLNLPEDLLRVPDESLFLNSGGDSLKSIRLLSEIEKLVGTSVPGLLEIILSSSILEIYNHILQTVVPDEDVTFRKSCATKRKLSDINQEEASGTSLHQKAIMTFTCHNEINAFVVLSRGSQILSLNSTRFLTKLGHCSSACPSDSVSQTNIQNLKGLNSPVLIGKSKDPSCVAKVSEEGKPAIGTQKMELHVRWRSDTGKCVDASPLVVIPTFDKSSTTVYIGSHSHRMKAVDFYSGKVKWEQILGDRIESSACVSKCGNFIVVGKFLNLRFVELN

SEQ ID NO: 17012 - protein, 333 aa, Homo sapiens
MLLPSKKDLKTALDVFAVFQWSFSALLITTTVIAVNLYLVVFTPYWPVTVLILTWLAFDWKTPQRGGRRFTCVRHWRLWKHYSDYFPLKLLKTHDICPSRNYILVCHPHGLFAHGWFGHFATEASGFSKIFPGITPYILTLGAFFWMPFLREYVMSTGACSVSRSSIDFLLTHKGTGNMVIVVIGGLAECRYSLPGSSTLVLKNRSGFVRMALQHGVPLIPAYAFGETDLYDQHIFTPGGFVNRFQKWFQSMVHIYPCAFYGRGFTKNSWGLLPYSRPVTTIVGEPLPMPKIENPSQEIVAKYHTLYIDALRKLFDQHKTKFGISETQELEII

SEQ ID NO: 17013 - protein, 195 aa, Homo sapiens
MSALLRLLRTGAPAAACLRLGTSAGTGSRRAMALYHTEERGQPCSQNYRLFFKNVTGHYISPFHDIPLKENGIPMKKARNDEYENLFNMIVEIPRWTNAKMEIATKEPMNPIKQYVKDGKLRYVANIFPYKGYIWNYGTLPQTWEDPHEKDKSTNCFGDNDPIDVCEIGSKILSCGEVIHVKILGILALIDEGET

SEQ ID NO: 17014 - protein, 1138 aa, Homo sapiens
MGDFAAPAAAANGSSICINSSLNSSLGGAGIGVNNTPNSTPAAPSSNHPAAGGCGGSGGPGGGSAAVPKHSTVVERLRQRIEGCRRHHVNCENRYQQAQVEQLELERRDTVSLYQRTLEQRAKKSGAGTGKQQHPSKPQQDAEAASAEQRNHTLIMLQETVKRKLEGARSPLNGDQQNGACDGNFSPTSKRIRKDISAGMEAINNLPSNMPLPSASPLHQLDLKPSLPLQNSGTHTPGLLEDLSKNGRLPEIKLPVNGCSDLEDSFTILQSKDLKQEPLDDPTCIDTSETSLSNQNKLFSDINLNDQEWQELIDELANTVPEDDIQDLFNEDFEEKKEPEFSQPATETPLSQESASVKSDPSHSPFAHVSMGSPQARPSSSGPPFSTVSTATSLPSVASTPAAPNPASSPANCAVQSPQTPNQAHTPGQAPPRPGNGYLLNPAAVTVAGSASGPVAVPSSDMSPAEQLKQMAAQQQQRAKLMQQKQQQQQQQQQQQQQQQQQQQQQQQQQHSNQTSNWSPLGPPSSPYGAAFTAEKPNSPMMYPQAFNNQNPIVPPMANNLQKTTMNNYLPQNHMNMINQQPNNLGTNSLNKQHNILTYGNTKPLTHFNADLSQRMTPPVANPNKNPLMPYIQQQQQQQQQQQQQQQQQQPPPPQLQAPRAHLSEDQKRLLLMKQKGVMNQPMAYAALPSHGQEQHPVGLPRTTGPMQSSVPPGSGGMVSGASPAGPGFLGSQPQAAIMKQMLIDQRAQLIEQQKQQFLREQRQQQQQQQQQILAEQQLQQSHLPRQHLQPQRNPYPVQQVNQFQGSPQDIAAVRSQAALQSMRTSRLMAQNAGMMGIGPSQNPGTMATAAAQSEMGLAPYSTTPTSQPGMYNMSTGMTQMLQHPNQSGMSITHNQAQGPRQPASGQGVGMVSGFGQSMLVNSAITQQHPQMKGPVGQALPRPQAPPRLQSLMGTVQQGAQSWQQRSLQGMPGRTSGELGPFNNGASYPLQAGQPRLTKQHFPQGLSQSVVDANTGTVRTLNPAAMGRQMMPSLPGQQGTSQARPMVMSGLSQGVPGMPAFSQPPAQQQIPSGSFAPSSQSQAYERNAPQDVSYNYSGDGAGGSFPGLPDGADLVDSIIKGGPGDEWMQELDELFGNP

SEQ ID NO: 17015 - protein, 374 aa, Homo sapiens
MRTKQVNLLITLVAVALFSFSCFSIYRITQTNNQLINCRNHILEFKENMLHLRNKTEKNTQEMMKVLNRMKYEITKREILSGNLVAQKADILNKNETVSNTFEDLKFFFPHLRKEGRIYPDVIIGKGKTGVSFALGISTVNRGNYSYLKQTLTSVVSRMTLSQEKDSVVIVLVADSNEDYLHSVVKMITKKFKRQVRSGSLEVISIPAFLYSSMLNAKHLAEASQKLASWRIKQVLDFCILLLYAQPKAKYYLQLEDDIIAKEMYFTKITDFVGNISSNNWFFIEFSMLGFIGKLFRSEDLTHFVRFFLMFYKEKPIDWLLNDIFQVKVCDAGEDLRNCMKRKKQIRIQYKPSLFQHVGIHSSFPRKEQYEKKI

SEQ ID NO: 17016 - protein, 1326 aa, Homo sapiens
MTTIHSRQMLQEHVSMEFSSSTTHVQTFSQTTKIVGEEVVRRKSSSIVEFFSLVTRSSNIPAGDSVPEFVEKPQPVTAPEGDKAVFRARVQGNAKPHISWKRESGIPIKESAKIFYDSINKEHVLKLEPLTSDDSDNYKCIASNDHADAIYTVSLLVTEGQEKMDFKKMLKKRAPPAPKKKQKKVANEKEMLEILSKVPKKDFEKVCMEYGFTDFRGLLRKLKEMKKKVEVEAIRILKPLEDKETKVDTTVVFDCIMELKDPNVKMIWIKGTEPLRIQYSLGKYDVKQMGTKYMLVISNVNMNDAGIYSLSVGDKRMSAELTVLDEPLKFLGEMKPVKVTERQTAVFEIRLSKKEPNFVWKFNGKELKRDDKYEITVSEDGLTHTLKIKDARLSDSGEFSAEAGNLVQKAQLTVDRIPIKFVSNLKNVRVKERSRACLECELTSKDVTLRWKKDGQLLMHGTKYSMNHEGKRAELIIEDAQLSDGGEYTVVAMQDGDPTEYYSTAIVTVEERLATVKSGMSDVHAATGSPAELCVVLNDEKVEGVWLKDGKEITDLPGMQIVKQGAVHKLIFPSMGPEHEGKYTFRAKGTESEASVFIADPPTIDPSVLEALAAHAITVKVGHTAHIKVPFRGKPLPKVTWYKDGMEVTEEERVSMERGEDQALLTISNCVREDSGLILLKLKNDHGSATATLHLSVLDRPKPPQGRVEFLELSGSCVHMKWKAPKDNGGRPVTQFIVERRAVGKKSWIKIGEVDGKVTNFSTNKVEEGKAYQFRILAVNSEGVSDPLETEEVFAGNPIEPPGFASQPQVTDVTKEAVTITWNAPTQDGGAPVLGYIVERRKKGSNLWVPVNKDPIQGTKCTVDGLLEDTEYEFRVIAVNKAGPGQPSVPSSSVVAKDPVKPPGLVQDLHVSDSSNSSISLAWREPAEGDPPSGYILEMRAEDTKEWSKCTKIPISGTCYTVGGLIERQKYFFRIRAVNEAGVGEPVELDKGVRAMPPPAAPKFDLSARLKSHMVVRAGTALCIHAAFSGSPPPDVIWQKDGVPTKGRETITKSKNHSQFLINSTKRSDSGVYRILLQNEFGEARYDIHVRVADFPRPPTNLRLFEEVPNTVTLTWNHSPDVQEDGEAHYIIMKRDASTATWYTAAERVFSNKYTVTGLLPGRKYYFRVVARNEIGDSEPLDSRDTWLINKDQIQDLSAKLKPYEKKDWRHAPRFVTPLKPHTVLRGQDCTMTCAFLGNPRPTVTLYKGDVNITANSKFWYNSTSGVCTLVIPTCTLKDSGDYSVLVENELGKDRSSCTLTVYDKDDKSVVASITESLQKKSKHLM

SEQ ID NO: 17017 - protein, 1211 aa, Homo sapiens
MKVRLLRQLSAAAKVKAPSGLQGPPQAHQFISLLLEEYGALCQAARSISTFLGTLENEHLKKFQVTWELHNKHLFENLVFSEPLLQSNLPALVSQIRLGTTTHDTCSEDTYSTLLQRYQRSEEELRRVAEEWLECQKRIDAYVDEQMTMKTKQRMLTEDWELFKQRRFIEEQLTNKKAVTGENNFTDTMRHMLSSRLSMPDCPNCNYRRRCACDDCSLSHILTCGIMDPPVTDDIHIHQLPLQVDPAPDYLAERSPPSVSSASSGSGSSSPITIQQHPRLILTDSGSAPTFCSDDEDVAPLSAKFADIYPLSNYDDTEVVANMNGIHSELNGGGENMALKDESPQISSTSSSSSEADDEEADGESSGEPPGAPKEDGVLGSRSPRTEESKADSPPPSYPTQQAEQAPNTCECHVCKQEASGLTPSAMTAGALPPGHQFLSPEKPTHPALHLYPHIHGHVPLHTVPHLPRPLIHPTLYATPPFTHSKALPPAPVQNHTNKHQVFNASLQDHIYPSCFGNTPEWNSSKFISLWGSEVMNDKNWNPGTFLPDTISGSEILGPTLSETRPEALPPPSSNETPAVSDSKEKKNAAKKKCLYNFQDAFMEANKVVMATSSATSSVSCTATTVQSSNSQFRVSSKRPPSVGDVFHGISKEDHRHSAPAAPRNSPTGLAPLPALSPAALSPAALSPASTPHLANLAAPSFPKTATTTPGFVDTRKSFCPAPLPPATDGSISAPPSVCSDPDCEGHRCENGVYDPQQDDGDESADEDSCSEHSSSTSTSTNQKEGKYCDCCYCEFFGHGGPPAAPTSRNYAEMREKLRLRLTKRKEEQPKKMDQISERESVVDHRRVEDLLQFINSSETKPVSSTRAAKRARHKQRKLEEKARLEAEARAREHLHLQEEQRRREEEEDEEEEEDRFKEEFQRLQELQKLRAVKKKKKERPSKDCPKLDMLTRNFQAATESVPNSGNIHNGSLEQTEEPETSSHSPSRHMNHSEPRPGLGADGDAADPVDTRDSKFLLPKEVNGKQHEPLSFFFDIMQHHKEGNGKQKLRQTSKASSEPARRPTEPPKATEGQSKPRAQTESKAKVVDLMSITEQKREERKVNSNNNNKKQLNHIKDEKSNPTPMEPTSPGEHQQNSKLVLAESPQPKGKNKKNKKKKGDRVNNSIDDVFLPKDIDLDSVDMDETEREVEYFKRDGVSPHCPGWSRTPGLK

SEQ ID NO: 17018 - protein, 516 aa, Homo sapiens
MAENLKRLVSNETLRTLQEKLDFWLKEYNTNTCDQNLNHCLELIEQVAKVQGQLFGILTAAAQEGGRNDGVETIKSRLLPWLEASFTAASLGKSVDSKVPSLQDTFDRERHKDPSPRDRDMQQLDSNLNSTRSQCNQVQDDLVETEKNLEESKNRSAISLLAAEEEINQLKKQLKSLQAQEDARHRNTDQRSSENRRSEPWSLEERKREQWNSLKQNADQQDTEAMSDYKKQLRNLKEEIAVLSAEKSALQGRSSRSRSPSPAPRSRSCSRSRSASPSTAVKVRRPSPNRSKLSNVARKAALLSRFSDSYSQARLDAQCLLRRCIDKAETVQRIIYIATVEAFHVAKMAFRHFKIHVRKSLTPSYVGSNDFENAVLDYVICHLDLYDSQSSVNDVIRAMNVNPKISFPPVVDFCLLSDFIQEICCIAFAMQALEPPLDIAYGADGEVFNDCKYRRSYDSDFTAPLVLYHVWPALMENDCVIMKGEAVTRRGAFVRWPCIVTIHPKCLIHNGIRCDL

SEQ ID NO: 17019 - protein, 261 aa, Homo sapiens
MTILGTTFGMVFSLLQVVSGESGYAQNGDLEDAELDDYSFSCYSQLEVNGSQHSLTCAFEDPDVNITNLEFEICGALVEVKCLNFRKLQEIYFIETKKFLLIGKSNICVKVGEKSLTCKKIDLTTIVKPEAPFDLSVVYREGANDFVVTFNTSHLQKKYVKVLMHDVAYRQEKDENKWTHVNLSSTKLTLLQRKLQPAAMYEIKVRSIPDHYFKGFWSEWSPSYYFRTPEINNSSGLSLSYGPVSPIIRRLWNIFVRNQEK

SEQ ID NO: 17020 - protein, 3062 aa, Homo sapiens
MRSRLPPALAALGAALLLSSIEAEVDPPSDLNFKIIDENTVHMSWAKPVDPIVGYRITVDPTTDGPTKEFTLSASTTETLLSELVPETEYVVTITSYDEVEESVPVIGQLTIQTGSSTKPVEKKPGKTEIQKCSVSAWTDLVFLVDGSWSVGRNNFKYILDFIAALVSAFDIGEEKTRVGVVQYSSDTRTEFNLNQYYQRDELLAAIKKIPYKGGNTMTGDAIDYLVKNTFTESAGARVGFPKVAIIITDGKSQDEVEIPARELRNVGVEVFSLGIKAADAKELKQIASTPSLNHVFNVANFDAIVDIQNEIISQVCSGVDEQLGELVSGEEVVEPPSNLIAMEVSSKYVKLNWNPSPSPVTGYKVILTPMTAGSRQHALSVGPQTTTLSVRDLSADTEYQISVSAMKGMTSSEPISIMEKTQPMKVQVECSRGVDIKADIVFLVDGSYSIGIANFVKVRAFLEVLVKSFEISPNRVQISLVQYSRDPHTEFTLKKFTKVEDIIEAINTFPYRGGSTNTGKAMTYVREKIFVPSKGSRSNVPKVMILITDGKSSDAFRDPAIKLRNSDVEIFAVGVKDAVRSELEAIASPPAETHVFTVEDFDAFQRISFELTQSICLRIEQELAAIKKKAYVPPKDLSFSEVTSYGFKTNWSPAGENVFSYHITYKEAAGDDEVTVVEPASSTSVVLSSLKPETLYLVNVTAEYEDGFSIPLAGEETTEEVKGAPRNLKVTDETTDSFKITWTQAPGRVLRYRIIYRPVAGGESREVTTPPNQRRRTLENLIPDTKYEVSVIPEYFSGPGTPLTGNAATEEVRGNPRDLRVSDPTTSTMKLSWSGAPGKVKQYLVTYTPVAGGETQEVTVRGDTTNTVLQGLKEGTQYALSVTALYASGAGDALFGEGTTLEERGSPQDLVTKDITDTSIGAYWTSAPGMVRGYRVSWKSLYDDVDTGEKNLPEDAIHTMIENLQPETKYRISVFATYSSGEGEPLTGDATTELSQDSKTLKVDEETENTMRVTWKPAPGKVVNYRVVYRPHGRGKQMVAKVPPTVTSTVLKRLQPQTTYDITVLPIYKMGEGKLRQGSGTTASRFKSPRNLKTSDPTMSSFRVTWEPAPGEVKGYKVTFHPTGDDRRLGELVVGPYDNTVVLEELRAGTTYKVNVFGMFDGGESSPLVGQEMTTLSDTTVMPILSSGMECLTRAEADIVLLVDGSWSIGRANFRTVRSFISRIVEVFDIGPKRVQIALAQYSGDPRTEWQLNAHRDKKSLLQAVANLPYKGGNTLTGMALNFIRQQNFRTQAGMRPRARKIGVLITDGKSQDDVEAPSKKLKDEGVELFAIGIKNADEVELKMIATDPDDTHAYNVADFESLSRIVDDLTINLCNSVKGPGDLEAPSNLVISERTHRSFRVSWTPPSDSVDRYKVEYYPVSGGKRQEFYVSRMETSTVLKDLKPETEYVVNVYSVVEDEYSEPLKGTEKTLPVPVVSLNIYDVGPTTMHVQWQPVGGATGYILSYKPVKDTEPTRPKEVRLGPTVNDMQLTDLVPNTEYAVTVQAVLHDLTSEPVTVREVTLPLPRPQDLKLRDVTHSTMNVFWEPVPGKVRKYIVRYKTPEEDVKEVEVDRSETSTSLKDLFSQTLYTVSVSAVHDEGESPPVTAQETTRPVPAPTNLKITEVTSEGFRGTWDHGASDVSLYRITWAPFGSSDKMETILNGDENTLVFENLNPNTIYEVSITAIYPDESESDDLIGSERTLPILTTQAPKSGPRNLQVYNATSNSLTVKWDPASGRVQKYRITYQPSTGEGNEQTTTIGGRQNSVVLQKLKPDTPYTITVSSLYPDGEGGRMTGRGKTKPLNTVRNLRVYDPSTSTLNVRWDHAEGNPRQYKLFYAPAAGGPEELVPIPGNTNYAILRNLQPDTSYTVTVVPVYTEGDGGRTSDTGRTLMRGLARNVQVYNPTPNSLDVRWDPAPGPVLQYRVVYSPVDGTRPSESIVVPGNTRMVHLERLIPDTLYSVNLVALYSDGEGNPSPAQGRTLPRSGPRNLRVFGETTNSLSVAWDHADGPVQQYRIIYSPTVGDPIDEYTTVPGRRNNVILQPLQPDTPYKITVIAVYEDGDGGHLTGNGRTVGLLPPQNIHISDEWYTRFRVSWDPSPSPVLGYKIVYKPVGSNEPMEAFVGEMTSYTLHNLNPSTTYDVNVYAQYDSGLSVPLTDQGTTLYLNVTDLKTYQIGWDTFCVKWSPHRAATSYRLKLSPADGTRGQEITVRGSETSHCFTGLSPDTDYGVTVFVQTPNLEGPGVSVKEHTTVKPTEAPTEPPTPPPPPTIPPARDVCKGAKADIVFLTDASWSIGDDNFNKVVKFIFNTVGGFDEISPAGIQVSFVQYSDEVKSEFKLNTYNDKALALGALQNIRYRGGNTRTGKALTFIKEKVLTWESGMRKNVPKVLVVVTDGRSQDEVKKAALVIQQSGFSVFVVGVADVDYNELANIASKPSERHVFIVDDFESFEKIEDNLITFVCETATSSCPLIYLDGYTSPGFKMLEAYNLTEKNFASVQGVSLESGSFPSYSAYRIQKNAFVNQPTADLHPNGLPPSYTIILLFRLLPETPSDPFAIWQITDRDYKPQVGVIADPSSKTLSFFNKDTRGEVQTVTFDTEEVKTLFYGSFHKVHIVVTSKSVKIYIDCYEIIEKDIKEAGNITTDGYEILGKLLKGERKSAAFQIQSFDIVCSPVWTSRDRCCDIPSRRDEGKCPAFPNSCTCTQDSVGPPGPPGPAGGPGAKGPRGERGISGAIGPPGPRGDIGPPGPQGPPGPQGPNGLSIPGEQGRQGMKGDAGEPGLPGRTGTPGLPGPPGPMGPPGDRGFTGKDGAMGPRGPPGPGSPGVTGPSGKPGKPGDHGRPGPSGLKGEKGDRGDIASQNMMRAVARQVCEQLISGQMNRFNQMLNQIPNDYQSSRNQPGPPGPPGPPGSAGARGEPGPGGRPGFPGTPGMQGPPGERGLPGEKGERGTGSSGPRGLPGPPGPQGESRTGPPGSTGSRGPPGPPGRPGNSGIRGPPGPPGYCDSSQCASIPYNGQGYPGTLLPL

SEQ ID NO: 17021 - protein, 728 aa, Homo sapiens
EASLQFVVEPSEATNRSVQAHEVHQKILATDVSSKNTPDSKKISSRNINDHHSEADEEFYLSVGSPSVLLDAKTSVSQNVIPSSAQKRETYTFENSVNMLPSSTEVSVKTKKRLNFDDKVMLKKIEIDNKVSDEEDKTSEGQERKPSGSSQNRIRDSEYEIQRQAKKSFSTLFLETVKRKSESSPIVRHAATAPPHSCPPDDTKLIEDEFIIDESDQSFASRSWITIPRKAGSLKQRTISPAESTALLQGRKSREKHHNILPKTLANDKHSHKPHPVETSQPSDKTVLDTSYALIGETVNNYRSTKYEMYSKNAEKPSRSKRTIKQKQRRKFMAKPAEEQLDVGQSKDENIHTSHITQDEFQRNSDRNMEEHEEMGNDCVSKKQMPPVGSKKSSTRKDKEESKKKRFSSESKNKLVPEEVTSTVTKSRRISRRPSDWWVVKSEESPVYSNSSVRNELPMHHNSSRKSTKKTNQSSKNIRKKTIPLKRQKTATKGNQRVQKFLNAEGSGGIVGHDEISRCSLSEPLESDEADLAKKKNLDCSRSTRSSKNEDNIMTAQNVPLKPQTSGYTCNIPTESNLDSGEHKTSVLEESGPSRLNNNYLMSGKNDVDDEEVHGSSDDSKQSKVIPKNRIHHKLVLPSNTPNVRRTKRTRLKPLEYWRGERIDYQGRPSGGFVISGVLSPDTISSKRKAKENIGKVNKKSNKKRICLDNDERSMNLFLKVTFRFYFK

SEQ ID NO: 17022 - protein, 897 aa, Homo sapiens
MRKDTDDIESPKRSIRDSGYIDCWDSERSDSLSPPRHGRDDSFDSLDSFGSRSRQTPSPDVVLRGSSDGRGSDSESDLPHRKLPDVKKDDMSARRTSHGEPKSAVPFNQYLPNKSNQTAYVPAPLRKKKAEREEYRKSWSTATSPLGGERPFRYGPRTPVSDDAESTSMFDMRCEEEAAVQPHSRARQEQLQLINNQLREEDDKWQDDLARWKSRRRSVSQDLIKKEEERKKMEKLLAGEDGTSERRKSIKTYREIVQEKERRERELHEAYKNARSQEEAEGILQQYIERFTISEAVLERLEMPKILERSHSTEPNLSSFLNDPNPMKYLRQQSLPPPKFTATVETTIARASVLDTSMSAGSGSPSKTVTPKAVPMLTPKPYSQPKNSQDVLKTFKVDGKVSVNGETVHREEEKERECPTVAPAHSLTKSQMFEGVARVHGSPLELKQDNGSIEINIKKPNSVPQELAATTEKTEPNSQEDKNDGGKSRKGNIELASSEPQHFTTTVTRCSPTVAFVEFPSSPQLKNDVSEEKDQKKPENEMSGKVELVLSQKVVKPKSPEPEATLTFPFLDKMPEANQLHLPNLNSQVDSPSSEKSPVMTPFKFWAWDPEEERRRQEKWQQEQERLLQERYQKEQDKLKEEWEKAQKEVEEEERRYYEEERKIIEDTVVPFTVSSSSADQLSTSSSMTEGSGTMNKIDLGNCQDEKQDRRWKKSFQGDDSDLLLKTRESDRLEEKGSLTEGALAHSGNPVSKGVHEDHQLDTEAGAPHCGTNPQLAQDPSQNQQTSNPTHSSEDVKPKTLPLDKSINHQIESPSERRKSISGKKLCSSCGLPLGKGAAMIIETLNLYFHIQCFRCGICKGQLGDAVSGTDVRIRNGLLNCNDCYMRSRSAGQPTTL

SEQ ID NO: 17023 - protein, 232 aa, Homo sapiens
MLMFDPVPVKQEAMDPVSVSYPSNYMESMKPNKYGVIYSTPLPEKFFQTPEGLSHGIQMEPVDLTVNKRSSPPSAGNSPSSLKFPSSHRRASPGLSMPSSSPPIKKYSPPSPGVQPFGVPLSMPPVMAAALSRHGIRSPGILPVIQPVVVQPVPFMYTSHLQQPLMVSLSEEMENSSSSMQVPVIESYEKPISQKKIKIEPGIEPQRTDYYPEEMSPPLMNSVSPPQALLQE

SEQ ID NO: 17024 - protein, 159 aa, Homo sapiens
MVCRRKKKRCHRDGMCCPSTRCNNGICIPVTESILTPHIPALDGTRHRDRNHGHYSNHDLGWQNLGRPHTKMSHIKGHEGDPCLRSSDCIEGFCCARHFWTKICKPVLHQGEVCTKQRKKGSHGLEIFQRCDCAKGLSCKVWKDATYSSKARLHVCQKI

SEQ ID NO: 17025 - protein, 912 aa, Homo sapiens
MEVFPFLLVLSVWWSRTWDSANADSIIHIGAIFDESAKKDDEVFRTAVGDLNQNEEILQTEKITFSVTFVDGNNPFQAVQEDIRGIQEFLDKVSQQGMDVALQKVENNINKMITTLFDTMRIEELNRYRDTLRRAILVMNPATAKSFITEVVETNLVAFDCHWIIINEEINDVDVQELVRRSIGRLTIIRQTFPVPQNISQRCFRGNHRISSTLCDPKDPFAQNMEISNLYIYDTVLLLANAFHKKLEDRKWHSMASLSCIRKNSKPWQGGRSMLETIKKGGVSGLTGELEFGENGGNPNVHFEILGTNYGEELGRGVRKLGCWNPVTGLNGSLTDKKLENNMRGVVLRVVTVLEEPFVMVSENVLGKPKKYQGFSIDVLDALSNYLGFNYEIYVAPDHKYGSPQEDGTWNGLVGELVFKRADIGISALTITPDRENVVDFTTRYMDYSVGVLLRRAEKTVDMFACLAPFDLSLWACIAGTVLLVGLLVYLLNWLNPPRLQMGSMTSTTLYNSMWFVYGSFVQQGGEVPYTTLATRMMMGAWWLFALIVISSYTANLAAFLTITRIESSIQSLQDLSKQTEIPYGTVLDSAVYEHVRMKGLNPFERDSMYSQMWRMINRSNGSENNVLESQAGIQKVKYGNYAFVWDAAVLEYVAINDPDCSFYTIGNTVADRGYGIALQHGSPYRDVFSQRILELQQNGDMDILKHKWWPKNGQCDLYSSVDTKQKGGALDIKSFAGVFCILAAGIVLSCFIAMLETWWNKRKGSRVPSKEDDKEIDLEHLHRRVNSLCTDDDSPHKQFSTSSIDLTPLDIDTLPTRQALEQISDFRNTHITTTTFIPEQIQTLSRTLSAKAASGFTFGNVPEHRTGPFRHRAPNGGFFRSPIKTMSSIPYQPTPTLGLNLGNDPDRGTSI

SEQ ID NO: 17026 - protein, 437 aa, Homo sapiens
MAAATLRTPTQGTVTFEDVAVHFSWEEWGLLDEAQRCLYRDVMLENLALLTSLDVHHQKQHLGEKHFRSNVGRALFVKTCTFHVSGEPSTCREVGKDFLAKLGFLHQQAAHTGEQSNSKSDGGAISHRGKTHYNCGEHTKAFSGKHTLVQQQRTLTTERCYICSECGKSFSKSYSLNDHWRLHTGEKPYECRECGKSFRQSSSLIQHRRVHTAVRPHECDECGKLFSNKSNLIKHRRVHTGERPYECSECGKSFSQRSALLQHRGVHTGERPYECSECGKFFTYHSSLIKHQKVHSGSRPYECSECGKSFSQNSSLIEHHRVHTGERPYKCSECGKSFSQRSALLQHRGVHTGERPYECSECGKFFPYSSSLRKHQRVHTGSRPYECSECGKSFTQNSGLIKHRRVHTGEKPYECTECGKSFSHNSSLIKHQRIHSR

SEQ ID NO: 17027 - protein, 208 aa, Homo sapiens
MKDSPFQVTKLYWLNEKWDFIASASDMAAEQGQILVIATAAVGGFTLLVILTLFFLITGRCQWYIKAKMKSEEKRRNHLQNGHLRFPGIKTYIDPDTYEDPSLAVHEFAKEIDPSRIRIERVIGAGEFGEVCSGRLKTPGKREIPVAIKTLKGGHMDRQRRDFLREASIMGQFDHPNIIRLEGVVTKKPLEMMTYILRAKGEAGFLKK

SEQ ID NO: 17028 - protein, 358 aa, Homo sapiens
MRLLERMRKDWFMVGIVLAIAGAKLEPSIGVNGGPLKPEITVSYIAVATIFFNSGLSLKTEELTSALVHLKLHLFIQIFTLAFFPATIWLFLQLLSITPINEWLLKGLQTVGCMPPPVSSAVILTKAVGGNEAAAIFNSAFGSFLGIVITPLLLLLFLGSSSSVPFTSIFSQLFMTVVVPLIIGQIVRRYIKDWLERKKPPFGAISSSVLLMIIYTTFCDTFSNPNIDLDKFSLVLILFIIFSIQLSFMLLTFIFSTRNNSGFTPADTVAIIFCSTHKSLTLGIPMLKIVFAGHEHLSLISVPLLIYHPAQILLGSVLVPTIKSWMVSRQKKLLQTRGPLANLNNPEGLEYLSIKFGH

SEQ ID NO: 17029 - protein, 2058 aa, Homo sapiens
MDNFFTEGTRVWLRENGQHFPSTVNSCAEGIVVFRTDYGQVFTYKQSTITHQKVTAMHPTNEEGVDDMASLTELHGGSIMYNLFQRYKRNQIYTYIGSILASVNPYQPIAGLYEPATMEQYSRRHLGELPPHIFAIANECYRCLWKRHDNQCILISGESGAGKTESTKLILKFLSVISQQSLELSLKEKTSCVERAILESSPIMEAFGNAKTVYNNNSSRFGKFVQLNICQKGNIQGGRIVDYLLEKNRVVRQNPGERNYHIFYALLAGLEHEEREEFYLSTPENYHYLNQSGCVEDKTISDQESFREVITAMDVMQFSKEEVREVSRLLAGILHLGNIEFITAGGAQVSFKTALGRSAELLGLDPTQLTDALTQRSMFLRGEEILTPLNVQQAVDSRDSLAMALYACCFEWVIKKINSRIKGNEDFKSIGILDIFGFENFEVNHFEQFNINYANEKLQEYFNKHIFSLEQLEYSREGLVWEDIDWIDNGECLDLIEKKLGLLALINEESHFPQATDSTLLEKLHSQHANNHFYVKPRVAVNNFGVKHYAGEVQYDVRGILEKNRDTFRDDLLNLLRESRFDFIYDLFEHVSSRNNQDTLKCGSKHRRPTVSSQFKDSLHSLMATLSSSNPFFVRCIKPNMQKMPDQFDQAVVLNQLRYSGMLETVRIRKAGYAVRRPFQDFYKRYKVLMRNLALPEDVRGKCTSLLQLYDASNSEWQLGKTKVFLRESLEQKLEKRREEEVSHAAMVIRAHVLGFLARKQYRKVLYCVVIIQKNYRAFLLRRRFLHLKKAAIVFQKQLRGQIARRVYRQLLAEKREQEEKKKQEEEEKKKREEEERERERERREAELRAQQEEETRKQQELEALQKSQKEAELTRELEKQKENKQVEEILRLEKEIEDLQRMKEQQELSLTEASLQKLQERRDQELRRLEEEACRAAQEFLESLNFDEIDECVRNIERSLSVGSEFSSELAESACEEKPNFNFSQPYPEEEVDEGFEADDDAFKDSPNPSEHGHSDQRTSGIRTSDDSSEEDPYMNDTVVPTSPSADSTVLLAPSVQDSGSLHNSSSGESTYCMPQNAGDLPSPDGDYDYDQDDYEDGAITSGSSVTFSNSYGSQWSPDYRCSVGTYNSSGAYRFSSEGAQSSFEDSEEDFDSRFDTDDELSYRRDSVYSCVTLPYFHSFLYMKGGLMNSWKRRWCVLKDETFLWFRSKQEALKQGWLHKKGGGSSTLSRRNWKKRWFVLRQSKLMYFENDSEEKLKGTVEVRTAKEIIDNTTKENGIDIIMADRTFHLIAESPEDASQWFSVLSQVHASTDQEIQEMHDEQANPQNAVGTLDVGLIDSVCASDSPDRPNSFVIITANRVLHCNADTPEEMHHWITLLQRSKGDTRVEGQEFIVRGWLHKEVKNSPKMSSLKLKKRWFVLTHNSLDYYKSSEKNALKLGTLVLNSLCSVVPPDEKIFKETGYWNVTVYGRKHCYRLYTKLLNEATRWSSAIQNVTDTKAPIDTPTQQLIQDIKENCLNSDVVEQIYKRNPILRYTHHPLHSPLLPLPYGDINLNLLKDKGYTTLQDEAIKIFNSLQQLESMSDPIPIIQGILQTGHDLRPLRDELYCQLIKQTNKVPHPGSVGNLYSWQILTCLSCTFLPSRGILKYLKFHLKRIREQFPGSEMEKYALFTYESLKKTKCREFVPSRDEIEALIHRQEMTSTVYCHGGGSCKITINSHTTAGEVVEKLIRGLAMEDSRNMFALFEYNGHVDKAIESRTVVADVLAKFEKLAATSEVGDLPWKFYFKLYCFLDTDNVPKDSVEFAFMFEQAHEAVIHGHHPAPEENLQVLAALRLQYLQGDYTLHAAIPPLEEVYSLQRLKARISQSTKTFTPCERLEKRRTSFLEGTLRRSFRTGSVVRQKVEEEQMLDMWIKEEVSSARASIIDKWRKFQGMNQEQAMAKYMALIKEWPGYGSTLFDVECKEGGFPQELWLGVSADAVSVYKRGEGRPLEVFQYEHILSFGAPLANTYKIVVDERELLFETSEVVDVAKLMKAYISMIVKKRYSTTRSASSQGSSR

SEQ ID NO: 17030 - protein, 559 aa, Homo sapiens
MSAVSQPQAAPSPLEKSPSTAILCNTCGNVCKGEVLRVQDKYFHIKCFVCKACGCDLAEGGFFVRQGEYICTLDYQRLYGTRCFSCDQFIEGEVVSALGKTYHPDCFVCAVCRLPFPPGDRVTFNGKECMCQKCSLPVSVGSSAHLSQGLRSCGGCGTEIKNGQALVALDKHWHLGCFKCKSCGKLLNAEYISKDGLPYCEADYHAKFGIRCDSCEKYITGRVLEAGEKHYHPSCALCVRCGQMFAEGEEMYLQGSSIWHPACRQAARTEDRNKETRTSSESIISVPASSTSGSPSRVIYAKLGGEILDYRDLAALPKSKAIYDIDRPDMISYSPYISHSAGDRQSYGEGDQDDRSYKQCRTSSPSSTGSVSLGRYTPTSRSPQHYSRPAARRSDGEDGSLDQDNRKKSSWLMLKGDADTRTNSPDLDTQSLSHSSGTDRDPLQRMAGDSFHSRFPYSKSDPLPGHGKNGLDQRNANLAPCGADPDASWGMREYKIYPYDSLIVTNRIRVKLPKDVDRTRLERHLSPEEFQEVFGMSIEEFDRLALWKRNDLKKKALLF

SEQ ID NO: 17031 - protein, 369 aa, Homo sapiens
MSMKWTSALLLIQLSCYFSSGSCGKVLVWPTEFSHWMNIKTILDELVQRGHEVTVLASSASISFDPNSPSTLKFEVYPVSLTKTEFEDIIKQLVKRWAELPKDTFWSYFSQVQEIMWTFNDILRKFCKDIVSNKKLMKKLQESRFDVVLADAVFPFGELLAELLKIPFVYSLRFSPGYAIEKHSGGLLFPPSYVPVVMSELSDQMTFIERVKNMIYVLYFEFWFQIFDMKKWDQFYSEVLGRPTTLSETMAKADIWLIRNYWDFQFPHPLLPNVEFVGGLHCKPAKPLPKEMEEFVQSSGENGVVVFSLGSMVSNTSEERANVIASALAKIPQKVLWRFDGNKPDTLGLNTRLYKWIPQNDLLDIKRML

SEQ ID NO: 17032 - protein, 640 aa, Homo sapiens
MELKKDINAVSIDMLLIVHSEKRRAAQGTLSDQQANPSSLLQRGGGFQGVGNGVRRWQKLEGNDFHGTQLTVEVHPRDAMPQLLKKFSLAKRLQGDKNGNTRPRQPGGKDAHAYPWDRSSLKSMSLDLQQFEKLDIYASQVTAKSGLDELVSDLLQEAHTDLERVRAIWIWICHHIEYDIAAAQEKDRQAFKPTDILRTQKTNCDGYAGLFERMCRLAGVQCMTVPGYSKGFGYQTGQSFSGEFDHAWNAVYLEGRWHLVDSTWGSGLVDTITSKFTFLYNEFYFLTHPALFIEDHFPDNKNWQLLKPPQSLRQFENNMYHKSEFYNKGMLSAHPETSMIRTVNGKATVTIESCAPTLFMFMLNGKQEHGLLSLRKNGMKLEVYPPTMGTHKLQIFAKGNSDIYSSVLEYTLKCNYVDMGVQLPAELHQPVGPSWFSEQMGIMKPSHPDPIIHTSDGRCSISFSVEEGINVLASLHGDDGPITEETQRRYIFQLHREKQTELKVQLPHAGKFALKIFVKKRQEPGNYIFVFNYLVCCANTKVNWPMFPESFGNWGQDNELLEPLSGVLPANRNVPFKLKLHGIAKVLVKGQDTWPLTLNHEGYWEGSCSTAGCQEVYVMVLENANHNFYSYILKYKVNAQ

SEQ ID NO: 17033 - protein, 76 aa, Homo sapiens
KMESSISSSSEEQIRRMNENSHVQVPFQQLNQLAAYPYAVWYYPQIMQYVPFPPFSDISNPTAHENYEKNNVMLQW

SEQ ID NO: 17034 - protein, 545 aa, Homo sapiens
MLGWCEAIARNPHRIPNNTRTPEISGDLADASQTSTLNEKSPGRSASRSSNISKASSPTTGTAPRSQSRLSVCPSTQDICRSAILHDMSEESFEYCTPVMVLSPARKESGKKSVIQRPRRRRKASERYEHAAEEQIRGRKNDFHLQISSPRWRELYTDSSDSSSTDESHWIQAKRRAQVKFRLSRRRRRNNNKPCENLAGSSTPNGIELVDLGSKGKEQQELIECESCSLNLHRGKHTRYQECNPSLTQGSSEIKRSSRNHEKSKGRYHHRDPQLLQSLRKNEIMKKTFSETDSSTEILGVPEGSKDMNDAGLQVNNPVQKPPATYDDGSDNLEVCRICHCEGDEESPLITPCRCTGTLRFVHQSCLHQWIKSSDTRCCELCKYDFIMETKLKPLRKWEKLQMTTSERRKIFCSVTFHVIAITCVVWSLYVLIDRTAEEIKQGNDNGVLEWPFWTKLVVVAIGFTGGLVFMYVQCKVYVQLWRRLKAYNRVIFVQNCPDTAKKLEKNFSCNVNTDIKDAVVVPVPQTGANSLPSAEGGPPEVVSV

SEQ ID NO: 17035 - protein, 973 aa, Homo sapiens
MDSLLPPSRFSYFKKYPLHAIRRYLSTLRNQRAEEQVARFQKIPNGENETMIPVLTSKKASELPVSEVASILQADLQNGLNKCEVSHRRAFHGWNEFDISEDEPLWKKYISQFKNPLIMLLLASAVISVLMHQFDDAVSITVAILIVVTVAFVQEYRSEKSLEELSKLVPPECHCVREGKLEHTLARDLVPGDTVCLSVGDRVPADLRLFEAVDLSIDESSLTGETTPCSKVTAPQPAATNGDLASRSNIAFMGTLVRCGKAKGVVIGTGENSEFGEVFKMMQAEEAPKTPLQKSMDLLGKQLSFYSFGIIGIIMLVGWLLGKDILEMFTISVSLAVAAIPEGLPIVVTVTLALGVMRMVKKRAIVKKLPIVETLGCCNVICSDKTGTLTKNEMTVTHIFTSDGLHAEVTGVGYNQFGEVIVDGDVVHGFYNPAVSRIVEAGCVCNDAVIRNNTLMGKPTEGALIALAMKMGLDGLQQDYIRKAEYPFSSEQKWMAVKCVHRTQQDRPEICFMKGAYEQVIKYCTTYQSKGQTLTLTQQQRDVYQQEKARMGSAGLRVLALASGPELGQLTFLGLVGIIDPPRTGVKEAVTTLIASGVSIKMITGDSQETAVAIASRLGLYSKTSQSVSGEEIDAMDVQQLSQIVPKVAVFYRASPRHKMKIIKSLQKNGSVVAMTGDGVNDAVALKAADIGVAMGQTGTDVCKEAADMILVDDDFQTIMSAIEEGKGIYNNIKNFVRFQLSTSIAALTLISLATLMNFPNPLNAMQILWINIIMDGPPAQSLGVEPVDKDVIRKPPRNWKDSILTKNLILKILVSSIIIVCGTLFVFWRELRDNVITPRDTTMTFTCFVFFDMFNALSSRSQTKSVFEIGLCSNRMFCYAVLGSIMGQLLVIYFPPLQKVFQTESLSILDLLFLLGLTSSVCIVAEIIKKVERSREKIQKHVWLWERSGQQLVEIHPHLETGLPLTEDVSCV

SEQ ID NO: 17036 - protein, 199 aa, Homo sapiens
MKSLLLLVLISICWADHLSDNYTLDHDRAIHIQAENGPHLLVEAEQAKVFSHRGGNVTLPCKFYRDPTAFGSGIHKIRIKWTKLTSDYLKEVDVFVSMGYHKKTYGGYQGRVFLKGGSDSDASLVITDLTLEDYGRYKCEVIEGLEDDTVVVALDLQGVVFPYFPRLGRYNLNFHEAQQACLDQDAVIASFDQLYDAWR

SEQ ID NO: 17037 - protein, 1091 aa, Homo sapiens
MSLQSAQYLRQAEVLKADMTDSKLGPAEVWTSRQALQDLYQKMLVTDLEYALDKKVEQDLWNHAFKNQITTLQGQAKNRANPNRSEVQANLSLFLEAASGFYTQLLQELCTVFNVDLPCRVKSSQLGIISNKQTHTSAIVKPQSSSCSYICQHCLVHLGDIARYRNQTSQAESYYRHAAQLVPSNGQPYNQLAILASSKGDHLTTIFYYCRSIAVKFPFPAASTNLQKALSKALESRDEVKTKWGVSDFIKAFIKFHGHVYLSKSLEKLSPLREKLEEQFKRLLFQKAFNSQQLVHVTVINLFQLHHLRDFSNETEQHTYSQDEQLCWTQLLALFMSFLGILCKCPLQNESQEESYNAYPLPAVKVSMDWLRLRPRVFQEAVVDERQYIWPWLISLLNSFHPHEEDLSSISATPLPEEFELQGFLALRPSFRNLDFSKGHQGITGDKEGQQRRIRQQRLISIGKWIADNQPRLIQCENEVGKLLFITEIPELILEDPSEAKENLILQETSVIESLAADGSPGLKSVLSTSRNLSNNCDTGEKPVVTFKENIKTREVNRDQGRSFPPKEVKSQTELRKTPVSEARKTPVTQTPTQASNSQFIPIHHPGAFPPLPSRPGFPPPTYVIPPPVAFSMGSGYTFPAGVSVPGTFLQPTAHSPAGNQVQAGKQSHIPYSQQRPSGPGPMNQGPQQSQPPSQQPLTSLPAQPTAQSTSQLQVQALTQQQQSPTKAVPALGKSPPHHSGFQQYQQADASKQLWNPPQVQGPLGKIMPVKQPYYLQTQDPIKLFEPSLQPPVMQQQPLEKKMKPFPMEPYNHNPSEVKVPEFYWDSSYSMADNRSVMAQQANIDRRGKRSPGVFRPEQDPVPRMPFEKSLLEKPSELMSHSSSFLSLTGFSLNQERYPNNSMFNEVYGKNLTSSSKAELSPSMAPQETSLYSLFEGTPWSPSLPASSDHSTPASQSPHSSNPSSLPSSPPTHNHNSVPFSNFGPIGTPDNRDRRTADRWKTDKPAMGGFGIDYLSATSSSESSWHQASTPSGTWTGHGPSMEDSSAVLMESLKSIWSSSMMHPGPSALEQLLMQQKQKQQRGQGTMNPPH

SEQ ID NO: 17038 - protein, 1232 aa, Homo sapiens
MSLLQSALDFLAGPGSLGGASGRDQSDFVGQTVELGELRLRVRRVLAEGQLVEFLKKMESRGPLSCDTVLKIFYQTCRAVQHMHRQKPPIIHRDLKVENLLLSNQGTIKLCDFGSATTISHYPDYSWSAQRRALVEEEITRNTTPMYRTPEIIDLYSNFPIGEKQDIWALGCILYLLCFRQHPFEDGAKLRIVNGKYSIPPHDTQYTVFHSLIRAMLQVNPEERLSIAEVVHQLQEIAAARNVNPKSPITELLEQNGGYGSATLSRGPPPPVGPAGSGYSGGLALAEYDQPYGGFLDILRGGTERLFTNLKDTSSKVIQSVANYAKGDLDISYITSRIAVMSFPAEGVESALKNNIEDVRLFLDSKHPGHYAVYNLSPRTYRPSRFHNRVSECGWAARRAPHLHTLYNICRNMHAWLRQDHKNVCVVHCMDGRAASAVAVCSFLCFCRLFSTAEAAVYMFSMKRCPPGIWPSHKRYIEYMCDMVAEEPITPHSKPILVRAVVMTPVPLFSKQRSGCRPFCEVYVGDERVASTSQEYDKMRDFKIEDGKAVIPLGVTVQGDVLIVIYHARSTLGGRLQAKMASMKMFQIQFHTGFVPRNATTVKFAKYDLDACDIQEKYPDLFQVNLEVEVEPRDRPSREAPPWENSSMRGLNPKILFSSREEQQDILSKFGKPELPRQPGSTAQYDAGAGSPEAEPTDSDSPPSSSADASRFLHTLDWQEEKEAETGAENASSKESESALMEDRDESEVSDEGGSPISSEGQEPRADPEPPGLAAGLVQQDLVFEVETPAVLPEPVPQEDGVDLLGLHSEVGAGPAVPPQACKAPSSNTDLLSCLLGPPEAASQGPPEDLLSEDPLLLASPAPPLSVQSTPRGGPPAAADPFGPLLPSSGNNSQPCSNPDLFGEFLNSDSVTVPPSFPSAHSAPPPSCSADFLHLGDLPGEPSKMTASSSNPDLLGGWAAWTETAASAVAPTPATEGPLFSPGGQPAPCGSQASWTKSQNPDPFADLGDLSSGLQGSPAGFPPGGFIPKTATTPKGSSSWQTSRPPAQGASWPPQAKPPPKACTQPRPNYASNFSVIGAREERGVRAPSFAQKPKVSENDFEDLLSNQGFSSRSDKKGPKTIAEMRKQDLAKDTDPLKLKLLDWIEGKERNIRALLSTLHTVLWDGESRWTPVGMADLVAPEQVKKHYRRAVLAVHPDKAAGQPYEQHAKMIFMELNDAWSEFENQGSRPLF

SEQ ID NO: 17039 - protein, 655 aa, Homo sapiens
MFINIKSILWMCSTLIVTHALHKVKVGKSPPVRGSLSGKVSLPCHFSTMPTLPPSYNTSEFLRIKWSKIEVDKNGKDLKETTVLVAQNGNIKIGQDYKGRVSVPTHPEAVGDASLTVVKLLASDAGLYRCDVMYGIEDTQDTVSLTVDGVVFHYRAATSRYTLNFEAAQKACLDVGAVIATPEQLFAAYEDGFEQCDAGWLADQTVRYPIRAPRVGCYGDKMGKAGVRTYGFRSPQETYDVYCYVDHLDGDVFHLTVPSKFTFEEAAKECENQDARLATVGELQAAWRNGFDQCDYGWLSDASVRHPVTVARAQCGGGLLGVRTLYRFENQTGFPPPDSRFDAYCFKRPDRCKMNPCLNGGTCYPTETSYVCTCVPGYSGDQCELDFDECHSNPCRNGATCVDGFNTFRCLCLPSYVGALCEQDTETCDYGWHKFQGQCYKYFAHRRTWDAAERECRLQGAHLTSILSHEEQMFVNRVGHDYQWIGLNDKMFEHDFRWTDGSTLQYENWRPNQPDSFFSAGEDCVVIIWHENGQWNDVPCNYHLTYTCKKGTVACGQPPVVENAKTFGKMKPRYEINSLIRYHCKDGFIQRHLPTIRCLGNGRWAIPKITCMNPSAYQRTYSMKYFKNSSSAKDNSINTSKHDHRWSRRWQESRR

SEQ ID NO: 17040 - protein, 804 aa, Homo sapiens
MKVRLLRQLSAAAKVKAPSGLQGPPQAHQFISLLLEEYGALCQAARSISTFLGTLENEHLKKFQVTWELHNKHLFENLVFSEPLLQSNLPALVSQIRLGTTTHDTCSEDTYSTLLQRYQRSEEELRRVAEEWLECQKRIDAYVDEQMTMKTKQRMLTEDWELFKQRRFIEEQLTNKKAVTGENNFTDTMRHMLSSRLSMPDCPNCNYRRRCACDDCSLSHILTCGIMDPPVTDDIHIHQLPLQVDPAPDYLAERSPPSVSSASSGSGSSSPITIQQHPRLILTDSGSAPTFCSDDEDVAPLSAKFADIYPLSNYDDTEVVANMNGIHSELNGGGENMALKDESPQISSTSSSSSEADDEEADGESSGEPPGAPKEDGVLGSRSPRTEESKADSPPPSYPTQQAEQAPNTCECHVCKQEASGLTPSAMTAGALPPGHQFLSPEKPTHPALHLYPHIHGHVPLHTVPHLPRPLIHPTLYATPPFTHSKALPPAPVQNHTNKHQVFNASLQDHIYPSCFGNTPEWNSSKFISLWGSEVMNDKNWNPGTFLPDTISGSEILGPTLSETRPEALPPPSSNETPAVSDSKEKKNAAKKKCLYNFQDAFMEANKVVMATSSATSSVSCTATTVQSSNSQFRVSSKRPPSVGDVFHGISKEDHRHSAPAAPRNSPTGLAPLPALSPAALSPAALSPASTPHLANLAAPSFPKTATTTPGFVDTRKSFCPAPLPPATDGSISAPPSVCSDPDCEGHRCENGVYDPQQDDGDESADEDSCSEHSSSTSTSTNQKEGKYCDCCYCEFFGHGGVSA

SEQ ID NO: 17041 - protein, 1528 aa, Homo sapiens
MWPSQLLIFMMLLAPIIHGGKHSERHPALAAPLRHAERSPGGALPPRHLLQQPAAERTAAHRGQGPRGATRGVRGPGAQGAQIAAQAFSRAPIPMAVVRRELSCESYPIELRCPGTDVIMIESANYGRTDDKICDSDPAQMENIRCYLPDAYKIMSQRCNNRTQCAVVAGPDVFPDPCPGTYKYLEVQYECVPYKVEQKVFLCPGLLKGVYQSEHLFESDHQSGAWCKDPLQASDKIYYMPWTPYRTDTLTEYSSKDDFIAGRPTTTYKLPHRVDGTGFVVYDGALFFNKERTRNIVKFDLRTRIKSGEAIIANANYHDTSPYRWGGKSDIDLAVDENGLWVIYATEQNNGKIVISQLNPYTLRIEGTWDTAYDKRSASNAFMICGILYVVKSVYEDDDNEATGNKIDYIYNTDQSKDSLVDVPFPNSYQYIAAVDYNPRDNLLYVWNNYHVVKYSLDFGPLDSRSGQAHHGQVSYISPPIHLDSELERPSVKDISTTGPLGMGSTTTSTTLRTTTLSPGRSTTPSVSGRRNRSTSTPSPAVEVLDDMTTHLPSASSQIPALEESCEAVEAREIMWFKTRQGQIAKQPCPAGTIGVSTYLCLAPDGIWDPQGPDLSNCSSPWVNHITQKLKSGETAANIARELAEQTRNHLNAGDITYSVRAMDQLVGLLDVQLRNLTPGGKDSAARSLNKLQKRERSCRAYVQAMVETVNNLLQPQALNAWRDLTTSDQLRAATMLLHTVEESAFVLADNLLKTDIVRENTDNIKLEVARLSTEGNLEDLKFPENMGHGSTIQLSANTLKQNGRNGEIRVAFVLYNNLGPYLSTENASMKLGTEALSTNHSVIVNSPVITAAINKEFSNKVYLADPVVFTVKHIKQSEENFNPNCSFWSYSKRTMTGYWSTQGCRLLTTNKTHTTCSCNHLTNFAVLMAHVEVKHSDAVHDLLLDVITWVGILLSLVCLLICIFTFCFFRGLQSDRNTIHKNLCISLFVAELLFLIGINRTDQPIACAVFAALLHFFFLAAFTWMFLEGVQLYIMLVEVFESEHSRRKYFYLVGYGMPALIVAVSAAVDYRSYGTDKVCWLRLDTYFIWSFIGPATLIIMLNVIFLGIALYKMFHHTAILKPESGCLDNIKSWVIGAIALLCLLGLTWAFGLMYINESTVIMAYLFTIFNSLQGMFIFIFHCVLQKKVRKEYGKCLRTHCCSGKSTESSIGSGKTSGSRTPGRYSTGSQSRIRRMWNDTVRKQSESSFITGDINSSASLNREGLLNNARDTSVMDTLPLNGNHGNSYSIASGEYLSNCVQIIDRGYNHNETALEKKILKELTSNYIPSYLNNHERSSEQNRNLMNKLVNNLGSGREDDAIVLDDATSFNHEESLGLELIHEESDAPLLPPRVYSTENHQPHHYTRRRIPQDHSESFFPLLTNEHTEDLQSPHRDSLYTSMPTLAGVAATESVTTSTQTEPPPAKCGDAEDVYYKSMPNLGSRNHVHQLHTYYQLGRGSSDGFIVPPNKDGTPPEGSSKGPAHLVTSL

SEQ ID NO: 17042 - protein, 2752 aa, Homo sapiens
MASEVVCGLIFRLLLPICLAVACAFRYNGLSFVYLIYLLLIPLFSEPTKTTMQGHTGRLLKSLCFISLSFLLLHIIFHITLVSLEAQHRIAPGYNCSTWEKTFRQIGFESLKGADAGNGIRVFVPDIGMFIASLTIWLLCRNIVQKPVTDEAAQSNPEFENEELAEGEKIDSEEALIYEEDFNGGDGVEGELEESTKLKMFRRLASVASKLKEFIGNMITTAGKVVVTILLGSSGMMLPSLTSSVYFFVFLGLCTWWSWCRTFDPLLFSCLCVLLAIFTAGHLIGLYLYQFQFFQEAVPPNDYYARLFGIKSVIQTDCSSTWKIIVNPDLSWYHHANPILLLVMYYTLATLIRIWLQEPLVQDEGTKEEDKALACSPIQITAGRRRSLWYATHYPTDERKLLSMTQDDYKPSDGLLVTVNGNPVDYHTIHPSLPMENGPGKADLYSTPQYRWEPSDESSEKREEEEEEKEEFEEERSREEKRSIKVHAMVSVFQFIMKQSYICALIAMMAWSITYHSWLTFVLLIWSCTLWMIRNRRKYAMISSPFMVVYGNLLLILQYIWSFELPEIKKVPGFLEKKEPGELASKILFTITFWLLLRQHLTEQKALQEKEALLSEVKIGSQENEEKDEELQDIQVEGEPKEEEEEEAKEEKQERKKVEQEEAEEEDEQDIMKVLGNLVVAMFIKYWIYVCGGMFFFVSFEGKIVMYKIIYMVLFLFCVALYQVHYEWWRKILKYFWMSVVIYTMLVLIFIYTYQFENFPGLWQNMTGLKKEKLEDLGLKQFTVAELFTRIFIPTSFLLVCILHLHYFHDRFLELTDLKSIPSKEDNTIYRLAHPEGSLPDLTMMHLTASLEKPEVRKLAEPGEEKLEGYSEKAQKGDLGKDSEESEEDGEEEEESEEEEETSDLRNKWHLVIDRLTVLFLKFLEYFHKLQVFMWWILELHIIKIVSSYIIWVSVKEVSLFNYVFLISWAFALPYAKLRRLASSVCTVWTCVIIVCKMLYQLQTIKPENFSVNCSLPNENQTNIPFNELNKSLLYSAPIDPTEWVGLRKSSPLLVYLRNNLLMLAILAFEVTIYRHQEYYRGRNNLTAPVSRTIFHDITRLHLDDGLINCAKYFINYFFYKFGLETCFLMSVNVIGQRMDFYAMIHACWLIAVLYRRRRKAIAEIWPKYCCFLACIITFQYFICIGIPPAPCRDYPWRFKGASFNDNIIKWLYFPDFIVRPNPVFLVYDFMLLLCASLQRQIFEDENKAAVRIMAGDNVEICMNLDAASFSQHNPVPDFIHCRSYLDMSKVIIFSYLFWFVLTIIFITGTTRISIFCMGYLVACFYFLLFGGDLLLKPIKSILRYWDWLIAYNVFVITMKNILSIGACGYIGTLVHNSCWLIQAFSLACTVKGYQMPAANSPCTLPSGEAGIIWDSICFAFLLLQRRVFMSYYFLHVVADIKASQILASRGAELFQATIVKAVKARIEEEKKSMDQLKRQMDRIKARQQKYKKGKERMLSLTQEPGEGQDMQKLSEEDDEREADKQKAKGKKKQWWRPWVDHASMVRSGDYYLFETDSEEEEEEELKKEDEEPPRRSAFQFVYQAWITDPKTALRQRHKEKKRSAREERKRRRKGSKEGPVEWEDREDEPIKKKSDGPDNIIKRIFNILKFTWVLFLATVDSFTTWLNSISREHIDISTVLRIERCMLTREIKKGNVPTRESIHMYYQNHIMNLSRESGLDTIDEHPGAASGAQTAHRMDSLDSHDSISSEPTQCTMLYSRQGTTETIEEVEAEQEEEAGSTAPEPREAKEYEATGYDVGAMGAEEASLTPEEELTQFSTLDGDVEAPPSYSKAVSFEHLSFGSQDDSAGKNRMAVSPDDSRTDKLGSSILPPLTHELTASELLLKKMFHDDELEESEKFYVGQPRFLLLFYAMYNTLVARSEMVCYFVIILNHMVSASMITLLLPILIFLWAMLSVPRPSRRFWMMAIVYTEVAIVVKYFFQFGFFPWNKNVEVNKDKPYHPPNIIGVEKKEGYVLYDLIQLLALFFHRSILKCHGLWDEDDMTESGMAREESDDELSLGHGRRDSSDSLKSINLAASVESVHVTFPEQQTAVRRKRSGSSSEPSQRSSFSSNRSQRGSTSTRNSSQKGSSVLSIKQKGKRELYMEKLQEHLIKAKAFTIKKTLEIYVPIKQFFYNLIHPEYSAVTDVYVLMFLADTVDFIIIVFGFWAFGKHSAAADITSSLSEDQVPGPFLVMVLIQFGTMVVDRALYLRKTVLGKVIFQVILVFGIHFWMFFILPGVTERKFSQNLVAQLWYFVKCVYFGLSAYQIRCGYPTRVLGNFLTKSYNYVNLFLFQGFRLVPFLTELRAVMDWVWTDTTLSLSSWICVEDIYAHIFILKCWRESEKRYPQPRGQKKKKVVKYGMGGMIIVLLICIVWFPLLFMSLIKSVAGVINQPLDVSVTITLGGYQPIFTMSAQQSQLKVMDQQSFNKFIQAFSRDTGAMQFLENYEKEDITVAELEGNSNSLWTISPPSKQKMIHELLDPNSSFSVVFSWSIQRNLSLGAKSEIATDKLSFPLKNITRKNIAKMIAGNSTESSKTPVTIEKIYPYYVKAPSDSNSKPIKQLLSENNFMDITIILSRDNTTKYNSEWWVLNLTGNRIYNPNSQALELVVFNDKVSPPSLGFLAGYGIMGLYASVVLVIGKFVREFFSGISHSIMFEELPNVDRILKLCTDIFLVRETGELELEEDLYAKLIFLYRSPETMIKWTREKTN

SEQ ID NO: 17043 - protein, 1166 aa, Homo sapiens
MLLTLIILLPVVSKFSFVSLSAPQHWSCPEGTLAGNGNSTCVGPAPFLIFSHGNSIFRIDTEGTNYEQLVVDAGVSVIMDFHYNEKRIYWVDLERQLLQRVFLNGSRQERVCNIEKNVSGMAINWINEEVIWSNQQEGIITVTDMKGNNSHILLSALKYPANVAVDPVERFIFWSSEVAGSLYRADLDGVGVKALLETSEKITAVSLDVLDKRLFWIQYNREGSNSLICSCDYDGGSVHISKHPTQHNLFAMSLFGDRIFYSTWKMKTIWIANKHTGKDMVRINLHSSFVPLGELKVVHPLAQPKAEDDTWEPEQKLCKLRKGNCSSTVCGQDLQSHLCMCAEGYALSRDRKYCEDVNECAFWNHGCTLGCKNTPGSYYCTCPVGFVLLPDGKRCHQLVSCPRNVSECSHDCVLTSEGPLCFCPEGSVLERDGKTCSGCSSPDNGGCSQLCVPLSPVSWECDCFPGYDLQLDEKSCAASGPQPFLLFANSQDIRHMHFDGTDYGTLLSQQMGMVYALDHDPVENKIYFAHTALKWIERANMDGSQRERLIEEGVDVPEGLAVDWIGRRFYWTDRGKSLIGRSDLNGKRSKIITKENISQPRGIAVHPMAKRLFWTDTGINPRIESSSLQGLGRLVIASSDLIWPSGITIDFLTDKLYWCDAKQSVIEMANLDGSKRRRLTQNDVGHPFAVAVFEDYVWFSDWAMPSVMRVNKRTGKDRVRLQGSMLKPSSLVVVHPLAKPGADPCLYQNGGCEHICKKRLGTAWCSCREGFMKASDGKTCLALDGHQLLAGGEVDLKNQVTPLDILSKTRVSEDNITESQHMLVAEIMVSDQDDCAPVGCSMYARCISEGEDATCQCLKGFAGDGKLCSDIDECEMGVPVCPPASSKCINTEGGYVCRCSEGYQGDGIHCLDSTPPPHLREDDHHYSVRNSDSECPLSHDGYCLHDGVCMYIEALDKYACNCVVGYIGERCQYRDLKWWELRHAGHGQQQKVIVVAVCVVVLVMLLLLSLWGAHYYRTQKLLSKNPKNPYEESSRDVRSRRPADTEDGMSSCPQPWFVVIKEHQDLKNGGQPVAGEDGQAADGSMQPTSWRQEPQLCGMGTEQGCWIPVSSDKGSCPQVMERSFHMPSYGTQTLEGGVEKPHSLLSANPLWQQRALDPPHQMELTQ

SEQ ID NO: 17044 - protein, 311 aa, Homo sapiens
MVLELLGPSLEDLFDLCDRTFSLKTVLMIAIQLISRMEYVHSKNLIYRDVKPENFLIGRPGNKTQQVIHIIDFGLAKEYIDPETKKHIPYREHKSLTGTARYMSINTHLGKEQSRRDDLEALGHMFMYFLRGSLPWQGLKADTLKERYQKIGDTKRATPIEVLCENFPEEMATYLRYVRRLDFFEKPDYDYLRKLFTDLFDRKGYMFDYEYDWIGKQLPTPVGAVQQDPALSSNREAHQHRDKMQQSKNQVVSSTNGELNTDDPTAGRSNAPITAPTEVEVMDETNCQKVLNMWCCCFFKRRKRKTIQRHK

SEQ ID NO: 17045 - protein, 159 aa, Homo sapiens
MFPPSGHQDVSERRLDTQRPQVTMWERDVSSDRQEPGRRGRSWGLEGSQALSQQAEVIVRQLQELRRLEEEVRLLRETSLQQKMRLEAQAMELEALARAEKAGRAEAEGLRAALAGAEVVRKNLEEGSQRELEEVQRLHQEQLSSLTQAHEEALSSLTS

SEQ ID NO: 17046 - protein, 449 aa, Homo sapiens
MIPGIGTLTQDTLWCFSQVKGTIEIGTTEADIISTVEFNHTGELLATGDKGGRVVIFQREQESKNQVHRRGEYNVYSTFQSHEPEFDYLKSLEIEEKINKIRWLPQQNAAYFLLSTNDKTVKLWKVSERDKRPEGYNLKDEEGRLRDPATITTLRVPVLRPMDLMVEATPRRVFANAHTYHINSISVNSDYETYMSADDLRINLWNFEITNQSFNIVDIKPANMEELTEVITAAEFHPHHCNTFVYSSSKGTIRLCDMRASALCDRHTKFFEEPEDPSNRSFFSEIISSISDVKFSHSGRYIMTRDYLTVKVWDLNMENRPIETYQVHDYLRSKLCSLYENDCIFDKFECVWNGSDSVIMTGSYNNFFRMFDRNTKRDVTLEASRENSKPRAILKPRKVCVGGKRRKDEISVDSLDFSKKILHTAWHPSENIIAVAATNNLYIFQDKVN

SEQ ID NO: 17047 - protein, 799 aa, Homo sapiens
MSKKGRNKGEKPEALIVALQAANEDLRTKLTDIQIELHQEKSKVSKLEREKTQEAKRIRELEQRKHTVLVTELKAKLHEEKMKELQAVRENLIKQHEQEMSRTVKVRDGEIQRLKSALCALRDGSSDKVRTALTIEAREEARKLFDTERLKLLQEIADLKTAKKQVDEALSNMIQADKIKAGDLRSEHQSHQEAISKIKWESERDIRRLMDEIKAKDRIIFSLEKELETQTGYVQKLQLQKEALDEQLFLVKEAECNMSSPKREIPGRAGDGSEHCSSPDLRRNQKRIAELNATIRKLEDRNTLLGDERNELLKRVRETEKQCKPLLERNKCLAKRNDELMVSLQRMEEKLKAVTKENSEMREKITSHPPLKKLKSLNDLDQANEEQETEFLKLQVIEQQNIIDELTRDREKLIRRRKHRRSSKPIKRPVLDPFIGYDEDSMDSETSSMASFRTDRTPATPDDDLDESLAAEESELRFRQLTKEYQALQRAYALLQEQTGGIIDAEREAKAQEQLQAEVLRYKAKIEDLEATLAQKGQIEKQEAENHRLQQELQDARDQNELLEFRNLELEERERRSPPFNLQIHPFSDGVSALQIYCMKEGVKDVNIPDLIKQLDILGDNGNLRNEEQVAIIQASTVLSLAEKWIQQIEGAEAALHQKMMELESDMEQFCKIKGYLEEELDYRKQALDQAYMRIQELEATLYNALQQETVIKFGELLSEKQQEELRTAVEKLRRQMLRKSREYDCQILQERMELLQQAHQRIRDLEDKTDIQKRQIKDLEEKFLFLFLFFSLAFILWP

SEQ ID NO: 17048 - protein, 1177 aa, Homo sapiens
MRSKARARKLAKSDGDVVNNMYEPNRDLLASHSAEDEAEDSAMSPIPVGPPSPFPTSEDFTPKEGSPYEAPVYIPEDIPIPADFELRESSIPGAGLGVWAKRKMEAGERLGPCVVVPRAAAKETDFGWEQILTDVEVSPQEGCITKQISEDLGSEKFCVDANQAGAGSWLKYIRVACSCDDQNLTMCQISEQIYYKVIKDIEPGEELLVHVKEGVYPLGTVPPGLDEEPTFRCDECDELFQSKLDLRRHKKYTCGSVGAALYEGLAEELKPEGLGGGSGQAHECKDCERMFPNKYSLEQHMVIHTEEREYKCDQCPKAFNWKSNLIRHQMSHDSGKRFECENCVKVFTDPSNLQRHIRSQHVGARAHACPDCGKTFATSSGLKQHKHIHSTVKPFICEVCHKSYTQFSNLCRHKRMHADCRTQIKCKDCGQMFSTTSSLNKHRRFCEGKNHYTPGGIFAPGLPLTPSPMMDKAKPSPSLNHASLGFNEYFPSRPHPGSLPFSTAPPTFPALTPGFPGIFPPSLYPRPPLLPPTSLLKSPLNHTQDAKLPSPLGNPALPLVSAVSNSSQGTTAAAGPEEKFESRLEDSCVEKLKTRSSDMSDGSDFEDVNTTTGTDLDTTTGTGSDLDSDVDSDPDKDKGKGKSAEGQPKFGGGLAPPGAPNSVAEVPVFYSQHSFFPPPDEQLLTATGAAGDSIKAIASIAEKYFGPGFMGMQEKKLGSLPYHSAFPFQFLPNFPHSLYPFTDRALAHNLLVKAEPKSPRDALKVGGPSAECPFDLTTKPKDVKPILPMPKGPSAPASGEEQPLDLSIGSRARASQNGGGREPRKNHVYGERKLGAGEGLPQVCPARMPQQPPLHYAKPSPFFMDPIYRVEKRKVTDPVGALKEKYLRPSPLLFHPQMSAIETMTEKLESFAAMKADSGSSLQPLPHHPFNFRSPPPTLSDPILRKGKERYTCRYCGKIFPRSANLTRHLRTHTGEQPYRCKYCDRSFSISSNLQRHVRNIHNKEKPFKCHLCNRCFGQQTNLDRHLKKHEHENAPVSQHPGVLTNHLGTSASSPTSESDNHALLDEKEDSYFSEIRNFIANSEMNQASTRTEKRADMQIVDGSAQCPGLASEKQEDVEEEDDDDLEEDDEDSLAGKSQDDTVSPAPEPQAAYEDEEDEEPAASLAVGFDHTRRHMQ

SEQ ID NO: 17049 - protein, 168 aa, Homo sapiens
MADEKPSNGVLVHMVKLLIKTFLDGIFDDLMENNVLNTDEIHLIGKCLKFVVSNAENLVDDITETAQIAGKIFREHLWNSKKQLSSAFLEIQGAQPSGKLKLCPHAHFHELKTKRADEIYPVMEKERRTCLASTSATKNSTIFIIEMVLNLTFWGCEIYLKTLDTQWL

SEQ ID NO: 17050 - protein, 483 aa, Homo sapiens
MLNNLLLFSLQISLIGTTLGGNVLIWPMEGSHWLNVKIIIDELIKKEHNVTVLVASGALFITPTSNPSLTFEIYKVPFGKERIEGVIKDFVLTWLENRPSPSTIWRFYQEMAKVIKDFHMVSQEICDGVLKNQQLMAKLKKSKFEVLVSDPVFPCGDIVALKLGIPFMYSLRFSPASTVEKHCGKVPYPPSYVPAVLSELTDQMSFTDRIRNFISYHLQDYMFETLWKSWDSYYSKALGRPTTLCETMGKAEIWLIRTYWDFEFPRPYLPNFEFVGGLHCKPAKPLPKVLWRYKGKKPATLGNNTQLFDWIPQNDLLGHPKTKAFITHGGTNGIYEAIYHGVPMVGVPMFADQPDNIAHMKAKGAAVEVNLNTMTSVDLLSALRTVINEPSYKENAMRLSRIHHDQPVKPLDRAVFWIEFVMRHKGAKHLRVAAHDLTWFQYHSLDVIGFLLVCVTTAIFLVIQCCLFSCQKFGKIGKKKKRE

SEQ ID NO: 17051 - protein, 734 aa, Homo sapiens
MAECGASGSGSSGDSLDKSITLPPDEIFRNLENAKRFAIDIGGSLTKLAYYSTVQHKVAKVRSFDHSGKDTEREHEPPYEISVQEEITARLHFIKFENTYIEACLDFIKDHLVNTETKVIQATGGGAFVYQKDSDPEFRFQTNHPHIFPYLLVNIGSGVSIVKVETEDRFEWVGGSSIGGGTFWGLGALLTKTKKFDELLHLASRGQHSNVDMLVRDVYGGAHQTLGLSGNLIASSFGKSATADQEFSKEDMAKSLLHMISNDIGQLACLHARLHSLDRVYFGGFFIRGHPVTMRTITYSINFFSKGEVQALFLRHEGYLGAIGAFLKGAEQDNPNQYSWGENYAGSSGLMSASPELGPAQRARSGTFDLLEMDRLERPLVDLPLLLDPPSYVPDTVDLTDDALARKYWLTCFEEALDGVVKRAVASQPDSVDAAERAEKFRQKYWNKLQTLRQQPFAYGTLTVRSLLDTREHCLNEFNFPDPYSKVKQRENGVALRCFPGVVRSLDALGWEERQLALVKGLLAGNVFDWGAKAVSAVLESDPYFGFEEAKRKLQERPWLVDSYSEWLQRLKGPPHKCALIFADNSGIDIILGVFPFVRELLLRGTEVILACNSGPALNDVTHSESLIVAERIAGMDPVVHSALQEERLLLVQTGSSSPCLDLSRLDKGLAALVRERGADLVVIEGMGRAVHTNYHAALRCESLKLAVIKNAWLAERLGGRLFSVIFKYEVPAE

SEQ ID NO: 17052 - protein, 770 aa, Homo sapiens
MVNCHLKIGNTKDIIMIYEEDAEEWALYLTEVFLHVVKREAILLYRLENFSFRHLELLNLTSYKCKLLILSNSLLRDLTPKKCQFLEKILHSPKSVVTLLCGVKSSDQLYELLNISQSRWEISTEQEPEDYISVIQSIIFKDSEDYFEVNIPTDLRAKHSGEISERKEIEELSEASRNTIPLAVVLPTEIPCENPGEIFIILRDEVIGDTVEVEFTSSNKRIRTRPALWNKKVWCMKALEFPAGSVHVNVYCDGIVKATTKIKYYPTAKAKECLFRMADSGESLCQNSIEELDGVLTSIFKHEIPYYEFQSLQTEICSQNKYTHFKELPTLLHCAAKFGLKNLAIHLLQCSGATWASKMKNMEGSDPAHIAERHGHKELKKIFEDFSIQEIDINNEQENDYEEDIASFSTYIPSTQNPAFHHESRKTYGQSADGAEANEMEGEGKQNGSGMETKHSPLEVGSESSEDQYDDLYVFIPGADPENNSQEPLMSSRPPLPPPRPVANAFQLERPHFTLPGTMVEGQMERSQNWGHPGVRQETGDEPKGEKEKKEEEKEQEEEEDPYTFAEIDDSEYDMILANLSIKKKTGSRSFIINRPPAPTPRPTSIPPKEETTPYIAQVFQQKTARRQSDDDKFCGLPKKQDRARIESPAFSTLRGCLTDGQEELILLQEKVKNGKMSMDEALEKFKHWQMGKSGLEMIQQEKLRQLRDCIIGKRPEEENVYNKLTIVHHPGGKETAHNENKFYNVHFSNKLPARPQVEKEFGFCCKKDH

SEQ ID NO: 17053 - protein, 329 aa, Homo sapiens
CGNNYFQMTSCILSGSIQTTPQVSAGGSEAKPLIFTFVPTVRRLPTHTQLADTSKFLVKIPEESSDKSPETVNRSKSNDYLTLNAGSQQERDQAKLTCPSEVSGTILQEREFEANKLQGMQQSDLFKAEYVLIVDSEGEDEAASRKVEQGPPGGIGTAAVRPKSLAISSSLVSDVVRPKTQGTDLKTSSHPEMLHGMAPQQKHGQALDEPAKTESVSKDNTLEPPVETPTTLPRAAGRETKYANLSSPSSTVSESQLTKPGVIRPVPVKSRILLKKEEEVYEPNPFSKYLEDNSDLFSEQDVTVPPKPVSLHPLYQTKLYPPAKSLLHP

SEQ ID NO: 17054 - protein, 195 aa, Homo sapiens
MSSIKHLVYAVIRFLREQSQMDTYTSDEQESLEVAIQCLETVFKISPEDTHLAVSQPLTEMFTSSFCKNDVLPLSNSVPEDVGKADQLKDEGNNHMKEENYAAAVDCYTQAIELDPNNAVYYCNRAAAQSKLGHYTDAIKDCEKAIAIDSKYSKAYGRMGLALTALNKFEEAVTSYQKALDLDPENDSYKSNLKI

SEQ ID NO: 17055 - protein, 1377 aa, Homo sapiens
MHFPSEAFSLSWHSGCNTSDVCVQWCPLSRHCSTEKSSSIGSMESLEQPGQATYESHLLPIDQNMYPNQRDSAYSSFSASSNASDCALSLRPEEPASTDCIMQGPGPTKAPSGRPNVAETSGGSRRTNGGHLTPSSQMSSRPQEGYQSGPAKAVRGPPQPPVRRDSLQASRAQLLNGEQRRASEPVVPLPQKEKLSLEPVLPARNPNRFCCLSGHDQVTSEGHQNCEFSQPPESSQQGSEHLLMQASTKAVGSPKACDRASSVDSNPLNEASAELAKASFGRPPHLIGPTGHRHSAPEQLLASHLQHVHLDTRGSKGMELPPVQDGHQWTLSPLHSSHKGKKSPCPPTGGTHDQSSKERKTRQVDDRSLVLGHQSQSSPPHGEADGHPSEKGFLDPNRTSRAASELANQQPSASGSLVQQATDCSSTTKAASGTEAGEEGDSEPKECSRMGGRRSGGTRGRSIQNRRKSERFATNLRNEIQRRKAQLQKSKGPLSQLCDTKEPVEETQEPPESPPLTASNTSLLSSCKKPPSPRDKLFNKSMMLRARSSECLSQAPESHESRTGLEGRISPGQRPGQSSLGLNTWWKAPDPSSSDPEKAHAHCGVRGGHWRWSPEHNSQPLVAAAMEGPSNPGDNKELKASTAQAGEDAILLPFADRRKFFEESSKSLSTSHLPGLTTHSNKTFTQRPKPIDQNFQPMSSSCRELRRHPMDQSYHSADQPYHATDQSYHSMSPLQSETPTYSECFASKGLENSMCCKPLHCGDFDYHRTCSYSCSVQGALVHDPCIYCSGEICPALLKRNMMPNCYNCRCHHHQCIRCSVCYHNPQHSALEDSSLAPGNTWKPRKLTVQEFPGDKWNPITGNRKTSQSGREMAHSKTSFSWATPFHPCLENPALDLSSYRAISSLDLLGDFKHALKKSEETSVYEEGSSLASMPHPLRSRAFSESHISLAPQSTRAWGQHRRELFSKGDETQSDLLGARKKAFPPPRPPPPNWEKYRLFRAAQQQKQQQQQQKQQEEEEEEEEEEEEEEEEEEEEAEEEEEELPPQYFSSETSGSCALNPEEVLEQPQPLSFGHLEGSRQGSQSVPAEQESFALHSSDFLPPIRGHLGSQPEQAQPPCYYGIGGLWRTSGQEATESAKQEFQHFSPPSGAPGIPTSYSAYYNISVAKAELLNKLKDQPEMAEIGLGEEEVDHELAQKKIQLIESISRKLSVLREAQRGLLEDINANSALGEEVEANLKAVCKSNEFEKYHLFVGDLDKVVNLLLSLSGRLARVENALNSIDSEANQEKLVLIEKKQQLTGQLADAKELKEHVDRREKLVFGMVSRYLPQDQLQDYQHFVKMKSALIIEQRELEEKIKLGEEQLKCLRESLLLGPSNF

SEQ ID NO: 17056 - protein, 290 aa, Homo sapiens
METNCRKLVSACVQLGVQPAAVECLFSKDSEIKKVEFTDSPESRKEAASSKFFPRQHPGANEKDKSQQGKNEDVGAEDPSKKKRQRRQRTHFTSQQLQELEATFQRNRYPDMSTREEIAVWTNLTEARVRVWFKNRRAKWRKRERNQQAELCKNGFGPQFNGLMQPYDDMYPGYSYNNWAAKGLTSASLSTKSFPFFNSMNVNPLSSQSMFSPPNSISSMSMSSSMVPSAVTGVPGSSLNSLNNLNNLSSPSLNSAVPTPACPYAPPTPPYVYRDTCNSSLASLRLKAKQ

SEQ ID NO: 17057 - protein, 158 aa, Homo sapiens
MKRTTVCSCRCSKKAPRLSRLSRQMVPQLQLPEPPALSVMYSYLHSRKIKILEIFHKVGQGENQRITREEFIAAVKAVGVPLKNQEVEDIVIYLSSLGKHNTITMDILANTYKQWSMAQQRSSLATAREHYILAKHRDSLKGPLKKQEVDSAPQLPKV

SEQ ID NO: 17058 - protein, 1067 aa, Homo sapiens
MKLKEVDRTAMQAWSPAQNHPIYLATGTSAQQLDATFSTNASLEIFELDLSDPSLDMKSCATFSSSHRYHKLIWGPYKMDSKGDVSGVLIAGGENGNIILYDPSKIIAGDKEVVIAQNDKHTGPVRALDVNIFQTNLVASGANESEIYIWDLNNFATPMTPGAKTQPPEDISCIAWNRQVQHILASASPSGRATVWDLRKNEPIIKVSDHSNRMHCSGLAWHPDVATQMVLASEDDRLPVIQMWDLRFASSPLRVLENHARGILAIAWSMADPELLLSCGKDAKILCSNPNTGEVLYELPTNTQWCFDIQWCPRNPAVLSAASFDGRISVYSIMGGSTDGLRQKQVDKLSSSFGNLDPFGTGQPLPPLQIPQQTAQHSIVLPLKKPPKWIRRPVGASFSFGGKLVTFENVRMPSHQGAEQQQQQHHVFISQVVTEKEFLSRSDQLQQAVQSQGFINYCQKKIDASQTEFEKNVWSFLKVNFEDDSRGKYLELLGYRKEDLGKKHIKEEKEESEFLPSSGGTFNISVSGDIDGLITQALLTGNFESAVDLCLHDNRMADAIILAIAGGQELLARTQKKYFAKSQSKITRLITAVVMKNWKEIVESCDLKNWREALAAVLTYAKPDEFSALCDLLGTRLENEGDSLLQTQACLCYICAGNVEKLVACWTKAQDGSHPLSLQDLIEKVVILRKAVQLTQAMDTSTVGVLLAAKMSQYANLLAAQGSIAAALAFLPDNTNQPNIMQLRDRLCRAQGEPVAGHESPKIPYEKQQLPKGRPGPVAGHHQMPRVQTQQYYPHGENPPPPGFIMHGNVNPNAAGQLPTSPGHMHTQVPPYPQPQRPQNGWNDPPALNRVPKKKKMPENFMPPVPITSPIMNPLGDPQSQMLQQQPSAPVPLSSQSSFPQPHLPGGQPFHGVQQPLGQTGMPPSFSKPNIEGAPGAPIGNTFQHVQSLPTKKITKKPIPDEHLILKTTFEDLIQRCLSSATDPQTKRKLDDASKRLEFLYDKLREQTLSPTITSGLHNIARSIETRNYSEGLTMHTHIVSTSNFSETSAFMPVLKVVLTQANKLGV

SEQ ID NO: 17059 - protein, 1193 aa, Homo sapiens
MTRSSKDNKFQVITGQRVFVFRTESEAQRDMWCSTLQSCLKEQRLLGHPRPPQPPRPLRTGMLELRGHKAKVFAALSPGELALYKSEQAFSLGIGICFIELQGCSVRETKSRSFDLLTPHRCFSFTAESGGARQSWAAALQEAVTETLSDYEVAEKIWSNRANRQCADCGSSRPDWAAVNLGVVICKQCAGQHRALGSGISKVQSLKLDTSVWSNEIVQLFIVLGNDRANRFWAGTLPPGEGLHPDATPGPRGEFISRKYRLGLFRKPHPQYPDHSQLLQALCAAVARPNLLKNMTQLLCVEAFEGEEPWFPPAPDGSCPGLLPSDPSPGVYNEVVVRATYSGFLYCSPVSNKAGPSPPRRGRDAPPRLWCVLGAALEMFASENSPEPLSLIQPQDIVCLGVSPPPTDPGDRFPFSFELILAGGRIQHFGTDGADSLEAWTSAVGKWFSPLSCHQLLGPGLLRLGRLWLRSPSHTAPAPGLWLSGFGLLRGDHLFLCSAPGPGPPAPEDMVHLRRLQEISVVSAADTPDKKEHLVLVETGRTLYLQGEGRLDFTAWNAAIGGAAGGGGTGLQEQQMSRGDIPIIVDACISFVTQHGLRLEGVYRKGGARARSLRLLAEFRRDARSVKLRPGEHFVEDVTDTLKRFFRELDDPVTSARLLPRWREAAELPQKNQRLEKYKDVIGCLPRVNRRTLATLIGHLYRVQKCAALNQMCTRNLALLFAPSVFQTDGRGEHEVRVLQELIDGYISVFDIDSDQVAQIDLEVSLITTWKDVQLSQAGDLIMEVYIEQQLPDNCVTLKVSPTLTAEELTNQVLEMRGTAAGMDLWVTFEIREHGELERPLHPKEKVLEQALQWCQLPEPCSASLLLKKVPLAQAGCLFTGIRRESPRVGLLRCREEPPRLLGSRFQERFFLLRGRCLLLLKEKKSSKPEREWPLEGAKVYLGIRKKLKPPTPWGFTLILEKMHLYLSCTDEDEMWDWTTSILKAQHDDQQPVVLRRHSSSDLARQKFGTMPLLPIRGDDSGATLLSANQTLPMKSSQGSVEEQEELEEPVYEEPVYEEVGAFPELIQDTSTSFSTTREWTVKPENPLTSQKSLDQPFLSKSSTLGQEERPPEPPPGPPSKSSPQARGSLEEQLLQELSSLILRKGETTAGLGSPSQPSSPQSPSPTGLPTQTPGFPTQPPCTSSPPSSQPLT

SEQ ID NO: 17060 - protein, 1342 aa, Homo sapiens
MWPSQLLIFMMLLAPIIHGGKHSERHPALAAPLRHAERSPGGALPPRHLLQQPAAERTAAHRGQGPRGATRGVRGPGAQGAQIAAQAFSRAPIPMAVVRRELSCESYPIELRCPGTDVIMIESANYGRTDDKICDSDPAQMENIRCYLPDAYKIMSQRCNNRTQCAVVAGPDVFPDPCPGTYKYLEVQYECVPYKVEQKVFLCPGLLKGVYQSEHLFESDHQSGAWCKDPLQASDKIYYMPWTPYRTDTLTEYSSKDDFIAGRPTTTYKLPHRVDGTGFVVYDGALFFNKERTRNIVKFDLRTRIKSGEAIIANANYHDTSPYRWGGKSDIDLAVDENGLWVIYATEQNNGKIVISQLNPYTLRIEGTWDTAYDKRSASNAFMICGILYVVKSVYEDDDNEATGNKIDYIYNTDQSKDSLVDVPFPNSYQYIAAVDYNPRDNLLYVWNNYHVVKYSLDFGPLDSRSGQAHHGQVSYISPPIHLDSELERPSVKDISTTGPLGMGSTTTSTTLRTTTLSPGRSTTPSVSGRRNRSTSTPSPAVEVLDDMTTHLPSASSQIPALEESCEAVEAREIMWFKTRQGQIAKQPCPAGTIGVSTYLCLAPDGIWDPQGPDLSNCSSPWVNHITQKLKSGETAANIARELAEQTRNHLNAGDITYSVRAMDQLVGLLDVQLRNLTPGGKDSAARSLNKLQKRERSCRAYVQAMVETVNNLLQPQALNAWRDLTTSDQLRAATMLLHTVEESAFVLADNLLKTDIVRENTDNIKLEVARLSTEGNLEDLKFPENMGHGSTIQLSANTLKQNGRNGEIRVAFVLYNNLGPYLSTENASMKLGTEALSTNHSVIVNSPVITAAINKEFSNKVYLADPVVFTVKHIKQSEENFNPNCSFWSYSKRTMTGYWSTQGCRLLTTNKTHTTCSCNHLTNFAVLMAHVEVKHSDAVHDLLLDVITWVGILLSLVCLLICIFTFCFFRGLQSDRNTIHKNLCISLFVAELLFLIGINRTDQPIACAVFAALLHFFFLAAFTWMFLEGVQLYIMLVEVFESEHSRRKYFYLVGYGMPALIVAVSAAVDYRSYGTDKVCWLRLDTYFIWSFIGPATLIIMLNVIFLGIALYKMFHHTAILKPESGCLDNIKSWVIGAIALLCLLGLTWAFGLMYINESTVIMAYLFTIFNSLQGMFIFIFHCVLQKKVRKEYGKCLRTHCCSGKSTESSIGSGKTSGSRTPGRYSTGSQSRIRRMWNDTVRKQSESSFITGDINSSASLNRGAMANHLISNALLRPHGTNNPYNTLLGEPAVCNNPSVSMYNAQEPYRETSMGVKLNIAYQIGASEQCQGYKCHGYSTTEW

SEQ ID NO: 17061 - protein, 988 aa, Homo sapiens
METKGYHSLPEGLDMERRWGQVSQAVERSSLGPTERTDENNYMEIVNVSCVSGAIPNNSTQGSSKEKQELLPCLQQDNNRPGILTSDIKTELESKELSATVAESMGLYMDSVRDADYSYEQQNQQGSMSPAKIYQNVEQLVKFYKGNGHRPSTLSCVNTPLRSFMSDSGSSVNGGVMRAVVKSPIMCHEKSPSVCSPLNMTSSVCSPAGINSVSSTTASFGSFPVHSPITQGTPLTCSPNVENRGSRSHSPAHASNVGSPLSSPLSSMKSSISSPPSHCSVKSPVSSPNNVTLRSSVSSPANINNSRCSVSSPSNTNNRSTLSSPAASTVGSICSPVNNAFSYTASGTSAGSSTLRDVVPSPDTQEKGAQEVPFPKTEEVESAISNGVTGQLNIVQYIKPEPDGAFSSSCLGGNSKINSDSSFSVPIKQESTKHSCSGTSFKGNPTVNPFPFMDGSYFSFMDDKDYYSLSGILGPPVPGFDGNCEGSGFPVGIKQEPDDGSYYPEASIPSSAIVGVNSGGQSFHYRIGAQGTISLSRSARDQSFQHLSSFPPVNTLVESWKSHGDLSSRRSDGYPVLEYIPENVSSSTLRSVSTGSSRPSKICLVCGDEASGCHYGVVTCGSCKVFFKRAVEGKCSWQHNYLCAGRNDCIIDKIRRKNCPACRLQKCLQAGMNLGARKSKKLGKLKGIHEEQPQQQQPPPPPPPPQSPEEGTTYIAPAKEPSVNTALVPQLSTISRALTPSPVMVLENIEPEIVYAGYDSSKPDTAENLLSTLNRLAGKQMIQVVKWAKVLPGFKNLPLEDQITLIQYSWMCLSSFALSWRSYKHTNSQFLYFAPDLVFNEEKMHQSAMYELCQGMHQISLQFVRLQLTFEEYTIMKVLLLLSTIPKDGLKSQAAFEEMRTNYIKELRKMVTKCPNNSGQSWQRFYQLTKLLDSMHDLVSDLLEFCFYTFRESHALKVEFPAMLVEIISDQLPKVESGNAKPLYFHRK

SEQ ID NO: 17062 - protein, 476 aa, Homo sapiens
MVMASVMQKIIPHYSLARWLLCNGSLRWYQHPTEEELRILAGKQQKGKTKKDRKYNGHIESKPLTIPKDIDLHLETKSVTEVDTLALHYFPEYQWLVDFTVAATVVYLVTEVYYNFMKPTQEMNISLVWCLLVLSFAIKVLFSLTTHYFKVEDGGERSVCVTFGFFFFVKAMAVLIVTENYLEFGLETGFTNFSDSAMQFLEKQGLESQSPVSKLTFKFFLAIFCSFIGAFLTFPGLRLAQMHLDALNLATEKITQTLLHINFLAPLFMVLLWVKPITKDYIMNPPLGKESIPLMTEATFDTLRLWLIILLCALRLAMMRSHLQAYLNLAQKCVDQMKKEAGRISTVELQKMVARVFYYLCVIALQYVAPLVMLLHTTLLLKTLGNHSWGIYPESISTLPVDNSLLSNSVYSELPSAEGKMKVTVTQITVALSSLKNIFTPLLFRGLLSFLTWWIAACLFSTSLFGLFYHQYLTVA

SEQ ID NO: 17063 - protein, 317 aa, Homo sapiens
MATPPKRSCPSFSASSEGTRIKKISIEGNIAAGKSTFVNILKQLCEDWEVVPEPVARWCNVQSTQDEFEELTMSQKNGGNVLQMMYEKPERWSFTFQTYACLSRIRAQLASLNGKLKDAEKPVLFFERSVYSDRYIFASNLYESECMNETEWTIYQDWHDWMNNQFGQSLELDGIIYLQATPETCLHRIYLRGRNEEQGIPLEYLEKLHYKHESWLLHRTLKTNFDYLQEVPILTLDVNEDFKDKYESLVEKSCSVAQAGVQWHNLGSLPSPPPRFNQFCLSLLSQRVFEYFVILLKTTGSQMVPDTSALCIFVTSY

SEQ ID NO: 17064 - protein, 440 aa, Homo sapiens
MAVSASPVISATSSGAGVPGGLFRAEPLYSTPREPPRLTPNMINSFVVNNHSNSAGGGGRGNTNTNECRMVDMHGMKVASFLMDGQELICLPQVFDLFLKHLVGGLHTVYTKLKRLDISPVVCTVEQVRILRGLGAIQPGVNRCKLITRKDFETLFTDCTNARRKRQMTRKQAVNSSRPGRPPKRSLGVLQENARLLTHAVPGLLSPGLITPTGITAAAMAEAMKLQKMKLMAMNTLQGNGSQNGTESEPDDLNSNTGGSESSWDKDKMQSPFAAPGPQHGIAHAALAGQPGIGGAPTLNPLQQNHLLTNRLDLPFMMMPHPLLPVSLPPASVAMAMNQMNHLNTIANMAAAAQIHSPLSRAGTSVIKERIPESPSPAPSLEENHRPGSQTSSHTSSSVSSSPSQMDHHLERMVMMPNNREELIVDQDNGLTIKKFQKDN

SEQ ID NO: 17065 - protein, 129 aa, Homo sapiens
MLQCLVTGHPRPQVRWTKTAGSASDKFQETSVFNETLRIERIARTQGGRYYCKAENGVGVPAIKSIRVDVQYLDEPMLTVHQTVSDVRGNFYQEKTVFLRCTVNSNPPARFIWKRGSDTLSHSQDNGVD

SEQ ID NO: 17066 - protein, 2194 aa, Homo sapiens
MDEEEDGAGAEESGQPRSFMRLNDLSGAGGRPGPGSAEKDPGSADSEAEGLPYPALAPVVFFYLSQDSRPRSWCLRTVCNPWFERISMLVILLNCVTLGMFRPCEDIACDSQRCRILQAFDDFIFAFFAVEMVVKMVALGIFGKKCYLGDTWNRLDFFIVIAGMLEYSLDLQNVSFSAVRTVRVLRPLRAINRVPSMRILVTLLLDTLPMLGNVLLLCFFVFFIFGIVGVQLWAGLLRNRCFLPENFSLPLSVDLERYYQTENEDESPFICSQPRENGMRSCRSVPTLRGDGGGGPPCGLDYEAYNSSSNTTCVNWNQYYTNCSAGEHNPFKGAINFDNIGYAWIAIFQVITLEGWVDIMYFVMDAHSFYNFIYFILLIIVGSFFMINLCLVVIATQFSETKQRESQLMREQRVRFLSNASTLASFSEPGSCYEELLKYLVYILRKAARRLAQVSRAAGVRVGLLSSPAPLGGQETQPSSSCSRSHRRLSVHHLVHHHHHHHHHYHLGNGTLRAPRASPEIQDRDANGSRRLMLPPPSTPALSGAPPGGAESVHSFYHADCHLEPVRCQAPPPRSPSEASGRTVGSGKVYPTVHTSPPPETLKEKALVEVAASSGPPTLTSLNIPPGPYSSMHKLLETQSTGACQSSCKISSPCLKADSGACGPDSCPYCARAGAGEVELADREMPDSDSEAVYEFTQDAQHSDLRDPHSRRQRSLGPDAEPSSVLAFWRLICDTFRKIVDSKYFGRGIMIAILVNTLSMGIEYHEQPEELTNALEISNIVFTSLFALEMLLKLLVYGPFGYIKNPYNIFDGVIVVISVWEIVGQQGGGLSVLRTFRLMRVLKLVRFLPALQRQLVVLMKTMDNVATFCMLLMLFIFIFSILGMHLFGCKFASERDGDTLPDRKNFDSLLWAIVTVFQILTQEDWNKVLYNGMASTSSWAALYFIALMTFGNYVLFNLLVAILVEGFQAEEISKREDASGQLSCIQLPVDSQGGDANKSESEPDFFSPSLDGDGDRKKCLALVSLGEHPELRKSLLPPLIIHTAATPMSLPKSTSTGLGEALGPASRRTSSSGSAEPGAAHEMKSPPSARSSPHSPWSAASSWTSRRSSRNSLGRAPSLKRRSPSGERRSLLSGEGQESQDEEESSEEERASPAGSDHRHRGSLEREAKSSFDLPDTLQVPGLHRTASGRGSASEHQDCNGKSASGRLARALRPDDPPLDGDDADDEGNLSKGERVRAWIRARLPACCLERDSWSAYIFPPQSRFRLLCHRIITHKMFDHVVLVIIFLNCITIAMERPKIDPHSAERIFLTLSNYIFTAVFLAEMTVKVVALGWCFGEQAYLRSSWNVLDGLLVLISVIDILVSMVSDSGTKILGMLRVLRLLRTLRPLRVISRAQGLKLVVETLMSSLKPIGNIVVICCAFFIIFGILGVQLFKGKFFVCQGEDTRNITNKSDCAEASYRWVRHKYNFDNLGQALMSLFVLASKDGWVDIMYDGLDAVGVDQQPIMNHNPWMLLYFISFLLIVAFFVLNMFVGVVVENFHKCRQHQEEEEARRREEKRLRRLEKKRRSKEKQMAEAQCKPYYSDYSRFRLLVHHLCTSHYLDLFITGVIGLNVVTMAMEHYQQPQILDEALKICNYIFTVIFVLESVFKLVAFGFRRFFQDRWNQLDLAIVLLSIMGITLEEIEVNASLPINPTIIRIMRVLRIARVLKLLKMAVGMRALLDTVMQALPQVGNLGLLFMLLFFIFAALGVELFGDLECDETHPCEGLGRHATFRNFGMAFLTLFRVSTGDNWNGIMKDTLRDCDQESTCYNTVISPIYFVSFVLTAQFVLVNVVIAVLMKHLEESNKEAKEEAELEAELELEMKTLSPQPHSPLGSPFLWPGVEGPDSPDSPKPGALHPAAHARSASHFSLEHPTMQPHPTELPGPDLLTVRKSGVSRTHSLPNDSYMCRHGSTAEGPLGHRGWGLPKAQSGSVLSVHSQPADTSYILQLPKDAPHLLQPHSAPTWGTIPKLPPPGRSPLAQRPLRRQAAIRTDSLDVQGLGSREDLLAEEEPPSPRDLKKCYSVEAQSCQRRPTSWLDEQRRHSIAVSCLDSGSQPHLGTDPSNLGGQPLGGPGSRPKKKLSPPSITIDPPESQGPRTPPSPGICLRRRAPSSDSKDPLASGPPDSMAASPSPKKDVLSLSGLSSDPADLDP

SEQ ID NO: 17067 - protein, 869 aa, Homo sapiens
MKIATVSVLLPLALCLIQDAASKNEDQDKKFFQSLDGIMFINKCATCKMILEKEAKSQKRARHLARAPKATAPTELNCDDFKKGERDGDFICPDYYEAVCGTDGKTYDNRCALCAENAKTGSQIGVKSEGECKSSNPEQDVCSAFRPFVRDGRLGCTRENDPVLGPDGKTHGNKCAMCAELFLKEAENAKREGETRIRRNAEKDFCKEYEKQVRNGRLFCTRESDPVRGPDGRMHGNKCALCAEIFKQRFSEENSKTDQNLGKAEEKTKVKREIVKLCSQYQNQAKNGILFCTRENDPIRGPDGKMHGNLCSMCQAYFQAENEEKKKAEARARNKRESGKATSYAELCSEYRKLVRNGKLACTRENDPIQGPDGKVHGNTCSMCEVFFQAEEEEKKKKEGKSRNKRQSKSTASFEELCSEYRKSRKNGRLFCTRENDPIQGPDGKMHGNTCSMCEAFFQQEERARAKAKREAAKEICSEFRDQVRNGTLICTREHNPVRGPDGKMHGNKCAMCASVFKLEEEEKKNDKEEKGKVEAEKVKREAVQELCSEYRHYVRNGRLPCTRENDPIEGLDGKIHGNTCSMCEAFFQQEAKEKERAEPRAKVKREAEKETCDEFRRLLQNGKLFCTRENDPVRGPDGKTHGNKCAMCKAVFQKENEERKRKEEEDQRNAAGHGSSGGGGGNTQDECAEYREQMKNGRLSCTRESDPVRDADGKSYNNQCTMCKAKLEREAERKNEYSRSRSNGTGSESGKDTCDEFRSQMKNGKLICTRESDPVRGPDGKTHGNKCTMCKEKLEREAAEKKKKEDEDRSNTGERSNTGERSNDKEDLCREFRSMQRNGKLICTRENNPVRGPYGKMHINKCAMCQSI

SEQ ID NO: 17068 - protein, 540 aa, Homo sapiens
MLKFQEAAKCVSGSTAISTYPKTLIARRYVLQQKLGSGSFGTVYLVSDKKAKRGEELKVLKEISVGELNPNETVQANLEAQLLSKLDHPAIVKFHASFVEQDNFCIITEYCEGRDLDDKIQEYKQAGKIFPENQIIEWFIQLLLGVDYMHERRILHRDLKSKNVFLKNNLLKIGDFGVSRLLMGSCDLATTLTGTPHYMSPEALKHQGYDTKSDIWQKRIHLQTLRALSEVQKMTPRERMRLRKLQAADEKARKLKKIVEEKYEENSKRMQELRSRNFQQLSVDVLHEKTHLKGMEEKEEQPEGRLSCSPQDEDEERWQGREEESDEPTLENLPESQPIPSMDLHELESIVEDATSDLGYHEIPEDPLVAEEYYADAFDSYCEESDEEEEEIALERPEKEIRNEGSQPAYRTNQQDSDIEALARCLENVLGCTSLDTKTITTMAEDMSPGPPIFNSVMARTKMKRMRESAMQKLGTEVFEEVYNYLKRARHQNASEAEIRECLEKVVPQASDCFEVDQLLYFEEQLLITMGKEPTLQNHL

SEQ ID NO: 17069 - protein, 2851 aa, Homo sapiens
MASEDNRVPSPPPTGDDGGGGGREETPTEGGALSLKPGLPIRGIRMKFAVLTGLVEVGEVSNRDIVETVFNLLVGGQFDLEMNFIIQEGESINCMVDLLEKCDITCQAEVWSMFTAILKKSIRNLQVCTEVGLVEKVLGKIEKVDNMIADLLVDMLGVLASYNLTVRELKLFFSKLQGDKGRWPPHAGKLLSVLKHMPQKYGPDAFFNFPGKSAAAIALPPIAKWPYQNGFTFHTWLRMDPVNNINVDKDKPYLYCFRTSKGLGYSAHFVGGCLIVTSIKSKGKGFQHCVKFDFKPQKWYMVTIVHIYNRWKNSELRCYVNGELASYGEITWFVNTSDTFDKCFLGSSETADANRVFCGQMTAVYLFSEALNAAQIFAIYQLGLGYKGTFKFKAESDLFLAEHHKLLLYDGKLSSAIAFTYNPRATDAQLCLESSPKDNPSIFVHSPHALMLQDVKAVLTHSIQSAMHSIGGVQVLFPLFAQLDYRQYLSDEIDLTICSTLLAFIMELLKNSIAMQEQMLACKGFLVIGYSLEKSSKSHVSRAVLELCLAFSKYLSNLQNGMPLLKQLCDHVLLNPAIWIHTPAKVQLMLYTYLSTEFIGTVNIYNTIRRVGTVLLIMHTLKYYYWAVNPQDRSGITPKGLDGPRPNQKEMLSLRAFLLMFIKQLVMKDSGVKEDELQAILNYLLTMHEDDNLMDVLQLLVALMSEHPNSMIPAFDQRNGLRVIYKLLASKSEGIRVQALKAMGYFLKHLAPKRKAEVMLGHGLFSLLAERLMLQTNLITMTTYNVLFEILIEQIGTQVIHKQHPDPDSSVKIQNPQILKVIATLLRNSPQCPESMEVRRAFLSDMIKLFNNSRENRRSLLQCSVWQEWMLSLCYFNPKNSDEQKITEMVYAIFRILLYHAVKYEWGGWRVWVDTLSITHSKVTFEIHKENLANIFREQQGKVDEEIGLCSSTSVQAASGIRRDINVSVGSQQPDTKDSPVCPHFTTNGNENSSIEKTSSLESASNIELQTTNTSYEEMKAEQENQELPDEGTLEETLTNETRNADDLEVSSDIIEAVAISSNSFITTGKDSMTVSEVTASISSPSEEDASEMPEFLDKSIVEEEEDDDYVELKVEGSPTEEANLPTELQDNSLSPAASEAGEKLDMFGNDDKLIFQEGKPVTEKQTDTETQDSKDSGIQTMTASGSSAMSPETTVSQIAVESDLGQMLEEGKKATNLTRETKLINDCHGSVSEASSEQKIAKLDVSNVATDTERLELKASPNVEAPQPHRHVLEISRQHEQPGQGIAPDAVNGQRRDSRSTVFRIPEFNWSQMHQRLLTDLLFSIETDIQMWRSHSTKTVMDFVNSSDNVIFVHNTIHLISQVMDNMVMACGGILPLLSAATSATHELENIEPTQGLSIEASVTFLQRLISLVDVLIFASSLGFTEIEAEKSMSSGGILRQCLRLVCAVAVRNCLECQQHSQLKTRGDKALKPMHSLIPLGKSAAKSPVDIVTGGISPVRDLDRLLQDMDINRLRAVVFRDIEDSKQAQFLALAVVYFISVLMVSKYRDILEPQNERHSQSCTETGSENENVSLSEITPAAFSTLTTASVEESESTSSARRRDSGIGEETATGLGSHVEVTPHTAPPGVSAGPDAISEVLSTLSLEVNKSPETKNDRGNDLDTKATPSVSVSKNVNVKDILRSLVNIPADGVTVDPALLPPACLGALGDLSVEQPVQFRSFDRSVIVAAKKSAVSPSTFNTSIPTNAVSVVSSVDSAQASDMGGESPGSRSSNAKLPSVPTVDSVSQDPVSNMSITERLEHALEKAAPLLREIFVDFAPFLSRTLLGSHGQELLIEGTSLVCMKSSSSVVELVMLLCSQEWQNSIQKNAGLAFIELVNEGRLLSQTMKDHLVRVANEAEFILSRQRAEDIHRHAEFESLCAQYSADKREDEKMCDHLIRAAKYRDHVTATQLIQKIINILTDKHGAWGNSAVSRPLEFWRLDYWEDDLRRRRRFVRNPLGSTHPEATLKTAVEHATDEDILAKGKQSIRSQALGNQNSENEILLEGDDDTLSSVDEKDLENLAGPVSLSTPAQLVAPSVVVKGTLSVTSSELYFEVDEEDPNFKKIDPKILAYTEGLHGKWLFTEIRSIFSRRYLLQNTALEIFMANRVAVMFNFPDPATVKKVVNYLPRVGVGTSFGLPQTRRISLASPRQLFKASNMTQRWQHREISNFEYLMFLNTIAGRSYNDLNQYPVFPWVITNYESEELDLTLPTNFRDLSKPIGALNPKRAAFFAERYESWEDDQVPKFHYGTHYSTASFVLAWLLRIEPFTTYFLNLQGGKFDHADRTFSSISRAWRNSQRDTSDIKELIPEFYYLPEMFVNFNNYNLGVMDDGTVVSDVELPPWAKTSEEFVHINRLALESEFVSCQLHQWIDLIFGYKQQGPEAVRALNVFYYLTYEGAVNLNSITDPVLREAVEAQIRSFGQTPSQLLIEPHPPRGSAMQVSPLMFTDKAQQDVIMVLKFPSNSPVTHVAANTQPGLATPAVITVTANRLFAVNKWHNLPAHQGAVQDQPYQLPVEIDPLIASNTGMHRRQITDLLDQSIQVHSQCFVITSDNRYILVCGFWDKSFRVYSTDTGRLIQVVFGHWDVVTCLARSESYIGGNCYILSGSRDATLLLWYWNGKCSGIGDNPGETAAPRAILTGHDYEVTCAAVCAELGLVLSGSQEGPCLIHSMNGDLLRTLEGPENCLKPKLIQASREGHCVIFYENGLFCTFSVNGKLQATMETDDNIRAIQLSRDGQYLLTGGDRGVVVVRQVSDLKQLFAYPGCDAGIRAMALSYDQRCIISGMASGSIVLFYNDFNRWHHEYQTRY

SEQ ID NO: 17070 - protein, 2309 aa, Homo sapiens
MKAMDVLPILKEKVAYLSGGRDKRGGPILTFPARSNHDRIRQEDLRRLISYLACIPSEEVCKRGFTVIVDMRGSKWDSIKPLLKILQESFPCCIHVALIIKPDNFWQKQRTNFGSSKFEFETNMVSLEGLTKVVDPSQLTPEFDGCLEYNHEEWIEIRVAFEDYISNATHMLSRLEELQDILAKKELPQDLEGARNMIEEHSQLKKKVIKAPIEDLDLEGQKLLQRIQSSESFPKKNSGSGNADLQNLLPKVSTMLDRLHSTRQHLHQMWHVRKLKLDQCFQLRLFEQDAEKMFDWITHNKGLFLNSYTEIGTSHPHAMELQTQHNHFAMNCMNVYVNINRIMSVANRLVESGHYASQQIRQIASQLEQEWKAFAAALDERSTLLDMSSIFHQKAEKYMSNVDSWCKACGEVDLPSELQDLEDAIHHHQGIYEHITLAYSEVSQDGKSLLDKLQRPLTPGSSDSLTASANYSKAVHHVLDVIHEVLHHQRQLENIWQHRKVRLHQRLQLCVFQQDVQQVLDWIENHGEAFLSKHTGVGKSLHRARALQKRHEDFEEVAQNTYTNADKLLEAAEQLAQTGECDPEEIYQAAHQLEDRIQDFVRRVEQRKILLDMSVSFHTHVKELWTWLEELQKELLDDVYAESVEAVQDLIKRFGQQQQTTLQVTVNVIKEGEDLIQQLRDSAISSNKTPHNSSINHIETVLQQLDEAQSQMEELFQERKIKLELFLQLRIFERDAIDIISDLESWNDELSQQMNDFDTEDLTIAEQRLQHHADKALTMNNLTFDVIHQGQDLLQYVNEVQASGVELLCDRDVDMATRVQDLLEFLHEKQQELDLAAEQHRKHLEQCVQLRHLQAEVKQVLGWIRNGESMLNAGLITASSLQEAEQLQREHEQFQHAIEKTHQSALQVQQKAEAMLQANHYDMDMIRDCAEKVASHWQQLMLKMEDRLKLVNASVAFYKTSEQVCSVLESLEQEYKREEDWCGGADKLGPNSETDHVTPMISKHLEQKEAFLKACTLARRNADVFLKYLHRNSVNMPGMVTHIKAPEQQVKNILNELFQRENRVLHYWTMRKRRLDQCQQYVVFERSAKQALEWIHDNGEFYLSTHTSTGSSIQHTQELLKEHEEFQITAKQTKERVKLLIQLADGFCEKGHAHAAEIKKCVTAVDKRYRDFSLRMEKYRTSLEKALGISSDSNKSSKSLQLDIIPASIPGSEVKLRDAAHELNEEKRKSARRKEFIMAELIQTEKAYVRDLRECMDTYLWEMTSGVEEIPPGIVNKELIIFGNMQEIYEFHNNIFLKELEKYEQLPEDVGHCFVTWADKFQMYVTYCKNKPDSTQLILEHAGSYFDEIQQRHGLANSISSYLIKPVQRITKYQLLLKELLTCCEEGKGEIKDGLEVMLSVPKRANDAMHLSMLEGFDENIESQGELILQESFQVWDPKTLIRKGRERHLFLFEMSLVFSKEVKDSSGRSKYLYKSKLFTSELGVTEHVEGDPCKFALWVGRTPTSDNKIVLKASSIENKQDWIKHIREVIQERTIHLKGALKEPIHIPKTAPATRQKGRRDGEDLDSQGDGSSQPDTISIASRTSQNTLDSDKLSGGCELTVVIHDFTACNSNELTIRRGQTVEVLERPHDKPDWCLVRTTDRSPAAEGLVPCGSLCIAHSRSSMEMEGIFNHKDSLSVSSNDASPPASVASLQPHMIGAQSSPGPKRPGNTLRKWLTSPVRRLSSGKADGHVKKLAHKHKKSREVRKSADAGSQKDSDDSAATPQDETVEERGRNEGLSSGTLSKSSSSGMQSCGEEEGEEGADAVPLPPPMAIQQHSLLQPDSQDDKASSRLLVRPTSSETPSAAELVSAIEELVKSKMALEDRPSSLLVDQGDSSSPSFNPSDNSLLSSSSPIDEMEERKSSSLKRRHYVLQELVETERDYVRDLGYVVEGYMALMKEDGVPDDMKGKDKIVFGNIHQIYDWHRDFFLGELEKCLEDPEKLGSLFVKHERRLHMYIAYCQNKPKSEHIVSEYIDTFFEDLKQRLGHRLQLTDLLIKPVQRIMKYQLLLKDFLKYSKKASLDTSELERAVEVMCIVPRRCNDMMNVGRLQGFDGKIVAQGKLLLQDTFLVTDQDAGLLPRCRERRIFLFEQIVIFSEPLDKKKGFSMPGFLFKNSIKVSCLCLEENVENDPCKFALTSRTGDVVETFILHSSSPSVRQTWIHEINQILENQRNFLNALTSPIEYQRNHSGGGGGGGSGGSGGGGGSGGGGAPSGGSGHSGGPSSCGGAPSTSRSRPSRIPQPVRHHPPVLVSSAASSQAEADKMSE

SEQ ID NO: 17071 - protein, 697 aa, Homo sapiens
MACEIMPLQSSQEDERPLSPFYLSAHVPQVSNVSATGELLERTIRSAVEQHLFDVNNSGGQSSEDSESGTLSASSATSARQRRRQSKEQDEVRHGRDKGLINKENTPSGFNHLDDCILNTQEVEKVHKNTFGCAGERSKPKRQKSSTKLSELHDNQDGLVNMESLNSTRSHERTGPDDFEWMSDERKGNEKDGGHTQHFESPTMKIQEHPSLSDTKQQRNQDAGDQEESFVSEVPQSDLTALCDEKNWEEPIPAFSSWQRENSDSDEAHLSPQAGRLIRQLLDEDSDPMLSPRFYAYGQSRQYLDDTEVPPSPPNSHSFMRRRSSSLGSYDDEQEDLTPAQLTRRIQSLKKKIRKFEDRFEEEKKYRPSHSDKAANPEVLKWTNDLAKFRRQLKESKLKISEEDLTPRMRQRSNTLPKSFGSQLEKEDEKKQELVDKAIKPSVEATLESIQRKLQEKRAESSRPEDIKDMTKDQIANEKVALQKALLYYESIHGRPVTKNERQVMKPLYDRYRLVKQILSRANTIPIIGSPSSKRRSPLLQPIIEGETASFFKEIKEEEEGSEDDSNVKPDFMVTLKTDFSARCFLDQFEDDADGFISPMDDKIPSKCSQDTGLSNLHAASIPELLEHLQEMREEKKRIRKKLRDFEDNFFRQNGRNVQKEDRTPMAEEYSEYKHIKAKLRLLEVLISKRDTDSKSM

SEQ ID NO: 17072 - protein, 380 aa, Homo sapiens
MLRNSTFKNMQRRHTTLREKGRRQAIRGPAYMFNEKGTSLTPEEERFLDSAEYGNIPVVRKMLEESKTLNFNCVDYMGQNALQLAVGNEHLEVTELLLKKENLARVGDALLLAISKGYVRIVEAILNHPAFAQGQRLTLSPLEQELRDDDFYAYDEDGTRFSHDITPIILAAHCQEYEIVHILLLKGARIERPHDYFCKCNECTEKQRKDSFSHSRSRMNAYKGLASAAYLSLSSEDPVLTALELSNELARLANIETEFKNDYRKLSMQCKDFVVGVLDLCRDTEEVEAILNGDVNFQVWSDHHRPSLSRIKLAIKYEVKKFVAHPNCQQQLLTMWYENLSGLRQQSIAVKFLAVFGVSIGLPFLAIAYWIAPCSKVQTA

SEQ ID NO: 17073 - protein, 267 aa, Homo sapiens
MGCFECCIKCLGGIPYASLIATILLYAGVALFCGCGHEALSGTVNILQTYFEMARTAGDTLDVFTMIDIFKYVIYGIAAAFFVYGILLMVEGFFTTGAIKDLYGDFKITTCGRCVSAWFIMLTYLFMLAWLGVTAFTSLPVYMYFNLWTICRNTTLVEGANLCLDLRQFGIVTIGEEKKICTVSENFLRMCESTELNMTFHLFIVALAGAGAAVIAMVHYLMVLSANWAYVKDACRMQKYEDIKSKEEQELHDIHSTRSKERLNAYT

SEQ ID NO: 17074 - protein, 393 aa, Homo sapiens
MKETRGYGGDAPFCTRLNHSYTGMWAPERSAEARGNLTRPPGSGEDCGSVSVAFPITMLLTGFVGNALAMLLVSRSYRRRESKRKKSFLLCIGWLALTDLVGQLLTTPVVIVVYLSKQRWEHIDPSGRLCTFFGLTMTVFGLSSLFIASAMAVERALAIRAPHWYASHMKTRATRAVLLGVWLAVLAFALLPVLGVGQYTVQWPGTWCFISTGRGGNGTSSSHNWGNLFFASAFAFLGLLALTVTFSCNLATIKALVSRCRAKATASQSSAQWGRITTETAIQLMGIMCVLSVCWSPLLIMMLKMIFNQTSVEHCKTHTEKQKECNFFLIAVRLASLNQILDPWVYLLLRKILLRKFCQEMGPDGRCFCHAWRQVPRTWCSSHDREPCSVQLS

SEQ ID NO: 17075 - protein, 1553 aa, Homo sapiens
MSNITIDPDVKPGEYVIKSLFAEFAVQAEKKIEVVMAEPLEKLLSRSLQRGEDLQFDQLISSMSSVAEHCLPSLLRTLFDWYRRQNGTEDESYEYRPRSSTKSKGDEQQRERDYLLERRDLAVDFIFCLVLVEVLKQIPVHPVPDPLVHEVLNLAFKHFKHKEGYSGTNTGNVHIIADLYAEVIGVLAQSKFQAVRKKFVTELKELRQKEQSPHVVQSVISLIMGMKFFRVKMYPVEDFEASFQFMQECAQYFLEVKDKDIKHALAGLFVEILIPVAAAVKNEVNVPCLKNFVEMLYQTTFELSSRKKHSLALYPLITCLLCVSQKQFFLNNWHIFLQNCLSHLKNKDPKMSRVALESLYRLLWVYVIRIKCESNTVTQSRLMSIVSALFPKGSRSVVPRDTPLNIFVKIIQFIAQERLDFAMKEIIFDLLSVGKSTKTFTINPERMNIGLRVFLVIADSLQQKDGEPPMPTTGVILPSGNTLRVKKIFLNKTLTDEEAKVIGMSVYYPQVRKALDSILRHLDKEVGRPMCMTSVQMSNKEPEDMITGERKPKIDLFRTCIAAIPRLIPDGMSRTDLIELLARLTIHMDEELRALAFNTLQALMLDFPDWREDVLSGFVYFIVREVTDVHPTLLDNAVKMLVQLINQWKQAAQMHNKNQDTQHGVANGASHPPPLERSPYSNVFHVVEGFALVILCSSRPATRRLAVSVLREIRALFALLEIPKGDDELAIDVMDRLSPSILESFIHLTGADQTTLLYCPSSIDLQTLAEWNSSPISHQFDVISPSHIWIFAHVTQGQDPWIISLSSFLKQENLPKHCSTAVSYAWMFAYTRLQLLSPQVDINSPINAKKVNTTTSSDSYIGLWRNYLILCCSAATSSSSTSAGSVRCSPPETLASTPDSGYSIDSKIIGIPSPSSLFKHIVPMMRSESMEITESLVLGLGRTNPGAFRELIEELHPIIKEALERRPENMKRRRRRDILRVQLVRIFELLADAGVISHSASGGLDNETHFLNNTLLEYVDLTRQLLEAENEKDSDTLKDIRCHFSALVANIIQNVPVHQRRSIFPQQSLRHSLFMLFSHWAGPFSIMFTPLDRYSDRNMQINRHQYCALKAMSAVLCCGPVADNVGLSSDGYLYKWLDNILDSLDKKVHQLGCEAVTLLLELNPDQSNLMYWAVDRCYTGSGRVAAGCFKAIANVFQNRDYQCDTVMLLNLILFKAADSSRSIYEVAMQLLQILEPKMFRYAHKLEVQRTDGVLSQLSPLPHLYSVSYYQLSEELARAYPELTLAIFSEISQRIQTAHPAGRQVMLHYLLPWMNNIELVDLKPLPTARRHDEDEDDSLKDRELMVTSRRWLRGEGWGSPQATAMVLNNLMYMTAKYGDELAWSEVENVWTTLADGWPKNLKIILHFLISICGVNSEPSLLPYVKKVIVYLGRDKTMQLLEELVSELQLTDPVSSGVTHMDNPPYYRITSSYKIPSVTSGTTSSSNTMVAPTDGNPDNKPIKENIEESYVHLDIYSGLNSHLNRQHHRLESRYSSSSGGSYEEEKSNKFQMFLI

SEQ ID NO: 17076 - protein, 943 aa, Homo sapiens
MSEILCQWLNKELKVSRTVSPKSFAKAFSSGYLLGEVLHKFELQDDFSEFLDSRVSSAKLNNFSRLEPTLNLLGVQFDQNVAHGIITEKPGVATKLLYQLYIALQKKKKSGLTGVEMQTMQRLTNLRLQNMKSDTFQERLRHMIPRQTDFNLMRITYRFQEKYKHVKEDLAHLHFEKLERFQKLKEEQRCFDIEKQYLNRRRQNEIMAKIQAAIIQIPKPASNRTLKALEAQKMMKKKKEAEDVADEIKKFEALIKKDLQAKESASKTSLDTAGQTTTDLLNTYSDDEYIKKIQKRLEEDAFAREQREKRRRKLLMDQLIAHEAQEEAYREEQLINRLMRQSQQERRIAVQLMHVRHEKEVLWQNRIFREKQHEERRLKDFQDALDREAALAKQAKIDFEEQFLKEKRFHDQIAVERAQARYEKHYSVCAEILDQIVDLSTKVADYRMLTNNLIPYKLMHDWKELFFNAKPIYEQASVKTLPANPSREQLTELEKRDLLDTNDYEEYKNMVGEWALPEEMVDNLPPSNNCILGHILHRLAEKSLPPRAESTTPELPSFAVKGCLLGKTLSGKTTILRSLQKDFPIQILSIDTLVQEAIQAFHDNEKVSEVLPIQKNDEEDALPVLQEEIKESQDPQHVFSAGPVSDEVLPETEGANADKTPKAEEVKSSDSFLKLTTRAQLGAKSEQLLKKGKSIPDVLLVDIIVNAINEIPVNQDCILDGFPMTLNQAQLLEEALTGCNRNLTEVERKKAQKSTLAIDPATSKEIPLPSPAFDFVILLDVSDTSSMSRMNDIIAEELSYKTAHEDISQRVAAENQDKDGDQNLRDQIQHRIIGFLDNWPLLEQWFSEPENILIKINAEIDKESLCEKVKEILTTEIAKKKNKVEKKLEEKEAEKKAAASLAELPLPTPPPAPPPEPEKEKEIHQSHVASKTPTAKGKPQSGD

SEQ ID NO: 17077 - protein, 86 aa, Homo sapiens
MEADIITNLRCRLKEAEEERLKAAQYGLQLVESQNELQNQLDKCRNEMMTMTESYEQEKYTLQREVELKSRMLESLSCECEAIKQQ

SEQ ID NO: 17078 - protein, 706 aa, Homo sapiens
MGKGSISFLFFSQIGSLENHYLFKHKNHPRRSRRSAFHITKRLSDDDRVIWAEQQYEKERSKRSALRDSALNLFNDPMWNQQWYLQDTRMTAALPKLDLHVIPVWQKGITGKGVVITVLDDGLEWNHTDIYANYDPEASYDFNDNDHDPFPRYDPTNENKHGTRCAGEIAMQANNHKCGVGVAYNSKVGGIRMLDGIVTDAIEASSIGFNPGHVDIYSASWGPNDDGKTVEGPGRLAQKAFEYGVKQGRQGKGSIFVWASGNGGRQGDNCDCDGYTDSIYTISISSASQQGLSPWYAEKCSSTLATSYSSGDYTDQRITSADLHNDCTETHTGTSASAPLAAGIFALALEANPNLTWRDMQHLVVWTSEYDPLANNPGWKKNGAGLMVNSRFGFGLLNAKALVDLADPRTWRSVPEKKECVVKDNDFEPRALKANGEVIIEIPTRACEGQENAIKSLEHVQFEATIEYSRRGDLHVTLTSAAGTSTVLLAERERDTSPNGFKNWDFMSVHTWGENPIGTWTLRITDMSGRIQNEGRIVNWKLILHGTSSQPEHMKQPRVYTSYNTVQNDRRGVEKMVDPGEEQPTQENPKENTLVSKSPSSSSVGGRRDELEEGAPSQAMLRLLQSAFSKNSPPKQSPKKSPSAKLNIPYENFYEALEKLNKPSQLKDSEDSLYNDYVDVFYNTKPYKHRDDRLLQALVDILNEEN

SEQ ID NO: 17079 - protein, 766 aa, Homo sapiens
MREHEDVQERTTLRYEERITELHSVIAELNKKIDRLQGTTIREEDEYSELRSELSQSQHEVNEDSRSMDQDQTSVSIPENQSTMVTADMDNCSDLNSELQRVLTGLENVVCGRKKSSCSLSVAEVDKHIEQLTTASEHCDLAIKTVEEIEGVLGRDLYPNLAEERSRWEKELAGLREENESLTAMLCSKEEELNRTKATMNAIREERDRLRRRVRELQTRLQSVQATGPSSPGRLTSTNRPINPSTGELSTSSSSNDIPIAKIAERVKLSKTRSESSSSDRPVLGSEISSIGVSSSVAEHLAHSLQDCSNIQEIFQTLYSHGSAISESKIREFEVETERLNSRIEHLKSQNDLLTITLEECKSNAERMSMLVGKYESNATALRLALQYSEQCIEAYELLLALAESEQSLILGQFRAAGVGSSPGDQSGDENITQMLKRAHDCRKTAENAAKALLMKLDGSCGGAFAVAGCSVQPWESLSSNSHTSTTSSTASSCDTEFTKEDEQRLKDYIQQLKNDRAAVKLTMLELESIHIDPLSYDVKPRGDSQRLDLENAVLMQELMAMKEEMAELKAQLYLLEKEKKALELKLSTREAQEQAYLVHIEHLKSEVEEQKEQRMRSLSSTSSGSKDKPGKECADAASPALSLAELRTTCSENELAAEFTNAIRREKKLKARVQELVSALERLTKSSEIRHQQSAEFVNDLKRANSNLVAAYEKAKKKHQNKLKKLESQMMAMVERHETQVRMLKQRIALLEEENSRPHTNETSL

SEQ ID NO: 17080 - protein, 844 aa, Homo sapiens
MLVVEAKFDGEQLATDPVDHTDQPEFATELAWEIDRKALHQHRLQRTPIKLQCFALDPVTSAKETIGYIVLDLRTAQETKQAPKWYQLLSNKYTKFKSEIQISIALETDTKPPVDSFKAKGAPPRDGKVPAILAGLDPRDIVAVLNEEGGYHQIGPAEYCTDSFIMSVTIAFATQLEQLIPCTMKLPERQPEFFFYYSLLGNDVTNEPFNDLINPNFEPERASVRIRSSVEILRVYLALQSKLQIHLCCGDQSLGSTEIPLTGLLKKGSTEINQHPVTVEGAFTLDPPNRAKQKLAPIPVELAPTVGVSVALQREGIDSQSLIELKTQNEHEPEHSKKKVLTPIKEKTLTGPKSPTVSPVPSHNQSPPTKDDATESEVESLQYDKDTKPNPKASSSVPASLAQLVTTSNASEVASGQKIAVPATSHHFCFSIDLRSIHALEIGFPINCILRYSYPFFGSAAPIMTNPPVEVRKNMEVFLPQSYCAFDFATMPHQLQDTFLRIPLLVELWHKDKMSKDLLLGIARIQLSNILSSEKTRFLGSNGEQCWRQTYSESVPVIAAQGSNNRIADLSYTVTLEDYGLVKMREIFISDSSQGVSAVQQKPSSLPPAPCPSEIQTEPRETLEYKAALELEMWKEMQEDIFENQLKQKELAHMQALAEEWKKRDRERESLVKKKVAEYTILEGKLQKTLIDLEKREQQLASVESELQREKKELQSERQRNLQELQDSIRRAKEDCIHQVELERLKIKQLEEDKHRLQQQLNDAENKYKILEKEFQQFKDQQNNKPEIRLQSEINLLTLEKVELERKLESATKSKLHYKQQWGRALKELARLKQREQESQMARL

SEQ ID NO: 17081 - protein, 1512 aa, Homo sapiens
MWPSQLLIFMMLLAPIIHAFSRAPIPMAVVRRELSCESYPIELRCPGTDVIMIESANYGRTDDKICDSDPAQMENIRCYLPDAYKIMSQRCNNRTQCAVVAGPDVFPDPCPGTYKYLEVQYECVPYKVEQKVFLCPGLLKGVYQSEHLFESDHQSGAWCKDPLQASDKIYYMPWTPYRTDTLTEYSSKDDFIAGRPTTTYKLPHRVDGTGFVVYDGALFFNKERTRNIVKFDLRTRIKSGEAIIANANYHDTSPYRWGGKSDIDLAVDENGLWVIYATEQNNGKIVISQLNPYTLRIEGTWDTAYDKRSASNAFMICGILYVVKSVYEDDDNEATGNKIDYIYNTDQSKDSLVDVPFPNSYQYIAAVDYNPRDNLLYVWNNYHVVKYSLDFGPLDSRSGQAHHGQVSYISPPIHLDSELERPSVKDISTTGPLGMGSTTTSTTLRTTTLSPGRSTTPSVSGRRNRSTSTPSPAVEVLDDMTTHLPSASSQIPALEESCEAVEAREIMWFKTRQGQIAKQPCPAGTIGVSTYLCLAPDGIWDPQGPDLSNCSSPWVNHITQKLKSGETAANIARELAEQTRNHLNAGDITYSVRAMDQLVGLLDVQLRNLTPGGKDSAARSLNKLQKRERSCRAYVQAMVETVNNLLQPQALNAWRDLTTSDQLRAATMLLHTVEESAFVLADNLLKTDIVRENTDNIKLEVARLSTEGNLEDLKFPENMGHGSTIQLSANTLKQNGRNGEIRVAFVLYNNLGPYLSTENASMKLGTEALSTNHSVIVNSPVITAAINKEFSNKVYLADPVVFTVKHIKQSEENFNPNCSFWSYSKRTMTGYWSTQGCRLLTTNKTHTTCSCNHLTNFAVLMAHVEVKHSDAVHDLLLDVITWVGILLSLVCLLICIFTFCFFRGLQSDRNTIHKNLCISLFVAELLFLIGINRTDQPIACAVFAALLHFFFLAAFTWMFLEGVQLYIMLVEVFESEHSRRKYFYLVGYGMPALIVAVSAAVDYRSYGTDKVCWLRLDTYFIWSFIGPATLIIMLNVIFLGIALYKMFHHTAILKPESGCLDNINYEDNRPFIKSWVIGAIALLCLLGLTWAFGLMYINESTVIMAYLFTIFNSLQGMFIFIFHCVLQKKVRKEYGKCLRTHCCSGKSTESSIGSGKTSGSRTPGRYSTGSQSRIRRMWNDTVRKQSESSFITGDINSSASLNRGAMANHLISNALLRPHGTNNPYNTLLGEPAVCNNPSVSMYNAQEGLLNNARDTSVMDTLPLNGNHGNSYSIASGEYLSNCVQIIDRGYNHNETALEKKILKELTSNYIPSYLNNHERSSEQNRNLMNKLVNNLGSGREDDAIVLDDATSFNHEESLGLELIHEESDAPLLPPRVYSTENHQPHHYTRRRIPQDHSESFFPLLTNEHTEDLQSPHRDSLYTSMPTLAGVAATESVTTSTQTEPPPAKCGDAEDVYYKSMPNLGSRNHVHQLHTYYQLGRGSSDGFIVPPNKDGTPPEGSSKGPAHLVTSL

SEQ ID NO: 17082 - protein, 570 aa, Homo sapiens
MKPRARGWRGLAALWMLLAQVAEQAPACAMGPAAAAPGSPSVPRPPPPAERPGWMEKGEYDLVSAYEVDHRGDYVSHEIMHHQRRRRAVPVSEVESLHLRLKGSRHDFHMDLRTSSSLVAPGFIVQTLGKTGTKSVQTLPPEDFCFYQGSLRSHRNSSVALSTCQGLSGMIRTEEADYFLRPLPSHLSWKLGRAAQGSSPSHVLYKRSTEPHAPGASEVLVTSRTWELAHQPLHSSDLRLGLPQKQHFCGRRKKYMPQPPKEDLFILPDEYKSCLRHKRSLLRSHRNEELNVETLVVVDKKMMQNHGHENITTYVLTILNMVSALFKDGTIGGNINIAIVGLILLEDEQPGLVISHHADHTLSSFCQWQSGLMGKDGTRHDHAILLTGLDICSWKNEPCDTLGFAPISGMCSKYRSCTINEDTGLGLAFTIAHESGHNFGMIHDGEGNMCKKSEGNIMSPTLAGRNGVFSWSPCSRQYLHKFLSTAQAICLADQPKPVKEYKYPEKLPGELYDANTQCKWQFGEKAKLCMLDFKKDICKALWCHRIGRKCETKFMPAAEGTICGHDMVRS

SEQ ID NO: 17083 - protein, 1251 aa, Homo sapiens
MKLKEVDRTAMQAWSPAQNHPIYLATGTSAQQLDATFSTNASLEIFELDLSDPSLDMKSCATFSSSHRYHKLIWGPYKMDSKGDVSGVLIAGGENGNIILYDPSKIIAGDKEVVIAQNDKHTGPVRALDVNIFQTNLVASGANESEIYIWDLNNFATPMTPGAKTQPPEDISCIAWNRQVQHILASASPSGRATVWDLRKNEPIIKVSDHSNRMHCSGLAWHPDVATQMVLASEDDRLPVIQMWDLRFASSPLRVLENHARGILAIAWSMADPELLLSCGKDAKILCSNPNTGEVLYELPTNTQWCFDIQWCPRNPAVLSAASFDGRISVYSIMGGSTDGLRQKQVDKLSSSFGNLDPFGTGQPLPPLQIPQQTAQHSIVLPLKKPPKWIRRPVGASFSFGGKLVTFENVRMPSHQGAEQQQQQHHVFISQVVTEKEFLSRSDQLQQAVQSQGFINYCQKKIDASQTEFEKNVWSFLKVNFEDDSRGKYLELLGYRKEDLGKKIALALNKVDGANVALKDSDQVAQSDGEESPAAEEQLLGEHIKEEKEESEFLPSSGGTFNISVSGDIDGLITQALLTGNFESAVDLCLHDNRMADAIILAIAGGQELLARTQKKYFAKSQSKITRLITAVVMKNWKEIVESCDLKNWREALAAVLTYAKPDEFSALCDLLGTRLENEGDSLLQTQACLCYICAGNVEKLVACWTKAQDGSHPLSLQDLIEKVVILRKAVQLTQAMDTSTVGVLLAAKMSQYANLLAAQGSIAAALAFLPDNTNQPNIMQLRDRLCRAQGEPVAGHESPKIPYEKQQLPKGRPGPVAGHHQMPRVQTQQYYPHVRIAPTVTTWSNKTPTALPSHPPAASPSDTQGENPPPPGFIMHGNVNPNAAGQLPTSPGHMHTQVPPYPQPQPYQPAQPYPFGTGGSAMYRPQQPVAPPTSNAYPNTPYISSASSYTGQSQLYAAQHQASSPTSSPATSFPPPPSSGASFQHGGPGAPPSSSAYALPPGTTGTLPAASELPASQRTGPQNGWNDPPALNRVPKKKKMPENFMPPVPITSPIMNPLGDPQSQMLQQQPSAPVPLSSQSSFPQPHLPGGQPFHGVQQPLGQTGMPPSFSKPNIEGAPGAPIGNTFQHVQSLPTKKITKKPIPDEHLILKTTFEDLIQRCLSSATDPQTKRKLDDASKRLEFLYDKLREQTLSPTITSGLHNIARSIETRNYSEGLTMHTHIVSTSNFSETSAFMPVLKVVLTQANKLGV

SEQ ID NO: 17084 - protein, 855 aa, Homo sapiens
CTNEALVDEIMMTLKQAFTVAAVQQTAKAPAQLCEGCPLQSLHKLCERIEGMNSSKTKLELQKHLTTLTNQEQATIFEEVQKLRPRNEQRENELIISFLRCLYEEKQKEHIHIGEMKQTSQMAAENIGSELPPSATRFRLDMLKNKAKRSLTESLESILSRGNKARGLQEHSISVDLDSSLSSTLSNTSKEPSVCEKEALPISESSFKLLGSSEDLSSDSESHLPEEPAPLSPQQAFRRRANTLSHFPIECQEPPQPARGSPGVSQRKLMRYHSVSTETPHERNISYRNALRKKLHSSSSVPNFLKFLAPVDENNTSDFMNTKRDFESKANHLGDSGGTPVKTRRHSWRQQIFLRVATPQKACDSSSRYEDYSELGELPPRSPLEPVCEDGPFGPPPEEKKRTSRELRELWQKAILQQILLLRMEKENQKLQASENDLLNKRLKLDYEEITPCLKEVTTVWEKMLSTPGRSKIKFDMEKMHSAVGQGVPRHHRGEIWKFLAEQFHLKHQFPSKQQPKDVPYKELLKQLTSQQHAILIDLGRTFPTHPYFSAQLGAGQLSLYNILKAYSLLDQEVGYCQGLSFVAGILLLHMSEEEAFKMLKFLMFDMGLRKQYRPDMIILQIQMYQLSRLLHDYHRDLYNHLEEHEIGPSLYAAPWFLTMFASQFPLGFVARVFDMIFLQGTEVIFKVALSLLGSHKPLILQHENLETIVDFIKSTLPNLGLVQMEKTINQVFEMDIAKQLQAYEVEYHVLQEELIDSSPLSDNQRMDKLEKTNSSLRKQNLDLLEQLQVANGRIQSLEATIEKLLSSESKLKQAMLTLELERSALLQTVEELRRRSAEPSDREPECTQPEPTGD

SEQ ID NO: 17085 - protein, 1041 aa, Homo sapiens
MGDPGSEIIESVPPAGPEASESTTDENEDDIQFVSEGPLRPVLEYIDLVSSDDEEPSTSYTDENIKRKDHIDYQKDKVALTLARLARHVEVEKQQKEEKNRAFREKIDFQHAHGLQELEFIRGHSDTEAARLCVDQWLKMPGLKTGTINCGTKSSFRRGGHTWVSGKPILCPIMHCNKEFDNGHLLLGHLKRFDHSPCDPTITLHGPFFSSFACVVCYKKFVTQQQYRDHLFDKEATDDGHNNNLLPQIIQCFACPNCFLLFSRKEECSKHMSGKNHFHQSFKLGDNKGIAHPISFPSFAKKLLISLCKDVPFQVKCVACHKTLRSHMELTAHFRVHCRNAGPVAVAEKSITQVAEKFILRGYCPDCNQVFVDETSTQNHKQNSGHKVRVINSVEESVLLYCHSSEGNKDPSSDLHLLLDQSKFSSLKRTMSIKESSSLECIAIPKKKMNLKDKSHEGVACVQKEKSVVKTWFCECNQRFPSEDAVEKHVFSANTMGYKCVVCGKVCDDSGVIRLHMSRIHGGAHLNNFLFWCRTCKKELTRKDTIMAHVTEFHNGHRYFYEMDEVEGETLPSSSTTLDNLTANKPSSAITVIDHSPANSSPRGKWQCRICEDMFDSQEYVKQHCMSLASHKFHRYSCAHCRKPFHKIETLYRHCQDEHDNEIKIKYFCGLCDLIFNVEEAFLSHYEEHHSIDYVFVSEKTETSIKTEDDFPVIETSNQLTCGCRESYICKVNRKEDYSRCLQIMLDKGKLWFRCSLCSATAQNLTDMNTHIHQVHKEKSDEEEQQYVIKCGTCTKAFHDPESAQQHFHRKHCFLQKPSVAHFGSEKSNLYKFTASASHTERKLKQAINYSKSLDMEKGVENDLSYQNIEEEIVELPDLDYLRTMTHIVFVDFDNWSNFFGHLPGHLNQGTFIWGFQGGNTNWKPPLNCKIYNYLNRIGCFFLHPRCSKRKDAADFAICMHAGRLDEQLPKQIPFTILSGDQGFLELENQFKKTQRPAHILNPHHLEGDMMCALLNSISDTTKGTQLQSQCKPPKRRRLHC

SEQ ID NO: 17086 - protein, 575 aa, Homo sapiens
MAVEPSSSESIKRRAGRRMKKMSNIYESAANTLGIFNSPCLTKVELRVACKGISDRDALSKPDPCVILKMQSHGQWFEVDRTEVIRTCINPVYSKLFTVDFYFEEVQRLRFEVHDISSNHNGLKEADFLGGMECTLGQIVSQRKLSKSLLKHGNTAGKSSITVIAEELSGNDDYVELAFNARKLDDKDFFSKSDPFLEIFRMNDDATQQLVHRTEVVMNNLSPAWKSFKVSVNSLCSGDPDRRLKCIVWDWDSNGKHDFIGEFTSTFKEMRGAMEGKQVQWECINPKYKAKKKNYKNSGTVILNLCKIHKMHSFLDYIMGGCQIQFTVAIDFTASNGDPRNSCSLHYIHPYQPNEYLKALVAVGEICQDYDSDKMFPAFGFGARIPPEYTVSHDFAINFNEDNPECAGIQGVVEAYQSCLPKLQLYGPTNIAPIIQKVAKSASEETNTKEASQYFILLILTDGVITDMADTREAIVHASHLPMSVIIVGVGNADFSDMQMLDGDDGILRSPKGEPVLRDIVQFVPFRNFKHASPAALAKSVLAEVPNQVVDYYNGKGIKPKCSSEMYESSRTLAP

SEQ ID NO: 17087 - protein, 916 aa, Homo sapiens
IESPKRSIRDSGYIDCWDSERSDSLSPPRHGRDDSFDSLDSFGSRSRQTPSPDVVLRGSSDGRGSDSESDLPHRKLPDVKKDDMSARRTSHGEPKSAVPFNQYLPNKSNQTAYVPAPLRKKKAEREEYRKSWSTATSPLGGERPFRYGPRTPVSDDAESTSMFDMRCEEEAAVQPHSRARQEQLQLINNQLREEDDKWQDDLARWKSRRRSVSQDLIKKEEERKKMEKLLAGEDGTSERRKSIKTYREIVQEKERRERELHEAYKNARSQEEAEGILQQYIERFTISEAVLERLEMPKILERSHSTEPNLSSFLNDPNPMKYLRQQSLPPPKFTATVETTIARASVLDTSMSAGSGSPSKTVTPKAVPMLTPKPYSQPKNSQDVLKTFKVDGKVSVNGETVHREEEKERECPTVAPAHSLTKSQMFEGVARVHGSPLELKQDNGSIEINIKKPNSVPQELAATTEKTEPNSQEDKNDGGKSRKGNIELASSEPQHFTTTVTRCSPTVAFVEFPSSPQLKNDVSEEKDQKKPENEMSGKVELVLSQKVVKPKSPEPEATLTFPFLDKMPEANQLHLPNLNSQVDSPSSEKSPVMTPFKFWAWDPEEERRRQEKWQQEQERLLQERYQKEQDKLKEEWEKAQKEVEEEERRYYEEERKIIEDTVVPFTVSSSSADQLSTSSSMTEGSGTMNKIDLGNCQDEKQDRRWKKSFQGDDSDLLLKTRESDRLEEKGSLTEGALAHSGNPVSKGVHEDHQLDTEAGAPHCGTNPQLAQDPSQNQQTSNPTHSSEDVKPKTLPLDKSINHQIESPSERRKKSPREHFQAGPFSPCSPTPPGQSPNRSISGKKLCSSCGLPLGKGAAMIIETLNLYFHIQCFRCGICKGQLGDAVSGTDVRIRNGLLNCNDCYMRSRSAGQPTTL

SEQ ID NO: 17088 - protein, 402 aa, Homo sapiens
MSAPVIFDRSREEIEEEANGDIFDIEIGVSDPEKVGDGMNAYMAYRVTTKTSLSMFSKSEFSVKRRFSDFLGLHSKLASKYLHVGYIVPPAPEKSIVGMTKVKVGKEDSSSTEFVEKRRAALERYLQRTVKHPTLLQDPDLRQFLESSELPRAVNTQALSGAGILRMVNKAADAVNKMTIKMNESDAWFEEKQQQFENLDQQLRKLHVSVEALVCHRKELSANTAAFAKSAAMLGNSEDHTALSRALSQLAEVEEKIDQLHQEQAFADFYMFSELLSDYIRLIAAVKGVFDHRMKCWQKWEDAQITLLKKREAEAKMMVANKPDKIQQAKNEIREWEAKVQQGERDFEQISKTIRKEVGRFEKERVKDFKTVIIKYLESLVQTQQQLIKYWEAFLPEAKAIA

SEQ ID NO: 17089 - protein, 544 aa, Homo sapiens
VIFARRSVRCVCRRLLEGPCDFYASAAELCRVGSWHSPINCPWVEVSRRTLWGSVETPVQIKEFGAVSKVDFSPQPPYNYAVTASSRIHIYGRYSQEPIKTFSRFKDTAYCATFRQDGRLLVAGSEDGGVQLFDISGRAPLRQFEGHTKAVHTVDFTADKYHVVSGADDYTVKLWDIPNSKEILTFKEHSDYVRCGCASKLNPDLFITGSYDHTVKMFDARTSESVLSVEHGQPVESVLLFPSGGLLVSAGGRYVKVWDMLKGGQLLVSLKNHHKTVTCLCLSSSGQRLLSGSLDRKVKVYSTTSYKVVHSFDYAASILSLALAHEDETIVVGMTNGILSVKHRKSEAKKESLPRRRRPAYRTFIKGKNYMKQRDDILINRPAKKHLELYDRDLKHFRISKALDRVLDPTCTIKTPEITVSIIKELNRRGVLANALAGRDEKEISHVLNFLIRNLSQPRFAPVLINAAEIIIDIYLPVIGQSPVVDKKFLLLQGLVEKEIDYQRELLETLGMMDMLFATMRRKEGTSVLEHTSDGFPENKKIES

SEQ ID NO: 17090 - protein, 1601 aa, Homo sapiens
MNSPVDPGARQALRKKPPERTPEDLNTIYSYLHGMEILSNLREHQLRLMSARARYERYSGNQVLFCSETIARCWYILLSGSVLVKGSMVLPPCSFGKQFGGKRGCDCLVLEPSEMIVVENAKDNEDSILQREIPARQSRRRFRKINYKGERQTITDDVEVNSYLSLPADLTKMHLTENPHPQVTHVSSSQSGCSIASDSGSSSLSDIYQATESEVGDVDLTRLPEGPVDSEDDEEEDEEIDRTDPLQGRDLVRECLEKEPADKTDDDIEQLLEFMHQLPAFANMTMSVRRELCSVMIFEVVEQAGAIILEDGQELDSWYVILNGTVEISHPDGKVENLFMGNSFGITPTLDKQYMHGIVRTKVDDCQFVCIAQQDYWRILNHVEKNTHKVEEEGEIVMVHEHRELDRSGTRKGHIVIKATPERLIMHLIEEHSIVDPTYIEDFLLTYRTFLESPLDVGIKLLEWFKIDSLRDKVTRIVLLWVNNHFNDFEGDPAMTRFLEEFEKNLEDTKMNGHLRLLNIACAAKAKWRQVVLQKASRESPLQFSLNGGSEKGFGIFVEGVEPGSKAADSGLKRGDQIMEVNGQNFENITFMKAVEILRNNTHLALTVKTNIFVFKELLFRTEQEKSGVPHIPKIAEKKSNRHSIQHVPGDIEQTSQEKGSKKVKANTVSGGRNKIRKILDKTRFSILPPKLFSDGGLSQSQDDSIVGTRHCRHSLAIMPIPGTLSSSSPDLLQPTTSMLDFSNPSDIPDQVIRVFKVDQQSCYIIISKDTTAKEVVFHAVHEFGLTGASDTYSLCEVSVTPEGVIKQRRLPDQFSKLADRIQLNGRYYLKNNMETETLCSDEDAQELVKESQLSMLQLSTIEVATQLSMRDFDLFRNIEPTEYIDDLFKLNSKTGNTHLKRFEDIVNQETFWVASEILTEANQLKRMKIIKHFIKIALHCRECKNFNSMFAIISGLNLASVARLRGTWEKLPSKYEKHLQDLQDIFDPSRNMAKYRNILSSQSMQPPIIPLFPVVKKDMTFLHEGNDSKVDGLVNFEKLRMISKEIRQVVRMTSANMDPAMMFRQRSLSQGSTNSNMLDVQGGAHKKRARRSSLLNAKKLYEDAQMARKVKQYLSSLDVETDEEKFQMMSLQWEPAYGTLTKNLSEKRSAKSSEMSPVPMRSAGQTTKAHLHQPHRVSQVLQVPAVNLHPIRKKGQTKDPALNTSLPQKVLGTTEEISGKKHTEDTISVASSLHSSPPASPQGSPHKGYTLIPSAKSDNLSDSSHSEISSRSSIVSNCSVDSMSAALQDERCSSQALAVPESTGALEKTEHASGIGDHSQHGPGWTLLKPSLIKCLAVSSSVSNEEISQEHIIIEAADSGRGSWTSCSSSSHDNFQSLPNPKSWDFLNSYRHTHLDDPIAEVEPTDSEPYSCSKSCSRTCGQCKGSLERKSWTSSSSLSDTYEPNYGTVKQRVLESTPAESSEGLDPKDATDPVYKTVTSSTEKGLIVYCVTSPKKDDRYREPPPTPPGYLGISLADLKEGPHTHLKPPDYSVAVQRSKMMHNSLSRLPPASLSSNLVACVPSKIVTQPQRHNLQPFHPKLGDVTDADSEADENEQVSAV

SEQ ID NO: 17091 - protein, 129 aa, Homo sapiens
MVFLPLKWSLATMSFLLSSLLALLTVSTPSWCQSTEASPKRSDGTPFPWNKIRLPEYVIPVHYDLLIHANLTTLTFWGTTKVEITASQPTSTIILHSHHLQISRATLRKGAGERLSEEPLQVLEHPRQE

SEQ ID NO: 17092 - protein, 147 aa, Homo sapiens
QQDSQELLHYLLDAVRTEETKRIQASILKAFNNPTTKTADDETRKKVKAYGKEGVKMNFIDRIFIGELTSTVMCEECANISTVKDPFIDISLPIIEERVSKPLLWGRMNKYRSLRETDHDRYSGNVTIENIHQPRAAKKHSSSKDKR

SEQ ID NO: 17093 - protein, 398 aa, Homo sapiens
MKDSPFQVTKLYWLNEKWDFIASASDMAAEQGQILVIATAAVGGFTLLVILTLFFLITGRCQWYIKAKMKSEEKRRNHLQNGHLRFPGIKTYIDPDTYEDPSLAVHEFAKEIDPSRIRIERVIGAGEFGEVCSGRLKTPGKREIPVAIKTLKGGHMDRQRRDFLREASIMGQFDHPNIIRLEGVVTKRSFPAIGVEAFCPSFLRAGFLNSIQAPHPVPGGGSLPPRIPAGRPVMIVVEYMENGSLDSFLRKHDGHFTVIQLVGMLRGIASGMKYLSDMGYVHRDLAARNILVNSNLVCKVSDFGLSRVLEDDPEAAYTTTRPTNHNKEQSELVKEDGLESLCEQCESSSGYGTGLVLMWKRNRRAMGASGQTRKQCDKRDNPPTDLFQTLTLNLCYSA

SEQ ID NO: 17094 - protein, 61 aa, Homo sapiens
MLFEGKVNPQTQSLLAECGEWTRRSLHLRVLGRQLILPTDKGVQHFQGSTPASAVHRPPLS

SEQ ID NO: 17095 - protein, 1506 aa, Homo sapiens
MTTVVVHVDSKAELTTLLEQWEKEHGSGQDMVPILTRMSQLIEKETEEYRKGDPDPFDDRHPGRADPECMLGHLLRILFKNDDFMNLVNAYVMTSREPPLNTAACRLLLDIMPGLETAVVFQEKEGIVENLFKWAREADQPLRTYSTGLLGGAMENQDIAANYRDENSQLVAIVLRRLRELQLQEVALRQENKRPSPRKLSSEPLLPLDEEAVDMDYGDMAVDVVDGDQEEASGDMEISFHLDSGHKTSSRVNSTTKPEDGGLKKNKSAKQGDRENFRKAKQKLGFSSSDPDRMFVELSNSSWSEMSPWVIGTNYTLYPMTPAIEQRLILQYLTPLGEYQELLPIFMQLGSRELMMFYIDLKQTNDVLLTFEALKHLASLLLHNKFATEFVAHGGVQKLLEIPRPSMAATGVSMCLYYLSYNQDAMERVCMHPHNVLSDVVNYTLWLMECSHASGCCHATMFFSICFSFRAVLELFDRYDGLRRLVNLISTLEILNLEDQGALLSDDEIFASRQTGKHTCMALRKYFEAHLAIKLEQVKQSLQRTEGGILVHPQPPYKACSYTHEQIVEMMEFLIEYGPAQLYWEPAEVFLKLSCVQLLLQLISIACNWKTYYARNDTVRFALDVLAILTVVPKIQLQLAESVDVLDEAGSTVSTVGISIILGVAEGEFFIHDAEIQKSALQIIINCVCGPDNRISSIGKFISGTPRRKLPQNPKSSEHTLAKMWNVVQSNNGIKVLLSLLSIKMPITDADQIRALACKALVGLSRSSTVRQIISKLPLFSSCQIQQLMKEPVLQDKRSDHVKFCKYAAELIERVSGKPLLIGTDVSLARLQKADVVAQSRISFPEKELLLLIRNHLISKGLGETATVLTKEADLPMTAASHSSAFTPVTAAASPVSLPRTPRIANGIATRLGSHAAVGASAPSAPTAHPQPRPPQGPLALPGPSYAGNSPLIGRISFIRERPSPCNGRKIRVLRQKSDHGAYSQSPAIKKQLDRHLPSPPTLDSIITEYLREQHARCKNPVATCPPFSLFTPHQCPEPKQRRQAPINFTSRLNRRASFPKYGGVDGGCFDRHLIFSRFRPISVFREANEDESGFTCCAFSARERFLMLGTCTGQLKLYNVFSGQEEASYNCHNSAITHLEPSRDGSLLLTSATWSQPLSALWGMKSVFDMKHSFTEDHYVEFSKHSQDRVIGTKGDIAHIYDIQTGNKLLTLFNPDLANNYKRNCATFNPTDDLVLNDGVLWDVRSAQAIHKFDKFNMNISGVFHPNGLEVIINTEIWDLRTFHLLHTVPALDQCRVVFNHTGTVMYGAMLQADDEDDLMEERMKSPFGSSFRTFNATDYKPIATIDVKRNIFDLCTDTKDCYLAVIENQGSMDALNMDTVCRLYEVGRQRLAEDEDEEEDQEEEEQEEEDDDEDDDDTDDLDELDTDQLLEAELEEDDNNENAGEDGDNDFSPSDEELANLLEEGEDGEDEDSDADEEVELILGDTDSSDNSDLEDDIILSLNE

SEQ ID NO: 17096 - protein, 161 aa, Homo sapiens
MKSLLLLVLISICWADHLSDNYTLDHDRAIHIQAENGPHLLVEAEQAKVFSHRGGNVTLPCKFYRDPTAFGSGIHKIRIKWTKLTSDYLKEVDVFVSMGYHKKTYGGYQGRVFLKGGSDSDASLVITDLTLEDYGRYKCEVIEGLEDDTVVVALDLQGMYL

SEQ ID NO: 17097 - protein, 333 aa, Homo sapiens
MSAPCVEADDAVCRCAYGYYQDETTGRCEACRVCEAGSGLVFSCQDKQNTVCEECPDGTYSDEANHVDPCLPCTVCEDTERQLRECTRWADAECEEIPGRWITRSTPPEGSDSTAPSTQEPEAPPEQDLIASTVAGVVTTVMGSSQPVVTRGTTDNLIPVYCSILAAVVVGLVAYIAFKRWNSCKQNKQGANSRPVNQTPPPEGEKLHSDSGISVDSQSLHDQQPHTQTASGQALKGDGGLYSSLPPAKREEVEKLLNGSAGDTWRHLAGELGYQPEHIDSFTHEACPVRALLASWATQDSATLDALLAALRRIQRADLVESLCSESTATSPV

SEQ ID NO: 17098 - protein, 569 aa, Homo sapiens
MAPPVRLERPFPSRRFPGLLLAALVLLLSSFSDQCNVPEWLPFARPTNLTDDFEFPIGTYLNYECRPGYSGRPFSIICLKNSVWTSAKDKCKRKSCRNPPDPVNGMAHVIKDIQFRSQIKYSCPKGYRLIGSSSATCIISGNTVIWDNKTPVCDRIICGLPPTIANGDFTSISREYFHYGSVVTYHCNLGSRGKKVFELVGEPSIYCTSKDDQVGIWSGPAPQCIIPNKCTPPNVENGILVSDNRSLFSLNEVVEFRCQPGFGMKGPSHVKCQALNKWEPELPSCSRVCQPPPDVLHAERTQRDKDNFSPGQEVFYSCEPGYDLRGSTYLHCTPQGDWSPAAPRCEVKSCDDFLGQLPNGHVLFPLNLQLGAKVDFVCDEGFQLKGSSASYCVLAGMESLWNSSVPVCERKSCETPPVPVNGMVHVITDIHVGSRINYSCTTGHRLIGHSSAECILSGNTAHWSMKPPICQQIFCPNPPAILNGRHTGTPLGDIPYGKEVSYTCDPHPDRGMTFNLIGESTIRRTSEPHGNGVWSSPAPRCELPVGAGSHDALIVGKFYEVFAEEFCHL

SEQ ID NO: 17099 - protein, 723 aa, Homo sapiens
MKEPLDGECGKAVVPQQELLDKIKEEPDNAQEYGCVQQPKTQESKLKIGGVSSVNERPIAQQLNPGFQLSFASSGPSVLLPSVPAVAIKVFCSGCKKMLYKGQTAYHKTGSTQLFCSTRCITRHSSPACLPPPPKKTCTNCSKDILNPKDVITTRFENSYPSKDFCSQSCLSSYELKKKPVVTIYTKSISTKCSMCQKNADTRFEVKYQNVVHGLCSDACFSKFHSTNNLTMNCCENCGSYCYSSSGPCQSQKVFSSTSVTAYKQNSAQIPPYALGKSLRPSAEMIETTNDSGKTELFCSINCLSAYRVKTVTSSGVQVSCHSCKTSAIPQYHLAMSNGTIYSFCSSSCVVAFQNVFSKPKGTNSSAVPLSQGQVVVSPPSSRSAVSIGGGNTSAVSPSSIRGSAAASLQPLAEQSQQVALTHTVVKLKCQHCNHLFATKPELLFYKGKMFLFCGKNCSDEYKKKNKVVAMCDYCKLQKIIKETVRFSGVDKPFCSEVCKFLSARDFGERWGNYCKMCSYCSQTSPNLVENRLEGKLEEFCCEDCMSKFTVLFYQMAKCDGCKRQGKLSESIKWRGNIKHFCNLFCVLEFCHQQIMNDCLPQNKVNISKAKTAVTELPSARTDTTPVITSVMSLAKIPATLSTGNTNSVLKGAVTKEAAKIIQDESTQEDAMKFPSSQSSQPSRLLKNKGISCKPVTQTKATSCKPHTQHKECQTECPVRAVC

SEQ ID NO: 17100 - protein, 662 aa, Homo sapiens
MKKFSRMPKSEGGSGGGAAGGGAGGAGAGAGCGSGGSSVGVRVFAVGRHQVTLEESLAEGGFSTVFLVRTHGGIRCALKRMYVNNMPDLNVCKREITIMKELSGHKNIVGYLDCAVNSISDNVWEVLILMEYCRAGQVVNQMNKKLQTGFTEPEVLQIFCDTCEAVARLHQCKTPIIHRDLKVENILLNDGGNYVLCDFGSATNKFLNPQKDGVNVVEEEIKKYTTLSYRAPEMINLYGGKPITTKADIWALGCLLYKLCFFTLPFGESQVAICDGNFTIPDNSRYSRNIHCLIRFMLEPDPEHRPDIFQVSYFAFKFAKKDCPVSNINNSSIPSALPEPMTASEAAARKSQIKARITDTIGPTETSIAPRQRPKANSATTATPSVLTIQSSATPVKVLAPGEFGNHRPKGALRPGNGPEILLGQGPPQQPPQQHRVLQQLQQGDWRLQQLHLQHRHPHQQQQQQQQQQQQQQQQQQQQQQQQQQQHHHHHHHHLLQDAYMQQYQHATQQQQMLQQQFLMHSVYQPQPSASQYPTMMPQYQQAFFQQQMLAQHQPSQQQASPEYLTSPQEFSPALVSYTSSLPAQVGTIMDSSYSANRSVADKEAIANFTNQKNISNPPDMSGWNPFGEDNFSKLTEEELLDREFDLLRSSKGHLKAYFASQ

SEQ ID NO: 17101 - protein, 1151 aa, Homo sapiens
MQKSVRYNEGHALYLAFLARKEGTKRGFLSKKTAEASRWHEKWFALYQNVLFYFEGEQSCRPAGMYLLEGCSCERTPAPPRAGAGQGGVRDALDKQYYFTVLFGHEGQKPLELRCEEEQDGKEWMEAIHQASYADILIEREVLMQKYIHLVQIVETEKIAANQLRHQLEDQDTEIERLKSEIIALNKTKERMRPYQSNQEDEDPDIKKIKKVQSFMRGWLCRRKWKTIVQDYICSPHAESMRKRNQIVFTMVEAESEYVHQLYILVNGFLRPLRMAASSKKPPISHDDVSSIFLNSETIMFLHEIFHQGLKARIANWPTLILADLFDILLPMLNIYQEFVRNHQYSLQVLANCKQNRDFDKLLKQYEANPACEGRMLETFLTYPMFQIPRYIITLHELLAHTPHEHVERKSLEFAKSKLEELSRVMHDEVSDTENIRKNLAIERMIVEGCDILLDTSQTFIRQGSLIQVPSVERGKLSKVRLGSLSLKKEGERQCFLFTKHFLICTRSSGGKLHLLKTGGVLSLIDCTLIEEPDASDDDSKGSGQVFGHLDFKIVVEPPDAAAFTVVLLAPSRQEKAAWMSDISQCVDNIRCNGLMTIVFEENSKVTVPHMIKSDARLHKDDTDICFSKTLNSCKVPQIRYASVERLLERLTDLRFLSIDFLNTFLHTYRIFTTAAVVLGKLSDIYKRPFTSIPVRSLELFFATSQNNRGEHLVDGKSPRLCRKFSSPPPLAVSRTSSPVRARKLSLTSPLNSKIGALDLTTSSSPTTTTQSPAASPPPHTGQIPLDLSRGLSSPEQSPGTVEENVDNPRVDLCNKLKRSIQKAVLESAPADRAGVESSPAADTTELSPCRSPSTPRHLRYRQPGGQTADNAHCSVSPASAFAIATAAAGHGSPPGFNNTERTCDKEFIIRRTATNRVLNVLRHWVSKHAQDFELNNELKMNVLNLLEEVLRDPDLLPQERKAAANILRALSQDDQDDIHLKLEDIIQMTDCMKAECFESLSAMELAEQITLLDHVIFRSIPYEEFLGQGWMKLDKNERTPYIMKTSQHFNDMSNLVASQIMNYADVSSRANAIEKWVAVADICRCLHNYNGVLEITSALNRSAIYRLKKTWAKVSKQTKALMDKLQKTVSSEGRFKNLRETLKNSSRLNT

SEQ ID NO: 17102 - protein, 202 aa, Homo sapiens
MGRRSRGRRLQQQQRPEDAEDGAEGGGKRGEAGWEGGYPEIVKENKLFEHYYQELKIVPEGEWGQFMDALREPLPATLRITGYKSHAKEILHCLKNKYFKELEDLEVDGQKVEVPQPLSWYPEELAWHTNLSRKILRKSPHLEKFHQFLVSETESGNISRQEAVSMIPPLLLNVRPHHKRDLLLRMMWTTSAATCSSIKPRG

SEQ ID NO: 17103 - protein, 898 aa, Homo sapiens
MAVRPGLWPALLGIVLAAWLRGSGAQQSATVANPVPGANPDLLPHFLVEPEDVYIVKNKPVLLVCKAVPATQIFFKCNGEWVRQVDHVIERSTDGSSGLPTMEVRINVSRQQVEKVFGLEEYWCQCVAWSSSGTTKSQKAYIRIAYLRKNFEQEPLAKEVSLEQGIVLPCRPPEGIPPAEVEWLRNEDLVDPSLDPNVYITREHSLVVRQARLADTANYTCVAKNIVARRRSASAAVIVYVNGGWSTWTEWSVCSASCGRGWQKRSRSCTNPAPLNGGAFCEGQNVQKTACATLCPVDGSWSPWSKWSACGLDCTHWRSRECSDPAPRNGGEECQGTDLDTRNCTSDLCVHTASGPEDVALYVGLIAVAVCLVLLLLVLILVYCRKKEGLDSDVADSSILTSGFQPVSIKPSKADNPHLLTIQPDLSTTTTTYQGSLCPRQDGPSPKFQLTNGHLLSPLGGGRHTLHHSSPTSEAEEFVSRLSTQNYFRSLPRGTSNMTYGTFNFLGGRLMIPNTGISLLIPPDAIPRGKIYEIYLTLHKPEDVRLPLAGCQTLLSPIVSCGPPGVLLTRPVILAMDHCGEPSPDSWSLRLKKQSCEGSWEDVLHLGEEAPSHLYYCQLEASACYVFTEQLGRFALVGEALSVAAAKRLKLLLFAPVACTSLEYNIRVYCLHDTHDALKEVVQLEKQLGGQLIQEPRVLHFKDSYHNLRLSIHDVPSSLWKSKLLVSYQEIPFYHIWNGTQRYLHCTFTLERVSPSTSDLACKLWVWQVEGDGQSFSINFNITKDTRFAELLALESEAGVPALVGPSAFKIPFLIRQKIISSLDPPCRRGADWRTLAQKLHLDSHLSFFASKPSPTAMILNLWEARHFPNGNLSQLAAAVAGLGQPDAGLFTVSEAEC

SEQ ID NO: 17104 - protein, 608 aa, Homo sapiens
MALITLRKNLYRLSDFQMHRALAALKNKPLNHVHKVVKERLCPWLCSRQPEPFGVKFHHAHCKKFHSKNGNDLHPLGGPVFSQVSDCDRLEQNVKNEESQMFYRRLSNLTSSEEVLSFISTMETLPDTMAAGALQRICEVEKKDGDQGLPKEILENSIFQALCFQFEKEPSQLSNTSLVTALQALILLHVDPQSSLLLNLVAECQNRLRKGGMEVRNLCILGESLITLHSSGCVTLELIINQLQGEKLETFTPEDIVALYRILQACTEKVDEHQTFLNKINNFSLSIVSNLSPKLISQMLTALVVLDQSQAFPLIIKLGKYVVRHVPHFTNEELRRVLEAFIYFGHHDTFFTKALEHRVAAVCLTLDPEVVCRVMEYCSRELILSKPILNAVAETFVCQTEKFSPRQISALMEPFGKLNYLPPNASALFRKLENVLFTHFNYFPPKSLLKLLHSCSLNECHPVNFLAKIFKPLFLQRLQGKESHLDTLSRAQLTQLFLASVLECPFYKGPKLLPKYQVKSFLTPCCSLETPVDSQLYRYVKIGLTNLLGARLYFAPKVLTPYCYTIAFSPIDQCKVEGIKAKQRNEYRKIVFVRVSHEEFFLSSLTRC

SEQ ID NO: 17105 - protein, 662 aa, Homo sapiens
MGRWAWVPSPWPPPGLGPFLLLLLLLLLLPRGFQPQPGGNRTESPEPNATATPAIPTILVTSVTSETPATSAPEAEGPQSGGLPPPPRAVPSSSSPQAQALTEDGRPCRFPFRYGGRMLHACTSEGSAHRKWCATTHNYDRDRAWGYCVEATPPPGGPAALDPCASGPCLNGGSCSNTQDPQSYHCSCPRAFTGKDCGTEKCFDETRYEYLEGGDRWARVRQGHVEQCECFGGRTWCEGTRHTACLSSPCLNGGTCHLIVATGTTVCACPPGFAGRLCNIEPDERCFLGNGTGYRGVASTSASGLSCLAWNSDLLYQELHVDSVGAAALLGLGPHAYCRNPDNDERPWCYVVKDSALSWEYCRLEACDLETEGRESLTRVQLSPDLLATLPEPASPGRQACGRRHKKRTFLRPRIIGGSSSLPGSHPWLAAIYIGDSFCAGSLVHTCWVVSAAHCFSHSPPRDSVSVVLGQHFFNRTTDVTQTFGIEKYIPYTLYSVFNPSDHDLVLIRLKKKGDRCATRSQFVQPICLPEPGSTFPAGHKCQIAGWGHLDENVSGYSSSLREALVPLVADHKCSSPEVYGADISPNMLCAGYFDCKSDACQGDSGGPLACEKNGVAYLYGIISWGDGCGRLHKPGVYTRVANYVDWINDRIRPPRRLVAPS

SEQ ID NO: 17106 - protein, 193 aa, Homo sapiens
MSGKHYKGPEVSCCIKYFIFGFNVIFWFLGITFLGIGLWAWNEKGVLSNISSITDLGGFDPVWLFLVVGGVMFILGFAGCIGALRENTFLLKFFSVFLGIIFFLELTAGVLAFVFKDWIKDQLYFFINNNIRAYRDDIDLQNLIDFTQEYIPMQVESDVAFHSPAALKIPQKMSSTLSVAMMPGKNQKLTSRL

SEQ ID NO: 17107 - protein, 226 aa, Homo sapiens
MADEKPSNGVLVHMVKLLIKTFLDGIFDDLMENNVLNTDEIHLIGKCLKFVVSNAENLVDDITETAQIAGKIFREHLWNSKKQLSSDISSDGEREANMPGLNIRNKEFNYLHNRNGSELDLLGMUDLLENLGYSVVIKENLTAQMVLGLFGSPLTVEKPVQILMVGSCKVTSVMMLLQRLMWKRTSLLSNLPHHVQHSFETPNILTQLPTIERLSMTRYFYLFPGN

SEQ ID NO: 17108 - protein, 162 aa, Homo sapiens
MLRFPTCFPSFRVVGEKQLPQEIIFLVWSPKRDLIALANTAGEVLLHRLASFHRVWSFPPNENTGKEVTCLAWRPDGKLLAFALADTKKIVLCDVEKPESLHSFSVEAPVSCMHWMEVTVESSVLTSFYNAEDESNLLLPKLPTLPKNYSNTSKIFSEENSD

SEQ ID NO: 17109 - protein, 490 aa, Homo sapiens
MTTIPRKGSSHLPGSLHTCKLKLQEDRRQQEKSVIAQPIFVFEKGEQTFKRPAEDTLYEAAEPECNGFPTKRVRSSSFTFHITDSQSQGVSTLSQKQMRCSSVTNLPTFPHSGPVRKNNVFMTSALVQSSVDIKSAEQGPVKHSKHVIRPAILQLPQARSCAKVRKTFGHKALESCKTKEKTNNKISEGNSYLLSENLSRARISVQLSTNQDFLGATSVGCQPNEDKCSFKSCSSNFVFGENMVERVLGTQKLTQPQLENDSYAKEKPFKSIPKFPVNFLSSRTDSIKNTSLIESAAAFSSQPSRKCLLEKIDVITGEETEHNVLKINCKLFIFNKTTQSWIERGRGTLRLNDTASTDCGTLQSRLIMRNQGSLRLILNSKLWAQMKIQRANHKNVRITATDLEDYSIKIFLIQASAQDTAYLYAAIHHRLVALQSFNKQRDVNQAESLSETAQQLNCESCDENEDDFIQVTKNGSDPSSWTHRQSVACS

SEQ ID NO: 17110 - protein, 392 aa, Homo sapiens
MGSLSTANVEFCLDVFKELNSNNIGDNIFFSSLSLLYALSMVLLGARGETEEQLEKVLHFSHTVDSLKPGFKDSPKCSQAGRIHSEFGVEFSQINQPDSNCTLSIANRLYGTKTMAFHQQYLSCSEKWYQARLQTVDFEQSTEETRKTINAWVENKTNGKVANLFGKSTIDPSSVMVLVNAIYFKGQWQNKFQVRETVKSPFQLSEGKNVTVEMMYQIGTFKLAFVKEPQMQVLELPYVNNKLSMIILLPVGIANLKQIEKQLNSGTFHEWTSSSNMMEREVEVHLPRFKLETKYELNSLLKSLGVTDLFNQVKADLSGMSPTKGLYLSKAIHKSYLDVSEEGTEAAAATGDSIAVKSLPMRAQFKANHPFLFFIRHTHTNTILFCGKLASP

SEQ ID NO: 17111 - protein, 1281 aa, Homo sapiens
MGGCFCIPRERSLTRGPGKETPSKDPTVSSECIASSEYKEKCFLPQNINPDLTLSFCVKSRSRRCVNGPLQEAARRRLWALENEDQEVRMLFKDLSARLVSIQSQRAQFLITFKTMEEIWKFSTYLNLEHLLFDHKYWLNCILVEDTEIQVSVDDKHLETIYLGLLIQEGHFFCRALCSVTPPAEKEGECLTLCKNELISVKMAEAGSELEGVSLVTGQRGLVLVSALEPLPLPFHQWFLKNYPGSCGLSRKRDWTGSYQIGRGRCKALTGYEPGEKDELNFYQGESIEIIGFVIPGLQWFIGKSTSSGQVGFVPTRNIDPDSYSPMSRNSAFLSDEERCSLLALGSDKQTECSSFLHTLARTDITSVYRLSGFESIQNPPNDLSASQPEGFKEVRPGRAWEEHQAVGSRQSSSSEDSSLEEELLSATSDSYRLPEPDDLDDPELLMDLSTGQEEEAENFAPILAFLDHEGYADHFKSLYDFSFSFLTSSFYSFSEEDEFVAYLEASRKWAKKSHMTWAHARLCFLLGRLSIRKVKLSQARVYFEEAIHILNGAFEDLSLVATLYINLAAIYLKQRLRHKGSALLEKAGALLACLPDRESSAKHELDVVAYVLRQGIVVGSSPLEARACFLAIRLLLSLGRHEEVLPFAERLQLLSGHPPASEAVASVLSFLYDKKYLPHLAVASVQQHGIQSAQGMSLPIWQVHLVLQNTTKLLGFPSPGWGEVSALACPMLRQALAACEELADRSTQRALCLILSKVYLEHRSPDGAIHYLSQALVLGQLLGEQESFESSLCLAWAYLLASQAKKALDVLEPLLCSLKETESLTQRGVIYNLLGLALQGEGRVNRAAKSYLRALNRAQEVGDVHNQAVAMANLGHLSLKSWAQHPARNYLLQAVRLYCELQASKETDMELVQVFLWLAQVLVSGHQLTHGLLCYEMALLFGLRHRHLKSQLQATKSLCHFYSSVSPNPEACITYHEHWLALAQQLRDREMEGRLLESLGQLYRNLNTARSLRRSLTCIKESLRIFIDLGETDKAAEAWLGAGRLHYLMQEDELVELCLQAAIQTALKSEEPLLALKLYEEAGDVFFNGTRHRHHAVEYYRAGAVPLARRLKAVRTELRIFNKLTELQISLEGYEKALEFATLAARLSTVTGDQRQELVAFHRLATVYYSLHMYEMAEDCYLKTLSLCPPWLQSPKEALYYAKVYYRLGRLTFCQLKDAHDATEYFLLALAAAVLLGDEELQDTIRSRLDNICQSPLWHSRPSGCSSERARWLSGGGLAL

SEQ ID NO: 17112 - protein, 1081 aa, Homo sapiens
MPRRKQEQPKRLPSHVSRQEEAEGELSEGEHWYGNSSETPSEASYGEVQENYKLSLEDRIQEQSTSPDTSLGSTTPSSHTLELVALDSEVLRDSLQCQDHLSPGVSSLCDDDPGSNKPLSSNLRRLLEAGSLKLDAAATANGRVESPVNVGSNLSFSPPSHHAQQLSVLARKLAEKQEQNDQYTPSNRFIWNQGKWLPNSTTTCSLSPDSAILKLKAAANAVLQDKSLTRTEETMRFESFSSPFSSQSASSTLAALSKKVSERSLTPGQEHPPPASSFLSLASMTSSAALLKEVAARAAGSLLAEKSSLLPEDPLPPPPSEKKPEKVTPPPPPPPPPPPPPPPQSLELLLLPVPKGRVSKPSNSASEEESGKPFQCPICGLVIKRKSYWKRHMVIHTGLKSHQCPLCPFRCARKDNLKSHMKVHQHQDRGETFQCQLCPFTSSRHFSLKLHMRCHQHFLRTEAKVKEEIPDPDVKGSPHLSDSACLGQQREGGGTELVGTMMTSNTPERTSQGGAGVSPLLVKEEPKEDNGLPTSFTLNAADRPANHTKLKDPSEYVANSASALFSQDISVKMASDFLMKLSAANQKEPMNLNFKVKEEPKEGESLSTTLPRSSYVFSPESEVSAPGVSEDALKPQEGKGSVLRRDVSVKAASELLMKLSAESYKETQMVKIKEEPMEVDIQDSHVSISPSRNVGYSTLIGREKTEPLQKMPEGRVPPERNLFSQDISVKMASELLFQLSEKVSKEHNHTKENTIRTTTSPFFSEDTFRQSPFTSNSKELLPSDSVLHGRISAPETEKIVLEAGNGLPSWKFNDQLFPCDVCGKVFGRQQTLSRHLSLHTEERKYKCHLCPYAAKCRANLNQHLTVHSVKLVSTDTEDIVSAVTSEGSDGKKHPYYYSCHVCGFETELNVQFVSHMSLHVDKEQWMFSICCTACDFVTMEEAEIKTHIGTKHTGEDRKTPSESNSPSSSSLSALSDSANSKDDSDGSQKNKGGNNLLVISVMPGSQPSLNSEEKPEKGFECVFCNFVCKTKNMFERHLQIHLITRMFECDVCHKFMKTPEQLLEHKKCHTVPTGGLNSGQW

SEQ ID NO: 17113 - protein, 502 aa, Homo sapiens
METLQESLNTLLKQLEEEKKTLESQVKYYALKLEQESKAYQKINNERRTYLAEMSQGSGLHQVSKRQQVDQLPRMQENLVKTLLLKEELDPLKAKIDILLVGDVTVGYLADTVQKLFANIAEVTITISDTKEAAALLDDCIFNMVLLKVPSSLSAEELEAIKLIRFGKKKNTHSLFVFIIPENFKGCISGHGMDIALTEPLTMEKMSNVVKYWTTCPSNTVKTENATGPEELGLPLQRSYSEHLGYFPTDLFACSESLRNGNGLELNASLSEFEKNKKISLLHSSKEKLRRERIKYCCEQLRTLLPYVKGRKNDAASVLEATVDYVKYIREKISPAVMAQITEALQSNMRFCKKQQTPIELSLPGTVMAQRENSVMSTYSPERGLQFLTNTCWNGCSTPDAESSLDEAVRVPSSSASENAIGDPYKTHISSAALSLNSLHTVRYYSKVTPSYDATAVTNQNISIHLPSAMPPVSKLLPRHCTSGLGQTCTTHPNCLQQFWAY

SEQ ID NO: 17114 - protein, 707 aa, Homo sapiens
MSVNISTAGKGVDPNTVDTYDSGDDWEIGVGNLIIDLDADLEKDRQKFEMNNSTTTTSSSNSKDCGGPASSGAGATAALADGLKFASVQASAPQGNSHKETSKSKVKRSKTSKDANKSLPSAALYGIPEISSTGKRQEVQGRPGEATGMNSALGQSVSSGGSGNPNSNSTSTSTSAATAGAGSCGKSKEEKPGKSQSSRGAKRDKDAGKSRKDKHDLLQGHQNGSGSQAPSGGHLYGFGAKSNGGGASPFHCGGTGSGSVAAAGEVSKSAPDSGLMGNSMLVKKEEEEEESHRRIKKLKTEKVDPLFTVPAPPPPISSSLTPQILPSYFSPSSSNIAAPVEQLLVRTRSVGVNTCEVGVVTEPECLGPCEPGTSVNLEGIVWHETEEGVLVVNVTWRNKTYVGTLLDCTKHDWAPPRFCESPTSDLEMRGGRGRGKRARSAAAAPGSEASFTESRGLQNKNRGGANGKGRRGSLNASGRRTPPNCAAEDIKASPSSTNKRKNKPPMELDLNSSSEDNKPGKRVRTNSRSTPTTPQGKPETTFLDQGCSSPVLIDCPHPNCNKKYKHINGLRYHQAHAHLDPENKLEFEPDSEDKISDCEEGLSNVALECSEPSTSVSAYDQLKAPASPGAGNPPGTPKGKRELMSNGPGSIIGAKAGKNSGKKKGLNNELNNLPVISNMTAALDSCSAADGSLAAEMPKLEAEGLID

SEQ ID NO: 17115 - protein, 632 aa, Homo sapiens
MNGDSRAAVVTSPPPTTAPHKERYFDRVDENNPEYLRERNMAPDLRQDFNMMEQKKRVSMILQSPAFCEELESMIQEQFKKGKNPTGLLALQQIADFMTTNVPNVYPAAPQGGMAALNMSLGMVTPVNDLRGSDSIAYDKGEKLLRCKLAAFYRLADLFGWSQLIYNHITTRVNSEQEHFLIVPFGLLYSEVTASSLVKINLQGDIVDRGSTNLGVNQAGFTLHSAIYAARPDVKCVVHIHTPAGAAVSAMKCGLLPISPEALSLGEVAYHDYHGILVDEEEKVLIQKNLGPKSKVLILRNHGLVSVGESVEEAFYYIHNLVVACEIQVRTLASAGGPDNLVLLNPEKYKAKSRSPGSPVGEGTGSPPKWQIGEQEFEALMRMLDNLGYRTGYPYRYPALREKSKKYSDVEVPASVTGYSFASDGDSGTCSPLRHSFQKQQREKTRWLNSGRGDEASEEGQNGSSPKSKTKWTKEDGHRTSTSAVPNLFVPLNTNPKEVQEMRNKIREQNLQDIKTAGPQSQVLCGVVMDRSLVQGELVTASKAIIEKEYQPHVIVSTTGPNPFTTLTDRELEEYRREVERKQKGSEENLDEAREQKEKSPPDQPAVPHPPPSTPIKLEEAGDGCAREYLLP

SEQ ID NO: 17116 - protein, 609 aa, Homo sapiens
MKEQDLCNKIMAKILENYNTLFEVEYTENDHLRCENLARLIIVKEVYYKNSLPILLTRGLERDMPKPPPKTKNMESLNSTRSHERTGPDDFEWMSDERKGNEKDGGHTQHFESPTMKIQEHPSLSDTKQQRNQDAGDQEESFVSEVPQSDLTALCDEKNWEEPIPAFSSWQRENSDSDEAHLSPQAGRLIRQLLDEDSDPMLSPRFYAYGQSRQYLDDTEVPPSPPNSHSFMRRRSSSLGSYDDEQEDLTPAQLTRRIQSLKKKIRKFEDRFEEEKKYRPSHSDKAANPEVLKWTNDLAKFRRQLKESKLKISEEDLTPRMRQRSNTLPKSFGSQLEKEDEKKQELVDKAIKPSVEATLESIQRKLQEKRAESSRPEDIKDMTKDQIANEKVALQKALLYYESIHGRPVTKNERQVMKPLYDRYRLVKQILSRANTIPIIGSPSSKRRSPLLQPIIEGETASFFKEIKEEEEGSEDDSNVKPDFMVTLKTDFSARCFLDQFEDDADGFISPMDDKIPSKCSQDTGLSNLHAASIPELLEHLQEMREEKKRIRKKLRDFEDNFFRQNGRNVQKEDRTPMAEEYSEYKHIKAKLRLLEVLISKRDTDSKSM

SEQ ID NO: 17117 - protein, 1292 aa, Homo sapiens
MDASYDGTEVTVVMEEIEEAYCYTSPGPPKKKKKYKIHGEKTKKPRSAYLLYYYDIYLKVQQELPHLPQSEINKKISESWRLLSVAERSYYLEKAKLEKEGLDPNSKLSALTAVVPDIPGFRKILPRSDYIIIPKSSLQEDRSCPQLELCVAQNQMSPKGPPLVSNTAPETVPSHAGMAEQCLAVEALAEEVGALTQSGAVQEIATSEILSQDVLLEDASLEVGESHQPYQTSLVIEETLVNGSPDLPTGSLAVPHPQVGESVSVVTVMRDSSESSSSAPATQFIMLPLPAYSVVENPTSIKLTTTYTRRGHGTCTSPGCSFTYVTRHKPPKCPTCGNFLGGKWIPKEKPAKVKVELASGVSSKGSVVKRNQQPVTTEQNSSKENASKLTLENSEAVSQLLNVAPPREVGEESEWEEVIISDAHVLVKEAPGNCGTAVTKTPVVKSGVQPEVTLGTTDNDSPGADVPTPSEGTSTSSPLPAPKKPTGADLLTPGSRAPELKGRARGKPSLLAAARPMRAILPAPVNVGRGSSMGLPRARQAFSLSDKTPSVRTCGLKPSTLKQLGQPIQQPSGPGEVKLPSGPSNRTSQVKVVEVKPDMFPPYKYSCTVTLDLGLATSRGRGKCKNPSCSYVYTNRHKPRICPSCGVNLAKDRTEKTTKAIEVSSPLPDVLNATEPLSTAQREIQRQSTLQLLRKVLQIPENESELAEVFALIHELNSSRLILSNVSEETVTIEQTSWSNYYESPSTQCLLCSSPLFKGGQNSLAGPQECWLLTASRLQTVTAQVKMCLNPHCLALHSFIDIYTGLFNVGNKLLVSLDLLFAIRNQIKLGEDPRVSINVVLKSVQEQTEKTLTSEELSQLQELLCNGYWAFECLTVRDYNDMICGICGVAPKVEMAQRSEENVLALKSVEFTWPEFLGSNEVNVEDFWATMETEVIEQVAFPASIPITKFDASVIAPFFPPLMRGAVVVNTEKDKNLDVQPVPGSGSALVRLLQEGTCKLDEIGSYSEEKLQHLLRQCGIPFGAEDSKDQLCFSLLALYESVQNGARAIRPPRHFTGGKIYKVCPHQVVCGSKYLVRGESARDHVDLLASSRHWPPVYVVDMATSVALCADLCYPELTNQMWGRNQGCFSSPTEPPVSVSCPELLDQHYTVDMTETEHSIQHPVTKTATRRIVHAGLQPNPGDPSAGHHSLALCPELAPYATILASIVDSKPNGVRQRPIAFDNATHYYLYNRLMDFLTSREIVNRQIHDIVQSCQPGEVVIRDTLYRLGVAQIKTETEEEGEEEEVAAVAE

SEQ ID NO: 17118 - protein, 380 aa, Homo sapiens
MAEAMKLQKMKLMAMNTLQGNGSQNGTESEPDDLNSNTGGSESSWDKDKMQSPFAAPGPQHGIAHAALAGQPGIGGAPTLNPLQQNHLLTNRLDLPFMMMPHPLLPVSLPPASVAMAMNQMNHLNTIANMAAAAQIHSPLSRAGTSVIKERIPESPSPAPSLEENHRPGSQTSSHTSSSVSSSPSQMDHHLERMEEVPVQIPIMKSPLDKIQLTPGQALPAGFPGPFIFADSLSSVETLLTNIQGLLKVALDNARIQEKQIQQEKKELRLELYREREIRENLERQLAVELQSRTTMQKRLKKEKKTKRKLQEALEFESKRREQVEQALKQATTSDSGLRMLKDTGIPDIEIENNGTPHDSAAMQGGNYYCLEMAQQLYSA

SEQ ID NO: 17119 - protein, 499 aa, Homo sapiens
MNGPEDLPKSYDYDLIIIGGGSGGLAAAKEAAQYGKKVMVLDFVTPTPLGTRWGLGGTCVNVGCIPKKLMHQAALLGQALQDSRNYGWKVEETVKHDWDRMIEAVQNHIGSLNWGYRVALREKKVVYENAYGQFIGPHRIKATNNKGKEKIYSAERFLIATGERPRYLGIPGDKEYCISSDDLFSLPYCPGKTLVVGASYVALECAGFLAGIGLDVTVMVRSILLRGFDQDMANKIGEHMEEHGIKFIRQFVPIKVEQIEAGTPGRLRVVAQSTNSEEIIEGEYNTVMLAIGRDACTRKIGLETVGVKINEKTGKIPVTDEEQTNVPYIYAIGDILEDKVELTPVAIQAGRLLAQRLYAGSTVKCDYENVPTTVFTPLEYGACGLSEEKAVEKFGEENIEVYHSYFWPLEWTIPSRDNNKCYAKIICNTKDNERVVGFHVLGPNAGEVTQGFAAALKCGLTKKQLDSTIGIHPVCAEVFTTLSVTKRSGASILQAGCUG

SEQ ID NO: 17120 - protein, 221 aa, Homo sapiens
MSEEQFGGDGAAAAATAAVGGSAGEQEGAMVAATQGAAAAAGSGAGTGGGTASGGTEGGSAESEGAKIDASKNEEDEGHSNSSPRHSEAATAQREEWKMFIGGLSWDTTKKDLKDYFSKFGEVVDCTLKLDPITGRSRGFGFVLFKESESVDKVMDQKEHKLNGKVIDPKRAKAMKTKEPVKKIFVGGLSPDTPEEKIREYFGGFGEVESIELPMDNKTNK

SEQ ID NO: 17121 - protein, 462 aa, Homo sapiens
MMEESGIETTPPGTPPPNPAGLAATAMSSTPVPLAATSSFSSPNVSSMESFPPLAYSTPQPPLPPVRPSAPLPFVPPPAVPSVPPLVTSMPPPVSPSTAAAFGNPPVSHFPPSTSAPNTLLPAPPSGPPISGFSVGSTYDITRGHAGRAPQTPLMPSFSAPSGTGLLPTPITQQASLTSLAQGTGTTSAITFPEEQEDPRITRGQDEASAGGIWGFIKGVAGNPMVKSVLDKTKHSVESMITTLDPGMAPYIKSGGELDIVVTSNKEVKVAAVRDAFQEVFGLAVVVGEAGQSNIAPQPVGYAAGLKGAQERIDSLRRTGVIHEKQTAVSVENFIAELLPDKWFDIGCLVVEDPVHGIHLETFTQATPVPLEFVQQAQSLTPQDYNLRWSGLLVTVGEVLEKSLLNVSRTDWHMAFTGMSRRQMIYSAARAIADDYFPRIPKEQWQSMAWLKLEIFLPLVTW

SEQ ID NO: 17122 - protein, 441 aa, Homo sapiens
MFPNSILGRPPFTPNHQQHNNFFTLSPTVYSHQQLIDAQFNFQNADLSRAVSLQQLTYGNVSPIQTSASPLFRGRKRLSDEKNLPLDGKRQRFHSPHQEPTVVNQIVPLSGERRYSMPPLFHTHYVPDIVRCVPPFREIAFLEPREITLPEAKDKLSQQILELFETCQQQISDLKKKELCRTQLQREIQLLFPQSRLFLVGSSLNGFGTRSSDGDLCLVVKEEPCFFQVNQKTEARHILTLVHKHFCTRLSGYIERPQLIRAKVPIVKFRDKVSCVEFDLNVNNIVGIRNTFLLRTYAYPLPEPILPSLQKIYPESFSPAIQLHLVHQAPCNVPPYLSKNESNLGDLLLGFLKYYATEFDWNSQMISVREAKAIPRPDGIEWRNKYICVEEPFDGTNTARAVHEKQKFDMIKDQFLKSWHRLKNKRDLNSILPVRAAVLKR

SEQ ID NO: 17123 - protein, 1166 aa, Homo sapiens
MAPTLFQKLFSKRTGLGAPGRDARDPDCGFSWPLPEFDPSQIRLIVYQDCERRGRNVLFDSSVKRRNEDISVSKLGSDAQVKVFGKCCQLKPGGDSSSSLDSSVTSSSDIKDQCLKYQGSRCSSDANMLGEMMFGSVAMSYKGSTLKIHQIRSPPQLMLSKVFTARTGSSICGSLNTLQDSLEFINQDNNTLKADNNTVINGLLGNIGLSQFCSPRRAFSEQGPLRLIRSASFFAVHSNPMDMPGRELNEDRDSGIARSASLSSLLITPFPSPNSSLTRSCASSYQRRWRRSQTTSLENGVFPRWSIEESFNLSDESCGPNPGIVRKKKIAIGVIFSLSKDEDENNKFNEFFFSHFPLFESHMNKLKSAIEQAMKMSRRSADASQRSLAYNRIVDALNEFRTTICNLYTMPRIGEPVWLTMMSGTPEKNHLCYRFMKEFTFLMENASKNQFLPALITAVLTNHLAWVPTVMPNGQPPIKIFLEKHSSQSVDMLAKTHPYNPLWAQLGDLYGAIGSPVRLARTVVVGKRQDMVQRLLYFLTYFIRCSELQETHLLENGEDEAIVMPGTVITTTLEKGEIEESEYVLVTMHRNKSSLLFKESEEIRTPNCNCKYCSHPLLGQNVENISQQEREDIQNSSKELLGISDECQMISPSDCQEENAVDVKQYRDKLRTCFDAKLETVVCTGSVPVDKCALSESGLESTEETWQSEKLLDSDSHTGKAMRSTGMVVEKKPPDKIVPASFSCEAAQTKVTFLIGDSMSPDSDTELRSQAVVDQITRHHTKPLKEERGAIDQHQETKQTTKDQSGESDTQNMVSEEPCELPCWNHSDPESMSLFDEYFNDDSIETRTIDDVPFKTSTDSKDHCCMLEFSKILCTKNNKQNNEFCKCIETVPQDSCKTCFPQQDQRDTLSILVPHGDKESSDKKIAVGTEWDIPRNESSDSALGDSESEDTGHDMTRQVSSYYGGEQEDWAEEDEIPFPGSKLIEVSAVQPNIANFGRSLLGGYCSSYVPDFVLQGIGSDERFRQCLMSDLSHAVQHPVLDEPIAEAVCIIADMDKWTVQVASSQRRVTDNKLGKEVLVSSLVSNLLHSTLQLYKHNLSPNFCVMHLEDRLQELYFKSKMLSEYLRGQMRVHVKELGVVLGIESSDLPLLAAVASTHSPYVAQILL

SEQ ID NO: 17124 - protein, 419 aa, Homo sapiens
MGPLSAPPCTQHITWKGLLLTASLLNFWNPPTTAQVTIEAQPPKVSEGKDVLLLVHNLPQNLTGYIWYKGQIRDLYHYVTSYIVDGQIIKYGPAYSGRETVYSNASLLIQNVTQEDTGSYTLHIIKRGDGTGGVTGRFTFTLYLETPKPSISSSNFNPREATEAVILTCDPETPDASYLWWMNGQSLPMTHSLQLSETNRTLYLFGVTNYTAGPYECEIRNPVSASRSDPVTLNLLPKLPKPYITINNLNPRENKDVSTFTCEPKSENYTYIWWLNGQSLPVSPRVKRRIENRILILPSVTRNETGPYQCEIRDRYGGIRSDPVTLNVLYGPDLPRIYPSFTYYHSGQNLYLSCFADSNPPAQYSWTINGKFQLSGQKLSIPQITTKHSGLYACSVRNSATGKESSKSVTVRVSDWTLP

SEQ ID NO: 17125 - protein, 466 aa, Homo sapiens
MFVGVARHSGSQDEVSRGVEPLEAARAQPAKDRRAKGTPKSSKPGKKHRYLRLLPEALIRFGGFRKRKKAKSSVSKKPGEVDDSLEQPCGLGCLVSTCCECCNNIRCFMIFYCILLICQGVVFGLIDVSIGDFQKEYQLKTIEKLALEKSYDISSGLVAIFIAFYGDRKKVIWFVASSFLIGLGSLLCAFPSINEENKQSKVGIEGIAECTSMIGYALGYVLGAPLVKVPENTTSATKTGKLGNLTAPCNEKCRCSSSIYSSICGRDDIEYFSPCFAGCTYSKAQNQKKMYYNCSCIKEGLITADAEGDFIDARPGKCDAKCYKLPLFIAFIFSTLIFSGFSGVPIVLAMTRVVPDKLRSLALGVSYVILRIFGTIPGPSIFKMSGETSCILRDVNKCGHTGRCWIYNKTKMAFLLVGICFLCKLCTIIFTTIAFFIYKRRLNENTDFPDVTVKNPKVKKKEETDL

SEQ ID NO: 17126 - protein, 126 aa, Homo sapiens
MFPPSGHQDVSERRLDTQRPQVTMWERDVSSDRQEPGRRGRSWGLEGSQALSQQAEVIVRQLQELRRLEEEVRLLRETSLQQKMRLEAQAMELEALARAEKAGRAEAEGLRAALAGAEVVRKNLEE

SEQ ID NO: 17127 - protein, 435 aa, Homo sapiens
MASVASCDSRPSSDELPGDPSSQEEDEDYDFEDRVSDSGSYSSASSDYDDLEPEWLDSVQKNGELFYLELSEDEEESLLPETPTVNHVRFSENEIIIEDDYKERKKYEPKLKQFTKILRRKRLLPKRCNKKNSNDNGPVSILKHQSNQKTGVIVQQRYKDVNVYVNPKKLTVIKAKEQLKLLEVLVGIIHQTKWSWRRTGKQGDGERLVVHGLLPGGSAMKSGQVLIGDVLVAVNDVDVTTENIERVLSCIPGPMQVKLTFENAYDVKRETSHPRQKKTQSNTSDLVKLLWGEEVEGIQQSGLNTPHIIMYLTLQLDSETSKEEQEILYHYPMSEASQKLKSVRGIFLTLCDMLENVTGTQVTSSSLLLNGKQIHVAYWKESDKLLLIGLPAEEVPLPRLRNMIENVIQTLKFMYGSLDSIMKEFSVIVSSGKII

SEQ ID NO: 17128 - protein, 348 aa, Homo sapiens
MKSRAPQLHLEYRFYKQLGSGDGIPQVYYFGPCGKYNAMVLELLGPSLEDLFDLCDRTFSLKTVLMIAIQLISRMEYVHSKNLIYRDVKPENFLIGRPGNKTQQVIHIIDFGLAKEYIDPETKKHIPYREHKSLTGTARYMSINTHLGKEQSRRDDLEALGHMFMYFLRGSLPWQGLKADTLKERYQKIGDTKRATPIEVLCENFPEMATYLRYVRRLDFFEKPDYDYLRKLFTDLFDRKGYMFDYEYDWIGKQLPTPVGAVQQDPALSSNREAHQHRDKMQQSKNQVVSSTNGELNTDDPTAGRSNAPITAPTEVEVMDETNCQKVLNMWCCCFFKRRKRKTIQRHK

SEQ ID NO: 17129 - protein, 569 aa, Homo sapiens
MSKKGRSKGEKPEMETDAVQMANEELRAKLTSIQIEFQQEKSKVGKLRERLQEAKLEREQEQRRHTAYISELKAKLHEEKTKELQALREGLIRQHEQEAARTAKIKEGELQRLQATLNVLRDGAADKVKTALLTEAREEARRAFDGERLRLQQEILELKAARKQAEEALSNCMQADKTKAADLRAAYQAHQDEVHRIKRECERDIRRLMDEIKGKDRVILALEKELGVQAGQTQKLLLQKEALDEQLVQVKEAERHHSSPKRELPPGIGDMVELMGVQDQHMDERDVRRFQLKIAELNSVIRKLEDRNTLLADERNELLKRSRETEVQLKPLVEKNKRMNKKNEDLLQSIQRMEEKIKNLTRENVEMKEKLSAQASLKRHTSLNDLSLTRDEQEIEFLRLQVLEQQHVIDDLSLERERLLRSKRHRGKSLKPPKKHVVETFFGFDEESVDSETLSETSYNTDRTDRTPATPEEDLDDATAREEADLRFCQLTREYQALQRAYALLQEQVGGTLDAEREARTREQLQADLLRCQAKIEDLEKLLVEKGQDSKWVEEKQLLIRTNQDLLEK

SEQ ID NO: 17130 - protein, 944 aa, Homo sapiens
MGIGLCVPPARCWKRLTRSSRGQPLERPAATIIIGLSIVERSKQTQRGPVDFSRSHSAPAAEQECKPRISAARSTPAPPSPAVPGFRTTPCQTFTAWCNSHLRKAGTQIENIEEDFRNGLKLMLLLEVISGERLPRPDKGKMRFHKIANVNKALDFIASKGVKLVSIGAEEIVDGNLKMTLGMIWTIILRFAIQDISVEETSAKEGLLLWCQRKTAPYRNVNVQNFHTSWKDGLALCALIHRHRPDLIDYAKLRKDDPIGNLNTAFEVAEKYLDIPKMLDAEDIVNTPKPDEKAIMTYVSCFYHAFAGAEQAETAANRICKVLAVNQENEKLMEEYEKLASELLEWIRRTVPWLENRVGEPSMSAMQRKLEDFRDYRRLHKPPRIQEKCQLEINFNTLQTKLRLSHRPAFMPSEGKLVSDIANAWRGLEQVEKGYEDWLLSEIRRLQRLQHLAEKFRQKASLHEAWTRGKEEMLSQRDYDSALLQEVRALLRRHEAFESDLAAHQDRVEHIAALAQELNELDYHEAASVNSRCQAICDQWDNLGTLTQKRRDALERMEKLLETIDRLQLEFARRAAPFNNWLDGAVEDLQDVWLVHSVEETQSLLTAHDQFKATLPEADRERGAIMGIQGEIQKICQTYGLRPCSTNPYITLSPQDINTKWDMVRKLVPSCDQTLQEELARQQVNERLRRQFAAQANAIGPWIQAKVEEVGRLAAGLAGSLEEQMAGLRQQEQNIINYKTNIDRLEGDHQLLQESLVFDNKHTVYSMEHIRVGWEQLLTSIARTINEVENQVLTRDAKGLSQEQLNEFRASFNHFDRKQNGMMEPDDFRACLISMGYDLGEVEFARIMTMVDPNAAGVVTFQAFIDFMTRETAETDTTEQVVASFKILAGDKNYITPEELRRELPAKQAEYCIRRMVPYKGSGAPAGALDYVAFSSALYGESDL

SEQ ID NO: 17131 - protein, 880 aa, Homo sapiens
MRTGYSSVPSKLRWYHGKLDRTIAEERLRQAGKSGSYLIRESDRRPGSFVLSFLSQMNVVNHFRIIAMCGDYYIGGRRFSSLSDLIGYYSHVSCLLKGEKLLYPVAPPEPVEDRRRVRAILPYTKVPDTDEISFLKGDMFIVHNELEDGWMWVTNLRTDEQGLIVEDLVEEVGREEDPHEGKIWFHGKISKQEAYNLLMTVGQVCSFLVRPSDNTPGDYSLYFRTNENIQRFKICPTPNNQFMMGGRYYNSIGDIIDHYRKEQIVEGYYLKEPVPMQDQEQVLNDTVDGKEIYNTIRRKTKDAFYKNIVKKGYLLKKGKGKRWKNLYFILEGSDAQLIYFESEKRATKPKGLIDLSVCSVYVVHDSLFGRPNCFQIVVQHFSEEHYIFYFAGETPEQAEDWMKGLQAFCNLRKSSPGTSNKRLRQVSSLVLHIEEAHKLPVKHFTNPYCNIYLNSVQVAKTHAREGQNPVWSEEFVFDDLPPDINRFEITLSNKTKKSKDPDILFMRCQLSRLQKGHATDEWFLLSSHIPLKGIEPGSLRVRARYSMEKIMPEEEYSEFKELILQKELHVVYALSHVCGQDRTLLASILLRIFLHEKLESLLLCTLNDREISMEDEATTLFRATTLASTLMEQYMKATATQFVHHALKDSILKIMESKQSCELSPSKLEKNEDVNTNLTHLLNILSELVEKIFMASEILPPTLRYIYGCLQKSVQHKWPTNTTMRTRVVSGFVFLRLICPAILNPRMFNIISDSPSPIAARTLILVAKSVQNLANLVEFGAKEPYMEGVNPFIKSNKHRMIMFLDELGNVPELPDTTEHSRTDLSRDLAALHEICVAHSDELRTLSNERGAQQHVLKKLLAITELLQQKQNQYTKTNDVR

SEQ ID NO: 17132 - protein, 161 aa, Homo sapiens
MKLLHVFLLFLCFHLRFCKVTYTSQEDLVEKKCLAKKYTHLSCDKVFCQPWQRCIEGTCVCKLPYQCPKNGTAVCATNRRSFPTYCQQKSLECLHPGTKFLNNGTCTAEGKFSVSLKHGNTDSEGIVEVKLVDQDKTMFICKSSWSMREANVACLDLGFQQ

SEQ ID NO: 17133 - protein, 1028 aa, Homo sapiens
MADKTPGGSQKASSKTRSSDVHSSGSSDAHMDASGPSDSDMPSRTRPKSPRKHNYRNESARESLCDSPHQNLSRPLLENKLKAFSIGKMSTAKRTLSKKEQEELKKKEDEKAAAEIYEEFLAAFEGSDGNKVKTFVRGGVVNAAKEEHETDEKRGKIYKPSSRFADQKNPPNQSSNERPPSLLVIETKKPPLKKGEKEKKKSNLELFKEELKQIQEERDERHKTKGRLSRFEPPQSDSDGQRRSMDAPSRRNRSSVLDDYAPGSHDVGDPSTTNLYLGNINPQMNEEMLCQEFGRFGPLASVKIMWPRTDEERARERNCGFVAFMNRRDAERALKNLNGKMIMSFEMKLGWGKAVPIPPHPIYIPPSMMEHTLPPPPSGLPFNAQPRERLKNPNAPMLPPPKNKEDFEKTLSQAIVKVVIPTERNLLALIHRMIEFVVREGPMFEAMIMNREINNPMFRFLFENQTPAHVYYRWKLYSILQANSPTKWRTEDFRMFKNGSFWRPPPLNPYLHGMSEEQETEAFVEEPSKKGALKEEQRDKLEEILRGLTPRKNDIGDAMVFCLNNAEAAEEIVDCITESLSILKTPLPKKIARLYLVSDVLYNSSAKVANASYYRKFFETKLCQIFSDLNATYRTIQGHLQSENFKQRVMTCFRAWEDWAIYPEPFLIKLQNIFLGLVNIIEEKETEDVPDDLDGAPIEEELDGAPLEDVDGIPIDATPIDDLDGVPIKSLDDDLDGVPLDATEDSKKNEPIFKVAPSKWEAVDESELEAQAVTTSKWELFDQHEESEEEENQNQEEESEDEEDTQSSKSEEHHLYSNPIKEEMTESKFSKYSEMSEEKRAKLREIELKVMKFQDELESGKRPKKPGQSFQEQVEHYRDKLLQREKEKELERERERDKKDKEKLESRSKDKKEKDECTPTRKERKRRHSTSPSPSRSSSGRRVKSPSPKSERSERSERSHKESSRSRSSHKDSPRDVSKKAKRSPSGSRTPKRSRRSRSRSPKKSGKKSRSQSRSPHRSHKKSKKNKH

SEQ ID NO: 17134 - protein, 1327 aa, Homo sapiens
MPSSLLGAAMPASTSAAALQEALENAGRLIDRQLQEDRMYPDLSELLMVSAPNNPTVSGMSDMDYPLQGPGLLSVPNLPEISSIRRVPLPPELVEQFGHMQCNCMMGVFPPISRAWLTIDSDIFMWNYEDGGDLAYFDGLSETILAVGLVKPKAGIFQPHVRHLLVLATPVDIVILGLSYANLQTGSGVLNDSLSGGMQLLPDPLYSLPTDNTYLLTITSTDNGRIFLAGKDGCLYEVAYQAEAGWFSQRCRKINHSKSSLSFLVPSLLQFTFSEDDPILQIAIDNSRNILYTRSEKGVIQVYDLGQDGQGMSRVASVSQNAIVSAAGNIARTIDRSVFKPIVQIAVIENSESLDCQLLAVTHAGVRLYFSTCPFRQPLARPNTLTLVHVRLPPGFSASSTVEKPSKVHRALYSKGILLMAASENEDNDILWCVNHDTFPFQKPMMETQMTAGVDGHSWALSAIDELKVDKIITPLNKDHIPITDSPVVVQQHMLPPKKFVLLSAQGSLMFHKLRPVDQLRHLLVSNVGGDGEEIERFFKLHQEDQACATCLILACSTAACDREVSAWATRAFFRYGGEAQMRFPTTLPPPSNVGPILGSPVYSSSPVPSGSPYPNPSFLGTPSHGIQPPAMSTPVCALGNPATQATNMSCVTGPEIVYSGKHNGICIYFSRIMGNIWDASLVVERIFKSGNREITAIESSVPCQLLESVLQELKGLQEFLDRNSQFAGGPLGNPNTTAKVQQRLIGFMRPENGNPQQMQQELQRKFHEAQLSEKISLQAIQQLVRKSYQALALWKLLCEHQFTIIVAELQKANELLQRSRQVQNKTEKERMLRESLKEYQKISNQVDLSNVCAQYRQVRFYEGVVELSLTAAEKKDPQGLGLHFYKHGEPEEDIVGLQAFQERLNSYKCITDTLQELVNQSKAAPQSPSVPKKPGPPVLSSDPNMLSNEEAGHHFEQMLKLSQRSKDELFSIALYNWLIQVDLADKLLQVASPFLEPHLVRMAKVDQNRVRYMDLLWRYYEKNRSFSNAARVLSRLADMHSTEISLQQRLEYIARAILSAKSSTAISSIAADGEFLHELEEKMEVARIQLQIQETLQRQYSHHSSVQDAVSQLDSELMDITKLYGEFADPFKLAECKLAIIHCAGYSDPILVQTLWQDIIEKELSDSVTLSSSDRMHALSLKIVLLGKIYAGTPRFFPLDFIVQFLEQQVCTLNWDVGFVIQTMNEIGVPLPRLLEVYDQLFKSRDPFWNRMKKPLHLLDCIHVLLIRYVENPSQVLNCERRRFTNLCLDAVCGYLVELQSMSSSVAVQAITGNFKSLQAKLERLH

SEQ ID NO: 17135 - protein, 342 aa, Homo sapiens
MALFAVFQTTFFLTLLSLRTYQSEVLAERLPLTPVSLKVSTNSTRQSLHLQWTVHNLPYHQELKMVFQIQISRIETSNVIWVGNYSTTVKWNQVLHWSWESELPLECATHFVRIKSLVDDAKFPEPNFWSNWSSWEEVSVQDSTGQDILFVFPKDKLVEEGTNVTICYVSRNIQNNVSCYLEGKQIHGEQLDPHVTAFNLNSVPFIRNKGTNIYCEASQGNVSEGMKGIVLFVSKVLEEPKDFSCETEDFKTLHCTWDPGTDTALGWSKQPSQSYTLFESFSGEKKLCTHKNWCNWQITQDSQETYNFTLIAENYLRKRSVNILFNLTHRGETRVVTAHRGH

SEQ ID NO: 17136 - protein, 973 aa, Homo sapiens
MEVTCLLLLALIPFHCRGQGVYAPAQAQIVHAGQACVVKEDNISERVYTIREGDTLMLQCLVTGHPRPQVRWTKTAGSASDKFQETSVFNETLRIERIARTQGGRYYCKAENGVGVPAIKSIRVDVQYLDEPMLTVHQTVSDVRGNFYQEKTVFLRCTVNSNPPARFIWKRGSDTLSHSQDNGVDIYEPLYTQGETKVLKLKNLRPQDYASYTCQVSVRNVCGIPDKAITFRLTNTTAPPALKLSVNETLVVNPGENVTVQCLLTGGDPLPQLQWSHGPGPLPLGALAQGGTLSIPSVQARDSGYYNCTATNNVGNPAKKTVNLLVRSMKNATFQITPDVIKESENIQLGQDLKLSCHVDAVPQEKVTYQWFKNGKPARMSKRLLVTRNDPELPAVTSSLELIDLHFSDYGTYLCMASFPGAPVPDLSVEVNISSETVPPTISVPKGRAVVTVREGSPAELQCEVRGKPRPPVLWSRVDKEAALLPSGLPLEETPDGKLRLERVSRDMSGTYRCQTARYNGFNVRPREAQVQLNVQFPPEVEPSSQDVRQALGRPVLLRCSLLRGSPQRIASAVWRFKGQLLPPPPVVPAAAEAPDHAELRLDAVTRDSSGSYECSVSNDVGSAACLFQVSAKAYSPEFYFDTPNPTRSHKLSKNYSYVLQWTQREPDAVDPVLNYRLSIRQLNQHNAVVKAIPVRRVEKGQLLEYILTDLRVPHSYEVRLTPYTTFGAGDMASRIIHYTEPINSPNLSDNTCHFEDEKICGYTQDLTDNFDWTRQNALTQNPKRSPNTGPPTDISGTPEGYYMFIETSRPRELGDRARLVSPLYNASAKFYCVSFFYHMYGKHIGSLNLLVRSRNKGALDTHAWSLSGNKGNVWQQAHVPISPSGPFQIIFEGVRGPGYLGDIAIDDVTLKKGECPRKQTDPNKGARREGGGGAESGGSCAWRGFLSVEGGCLGLNRGSECLSDGNHVALTV

SEQ ID NO: 17137 - protein, 536 aa, Homo sapiens
MDFLLALVLVSSLYLQAAAEFDGRWPRQIVSSIGLCRYGGRIDCCWGWARQSWGQCQPVCQPRCKHGECIGPNKCKCHPGYAGKTCNQDLNECGLKPRPCKHRCMNTYGSYKCYCLNGYMLMPDGSCSSALTCSMANCQYGCDVVKGQIRCQCPSPGLQLAPDGRTCVDVDECATGRASCPRFRQCVNTFGSYICKCHKGFDLMYIGGKYQCHDIDECSLGQYQCSSFARCYNIRGSYKCKCKEGYQGDGLTCVYIPKVMIEPSGPIHVPKGNGTILKGDTGNNNWIPDVGSTWWPPKTPYIPPIITNRPTSKPTTRPTPKPTPIPTPPPPPPLPTELRTPLPPTTPERPTTGLTTIAPAASTPPGGITVDNRVQTDPQKPRGDVFSVLVHSCNFDHGLCGWIREKDNDLHWEPIRDPAGGQYLTVSAAKAPGGKAARLVLPLGRLMHSGDLCLSFRHKVTGLHSGTLQVFVRKHGAHGAALWGRNGGHGWRQTQITLRGADIKSVVFKGEKRRGHTGEIGLDDVSLKKGHCSEER

SEQ ID NO: 17138 - protein, 140 aa, Homo sapiens
MENCSAASTFLTDSLELELGTEWCKPPYFSCAVDNRGGGKHFSGESYLCSGALKRLILNLDPLPTNFEEDTLEIFGIQWVTETALVNSSRELFHLFRQQLYNLETLLQSSCDFAFSTVMAFITSPLGYTLAGARNSLHAG

SEQ ID NO: 17139 - protein, 333 aa, Homo sapiens
ERCRDDSFFGETSHNYHKFDSEYERMGRGPGPLQERSLFEKKRGAPPSSNIEDFHGLLPKGYPHLCSICDLPVHSNKEWSQHINGASHSRRCQLLLEMGDPFMLQQSTNPAPGILGPPPPSFHLGGPAVGPRGNLGAGNGNLQGPRHMQKGRVETSRVVHIMDFQRGKNLRYQLLQLVEPFGVISNHLILNKINEAFIEMATTEDAQAAVDYYTTTPALVFGKPVRVHLSQKYKRIKKPEGKPDQKFDQKQELGRVIHLSNLPHSGYSDSAVLKLAEPYGKIKNYILMRMKSQAFIEMETREDAMAMVDHCLKKALWFQGRCVKVDLSEKYKK

SEQ ID NO: 17140 - protein, 421 aa, Homo sapiens
MADKLTRIAIVNHDKCKPKKCRQECKKSCPVVRMGKLCIEVTPQSKIAWISETLCIGCGICIKKCPFGALSIVNLPSNLEKETTHRYCANAFKLHRLPIPRPGEVLGLVGTNGIGKSTALKILAGKQKPNLGKYDDPPDWQEILTYFRGSELQNYFTKILEDDLKAIIKPQYVDQIPKAAKGTVGSILDRKDETKTQAIVCQQLDLTHLKERNVEDLSGGELQRFACAVVCIQKADIFMFDEPSSYLDVKQRLKAAITIRSLINPDRYIIVVEHDLSVLDYLSDFICCLYGVPSAYGVVTMPFSVREGINIFLDGYVPTENLRFRDASLVFKVAETANEEEVKKMCMYKYPGMKKKMGEFELAIVAGEFTDSEIMVMLGENGTGKTTFIRMLAGRLKPDEGGEVPVLNVSYKPQKISPKST

SEQ ID NO: 17141 - protein, 670 aa, Homo sapiens
MTPGVRVSTDPEQVTFEDVVVGFSQEEWGQLKPAQRTLYRDVMLDTFRLLVSVGHWLPKPNVISLLEQEAELWAVESRLPQGVYPEIKGHFQFLLLSDLETRPKVKLSVLKQGISEEISNSVILVERFLWDGLWYCRGEDTEGHWEWSCESLESLAVPVAFTPVKTPVLEQWQRNGFGENISLNPDLPHQPMTPERQSPHTWGTRGKREKPDLNVLQKTCVKEKPYKCQECGKAFSHSSALIEHHRTHTGERPYECHECLKGFRNSSALTKHQRIHTGEKPYKCTQCGRTFNQIAPLIQHQRTHTGEKPYECSECGKSFSFRSSFSQHERTHTGEKPYECSECGKAFRQSIHLTQHLRIHTGEKPYQCGECGKAFSHSSSLTKHQRIHTGEKPYECHECGKAFTQITPLIQHQRTHTGEKPYECGECGKAFSQSTLLTEHRRIHTGEKPYGCNECGKTFSHSSSLSQHERTHTGEKPYECSQCGKAFRQSTHLTQHQRIHTGEKPYECNDCGKAFSHSSSLTKHQRIHTGEKPYECNQCGRAFSQLAPLIQHQRIHTGEKPYECNQCGRAFSQSSLLIEHQRIHTKEKPYGCNECGKSFSHSSSLSQHERTHTGEKPYECHDCGKSFRQSTHLTQHRRIHTGEKPYACRDCGKAFTHSSSLTKHQRTHTG

SEQ ID NO: 17142 - protein, 264 aa, Homo sapiens
MEAEETMECLQEFPEHHKMILDRLNEQREQDRFTDITLIVDGHHFKAHKAVLAACSKFFYKFFQEFTQEPLVEIEGVSKMAFRHLIEFTYTAKLMIQGEEEANDVWKAAEFLQMLEAIKALEVRNKENSAPLEENTTGKNEAKKRKIAETSNVITESLPSAESEPVEIEVEIAEGTIEVEDEGIETLEEVASAKQSVKYIQSTGSSDDSALALLADITSKYRQGDRKGQIKEDGCPSDPTSKQEHMKSHSTESFKCEICNKRYL

SEQ ID NO: 17143 - protein, 380 aa, Homo sapiens
MVSKSDQLLIVVSILEGRHFPKRPKHMLVVEAKFDGEQLATDPVDHTDQPEFATELAWEIDRKALHQHRLQRTPIKLQCFALDPVTSAKETIGYIVLDLRTAQETKQAPKWYQLLSNKYTKFKSEIQISIALETDTKPPVDSFKAKGAPPRDGKVPAILAGLDPRDIVAVLNEEGGYHQIGPAEYCTDSFIMSVTIAFATQLEQLIPCTMKLPERQPEFFFYYSLLGNDVTNEPFNDLINPNFEPERASVRIRSSVEILRVYLALQSKLQIHLCCGDQSLGSTEIPLTGLLKKGSTEINQHPVTVEGAFTLDPPNRAKQKLAPIPVELAPTVGVSVALQREGIDSQDAFWYSALDIIFPLFIFLFLVLDAIRKFANYEEK

SEQ ID NO: 17144 - protein, 858 aa, Homo sapiens
MEAPEYLDLDEIDFSDDISYSVTSLKTIPELCRRCDTQNEDRSVSSSSWNCGISTLITNTQKPTGIADVYSKFRPVKRVSPLKHQPETLENNESDDQKNQKVVEYQKGGESDLGPQPQELGPGDGVGGPPGKSSEPSTSLGELEHYDLDMDEILDVPYIKSSQQLASFTKVTSEKRILGLCTTINGLSGKACSTGSSESSSSNMAPFCVLSPVKSPHLRKASAVIHDQHKLSTEETEISPPLVKCGSAYEPENQSKDFLNKTFSDPHGRKVEKTTPDCQLRAFHLQSSAAESKPEEQVSGLNRTSSQGPEERSEYLKKVKSILNIVKEGQISLLNGQLECVRWMVSETEAIAELSCSKDFPSLIHYAGCYGQEKILLWLLQFMQEQGISLDEVDQDGNSAVHVASQHGYLGCIQTLVEYGANVTMQNHAGEKPSQSAERQGHTLCSRYLVVVETCMSLASQVVKLTKQLKEQTVERVTLQNQLQQFLEAQKSEGKSLPSSPSSPSSPASRKSQWKSPDADDDSVAKSKPGVQEGIQVLGSLSASSRARPKAKDEDSDKILRQLLGKEISENVCTQEKLSLEFQDAQASSRNSKKIPLEKRELKLARLRQLMQRSLSESDTDSNNSEDPKTTPVRKADRPRPQPIVESVESMDSAESLHLMIKKHTLASGGRRFPFSIKASKSLDGHSPSPTSESSEPDLESQYPGSGSIPPNQPSGDPQQPSPDSTAAQKVATSPKSALKSPSSKRRTSQNLKLRVTFEEPVVQMEQPSLELNGEKDKDKGRTLQRTSTSNESGDQLKRPFGAFRSIMETLSGNQNNNNNYQAANQLKTSTLPLTSLGRKTDAKGNPASSASKGKNKA

SEQ ID NO: 17145 - protein, 822 aa, Homo sapiens
MTRRRSRPSGGAGRRERARAAGPQKPQAPEPPPPPSLEAGAGAGPPEAPAEPDHDGPREDDEPNLVPGPQVPPASSQPVQTCCLLCHRERKGWEEGPSQNGLVLQGEKLPPDFMPKLVKNLLGEMPLWVCQSCRKSMEEDERQTGREHAVAISLSHTSCKSQSCGDDSHSSSSSSSSSSSSSSSSCPGNSGDWDPSSFLSAHKLSGLWNSPHSSGAMPGSSLGSPPTIPGEAFPVSEHHQHSDLTAPPNSPTGHHPQPASLIPSHPSSFGSPPHPHLLPTTPAAPFPAQASECPVAAATAPHTPGPCQSSHLPSTSMPLLKMPPPFSGCSHPCSGHCGGHCSGPLLPPPSSQPLPSTHRDPGCKGHKFAHSGLACQLPQPCEADEGLGEEEDSSSERSSCTSSSTHQRDGKFCDCCYCEFFGHNAEKEKAQLAAEALKQANRVSGSREPRPARERLLEWPDRELDRVNSFLSSRLQEIKNTVKDSIRASFSVCELSMDSNGFSKEGAAEPEPQSLPPSNLSGSSEQQPDINLDLSPLTLGSPQNHTLQAPGEPAPPWAEMRGPHPPWTEVRGPPPGIVPENGLVRRLNTVPNLSRVIWVKTPKPGYPSSEEPSSKEVPSCKQELPEPVSSGGKPQKGKRQGSQAKKSEASPAPRPPASLEVPSAKGQVAGPKQPGRVLELPKVGSCAEAGEGSRGSRPGPGWAGSPKTEKEKGSSWRNWPGEAKARPQEQESVQPSGPARPQSLPQGKGRSRRSRNKQEKPASSLDDVFLPKDMDGVEMDETDREVEYFKRFCLDSAKQTRQKVAVNWTNFSLKKTTPSTAQ

SEQ ID NO: 17146 - protein, 574 aa, Homo sapiens
MKITSTSCICPVLVCLCFVQRCYGTAHHSSIKVMRNQTKHIEGETEVHHRPKRGWVWNQFFVLEEHMGPDPQYVGKLHSNSDKGDGSVKYILTGEGAGTIFIIDDTTGDIHSTKSLDREQKTHYVLHAQAIDRRTNKPLEPESEFIIKVQDINDNAPKFTDGPYIVTVPEMSDMGTSVLQVTATDADDPTYGNSARVVYSILQGQPYFSVDPKTGVIRTALHNMDREAREHYSVVIQAKDMAGQVGGLSGSTTVNITLTDVNDNPPRFPQKHYQLYVPESAQVGSAVGKIKANDADTGSNADMTYSIINGDGMGIFSISTDKETREGILSLKKPLNYEKKKSYTLNIEGANTHLDFRFSHLGPFKDATMLKIIVGDVDEPPLFSMPSYLMEVYENAKIGTVVGTVLAQDPDSTNSLVRYFINYNVEDDRFFNIDANTGTIRTTKVLDREETPWYNITVTASEIDNPDLLSHVTVGIRVLDVNDNPPELAREYDIIVCENSKPGQVIHTISATDKDDFANGPRFNFFLDERLPVNPNFTLKDNEAAAPSPSGFVHAREMGVCGPAMQKPSCPRLV

SEQ ID NO: 17147 - protein, 143 aa, Homo sapiens
MFCTKLKDLKITGECPFSLLAPGQVPNESSEEAAGSSESCKATVPICQDIPEKNIQESLPQRKTSRSRVYLHTLAESICKLIFPEFERLNVALQRTLAKHKIKESRKSLEREDFEKTIAEQAVAAGGDHWRCLLCSWGITQRE

SEQ ID NO: 17148 - protein, 769 aa, Homo sapiens
MSQPGQKPAASPRPRRAAAARRTHEHVSEKTSESPSKPGEKKGSDEKKAASLGSSQSSRTYAGGTASATKVSASSGATSKSSSMNPTETKAVKTEPEKKSQSTKLSVVHEKKSQEGKPKEHTEPKSLPKQASDTGSNDAHNKKAVSRSAEQQPSEKSTEPKTKPQDMISAGGESVAGITAISGKPGDKKKEKKSLTPAVPVESKPDKPSGKSGMDAALDDLIDTLGGPEETEEENTTYTGPEVSDPMSSTYIEELGKREVTIPPKYRELLAKKEGITGPPADSSKPIGPDDAIDALSSDFTCGSPTAAGKKTEKEESTEVLKAQSAGTVRSAAPPQEKKRKVEKDTMSDQALEALSASLGTRQAEPELDLRSIKEVDEAKAKEEKLEKCGEDDETIPSEYRLKPATDKDGKPLLPEPEEKPKPRSESELIDELSEDFDRSECKEKPSKPTEKTEESKAAAPAPVSEAVCRTSMCSIQSAPPEPATLKGTVPDDAVEALADSLGKKEADPEDGKPVMDKVKEKAKEEDREKLGEKEETIPPDYRLEEVKDKDGKPLLPKESKEQLPPMSEDFLLDALSEDFSGPQNASSLKFEDAKLAAAISEVVSQTPASTTQAGAPPRDTSQSDKDLDDALDKLSDSLGQRQPDPDENKPMEDKVKEKAKAEHRDKLGERDDTIPPEYRHLLDDNGQDKPVKPPTKKSEDSKKPADDQDPIDALSGDLDSCPSTTETSQNTAKDKCKKAASSSKAPKNGGKAKDSAKTTEETSKPKDD

SEQ ID NO: 17149 - protein, 1118 aa, Homo sapiens
MRAVLTWRDKAEHCINDIAFKPDGTQLILAAGSRLLVYDTSDGTLLQPLKGHKDTVYCVAYAKDVLCIEGLWSPEQKSVSKHKSSSKIICCSWTNDGQYLALGMFNGIISIRNKNGEEKVKIERPGGSLSPIWSICWNPSREERNDILAVADWGQKVSFYQLSGKQIGKDRALNFDPCCISYFTKGEYILLGGSDKQVSLFTKDGVRLGTVGEQNSWVWTCQAKPDSNYVVVGCQDGTISFYQLIFSTVHGLYKDRYAYRDSMTDVIVQHLITEQKVRIKCKELVKKIAIYRNRLAIQLPEKILIYELYSEDLSDMHYRVKEKIIKKFECNLLVVCANHIILCQEKRLQCLSFSGVKEREWQMESLIRYIKVIGGPPGREGLLVGLKNGQILKIFVDNLFAIVLLKQATAVRCLDMSASRKKLAVVDENDTCLVYDIDTKELLFQEPNANSVAWNTQCEDMLCFSGGGYLNIKASTFPVHRQKLQGFVVGYNGSKIFCLHVFSISAVEVPQSAPMYQYLDRKLFKEAYQIACLGVTDTDWRELAMEALEGLDFETAKKERKKRGETNNDLFLADVFSYQGKFHEAAKLYKRSGHENLALEMYTDLCMFEYAKDFLGSGDPKETKMLITKQADWARNIKEPKAAVEMYISAGEHVKAIEICGDHGWVDMLIDIARKLDKAEREPLLLCATYLKKLDSPGYAAETYLKMGDLKSLVQLHVETQRWDEAFALGEKHPEFKDDIYMPYAQWLAENDRFEEAQKAFHKAGRQREAVQVLEQLTNNAVAESRFNDAAYYYWMLSMQCLDIAQADPAQKDTMLGKFYHFQRLAELYHGYHAIHRHTEDPFSVHRPETLFNISRFLLHSLPKDTPSGISKVKILFTLAKQSKALGAYRLARHAYDKLRGLYIPARFQKSIELGTLTIRAKPFHDSEELVPLCYRCSTNNPLLNNLGNVCINCRQPFIFSASSYDVLHLVEFYLEEGITDEEAISLIDLEVLRPKRDDRQLEIANNSSQILRLVETKDSIGDEDPFTAKLSFEQGGSEFVPVVVSRLVLRSMSRRDVLIKRWPPPLRWQYFRSLLPDASITMCPSCFQMFHSEDYELLVLQHGCCPYCRRCKDDPGP

SEQ ID NO: 17150 - protein, 2575 aa, Homo sapiens
MASEDNRVPSPPPTGDDGGGGGREETPTEGGALSLKPGLPIRGIRMKFAVLTGLVEVGEVSNRDIVETVFNLLVGGQFDLEMNFIIQEGESINCMVDLLEKCDITCQAEVWSMFTAILKKSIRNLQVCTEVGLVEKVLGKIEKVDNMIADLLVDMLGVLASYNLTVRELKLFFSKLQGDKGRWPPHAGKLLSVLKHMPQKYGPDAFFNFPGKSAAAIALPPIAKWPYQNGFTFHTWLRMDPVNNINVDKDKPYLYCFRTSKGLGYSAHFVGGCLIVTSIKSKGKGFQHCVKFDFKPQKWYMVTIVHIYNRWKNSELRCYVNGELASYGEITWFVNTSDTFDKCFLGSSETADANRVFCGQMTAVYLFSEALNAAQIFAIYQLGLGYKGTFKFKAESDLFLAEHHKLLLYDGKLSSAIAFTYNPRATDAQLCLESSPKDNPSIFVHSPHALMLQDVKAVLTHSIQSAMHSIGGVQVLFPLFAQLDYRQYLSDEIDLTICSTLLAFIMELLKNSIAMQEQMLACKGFLVIGYSLEKSSKSHVSRAVLELCLAFSKYLSNLQNGMPLLKQLCDHVLLNPAIWIHTPAKVQLMLYTYLSTEFIGTVNIYNTIRRVGTVLLIMHTLKYYYWAVNPQDRSGITPKGLDGPRPNQKEMLSLRAFLLMFIKQLVMKDSGVKEDELQAILNYLLTMHEDDNLMDVLQLLVALMSEHPNSMIPAFDQRNGLRVIYKLLASKSEGIRVQALKAMGYFLKHLAPKRKAEVMLGHGLFSLLAERLMLQTNLITMTTYNVLFEILIEQIGTQVIHKQHPDPDSSVKIQNPQILKVIATLLRNSPQCPESMEVRRAFLSDMIKLFNNSRENRRSLLQCSVWQEWMLSLCYFNPKNSDEQKITEMVYAIFRILLYHAVKYEWGGWRVWVDTLSITHSKVTFEIHKENLANIFREQQGKVDEEIGLCSSTSVQAASGIRRDINVSVGSQQPDTKDSPVCPHFTTNGNENSSIEKTSSLESASNIELQTTNTSYEEMKAEQENQELPDEGTLEETLTNETRNADDLEVSSDIIEAVAISSNSFITTGKDSMTVSEVTASISSPSEEDASEMPEFLDKSIVEEEEDDDYVELKVEGSPTEEANLPTELQDNSLSPAASEAGEKLDMFGNDDKLIFQEGKPVTEKQTDTETQDSKDSGIQTMTASGSSAMSPETTVSQIAVESDLGQMLEEGKKATNLTRETKLINDCHGSVSEASSEQKIAKLDVSNVATDTERLELKASPNVEAPQPHRHVLEISRQHEQPGQGIAPDAVNGQRRDSRSTVFRIPEFNWSQMHQRLLTDLLFSIETDIQMWRSHSTKTVMDFVNSSDNVIFVHNTIHLISQVMDNMVMACGGILPLLSAATSATHELENIEPTQGLSIEASVTFLQRLISLVDVLIFASSLGFTEIEAEKSMSSGGILRQCLRLVCAVAVRNCLECQQHSQLKTRGDKALKPMHSLIPLGKSAAKSPVDIVTGGISPVRDLDRLLQDMDINRLRAVVFRDIEDSKQAQFLALAVVYFISVLMVSKYRDILEPQNERHSQSCTETGSENENVSLSEITPAAFSTLTTASVEESESTSSARRRDSGIGEETATGLGSHVEVTPHTAPPGVSAGPDAISEVLSTLSLEVNKSPETKNDRGNDLDTKATPSVSVSKNVNVKDILRSLVNIPADGVTVDPALLPPACLGALGDLSVEQPVQFRSFDRSVIVAAKKSAVSPSTFNTSIPTNAVSVVSSVDSAQASDMGGESPGSRSSNAKLPSVPTVDSVSQDPVSNMSITERLEHALEKAAPLLREIFVDFAPFLSRTLLGSHGQELLIEGTSLVCMKSSSSVVELVMLLCSQEWQNSIQKNAGLAFIELVNEGRLLSQTMKDHLVRVANEAEFILSRQRAEDIHRHAEFESLCAQYSADKREDEKMCDHLIRAAKYRDHVTATQLIQKIINILTDKHGAWGNSAVSRPLEFWRLDYWEDDLRRRRRFVRNPLGSTHPEATLKTAVEHATDEDILAKGKQSIRSQALGNQNSENEILLEGDDDTLSSVDEKDLENLAGPVSLSTPAQLVAPSVVVKGTLSVTSSELYFEVDEEDPNFKKIDPKILAYTEGLHGKWLFTEIRSIFSRRYLLQNTALEIFMANRVAVMFNFPDPATVKKVVNYLPRVGVGTSFGLPQTRRISLASPRQLFKASNMTQRWQHREISNFEYLMFLNTIAGRSYNDLNQYPVFPWVITNYESEELDLTLPTNFRDLSKPIGALNPKRAAFFAERYESWEDDQVPKFHYGTHYSTASFVLAWLLRIEPFTTYFLNLQGGKFDHADRTFSSISRAWRNSQRDTSDIKELIPEFYYLPEMFVNFNNYNLGVMDDGTVVSDVELPPWAKTSEEFVHINRLALESEFVSCQLHQWIDLIFGYKQQGPEAVRALNVFYYLTYEGAVNLNSITDPVLREAVEAQIRSFGQTPSQLLIEPHPPRGSAMQVSPLMFTDKAQQDVIMVLKFPSNSPVTHVAANTQPGLATPAVITVTANRLFAVNKWHNLPAHQGAVQDQPYQLPVEIDPLIGLSLPSLFAIH

SEQ ID NO: 17151 - protein, 1159 aa, Homo sapiens
MAHRGPSRASKGPGPTARAPSPGAPPPPRSPRSRPLLLLLLLLGACGAAGRSPEPGRLGPHAQLTRVPRSPPAGRAEPGGGEDRQARGTEPGAPGPSPGPAPGPGEDGAPAAGYRRWERAAPLAGVASRAQVSLISTSFVLKGDATHNQAMVHWTGENSSVILILTKYYHADMGKVLESSLWRSSDFGTSYTKLTLQPGVTTVIDNFYICPTNKRKVILVSSSLSDRDQSLFLSADEGATFQKQPIPFFVETLIFHPKEEDKVLAYTKESKLYVSSDLGKKWTLLQERVTKDHVFWSVSGVDADPDLVHVEAQDLGGDFRYVTCAIHNCSEKMLTAPFAGPIDHGSLTVQDDYIFFKATSANQTKYYVSYRRNEFVLMKLPKYALPKDLQIISTDESQVFVAVQEWYQMDTYNLYQSDPRGVRYALVLQDVRSSRQAEESVLIDILEVRGVKGVFLANQKIDGKVMTLITYNKGRDWDYLRPPSMDMNGKPTNCKPPDCHLHLHLRWADNPYVSGTVHTKDTAPGLIMGAGNLGSQLVEYKEEMYITSDCGHTWRQVFEEEHHILYLDHGGVIVAIKDTSIPLKILKFSVDEGLTWSTHNFTSTSVFVDGLLSEPGDETLVMTVFGHISFRSDWELVKVDFRPSFSRQCGEEDYSSWELSNLQGDRCIMGQQRSFRKRKSTSWCIKGRSFTSALTSRVCECRDSDFLCDYGFERSSSSESSTNKCSANFWFNPLSPPDDCALGQTYTSSLGYRKVVSNVCEGGVDMQQSQVQLQCPLTPPRGLQVSIQGEAVAVRPGEDVLFVVRQEQGDVLTTKYQVDLGDGFKAMYVNLTLTGEPIRHRYESPGIYRVSVRAENTAGHDEAVLFVQVNSPLQALYLEVVPVIGLNQEVNLTAVLLPLNPNLTVFYWWIGHSLQPLLSLDNSVTTRFSDTGDVRVTVQAACGNSVLQDSRVLRVLDQFQVMPLQFSKELDAYNPNTPEWREDVGLVVTRLLSKETSVPQELLVTVVKPGLPTLADLYVLLPPPRPTRKRSLSSDKRLAAIQQVLNAQKISFLLRGGVRVLVALRDTGTGAEQLGGGGGYWAVVVLFVIGLFAAGAFILYKFKRKRPGRTVYAQMHNEKEQEMTSPVSHSEDVQGAVQGNHSGVVLSINSREMHSYLVS

SEQ ID NO: 17152 - protein, 361 aa, Homo sapiens
MQASPIRIPTVSNDIDWDFCFHMSQQTEIPAHQQTDELYPTGGCGESEEETKAKEKEKAIDCMSHPKEKLAQSQKKVAQLIKEKMNTQANKELIRCVILSRIIFGDHHWKCARALANLAYGYLTLRGLPVQAKKHATSAKNTLLTWKANTTSNKEKEEILEALVKLYYTLGVAWLLQNRGREAYFNLQKAERNMKELKELYKGGVCELQVSENDLTLALGRASLAIHRLNLALAYFEKAIGDVIAAKGDRTSDLISLYEEAAQIEQLRRNHNQAIQYLQQAHSVCVSLFTEVSPKTAEMSALLAKAYAMSGEAQHRDAVEIYFIRSINAYRATLGSEDFETLSTTEEFCKWLVQNGEKQDK

SEQ ID NO: 17153 - protein, 1297 aa, Homo sapiens
MAWMTYISNWFEQDDWYEGLQRANMSQVRQVGLLAAGCQPWNKDVCAASGDRFAYCATLAIYIYQLDHRYNEFKLHAIMSEHKKTITAISWCPHNPDLFASGSTDNLVIIWNVAEQKVIAKLDSTKGIPASLSWCWNAEDVVAFVSHRGPLFIWTISGPDSGVIVHKDAHSFLSDICMFRWHTHQKGKVVFGHIDGSLSIFHPDEEDPVTALEWDPLSTDYLLVVNLHYGIRLVDSESLSCITTFNLPSAAASVQCLAWVPSAPGMFITGDSQVGVLRIWNVSRTTPIDNLKLKKTGFHCLHVLNSPPRKKFSVQSPTKNHYTSSTSEAVPPPTLTQNQAFSLPPGHAVCCFLDGGVGLYDMGAKKWDFLRDLGHVETIFDCKFKPDDPNLLATASFDGTIKVWDINTLTAVYTSPGNEGVIYSLSWAPGGLNCIAGGTSRNGAFIWNVQKGKIIQRFNEHGTNGIFCIAWSHKDSKRIATCSSDGFCIIRTIDGKVLHKYKHPAAVFGCDWSQNNKDMIATGCEDTNVRVYYVATSSDQPLKVFSGHTAKVFHVKWSPLREGILCSGSDDGTVRIWDYTQDACINILNGHTAPVRGLMWNTEIPYLLISGSWDYTIKVWDTREGTCVDTVYDHGADVYGLTCHPSRPFTMASCSRDSTVRLWSLTALVTPVQINILADRSWEEIIGNTDYAIEPGTPPLLCGKVSRDIRQEIEKLTANSQVKKLRWFSECLSPPGGSDNLWNLVAVIKGQDDSLLPQNYCKGIMHLKHLIKFRTSEAQELTTVKMSKFGGGIGVPAKEERLKEAAEIHLRLGQIQRYCELMVELGEWDKALSIAPGVSVKYWKKLMQRRADQLIQEDKDDVIPYCIAIGDVKKLVHFFMSRGQLKEALLVAQAACEGNMQPLHVSVPKGASYSDDIYKEDFNELLHKVSKELAEWYFQDGRAVLAACCHLAIDNIELAMAYLIRGNELELAVCVGTVLGESAAPATHYALELLARKCMMISVCFPCVGYRNLAADLLLMIPDNELHLIKLCAFYPGCTEEINDLHDKCKLPTVEECMQLAETARADDNIFETVKYYLLSQEPEKALPIGISFVKEYISSSDWTLDTIYPVLDLLSYIRTEKLLLHTCTEARNELLILCGYIGALLAIRRQYQSIVPALYEYTSQLLKRREVSVPLKIEYLSEELDAWRACTQSTNRSLEDSPYTPPSDSQRMIYATLLKRLKEESLKGIIGPDYVTGSNLPSHSDIHISCLTGLKIQGPVFFLEDGKSAISLNDALMWAKVNPFSPLGTGIRLNPF

SEQ ID NO: 17154 - protein, 1308 aa, Homo sapiens
MGSKDHAVFFREMTQLILNEMPKAGYSSILNDFVESNFFVIDGDSLLVTCLGVKSFKWGQNLHFFYLVECYLVDLLSNGGQFTIVFFKDAEYAYFDFPELLSLRTALILHLQHNTNIDVQTEFSGCLSQDWKLFLEQHYPYFLIVSEEGLSDLQTYLFNFLIIHSWGMKVNVVLSSGHESDTLRFYAYTMESTDRNQTFSKENETVIQSAYKSLIQHLEEIRVLVLATHFEHLKWNDMMEEAYQTLFLLQHLWSEGSDIQRVLCVTSCSLSLRMYHRVLVHSNCLSLQEVEDFCRLRCLCVAFQLHLPLSQRACSRVITCSWIRNSDSFLKMNKWCEYFILSNLNVFGCWNLNLNHVSDLYDEQLLKNIAFYYEFESTQEPHLNLGDSIRRDYEDLWNVVSHLVKEFNVGKSFPLRTTRRHFLRQEKSVIQEISLEKMPSVGFIPMTSAVIDEFVGDMMKDLPILKSDDPVVPSLFKQKTSDELLHWHAQRLLSDDYDRIKCHVDEQSRDPHVLDFLKKIQDYQQFYGKSLESISTKVIVTQTTRPKEDSSGASGEILQNTKPHQITKKSKKKSFLKEDQNKAQQNDDLLFSIEEEMKNNLHSGIRKLEDYLTSCASNSVKFGVEMLGLIACFKAWKKHCRGEGKISKDLSIAVQMMKRIHSLLERYPEILEAEHHQYIAKCLKYLGFNDLANSLDPTLIGDDKNKKKYSIDIGPARFQLQYMGHYLIRDERKDRDPRVQDFIPNAWQQELLDVVDKNESAVIVAPTSSGKTYASYYCMEKVLRESDVGVVVYVAPAKSLVGQVAATVENRFTKTLPAGRTLCGAFTRDYCHNVLNCQVLITVPECFEILLLAPHRQKWVERIRYVIFDEVHYLGREVGAKFWELLLVIIRCPFLVLSATINNPNLLTKWLQSVKQYWKQADKIMEEKCISEKQADKCLNFLQDHSYKNQSYEVRLVLCGERYNDLEKHICSVKHDDVYFDHFHPCAALTTDIIEKYGFPPDLTLTPQESIQLYDTMAQVWETWPRAQELCPEEFILFKNKIVIKKLDARKYEENLKAELTNWIKNGQVKKVKRVLKNLSPDSLSSSKDMVKMFPLLVEKLRQMDKLPAIFFLFKNDDVGKRAGSVCTFLEKTETKSHPHTECHSYVFAIDEVLEKVRKTQKRISTKKNPKKAEKLERKKVYRAEYINFLENLKILEISEDCTYADVKALHTEITRNKDSTLERVLPRVRFTRHGKELKALAQRGIGYHHSSMYFKEKEFVEILFVKGLIRVVTATETLALGIHMPCKSVVFAQDSVYLDALNYRQIM

SEQ ID NO: 17155 - protein, 226 aa, Homo sapiens
MKETPLSNCERRFLLRAIEEKKRLDGRQTYDYRNIRISFGTDYGCCIVELGKTRVLGQVSCELVSPKLNRATEGILFFNLELSQMAAPAFEPGRQSDLLVKLNRLMERCLRNSKCIDTESLCVVAGEKYTPEERDPVPLSIHHMPICVSFAFFQQGTYLLVDPNEREERVMDGLLVIAMNKHREICTIQSSGGIMLLKDQVLRCSKIAGVKVAEITELILKALEND

SEQ ID NO: 17156 - protein, 671 aa, Homo sapiens
MGPGVLLLLLVATAWHGQGIPVIEPSVPELVVKPGATVTLRCVGNGSVEWDGPPSPHWTLYSDGSSSILSTNNATFQNTGTYRCTEPGDPLGGSAAIHLYVKDPARPWNVLAQEVVVFEDQDALLPCLLTDPVLEAGVSLVRVRGRPLMRHTNYSFSPWHGFTIHRAKFIQSQDYQCSALMGGRKVMSISIRLKVQKVIPGPPALTLVPAELVRIRGEAAQIVCSASSVDVNFDVFLQHNNTKLAIPQQSDFHNNRYQKVLTLNLDQVDFQHAGNYSCVASNVQGKHSTSMFFRVVESAYLNLSSEQNLIQEVTVGEGLNLKVMVEAYPGLQGFNWTYLGPFSDHQPEPKLANATTKDTYRHTFTLSLPRLKPSEAGRYSFLARNPGGWRALTFELTLRYPPEVSVIWTFINGSGTLLCAASGYPQPNVTWLQCSGHTDRCDEAQVLQVWDDPYPEVLSQEPFHKVTVQSLLTVETLEHNQTYECRAHNSVGSGSWAFIPISAGAHTHPPDEFLFTPVVVACMSIMALLLLLLLLLLYKYKQKPKYQVRWKIIESYEGNSYTFIDPTQLPYNEKWEFPRNNLQFGKTLGAGAFGKVVEATAFGLGKEDAVLKVAVKMLKSTAHADEKEALMSELKIMSHLGQHENIVNLLGACTHGGTVASPARVWTPMWR

SEQ ID NO: 17157 - protein, 1260 aa, Homo sapiens
MDASYDGTEVTVVMEEIEEAYCYTSPGPPKKKKKYKIHGEKTKKPRSAYLLYYYDIYLKVQQELPHLPQSEINKKISESWRLLSVAERSYYLEKAKLEKEGLDPNSKLSALTAVVPDIPGFRKILPRSDYIIIPKSSLQEDRSCPQLELCVAQNQMSPKGPPLVSNTAPETVPSHAGMAEQCLAVEALAEEVGALTQSGAVQEIATSEILSQDVLLEDASLEVGESHQPYQTSLVIEETLVNGSPDLPTGSLAVPHPQVGESVSVVTVMRDSSESSSSAPATQFIMLPLPAYSVVENPTSIKLTTTYTRRGHGTCTSPGCSFTYVTRHKPPKCPTCGNFLGGKWIPKEKPAKVKVELASGVSSKGSVVKRNQQPVTTEQNSSKENASKLTLENSEAEAPGNCGTAVTKTPVVKSGVQPEVTLGTTDNDSPGADVPTPSEGTSTSSPLPAPKKPTGADLLTPGSRAPELKGRARGKPSLLAAARPMRAILPAPVNVGRGSSMGLPRARQAFSLSDKTPSVRTCGLKPSTLKQLGQPIQQPSGPGEVKLPSGPSNRTSQVKVVEVKPDMFPPYKYSCTVTLDLGLATSRGRGKCKNPSCSYVYTNRHKPRICPSCGVNLAKDRTEKTTKAIEVSSPLPDVLNATEPLSTAQREIQRQSTLQLLRKVLQIPENESELAEVFALIHELNSSRLILSNVSEETVTIEQTSWSNYYESPSTQCLLCSSPLFKGGQNSLAGPQECWLLTASRLQTVTAQVKMCLNPHCLALHSFIDIYTGLFNVGNKLLVSLDLLFAIRNQIKLGEDPRVSINVVLKSVQEQTEKTLTSEELSQLQELLCNGYWAFECLTVRDYNDMICGICGVAPKVEMAQRSEENVLALKSVEFTWPEFLGSNEVNVEDFWATMETEVIEQVAFPASIPITKFDASVIAPFFPPLMRGAVVVNTEKDKNLDVQPVPGSGSALVRLLQEGTCKLDEIGSYSEEKLQHLLRQCGIPFGAEDSKDQLCFSLLALYESVQNGARAIRPPRHFTGGKIYKVCPHQVVCGSKYLVRGESARDHVDLLASSRHWPPVYVVDMATSVALCADLCYPELTNQMWGRNQGCFSSPTEPPVSVSCPELLDQHYTVDMTETEHSIQHPVTKTATRRIVHAGLQPNPGDPSAGHHSLALCPELAPYATILASIVDSKPNGVRQRPIAFDNATHYYLYNRLMDFLTSREIVNRQIHDIVQSCQPGEVVIRDTLYRLGVAQIKTETEEEGEEEEVAAVAE

SEQ ID NO: 17158 - protein, 1012 aa, Homo sapiens
MFKPVKEEDDGLSGKHSMRTRRSRGSMSTLRSGRKKQPASPDGRTSPINEDIRSSGRNSPSAASTSSNDSKAETVKKSAKKVKEEASSPLKSNKRQREKVASDTEEADRTSSKKTKTQEISRPNSPSEGEGESSDSRSVNDEGSSDPKDIDQDNRSTSPSIPSPQDNESDSDSSAQQQMLQAQPPALQAPTGVTPAPSSAPPGTPQLPTPGPTPSATAVPPQGSPTASQAPNQPQAPTAPVPHTHIQQAPALHPQRPPSPHPPPHPSPHPPLQPLTGSAGQPSAPSHAQPPLHGQGPPGPHSLQAGPLLQHPGPPQPFGLPPQASQGQAPLGTSPAAAYPHTSLQLPASQSALQSQQPPREQPLPPAPLAMPHIKPPPTTPIPQLPAPQAHKHPPHLSGPSPFSMNANLPPPPALKPLSSLSTHHPPSAHPPPLQLMPQSQPLPSSPAQPPGLTQSQNLPPPPASHPPTGLHQVAPQPPFAQHPFVPGGPPPITPPTCPSTSTPPAGPGTSAQPPCSGAAASGGSIAGGSSCPLPTVQIKEEALDDAEEPESPPPPPRSPSPEPTVVDTPSHASQSARFYKHLDRGYNSCARTDLYFMPLAGSKLAKKREEAIEKAKREAEQKAREEREREKEKEKEREREREREREAERAAKASSSAHEGRLSDPQLSGPGHMRPSFEPPPTTIAAVPPYIGPDTPALRTLSEYARPHVMSPTNRNHPFYMPLNPTDPLLAYHMPGLYNVDPTIRERELREREIREREIRERELRERMKPGFEVKPPELDPLHPAANPMEHFARHSALTIPPTAGPHPFASFHPGLNPLERERLALAGPQLRPEMSYPDRLAAERIHAERMASLTSDPLARLQMFNVTPHHHQHSHIHSHLHLHQQDPLHQGSAGPVHPLVDPLTAGPHLARFPYPPGTLPNPLLGQPPHEHEMLRHPVFGTPYPRDLPGAIPPPMSAAHQLQAMHAQSAELQRLAMEQQWLHGHPHMHGGHLPSQEDYYSRLKKEGDKQL

SEQ ID NO: 17159 - protein, 1525 aa, Homo sapiens
MRGVGWQMLSLSLGLVLAILNKVAPQACPAQCSCSGSTVDCHGLALRSVPRNIPRNTERLDLNGNNITRITKTDFAGLRHLRVLQLMENKISTIERGAFQDLKELERLRLNRNHLQLFPELLFLGTAKLYRLDLSENQIQAIPRKAFRGAVDIKNLQLDYNQISCIEDGAFRALRDLEVLTLNNNNITRLSVASFNHMPKLRTFRLHSNNLYCDCHLAWLSDWLRQRPRVGLYTQCMGPSHLRGHNVAEVQKREFVCSDEEEGHQSFMAPSCSVLHCPAACTCSNNIVDCRGKGLTEIPTNLPETITEIRLEQNTIKVIPPGAFSPYKKLRRIDLSNNQISELAPDAFQGLRSLNSLVLYGNKITELPKSLFEGLFSLQLLLLNANKINCLRVDAFQDLHNLNLLSLYDNKLQTIAKGTFSPLRAIQTMHLAQNPFICDCHLKWLADYLHTNPIETSGARCTSPRRLANKRIGQIKSKKFRCSGTEDYRSKLSGDCFADLACPEKCRCEGTTVDCSNQKLNKIPEHIPQYTAELRLNNNEFTVLEATGIFKKLPQLRKINFSNNKITDIEEGAFEGASGVNEILLTSNRLENVQHKMFKGLESLKTLMLRSNRITCVGNDSFIGLSSVRLLSLYDNQITTVAPGAFDTLHSLSTLNLLANPFNCNCYLAWLGEWLRKKRIVTGNPRCQKPYFLKEIPIQDVAIQDFTCDDGNDDNSCSPLSRCPTECTCLDTVVRCSNKGLKVLPKGIPRDVTELYLDGNQFTLVPKELSNYKHLTLIDLSNNRISTLSNQSFSNMTQLLTLILSYNRLRCIPPRTFDGLKSLRLLSLHGNDISVVPEGAFNDLSALSHLAIGANPLYCDCNMQWLSDWVKSEYKEPGIARCAGPGEMADKLLLTTPSKKFTCQGPVDVNILAKCNPCLSNPCKNDGTCNSDPVDFYRCTCPYGFKGQDCDVPIHACISNPCKHGGTCHLKEGEEDGFWCICADGFEGENCEVNVDDCEDNDCENNSTCVDGINNYTCLCPPEYTGELCEEKLDFCAQDLNPCQHDSKCILTPKGFKCDCTPGYVGEHCDIDFDDCQDNKCKNGAHCTDAVNGYTCICPEGYSGLFCEFSPPMVLPRTSPCDNFDCQNGAQCIVRINEPICQCLPGYQGEKCEKLVSVNFINKESYLQIPSAKVRPQTNITLQIATDEDSGILLYKGDKDHIAVELYRGRVRASYDTGSHPASAIYSVETINDGNFHIVELLALDQSLSLSVDGGNPKIITNLSKQSTLNFDSPLYVGGMPGKSNVASLRQAPGQNGTSFHGCIRNLYINSELQDFQKVPMQTGILPGCEPCHKKVCAHGTCQPSSQAGFTCECQEGWMGPLCDQRTNDPCLGNKCVHGTCLPINAFSYSCKCLEGHGGVLCDEEEDLFNPCQAIKCKHGKCRLSGLGQPYCECSSGYTGDSCDREISCRGERIRDYYQKQQGYAACQTTKKVSRLECRGGCAGGQCCGPLRSKRRKYSFECTDGSSFVDEVEKVVKCGCTRCVS

SEQ ID NO: 17160 - protein, 285 aa, Homo sapiens
FGGKLVTFENVRMPSHQGAEQQQQQHHVFISQVVTEKEFLSRSDQLQQAVQSQGFINYCQKKIDASQTEFEKNVWSFLKVNFEDDSRGKYLELLGYRKEDLGKKALKDSDQVAQSDGEESPAAEEQLLGEHIKEEKEESEFLPSSGGTFNISVSGDIDGLITQALLTGNFESAVDLCLHDNRMADAIILAIAGGQELLARTQKKYFAKSQSKITRLITAVVMKNWKEIVESCDLKNWREALAAVLTYAKPDEFSALCDLLGTRLENEGDSLLQTQACLCYICAGN

SEQ ID NO: 17161 - protein, 2205 aa, Homo sapiens
MDEEEDGAGAEESGQPRSFMRLNDLSGAGGRPGPGSAEKDPGSADSEAEGLPYPALAPVVFFYLSQDSRPRSWCLRTVCNPWFERISMLVILLNCVTLGMFRPCEDIACDSQRCRILQAFDDFIFAFFAVEMVVKMVALGIFGKKCYLGDTWNRLDFFIVIAGMLEYSLDLQNVSFSAVRTVRVLRPLRAINRVPSMRILVTLLLDTLPMLGNVLLLCFFVFFIFGIVGVQLWAGLLRNRCFLPENFSLPLSVDLERYYQTENEDESPFICSQPRENGMRSCRSVPTLRGDGGGGPPCGLDYEAYNSSSNTTCVNWNQYYTNCSAGEHNPFKGAINFDNIGYAWIAIFQVITLEGWVDIMYFVMDAHSFYNFIYFILLIIVGSFFMINLCLVVIATQFSETKQRESQLMREQRVRFLSNASTLASFSEPGSCYEELLKYLVYILRKAARRLAQVSRAAGVRVGLLSSPAPLGGQETQPSSSCSRSHRRLSVHHLVHHHHHHHHHYHLGNGTLRAPRASPEIQDRDANGSRRLMLPPPSTPALSGAPPGGAESVHSFYHADCHLEPVRCQAPPPRSPSEASGRTVGSGKVYPTVHTSPPPETLKEKALVEVAASSGPPTLTSLNIPPGPYSSMHKLLETQSTGACQSSCKISSPCLKADSGACGPDSCPYCARAGAGEVELADREMPDSDSEAVYEFTQDAQHSDLRDPHSRRQRSLGPDAEPSSVLAFWRLICDTFRKIVDSKYFGRGIMIAILVNTLSMGIEYHEQPEELTNALEISNIVFTSLFALEMLLKLLVYGPFGYIKNPYNIFDGVIVVISVWEIVGQQGGGLSVLRTFRLMRVLKLVRFLPALQRQLVVLMKTMDNVATFCMLLMLFIFIFSILGMHLFGCKFASERDGDTLPDRKNFDSLLWAIVTVFQILTQEDWNKVLYNGMASTSSWAALYFIALMTFGNYVLFNLLVAILVEGFQAEEISKREDASGQLSCIQLPVDSQGGDANKSESEPDFFSPSLDGDGDRKKCLALVSLGEHPELRKSLLPPLIIHTAATPMSLPKSTSTGLGEALGPASRRTSSSGSAEPGAAHEMKSPPSARSSPHSPWSAASSWTSRRSSRNSLGRAPSLKRRSPSGERRSLLSGEGQESQDEEESSEEERASPAGSDHRHRGSLEREAKSSFDLPDTLQVPGLHRTASGRGSASEHQDCNGKSASGRLARALRPDDPPLDGDDADDEGNLSKGERVRAWIRARLPACCLERDSWSAYIFPPQSRFRLLCHRIITHKMFDHVVLVIIFLNCITIAMERPKIDPHSAERIFLTLSNYIFTAVFLAEMTVKVVALGWCFGEQAYLRSSWNVLDGLLVLISVIDILVSMVSDSGTKILGMLRVLRLLRTLRPLRVISRAQGLKLVVETLMSSLKPIGNIVVICCAFFIIFGILGVQLFKGKFFVCQGEDTRNITNKSDCAEASYRWVRHKYNFDNLGQALMSLFVLASKDGWVDIMYDGLDAVGVDQQPIMNHNPWMLLYFISFLLIVAFFVLNMFVGVVVENFHKCRQHQEEEEARRREEKRLRRLEKKRRNLMLDDVIASGSSASAASEAQCKPYYSDYSRFRLLVHHLCTSHYLDLFITGVIGLNVVTMAMEHYQQPQILDEALKICNYIFTVIFVLESVFKLVAFGFRRFFQDRWNQLDLAIVLLSIMGITLEEIEVNASLPINPTIIRIMRVLRIARVLKLLKMAVGMRALLDTVMQALPQVGNLGLLFMLLFFIFAALGVELFGDLECDETHPCEGLGRHATFRNFGMAFLTLFRVSTGDNWNGIMKDTLRDCDQESTCYNTVISPIYFVSFVLTAQFVLVNVVIAVLMKHLEESNKEAKEEAELEAELELEMKTLSPQPHSPLGSPFLWPGVEGPDSPDSPKPGALHPAAHARSASHFSLEHPTMQPHPTELPGPDLLTVRKSGVSRTHSLPNDSYMCRHGSTAEGPLGHRGWGLPKAQSGSVLSVHSQPADTSYILQLPKDAPHLLQPHSAPTWGTIPKLPPPGRSPLAQRPLRRQAAIRTDSLDVQGLGSREDLLAEEEPPSPRDLKKCYSVEAQSCQRRPTSWLDEQRRHSIAVSCLDSGSQPHLGTDPSNLGGQPLGGPGSRPKKKLSPPSITIDPPESQGPRTPPSPGICLRRRAPSSDSKDPLASGPPDSMAASPSPKKDVLSLSGLSSDPADLDP

SEQ ID NO: 17162 - protein, 74 aa, Homo sapiens
MNKSRWQSRRRHGRRSHQQNPWFRLRDSEDRSDSRAAQPAHDSGHGDDESPSTSSGTAGTSSVPETLLPLAPWT

SEQ ID NO: 17163 - protein, 544 aa, Homo sapiens
YQNHTVVFLGSEKGIILKFLARIGNSGFLNDSLFLEEMSVYNSEKCSYDGVEDKRIMGMQLDRASSSLYVAFSTCVIKVPLGRCERHGKCKKTCIASRDPYCGWIKEGGACSHLSPNSRLTFEQDIERGNTDGLGDCHNSFVALNGVIRESYLKGHDQLVPVTLLAIAVILAFVMGAVFSGITVYCVCDHRRKDVAVVQRKEKELTHSRRGSMSSVTKLSGLFGDTQSKDPKPEAILTPLMHNGKLATPGNTAKMLIKADQHHLDLTALPTPESTPTLQQKRKPSRGSREWERNQNLINACTKDMPPMGSPVIPTDLPLRASPSHIPSVVVLPITQQGYQHEYVDQPKMSEVAQMALEDQAATLEYKTIKEHLSSKSPNHGVNLVENLDSLPPKVPQREASLGPPGASLSQTGLSKRLEMHHSSSYGVDYKRSYPTNSLTRSHQATTLKRNNTNSSNSSHLSRNQSFGRGDNPPPAPQRVDSIQVHSSQPSGQAVTVSRQPSLNAYNSLTRSGLKRTPSLKPDVPPKPSFAPLSTSMKPNDACT

SEQ ID NO: 17164 - protein, 870 aa, Homo sapiens
MGRLNKAILRYLKNDGKVHLVVFNNLQLADGRRHRILLRLSNLQRGAGSLELYLDCIQVDSVHNLPRAFAGPSQKPETIELRTFQRKPQDFLEELKLVVRGSLFQVASLQDCFLQQSEPLAATGTGDFNRQFLGQMTQLNQLLGEVKDLLRQQVKETSFLRNTIAECQACGPLKFQSPTPSTVVPPAPPAPPTRPPRRCDSNPCFRGVQCTDSRDGFQCGPCPEGYTGNGITCIDVDECKYHPCYPGVHCINLSPGFRCDACPVGFTGPMVQGVGISFAKSNKQVCTDIDECRNGACVPNSICVNTLGSYRCGPCKPGYTGDQIRGCKAERNCRNPELNPCSVNAQCIEERQGDVTCVCGVGWAGDGYICGKDVDIDSYPDEELPCSARNCKKDNCKYVPNSGQEDADRDGIGDACDEDADGDGILNEQDNCVLIHNVDQRNSDKDIFGDACDNCLSVLNNDQKDTDGDGRGDACDDDMDGDGIKNILDNCPKFPNRDQRDKDGDGVGDACDSCPDVSNPNQSDVDNDLVGDSCDTNQDSDGDGHQDSTDNCPTVINSAQLDTDKDGIGDECDDDDDNDGIPDLVPPGPDNCRLVPNPAQEDSNSDGVGDICESDFDQDQVIDRIDVCPENAEVTLTDFRAYQTVVLDPEGDAQIDPNWVVLNQGMEIVQTMNSDPGLAVGYTAFNGVDFEGTFHVNTQTDDDYAGFIFGYQDSSSFYVVMWKQTEQTYWQATPFRAVAEPGIQLKAVKSKTGPGEHLRNSLWHTGDTSDQVRLLWKDSRNVGWKDKVSYRWFLQHRPQVGYIRVRFYEGSELVADSGVTIDTTMRGGRLGVFCFSQENIIWSNLKYRCNDTIPEDFQEFQTQNFDRFDN

SEQ ID NO: 17165 - protein, 240 aa, Homo sapiens
MVKLFIGNLPREATEQEIRSLFEQYGKVLECDIIKNYGFVHIEDKTAAEDAIRNLHHYKLHGVNINVEASKNKSKTSTKLHVGNISPTCTNKELRAKFEEYGPVIECDIVKDYAFVHMERAEDAVEAIRGLDNTEFQGKRMHVQLSTSRLRTAPGMGDQSGCYRHLLPTSGAAATAAAAAAAAAAVTAASTSYYGRDRSPLRRATAPVPTVGEGYGYGHESELSQASAAARNSLYDMARY

SEQ ID NO: 17166 - protein, 501 aa, Homo sapiens
MLGMYVPDRFSLKSSRVQDGMGLYTARRVRKGEKFGPFAGEKRMPEDLDENMDYRLMWEVRGSKGEVLYILDATNPRHSNWLRFVHEAPSQEQKNLAAIQEGENIFYLAVEDIETDTELLIGYLDSDMEAEEEEQQIMTVIKEGEVENSRRQSTAGRKDRLGCKEDYACPQCESSFTSEDILAEHLQTLHQKPTEEKEFKCKNCGKKFPVKQALQRHFEQHQETCRGDARFVCKADSCGKRLKSKDALKRHQENVHTGDPKKKLICSVCNKKCSSASSLQEHRKIHEIFDCQECMKKFISANQLKRHMITHSEKRPYNCEICNKSFKRLDQVGAHKVIHSEDKPYKCKLCGKGFAHRNVYKNHKKTHSEERPFQCEECKALFRTPFSLQRHLLIHNSERTFKCHHCDATFKRKDTLNVHVQVVHERHKKYRCELCNKAFVTPSVLRSHKKTHTGEKEKICPYCGQKFASSGTLRVHIRSHTGEAVQVLRVQQGLQPEARPG

SEQ ID NO: 17167 - protein, 594 aa, Homo sapiens
MFGKMFFVFCQESGYDTILRVLGSNVREFLQNLDALHDHLATIYPGMRAPSFRCTDAEKGKGLILHYYSEREGLQDIVIGIIKTVAQQIHGTEIDMKVIQQRNEECDHTQFLIEEKESKEEDFYEDLDRFEENGTQESRISPYTFCKAFPFHIIFDRDLVVTQCGNAIYRVLPQLQPGNCSLLSVFSLVRPHIDISFHGILSHINTVFVLRSKEGLLDVEKLECEDELTGTEISCLRLKGQMIYLPEADSILFLCSPSVMNLDDLTRRGLYLSDIPLHDATRDLVLLGEQFREEYKLTQELEILTDRLQLTLRALEDEKKKTDTGCPARIQAFKVQTTLMLCEKDSRSTKGFPSISYSGFLLIPLNRLLYSVLPPSVANELRHKRPVPAKRYDNVTILFSGIVGFNAFCSKHASGEGAMKIVNLLNDLYTRFDTLTDSRKNPFVYKVETVGDKYMTVSGLPEPCIHHARSICHLALDMMEIAGQVQVDGESVQITIGIHTGEVVTGVIGQRMPRYCLFGNTVNLTSRTETTGEKGKINVSEYTYRCLMSPENSDPQFHLEHRGPVSMKGKKEPMQVWFLSRKNTGTEETKQDDD

SEQ ID NO: 17168 - protein, 642 aa, Homo sapiens
MNPTETKAIPVSQQMEGPHLPNKKKHKKQAVKTEPEKKSQSTKLSVVHEKKSQEGKPKEHTEPKSLPKQASDTGSNDAHNKKAVSRSAEQQPSEKSTEPKTKPQDMISAGGESVAGITAISGKPGDKKKEKKSLTPAVPVESKPDKPSGKSGMDAALDDLIDTLGGPEETEEENTTYTGPEVSDPMSSTYIEELGKREVTIPPKYRELLAKKEGITGPPADSSKPIGPDDAIDALSSDFTCGSPTAAGKKTEKEESTEVLKAQSAGTVRSAAPPQEKKRKVEKDTMSDQALEALSASLGTRQAEPELDLRSIKEVDEAKAKEEKLEKCGEDDETIPSEYRLKPATDKDGKPLLPEPEEKPKPRSESELIDELSEDFDRSECKEKPSKPTEKTEESKAAAPAPVSEAVCRTSMCSIQSAPPEPATLKGTVPDDAVEALADSLGKKEADPEDGKPVMDKVKEKAKEEDREKLGEKEETIPPDYRLEEVKDKDGKPLLPKESKEQLPPMSEDFLLDALSEDFSGPQNASSLKFEDAKLAAAISEVVSQTPASTTQAGAPPRDTSQSDKDLDDALDKLSDSLGQRQPDPDENKPMEDKVKEKAKAEHRDKLGERDDTIPPEYRHLLDDNGQDKPVKPPTKKSEDSK

SEQ ID NO: 17169 - protein, 76 aa, Homo sapiens
MLFEGKVNPQTQSLLAECGEWTRRSLHLRVLGRQLILPTDKGVQHFQGSTPASAVHRPPLSACGHSSNIRELCISG

SEQ ID NO: 17170 - protein, 381 aa, Homo sapiens
MLVTFKDVAVTFTREEWRQLDLAQRTLYREVMLETCGLLVSLGDRAQVHTREPTTYPPVLSERAFLRGSLTLESSTSSDSRLGRARDEEGLLEMQKGKVTPETDLHKETHLGKVSLEGEGLGTDDGLHSRALQEWLSADVLHECDSQQPGKDALIHAGTNPYKCKQCGKGFNRKWYLVRHQRVHTGMKPYECNACGKAFSQSSTLIRHYLIHTGEKPYKCLECGKAFKRRSYLMQHHPIHTGEKPYECSQCRKAFTHRSTFIRHNRTHTGEKPFECKECEKAFSNRAHLIQHYIIHTGEKPYDCMACGKAFRCSSELIQHQRIHTGEKPYECTQCGKAFHRSTYLIQHSVIHTGEMPYKCIECGKAFKRRSHLLQHQRVHT

SEQ ID NO: 17171 - protein, 230 aa, Homo sapiens
MEADIITNLRCRLKEAEEERLKAAQYGLQLVESQNELQNQLDKCRNEMMTMTESYEQEKYTLQREVELKSRMLESLSCECEAIKQQQKMHLEKLEEQLSRSHGQEVNELKTKIEKLKVELDEARLSEKQLKHQVDHQKELLSCKSEELRVMSERVQESMSSEMLALQIELTEMESMKTTLKEEVNELQYRQEQLELLITNLMRQVDRLKEEKEEREKEAVSYYNALEKAR

SEQ ID NO: 17172 - protein, 382 aa, Homo sapiens
NAAGQLPTSPGHMHTQVPPYPQPQPYQPAQPYPFGTGGSAMYRPQQPVAPPTSNAYPNTPYISSASSYTGQSQLYAAQHQASSPTSSPATSFPPPPSSGASFQHGGPGAPPSSSAYALPPGTTGTLPAASELPASQRTENQSIQDQAPMLEGPQNGWNDPPALNRVPKKKKMPENFMPPVPITSPIMNPLGDPQSQMLQQQPSAPVPLSSQSSFPQPHLPGGQPFHGVQQPLGQTGMPPSFSKPNIEGAPGAPIGNTFQHVQSLPTKKITKKPIPDEHLILKTTFEDLIQRCLSSATDPQTKRKLDDASKRLEFLYDKLREQTLSPTITSGLHNIARSIETRNYSEGLTMHTHIVSTSNFSETSAFMPVLKVVLTQANKLGV

SEQ ID NO: 17173 - protein, 430 aa, Homo sapiens
MGKRDTADIISTVEFNHTGELLATGDKGGRVVIFQREPESKNAPHSQGEYDVYSTFQSHEPEFDYLKSLEIEEKINKIKWLPQQNAAHSLLSTNDKTIKLWKITERDKRPEGYNLKDEEGKLKDLSTVTSLQVPVLKPMDLMVEVSPRRIFANGHTYHINSISVNSDCETYMSADDLRINLWHLAITDRSFNIVDIKPANMEDLTEVITASEFHPHHCNLFVYSSSKGSLRLCDMRAAALCDKHSKLFEEPEDPSNRSFFSEIISSVSDVKFSHSGRYMLTRDYLTVKVWDLNMEARPIETYQVHDYLRSKLCSLYENDCIFDKFECAWNGSDSVIMTGAYNNFFRMFDRNTKRDVTLEASRESSKPRAVLKPRRVCVGGKRRRDDISVDSLDFTKKILHTAWHPAENIIAIAATNNLYIFQDKVNSDMH

SEQ ID NO: 17174 - protein, 951 aa, Homo sapiens
MKSLKAKFRKSDTNEWNKNDDRLLQAVENGDAEKVASLLGKKGASATKHDSEGKTAFHLAAAKGHVECLRVMITHGVDVTAQDTTGHSALHLAAKNSHHECIRKLLQSKCPAESVDSSGKTALHYAAAQGCLQAVQILCEHKSPINLKDLDGNIPLLLAVQNGHSEICHFLLDHGADVNSRNKSGRTALMLACEIGSSNAVEALIKKGADLNLVDSLGYNALHYSKLSENAGIQSLLLSKISQDADLKTPTKPKQLSDVSSPRSITSTPLSGKESVFFAEPPFKAEISSIRENKDRLSDSTTGADSLLDISSEADQQDLLSLLQAKVASLTLHNKELQDKLQAKSPKEAEADLSFDSYHSTQTDLGPSLGKPGETSPPDSKSSPSVLIHSLGKSTTDNDVRIQQLQEILQDLQKRLESSEAERKQLQVELQSRRAELVCLNNTEISENSSDLSQKLKETQSKYEEAMKEVLSVQKQMKLGLVSPESMDNYSHFHELRVTEEEINVLKQDLQNALEESERNKEKVRELEEKLVEREKGTVIKPPVEEYEEMKSSYCSVIENMNKEKAFLFEKYQEAQEEIMKLKDTLKSQMTQEASDEAEDMKEAMNRMIDELNKQVSELSQLYKEAQAELEDYRKRKSLEDVTAEYIHKAEHEKLMQLTNVSRAKAEDALSEMKSQYSKVLNELTQLKQLVDAQKENSVSITEHLQVITTLRTAAKEMEEKISNLKEHLASKEVEVAKLEKQLLEEKAAMTDAMVPRSSYEKLQSSLESEVSVLASKLKESVKEKEKVHSEVVQIRSEVSQVKREKENIQTLLKSKEQEVNELLQKFQQAQEELAEMKRYAESSSKLEEDKDKKINEMSKEVTKLKEALNSLSQLSYSTSSSKRQSQQLEALQQQVKQLQNQLAECKKQHQEVISVYRMHLLYAVQGQMDEDVQKVLKQILTMCKNQSQKK

SEQ ID NO: 17175 - protein, 285 aa, Homo sapiens
MSASAPAAEGEGTPTQPASEKEPEMPGPREESEEEEDEDDEEEEEEEKEKSLIVEGKREKKKVERLTMQVSSLQREPFTIAQGKGQKLCEIERIHFFLSKKKTDELRNLHKLLYNRPGTVSSLKKNVGQFSGFPFEKGSVQYKKKEEMLKKFRNAMLKSICEVLDLERSGVNSELVKRILNFLMHPKPSGKPLPKSKKTCSKGSKKERNSSGMARKAKRTKCPEILSDESSSDEDEKKNKEESSDDEDKESEEEYNLSAVRTEFWLCDRRLFWRPSFKSPAAYKS

SEQ ID NO: 17176 - protein, 433 aa, Homo sapiens
MGRKKIQITRIMDERNRQVTFTKRKFGLMKKAYELSVLCDCEIALIIFNSTNKLFQYASTDMDKVLLKYTEYNEPHESRTNSDIVETLRKKGLNGCDSPDPDADDSVGHSPESEDKYRKINEDIDLMISRQRLCAVPPPNFEMPVSIPVSSHNSLVYSNPVSSLGNPNLLPLAHPSLQRNSMSPGVTHRPPSAGNTGGLMGGDLTSGAGTSAGNGYGNPRNSPGLLVSPGNLNKNMQAKSPPPMNLGMNNRKPDLRVLIPPGSKNTMPSVNQRINNSQSAQSLATPVVSVATPTLPGQGMGGYPSAISTTYGTEYSLSSADLSSLSGFNTASALHLGSVTGWQQQHLHNMPPSALSQLGDRTTTPSRYPQHTRHEAGRSPVDSLSSCSSSYDGSDREDHRNEFHSPIGLTRPSPDERESPSVKRMRLSEGWAT

SEQ ID NO: 17177 - protein, 646 aa, Homo sapiens
MSTENVEGKPSNLGERGRARSSTFLRVVQPMFNHSIFTSAVSPAAERIRFILGEEDDSPAPPQLFTELDELLAVDGQEMEWKETARWIKFEEKVEQGGERWSKPHVATLSLHSLFELRTCMEKGSIMLDREASSLPQLVEMIVDHQIETGLLKPELKDKVTYTLLRKHRHQTKKSNLRSLADIGKTVSSASRMFTNPDNGSPAMTHRNLTSSSLNDISDKPEKDQLKNKFMKKLPRDAEASNVLVGEVDFLDTPFIAFVRLQQAVMLGALTEVPVPTRFLFILLGPKGKAKSYHEIGRAIATLMSDEVFHDIAYKAKDRHDLIAGIDEFLDEVIVLPPGEWDPAIRIEPPKSLPSSDKRKNMYSGGENVQMNGDTPHDGGHGGGGHGDCEELQRTGRFCGGLIKDIKRKAPFFASDFYDALNIQALSAILFIYLATVTNAITFGGLLGDATDNMQGVLESFLGTAVSGAIFCLFAGQPLTILSSTGPVLVFERLLFNFSKDNNFDYLEFRLWIGLWSAFLCLILVATDASFLVQYFTRFTEEGFSSLISFIFIYDAFKKMIKLADYYPINSNFKVGYNTLFSCTCVPPDPGEGITLCVYARFVFGGRCRLHACKFSTCCHGPQELVLFFSLKNSATEFDVSLPEVF

SEQ ID NO: 17178 - protein, 2227 aa, Homo sapiens
MDEEEDGAGAEESGQPRSFMRLNDLSGAGGRPGPGSAEKDPGSADSEAEGLPYPALAPVVFFYLSQDSRPRSWCLRTVCNPWFERISMLVILLNCVTLGMFRPCEDIACDSQRCRILQAFDDFIFAFFAVEMVVKMVALGIFGKKCYLGDTWNRLDFFIVIAGMLEYSLDLQNVSFSAVRTVRVLRPLRAINRVPSMRILVTLLLDTLPMLGNVLLLCFFVFFIFGIVGVQLWAGLLRNRCFLPENFSLPLSVDLERYYQTENEDESPFICSQPRENGMRSCRSVPTLRGDGGGGPPCGLDYEAYNSSSNTTCVNWNQYYTNCSAGEHNPFKGAINFDNIGYAWIAIFQVITLEGWVDIMYFVMDAHSFYNFIYFILLIIVGSFFMINLCLVVIATQFSETKQRESQLMREQRVRFLSNASTLASFSEPGSCYEELLKYLVYILRKAARRLAQVSRAAGVRVGLLSSPAPLGGQETQPSSSCSRSHRRLSVHHLVHHHHHHHHHYHLGNGTLRAPRASPEIQDRDANGSRRLMLPPPSTPALSGAPPGGAESVHSFYHADCHLEPVRCQAPPPRSPSEASGRTVGSGKVYPTVHTSPPPETLKEKALVEVAASSGPPTLTSLNIPPGPYSSMHKLLETQSTGACQSSCKISSPCLKADSGACGPDSCPYCARAGAGEVELADREMPDSDSEAVYEFTQDAQHSDLRDPHSRRQRSLGPDAEPSSVLAFWRLICDTFRKIVDSKYFGRGIMIAILVNTLSMGIEYHEQPEELTNALEISNIVFTSLFALEMLLKLLVYGPFGYIKNPYNIFDGVIVVISVWEIVGQQGGGLSVLRTFRLMRVLKLVRFLPALQRQLVVLMKTMDNVATFCMLLMLFIFIFSILGMHLFGCKFASERDGDTLPDRKNFDSLLWAIVTVFQILTQEDWNKVLYNGMASTSSWAALYFIALMTFGNYVLFNLLVAILVEGFQAEGDANKSESEPDFFSPSLDGDGDRKKCLALVSLGEHPELRKSLLPPLIIHTAATPMSLPKSTSTGLGEALGPASRRTSSSGSAEPGAAHEMKSPPSARSSPHSPWSAASSWTSRRSSRNSLGRAPSLKRRSPSGERRSLLSGEGQESQDEEESSEEERASPAGSDHRHRGSLEREAKSSFDLPDTLQVPGLHRTASGRGSASEHQDCNGKSASGRLARALRPDDPPLDGDDADDEGNLSKGERVRAWIRARLPACCLERDSWSAYIFPPQSRFRLLCHRIITHKMFDHVVLVIIFLNCITIAMERPKIDPHSAERIFLTLSNYIFTAVFLAEMTVKVVALGWCFGEQAYLRSSWNVLDGLLVLISVIDILVSMVSDSGTKILGMLRVLRLLRTLRPLRVISRAQGLKLVVETLMSSLKPIGNIVVICCAFFIIFGILGVQLFKGKFFVCQGEDTRNITNKSDCAEASYRWVRHKYNFDNLGQALMSLFVLASKDGWVDIMYDGLDAVGVDQQNFHKCRQHQEEEEARRREEKRLRRLEKKRRNLMLDDVIASGSSASAASEAQCKPYYSDYSRFRLLVHHLCTSHYLDLFITGVIGLNVVTMAMEHYQQPQILDEALKICNYIFTVIFVLESVFKLVAFGFRRFFQDRWNQLDLAIVLLSIMGITLEEIEVNASLPINPTIIRIMRVLRIARVLKLLKMAVGMRALLDTVMQALPQVGNLGLLFMLLFFIFAALGVELFGDLECDETHPCEGLGRHATFRNFGMAFLTLFRVSTGDNWNGIMKDTLRDCDQESTCYNTVISPIYFVSFVLTAQFVLVNVVIAVLMKHLEESNKEAKEEAELEAELELEMKTLSPQPHSPLGSPFLWPGVEGPDSPDSPKPGALHPAAHARSASHFSLEHPTMQPHPTELPGPDLLTVRKSGVSRTHSLPNDSYMCRHGSTAEGPLGHRGWGLPKAQSGSVLSVHSQPADTSYILQLPKDAPHLLQPHSAPTWGTIPKLPPPGRSPLAQRPLRRQAAIRTDSLDVQGLGSREDLLAEVSGPSPPLARAYSFWGQSSTQAQQHSRSHSKISKHMTPPAPCPGPEPNWGKGPPETRSSLELDTELSWISGDLLPPGGQEEPPSPRDLKKCYSVEAQSCQRRPTSWLDEQRRHSIAVSCLDSGSQPHLGTDPSNLGGQPLGGPGSRPKKKLSPPSITIDPPESQGPRTPPSPGICLRRRAPSSDSKDPLASGPPDSMAASPSPKKDVLSLSGLSSDPADLDP

SEQ ID NO: 17179 - protein, 1715 aa, Homo sapiens
RIQTAHPAGRQVMLHYLLPWMNNIELVDLKPLPTARRHDEDEDDSLKDRELMVTSRRWLRGEGWGSPQATAMVLNNLMYMTAKYGDELAWSEVENVWTTLADGWPKNLKIILHFLISICGVNSEPSLLPYVKKVIVYLGRDKTMQLLEELVSELQLTDPVSSGVTHMDNPPYYRITSSYKIPSVTSGTTSSSNTMVAPTDGNPDNKPIKENIEESYVHLDIYSGLNSHLNRQHHRLESRYSSSSGGSYEEEKSDSMPLYSNWRLKVMEHNQGEPLPFPPAGGCWSPLVDYVPETSSPGLPLHRCNIAVILLTDLIIDHSVKVEWGSYLHLLLHAIFIGFDHCHPEVYEHCKRLLLHLLIVMGPNSNIRTVASVLLRNKEFNEPRVLTVKQVAHLDYNFTAGINDFIPDYQPSPMTDSGLSSSSTSSSISLGNNSAAISHLHTTILNEVDISVEQDGKVKTLMEFITSRKRGPLWNHEDVSAKNPSIKSAEQLTTFLKHVVSVFKQSSSEGIHLEHHLSEVALQTALSCSSRHYAGRSFQIFRALKQPLTATTLSDVLSRLVETVGDPGEDAQGFVIELLLTLESAIDTLAETMKHYDLLSALSQTSYHDPIMGNKYAANRKSTGQLNLSTSPINSSSYLGYNSNARSNSLRLSLIGDRRGDRRRSNTLDIMDGRINHSSSLARTRSLSSLREKGMYDVQSTTEPTNLMATIFWIAASLLESDYEYEYLLALRLLNKLLIHLPLDKSESREKIENVQSKLKWTNFPGLQQLFLKGFTSASTQEMTVHLLSKLISVSKHTLVDPSQLSGFPLNILCLLPHLIQHFDSPTQFCKETASRIAKVCAEEKCPTLVNLAHMMSLYSTHTYSRDCSNWINVVCRYLHDSFSDTTFNLVTYLAELLEKGLSSMQQSLLQIIYSLLSHIDLSAAPAKQFNLEIIKIIGKYVQSPYWKEALNILKLVVSRSASLVVPSDIPKTYGGDTGSPEISFTKIFNNVSKELPGKTLDFHFDISETPIIGNKYGDQHSAAGRNGKPKVIAVTRSTSSTSSGSNSNALVPVSWKRPQLSQRRTREKLMNVLSLCGPESGLPKNPSVVFSSNEDLEVGDQQTSLISTTEDINQEEEVAVEDNSSEQQFGVFKDFDFLDVELEDAEGESMDNFNWGVRRRSLDSIDKGDTPSLQEYQCSSSTPSLNLTNQEDTDESSEEEAALTASQILSRTQMLNSDSATDETIPDHPDLLLQSEDSTGSITTEEVLQIRDETPTLEASLDNANSRLPEDTTSVLKEEHVTTFEDEGSYIIQEQQESLVCQGILDLEETEMPEPLAPESYPESVCEEDVTLALKELDERCEEEEADFSGLSSQDEEEQDGFPEVQTSPLPSPFLSAIIAAFQPVAYDDEEEAWRCHVNQMLSDTDGSSAVFTFHVFSRLFQTIQRKFGEITNEAVSFLGDSLQRIGTKFKSSLEVMMLCSECPTVFVDAETLMSCGLLETLKFGVLELQEHLDTYNVKREAAEQWLDDCKRTFGAKEDMYRINTDAQELELCRRLYKLHFQLLLLFQAYCKLINQVNTIKNEAEVINMSEELAQLESILKEAESASENEEIDISKAAQTTIETAIHSLIETLKNKEFISAVAQVKAFRSLWPSDIFGSCEDDPVQTLLHIYFHHQTLGQTGSFAVIGSNLDMSEANYKLMELNLEIRESLRMVQSYQLLAQAKPMGNMVSTGF

SEQ ID NO: 17180 - protein, 1706 aa, Homo sapiens; identical to SEQ ID NO: 1370

SEQ ID NO: 17181 - protein, 378 aa, Homo sapiens
MERDGCAGGGSRGGEGGRAPREGPAGNGRDRGRSHAAEAPGDPQAAASLLAPMDVGEEPLEKAARARTAKDPNTYKVLSLVLSVCVLTTILGCIFGLKPSCAKEVKSCKGRCFERTFGNCRCDAACVELGNCCLDYQETCIEPEHIWTCNKFRCGEKRLTRSLCACSDDCKDKGDCCINYSSVCQGEKSWVEEPCESINEPQCPAGFETPPTLLFSLDGFRAEYLHTWGGLLPVISKLKKCGTYTKNMRPVYPTKTFPNHYSIVTGLYPESHGIIDNKMYDPKMNASFSLKSKEKFNPEWYKGEPIWVTAKYQGLKSGTFFWPGSDVEINGIFPDIYKMYNGSVPFEERILAVLQWLQLPKDERRTRFFRSFIWTSQQ

SEQ ID NO: 17182 - protein, 894 aa, Homo sapiens
MSLPRCCPHPLRPEGSGAMGPEALSSLLLLLLVASGDADMKGHFDPAKCRYALGMQDRTIPDSDISASSSWSDSTAARHSRLESSDGDGAWCPAGSVFPKEEEYLQVDLQRLHLVALVGTQGRHAGGLGKEFSRSYRLRYSRDGRRWMGWKDRWGQEVISGNEDPEGVVLKDLGPPMVARLVRFYPRADRVMSVCLRVELYGCLWRDGLLSYTAPVGQTMYLSEAVYLNDSTYDGHTVGGLQYGGLGQLADGVVGLDDFRKSQELRVWPGYDYVGWSNHSFSSGYVEMEFEFDRLRAFQAMQVHCNNMHTLGARLPGGVECRFRRGPAMAWEGEPMRHNLGGNLGDPRARAVSVPLGGRVARFLQCRFLFAGPWLLFSEISFISDVVNNSSPALGGTFPPAPWWPPGPPPTNFSSLELEPRGQQPVAKAEGSPTAILIGCLVAIILLLLLIIALMLWRLHWRRLLSKAERRVLEEELTVHLSVPGDTILINNRPGPREPPPYQEPRPRGNPPHSAPCVPNGSAYSGDYMEPEKPGAPLLPPPPQNSVPHYAEADIVTLQGVTGGNTYAVPALPPGAVGDGPPRVDFPRSRLRFKEKLGEGQFGEVHLCEVDSPQDLVSLDFPLNVRKGHPLLVAVKILRPDATKNARNDFLKEVKIMSRLKDPNIIRLLGVCVQDDPLCMITDYMENGDLNQFLSAHQLEDKAAEGAPGDGQAAQGPTISYPMLLHVAAQIASGMRYLATLNFVHRDLATRNCLVGENFTIKIADFGMSRNLYAGDYYRVQGRAVLPIRWMAWECILMGKFTTASDVWAFGVTLWEVLMLCRAQPFGQLTDEQVIENAGEFFRDQGRQVYLSRPPACPQGLYELMLRCWSRESEQRPPFSQLHRFLAEDALNTV

SEQ ID NO: 17183 - protein, 909 aa, Homo sapiens
NGDCKPEMSEIKLNSDSEYIKLMHRTSACLPSSQNVDCQININGELERPHSQMNKNHGILRRSISLGGAYPNISCLSSLKHNCSKGGPSQLLIKFASGNEGKVDNLSRDSNRDCTNELSNSCKTENPRLERPYTFKDFVLHPRSHKSRVKGYLRLKMTYLPKTSGSEDDNAEQAEELEPGWVVLDQPDAACHLQQQQEPSPLPPGWEERQDILGRTYYVNHESRRTQWKRPTPQDNLTDAENGNIQLQAQRAFTTRRQISEETESVDNRESSENWEIIREDEATMYSNQAFPSPPPSSNLDVPTHLAEELNARLTIFGNSAVSQPASSSNHSSRRGSLQAYTFEEQPTLPVLLPTSSGLPPGWEEKQDERGRSYYVDHNSRTTTWTKPTVQATVETSQLTSSQSSAGPQSQASTSDSGQQVTQPSEIEQGFLPKGWEVRHAPNGRPFFIDHNTKTTTWEDPRLKIPAHLRGKTSLDTSNDLGPLPPGWEERTHTDGRIFYINHNIKRTQWEDPRLENVAITGPAVPYSRDYKRKYEFFRRKLKKQNDIPNKFEMKLRRATVLEDSYRRIMGVKRADFLKARLWIEFDGEKGLDYGGVAREWFFLISKEMFNPYYGLFEYSATDNYTLQINPNSGLCNEDHLSYFKFIGRVAGMAVYHGKLLDGFFIRPFYKMMLHKPITLHDMESVDSEYYNSLRWILENDPTELDLRFIIDEELFGQTHQHELKNGGSEIVVTNKNKKEYIYLVIQWRFVNRIQKQMAAFKEGFFELIPQDLIKIFDENELELLMCGLGDVDVNDWREHTKYKNGYSANHQVIQWFWKAVLMMDSEKRIRLLQFVTGTSRVPMNGFAELYGSNGPQSFTVEQWGTPEKLPRAHTCFNRLDLPPYESFEELWDKLQMAIENTQGFDGVD

SEQ ID NO: 17184 - protein, 376 aa, Homo sapiens
MVPFIYLQAHFTLCSGWSSTYRDLRKGVYVPYTQGKWEGELGTDLVSIPHGPNVTVRANIAAITESDKFFINGSNWEGILGLAYAEIARLCGAGFPLNQSEVLASVGGSMIIGGIDHSLYTGSLWYTPIRREWYYEVIIVRVEINGQDLKMDCKEYNYDKSIVDSGTTNLRLPKKVFEAAVKSIKAASSTEKFPDGFWLGEQLVCWQAGTTPWNIFPVISLYLMGEVTNQSFRITILPQQYLRPVEDVATSQDDCYKFAISQSSTGTVMGAVIMEGFYVVFDRARKRIGFAVSACHVHDEFRTAAVEGPFVTLDMEDCGYNIPQTDESTLMTIAYVMAAICALFMLPLCLMVCQWRCLRCLRQQHDDFADDISLLK

SEQ ID NO: 17185 - protein, 345 aa, Homo sapiens
MSLFGLLLLTSALAGQRQGTQAESNLSSKFQFSSNKEQNGVQDPQHERIITVSTNGSIHSPRFPHTYPRNTVLVWRLVAVEENVWIQLTFDERFGLEDPEDDICKYDFVEVEEPSDGTILGRWCGSGTVPGKQISKGNQIRIRFVSDEYFPSEPGFCIHYNIVMPQFTEAVSPSVLPPSALPLDLLNNAITAFSTLEDLIRYLEPERWQLDLEDLYRPTWQLLGKAFVFGRKSRVVDLNLLTEEVRLYSCTPRNFSVSIREELKRTDTIFWPGCLLVKRCGGNCACCLHNCNECQCVPSKVTKKYHEVLQLRPKTGVRGLHKSLTDVALEHHEECDCVCRGSTGG

SEQ ID NO: 17186 - protein, 566 aa, Homo sapiens
MDFLLALVLVSSLYLQAAAEFDGRWPRQIVSSIGLCRYGGRIDCCWGWARQSWGQCQPVCQPRCKHGECIGPNKCKCHPGYAGKTCNQDEHIPAPLDQGSEQPLFQPLDHQATSLPSRDLNECGLKPRPCKHRCMNTYGSYKCYCLNGYMLMPDGSCSSALTCSMANCQYGCDVVKGQIRCQCPSPGLQLAPDGRTCVDVDECATGRASCPRFRQCVNTFGSYICKCHKGFDLMYIGGKYQCHDIDECSLGQYQCSSFARCYNIRGSYKCKCKEGYQGDGLTCVYIPKVMIEPSGPIHVPKGNGTILKGDTGNNNWIPDVGSTWWPPKTPYIPPIITNRPTSKPTTRPTPKPTPIPTPPPPPPLPTELRTPLPPTTPERPTTGLTTIAPAASTPPGGITVDNRVQTDPQKPRGDVFSVLVHSCNFDHGLCGWIREKDNDLHWEPIRDPAGGQYLTVSAAKAPGGKAARLVLPLGRLMHSGDLCLSFRHKVTGLHSGTLQVFVRKHGAHGAALWGRNGGHGWRQTQITLRGADIKSVVFKGEKRRGHTGEIGLDDVSLKKGHCSEER

SEQ ID NO: 17187 - protein, 622 aa, Homo sapiens
MGKSEGPVGMVESAGRAGQKRPGFLEGGLLLLLLLVTAALVALGVLYADRRGKQLPRLASRLCFLQEERTFVKRKPRGIPEAQEVSEVCTTPGCVIAAARILQNMDPTTEPCDDFYQFACGGWLRRHVIPETNSRYSIFDVLRDELEVILKAVLENSTAKATVPQEERHDVIALYHRMGLEELQSQFGLKGFNWTLFIQTVLSSVKIKLLPDEEVVVYGIPYLQNLENIIDTYSARTIQNYLVWRLVLDRIGSLSQRFKDTRVNYRKALFGTMVEEVRWRECVGYVNSNMENAVGSLYVREAFPGDSKSMVRELIDKVRTVFVETLDELGWMDEESKKKAQEKAMSIREQIGHPDYILEEMNRRLDEEYSNLNFSEDLYFENSLQNLKVGAQRSLRKLREKVDPNLWIIGAAVVNAFYSPNRNQIVFPAGILQPPFFSKEQPQALNFGGIGMVIGHEITHGFDDNGRNFDKNGNMMDWWSNFSTQHFREQSECMIYQYGNYSWDLADEQNVNGFNTLGENIADNGGVRQAYKAYLKWMAEGGKDQQLPGLDLTHEQLFFINYAQVWCGSYRPEFAIQSIKTDVHSPLKYRVLGSLQNLAAFADTFHCARGTPMHPKERCRVW

SEQ ID NO: 17188 - protein, 421 aa, Homo sapiens
APRSSRGAQAAACHTSHHSAGSRPGGHLGGQAVGTPNCVPVEGPGCTKEEDVLASSACVSTDGGSLHCHNPSGPSDVPARQPHPEQEGWPPGTGDFPSQVPKQVLDVSQELLQSGVVTLPGTRDRHGRAVVQVRTRSLLWTREHSSCAELTRLLLYFHSIPRKEVRDLGLVVLVDARRSPAAPAVSQALSGLQNNTSPIIHSILLLVDKESAFRPDKDAIIQCEVVSSLKAVHKFVDSCQLTADLDGSFPYSHGDWICFRQRLEHFAANCEEAIIFLQNSFCSLNTHRTPRTAQEVAELIDQHETMMKLVLEDPLLVSLRLEGGTVLARLRREELGTEDSRDTLEAATSLYDRVDEEVHRLVLTSNNRLQQLEHLRELASLLEGNDQVRAAGGRRPGQHPLQARLAKATLSPSHCVFRALI

SEQ ID NO: 17189 - protein, 682 aa, Homo sapiens
MDAVLACRLRGRGNRVAALRPRPRPGGSAGPSPFALLCAGLSPEPRAGVGSEFPAWFLGGSSQRRNMALLGSRAELEADEDVFEDALETISISSHSDMATSSLHFASCDTQQAPRQRGASTVSSSSSTKVDLKSGLEECAVALNLFLSNKFTDALELLRPWAKESMYHALGYSTIVVLQAVLTFEQQDIQNGISAMKDALQTCQKYRKKYTVVESFSSLLSRGSLEQLSEEEMHAEICYAECLLQKAALTFVQDENMINFIKGGLKIRTSYQIYKECLSILHEIQKNKLQQEFFYEFEGGVKLGSGAFNLMLSLLPARIIRLLEFIGFSGNRELGLLQLREGASGRSMRSALCCLTILAFHTYISLILGTGEVNVAEAERLLAPFLQQFPNGSLVLFYHARIELLKGNLEEAQEVFQKCISVQEEWKQFHHLCYWELMWINVFQQNWMQAYYYSDLLCKESKWSKATYVFLKAAILSMLPEEDVVATNENVVTLFRQVDSLKQRIAGKSIPTEKFAVRKARRYSASLPAPVKLILPALEMMYVWNGFSIVSKRKDLSENLLVTVEKAEAALQSQNFNSFSVDDECLVKLLKGCCLKNLQRPLQAELCYNHVVESEKLLKYDHYLVPFTLFELASLYKSQGEIDKAIKFLETARNNYKDYSLESRLHFRIQAALHLWRKPSSD

SEQ ID NO: 17190 - protein, 145 aa, Homo sapiens
MFKRHKSLASERKRALLSQRATRFILKDDMRNFHFLSKLVLSAGPLRPTPAVKHSKTTHFEIEIFDAQTRKQICILDKVTQSSTIHDVKQKFHKACPKWYPSRVGLQLECGGPFLKDYITIQSIAASSIVTLYATDLGQQVSWTT

SEQ ID NO: 17191 - protein, 1062 aa, Homo sapiens
MTEVLDVSDEEGDDTMTGDGGEYLRPEDLKELGDDSLPSSQFLDGMNYLRYSLEGGRSDSLRSFSSDRSHTLSHASYLRDSAVMDDSVVIPSHQVSTLAKEAERNSYRLSWGTENLDNVALSSSPIHSGFLVSFMVDARGGAMRGCRHNGLRIIIPPRKCTAPTRVTCRLVKRHRLATMPPMVEGEGLASRLIEVGPSGAQFLGPVIVEIPHFAALRGKERELVVLRSENGDSWKEHFCDYTEDELNEILNGMDEVLDSPEDLEKKRICRIITRDFPQYFAVVSRIKQDSNLIGPEGGVLSSTVVPQVQAVFPEGALTKRIRVGLQAQPMHSELVKKILGNKATFSPIVTLEPRRRKFHKPITMTIPVPKASSDVMLNGFGGDAPTLRLLCSITGGTTPAQWEDITGTTPLTFVNECVSFTTNVSARFWLIDCRQIQESVTFASQVYREIICVPYMAKFVVFAKSHDPIEARLRCFCMTDDKVDKTLEQQENFAEVARSRDVEVLEGKPIYVDCFGNLVPLTKSGQHHIFSFFAFKENRLPLFVKVRDTTQEPCGRLSFMKEPKSTRGLVHQAICNLNITLPIYTKESESDQEQEEEIDMTSEKNPQDEQERIEERLAYIADHLGFSWTELARELDFTEEQIHQIRIENPNSLQDQSHALLKYWLERDGKHATDTNLVECLTKINRMDIVHLMETNTEPLQERISHSYAEIEQTITLDHSEGFSVLQEELCTAQHKQKEEQAVSKESETCDHPPIVSEEDISVGYSTFQDGVPKTEGDSSATALFPQTHKEQVQQDFSGKMQDLPEESSLEYQQEYFVTTPGTETSETQKAMIVPSSPSKTPEEVSTPAEEEKLYLQTPTSSERGGSPIIQEPEEPSEHREESSPRKTSLVIVESADNQPETCERLDEDAAFEKGDDMPEIPPETVTEEEYIDEHGHTVVKKVTRKIIRRYVSSEGTEKEEIMVQGMPQEPVNIEEGDGYSKVIKRVVLKSDTEQSEVTLCEPSILSSTSQFQAEPVEGRRVSKVVKTTVVLGERMEKHLGDSSLATDLPSAKDDFEEDNNE

SEQ ID NO: 17192 - protein, 327 aa, Homo sapiens
MSEAGEEQPMETTGATENGHEAVPEGESPAGAGTGAAAGAGGATAAPPSGNQNGAEGDQINASKNEEDAGKMFVGGLSWDTSKKDLKDYFTKFGEVVDCTIKMDPNTGRSRGFGFILFKDAASVEKVLDQKEHRLDGRVIDPKKAMAMKKDPVKKIFVGGLNPEATEEKIREYFGEFGEIEAIELPMDPKLNKRRGFVFITFKEEEPVKKVLEKKFHTVSGSKCEIKVAQPKEVYQQQQYGSGGRGNRNRGNRGSGGGQSQSWNQGYGNYWNQGYGYQQGYGPGYGGYDYSPYGYYGYGPGYDYSQGSTNYGKSQRRGGHQNNYKPY

SEQ ID NO: 17193 - protein, 169 aa, Homo sapiens
MKSLLLLVLISICWADHLSDNYTLDHDRAIHIQAENGPHLLVEAEQAKVFSHRGGNVTLPCKFYRDPTAFGSGIHKIRIKWTKLTSDYLKEVDVFVSMGYHKKTYGGYQGRVFLKGGSDSDASLVITDLTLEDYGRYKCEVIEGLEDDTVVVALDLQGVVFPYFPRLGR

SEQ ID NO: 17194 - protein, 486 aa, Homo sapiens
MARQPPPPWVHAAFLLCLLSLGGAIEIPMDPSIQNELTQPPTITKQSAKDHIVDPRDNILIECEAKGNPAPSFHWTRNSRFFNIAKDPRVSMRRRSGTLVIDFRSGGRPEEYEGEYQCFARNKFGTALSNRIRLQVSKSPLWPKENLDPVVVQEGAPLTLQCNPPPGLPSPVIFWMSSSMEPITQDKRVSQGHNGDLYFSNVMLQDMQTDYSCNARFHFTHTIQQKNPFTLKVLTNHPYNDSSLRNHPDMYSARGVAERTPSFMYPQGTASSQMVLRGMDLLLECIASGVPTPDIAWYKKGGDLPSDKAKFENFNKALRITNVSEEDSGEYFCLASNKMGSIRHTISVRVKAAPYWLDEPKNLILAPGEDGRLVCRANGNPKPTVQWMVNGEPLQSAPPNPNREVAGDTIIFRDTQISSRAVYQCNTSNEHGYLLANAFVSVLDVPPRMLSPRNQLIRVILYNRTRLDCPFFGSPIPTLRCPHGLS

SEQ ID NO: 17195 - protein, 230 aa, Homo sapiens
ASKKRLIEDTEDWRPRTGTTQSRSFRILAQITGTEHLKESEADNTKKANNSQEPSPQLASSVASTRSMPESLDSPTSGRPGVTSLTAAAAFKPVGSTGVIKSPSWQRPNQGVPSTGRISNSATYSGSVAPANSALGQTQPSDQDTLVQRAEHIPAGKRTPMCAHCNQVIRGPFLVALGKSWHPEEFNCAHCKNTMAYIGFVEEKGALYCELCYEKFFAPECGRCQRKILG

SEQ ID NO: 17196 - protein, 1469 aa, Homo sapiens
MWPSQLLIFMMLLAPIIHAFSRAPIPMAVVRRELSCESYPIELRCPGTDVIMIESANYGRTDDKICDSDPAQMENIRCYLPDAYKIMSQRCNNRTQCAVVAGPDVFPDPCPGTYKYLEVQYECVPYKVEQKVFLCPGLLKGVYQSEHLFESDHQSGAWCKDPLQASDKIYYMPWTPYRTDTLTEYSSKDDFIAGRPTTTYKLPHRVDGTGFVVYDGALFFNKERTRNIVKFDLRTRIKSGEAIIANANYHDTSPYRWGGKSDIDLAVDENGLWVIYATEQNNGKIVISQLNPYTLRIEGTWDTAYDKRSASNAFMICGILYVVKSVYEDDDNEATGNKIDYIYNTDQSKDSLVDVPFPNSYQYIAAVDYNPRDNLLYVWNNYHVVKYSLDFGPLDSRSGQAHHGQVSYISPPIHLDSELERPSVKDISTTGPLGMGSTTTSTTLRTTTLSPGRSTTPSVSGRRNRSTSTPSPAVEVLDDMTTHLPSASSQIPALEESCEAVEAREIMWFKTRQGQIAKQPCPAGTIGVSTYLCLAPDGIWDPQGPDLSNCSSPWVNHITQKLKSGETAANIARELAEQTRNHLNAGDITYSVRAMDQLVGLLDVQLRNLTPGGKDSAARSLNKLQKRERSCRAYVQAMVETVNNLLQPQALNAWRDLTTSDQLRAATMLLHTVEESAFVLADNLLKTDIVRENTDNIKLEVARLSTEGNLEDLKFPENMGHGSTIQLSANTLKQNGRNGEIRVAFVLYNNLGPYLSTENASMKLGTEALSTNHSVIVNSPVITAAINKEFSNKVYLADPVVFTVKHIKQSEENFNPNCSFWSYSKRTMTGYWSTQGCRLLTTNKTHTTCSCNHLTNFAVLMAHVEVKHSDAVHDLLLDVITWVGILLSLVCLLICIFTFCFFRGLQSDRNTIHKNLCISLFVAELLFLIGINRTDQPIACAVFAALLHFFFLAAFTWMFLEGVQLYIMLVEVFESEHSRRKYFYLVGYGMPALIVAVSAAVDYRSYGTDKVCWLRLDTYFIWSFIGPATLIIMLNVIFLGIALYKMFHHTAILKPESGCLDNINYEDNRPFIKSWVIGAIALLCLLGLTWAFGLMYINESTVIMAYLFTIFNSLQGMFIFIFHCVLQKKVRKEYGKCLRTHCCSGKSTESSIGSGKTSGSRTPGRYSTGSQSRIRRMWNDTVRKQSESSFITGDINSSASLNREGLLNNARDTSVMDTLPLNGNHGNSYSIASGEYLSNCVQIIDRGYNHNETALEKKILKELTSNYIPSYLNNHERSSEQNRNLMNKLVNNLGSGREDDAIVLDDATSFNHEESLGLELIHEESDAPLLPPRVYSTENHQPHHYTRRRIPQDHSESFFPLLTNEHTEDLQSPHRDSLYTSMPTLAGVAATESVTTSTQTEPPPAKCGDAEDVYYKSMPNLGSRNHVHQLHTYYQLGRGSSDGFIVPPNKDGTPPEGSSKGPAHLVTSL

SEQ ID NO: 17197 - protein, 1594 aa, Homo sapiens
MPCAQRSWLANLSVVAQLLNFGALCYGRQPQPGPVRFPDRRQEHFIKGLPEYHVVGPVRVDASGHFLSYGLHYPITSSRRKRDLDGSEDWVYYRISHEEKDLFFNLTVNQGFLSNSYIMEKRYGNLSHVKMMASSAPLCHLSGTVLQQGTRVGTAALSACHGLTGFFQLPHGDFFIEPVKKHPLVEGGYHPHIVYRRQKVPETKEPTCGLKDSVNISQKQELWREKWERHNLPSRSLSRRSISKERWVETLVVADTKMIEYHGSENVESYILTIMNMVTGLFHNPSIGNAIHIVVVRLILLEEEEQGLKIVHHAEKTLSSFCKWQKSINPKSDLNPVHHDVAVLLTRKDICAGFNRPCETLGLSHLSGMCQPHRSCNINEDSGLPLAFTIAHELGHSFGIQHDGKENDCEPVGRHPYIMSRQLQYDPTPLTWSKCSEEYITRFLDRGWGFCLDDIPKKKGLKSKVIAPGVIYDVHHQCQLQYGPNATFCQEVENVCQTLWCSVKGFCRSKLDAAADGTQCGEKKWCMAGKCITVGKKPESIPGGWGRWSPWSHCSRTCGAGVQSAERLCNNPEPKFGGKYCTGERKRYRLCNVHPCRSEAPTFRQMQCSEFDTVPYKNELYHWFPIFNPAHPCELYCRPIDGQFSEKMLDAVIDGTPCFEGGNSRNVCINGICKMVGCDYEIDSNATEDRCGVCLGDGSSCQTVRKMFKQKEGSGYVDIGLIPKGARDIRVMEIEGAGNFLAIRSEDPEKYYLNGGFIIQWNGNYKLAGTVFQYDRKGDLEKLMATGPTNESVWIQLLFQVTNPGIKYEYTIQKDGLDNDVEQQMYFWQYGHWTECSVTCGTGIRRQTAHCIKKGRGMVKATFCDPETQPNGRQKKCHEKACPPRWWAGEWEACSATCGPHGEKKRTVLCIQTMVSDEQALPPTDCQHLLKPKTLLSCNRDILCPSDWTVGNWSECSVSCGGGVRIRSVTCAKNHDEPCDVTRKPNSRALCGLQQCPSSRRVLKPNKGTISNGKNPPTLKPVPPPTSRPRMLTTPTGPESMSTSTPAISSPSPTTASKEGDLGGKQWQDSSTQPELSSRYLISTGSTSQPILTSQSLSIQPSEENVSSSDTGPTSEGGLVATTTSGSGLSSSRNPITWPVTPFYNTLTKGPEMEIHSGSGEEREQPEDKDESNPVIWTKIRVPGNDAPVESTEMPLAPPLTPDLSRESWWPPFSTVMEGLLPSQRPTTSETGTPRVEGMVTEKPANTLLPLGGDHQPEPSGKTANRNHLKLPNNMNQTKSSEPVLTEEDATSLITEGFLLNASNYKQLTNGHGSAHWIVGNWSECSTTCGLGAYWRRVECSTQMDSDCAAIQRPDPAKRCHLRPCAGWKVGNWSKCSRNCSGGFKIREIQCVDSRDHRNLRPFHCQFLAGIPPPLSMSCNPEPCEAWQVEPWSQCSRSCGGGVQERGVFCPGGLCDWTKRPTSTMSCNEHLCCHWATGNWDLCSTSCGGGFQKRTVQCVPSEGNKTEDQDQCLCDHKPRPPEFKKCNQQACKKSADLLCTKDKLSASFCQTLKAMKKCSVPTVRAECCFSCPQTHITHTQRQRRQRLLQKSKEL

SEQ ID NO: 17198 - protein, 521 aa, Homo sapiens
MKENVASATVFTLLLFLNTCLLNVQPDPPLELAVEVKQPEDRKPYLWIKWSPPTLIDLKTGWFTLLYEIRLKPEKAAEWEIHFAGQQTEFKILSLHPGQKYLVQVRCKPDHGYWSAWSPATFIQIPSDFTMNDTTVWISVAVLSAVICLIIVWAVALKGYSMVTCIFPPVPGPKIKGFDAHLLEKGKSEELLSALGCQDFPPTSDYEDLLVEYLEVDDSEDQHLMSVHSKEHPSQGMKPTYLDPDTDSGRGSCDSPSLLSEKCEEPQANPSTFYDPEVIEKPENPETTHTWDPQCISMEGKIPYFHAGGSKCSTWPLPQPSQHNPRSSYHNITDVCELAVGPAGAPATLLNEAGKDALKSSQTIKSREEGKATQQREVESFHSETDQDTPWLLPQEKTPFGSAKPLDYVEIHKVNKDGALSLLPKQRENSGKPKKPGTPENNKEYAKVSGVMDNNILVLVPDPHAKNVACFEESAKEAPPSLEQNQAEKALANFTATSSKCRLQLGGLDYLDPACFTHSFH

SEQ ID NO: 17199 - protein, 172 aa, Homo sapiens
MAAAMTFCRLLNRCGEAARSLPLGARCFGVRVSPTGEKVTHTGQVYDDKDYRRIRFVGRQKEVNENFAIDLIAEQPVSEVETRVIACDGGGGALGHPKVYINLVRSWPPVHMLGQPARPHTPLHSQCLFFLSSSLPAPEAALTGFTLLAHSPYSATLQGLHRAACPKTPFQL

SEQ ID NO: 17200 - protein, 994 aa, Homo sapiens
MAEARKRRELLPLIYHHLLRAGYVRAAREVKEQSGQKCFLAQPVTLLDIYTHWQQTSELGRKRKAEEDAALQAKKTRVSDPISTSESSEEEEEAEAETAKATPRLASTNSSVLGADLPSSMKEKAKAETEKAGKTGNSMPHPATGKTVANLLSGKSPRKSAEPSANTTLVSETEEEGSVPAFGAAAKPGMVSAGQADSSSEDTSSSSDETDVEGKPSVKPAQVKASSVSTKESPARKAAPAPGKVGDVTPQVKGGALPPAKRAKKPEEESESSEEGSESEEEAPAGTRSQVKASEKILQVRAASAPAKGTPGKGATPAPPGKAGAVASQTKAGKPEEDSESSSEESSDSEEETPAAKALLQAKASGKTSQVGAASAPAKESPRKGAAPAPPGKTGPAVAKAQAGKREEDSQSSSEESDSEEEAPAQAKPSGKAPQVRAASAPAKESPRKGAAPAPPRKTGPAAAQVQVGKQEEDSRSSSEESDSDREALAAMNAAQVKPLGKSPQVKPASTMGMGPLGKGAGPVPPGKVGPATPSAQVGKWEEDSESSSEESSDSSDGEVPTAVAPAQEKSLGNILQAKPTSSPAKGPPQKAGPVAVQVKAEKPMDNSESSEESSDSADSEEAPAAMTAAQAKPALKIPQTKACPKKTNTTASAKVAPVRVGTQAPRKAGTATSPAGSSPAVAGGTQRPAEDSSSSEESDSEEEKTGLAVTVGQAKSVGKGLQVKAASVPVKGSLGQGTAPVLPGKTGPTVTQVKAEKQEDSESSEEESDSEEAAASPAQVKTSVKKTQAKANPAAARAPSAKGTISAPGKVVTAAAQAKQRSPSKVKPPVRNPQNSTVLARGPASVPSVGKAVATAAQAQTGPEEDSGSSEEESDSEEEAETLAQVKPSGKTHQIRAALAPAKESPRKGAAPTPPGKTGPSAAQAGKQDDSGSSSEESDSDGEAPAAVTSAQDSNSKPARSKTLAPAPPERNTEGSSESSEEELPLTQDQESS

SEQ ID NO: 17201 - protein, 437 aa, Homo sapiens
MSKRLSPQLQHNITEDAYCETHLEPTRLFCDVDQITLCSKCFQSQEHKHHMVCGIQEAAENYRKLFQEILNTSREKLEAAKSILTDEQERMAMIQEEEQNFKKMIESEYSMRLRLLNEECEQNLQRQQECISDLNLRETLLNQAIKLATELEEMFQEMLQRLGRVGRENMEKLKESEARASEQVRSLLKLIVELEKKCGEGTLALLKNAKYSLERSKSLLLEHLEPAHITDLSLCHIRGLSSMFRVLQRHLTLDPETAHPCLALSEDLRTMRLRHGQQDGAGNPERLDFSAMVLAAESFTSGRHYWEVDVEKATRWQVGIYHGSADAKGSTARASGEKVLLTGSVMGTEWTLWVFPPLKRLFLEKKLDTVGVFLDCEHGQISFYNVTEMSLIYNFSHCAFQGALRPVFSLCIPNGDTSPDSLTILQHGPSCDATVSP

SEQ ID NO: 17202 - protein, 1529 aa, Homo sapiens
MRGVGWQMLSLSLGLVLAILNKVAPQACPAQCSCSGSTVDCHGLALRSVPRNIPRNTERLDLNGNNITRITKTDFAGLRHLRVLQLMENKISTIERGAFQDLKELERLRLNRNHLQLFPELLFLGTAKLYRLDLSENQIQAIPRKAFRGAVDIKNLQLDYNQISCIEDGAFRALRDLEVLTLNNNNITRLSVASFNHMPKLRTFRLHSNNLYCDCHLAWLSDWLRQRPRVGLYTQCMGPSHLRGHNVAEVQKREFVCSGHQSFMAPSCSVLHCPAACTCSNNIVDCRGKGLTEIPTNLPETITEIRLEQNTIKVIPPGAFSPYKKLRRIDLSNNQISELAPDAFQGLRSLNSLVLYGNKITELPKSLFEGLFSLQLLLLNANKINCLRVDAFQDLHNLNLLSLYDNKLQTIAKGTFSPLRAIQTMHLAQNPFICDCHLKWLADYLHTNPIETSGARCTSPRRLANKRIGQIKSKKFRCSAKEQYFIPGTEDYRSKLSGDCFADLACPEKCRCEGTTVDCSNQKLNKIPEHIPQYTAELRLNNNEFTVLEATGIFKKLPQLRKINFSNNKITDIEEGAFEGASGVNEILLTSNRLENVQHKMFKGLESLKTLMLRSNRITCVGNDSFIGLSSVRLLSLYDNQITTVAPGAFDTLHSLSTLNLLANPFNCNCYLAWLGEWLRKKRIVTGNPRCQKPYFLKEIPIQDVAIQDFTCDDGNDDNSCSPLSRCPTECTCLDTVVRCSNKGLKVLPKGIPRDVTELYLDGNQFTLVPKELSNYKHLTLIDLSNNRISTLSNQSFSNMTQLLTLILSYNRLRCIPPRTFDGLKSLRLLSLHGNDISVVPEGAFNDLSALSHLAIGANPLYCDCNMQWLSDWVKSEYKEPGIARCAGPGEMADKLLLTTPSKKFTCQGPVDVNILAKCNPCLSNPCKNDGTCNSDPVDFYRCTCPYGFKGQDCDVPIHACISNPCKHGGTCHLKEGEEDGFWCICADGFEGENCEVNVDDCEDNDCENNSTCVDGINNYTCLCPPEYTGELCEEKLDFCAQDLNPCQHDSKCILTPKGFKCDCTPGYVGEHCDIDFDDCQDNKCKNGAHCTDAVNGYTCICPEGYSGLFCEFSPPMVLPRTSPCDNFDCQNGAQCIVRINEPICQCLPGYQGEKCEKLVSVNFINKESYLQIPSAKVRPQTNITLQIATDEDSGILLYKGDKDHIAVELYRGRVRASYDTGSHPASAIYSVETINDGNFHIVELLALDQSLSLSVDGGNPKIITNLSKQSTLNFDSPLYVGGMPGKSNVASLRQAPGQNGTSFHGCIRNLYINSELQDFQKVPMQTGILPGCEPCHKKVCAHGTCQPSSQAGFTCECQEGWMGPLCDQRTNDPCLGNKCVHGTCLPINAFSYSCKCLEGHGGVLCDEEEDLFNPCQAIKCKHGKCRLSGLGQPYCECSSGYTGDSCDREISCRGERIRDYYQKQQGYAACQTTKKVSRLECRGGCAGGQCCGPLRSKRRKYSFECTDGSSFVDEVEKVVKCGCTRCVS

SEQ ID NO: 17203 - protein, 258 aa, Homo sapiens
MKSLLLLVLISICWADHLSDNYTLDHDRAIHIQAENGPHLLVEAEQAKVFSHRGGNVTLPCKFYRDPTAFGSGIHKIRIKWTKLTSDYLKEVDVFVSMGYHKKTYGGYQGRVFLKGGSDSDASLVITDLTLEDYGRYKCEVIEGLEDDTVVVALDLQGVVFPYFPRLGRYNLNFHEAQQACLDQDAVIASFDQLYDAWRGGLDWCNAGWLSDGSVQYPITKPREPCGGQNTVPGVRNYGFWDKDKSRYDVFCFTSNFN

SEQ ID NO: 17204 - protein, 1125 aa, Homo sapiens
MGDPKAHVMARPLRAPLRRSFSDHIRDSTARALDVIWKNTRDRRLAEIEAKEACDWLRATGFPQYAQLYEDFLFPIDISLVKREHDFLDRDAIEALCRRLNTLNKCAVMKLEISPHRKRSDDSDEDEPCAISGKWTFQRDSKRWSRLEEFDVFSPKQDLVPGSPDDSHPKDGPSPGGTLMDLSERQEVSSVRSLSSTGSLPSHAPPSEDAATPRTNSVISVCSSSNLAGNDDSFGSLPSPKELSSFSFSMKGHEKTAKSKTRSLLKRMESLKLKSSHHSKHKAPSKLGLIISGPILQEGMDEEKLKQLNCVEISALNGNRINVPMVRKRSVSNSTQTSSSSSQSETSSAVSTPSPVTRTRSLSACNKRVGMYLEGFDPFNQSTFNNVVEQNFKNRESYPEDTVFYIPEDHKPGTFPKALTNGSFSPSGNNGSVNWRTGSFHGPGHISLRRENSSDSPKELKRRNSSSSMSSRLSIYDNVPGSILYSSSGDLADLENEDIFPELDDILYHVKGMQRIVNQWSEKFSDEGDSDSALDSVSPCPSSPKQIHLDVDNDRTTPSDLDSTGNSLNEPEEPSEIPERRDSGVGASLTRSNRHRLRWHSFQSSHRPSLNSVSLQINCQSVAQMNLLQKYSLLKLTALLEKYTPSNKHGFSWAVPKFMKRIKVPDYKDRSVFGVPLTVNVQRTGQPLPQSIQQAMRYLRNHCLDQVGLFRKSGVKSRIQALRQMNEGAIDCVNYEGQSAYDVADMLKQYFRDLPEPLMTNKLSETFLQIYQYVPKDQRLQAIKAAIMLLPDENREVLQTLLYFLSDVTAAVKENQMTPTNLAVCLAPSLFHLNTLKRENSSPRVMQRKQSLGKPDQKDLNENLAATQGLAHMIAECKKLFQVPEEMSRCRNSYTEQELKPLTLEALGHLGNDDSADYQHFLQDCVDGLFKEVKEKFKGWVSYSTSEQAELSYKKVSEGPPLRLWRSVIEVPAVPEEILKRLLKEQHLWDVDLLDSKVIEILDSQTEIYQYVQNSMAPHPARDYVVLRTWRTNLPKGACALLLTSVDHDRAPVVGVRVNVLLSRYLIEPCGPGKSKLTYMCRVDLRGHMPEWYTKSFGHLCAAEVVKIRDSFSNQNTETKDTKSR

SEQ ID NO: 17205 - protein, 98 aa, Homo sapiens
MEAPEYLDLDEIDFSDDISYSVTSLKTIPELCRRCDTQNEDRSVSSSSWNCGISTLITNTQKPTGIADVYSKFRPVKRVSPLKHQPETLENNESDDQK

SEQ ID NO: 17206 - protein, 176 aa, Homo sapiens
MRLLILTCLVAVALARPKLPLRYPERLQNPSESSEPIPLESREEYMNGMNRRNILREKQTDEIKDTRNESTQNCVVAEPEKMESSISSSSEEQFCRLNEYNQLQLQAAHAQEQIRRMNENSHVQVPFQQLNQLAAYPYAVWYYPQIMQYVPFPPFSDISNPTAHENYEKNNVMLQW

SEQ ID NO: 17207 - protein, 203 aa, Homo sapiens
MENCSAASTFLTDSLELELGTEWCKPPYFSCAVDNRGGGKHFSGESYLCSGALKRLILNLDPLPTNFEEDTLEIFGIQWVTETALVNSSRELFHLFRQQLYNLETLLQSSCDFGKVSTLHCKADNIRQQCVLFLHYVKVFIFRYLKVQNAESHVPVHPYEALEAQLPSVLIDELHGLLLYIGHLSELPSVNIGAFVNQNQIKL

SEQ ID NO: 17208 - protein, 159 aa, Homo sapiens
MKTKLNIYNMQFLLFVFLVWDPARLVLANIQEDEAKNNITIFTRILDRLLDGYDNRLRPGLGDSITEVFTNIYVTSFGPVSDTDMEYTIDVFFRQKWKDERLKFKGPMNILRLNNLMASKIWTPDTFFHNGKKSVAHNMTMPNKLLRIQDDGTLLYTMR

SEQ ID NO: 17209 - protein, 169 aa, Homo sapiens
MSEVSCKKRDDYLEWPEYFMAVAFLSAQRSKDPNSQVGACIVNSENKIVGIGYNGMPNGCSDDVLPWRRTAENKLDTKYPYVCHAELNAIMNKNSTDVKGCSMYVALFPCNECAKLIIQAGIKEVIFMSDKYHDSDEATAARLLFNMAGVTFRKFIPKCSKIVIDFDSI

SEQ ID NO: 17210 - protein, 261 aa, Homo sapiens
MLPTASSKRRTFAARYFTRSKSLVMGEQSRSPGRMPCPHRLGPVLKAGWLKKQRSIMKNWQQRWFVLRGDQLFYYKDKDEIKPQGFISLQGTQVTELPPGPEDPGKHLFEISPGGAGEREKVPANPEALLLMASSQRDMEDWVQAIRRVIWAPLGGGIFGQRLEETVHHERKYGPRLAPLLVEQCVDFIRERGLTEEGLFRMPGQANLVRDLQDSFDCGEKPLFDSTTDVHTVASLLKLYLRELPEPVVPFARALWSWLNK

SEQ ID NO: 17211 - protein, 754 aa, Homo sapiens
MAFASWWYKTHVSEKTSESPSKPGEKKGSDEKKAASLGSSQSSRTYAGGTASATKVSASSGATSKSSSMNPTETKAVKTEPEKKSQSTKLSVVHEKKSQEGKPKEHTEPKSLPKQASDTGSNDAHNKKAVSRSAEQQPSEKSTEPKTKPQDMISAGGESVAGITAISGKPGDKKKEKKSLTPAVPVESKPDKPSGKSGMDAALDDLIDTLGGPEETEEENTTYTGPEVSDPMSSTYIEELGKREVTIPPKYRELLAKKEGITGPPADSSKPIGPDDAIDALSSDFTCGSPTAAGKKTEKEESTEVLKAQSAGTVRSAAPPQEKKRKVEKDTMSDQALEALSASLGTRQAEPELDLRSIKEVDEAKAKEEKLEKCGEDDETIPSEYRLKPATDKDGKPLLPEPEEKPKPRSESELIDELSEDFDRSECKEKPSKPTEKTEESKAAAPAPVSEAVCRTSMCSIQSAPPEPATLKGTVPDDAVEALADSLGKKEADPEDGKPVMDKVKEKAKEEDREKLGEKEETIPPDYRLEEVKDKDGKPLLPKESKEQLPPMSEDFLLDALSEDFSGPQNASSLKFEDAKLAAAISEVVSQTPASTTQAGAPPRDTSQSDKDLDDALDKLSDSLGQRQPDPDENKPMEDKVKEKAKAEHRDKLGERDDTIPPEYRHLLDDNGQDKPVKPPTKKSEDSKKPADDQDPIDALSGDLDSCPSTTETSQNTAKDKCKKAASSSKAPKNGGKAKDSAKTTEETSKPKDD

SEQ ID NO: 17212 - protein, 244 aa, Homo sapiens
AGVSVAFGAPIGGVLFSLEEVSYYFPLKTLWRSFFAALVAAFVLRSINPFGVFGGLWGAFFIRANIAWCRRRKSTKFGKYPVLEVIIVAAITAVIAFPNPYTRLNTSELIKELFTDCGPLESSSLCDYRNDMNASKIVDDIPDRPAGIGVYSAIWQLCLALIFKIIMTVFTFGIKVPSGLFIPSMAIGAIAGRIVGIAVEQLAYYHHDWFIFKEWCEVGADCITPGLYAMVGAAACLGGVTRMT

SEQ ID NO: 17213 - protein, 1303 aa, Homo sapiens
MAQSLRLHFAARRSNTYPLSETSGDDLDSHVHMCFKRPTRISTSNVVQMKLTPRQTALAPLIKENVQSQERSSVPSSENVNKKSSCLQISLQPTRYSGYLQSSNVLADSDDASFTCILKDGIYSSAVVDNELNAVNDGHLVSSPAICSGSLSNFSTSDNGSYSSNGSDFGSCASITSGGSYTNSVISDSSSYTFPPSDDTFLGGNLPSDSTSNRSVPNRNTTPCEIFSRSTSTDPFVQDDLEHGLEIMKLPVSRNTKIPLKRYSSLVIFPRSPSTTRPTSPTSLCTLLSKGSYQTSHQFIISPSEIAHNEDGTSAKGFLSTAVNGLRLSKTICTPGEVRDIRPLHRKGSLQKKIVLSNNTPRQTVCEKSSEGYSCVSVHFTQRKAATLDCETTNGDCKPEMSEIKLNSDSEYIKLMHRTSACLPSSQNVDCQININGELERPHSQMNKNHGILRRSISLGGAYPNISCLSSLKHNCSKGGPSQLLIKFASGNEGKVDNLSRDSNRDCTNELSNSCKTRDDFLGQVDVPLYPLPTENPRLERPYTFKDFVLHPRSHKSRVKGYLRLKMTYLPKTSGSEDDNAEQAEELEQQQEPSPLPPGWEERQDILGRTYYVNHESRRTQWKRPTPQDNLTDAENGNIQLQAQRAFTTRRQISEETESVDNRESSENWEIIREDEATMYSNQAFPSPPPSSNLDVPTHLAEELNARLTIFGNSAVSQPASSSNHSSRRGSLQAYTFEEQPTLPVLLPTSSGLPPGWEEKQDERGRSYYVDHNSRTTTWTKPTVQATVETSQLTSSQSSAGPQSQASTSDSGQQVTQPSEIEQGFLPKGWEVRHAPNGRPFFIDHNTKTTTWEDPRLKIPAHLRGKTSLDTSNDLGPLPPGWEERTHTDGRIFYINHNIKRTQWEDPRLENVAITGPAVPYSRDYKRKYEFFRRKLKKQNDIPNKFEMKLRRATVLEDSYRRIMGVKRADFLKARLWIEFDGEKGLDYGGVAREWFFLISKEMFNPYYGLFEYSATDNYTLQINPNSGLCNEDHLSYFKFIGRVAGMAVYHGKLLDGFFIRPFYKMMLHKPITLHDMESVDSEYYNSLRWILENDPTELDLRFIIDEELFGQTHQHELKNGGSEIVVTNKNKKEYIYLVIQWRFVNRIQKQMAAFKEGFFELIPQDLIKIFDENELELLMCGLGDVDVNDWREHTKYKNGYSANHQVIQWFWKAVLMMDSEKRIRLLQFVTGTSRVPMNGFAELYGSNGPQSFTVEQWGTPEKLPRAHTCFNRLDLPPYESFEELWDKLQMAIENTQGFDGVD

SEQ ID NO: 17214 - protein, 279 aa, Homo sapiens
DNSFRQAVMKNPPERTPQDLEIVYSYLHGMEALSNLREHQLRLMCETVRYERHEANEVLYYPDDIGTCWYILLSGSVFIKESMFLPRSSFGKRSAGSFRRGCECIVLEPSEMIVVDYMDENEEYFQRQASHRQSRRRFRKINQKGERQTIIDTVDPYPMGKPPLPRGYHTECTKSQLPADFTKLHLTDSLHPQVTHVSSSHSGCSITSDSGSSSLSDIYQATESEAGDMDLSGLPETAVDSEDDDDEEDIERASDPLMSRDIVRDCLEKDPIDRTDDDI

SEQ ID NO: 17215 - protein, 113 aa, Homo sapiens
MSALLRLLRTGAPAAACLRLGTSAGTGSRRAMALYHTEERGQPCSQNYRLFFKNVTGHYISPFHDIPLKVNSKEENGIPMKKARNDEYENLFNMIVEIPRWTNAKMEVLKIAM

SEQ ID NO: 17216 - protein, 501 aa, Homo sapiens
MSPEKKNQTDVKQEEKNKDNIGFHHLGKRINQELSSKENIVQERKKDLSLSEASENKGSSKSQNYFTNRQRLNKEYSISNKENTHNGLRMSIYPKSTGNKGFEDGDDAISKLHDQEEYGAALIRNNMQHIMGPVTAIKLLGEENKENTPRNVLNIIPASMNYAKAHSKDKKKPQRDSQAQKSPVKSKSTHRIQHNIDYLKHLSKVKKIPSDFEGSGYTDLQERGDNDISPFSGDGQPFKDIPGKGEATGPDLEGKDIQTGFAGPSEAESTHLDTKKPGYNEIPEREENGGNTIGTRDETAKEADAVDVSLVEGSNDIMGSTNFKELPGREGNRVDAGSQNAHQGKVEFHYPPAPSKEKRKEGSSDAAESTNYNEIPKNGKGSTRKGVDHSNRNQATLNEKQRFPSKGKSQGLPIPSRGLDNEIKNEMDSFNGPSHENIITHGRKYHYVPHRQNNSTRNKGMPQGKGSWGRQPHSNRRFSSRRRDDSSESSDSGSSSESDGD

SEQ ID NO: 17217 - protein, 208 aa, Homo sapiens
MLVIPSALMYSFVLYWRLALYVYEYLLHVGAQKSAQTFLSEIRWEKNITLGEPPGFLHSWWCVFWDLYCAAPERRETCEHSSEAKAFHDYSAAAAPSPVLGNIPPGDGMPVGPVPPGFFQPFMSPRYPGGPRPPLRIPNQALGGVPGSQPLLPSGMDPTRQQGHPNMGGPMQRMTPPRGMVPLGPQNYGGAMRPPLNALGGPGMPGMN

SEQ ID NO: 17218 - protein, 1152 aa, Homo sapiens
MSSPMPDCTSKCRSLKHALDVLSVVTKGSENQIKAFLSSHCYNAATIKDVFGRNALHLVSSCGKKGVLDWLIQKGVDLLVKDKESGWTALHRSIFYGHIDCVWSLLKHGVSLYIQDKEGLSALDLVMKDRPTHVVFKNTDPTDVYTWGDNTNFTLGHGSQNSKHHPELVDLFSRSGIYIKQVVLCKFHSVFLSQKGQVYTCGHGPGGRLGHGDEQTCLVPRLVEGLNGHNCSQVAAAKDHTVVLTEDGCVYTFGLNIFHQLGIIPPPSSCNVPRQIQAKYLKGRTIIGVAAGRFHTVLWTREAVYTMGLNGGQLGCLLDPNGEKCVTAPRQVSALHHKDIALSLVAASDGATVCVTTRGDIYLLADYQCKKMASKQLNLKKVLVSGGHMEYKVDPEHLKENGGQKICILAMDGAGRVFCWRSVNSSLKQCRWAYPRQVFISDIALNRNEILFVTQDGEGFRGRWFEEKRKSSEKKEILSNLHNSSSDVSYVSDINSVYERIRLEKLTFAHRAVSVSTDPSGCNFAILQSDPKTRLDGVRFENEKINVIAKNTGNKLKLSQKKCSFLCDVTMKSVDGKEFPCHKCVLCARLEYFHSMLSSSWIEASSCAALEMPIHSDILKVILDYLYTDEAVVIKESQNVDFICSVLVVADQLLITRLKEICEVALTEKLTLKNAAMLLEFAAMYSAKQLKLSCLQFIGLNMAALLEARSLDVLSDGVLKDLSEFYRKMIPAMDRRVITPYQDGPDISYLEVEDGDIFLKEEINMEQNHSETMFKKAKTKAKKKPRKRSDSSGGYNLSDIIQSPSSTGLLKSGKTNSVESLPELLTSDSEGSYAGVGSPRDLQSPDFTTGFHSDKIEAKVKPYVNGTSPVYSREDLKPWEKSPILKISAPQPIPSNRIDTTSSASWVAGSFSPVSPPVVDLRTIMEIEESRQKCGATPKSHLGKTVSHGVKLSQKQRKMIALTTKENNSGMNSMETVLFTPSKAPKPVNAWASSLHSVSSKSFRDFLLEEKKSVTSHSSGDHVKKVSFKGIENSQAPKIVRCSTHGTPGPEGNHISDLPLLDSPNPWLSSSVTAPSMVAPVTFASIVEEELQQEAALIRSREKPLALIQIEEHAIQDLLVFYEAFGNPEEFVIVERTPQGPLAVPMWNKHGC

SEQ ID NO: 17219 - protein, 1283 aa, Homo sapiens
MSQVRQVGLLAAGCQPWNKDVCAASGDRFAYCATLAIYIYQLDHRYNEFKLHAIMSEHKKTITAISWCPHNPDLFASGSTDNLVIIWNVAEQKVIAKLDSTKGIPASLSWCWNAEDVVAFVSHRGPLFIWTISGPDSGVIVHKDAHSFLSDICMFRWHTHQKGKVVFGHIDGSLSIFHPGNKNQKHVLRPESLEGTDEEDPVTALEWDPLSTDYLLVVNLHYGIRLVDSESLSCITTFNLPSAAASVQCLAWVPSAPGMFITGDSQVGVLRIWNVSRTTPIDNLKLKKTGFHCLHVLNSPPRKKFSVQSPTKNHYTSSTSEAVPPPTLTQNQAFSLPPGHAVCCFLDGGVGLYDMGAKKWDFLRDLGHVETIFDCKFKPDDPNLLATASFDGTIKVWDINTLTAVYTSPGNEGVIYSLSWAPGGLNCIAGGTSRNGAFIWNVQKGKIIQRFNEHGTNGIFCIAWSHKDSKRIATCSSDGFCIIRTIDGKVLHKYKHPAAVFGCDWSQNNKDMIATGCEDTNVRVYYVATSSDQPLKVFSGHTAKVFHVKWSPLREGILCSGSDDGTVRIWDYTQDACINILNGHTAPVRGLMWNTEIPYLLISGSWDYTIKVWDTREGTCVDTVYDHGADVYGLTCHPSRPFTMASCSRDSTVRLWSLTALVTPVQINILADRSWEEIIGNTDYAIEPGTPPLLCGKVSRDIRQEIEKLTANSQVKKLRWFSECLSPPGGSDNLWNLVAVIKGQDDSLLPQNYCKGIMHLKHLIKFRTSEAQELTTVKMSKFGGGIGVPAKEERLKEAAEIHLRLGQIQRYCELMVELGEWDKALSIAPGVSVKYWKKLMQRRADQLIQEDKDDVIPYCIAIGDVKKLVHFFMSRGQLKEALLVAQAACEGNMQPLHVSVPKGASYSDDIYKEDFNELLHKVSKELAEWYFQDGRAVLAACCHLAIDNIELAMAYLIRGNELELAVCVGTVLGESAAPATHYALELLARKCMMISVWNLAADLLLMIPDNELHLIKLCAFYPGCTEEINDLHDKCKLPTVEECMQLAETARADDNIFETVKYYLLSQEPEKALPIGISFVKEYISSSDWTLDTIYPVLDLLSYIRTEKLLLHTCTEARNELLILCGYIGALLAIRRQYQSIVPALYEYTSQLLKRREVSVPLKIEYLSEELDAWRACTQSTNRSLEDSPYTPPSDSQRMIYATLLKRLKEESLKGIIGPDYVTGSNLPSHSDIHISCLTGLKIQGPVFFLEDGKSAISLNDALMWAKVNPFSPLGTGIRLNPF

SEQ ID NO: 17220 - protein, 1367 aa, Homo sapiens
MTTKRSLFVRLVPCRCLRGEEETVTTLDYSHCSLEQVPKEIFTFEKTLEELYLDANQIEELPKQLFNCQSLHKLSLPDNDLTTLPASIANLINLRELDVSKNGIQEFPENIKNCKVLTIVEASVNPISKLPDGFSQLLNLTQLYLNDAFLEFLPANFGRLTKLQILELRENQLKMLPKTMNRLTQLERLDLGSNEFTEVPEVLEQLSGLKEFWMDANRLTFIPGFIGSLKQLTYLDVSKNNIEMVEEGISTCENLQDLLLSSNSLQQLPETIGSLKNITTLKIDENQLMYLPDSIGGLISVEELDCSFNEVEALPSSIGQLTNLRTFAADHNYLQQLPPEIGSWKNITVLFLHSNKLETLPEEMGDMQKLKVINLSDNRLKNLPFSFTKLQQLTAMWLSDNQSKPLIPLQKETDSETQKMVLTNYMFPQQPRTEDVMFISDNESFNPSLWEEQRKQRAQVAFECDEDKDEREAPPREGNLKRYPTPYPDELKNMVKTVQTIVHRLKDEETNEDSGRDLKPHEDQQDINKDTSESTTTVKSKVDEREKYMIGNSVQKISEPEAEISPGSLPVTANMKASENLKHIVNHDDVFEESEELSSDEEMKMAEMRPPLIETSINQPKVVALSNNKKDDTKETDSLSDEVTHNSNQNNSNCSSPSRMSDSVSLNTDSSQDTSLCSPVKQTHIDINSKIRQEDENFNSLLQNGDILNSSTEEKFKAHDKKDFNLPEYDLNVEERLVLIEKSVDSTATADDTHKLDHINMNLNKLITNDTFQPEIMERSKTQDIVLGTSFLSINSKEETEHLENGNKYPNLESVNKVNGHSEETSQSPNRTEPHDSDCSVDLGISKSTEDLSPQKSGPVGSVVKSHSITNMEIGGLKIYDILSDNGPQQPSTTVKITSAVDGKNIVRSKSATLLYDQPLQVFTGSSSSSDLISGTKAIFKFDSNHNPEEPNIIRGPTSGPQSAPQIYGPPQYNIQYSSSAAVKDTLWHSKQNPQIDHASFPPQLLPRSESTENQSYAKHSANMNFSNHNNVRANTAYHLHQRLGPARHGEMWAISPNDRLIPAVTRSTIQRQSSVSSTASVNLGDPGSTRRAQIPEGDYLSYREFHSAGRTPPMMPGSQRPLSARTYSIDGPNASRPQSARPSINEIPERTMSVSDFNYSRTSPSKRPNARVGSEHSLLDPPGKSKVPRDWREQVLRHIEAKKLEKMPLSNGQMGQPLRPQANYSQIHHPPQASVARHPSREQLIDYLMLKVAHQPPYTQPHCSPRQGHELAKQEIRVRVEKDPELGFSISGGVGGRGNPFRPDDDGIFVTRVQPEGPASKLLQPGDKIIQANGYSFINIEHGQAVSLLKTFQNTVELIIVREVSS

SEQ ID NO: 17221 - protein, 185 aa, Homo sapiens
RAKKSGAGTGKQQHPSKPQQDAEAASAEQRNHTLIMEQHPVGLPRTTGPMQSSVPPGSGGMVSGASPAGPGFLGSQPQAAIMKQMLIDQRAQLIEQQKQQFLREQRQQQQQQQQQILAEQQLQQSHLPRQHLQPQRNPYPVQQVNQFQGSPQDIAAVRSQAALQSMRTSRLMAQNAGMMGIGPSQ

SEQ ID NO: 17222 - protein, 604 aa, Homo sapiens
MKWVTFISLLFLFSSAYSRGVFRRDAHKSEVAHRFKDLGEENFKALVLIAFAQYLQQCPFEDHVKLVNEVTEFAKTCVADESAENCDKSLHTLFGDKLCTVATLRETYGEMADCCAKQEPERNECFLQHKDDNPNLPRLVRPEVDVMCTAFHDNEETFLKKYLYEIARRHPYFYAPELLFFAKRYKAAFTECCQAADKAACLLPKLDELRDEGKASSAKQRLKCASLQKFGERAFKAWAVARLSQRFPKAEFAEVSKLVTDLTKVHTECCHGDLLECADDRADLAKYICENQDSISSKLKECCEKPLLEKSHCIAEVENDEMPADLPSLAADFVESKDVCKNYAEAKDVFLGMFLYEYARRHPDYSVVLLLRLAKTYETTLEKCCAAADPHECYAKVFDEFKPLVEEPQNLIKQNCELFEQLGEYKFQNALLVRYTKKVPQVSTPTLVEVSRNLGKVGSKCCKHPEAKRMPCAEDYLSVVLNQLCVLHEKTPVSDRVTKCCTESLVNRRPCFSALEVDETYVPKEFNAETFTFHADICTLSEKERQIKKQTALVELVKHKPKATKEQLKAVMDDFAAFVEKCCKADDKETCFAEEPTMRIRERK

SEQ ID NO: 17223 - protein, 938 aa, Homo sapiens
MEIKEEGASEEGQHFLPTAQANDPGDCQFTSIQKTPNEPQLEFILACKDLVAPVRDRKLNTLVQISVIHPVEQSLTRYSSTEIVEGTRDPLFLTGVTFPSEYPIYEETKIKLTVYDVKDKSHDTVRTSVLPEHKDPPPEVGRSFLGYASFKVGELLKSKEQLLVLSLRTSDGGKVVGTIEVSVVKMGEIEDGEADHITTDVQGQKCALVCECTAPESVSGKDNLPFLNSVLKNPVCKLYRFPTSDNKWMRIREQMSESILSFHIPKELISLHIKEDLCRNQEIKELGELSPHWDNLRKNVLTHCDQMVNMYQDILTELSKETGSSFKSSSSKGEKTLEFVPINLHLQRMQVHSPHLKDALYDVITVGAPAAHFQGFKNGGLRKLLHRFETERRNTGYQFIYYSPENTAKAKEVLSNINQLQPLIATHADLLLNSASQHSPDSLKNSLKMLSEKTELFVHAFKDQLVRSALLALYTARPGGILKKPPSPKSSTEESSPQDQPPVMRGQDSIPHHSDYDEEEWDRVWANVGKSLNCIIAMVDKLIERDGGSEGSGGNNDGEKEPSLTDAIPSHPREDWYEQLYPLILTLKDCMGEVVNRAKQSLTFVLLQELAYSLPQCLMLTLRRDIVFSQALAGLVCGFIIKLQTSLYDPGFLQQLHTVGLIVQYEGLLSTYSDEIGMLEDMAVGISDLKKVAFKIIEAKSNDVLPVITGRREHYVVEVKLPARMFESLPLQIKEGQLLHVYPVLFNVGINEQQTLAERFGDVSLQESINQENFELLQEYYKIFMEKMPPDYISHFQEQNDLKALLENLLQNIQSKKRKNVEIMWLAATICRKLNGIRFTCCKSAKDRTSMSVTLEQCSILRDEHQLHKDFFIRALDCMRSRQTQGALNESDDPETGCLTDNKPTSRHFYPVALLLVSSHLLVVWLILSLALLLAKYQ

SEQ ID NO: 17224 - protein, 439 aa, Homo sapiens
MTLIWRHLLRPLCLVTSAPRILEMHPFLSLGTSRTSVTKLSLHTKPRMPPCDFMPERYQSLGYNRVLEIHKEHLSPVVTAYFQKPLLLHQGHMEWLFDAEGSRYLDFFSGIVTVSVGHCHPKVNAVAQKQLGRLWHTSTVFFHPPMHEYAEKLAALLPEPLKVIFLVNSGSEANELAMLMARAHSNNIDIISFRGAYHGCSPYTLGLTNVGTYKMELPGGTGCQPTMCPDVFRGPWGGSHCRDSPVQTIRKCSCAPDCCQAKDQYIEQFKDTLSTSVAKSIAGFFAEPIQGVNGVVQYPKGFLKEAFELVRARGGVCIADEVIKEENLQENSQEVGTYMLLKFAKLRDEFEIVGDVRGKGLMIGIEMVQDKISCRPLPREEVNQIHEDCKHMGLLVGRGSIFSQTFRIAPSMCITKPEVDFAVEVFRSALTQHMERRAK

SEQ ID NO: 17225 - protein, 672 aa, Homo sapiens
MIYYFPLQTLELTGLEGFSIAFLSPIFLTITPFWKLVNKKWMLTLLRIITIGSIASFQAPNAKLRLMVLALGVSSSLIVQAVTWWSGSHLQRYLRIWGFILGQIVLVVLRIWYTSLNPIWSYQMSNKVILTLSAIATLDRIGTDGDCSKPEEKKTGEVATGMASRPNWLLAGAAFGSLVFLTHWVFGEVSLVSRWAVSGHPHPGPDPNPFGGAVLLCLASGLMLPSCLWFRGTGLIWWVTGTASAAGLLYLHTWAAAVSGCVFAIFTASMWPQTLGHLINSGTNPGKTMTIAMIFYLLEIFFCAWCTAFKFVPGGVYARERSDVLLGTMMLIIGLNMLFGPKKNLDLLLQTKNSSKVLFRKSEKYMKLFLWLLVGVGLLGLGLRHKAYERKLGKVAPTKEVSAAIWPFRFGYDNEGWSSLERSAHLLNETGADFITILESDASKPYMGNNDLTMWLGEKLGFYTDFGPSTRYHTWGIMALSRYPIVKSEHHLLPSPEGEIAPAITLTVNISGKLVDFVVTHFGNHEDDLDRKLQAIAVSKLLKSSSNQVIFLGYITSAPGSRDYLQLTEHGNVKDIDSTDHDRWCEYIMYRGLIRLGYARISHAELSDSEIQMAKFRIPDDPTNYRDNQKVVIDHREVSEKIHFNPRFGSYKEGHNYENNHHFHMNTPKYFL

SEQ ID NO: 17226 - protein, 1008 aa, Homo sapiens
MGGSQSLQPAPASDLNLEASEAMSSDSEEAFETPESTTPVKAPPAPPPPPPEVIPEPEVSTQPPPEEPGCGSETVPVPDGPRSDSVEGSPFRPPSHSFSAVFDEDKPIASSGTYNLDFDNIELVDTFQTLEPRASDAKNQEGKVNTRRKSTDSVPISKSTLSRSLSLQASDFDGASSSGNPEAVALAPDAYSTGSSSASSTLKRTKKPRPPSLKKKQTTKKPTETPPVKETQQEPDEESLVPSGENLASETKTESAKTEGPSPALLEETPLEPAVGPKAACPLDSESAEGVVPPASGGGRVQNSPPVGRKTLPLTTAPEAGEVTPSDSGGQEDSPAKGLSVRLEFDYSEDKSSWDNQQENPPPTKKIGKKPVAKMPLRRPKMKKTPEKLDNTPASPPRSPAEPNDIPIAKGTYTFDIDKWDDPNFNPFSSTSKMQESPKLPQQSYNFDPDTCDESVDPFKTSSKTPSSPSKSPASFEIPASAMEANGVDGDGLNKPAKKKKTPLKTMVEDVMSVCSLFDTFRVKKSPKRSPLSDPPSQDPTPAATPETPPVISAVVHATDEEKLAVTNQKWTCMTVDLEADKQDYPQPSDLSTFVNETKFSSPTEELDYRNSYEIEYMEKIGSSLPQDDDAPKKQALYLMFDTSQESPVKSSPVRMSESPTPCSGSSFEETEALVNTAAKNQHPVPRGLAPNQESHLQVPEKSSQKELEAMGLGTPSEAIEITAPEGSFASADALLSRLAHPVSLCGALDYLEPDLAEKNPPLFAQKLQREAAHPTDVSISKTALYSRIGTAEVEKPAGLLFQQPDLDSALQIARAEIITKEREVSEWKDKYEESRREVMEMRKIVAEYEKTIAQMIEDEQREKSVSHQTVQQLVLEKEQALADLNSVEKSLADLFRRYEKMKEVLEGFRKNEEVLKRCAQEYLSRVKKEEQRYQALKVHAEEKLDRANAEIAQVRGKAQQEQAAHQASLRKEQLRVDALERTLEQKNKEIEELTKICDELIAKMGKS

SEQ ID NO: 17227 - protein, 156 aa, Homo sapiens
MNPTETKAVKTEPEKKSQSTKLSVVHEKKSQEGKPKEHTEPKSLPKQASDTGSNDAHNKKAVSRSAEQQPSEKSTEPKKKEKKSLTPAVPVESKPDKPSGKSGMDAALDDLIDTLGGPEETEEENTTYTGPEVSDPMSSTYIEELGKREVTIPPKY

SEQ ID NO: 17228 - protein, 85 aa, Homo sapiens
LKDGGKAAQANVRIGDVVLSIDGINAQGMTHLEAQNKIKGCTGSLNMTLQRASAAPKPEPVPVQKPTKKTHCGALYRVLSCTHSQ

SEQ ID NO: 17229 - protein, 4012 aa, Homo sapiens
MGVLKVWLGLALALAEFAVLPHHSEGACVYQDSLLADATIWKPDSCQSCRCHGDIVICKPAVCRNPQCAFEKGEVLQIAANQCCPECVLRTPGSCHHEKKIHEHGTEWASSPCSVCSCNHGEVRCTPQPCPPLSCGHQELAFIPEGSCCPVCVGLGKPCSYEGHVFQDGEDWRLSRCAKCLCRNGVAQCFTAQCQPLFCNQDETVVRVPGKCCPQCSARSCSAAGQVYEHGEQWSENACTTCICDRGEVRCHKQACLPLRCGKGQSRARRHGQCCEECVSPAGSCSYDGVVRYQDEMWKGSACEFCMCDHGQVTCQTGECAKVECARDEELIHLDGKCCPECISRNGYCVYEETGEFMSSNASEVKRIPEGEKWEDGPCKVCECRGAQVTCYEPSCPPCPVGTLALEVKGQCCPDCTSVHCHPDCLTCSQSPDHCDLCQDPTKLLQNGWCVHSCGLGFYQAGSLCLACQPQCSTCTSGLECSSCQPPLLMRHGQCVPTCGDGFYQDRHSCAVCHESCAGCWGPTEKHCLACRDPLHVLRDGGCESSCGKGFYNRQGTCSACDQSCDSCGPSSPRCLTCTEKTVLHDGKCMSECPGGYYADATGRCKVCHNSCASCSGPTPSHCTACSPPKALRQGHCLPRCGEGFYSDHGVCKACHSSCLACMGPAPSHCTGCKKPEEGLQVEQLSDVGIPSGECLAQCRAHFYLESTGICEACHQSCFRCAGKSPHNCTDCGPSHVLLDGQCLSQCPDGYFHQEGSCTECHPTCRQCHGPLESDCISCYPHISLTNGNCRTSCREEQFLNLVGYCADCHHLCQHCAADLHNTGSICLRCQNAHYLLLGDHCVPDCPSGYYAERGACKKCHSSCRTCQGRGPFSCSSCDTNLVLSHTGTCSTTCFPGHYLDDNHVCQPCNTHCGSCDSQASCTSCRDPNKVLLFGECQYESCAPQYYLDFSTNTCKECDWSCSACSGPLKTDCLQCMDGYVLQDGACVEQCLSSFYQDSGLCKNCDSYCLQCQGPHECTRCKGPFLLLEAQCVQECGKGYFADHAKHKCTACPQGCLQCSHRDRCHLCDHGFFLKSGLCVYNCVPGFSVHTSNETCSGKIHTPSLHVNGSLILPIGSIKPLDFSLLNVQDQEGRVEDLLFHVVSTPTNGQLVLSRNGKEVQLDKAGRFSWKDVNEKKVRFVHSKEKLRKGYLFLKISDQQFFSEPQLINIQAFSTQAPYVLRNEVLHISRGERATITTQMLDIRDDDNPQDVVIEIIDPPLHGQLLQTLQSPATPIYQFQLDELSRGLLHYAHDGSDSTSDVAVLQANDGHSFHNILFQVKTVPQNDRGLQLVANSMVWVPEGGMLQITNRILQAEAPGASAEEIIYKITQDYPQFGEVVLLVNMPADSPADEGQHLPDGRTATPTSTFTQQDINEGIVWYRHSGAPAQSDSFRFEVSSASNAQTRLESHMFNIAILPQTPEAPKVSLEASLHMTAREDGLTVIQPHSLSFINSEKPSGKIVYNITLPLHPNQGIIEHRDHPHSPIRYFTQEDINQGKVMYRPPPAAPHLQELMAFSFAGLPESVKFHFTVSDGEHTSPEMVLTIHLLPSDQQLPVFQVTAPRLAVSPGGSTSVGLQVVVRDAETAPKELFFELRRPPQHGVLLKHTAEFRRPMATGDTFTYEDVEKNALQYIHDGSSTREDSMEISVTDGLTVTMLEVRVEVSLSEDRGPRLAAGSSLSITVASKSTAIITRSHLAYVDDSSPDPEIWIQLNYLPSYGTLLRISGSEVEELSEVSNFTMEDINNKKIRYSAVFETDGHLVTDSFYFSVSDMDHNHLDNQIFTIMITPAENPPPVIAFADLITVDEGGRAPLSFHHFFATDDDDNLQRDAIIKLSALPKYGCIENTGTGDRFGPETASDLEASFPIQDVLENYIYYFQSVHESIEPTHDIFSFYVSDGTSRSEIHSINITIERKNDEPPRMTLQPLRVQLSSGVVISNSSLSLQDLDTPDNELIFVLTKKPDHGHVLWRQTASEPLENGRVLVQGSTFTYQDILAGLVGYVPSVPGMVVDEFQFSLTDGLHVDTGRMKIYTELPASDTPHLAINQGLQLSAGSVARITEQHLKVTDIDSDDHQVMYIMKEDPGAGRLQMMKHGNLEQISIKGPIRSFTQADISQGHVEYSHGTGEPGGSFAFKFDVVDGEGNRLIDKSFSISILEDKSPPVITTNKGLVLDENSVKKITTLQLSATDQDSGPTELIYRITRQPQLGHLEHAASPGIQISSFTQADLTSRNVQYVHSSEAEKHSDAFSFTLSDGVSEVTQTFHITLHPVDDSLPVVQNLGMRVQEGMRKTITEFELKAVDADTEAESVTFTIVQPPRHGTIERTSNGQHFHLTSTFTMKDIYQNRVSYSHDGSNSLKDRFTFTVSDGTNPFFIIEEGGKEIMTAAPQPFRVDILPVDDGTPRIVTNLGLQWLEYMDGKATNLITKKELLTMDPDTEDAQLVYEITTGPKHGFVENKLQPGRAAATFTQEDVNLGLIRYVLHKEKIREMMDSFQFLVKDSKPNVVSDNVFHIQWSLISFKYTSYNVSEKAGSVSVTVQRTGNLNQYAIVLCRTEQGTASSSSRVSSQPGQQDYVEYAGQVQFDEREDTKSCTIVINDDDVFENVESFTVELSMPAYALLGEFTQAKVIINDTEDEPTLEFDKKIYWVNESAGFLFAPIERKGDASSIVSAICYTVPKSAMGSSLYALESGSDFKSRGMSAASRVIFGPGVTMSTCDVMLIDDSEYEEEEEFEIALADASDNARIGRVATAKVLISGPNDASTVSLGNTAFTVSEDAGTVKIPVIRHGTDLSTFASVWCATRPSDPASATPGVDYVPSSRKVEFGPGVIEQYCTLTILDDTQYPVIEGLETFVVFLSSAQGAELTKPFQAVIAINDTFQDVPSMQFAKDLLLVKEKEGVLHVPITRSGDLSYESSVRCYTQSHSAQVMEDFEERQNADSSRITFLKGDKVKNCTVYIHDDSMFEPEEQFRVYLGLPLGNHWSGARIGKNNMATITISNDEDAPTIEFEEAAYQVREPAGPDAIAILNIKVIRRGDQNRTSKVRCSTRDGSAQSGVDYYPKSRVLKFSPGVDHIFFKVEILSNEDREWHESFSLVLGPDDPVEAVLGDVTTATVTILDQEAAGSLILPAPPIVVTLADYDHVEEVTKEGVKKSPSPGYPLVCVTPCDPHFPRYAVMKERCSEAGINQTSVQFSWEVAAPTDGNGARSPFETITDNTPFTSVNHMVLDSIYFSRRFHVRCVAKAVDKVGHVGTPLRSNIVTIGTDSAICHTPVVAGTSRGFQAQSFIATLKYLDVKHKEHPNRIHISVQIPHQDGMLPLISTMPLHNLHFLLSESIYRHQHVCSNLVTTYDLRGISEAGFLDDVVYDSTALGPGYDRPFQFDPSVREPKTIQLYKHLNLKSCVWTFDAYYDMTELIDVCGGSVTADFQVRDSAQSFLTVHVPLYVSYIYVTAPRGWASLEHHTEMEFSFFYDTVLWRTGIQTDSVLSARLQIIRIYIREDGRLVIEFKTHAKFRGQFVMEHHTLPEVKSFVLTPDHLGGIEFDLQLLWSAQTFDSPHQLWRATSSYNRKDYSGEYTIYLIPCTVQPTQPWVDPGEKPLACTAHAPERFLIPIAFQQTNRPVPVVYSLNTEFQLCNNEKVFLMDPNTSDMSLAEMDYKGAFSKGQILYGRVLWNPEQNLNSAYKLQLEKVYLCTGKDGYVPFFDPTGTIYNEGPQYGCIQPNKHLKHRFLLLDRNQPEVTDKYFHDVPFEAHFASELPDFHVVSNMPGVDGFTLKVDALYKVEAGHQWYLQVIYIIGPDTISGPRVQRSLTAPLRRNRRDLVEPDGQLILDDSLIYDNEGDQVKNGTNMKSLNLEMQELAVAASLSQTGASIGSALAAIMLLLLVFLVACFINRKCQKQRKKKPAEDILEEYPLNTKVEVPKRHPDRVEKNVNRHYCTVRNVNILSEPEAAYTFKGAKVKRLNLEVRVHNNLQDGTEV

SEQ ID NO: 17230 - protein, 303 aa, Homo sapiens
MAEVARQAQTSQEPYHDKAREHPDDGKHPDGGLYNKGPSYSSYSGYIMMPNMNNDPYMSNGSLSPPIPRTSNKVPVVQPSHAVHPLTPLITYSDEHFSPGSHPSHIPSDVNSKQGMSRHPPAPDIPTFYPLSPGGVGQITPPLGWFSHHMIPGPPGPHTTGIPHPAIVTPQVKQEHPHTDSDLMHVKPQHEQRKEQEPKRPHIKKPLNAFMLYMKEMRANVVAECTLKESAAINQILGRRWHALSREEQAKYYELARKERQLHMQLYPGWSARDNYGKKKKRKREKLQESASGTGPRMTAAYI

SEQ ID NO: 17231 - protein, 736 aa, Homo sapiens
MDIVDTFNHLIPTEHLDDALFLGSNLENEVCEDFSASQNVLEDSLKNMLSDKDPMLGSASNQFCLPVLDSNDPNFQMPCSTVVGLDDIMDEGVVKESGNDTIDEEELILPNRNLRDKVEENSVRSPRKSPRLMAQEQVRSLRQSTIAKRSNAAPLSNTKKASGKTVSTAKAGVKQPERSQVKEEVCMSLKPEYHKENRRCSRNSGQIEVVPEVSVSSSHSSVSSCLEMKDEDGLDSKHKCNNPGEIDVPSHELNCSLLSETCVTIGEKKNEALMECKAKPVGSPLFKFSDKEEHEQNDSISGKTGETVVEEMIATRKVEQDSKETVKLSHEDDHILEDAGSSDISSDAACTNPNKTENSLVGLPSCVDEVTECNLELKDTMGIADKTENTLERNKIEPLGYCEDAESNRQLESTEFNKSNLEVVDTSTFGPESNILENAICDVPDQNSKQLNAIESTKIESHETANLQDDRNSQSSSVSYLESKSVKSKHTKPVIHSKQNMTTDAPKKIVAAKYEVIHSKTKVNVKSVKRNTDVPESQQNFHRPVKVRKKQIDKEPKIQSCNSGVKSVKNQAHSVLKKTLQDQTLVQIFKPLTHSLSDKSHAHPGCLKEPHHPAQTGHVSHSSQKQCHKPQQQAPAMKTNSHVKEELEHPGVEHFKEEDKLKLKKPEKNLQPRQRRSSKSFSLDEPPLFIPDNIATIRREGSDHSSSFESKYMWTPSKQCGFCKKPHGNRCVCMCV

SEQ ID NO: 17232 - protein, 163 aa, Homo sapiens
MNQGILALVSSIGCTSAGSLQSLADAMHIPHLFIQRSTAGTPRSGCGLTRSNRNDDYTLSVRPPVYLHDVILRVVTEYAWQKFIIFYDSEYDIRGIQEFLDKVSQQGMDVALQKVENNINKMITTLFDTMRIEELNRYRDTLRRAILVMNPATAKSFITEMSF

SEQ ID NO: 17233 - protein, 965 aa, Homo sapiens
NVALSSSPIHSGFLVSFMVDARGGAMRGCRHNGLRIIIPPRKCTAPTRVTCRLVKRHRLATMPPMVEGEGLASRLIEVGPSGAQFLGPVIVEIPHFAALRGKERELVVLRSENGDSWKEHFCDYTEDELNEILNGMDEVLDSPEDLEKKRICRIITRDFPQYFAVVSRIKQDSNLIGPEGGVLSSTVVPQVQAVFPEGALTKRIRVGLQAQPMHSELVKKILGNKATFSPIVTLEPRRRKFHKPITMTIPVPKASSDVMLNGFGGDAPTLRLLCSITGGTTPAQWEDITGTTPLTFVNECVSFTTNVSARFWLIDCRQIQESVTFASQVYREIICVPYMAKFVVFAKSHDPIEARLRCFCMTDDKVDKTLEQQENFAEVARSRDVEVLEGKPIYVDCFGNLVPLTKSGQHHIFSFFAFKENRLPLFVKVRDTTQEPCGRLSFMKEPKSTRGLVHQAICNLNITLPIYTKIDMTSEKNPQDEQERIEERLAYIADHLGFSWTELARELDFTEEQIHQIRIENPNSLQDQSHALLKYWLERDGKHATDTNLVECLTKINRMDIVHLMETNTEPLQERISHSYAEIEQTITLDHSEGFSVLQEELCTAQHKQKEEQAVSKESETCDHPPIVSEEDISVGYSTFQDGVPKTEGDSSATALFPQTHKEQVQQDFSGKMQDLPEESSLEYQQEYFVTTPGTETSETQKAMIVPSSPSKTPEEVSTPAEEEKLYLQTPTSSERGGSPIIQEPEEPSEHREESSPRKTSLVIVESADNQPETCERLDEDAAFEKELTEELGELEASSDEEAMVTTRVVRRRVIIQGDDMPEIPPETVTEEEYIDEHGHTVVKKVTRKIIRRYVSSEGTEKEEIMVQGMPQEPVNIEEGDGYSKVIKRVVLKSDTEQSEVTLCEPSILSSTSQFQAEPVEGRRVSKVVKTTVVLGERMEKHLGDSSLATDLPSAKDDFEEDNNE

SEQ ID NO: 17234 - protein, 896 aa, Homo sapiens
MEMKLPGQEGFEASSAPRNIPSGELDSNPDPGTGPSPDGPSDTESKELGVPKDPLLFIQLNELLGWPQALEWRETGRWVLFEEKLEVAAGRWSAPHVPTLALPSLQKLRSLLAEGLVLLDCPAQSLLELVEQVTRVESLSPELRGQLQALLLQRPQHYNQTTGTRPCWGSTHPRKASDNEEAPLREQCQNPLRQKLPPGAEAGTVLAGELGFLAQPLGAFVRLRNPVVLGSLTEVSLPSRFFCLLLGPCMLGKGYHEMGRAAAVLLSDPQFQWSVRRASNLHDLLAALDAFLEEVTVLPPGRWDPTARIPPPKCLPSQHKRLPSQQREIRGPAVPRLTSAEDRHRHGPHAHSPELQRTGRLFGGLIQDVRRKVPWYPSDFLDALHLQCFSAVLYIYLATVTNAITFGGLLGDATDGAQGVLESFLGTAVAGAAFCLMAGQPLTILSSTGPVLVFERLLFSFSRDYSLDYLPFRLWVGIWVATFCLVLVATEASVLVRYFTRFTEEGFCALISLIFIYDAVGKMLNLTHTYPIQKPGSSAYGCLCQYPGPGGNESQWIRTRPKDRDDIVSMVRKGLSDFSSVLAILLGCGLDAFLGLATPKLMVPREFKPTLPGRGWLVSPFGANPWWWSVAAALPALLLSILIFMDQQITAVILNRMEYRLQKGAGFHLDLFCVAVLMLLTSALGLPWYVSATVISLAHMDSLRRESRACAPGERPNFLGIREQRLTGLVVFILTGASIFLAPVLKFIPMPVLYGIFLYMGVAALSSIQFTNRVKLLLMPAKHQPDLLLLRHVPLTRVHLFTAIQLACLGLLWIIKSTPAAIIFPLMLLGLVGVRKALERVFSPQELLWLDELMPEEERSIPEKGLEPEHSFSGSDSEDSELMYQPKAPEINISVN

SEQ ID NO: 17235 - protein, 340 aa, Homo sapiens
MKAIKKSLTEEEYLYLDFSHQTEGCIFPLHTSVTLFLLSYCDCKIFKICLVVTKEVSQWTRLCELTIPLAIENFLRESSDQPPTIPVEILQLEKKLSEPVRVHNDDKLRRQKLKQQKADGVGPPLTKGKAKSKVHTQETSEGLDSSSKSLELKVAFSKLTVQEEPATTNREPSHIRKAKASDLPPLEHVFAEGLYFTLADIVLLPCIHHFLVIISRKFSEKLVEFPLLASWYQRIQEVPGVKTAASKCGIQFLHLPKLLTTSTEQHPNLCEVPGVEEQSDPLFIGGPRPTMAKLMEKGIEVMFSPHPCPTWTLDWNVLPAAVSPKEDGVLLCHSGWNAVV

SEQ ID NO: 17236 - protein, 137 aa, Homo sapiens
MPVERMRMRPWLEEQINSNTIPGLKWLNKEKKIFQIPWMHAARHGWDVEKDAPLFRNWAIHTGKHQPGVDKPDPKTWKANFRCAMNSLPDIEEVKDKSIKKGNNAFRVYRMLPLSERPSKKGKKPKTEKEDKVKHIK

SEQ ID NO: 17237 - protein, 916 aa, Homo sapiens
MDSERQVKDTDDIESPKRSIRDSGYIDCWDSERSDSLSPPRHGRDDSFDSLDSFGSRSRQTPSPDVVLRGSSDGRGSDSESDLPHRKLPDVKKDDMSARRTSHGEPKSAVPFNQYLPNKSNQTAYVPAPLRKKKAEREEYRKSWSTATSPLGGERPFRSTSMFDMRCEEEAAVQPHSRARQEQLQLINNQLREEDDKWQDDLARWKSRRRSVSQDLIKKEEERKKMEKLLAGEDGTSERRKSIKTYREIVQEKERRERELHEAYKNARSQEEAEGILQQYIERFTISEAVLERLEMPKILERSHSTEPNLSSFLNDPNPMKYLRQQSLPPPKFTATVETTIARASVLDTSMSAGSGSPSKTVTPKAVPMLTPKPYSQPKNSQDVLKTFKVDGKVSVNGETVHREEEKERECPTVAPAHSLTKSQMFEGVARVHGSPLELKQDNGSIEINIKKPNSVPQELAATTEKTEPNSQEDKNDGGKSRKGNIELASSEPQHFTTTVTRCSPTVAFVEFPSSPQLKNDVSEEKDQKKPENEMSGKVELVLSQKVVKPKSPEPEATLTFPFLDKMPEANQLHLPNLNSQVDSPSSEKSPVMTPFKFWAWDPEEERRRQEKWQQEQERLLQERYQKEQDKLKEEWEKAQKEVEEEERRYYEEERKIIEDTVVPFTVSSSSADQLSTSSSMTEGSGTMNKIDLGNCQDEKQDRRWKKSFQGDDSDLLLKTRESDRLEEKGSLTEGALAHSGNPVSKGVHEDHQLDTEAGAPHCGTNPQLAQDPSQNQQTSNPTHSSEDVKPKTLPLDKSINHQIESPSERRKKSPREHFQAGPFSPCSPTPPGQSPNRSISGKKLCSSCGLPLGKGAAMIIETLNLYFHIQCFRCGICKGQLGDAVSGTDVRIRNGLLNCNDCYMRSRSAGQPTTL

SEQ ID NO: 17238 - protein, 531 aa, Homo sapiens
MCVPPHRKDGSIPCPRALCSQSVDIQAWQLSAAQRGDVGQPREFWHLRSQVPVPTCHLLTVQPWCLLPHPTPAGGRERRHSASSLLAALCLRKAVLRPHPAVLPGVGGCVVLSSGRMKAPLRGGLALGTGPAPTKLQLLHDWQSEPGPSGWQQGPSPPLFPAGTSLVQHLMTVLIRKHSQLFTAPVPEGPTSPRGGLQCAVGWGSEEVTRDSQGEPGGPGLPAHRTSSLDGAAVAVLSRTAPTGPGSRCSPGKKVQTLPSWKSSFRQPRSLSGSPKGGGSSLEVPIISSGGNWLMNGLSSLRGHRRASSGDRLKDSGSVQRLSTYDNVPAPGLVPGIPSVASMAWSGASSSESSVGGSLSSCTACRASDSSARSSLHTDWALEPSPLPSSSEDPKSLDLDHSMDEAGAGASNSEPSEPDSPTREHARRSEALQGLVTELRAELCRQRTEYERSVKRIEEGSADLRKRMSRLEEELDQEKKKYIMLEIKLRNSERAREDAERRNQLLQREMEEFFSTLGSLTVGAKGARAPK

SEQ ID NO: 17239 - protein, 834 aa, Homo sapiens
MWTRNLMARALYDNVPECAEELAFRKGDILTVIEQNTGGLEGWWLCSLHGRQGIVPGNRVKLLIGPMQETASSHEQPASGLMQQTFGQQKLYQVPNPQAAPRDTIYQVPPSYQNQGIYQVPTGHGTQEQEVYQVPPSVQRSIGGTSGPHVGKKVITPVRTGHGYVYEYPSRYQKDVYDIPPSHTTQGVYDIPPSSAKGPVFSVPVGEIKPQGVYDIPPTKGVYAIPPSACRDEAGLREKDYDFPPPMRQAGRPDLRPEGVYDIPPTCTKPAGKDLHVKYNCDIPGAAEPVARRHQSLSPNHPPPQLGQSVGSQNDAYDVPRGVQFLEPPAETSEKANPQERDGVYDVPLHNPPDAKGSRDLVDGINRLSFSSTGSTRSNMSTSSTSSKESSLSASPAQDKRLFLDPDTAIERLQRLQQALEMGVSSLMALVTTDWRCYGYMERHINEIRTAVDKVELFLKEYLHFVKGAVANAACLPELILHNKMKRELQRVEDSHQILSQTSHDLNECSWSLNILAINKPQNKCDDLDRFVMVAKTVPDDAKQLTTTINTNAEALFRPGPGSLHLKNGPESIMNSTEYPHGGSQGQLLHPGDHKAQAHNKALPPGLSKEQAPDCSSSDGSERSWMDDYDYVHLQGKEEFERQQKELLEKENIMKQNKMQLEHHQLSQFQLLEQEITKPVENDISKWKPSQSLPTTNSGVSAQDRQLLCFYYDQCETHFISLLNAIDALFSCVSSAQPPRIFVAHSKFVILSAHKLVFIGDTLTRQVTAQDIRNKVMNSSNQLCEQLKTIVMATKMAALHYPSTTALQEMVHQVTDLSRNAQLFKRSLLEMATF

SEQ ID NO: 17240 - protein, 923 aa, Homo sapiens
MIPVLTSKKASELPVSEVASILQADLQNGLNKCEVSHRRAFHGWNEFDISEDEPLWKKYISQFKNPLIMLLLASAVISVLMHQFDDAVSITVAILIVVTVAFVQEYRSEKSLEELSKLVPPECHCVREGKLEHTLARDLVPGDTVCLSVGDRVPADLRLFEAVDLSIDESSLTGETTPCSKVTAPQPAATNGDLASRSNIAFMGTLVRCGKAKGVVIGTGENSEFGEVFKMMQAEEAPKTPLQKSMDLLGKQLSFYSFGIIGIIMLVGWLLGKDILEMFTISVSLAVAAIPEGLPIVVTVTLALGVMRMVKKRAIVKKLPIVETLGCCNVICSDKTGTLTKNEMTVTHIFTSDGLHAEVTGVGYNQFGEVIVDGDVVHGFYNPAVSRIVEAGCVCNDAVIRNNTLMGKPTEGALIALAMKMGLDGLQQDYIRKAEYPFSSEQKWMAVKCVHRTQQDRPEICFMKGAYEQVIKYCTTYQSKGQTLTLTQQQRDVYQQEKARMGSAGLRVLALASGPELGQLTFLGLVGIIDPPRTGVKEAVTTLIASGVSIKMITGDSQETAVAIASRLGLYSKTSQSVSGEEIDAMDVQQLSQIVPKVAVFYRASPRHKMKIIKSLQKNGSVVAMTGDGVNDAVALKAADIGVAMGQTGTDVCKEAADMILVDDDFQTIMSAIEEGKGIYNNIKNFVRFQLSTSIAALTLISLATLMNFPNPLNAMQILWINIIMDGPPAQSLGVEPVDKDVIRKPPRNWKDSILTKNLILKILVSSIIIVCGTLFVFWRELRDNVITPRDTTMTFTCFVFFDMFNALSSRSQTKSVFEIGLCSNRMFCYAVLGSIMGQLLVIYFPPLQKVFQTESLSILDLLFLLGLTSSVCIVAEIIKKVERSREKIQKHVWLWERSGQQLVEIHPHLETGLPLTEDVSCV

SEQ ID NO: 17241 - protein, 588 aa, Homo sapiens
MNPREEKVKIITEEFIENDEDADMGRQNKNSKVRRQPRKKQPPTAVPKEMVSEKSHLGNPQEPVQEEPKTRLLSMTVRRGPRSLPPIPSTSRTGFAEFSMRGRMREKLQAARSKAESALLQEIPTPRPRRLRSPSKKELETEFGTEPGKEVERTQQEVDSQSYSRVKFHDSARKIKPKPQVPPGFPSAEEAYNFFTFNFDPEPEGSEEKPKARHRAGTNQEEEEGEEEEPPAQGGGKEMDEEELLNGDDAEDFLLGLDHVADDFVAVRPADYESIHDRLQMEREMLFIPSRQTVPTYKKLPENVQPRFLEDEGLYTGVRPEVARTNQNIMENRLLMQDPERRWFGDDGRILALPNPIKPFPSRPPVLTQEQSIKAELETLYKKAVKYVHSSQHVIRSGDPPGNFQLDIDISGLIFTHHPCFSREHVLAAKLAQLYDQYLARHQRNKAKFLTDKLQALRNAVQTGLDPEKPHQSLDTIQKTINEYKSEIRQTRKFRDAEQEKDRTLLKTIIKVWKEMKSLREFQRFTNTPLKLVLRKEKADQKADEEAYEAEIQAEISELLEEHTEEYAQKMEEYRTSLQQWKAWRKVQ

SEQ ID NO: 17242 - protein, 276 aa, Homo sapiens
MPLCNGGNLAVTGSWADRSPLHEAASQGRLLALRTLLSQGYNVNAVTLDHVTPLHEACLGDHVACARTLLEAGANVNAITIDGVTPLFNACSQGSPSCAELLLEYGAKAQLESCLPSPTHEAASKGHHECLDILISWGIDVDQEIPHLGTPLYVACMSQQFHCIWKLLYAGADVQKGKYWDTPLHAAAQQSSTEIVNLLLEFGADINAKNTELLRPIDVATSSSMVERILLQHEATPSSLYQLCRLCIRSYIGKPRLHLIPQLQLPTLLKNFLQYR

SEQ ID NO: 17243 - protein, 108 aa, Homo sapiens
MRLLLALLGVLLSVPGPPVLSLEASEEVELEPCLAPSLEQQEQELTVALGQPVRLCCGRAERGGHWYKEGSRLAPAGRVRGWRGRLEIASFLPEDAGRYLCLARGSMI

SEQ ID NO: 17244 - protein, 777 aa, Homo sapiens
EKCPAYPTELVFALDNSYDVTEESFNKTRDIITSIVNDLNIRENNCPVGARVAMVSYNSGTSYLIRWSDYNRKKQLLQQLSQIKYQDTTEPRDVGNAMRFVTRNVFKRTYAGANVRRVAVFFSNGQTASRSSIITATMEFSALDISPTVFAFDERVFLEAFGFDNTGTFQVIPVPPNGENQTLERLRRCALCYDKCFPNACIREAFLPEDSYMDVVFLIDNSRNIAKDEFKAVKALVSSVIDNFNIASDPLISDSGDRIALLSYSPWESSRRKMGTVKTEFDFITYDNQLLMKNHIQTSFQQLNGEATIGRALLWTTENLFPETPYLRKHKVIFVVSAGENYERKEFVKMMALRAKCQGYVIFVISLGSTRKDDMEELASYPLDQHLIQLGRIHKPDLNYIAKFLKPFLYSVRRGFNQYPPPMLEDACRLINLGGENIQNDGFQFVTELQEDFLGGNGFIGQELNSGRESPFVKTEDNGSDYLVYLPSQMFEPQKLMINYEKDQKSAEIASLTSGHENYGRKEEPDHTYEPGDVSLQEYYMDVAFLIDASQRVGSDEFKEVKAFITSVLDYFHIAPTPLTSTLGDRVAVLSYSPPGYMPNTEECPVYLEFDLVTYNSIHQMKHHLQDSQQLNGDVFIGHALQWTIDNVFVGTPNLRKNKVIFVISAGETNSLDKDVLRNVSLRAKCQGYSIFVFSFGPKHNDKELEELASHPLDHHLVQLGRTHKPDWNYIIKFVKPFVHLIRRAINKYPTEDMKATCVNMTSPNPENGGTENTVLW

SEQ ID NO: 17245 - protein, 258 aa, Homo sapiens
TNAMEKYSPKFEIYSENILNSLKDITVKGPSLLNANLLDSLWDTFQNKSAARGKVVLLFSDGLDDDVEKLEQKSDELRKEGLNALITVALDGPADSSDLADLPYIEFGKGFEYRTQLSIGMRELGSRLSKQLVNVAERTCCCLFCKCIGGDGTMGDPGPPGKRLHVKRVVDFFKKQGSERMERKGPPGFKGSEGYLGEEGIAGERGAPGPVGEQGTKGCYGTKGPKGNRGLNGQEGEVGENGIDGLNGEQGDNGLPGR

SEQ ID NO: 17246 - protein, 902 aa, Homo sapiens
LLEEHTEEYAQKMEEYRTSLQQWKAWRKVQRAKKKKRKQAAEEHPGDEIAEPYPEEDLVKPSPPEPTDRAVIEQEVRERAAQSRRRPWEPTLVPELSLAGSVTPNDQCPRAEVSRREDVKKRSVYLKVLFNNKEVSRTVSRPLGADFRVHFGQIFNLQIVNWPESLTLQVYETVGHSSPTLLAEVFLPIPETTVVTGRAPTEEVEFSSNQHVTLDHEGVGSGVPFSFEADGSNQLTLMTSGKVSHSVAWAIGENGIPLIPPLSQQNIGFRSALKKADAISSIGTSGLTDMKKLAKWAAESKLDPNDPNNAPLMQLISVATSGESYVPDFFRLEQLQQEFNFVSDQELNRSKRFRLLHLRSQEVPEFRNYKQVPVYDREIMEKVFQDYEKRLRDRNVIETKEHIDTHRAIVAKYLQQVRESVINRFLIAKQYFLLADMIVEEEVPNISILGLSLFKLAEQKRPLRPRRKGRKKVTAQNLSDGDIKLLVNIVRAYDIPVRKPAVSKFQQPSRSSRMFSEKHAASPSTYSPTHNADYPLGQVLVRPFVEVSFQRTVCHTTTAEGPNPSWNEELELPFRAPNGDYSTASLQSVKDVVFINIFDEVLHDVLEDDRERGSGIHTRIERHWLGCVKMPFSTIYFQARIDGTFKIDIPPVLLGYSKERNMILERGFDSVRSLSEGSYITLFITIEPQLVPGESIREKFESQEDEKLLQATEKFQAECALKFPNRQCLTTVIDISGKTVFITRYLKPLNPPQELLNVYPNNLQATAELVARYVSLIPFLPDTVSFGGICDLWSTSDQFLDLLAGDEEEHAVLLCNYFLSLGKKAWLLMGNAIPEGPTAYVLTWEQGRYLIWNPCSGHFYGQFDTFCPLKNVGCLIGPDNAQAMEIFLFKKPSISWPFQCSA

SEQ ID NO: 17247 - protein, 640 aa, Homo sapiens
MTHILLLYYLVFLLPTESCRTLYQAASKSKEKVPARPHGVCDGVCTDYSQCTQPCPPDTQGNMGFSCRQKTWHKITDTCQTLNALNIFEEDSRLVQPFEDNIKISVYTGKSETITDMLLQKCPTDLSCVIRNIQQSPWIPGNIAVIVQLLHNISTAIWTGVDEAKMQSYSTIANHILNSKSISNWTFIPDRNSSYILLHSVNSFARRLFIDKHPVDISDVFIHTMGTTISGDNIGKNFTFSMRINDTSNEVTGRVLISRDELRKVPSPSQVISIAFPTIGAILEASLLENVTVNGLVLSAILPKELKRISLIFEKISKSEERRTQCVGWHSVENRWDQQACKMIQENSQQAVCKCRPSKLFTSFSILMSPHILESLILTYITYVGLGISICSLILCLSIEVLVWSQVTKTEITYLRHVCIVNIAATLLMADVWFIVASFLSGPITHHKGCVAATFFVHFFYLSVFFWMLAKALLILYGIMIVFHTLPKSVLVASLFSVGYGCPLAIAAITVAATEPGKGYLRPEICWLNWDMTKALLAFVIPALAIVVVNLITVTLVIVKTQRAAIGNSMFQEVRAIVRISKNIAILTPLLGLTWGFGVATVIDDRSLAFHIIFSLLNAFQVSPDASDQVQSERIHEDVL

SEQ ID NO: 17248 - protein, 392 aa, Homo sapiens
MGLGTLSPRMLVWLVASGIVFYGELWVCAGLDYDYTFDGNEEDKTETIDYKDPCKAAVFWGDIALDDEDLNIFQIDRTIDLTQNPFGNLGHTTGGLGDHAMSKKRGALYQLIDRIRRIGFGLEQNNTVKGKVPLQFSGQNEKNRVPRAATSRTERIWPGGVIPYVIGGNFTGSQRAMFKQAMRHWEKHTCVTFIERSDEESYIVFTYRPCGCCSYVGRRGNGPQAISIGKNCDKFGIVVHELGHVIGFWHEHTRPDRDNHVTIIRENIQPGQEYNFLKMEPGEVNSLGERYDFDSIMHYARNTFSRGMFLDTILPSRDDNGIRPAIGQRTRLSKGDIAQARKLYRCPACGETLQESNGNLSSPGFPNGYPSYTHCIWRVSVTPGEKVVFSLC

SEQ ID NO: 17249 - protein, 372 aa, Homo sapiens
MQGPAGNASRGLPGGPPSTVASGAGRCESGALMHSFGIFLQGLLGVVAFSTLMLKRFREPKHERRPWRIWFLDTSKQAIGMLFIHFANVYLADLTEEDPCSLYLINFLLDATVGMLLIYVGVRAVSVLVEWQQWESLRFGEYGDPLQCGAWVGQCALYIVIMIFEKSVVFIVLLILQWKKVALLNPIENPDLKLAIVMLIVPFFVNALMFWVVDNFLMRKGKTKAKLEERGANQDSRNGSKVRYRRAASHEESESEILISADDEMEESDVEEDLRRLTPLKPVKKKKHRFGLPAGAQEAPIKKKRPPVKDEDLKGARGNLTKNQEIKSKTYQVMRECEQAGSAAPSVFSRTRTGTETVFEKPKAGPTKSVFG

SEQ ID NO: 17250 - protein, 393 aa, Homo sapiens
MSQPGQKPAASPRPRRAAAARRTHEHVSEKTSESPSKPGEKKGSDEKKAASLGSSQSSRTYAGGTASATKVSASSGATSKSSSMNPTETKAVKTEPEKKSQSTKLSVVHEKKSQEGKPKEHTEPKSLPKQASDTGSNDAHNKKAVSRSAEQQPSEKSTEPKTKPQDMISAGGESVAGITAISGKPGDKKKEKKSLTPAVPVESKPDKPSGKSGMDAALDDLIDTLGGPEETEEENTTYTGPEVSDPMSSTYIEELGKREVTIPPKYRELLAKPIGPDDAIDALSSDFTCGSPTAAGKKTEKEESTEVLKAQSAGTVRSAAPPQEKKRKVEKDTMSDQALEALSASLGTRQAEPELDLRSIKEVDEAKAKEEKLEKCGEDDETIPSEYRLKPAT

SEQ ID NO: 17251 - protein, 224 aa, Homo sapiens
MRPLRPRAALLALLASLLAAPPVAPAEAPHLVHVDAARALWPLRRFWRSTGFWGSTGRGLSYNFTHLDGYLDLLRENQLLPGFELMGSASGHFTDFEDKQQVFEWKDLVSSLARRYIGRYGLAHVSKWNFETWNEPDHHDFDNVSMTMQGFLNYYDACSEGLRAASPALRLGGPGDSFHTPPRSPLSWGLLRHCHDGTNFFTGEAGVRLDYISLHRKGARSSIS

SEQ ID NO: 17252 - protein, 288 aa, Homo sapiens
GEVPSAMIVSFLRPSQPFRTHVSEKTSESPSKPGEKKGSDEKKAASLGSSQSSRTYAGGTASATKVSASSGATSKSSSMNPTETKAIPVSQQMEGPHLPNKKKHKKQAVKTEPEKKSQSTKLSVVHEKKSQEGKPKEHTEPKSLPKQASDTGSNDAHNKKAVSRSAEQQPSEKSTEPKTKPQDMISAGGESVAGITAISGKPGDKKKEKKSLTPAVPVESKPDKPSGKSGMDAALDDLIDTLGGPEETEEENTTYTGPEVSDPMSSTYIEELGKREVTIPPKYRELLA

SEQ ID NO: 17253 - protein, 298 aa, Homo sapiens
MYGKGKSNSSAVPSDSQAREKLALYVYEYLLHVGAQKSAQTFLSEIRWEKNITLGEPPGFLHSWWCVFWDLYCAAPERRETCEHSSEAKAFHDYPFMSPRYPGGPRPPLRIPNQALGGVPGSQPLLPSGMDPTRQQGHPNMGGPMQRMTPPRGMVPLGPQNYGGAMRPPLNALGGPGMPGMNMGPGGGRPWPNPTNANSIPYSSASPGNYVGPPGGGGPPGTPIMPSPADSTNSGDNMYTLMNAVPPGPNRPNFPMGPGSDGPMGGLGGMESHHMNGSLGSGDMDSISKYSPSMTMSV

SEQ ID NO: 17254 - protein, 825 aa, Homo sapiens
MWGLGARGPDRGLLLALALGGLARAGGVEVEPGGAHGESGGFQVVTFEWAHVQDPYVIALWILVASLAKIGFHLSHKVTSVVPESALLIVLGLVLGGIVWAADHIASFTLTPTVFFFYLLPPIVLDAGYFMPNRLFFGNLGTILLYAVVGTVWNAATTGLSLYGVFLSGLMGDLQIGLLDFLLFGSLMAAVDPVAVLAVFEEVHVNEVLFIIVFGESLLNDAVTVVLYNVFESFVALGGDNVTGVDCVKGIVSFFVVSLGGTLVGVVFAFLLSLVTRFTKHVRIIEPGFVFIISYLSYLTSEMLSLSAILAITFCGICCQKYVKANISEQSATTVRYTMKMLASSAETIIFMFLGISAVNPFIWTWNTAFVLLTLVFISVYRAIGVVLQTWLLNRYRMVQLEPIDQVVLSYGGLRGAVAFALVVLLDGDKVKEKNLFVSTTIIVVFFTVIFQWLKVKRSEHREPRLNEKLHGRAFDHILSAIEDISGQIGHNYLRDKWSHFDRKFLSRVLMRRSAQKSRDRILNVFHELNLKDAISYVAEGERRGSLAFIRSPSTDNVVNVDFTPRSSTVEASVSYLLRENVSAVCLDMQSLEQRRRSIRDAEDMVTHHTLQQYLYKPRQEYKHLYSRHELTPTEDEKQDREIFHRTMRKRLESFKSTKLGLNQNKKAAKLYKRERAQKRRNSSIPNGKLPMESPAQNFTIKEKDLELSDTEEPPNYDEEMSGGIEFLASVTKDTASDSPAGIDNPVFSPDEALDRSLLARLPPWLSPGETVVPSQRARTQIPYSPGTFCRLMPFRLSSKSVDSFLQADGPEERPPAALPESTHM

SEQ ID NO: 17255 - protein, 229 aa, Homo sapiens
MKSRRPKSSLPPVLGTESDATVKKKPAPKTPPKAAMPPQIIQFPEDQKVRAGESVELFGKVTGTQPITCTWMKFRKQIQESEHMKVENSENGSKLTILAARQEHCGCYTLLVENKLGSRQAQVNLTVVDKPDPPAGTPCASDIRSSSLTLSWYGSSYDGGSAVQSYSIEIWDSANKTWKELATCRSTSFNVQDLLPDHEYKFRVRAINVYGTSEPSQESELTTVGEKPE

SEQ ID NO: 17256 - protein, 457 aa, Homo sapiens
MKTGHSSSLLPSTTTSDSTAQEGYESRGGMLDWKHLLDSPDSTDPLGAVSSHNHQDKKGVIRESYLKGHDQLVPVTLLAIAVILAFVMGAVFSGITVYCVCDHRRKDVAVVQRKEKELTHSRRGSMSSVTKLSGLFGDTQSKDPKPEAILTPLMHNGKLATPGNTAKMLIKADQHHLDLTALPTPESTPTLQQKRKPSRGSREWERNQNLINACTKDMPPMGSPVIPTDLPLRASPSHIPSVVVLPITQQGYQHEYVDQPKMSEVAQMALEDQAATLEYKTIKEHLSSKSPNHGVNLVENLDSLPPKVPQREASLGPPGASLSQTGLSKRLEMHHSSSYGVDYKRSYPTNSLTRSHQATTLKRNNTNSSNSSHLSRNQSFGRGDNPPPAPQRVDSIQVHSSQPSGQAVTVSRQPSLNAYNSLTRSGLKRTPSLKPDVPPKPSFAPLSTSMKPNDACT

SEQ ID NO: 17257 - protein, 500 aa, Homo sapiens
MSSDDRHLGSSCGSFIKTEPSSPSSGIDALSHHSPSGSSDASGGFGLALGTHANGLDSPPMFAGAGLGGTPCRKSYEDCASGIMEDSAIKCEYMLNAIPKRLCLVCGDIASGYHYGVASCEACKAFFKRTIQGNIEYSCPATNECEITKRRRKSCQACRFMKCLKVGMLKEGVRLDRVRGGRQKYKRRLDSESSPYLSLQISPPAKKPLTKIVSYLLVAEPDKLYAMPPPGMPEGDIKALTTLCDLADRELVVIIGWAKHIPGFSSLSLGDQMSLLQSAWMEILILGIVYRSLPYDDKLVYAEDYIMDEEHSRLAGLLELYRAILQLVRRYKKLKVEKEEFVTLKALALANSDSMYIEDLEAVQKLQDLLHEALQDYELSQRHEEPWRTGKLLLTLPLLRQTAAKAVQHFYSVKLQGKVPMHKLFLEMLEAKAWARADSLQEWRPLEQVPSPLHRATKRQHVHFLTPLPPPPSVAWVGTAQAGYHLEVFLPQRAGWPRAA

SEQ ID NO: 17258 - protein, 154 aa, Homo sapiens
MASASARGNQDKDAHFPPPSKQSLLFCPKSKLHIHRAEISKIMRECQEESFWKRALPFSLVSMLVTQGLVYQGYLAANSRFGSLPKVALAGLLGFGLGKVSYIGVCQSKFHFFEDQLRGAGFGPQHNRHCLLTCEECKIKHGLSEKGDSQPSAS

SEQ ID NO: 17259 - protein, 181 aa, Homo sapiens
TATAEEQPVEPDGPLPGSDNNQEKKVRLSPAKMSTKNSTDLVEYVDKSHAFLPIIPNTQRGQLEDRLNNQARTIAFLLEQAFRIKEDISACLQGTHGFRKEESLARKLLESHIQTITSIVKKLSQNIEILEDQIRARDQAATGTNFAVHEINIKHLQGVGDLRGRVARTSLLARLYLRETG

SEQ ID NO: 17260 - protein, 689 aa, Homo sapiens
MAPWPELGDAQPNPDKYLEGAAGQQPTAPDKSKETNKNNTEAPVTKIELLPSYSTATLIDEPTEVDDPWNLPTLQDSGIKWSERDTKGKILCFFQGIGRLILLLGFLYFFVCSLDILSSAFQLVGGKMAGQFFSNSSIMSNPLLGLVIGVLVTVLVQSSSTSTSIVVSMVSSSLLTVRAAIPIIMGANIGTSITNTIVALMQVGDRSEFRRAFAGATVHDFFNWLSVLVLLPVEVATHYLEIITQLIVESFHFKNGEDAPDLLKVITKPFTKLIVQLDKKVISQIAMNDEKAKNKSLVKIWCKTFTNKTQINVTVPSTANCTSPSLCWTDGIQNWTMKNVTYKENIAKCQHIFVNFHLPDLAVGTILLILSLLVLCGCLIMIVKILGSVLKGQVATVIKKTINTDFPFPFAWLTGYLAILVGAGMTFIVQSSSVFTSALTPLIGIGVITIERAYPLTLGSNIGTTTTAILAALASPGNALRSSLQIALCHFFFNISGILLWYPIPFTRLPIRMAKGLGNISAKYRWFAVFYLIIFFFLIPLTVFGLSLAGWRVLVGVGVPVVFIIILVLCLRLLQSRCPRVLPKKLQNWNFLPLWMRSLKPWDAVVSKFTGCFQMRCCCCCRVCCRACCLLCDCPKCCRCSKCCEDLEEAQEGQDVPVKAPETFDNITISREAQGEVPASDSKTECTAL

SEQ ID NO: 17261 - protein, 663 aa, Homo sapiens
MNGDSRAAVVTSPPPTTAPHKERYFDRVDENNPEYLRERNMAPDLRQDFNMMEQKKRVSMILQSPAFCEELESMIQEQFKKGKNPTGLLALQQIADFMTTNVPNVYPAAPQGGMAALNMSLGMVTPVNDLRGSDSIAYDKGEKLLRCKLAAFYRLADLFGWSQLIYNHITTRVNSEQEHFLIVPFGLLYSEVTASSLVKINLQGDIVDRGSTNLGVNQAGFTLHSAIYAARPDVKCVVHIHTPAGAAVSAMKCGLLPISPEALSLGEVAYHDYHGILVDEEEKVLIQKNLGPKSKVLILRNHGLVSVGESVEEAFYYIHNLVVACEIQVRTLASAGGPDNLVLLNPEKYKAKSRSPGSPVGEGTGSPPKWQIGEQEFEALMRMLDNLGYRTGYPYRYPALREKSKKYSDVEVPASVTGYSFASDGDSGTCSPLRHSFQKQQREKTRWLNSGRGDEASEEGQNGSSPKSKTKVWTNITHDHVKPLLQSLSSGVCVPSCITNCLWTKEDGHRTSTSAVPNLFVPLNTNPKEVQEMRNKIREQNLQDIKTAGPQSQVLCGVVMDRSLVQGELVTASKAIIEKEYQPHVIVSTTGPNPFTTLTDRELEEYRREVERKQKGSEENLDEAREQKEKSPPDQPAVPHPPPSTPIKLEEAGDGCAREYLLP

SEQ ID NO: 17262 - protein, 189 aa, Homo sapiens
GSKFSKTQTFQGCGILQPDPPANITVTAVARNPRWLSVTWQDPHSWNSSFYRLRFELRYRAERSKTFTTWMVKDLQHHCVIHDAWSGLRHVVQLRAQEEFGQGEWSEWSPEAMGTPWTESRSPPAENEVSTPMQALTTNKDDDNILFRDSANATSLPVQDSSSVPLPTFLVAGGSLAFGTLLCIAIVLR

SEQ ID NO: 17263 - protein, 232 aa, Homo sapiens
MGAERRLLSIKEAFRLAQQPHQNQAKLVVALSRTYRTMDDKTVFHEEFIHYLKYVMVVYKREPAVERVIEFAAKFVTSFHQSDMEDDEEEEDGGLLNYLFTFLLKSHEANSNAVRFRVCLLINKLLGSMPENAQIDDDVFDKINKAMLIRLKDKIPNVRIQAVLALSRLQDPKDDECPVVNAYATLIENDSNPEVRRAVLSCIAPSAKTLPKIVGRTKDVKEAVRKLAYQML

SEQ ID NO: 17264 - protein, 2277 aa, Homo sapiens
MDEEEDGAGAEESGQPRSFMRLNDLSGAGGRPGPGSAEKDPGSADSEAEGLPYPALAPVVFFYLSQDSRPRSWCLRTVCNPWFERISMLVILLNCVTLGMFRPCEDIACDSQRCRILQAFDDFIFAFFAVEMVVKMVALGIFGKKCYLGDTWNRLDFFIVIAGMLEYSLDLQNVSFSAVRTVRVLRPLRAINRVPSMRILVTLLLDTLPMLGNVLLLCFFVFFIFGIVGVQLWAGLLRNRCFLPENFSLPLSVDLERYYQTENEDESPFICSQPRENGMRSCRSVPTLRGDGGGGPPCGLDYEAYNSSSNTTCVNWNQYYTNCSAGEHNPFKGAINFDNIGYAWIAIFQVITLEGWVDIMYFVMDAHSFYNFIYFILLIIVGSFFMINLCLVVIATQFSETKQRESQLMREQRVRFLSNASTLASFSEPGSCYEELLKYLVYILRKAARRLAQVSRAAGVRVGLLSSPAPLGGQETQPSSSCSRSHRRLSVHHLVHHHHHHHHHYHLGNGTLRAPRASPEIQDRDANGSRRLMLPPPSTPALSGAPPGGAESVHSFYHADCHLEPVRCQAPPPRSPSEASGRTVGSGKVYPTVHTSPPPETLKEKALVEVAASSGPPTLTSLNIPPGPYSSMHKLLETQSTGACQSSCKISSPCLKADSGACGPDSCPYCARAGAGEVELADREMPDSDSEAVYEFTQDAQHSDLRDPHSRRQRSLGPDAEPSSVLAFWRLICDTFRKIVDSKYFGRGIMIAILVNTLSMGIEYHEQPEELTNALEISNIVFTSLFALEMLLKLLVYGPFGYIKNPYNIFDGVIVVISVWEIVGQQGGGLSVLRTFRLMRVLKLVRFLPALQRQLVVLMKTMDNVATFCMLLMLFIFIFSILGMHLFGCKFASERDGDTLPDRKNFDSLLWAIVTVFQILTQEDWNKVLYNGMASTSSWAALYFIALMTFGNYVLFNLLVAILVEGFQAEEISKREDASGQLSCIQLPVDSQGGDANKSESEPDFFSPSLDGDGDRKKCLALVSLGEHPELRKSLLPPLIIHTAATPMSLPKSTSTGLGEALGPASRRTSSSGSAEPGAAHEMKSPPSARSSPHSPWSAASSWTSRRSSRNSLGRAPSLKRRSPSGERRSLLSGEGQESQDEEESSEEERASPAGSDHRHRGSLEREAKSSFDLPDTLQVPGLHRTASGRGSASEHQDCNGKSASGRLARALRPDDPPLDGDDADDEGNLSKGERVRAWIRARLPACCLERDSWSAYIFPPQSRFRLLCHRIITHKMFDHVVLVIIFLNCITIAMERPKIDPHSAERIFLTLSNYIFTAVFLAEMTVKVVALGWCFGEQAYLRSSWNVLDGLLVLISVIDILVSMVSDSGTKILGMLRVLRLLRTLRPLRVISRAQGLKLVVETLMSSLKPIGNIVVICCAFFIIFGILGVQLFKGKFFVCQGEDTRNITNKSDCAEASYRWVRHKYNFDNLGQALMSLFVLASKDGWVDIMYDGLDAVGVDQQPIMNHNPWMLLYFISFLLIVAFFVLNMFVGVVVENFHKCRQHQEEEEARRREEKRLRRLEKKRRNLMLDDVIASGSSASAASEAQCKPYYSDYSRFRLLVHHLCTSHYLDLFITGVIGLNVVTMAMEHYQQPQILDEALKICNYIFTVIFVLESVFKLVAFGFRRFFQDRWNQLDLAIVLLSIMGITLEEIEVNASLPINPTIIRIMRVLRIARVLKLLKMAVGMRALLDTVGNLGLLFMLLFFIFAALGVELFGDLECDETHPCEGLGRHATFRNFGMAFLTLFRVSTGDNWNGIMKDTLRDCDQESTCYNTVISPIYFVSFVLTAQFVLVNVVIAVLMKHLEESNKEAKEEAELEAELELEMKTLSPQPHSPLGSPFLWPGVEGPDSPDSPKPGALHPAAHARSASHFSLEHPTMQPHPTELPGPDLLTVRKSGVSRTHSLPNDSYMCRHGSTAEGPLGHRGWGLPKAQSGSVLSVHSQPADTSYILQLPKDAPHLLQPHSAPTWGTIPKLPPPGRSPLAQRPLRRQAAIRTDSLDVQGLGSREDLLAEVSGPSPPLARAYSFWGQSSTQAQQHSRSHSKISKHMTPPAPCPGPEPNWGKGPPETRSSLELDTELSWISGDLLPPGGQEEPPSPRDLKKCYSVEAQSCQRRPTSWLDEQRRHSIAVSCLDSGSQPHLGTDPSNLGGQPLGGPGSRPKKKLSPPSITIDPPESQGPRTPPSPGICLRRRAPSSDSKDPLASGPPDSMAASPSPKKDVLSLSGLSSDPADLDP

SEQ ID NO: 17265 - protein, 612 aa, Homo sapiens
MSEIPSTIVSKNMTNDKNSLESMNISSSSSTEENPKKQARKNEEHGPDPSANPFHLSGDVDFFLLRDQERNKALSERQQQKTMRVHQKMTYSSKVSAKHTSLRRQLQLEDKQEDLEARAEAEHQRAFRDYTTWKLTLTKAEKNVEPENMSGYIKQKRQMFLLQYALDVKRREIQRLETLATKEEARLERAEKSLEKDAALFDEFVRENDCSSVQAMRAAEKETKAKIEKILEIRDLTTQIVNIKSEISRFEDTLKHYKVYKDFLYKLSPKEWLEEQEKKHSFLKKAKEVSEASKESSVNSTPGDKGPGIKGKASSMWAKEGQGTKKPWRFLQTMRLGRSPSYLSSPQQGSQPSESSGGDSRGSNSPIPPTQEDTDSDGEEPQLYFTEPQQLLDVFRELEEQNLSLIQNSQETEKTLEELSHTLKHTQIRMDREVNQLKQWVTTMMMSITKEEDTAAELELKARVFHFGEYKGDQQDKLLESLNCKVLDVYRHCTGTQQEANLGTVQMLTIIEHQLDELLENLEHVPQVKIEQAERAKEKERRIRLREEKLQMQKILQEEHLQRARARAQAEIKKKRGRTLVCRSRPPAHRIKQQSEHTLMDKEEEELLFFFT

SEQ ID NO: 17266 - protein, 398 aa, Homo sapiens
DPDQAASYTVEPDPRSRHLALSGPTFGIIVKHFPKLLPKVLVQGTVFARMAPEQKTELVCELQKLQYCVGMCGDGANDCGALKAADVGISLSQAEASVVSPFTSSMASIECVPMVIREGRCSLDTSFSVFKYMALYSLTQFISVLILYTINTNLGDLQFLAIDLVITTTVAVLMSRTGPALVLGRVRPPGALLSVPVLSSLLLQMVLVTGVQLGGYFLTLAQPWFVPLNRTVAAPDNLPNYENTVVFSLSSFQYLILAAAVSKGAPFRRPLYTNERARPVPPRLPAPPPAQAGLQEALQAAGTRAGRAALAAAARRPPEVVQAHGHPRHWNSLPLSHQLDPSPATPPPPPPTSLRLATVYTPPPRPPPPWGSVDYCPLPWTIPRRGGSPQLPSVLLSV

SEQ ID NO: 17267 - protein, 951 aa, Homo sapiens
MCCTEGSLRKRDSQRAPEAVLCLQLWQRTVPLDTLKGLGTCFPSGPELRGAGIAAAMERASERRTASALFAGFRALGLFSNDIPHVVRFSALKRRFYVTTCVGKSFHTYDVQKLSLVAVSNSVPQDICCMAADGRLVFAAYGNVFSAFARNKEIVHTFKGHKAEIHFLQPFGDHIISVDTDGILIIWHIYSEEEYLQLTFDKSVFKISAILHPSTYLNKILLGSEQGSLQLWNVKSNKLLYTFPGWKVGVTALQQAPAVDVVAIGLMSGQVIIHNIKFNETLMKFRQDWGPITSISFRTDGHPVMAAGSPCGHIGLWDLEDKKLINQMRNAHSTAIAGLTFLHREPLLVTNGADNALRIWIFDGPTGEGRLLRFRMGHSAPLTNIRYYGQNGQQILSASQDGTLQSFSTVHEKFNKSLGHGLINKKRVKRKGLQNTMSVRLPPITKFAAEEARESDWDGIIACHQGKLSCSTWNYQKSTIGAYFLKPKELKKDDITATAVDITSCGNFAVIGLSSGTVDVYNMQSGIHRGSFGKDQAHKGSVRGVAVDGLNQLTVTTGSEGLLKFWNFKNKILIHSVSLSSSPNIMLLHRDSGILGLALDDFSISVLDIETRKIVREFSGHQGQINDMAFSPDGRWLISAAMDCSIRTWDLPSGCLIDCFLLDSAPLNVSMSPTGDFLATSHVDHLGIYLWSNISLYSVVSLRPLPADYVPSIVMLPGTCQTQDVEVSEETVEPSDELIEYDSPEQLNEQLVTLSLLPESRWKNLLNLDVIKKKNKPKEPPKVPKSAPFFIPTIPGLVPRYAAPEQNNDPQQSKVVNLGVLAQKSDFCLKLEEGLVNNKYDTALNLLKESGPSGIETELRSLSPDCGGSIEVMQSFLKMIGMMLDRKRDFELAQAYLALFLKLHLKMLPSEPVLLEEITNLSSQVEENWTHLQSLFNQSMCILNYLKSALL

SEQ ID NO: 17268 - protein, 568 aa, Homo sapiens
MEPCTSDEFFQALNHAEQTFKKMENYLRHKQLCDVILVAGDRRIPAHRLVLSSVSDYFAAMFTNDVREARQEEIKMEGVEPNSLWSLIQYAYTGRLELKEDNIECLLSTACLLQLSQVVEACCKFLMKQLHPSNCLGIRSFADAQGCTDLHKVAHNYTMEHFMEVIRNQEFVLLPASEIAKLLASDDMNIPNEETILNALLTWVRHDLEQRRKDLSKLLAYIRLPLLAPQFLADMENNVLFRDDIECQKLIMEAMKYHLLPERRPMLQSPRTKPRKSTVGTLFAVGGMDSTKGATSIEKYDLRTNMWTPVANMNGRRLQFGVAVLDDKLYVVGGRDGLKTLNTVECYNPKTKTWSVMPPMSTHRHGLGVAVLEGPMYAVGGHDGWSYLNTVERWDPQARQWNFVATMSTPRSTVGVAVLSGKLYAVGGRDGSSCLKSVECFDPHTNKWTLCAQMSKRRGGVGVTTWNGLLYAIGGHDAPASNLTSRLSDCVERYDPKTDMWTAVASMSISRDAVGVCLLGDKLYAVGGYDGQAYLNTVEAYDPQTNEWTQVAPLCLGRAGACVVTVKL

SEQ ID NO: 17269 - protein, 748 aa, Homo sapiens
MKRNTCDLLSRSKSASEETLHSSNEEEDPFRGMEPYLVRRLSCRNIQLPPLAFRQLEQADLKSESENIQRPTSLPLKILPLIAITSAESSGFDVDNGTSAGRSPLDPMTSPGSGLILQANFVHSQRRESFLYRSDSDYDLSPKSMSRNSSIASDIHGDDLIVTPFAQVLASLRTVRNNFAALTNLQDRAPSKRSPMCNQPSINKATITEEAYQKLASETLEELDWCLDQLETLQTRHSVSEMASNKFKRMLNRELTHLSEMSRSGNQVSEFISNTFLDKQHEVEIPSPTQKEKEKKKRPMSQISGVKKLMHSSSLTNSSIPRFGVKTEQEDVLAKELEDVNKWGLHVFRIAELSGNRPLTVIMHTIFQERDLLKTFKIPVDTLITYLMTLEDHYHADVAYHNNIHAADVVQSTHVLLSTPALEAVFTDLEILAAIFASAIHDVDHPGVSNQFLINTNSELALMYNDSSVLENHHLAVGFKLLQEENCDIFQNLTKKQRQSLRKMVIDIVLATDMSKHMNLLADLKTMVETKKVTSSGVLLLDNYSDRIQVLQNMVHCADLSNPTKPLQLYRQWTDRIMEEFFRQGDRERERGMEISPMCDKHNASVEKSQVGFIDYIVHPLWETWADLVHPDAQDILDTLEDNREWYQSTIPQSPSPAPDDPEEGRQGQTEKFQFELTLEEDGESDTEKDSGSQVEEDTSCSDSKTLCTQDSESTEIPLDEQVEEEAVGEEEESQPEACVIDDRSPDT

SEQ ID NO: 17270 - protein, 739 aa, Homo sapiens
MSRPSSVSPRQPAPGGGGGGGPSPCGPGGGGRAKGLKDIRIDEEVKIAVNIALERFRYGDQREMEFPSSLTSTERAFIHRLSQSLGLVSKSKGKGANRYLTVKKKDGSETAHAMMTCNLTHNTKHAVRSLIQRFPVTNKERTELLPKTERGNVFAVEAENREMSKTSGRLNNGIPQIPVKRGESEFDSFRQSLPVFEKQEEIVKIIKENKVVLIVGETGSGKTTQIPQFLLDDCFKNGIPCRIFCTQPRRLAAIAVAERVAAERRERIGQTIGYQIRLESRVSPKTLLTFCTNGVLLRTLMAGDSTLSTVTHVIVDEVHERDRFSDFLLTKLRDLLQKHPTLKLILSSAALDVNLFIRYFGSCPVIYIQGRPFEVKEMFLEDILRTTGYTNKEMLKYKKEKQQEEKQQTTLTEWYSAQENSFKPESQRQRTVLNVTDEYDLLDDGGDAVFSQLTEKDVNCLEPWLIKEMDACLSDIWLHKDIDAFAQVFHLILTENVSVDYRHSETSATALMVAAGRGFASQVEQLISMGANVHSKASNGWMALDWAKHFGQTEIVDLLESYSATLEFGNLDESSLVQTNGSDLSAEDRELLKAYHHSFDDEKVDLDLIMHLLYNICHSCDAGAVLIFLPGYDEIVGLRDRILFDDKRFADSTHRYQVFMLHSNMQTSDQKKVLKNPPAGVRKIILSTNIAETSITVNDVVFVIDSGKVKEKSFDALNFVTMLKMVWISKASAIQRKGR

SEQ ID NO: 17271 - protein, 2332 aa, Homo sapiens
MDEEEDGAGAEESGQPRSFMRLNDLSGAGGRPGPGSAEKDPGSADSEAEGLPYPALAPVVFFYLSQDSRPRSWCLRTVCNPWFERISMLVILLNCVTLGMFRPCEDIACDSQRCRILQAFDDFIFAFFAVEMVVKMVALGIFGKKCYLGDTWNRLDFFIVIAGMLEYSLDLQNVSFSAVRTVRVLRPLRAINRVPSMRILVTLLLDTLPMLGNVLLLCFFVFFIFGIVGVQLWAGLLRNRCFLPENFSLPLSVDLERYYQTENEDESPFICSQPRENGMRSCRSVPTLRGDGGGGPPCGLDYEAYNSSSNTTCVNWNQYYTNCSAGEHNPFKGAINFDNIGYAWIAIFQVITLEGWVDIMYFVMDAHSFYNFIYFILLIIVGSFFMINLCLVVIATQFSETKQRESQLMREQRVRFLSNASTLASFSEPGSCYEELLKYLVYILRKAARRLAQVSRAAGVRVGLLSSPAPLGGQETQPSSSCSRSHRRLSVHHLVHHHHHHHHHYHLGNGTLRAPRASPEIQDRDANGSRRLMLPPPSTPALSGAPPGGAESVHSFYHADCHLEPVRCQAPPPRSPSEASGRTVGSGKVYPTVHTSPPPETLKEKALVEVAASSGPPTLTSLNIPPGPYSSMHKLLETQSTGACQSSCKISSPCLKADSGACGPDSCPYCARAGAGEVELADREMPDSDSEAVYEFTQDAQHSDLRDPHSRRQRSLGPDAEPSSVLAFWRLICDTFRKIVDSKYFGRGIMIAILVNTLSMGIEYHEQPEELTNALEISNIVFTSLFALEMLLKLLVYGPFGYIKNPYNIFDGVIVVISVWEIVGQQGGGLSVLRTFRLMRVLKLVRFLPALQRQLVVLMKTMDNVATFCMLLMLFIFIFSILGMHLFGCKFASERDGDTLPDRKNFDSLLWAIVTVFQILTQEDWNKVLYNGMASTSSWAALYFIALMTFGNYVLFNLLVAILVEGFQAEEISKREDASGQLSCIQLPVDSQGGDANKSESEPDFFSPSLDGDGDRKKCLALVSLGEHPELRKSLLPPLIIHTAATPMSLPKSTSTGLGEALGPASRRTSSSGSAEPGAAHEMKSPPSARSSPHSPWSAASSWTSRRSSRNSLGRAPSLKRRSPSGERRSLLSGEGQESQDEEESSEEERASPAGSDHRHRGSLEREAKSSFDLPDTLQVPGLHRTASGRGSASEHQDCNGKSASGRLARALRPDDPPLDGDDADDEGNLSKGERVRAWIRARLPACCLERDSWSAYIFPPQSRFRLLCHRIITHKMFDHVVLVIIFLNCITIAMERPKIDPHSAERIFLTLSNYIFTAVFLAEMTVKVVALGWCFGEQAYLRSSWNVLDGLLVLISVIDILVSMVSDSGTKILGMLRVLRLLRTLRPLRVISRAQGLKLVVETLMSSLKPIGNIVVICCAFFIIFGILGVQLFKGKFFVCQGEDTRNITNKSDCAEASYRWVRHKYNFDNLGQALMSLFVLASKDGWVDIMYDGLDAVGVDQQPIMNHNPWMLLYFISFLLIVAFFVLNMFVGVVVENFHKCRQHQEEEEARRREEKRLRRLEKKRRNLMLDDVIASGSSASAASEAQCKPYYSDYSRFRLLVHHLCTSHYLDLFITGVIGLNVVTMAMEHYQQPQILDEALKICNYIFTVIFVLESVFKLVAFGFRRFFQDRWNQLDLAIVLLSIMGITLEEIEVNASLPINPTIIRIMRVLRIARVLKLLKMAVGMRALLDTVMQALPQVGNLGLLFMLLFFIFAALGVELFGDLECDETHPCEGLGRHATFRNFGMAFLTLFRVSTGDNWNGIMKDTLRDCDQESTCYNTVISPIYFVSFVLTAQFVLVNVVIAVLMKHLEESNKEAKEEAELEAELELEMKTLSPQPHSPLGSPFLWPGVEGPDSPDSPKPGALHPAAHARSASHFSLEHPTDRQLFDTISLLIQGSLEWELKLMDELAGPGGQPSAFPSAPSLGGSDPQMQPHPTELPGPDLLTVRKSGVSRTHSLPNDSYMCRHGSTAEGPLGHRGWGLPKAQSGSVLSVHSQPADTSYILQLPKDAPHLLQPHSAPTWGTIPKLPPPGRSPLAQRPLRRQAAIRTDSLDVQGLGSREDLLAEVSGPSPPLARAYSFWGQSSTQAQQHSRSHSKISKHMTPPAPCPGPEPNWGKGPPETRSSLELDTELSWISGDLLPPGGQEEPPSPRDLKKCYSVEAQSCQRRPTSWLDEQRRHSIAVSCLDSGSQPHLGTDPSNLGGQPLGGPGSRPKKKLSPPSITIDPPESQGPRTPPSPGICLRRRAPSSDSKDPLASGPPDSMAASPSPKKDVLSLSGLSSDPADLDP

SEQ ID NO: 17272 - protein, 958 aa, Homo sapiens
MGQLCWLPLLAPLLLLRPPGVQSAGPIRAFVVPHSHMDVGWVYTVQESMRAYAANVYTSVVEELARGQQRRFIAVEQEFFRLWWDGVASDQQKYQVRQLLEEGRLEFVIGGQVMHDEAVTHLDDQILQLTEGHGFLYETFGIRPQFSWHVDPFGASATTPTLFALAGFNAHLGSRIDYDLKAAMQEARGLQFVWRGSPSLSERQEIFTHIMDQYSYCTPSHIPFSNRSGFYWNGVAVFPKPPQDGVYPNMSEPVTPANINLYAELGVSVQYATLGDYFRALHALNVTWRVRDHHDFLPYSTEPFQAWTGFYTSRSSLKGLARRASALLYAGESMFTRYLWPAPRGHLDPTWALQQLQQLRWAVSEVQHHDAITGTESPKVRDMYATHLASGMLGMRKLMASIVLDELQPQAPMAASSDAGPAGHFASVYNPLAWTVTTIVTLTVGFPGVRVTDEAGHPVPSQIQNSTETPSAYDLLILTTIPGLSYRHYNIRPTAGAQEGTQEPAATVASTLQFGRRLRRRTSHAGRYLVPVANDCYIVLLDQDTNLMHSIWERQSNRTVRVTQEFLEYHVNGDVKQGPISDNYLFTPGKAAVPAWEAVEMEIVAGQLVTEIRQYFYRNMTAQNYTYAIRSRLTHVPQGHDGELLCHRIEQEYQAGPLELNREAVLRTSTNLNSQQVIYSDNNGYQMQRRPYVSYVNNSIARNYYPMVQSAFMEDGKSRLVLLSERAHGISSQGNGQVEVMLHRRLWNNFDWDLGYNLTLNDTSVVHPVLWLLLGSWSLTTALRQRSALALQHRPVVLFGDLAGTAPKLPGPQQQEAVTLPPNLHLQILSIPGWRYSSNHTEHSQNLRKGHRGEAQADLRRVLLRLYHLYEVGEDPVLSQPVTVNLEAVLQALGSVVAVEERSLTGTWDLSMLHRWSWRTGPGRHRGDTTSPSRPPGGPIITVHPKEIRTFFIHFQQQ

SEQ ID NO: 17273 - protein, 731 aa, Homo sapiens
MPRRKQEQPKRLPSPSEEESGKPFQCPICGLVIKRKSYWKRHMVIHTGLKSHQCPLCPFRCARKDNLKSHMKVHQHQDRGETFQCQLCPFTSSRHFSLKLHMRCHQHFLRTEAKVKEEIPDPDVKGSPHLSDSACLGQQREGGGTELVGTMMTSNTPERTSQGGAGVSPLLVKEEPKEDNGLPTSFTLNAADRPANHTKLKDPSEYVANSASALFSQDISVKMASDFLMKLSAANQKEPMNLNFKVKEEPKEGESLSTTLPRSSYVFSPESEVSAPGVSEDALKPQEGKGSVLRRDVSVKAASELLMKLSAESYKETQMVKIKEEPMEVDIQDSHVSISPSRNVGYSTLIGREKTEPLQKMPEGRVPPERNLFSQDISVKMASELLFQLSEKVSKEHNHTKENTIRTTTSPFFSEDTFRQSPFTSNSKELLPSDSVLHGRISAPETEKIVLEAGNGLPSWKFNDQLFPCDVCGKVFGRQQTLSRHLSLHTEERKYKCHLCPYAAKCRANLNQHLTVHSVKLVSTDTEDIVSAVTSEGSDGKKHPYYYSCHVCGFETELNVQFVSHMSLHVDKEQWMFSICCTACDFVTMEEAEIKTHIGTKHTGEDRKTPSESNSPSSSSLSALSDSANSKDDSDGSQKNKGGNNLLVISVMPGSQPSLNSEEKPEKGFECVFCNFVCKTKNMFERHLQIHLITRMFECDVCHKFMKTPEQLLEHKKCHTVPTGGLNSGQW

SEQ ID NO: 17274 - protein, 1931 aa, Homo sapiens
KTVLHMDGCLDTETPTVSIQENVDVASLKPISDSGINFTDAIWSPTCERRTCECHESIEKNKDKTDLPQSVVYQNEEGRWVTDLAYYTSFNSKQNLNVSLSDEMNEDFRSGSEAFDLIAQDEEEFNKEHQFIQEENIDAHNTSVALGDTSWGATINYSLLRKSRSTSDLDKDDASYLRLSLGEFFAQRSEALGCLGGGNNVKRPSFGYFIRSPEKREPIALIRKSDVSRGNLEKEMAHLNHDLYSGDLNEQSQAQLSEGSITLQVEAVESTSQVDENDVTLTADKGKTEDTFFMSNKPQRYKDKLPDSGDSMLRISTIASAIAEASVNTDPSQLAAMIKALSNKTRDKTFQEDEKQKDYSHVRHFLPNDLEKSNGSNALDMEKYLKKTEVSRYESALENFSRASMSDTWDLSLPKEQTTQDIHPVDLSATSVSVRAPEENTAAIVYVENGESENQESFRTINSSNSVTNRENNSAVVDVKTCSIDNKLQDVGNDEKATSISTPSDSYSSVRNPRITSLCLLKDCEEIRDNRENQRQNECVSEISNSEKHVTFENHRIVSPKNSDLKNTSPEHGGRGSEDEQESFRPSTSPLSHSSPSEISGTSSSGCALESFGSAAQQQQPPCEQELSPLVCSPAGVSRLTYVSEPESSYPTTATDDALEDRKSDITSELSTTIIQGSPAALEERAMEKLREKVPFQNRGKGTLSSIIQNNSDTRKATETTSLSSKPEYVKPDFRWSKDPSSKSGNLLETSEVGWTSNPEELDPIRLALLGKSGLSCQVGSATSHPVSCQEPIDEDQRISPKDKSTAGREFSGQVSHQTTSENQCTPIPSSTVHSSVADMQNMPAAVHALLTQPSLSAAPFAQRYLGTLPSTGSTTLPQCHAGNATVCGFSGGLPYPAVAGEPVQNSVAVGICLGSNIGSGWMGTSSLCNPYSNTLNQNLLSTTKPFPVPSVGTNCGIEPWDSGVTSGLGSVRVPEELKLPHACCVGIASQTLLSVLNPTDRWLQVSIGVLSISVNGEKVDLSTYRCLVFKNKAIIRPHATEEIKVLFIPSSPGVFRCTFSVASWPCSTDAETIVQAEALASTVTLTAIAESPVIEVETEKKDVLDFGDLTYGGWKALPLKLINRTHATVPIRLIINANAVAWRCFTFSKESVRAPVEVAPCADVVTRLAGPSVVNHMMPASYDGQDPEFLMIWVLFHSPKKQISSSDILDSAEEFSAKVDIEVDSPNPTPVLRSVSLRARAGIARIHAPRDLQTMHFLAKVASSRKQHLPLKNAGNIEVYLDIKVPEQGSHFSVDPKNLLLKPGEEHEVIVSFTPKDPEACEERILKIFVQPFGPQYEVVLKGEVISSGSKPLSPGPCLDIPSILSNKQFLAWGGVPLGRTQLQKLALRNNSASTTQHLRLLIRGQDQDCFQLQNTFGSEQRLTSNCEIRIHPKEDIFISVLFAPTRLSCMLARLEIKQLGNRSQPGIKFTIPLSGYGGTSNLILEGVKKLSDSYMVTVNGLVPGKESKIVFSVRNTGSRAAFVKAVGFKDSQKKVLLDPKVLRIFPDKFVLKERTQENVTLIYNPSDRGINNKTATELSTVYLFGGDEISRQQYRRALLHKPEMIKQILPEHSVLQNINFVEAFQDELLVTEVYDLPQRPNDVQLFYGSMCKIILSVIGEFRDCISSREFLQPSSKASLESTSDLGASGKHGGNVSLDVLPVKGPQGSPLLSRAARPPLDQLASEEPWTVLPEHLILVAPSPCDMAKTGRFQIVNNSVRLLRFELCWPAHCLTVTPQHGCVAPESKLQILVSPNSSLSTKQSMFPWSGLIYIHCDDGQKKIVKVQIREDLTQVELLTRLTSKPFGILSPVSEPSVSHLVKPMTKPPSTKVEIRNKSITFPTTEPGETSESCLELENHGTTDVKWHLSSLAPPYVKRWSLTTLPRLVSIS

SEQ ID NO: 17275 - protein, 2314 aa, Homo sapiens
MDEEEDGAGAEESGQPRSFMRLNDLSGAGGRPGPGSAEKDPGSADSEAEGLPYPALAPVVFFYLSQDSRPRSWCLRTVCNPWFERISMLVILLNCVTLGMFRPCEDIACDSQRCRILQAFDDFIFAFFAVEMVVKMVALGIFGKKCYLGDTWNRLDFFIVIAGMLEYSLDLQNVSFSAVRTVRVLRPLRAINRVPSMRILVTLLLDTLPMLGNVLLLCFFVFFIFGIVGVQLWAGLLRNRCFLPENFSLPLSVDLERYYQTENEDESPFICSQPRENGMRSCRSVPTLRGDGGGGPPCGLDYEAYNSSSNTTCVNWNQYYTNCSAGEHNPFKGAINFDNIGYAWIAIFQVITLEGWVDIMYFVMDAHSFYNFIYFILLIIVGSFFMINLCLVVIATQFSETKQRESQLMREQRVRFLSNASTLASFSEPGSCYEELLKYLVYILRKAARRLAQVSRAAGVRVGLLSSPAPLGGQETQPSSSCSRSHRRLSVHHLVHHHHHHHHHYHLGNGTLRAPRASPEIQDRDANGSRRLMLPPPSTPALSGAPPGGAESVHSFYHADCHLEPVRCQAPPPRSPSEASGRTVGSGKVYPTVHTSPPPETLKEKALVEVAASSGPPTLTSLNIPPGPYSSMHKLLETQSTGACQSSCKISSPCLKADSGACGPDSCPYCARAGAGEVELADREMPDSDSEAVYEFTQDAQHSDLRDPHSRRQRSLGPDAEPSSVLAFWRLICDTFRKIVDSKYFGRGIMIAILVNTLSMGIEYHEQPEELTNALEISNIVFTSLFALEMLLKLLVYGPFGYIKNPYNIFDGVIVVISVWEIVGQQGGGLSVLRTFRLMRVLKLVRFLPALQRQLVVLMKTMDNVATFCMLLMLFIFIFSILGMHLFGCKFASERDGDTLPDRKNFDSLLWAIVTVFQILTQEDWNKVLYNGMASTSSWAALYFIALMTFGNYVLFNLLVAILVEGFQAEEISKREDASGQLSCIQLPVDSQGGDANKSESEPDFFSPSLDGDGDRKKCLALVSLGEHPELRKSLLPPLIIHTAATPMSLPKSTSTGLGEALGPASRRTSSSGSAEPGAAHEMKSPPSARSSPHSPWSAASSWTSRRSSRNSLGRAPSLKRRSPSGERRSLLSGEGQESQDEEESSEEERASPAGSDHRHRGSLEREAKSSFDLPDTLQVPGLHRTASGRGSASEHQDCNGKSASGRLARALRPDDPPLDGDDADDEGNLSKGERVRAWIRARLPACCLERDSWSAYIFPPQSRFRLLCHRIITHKMFDHVVLVIIFLNCITIAMERPKIDPHSAERIFLTLSNYIFTAVFLAEMTVKVVALGWCFGEQAYLRSSWNVLDGLLVLISVIDILVSMVSDSGTKILGMLRVLRLLRTLRPLRVISRAQGLKLVVETLMSSLKPIGNIVVICCAFFIIFGILGVQLFKGKFFVCQGEDTRNITNKSDCAEASYRWVRHKYNFDNLGQALMSLFVLASKDGWVDIMYDGLDAVGVDQQPIMNHNPWMLLYFISFLLIVAFFVLNMFVGVVVENFHKCRQHQEEEEARRREEKRLRRLEKKRRKAQCKPYYSDYSRFRLLVHHLCTSHYLDLFITGVIGLNVVTMAMEHYQQPQILDEALKICNYIFTVIFVLESVFKLVAFGFRRFFQDRWNQLDLAIVLLSIMGITLEEIEVNASLPINPTIIRIMRVLRIARVLKLLKMAVGMRALLDTVMQALPQVGNLGLLFMLLFFIFAALGVELFGDLECDETHPCEGLGRHATFRNFGMAFLTLFRVSTGDNWNGIMKDTLRDCDQESTCYNTVISPIYFVSFVLTAQFVLVNVVIAVLMKHLEESNKEAKEEAELEAELELEMKTLSPQPHSPLGSPFLWPGVEGPDSPDSPKPGALHPAAHARSASHFSLEHPTDRQLFDTISLLIQGSLEWELKLMDELAGPGGQPSAFPSAPSLGGSDPQMQPHPTELPGPDLLTVRKSGVSRTHSLPNDSYMCRHGSTAEGPLGHRGWGLPKAQSGSVLSVHSQPADTSYILQLPKDAPHLLQPHSAPTWGTIPKLPPPGRSPLAQRPLRRQAAIRTDSLDVQGLGSREDLLAEVSGPSPPLARAYSFWGQSSTQAQQHSRSHSKISKHMTPPAPCPGPEPNWGKGPPETRSSLELDTELSWISGDLLPPGGQEEPPSPRDLKKCYSVEAQSCQRRPTSWLDEQRRHSIAVSCLDSGSQPHLGTDPSNLGGQPLGGPGSRPKKKLSPPSITIDPPESQGPRTPPSPGICLRRRAPSSDSKDPLASGPPDSMAASPSPKKDVLSLSGLSSDPADLDP

SEQ ID NO: 17276 - protein, 1177 aa, Homo sapiens
MSPGCMLLFVFGFVGGAVVINSAILVSLSVLLLVHFSISTGVPALTQNLPRILRKERPISLGIFPLPAGDGLLTPDAQKGGETPGSEQWKFQELSQPRSHTSLKDELSDVSQGGSKATTPASTANSDVATIPTDTPLKEENEGFVKVTDAPNKSEISKHIEVQVAQETRNVSTGSAENEEKSEVQAIIESTPELDMDKDLSGYKGSSTPTKGIENKAFDRNTESLFEELSSAGSGLIGDVDEGADLLGMGREVENLILENTQLLETKNALNIVKNDLIAKVDELTCEKDVLQGELEAVKQAKLKLEEKNRELEEELRKARAEAEDARQKAKDDDDSDIPTAQRKRFTRVEMARVLMERNQYKERLMELQEAVRWTEMIRASRENPAMQEKKRSSIWQFFSRLFSSSSNTTKKPEPPVNLKYNAPTSHVTPSVKKRSSTLSQLPGDKSKAFDFLSEETEASLASRREQKREQYRQVKAHVQKEDGRVQAFGWSLPQKYKQVTNGQGENKMKNLPVPVYLRPLDEKDTSMKLWCAVGVNLSGGKTRDGGSVVGASVFYKDVAGLDTEGSKQRSASQSSLDKLDQELKEQQKELKNQEELSSLVWICTSTHSATKVLIIDAVQPGNILDSFTVCNSHVLCIASVPGARETDYPAGEDLSESGQVDKASLCGSMTSNSSAETDSLLGGITVVGCSAEGVTGAATSPSTNGASPVMDKPPEMEAENSEVDENVPTAEEATEATEGNAGSAEDTVDISQTGVYTEHVFTDPLGVQIPEDLSPVYQSSNDSDAYKDQISVLPNEQDLVREEAQKMSSLLPTMWLGAQNGCLYVHSSVAQWRKCLHSIKLKDSILSIVHVKGIVLVALADGTLAIFHRGVDGQWDLSNYHLLDLGRPHHSIRCMTVVHDKVWCGYRNKIYVVQPKAMKIEKSFDAHPRKESQVRQLAWVGDGVWVSIRLDSTLRLYHAHTYQHLQDVDIEPYVSKMLGTGKLGFSFVRITALMVSCNRLWVGTGNGVIISIPLTETVILHQGRLLGLRANKTSGVPGNRPGSVIRVYGDENSDKVTPGTFIPYCSMAHAQLCFHGHRDAVKFFVAVPGQVISPQSSSSGTDLTGDKAGPSAQEPGSQTPLKSMLVISGGEGYIDFRMGDEGGESELLGEDLPLEPSVTKAERSHLIVWQVMYGNE

SEQ ID NO: 17277 - protein, 328 aa, Homo sapiens
MAAHVGASRTPQEVMEHYVSMYIHGNLGKACIPDTIPNRVTDHTCPSGGPLSPSLTTPLPPLDISVAEQQQLGYMPLRDDYEIEYDQDAETLISGLSVNYDDDDVEIELKRAHVDMYVRKLKERQRRKNIARDYNLVPAFLGKDKKEKEKALKRKITKEEKELRLKLRPLYQFMSCKEFDDLFENMHKEKMLRAKIRELQRYRRNGITKMEESAEYEAARHKREKRKENKNLAGSKRGKEDGKDSEFAAIENLPGFELLSDREKVLCSSLNLSPARYVTVKTIIIKDHLQKRQGIPSKSRLPSYLDKVLKKRILNFLTESGWISRDAS

SEQ ID NO: 17278 - protein, 734 aa, Homo sapiens
MKQSPALAPEERCRRAGSPKPVLRADDNNMGNGCSQKLATANLLRFLLLVLIPCICALVLLLVILLSYVGTLQKVYFKSNGSEPLVTDGEIQGSDVILTNTIYNQSTVVSTAHPDQHVPAWTTDASLPGDQSHRNTSACMNITHSQCQMLPYHATLTPLLSVVRNMEMEKFLKFFTYLHRLSCYQHIMLFGCTLAFPECIIDGDDSHGLLPCRSFCEAAKEGCESVLGMVNYSWPDFLRCSQFRNQTESSNVSRICFSPQQENGKQLLCGRGENFLCASGICIPGKLQCNGYNDCDDWSDEAHCNCSENLFHCHTGKCLNYSLVCDGYDDCGDLSDEQNCACHSQGLVECRNGQCIPSTFQCDGDEDCKDGSDEENCSVIQTSCQEGDQRCLYNPCLDSCGGSSLCDPNNSLNNCSQCEPITLELCMNLPYNSTSYPNYFGHRTQKEASISWESSLFPALVQTNCYKYLMFFSCTILVPKCDVNTGEHIPPCRALCEHSKERCESVLGIVGLQWPEDTDCSQFPEENSDNQTCLMPDEYVEECSPSHFKCRSGQCVLASRRCDGQADCDDDSDEENCGCKERDLWECPSNKQCLKHTVICDGFPDCPDYMDEKNCSFCQDDELECANHACVSRDLWCDGEADCSDSSDEWDCGELLVSAICCTLSCLSATEAEWILNYFLDFTDQVHLFCFTVIKADSADLCVLFPTHRKFPHEATSLFEISILYGKTFGFKML

SEQ ID NO: 17279 - protein, 369 aa, Homo sapiens
MWSHMQPHLFHNESSLVEQMILNKEFALEHGIPINMGYAVAPHHSGVYPVHIQLYAAWKKVWGIQVTSTEEYPHLKPARYRKGFIHNSIMVLPRQTCGLFTHTIFYKEYPGGPQELDKSIRGGELFLTILLNPISIFMTHLSNYGNDRLGLYTFVNLVNFVQSWTNLKLQTLPPVQLAHQYFELFPEQKDPLWQNPCDDKRHKDIWSREKTCDHLPKFLVIGPQKTGTTALYLFLLMHPSIISNLPSPKTFEEVQFFNGNNYHKGIDWYMDFFPTPSNTTSDFLFEKSANYFHSEEAPRRAASLVPKAKIITILIDPSDRAYSWYQVGVQWRDLGSLQPSPPRFMPFSCLSLLSSWDYSTNDHMKIQLL

SEQ ID NO: 17280 - protein, 1135 aa, Homo sapiens
MYASLGSGPVAPLPASVPPSVLGSWSTGGSRSCVRQETKSPGGARTSGHWASVWQEVLKQLQGSIEDEAMASSGQIDLLERLKELNLDSSNFPGVKLRSKMSLRSYGSREGSVSSRSGECSPVPMGSFPRRGFVNGSRESTGYLEELEKERSLLLADLDKEEKEKDWYYAQLQNLTKRIDSLPLTENFSLQTDMTRRQLEYEARQIRVAMEEQLGTCQDMEKRAQRSSQNKHETGSHDAERQNEGQGVGEINMATSGNGQGSTTRMDHETASVLSSSSTHSAPRRLTSHLGTKVEMVYSLLSMLGTHDKDDMSRTLLAMSSSQDSCISMRQSGCLPLLIQLLHGNDKDSVLLGNSRGSKEARARASAALHNIIHSQPDDKRGRREIRVLHLLEQIRAYCETCWEWQEAHEPGMDQDKNPMPAPVEHQICPAVCVLMKLSFDEEHRHAMNELGGLQAIAELLQVDCEMYGLTNDHYSITLRRYAGMALTNLTFGDVANKATLCSMKGCMRALVAQLKSESEDLQQVIASVLRNLSWRADVNSKKTLREVGSVKALMECALEVKKESTLKSVLSALWNLSAHCTENKADICAVDGALAFLVGTLTYRSQTNTLAIIESGGGILRNVSSLIATNEDHRQILRENNCLQTLLQHLKSHSLTIVSNACGTLWNLSARNPKDQEALWDMGAVSMLKNLIHSKHKMIAMGSAAALRNLMANRPAKYKDANIMSPGSSLPSLHVRKQKALEAELDAQHLSETFDNIDNLSPKASHRSKQRHKQSLYGDYVFDTNRHDDNRSDNFNTGNMTVLSPYLNTTVLPSSSSSRGSLDSSRSEKDRSLERERGIGLGNYHPATENPGTSSKRGLQISTTAAQIAKVMEEVSAIHTSQEDRSSGSTTELHCVTDERNALRRSSAAHTHSNTYNFTKSENSNRTCSMPYAKLEYKRSSNDSLNSVSSSDGYGKRGQMKPSIESYSEDDESKFCSYGQYPADLAHKIHSANHMDDNDGELDTPINYSLKYSDEQLNSGRQSPSQNERWARPKHIIEDEIKQSEQRQSRNQSTTYPVYTESTDDKHLKFQPHFGQQECVSPYRSRGANGSETNRVGSNHGINQNVSQSLCQEDDYEDDKPTNYSERYSEEEQH

SEQ ID NO: 17281 - protein, 213 aa, Homo sapiens
LDSGSTKEFFRRSKIAVFDKMWTYMRSAEPSVFVRTTAEGVARVRKSKGKYAYLLESTMNEYIEQRKPCDTMKVGGNLDSKGYGIATPKGSSLRTPVNLAVLKLSEQGVLDKLKNKWWYDKGECGAKDSGSKEKTSALSLSNVAGVFYILVGGLGLAMLVALIEFCYKSRAEAKRMKVAKNAQNINPSSSQNSQNFATYKEGYNVYGIESVKI

SEQ ID NO: 17282 - protein, 459 aa, Homo sapiens
MFDENGEQYLDCINNVAHVGHCHPGVVKAALKQMELLNTNSRFLHDNIVEYAKRLSATLPEKLSVCYFTNSGSEANDLALRLARQFRGHQDVITLDHAYHGHLSSLIEISPYKFQKGKDVKKEFVHVAPTPDTYRGKYREDHADSASAYADEVKKIIEDAHNSGRKIAAFIAESMQSCGGQIIPPAGYFQKVAEYVHGAGGVFIADEVQVGFGRVGKHFWSFQMYGEDFVPDIVTMGKPMGNGHPVACVVTTKEIAEAFSSSGMEYFNTYGGNPVSCAVGLAVLDIIENEDLQGNAKRVGNYLTELLKKQKAKHTLIGDIRGIGLFIGIDLVKDHLKRTPATAEAQHIIYKMKEKRVLLSADGPHRNVLKIKPPMCFTEEDAKFMVDQLDRILTVLEEAMGTKTESVTSENTPCKTKMLKEAHIELLRDSTTDSKENPSRKRNGMCTDTHSLLSKRLKT

SEQ ID NO: 17283 - protein, 555 aa, Homo sapiens
MERTGYSMVQENGQRKYGGPPPGWEGPHPQRGCEVFVGKIPRDVYEDELVPVFEAVGRIYELRLMMDFDGKNRGYAFVMYCHKHEAKRAVRELNNYEIRPGRLLGVCCSVDNCRLFIGGIPKMKKREEILEEIAKVTEGVLDVIVYASAADKMKNRGFAFVEYESHRAAAMARRKLMPGRIQLWGHQIAVDWAEPEIDVDEDVMETVKILYVRNLMIETTEDTIKKSFGQFNPGCVERVKKIRDYAFVHFTSREDAVHAMNNLNGTELEGSCLEVTLAKPVDKEQYSRYQKAARGGGAAEAAQQPSYVYSCDPYTLAYYGYPYNALIGPNRDYFVKAGSIRGRGRGAAGNRAPGPRGSYLGGYSAGRGIYSRYHEGKGKQQEKGYELVPNLEIPTVNPVAIKPGTVAIPAIGAQYSMFPAAPAPKMIEDGKIHTVEHMISPIAVQPDPASAAAAAAAAAAAAAAVIPTVSTPPPFQGRPITPVYTVAPNVQRIPTAGIYGASYVPFAAPATATIATLQKNAAAAAAMYGGYAGYIPQAFPAAAIQVPIPDVYQTY

SEQ ID NO: 17284 - protein, 669 aa, Homo sapiens
MACEIMPLQRLLERTIRSAVEQHLFDVNNSGGQSSEDSESGTLSASSATSARQRRRQSKEQDEVRHGRDKGLINKENTPSGFNHLDDCILNTQEVEKVHKNTFGCAGERSKPKRQKSSTKLSELHDNQDGLVNMESLNSTRSHERTGPDDFEWMSDERKGNEKDGGHTQHFESPTMKIQEHPSLSDTKQQRNQDAGDQEESFVSEVPQSDLTALCDEKNWEEPIPAFSSWQRENSDSDEAHLSPQAGRLIRQLLDEDSDPMLSPRFYAYGQSRQYLDDTEVPPSPPNSHSFMRRRSSSLGSYDDEQEDLTPAQLTRRIQSLKKKIRKFEDRFEEEKKYRPSHSDKAANPEVLKWTNDLAKFRRQLKESKLKISEEDLTPRMRQRSNTLPKSFGSQLEKEDEKKQELVDKAIKPSVEATLESIQRKLQEKRAESSRPEDIKDMTKDQIANEKVALQKALLYYESIHGRPVTKNERQVMKPLYDRYRLVKQILSRANTIPIIGSPSSKRRSPLLQPIIEGETASFFKEIKEEEEGSEDDSNVKPDFMVTLKTDFSARCFLDQFEDDADGFISPMDDKIPSKCSQDTGLSNLHAASIPELLEHLQEMREEKKRIRKKLRDFEDNFFRQNGRNVQKEDRTPMAEEYSEYKHIKAKLRLLEVLISKRDTDSKSM

SEQ ID NO: 17285 - protein, 715 aa, Homo sapiens
MSVNISTAGKGVDPNTVDTYDSGDDWEIGVGNLIIDLDADLEKDRQKFEMNNSTTTTSSSNSKDCGGPASSGAGATAALADGLKFASVQASAPQGNSHKETSKSKVKRSKTSKDANKSLPSAALYGIPEISSTGKRQEVQGRPGEATGMNSALGQSVSSGGSGNPNSNSTSTSTSAATAGAGSCGKSKEEKPGKSQSSRGAKRDKDAGKSRKDKHDLLQGHQNGSGSQAPSGGHLYGFGAKSNGGGASPFHCGGTGSGSVAAAGEVSKSAPDSGLMGNSMLVKKEEEEEESHRRIKKLKTEKVDPLFTVPAPPPPISSSLTPQILPSYFSPSSSNIAAPVEQLLVRTRSVGVNTCEVGVVTEPECLGPCEPGTSVNLEGIVWHETEEGVLVVNVTWRNKTYVGTLLDCTKHDWAPPRFCESPTSDLEMRGGRGRGKRARSAAAAPGSEASFTESRGLQNKNRGGANGKGRRGSLNASGRRTPPNCAAEDIKASPSSTNKRKNKPPMELDLNSSSEDNKPGKRVRTNSRSTPTTPQGKPETTFLDQGCSSPVLIDCPHPNCNKKYKHINGLRYHQAHAHLDPENKLEFEPDSEDKISDCEEGLSNVALECSEPSTSVSAYDQLKAPASPGAGNPPGTPKGKRELMSNGPGSIIGAKAGKNSGKKKGLNNELNNLPVISNMTAALDSCSAADGSLAAEMPKLEAEGLIDKKNLGDKE

SEQ ID NO: 17286 - protein, 71 aa, Homo sapiens
KSEVRAKFKFSILNAKGEETKAMESQRAYRFVQGKDWGFKKFIRRDFLLDEANGLLPDDKLTLFCEILIKS

SEQ ID NO: 17287 - protein, 596 aa, Homo sapiens
MSKTNGLSEDLIWHCKTLIQERDVVIRLMNKCEDISNKLTKQVTMLTGNGGGWNIEQPSILNQSLSLKPYQKVGLNWLALVHKHGLNGILADEMGLGKTIQAIAFLAYLYQEGNNGPHLIVVPASTIDNWLREVNLWCPTLKVLCYYGSQEERKQIRFNIHSRYEDYNVIVTTYNCAISSSDDRSLFRRLKLNYAIFDEGHMLKNMGSIRYQHLMTINANNRLLLTGTPVQNNLLELMSLLNFVMPHMFSSSTSEIRRMFSSKTKSADEQSIYEKERIAHAKQIIKPFILRRVKEEVLKQLPPKKDRIELCAMSEKQEQLYLGLFNRLKKSINNLEKNTEMCNVMMQLRKMANHPLLHRQYYTAEKLKEMSQLMLKEPTHCEANPDLIFEDMEVMTDFELHVLCKQYRHINNFQLDMDLILDSGKFRVLGCILSELKQKGDRVVLFSQFTMMLDILEVLLKHHQHRYLRLDGKTQISERIHLIDEFNTDMDIFVFLLSTKAGGLGINLTSANVVILHDIDCNPYNDKQAEDRCHRVGQTKEVLVIKLISQGTIEESMLKINQQKLKLEQDMTTVDEGDEGSMPADIATLLKTSMGL

SEQ ID NO: 17288 - protein, 576 aa, Homo sapiens
MLRSGPASGPSVPTGRAMPSRRVARPPAAPELGALGSPDLSSLSLAVSRSTEIIDEYIKENGFGLDGGQPGPGEGLPRLVSRGAASLSTVTLGPVAPPATPPPWGCPLGRLVSPAPGPGPQPHLVITEQPKQRGMRFRYECEGRSAGSILGESSTEASKTLPAIELRDCGGLREVEVTACLVWKDWPHRVHPHSLVGKDCTDGICRVRLRPHVSPRHSFNNLGIQCVRKKEIEAAIERKIQLGIDPYNAGSLKNHQEVDMNVVRICFQASYRDQQGQMRRMDPVLSEPVYDKKSTNTSELRICRINKESGPCTGGEELYLLCDKVQKEDISVVFSRASWEGRADFSQADVHRQIAIVFKTPPYEDLEIVEPVTVNVFLQRLTDGVCSEPLPFTYLPRDHDSYGVDKKRKRGMPDVLGELNSSDPHGIESKRRKKKPAILDHFLPNHGSGPFLPPSALLPDPDFFSGTVSLPGLEPPGGPDLLDDGFAYDPTAPTLFTMLDLLPPAPPHASAVVCSGGAGAVVGETPGPEPLTLDSYQAPGPGDGGTASLVGSNMFPNHYREAAFGGGLLSPGPEAT

SEQ ID NO: 17289 - protein, 320 aa, Homo sapiens
INDIAFKPDGTQLILAAGSRLLVYDTSDGTLLQPLKGHKDTVYCVAYAKDGLWSPEQKSVSKHKSSSKIICCREERNDILAVADWGQKVSFYQLSGKQIGKDRALNFDPCCISYFTKGEYILLGGSDKQVSLFTKDGVRLGTVGEQNSWVWTCQAKPDSNYVVVGCQDGTISFYQLIFSTVHGLYKDRYAYRDSMTDVIVQHLITEQKVRIKCKELVKKIAIYRNRLAIQLPEKILIYELYSEDLSDMHYRVKEKIIKKFECNLLVVCANHIILCQEKRLQCLSFSGVKEREWQMESLIRYIKVIGGPPGREGLLVGLKN

SEQ ID NO: 17290 - protein, 433 aa, Homo sapiens
MSKSFQQSSLSRDSQGHGRDLSAAGIGLLAAATQSLSMPASLGRMNQGTARLASLMNLGMSSSLNQQGAHSALSSASTSSHNLQSIFNIGSRGPLPLSSQHRGDADQASNILASFGLSARDLDELSRYPEDKITPENLPQILLQLKRRRTEEGPTLSYGRDGRSATREPPYRVPRDDWEEKRHFRRDSFDDRGPSLNPVLDYDHGSRSQESGYYDRMDYEDDRLRDGERCRDDSFFGETSHNYHKFDSEYERMGRGPGPLQERSLFEKKRGAPPSSNIEDFHGLLPKGYPHLCSICDLPVHSNKEWSQHINGASHSRRCQLLLEIYPEWNPDNDTGHTMGDPFMLQQSTNPAPGILGPPPPSFHLGGPAVGPRGNLGAGNGNLQGPRHMQKGRVETSRVVHIMDFQRGKNLRYQLLQLVEPFGVISNHLILNK

SEQ ID NO: 17291 - protein, 446 aa, Homo sapiens
MDGESEVDFSSNSITPLWRRRSIPQPHQVLGRSKPRPQSYQSPNGLLITDFPVEDGGTLLAAQIPAQVPTASDSRTVHRSPLLLGAQRRAVANGGTASPEYRAASPRLRRPKSPKLPKAVPGGSPKSPANGAVTLPAPPPPPVLRPPRTPNAPAPCTPEEDLTGLTASPVPSPTANGLAANNDSPGSGSQSGRKAKDPERGLFPGPQKSSSEQKLPLQRLPSQENELLENPSVVLSTNSPAALKVGKQQIIPKSLASEIKISKSNNQNVEPHKRLLKVRSMVEGLGGPLGHAGEESEVDNDVDSPGSLRRGLRSTSYRRAVVSGFDFDSPTSSKKKNRMSQPVLKVVMEDKEKFSSLGRIKKKMLKGQGTFDGEENAVLYQNYKEKALDIDSDEESEPKEQKSDEKIVIHHKPLRSTWSQLSAVKRKVILIVGFMEMKDGRLRGGK

SEQ ID NO: 17292 - protein, 676 aa, Homo sapiens
MTSQYPFEAETPECLVGSVPVQCLCQGLELDCDETNLRAVPSVSSNVTAMSLQWNLIRKLPPDCFKNYHDLQKLYLQNNKITSISIYAFRGLNSLTKLYLSHNRITFLKPGVFEDLHRLEWLIIEDNHLSRISPPTFYGLNSLILLVLMNNVLTRLPDKPLCQHMPRLHWLDLEGNHIHNLRNLTFISCSNLTVLVMRKNKINHLNENTFAPLQKLDELDLGSNKIENLPPLIFKDLKELSQLNLSYNPIQKIQANQFDYLVKLKSLSLEGIEISNIQQRMFRPLMNLSHIYFKKFQYCGYAPHVRSCKPNTDGISSLENLLASIIQRVFVWVVSAVTCFGNIFVICMRPYIRSENKLYAMSIISLCCADCLMGIYLFVIGGFDLKFRGEYNKHAQLWMESTHCQLVGSLAILSTEVSVLLLTFLTLEKYICIVYPFRCVRPGKCRTITVLILIWITGFIVAFIPLSNKEFFKNYYGTNGVCFPLHSEDTESIGAQIYSVAIFLGINLAAFIIIVFSYGSMFYSVHQSAITATEIRNQVKKEMILAKRFFFIVFTDALCWIPIFVVKFLSLLQVEIPGTITSWVVIFILPINSALNPILYTLTTRPFKEMIHRFWYNYRQRKSMDSKGQKTYAPSFIWVEMWPLQEMPPELMKPDLFTYPCEMSLISQSTRLNSYS

SEQ ID NO: 17293 - protein, 1469 aa, Homo sapiens
MTEVQAMVEFSVELNKFYNVDLFQRGFYQIRASMKIPSRIPHRVEASLLHATGMTLAFPASVHDSLICSKTFQILYKNEEVVLNDVMIFKVKMLLDERKIEETLEEMNFLLSLDLHFTDGDYSADDLNALQLISSRTLKLHFSPHRGLHHHVNVMFDYFHLSVVSVTVHASLVALHQPLISFPRPVKTTWLNRNAPAQNKDSVIPTLESVVFGINYTKQLSPDGCSFIIADSFLHHAYRFHYTLCATLLLAFKGLHSYFITVTEEIPSCQKLELEEMDVEARLTELCEEVKKIENPDELAELINMNLAQLCSLLMALWGQFLEVITLHEELRILLAQEHHTLRVRRFSEAFFCFEHPREAAIAYQELHAQSHLQMCTAIKNTSFCSSLPPLPIECSELDGDLNSLPIIFEDRYLDSVTEDLDAPWMGIQNLQRSESSKMDKYETEESSVAGLSSPELKVRPAGASSIWYTEGEKQLTKSLKGKNEESNKSKVKVTKLMKTMKSENTKKLIKQNSKDSVVLVGYKCLKSTASNDLIKCFEGNPSHSQKEGLDPTICGYNFDPKTYMRQTSQKEASCLPTNTERTEQKSPDIENVQPDQFDPLNSGNLNLCANLSISGKLDISQDDSEITQMEHNLASRRSSDDCHDHQTTPSLGVRTIEIKPSNKDPFSGENITVKLGPWTELRQEEILVDNLLPNFESLESNGKSKSIEITFEKEALQEAKCLSIGESLTKLRSNLPAPSTKEYHVVVSGDTIKLPDISATYASSRFSDSGVESEPSSFATHPNTDLVFETVQGQGPCNSERLFPQLLMKPDYNVKFSLGNHCTESTSAISEIQSSLTSINSLPSDDELSPDENSKKSVVPECHLNDSKTVLNLGTTDLPKCDDTKKSSITLQQQSVVFSGNLDNETVAIHSLNSSIKDPLQFVFSDEETSSDVKSSCSSKPNLDTMCKGFQSPDKSNNSTGTAITLNSKLICLGTPCVISGSISSNTDVSEDRTMKKNSDVLNLTQMYSEIPTVESETHLGTSDPFSASTDIVKQGLVENYFGSQSSTDISDTCAVSYSNALSPQKETSEKEISNLQQEQDKEDEEEEQDQQMVQNGYYEETDYSALDGTINAHYTSRDELMEERLTKSEKINSDYLRDGINMPTVCTSGCLSFPSAPRESPCNVKYSSKSKFDAITKQPSSTSYNFTSSISWYESSPKPQIQAFLQAKEELKLLKLPGFMYSEVPLLASSVPYFSVEEEDGSEDGVHLIVCVHGLDGNSADLRLVKTYIELGLPGGRIDFLMSERNQNDTFADFDSMTDRLLDEIIQYIQIYSLTVSKISFIGHSLGNLIIRSVLTRPRFKYYLNKLHTFLSLSGPHLGTLYNSSALVNTGLWFMQKWKKSGSLLQLTCRDHSDPRQTFLYKLSNKAGLHYFKNVVLVGSLQDRYVPYHSARIEMCKTALKDKQSGNGIKLFQRVIGINELFPKFFL

SEQ ID NO: 17294 - protein, 453 aa, Homo sapiens
MDQFGDILEGEVDHSFFDSDFEEGKKCETNSVFDKQNDDPKERIDKDTKNVNSNTGMQTTENYLTEKGNERNVKFPPEHPVENDVTQTVSSFSLPASSRSKKLCDVTTGLKIHVSIPNRIPKIVKEGEDDYYTDGEESSDDGKKYHVKSKSAKPSTNVKKSIRKKYCKVSSSSSSSLSSSSSGSGTDCLDAGSDSHLSDSSPSSKSSKKHVSGITLLSPKHKYKSGIKSTETQPSSTTPKCGHYPEESEDTVTDVSPLSTPDISPLQSFELGIANDQKVKIKKQENVSQEIYEDVEDLKNNSKYLKAAKKGKEKHEPDVSSKSSSVLDSSLDHRHKQKVLHDTMDLNHLLKAFLQLDKKGPQKHHFDQPSVAPGKNYSFTREEVRQIDRENQRLLKELSRQAEKPGSKSTIPRSADHPPKLYHSALNRQKEQQRIERENLTISLCHPGWSAVT

SEQ ID NO: 17295 - protein, 601 aa, Homo sapiens
MKRKQKRFLQMTLLFTVALIFLPNVGLWSLYKDKHLVKSAEPGEQQTFPLGLGDGQFYSWTDGLRRKDWHDYESIQKEAMRSGKGEHGKPYPLTEEDHDDSAYRENGFNIFVSNNIALERSLPDIRHANCKHKMYLERLPNTSIIIPFHNEGWTSLLRTIHSIINRTPGSLIAEIILVDDFSEREHLKDKLEEYMARFSKVRIVRTKKREGLIRTRLLGASMARGEVLTFLDSHCEVNVNWLPPLLNQIALNHKTIVCPMIDVIDHNHFGYEAQAGDAMRGAFDWEMYYKRIPIPPELQRADPSDPFESPVMAGGLFAVDRKWFWELGGYDPGLEIWGGEQYEISFKVWMCGGEMFDVPCSRVGHIYRKYVPYKVPSGTSLARNLKRVAETWMDEFAEYIYQRRPEYRHLSTGDISAQKELRKQLKCKDFKWFMAAVAWDVPKYYPPVEPPPAAWGEIRNVAANLCVDSKHGATGTELRLDICVKDGSERTWSHEQLFTFGWREDIRPGEPLHTRKFCFDAISHNSPVTLYDCHGMKGNQLWGYRKDRTLFHPVSNSCMDCNPAEKKIFMARCDPLSETQQWIFEHINMTVLEKFNHHANS

SEQ ID NO: 17296 - protein, 2291 aa, Homo sapiens
MDEEEDGAGAEESGQPRSFMRLNDLSGAGGRPGPGSAEKDPGSADSEAEGLPYPALAPVVFFYLSQDSRPRSWCLRTVCNPWFERISMLVILLNCVTLGMFRPCEDIACDSQRCRILQAFDDFIFAFFAVEMVVKMVALGIFGKKCYLGDTWNRLDFFIVIAGMLEYSLDLQNVSFSAVRTVRVLRPLRAINRVPSMRILVTLLLDTLPMLGNVLLLCFFVFFIFGIVGVQLWAGLLRNRCFLPENFSLPLSVDLERYYQTENEDESPFICSQPRENGMRSCRSVPTLRGDGGGGPPCGLDYEAYNSSSNTTCVNWNQYYTNCSAGEHNPFKGAINFDNIGYAWIAIFQVITLEGWVDIMYFVMDAHSFYNFIYFILLIIVGSFFMINLCLVVIATQFSETKQRESQLMREQRVRFLSNASTLASFSEPGSCYEELLKYLVYILRKAARRLAQVSRAAGVRVGLLSSPAPLGGQETQPSSSCSRSHRRLSVHHLVHHHHHHHHHYHLGNGTLRAPRASPEIQDRDANGSRRLMLPPPSTPALSGAPPGGAESVHSFYHADCHLEPVRCQAPPPRSPSEASGRTVGSGKVYPTVHTSPPPETLKEKALVEVAASSGPPTLTSLNIPPGPYSSMHKLLETQSTGACQSSCKISSPCLKADSGACGPDSCPYCARAGAGEVELADREMPDSDSEAVYEFTQDAQHSDLRDPHSRRQRSLGPDAEPSSVLAFWRLICDTFRKIVDSKYFGRGIMIAILVNTLSMGIEYHEQPEELTNALEISNIVFTSLFALEMLLKLLVYGPFGYIKNPYNIFDGVIVVISVWEIVGQQGGGLSVLRTFRLMRVLKLVRFLPALQRQLVVLMKTMDNVATFCMLLMLFIFIFSILGMHLFGCKFASERDGDTLPDRKNFDSLLWAIVTVFQILTQEDWNKVLYNGMASTSSWAALYFIALMTFGNYVLFNLLVAILVEGFQAEEISKREDASGQLSCIQLPVDSQGGDANKSESEPDFFSPSLDGDGDRKKCLALVSLGEHPELRKSLLPPLIIHTAATPMSLPKSTSTGLGEALGPASRRTSSSGSAEPGAAHEMKSPPSARSSPHSPWSAASSWTSRRSSRNSLGRAPSLKRRSPSGERRSLLSGEGQESQDEEESSEEERASPAGSDHRHRGSLEREAKSSFDLPDTLQVPGLHRTASGRGSASEHQDCNGKSASGRLARALRPDDPPLDGDDADDEGNLSKGERVRAWIRARLPACCLERDSWSAYIFPPQSRFRLLCHRIITHKMFDHVVLVIIFLNCITIAMERPKIDPHSAERIFLTLSNYIFTAVFLAEMTVKVVALGWCFGEQAYLRSSWNVLDGLLVLISVIDILVSMVSDSGTKILGMLRVLRLLRTLRPLRVISRAQGLKLVVETLMSSLKPIGNIVVICCAFFIIFGILGVQLFKGKFFVCQGEDTRNITNKSDCAEASYRWVRHKYNFDNLGQALMSLFVLASKDGWVDIMYDGLDAVGVDQQPIMNHNPWMLLYFISFLLIVAFFVLNMFVGVVVENFHKCRQHQEEEEARRREEKRLRRLEKKRRSKEKQMADLMLDDVIASGSSASAASEAQCKPYYSDYSRFRLLVHHLCTSHYLDLFITGVIGLNVVTMAMEHYQQPQILDEALKICNYIFTVIFVLESVFKLVAFGFRRFFQDRWNQLDLAIVLLSIMGITLEEIEVNASLPINPTIIRIMRVLRIARVLKLLKMAVGMRALLDTVMQALPQVGNLGLLFMLLFFIFAALGVELFGDLECDETHPCEGLGRHATFRNFGMAFLTLFRVSTGDNWNGIMKDTLRDCDQESTCYNTVISPIYFVSFVLTAQFVLVNVVIAVLMKHLEESNKEAKEEAELEAELELEMKTLSPQPHSPLGSPFLWPGVEGPDSPDSPKPGALHPAAHARSASHFSLEHPTMQPHPTELPGPDLLTVRKSGVSRTHSLPNDSYMCRHGSTAEGPLGHRGWGLPKAQSGSVLSVHSQPADTSYILQLPKDAPHLLQPHSAPTWGTIPKLPPPGRSPLAQRPLRRQAAIRTDSLDVQGLGSREDLLAEVSGPSPPLARAYSFWGQSSTQAQQHSRSHSKISKHMTPPAPCPGPEPNWGKGPPETRSSLELDTELSWISGDLLPPGGQEEPPSPRDLKKCYSVEAQSCQRRPTSWLDEQRRHSIAVSCLDSGSQPHLGTDPSNLGGQPLGGPGSRPKKKLSPPSITIDPPESQGPRTPPSPGICLRRRAPSSDSKDPLASGPPDSMAASPSPKKDVLSLSGLSSDPADLDP

SEQ ID NO: 17297 - protein, 903 aa, Homo sapiens
MIPVLTSKKASELPVSEVASILQADLQNGLNKCEVSHRRAFHGWNEFDISEDEPLWKKYISQFKNPLIMLLLASAVISVLMHQFDDAVSITVAILIVVTVAFVQEYRSEKSLEELSKLVPPECHCVREGKLEHTLARDLVPGDTVCLSVGDRVPADLRLFEAVDLSIDESSLTGETTPCSKVTAPQPAATNGDLASRSNIAFMGTLVRCGKAKGVVIGTGENSEFGEVFKMMQAEEAPKTPLQKSMDLLGKQLSFYSFGIIGIIMLVGWLLGKDILEMFTISVSLAVAAIPEGLPIVVTVTLALGVMRMVKKRAIVKKLPIVETLGCCNVICSDKTGTLTKNEMTVTHIFTSDGLHAEVTGVGYNQFGEVIVDGDVVHGFYNPAVSRIVEAGCVCNDAVIRNNTLMGKPTEGALIALAMKMGLDGLQQDYIRKAEYPFSSEQKWMAVKCVHRTQQDRPEICFMKGAYEQVIKYCTTYQSKGQTLTLTQQQRDVYQQEKARMGSAGLRVLALASGPELGQLTFLGLVGIIDPPRTGVKEAVTTLIASGVSIKMITGDSQETAVAIASRLGLYSKTSQSVSGEEIDAMDVQQLSQIVPKVAVFYRASPRHKMKIIKSLQKNGSVVAMTGDGVNDAVALKAADIGVAMGQTGTDVCKEAADMILVDDDFQTIMSAIEEGKGIYNNIKNFVRFQLSTSIAALTLISLATLMNFPNPLNAMQILWINIIMDGPPAQSLGVEPVDKDVIRKPPRNWKDSILTKNLILKILVSSIIIVCGTLFVFWRELRDNVITPRDTTMTFTCFVFFDMFNALSSRSQTKSVFEIGLCSNRMFCYAVLGSIMGQLLVIYFPPLQKVFQTESLSILDLLFLLGLTSSVCIVAEIIKKVERSREKIQKHVSSTSSSFLEV

SEQ ID NO: 17298 - protein, 1242 aa, Homo sapiens
MEKYVRLQKIGEGSFGKAILVKSTEDGRQYVIKEINISRMSSKEREESRREVAVLANMKHPNIVQYRESFEENGSLYIVMDYCEGGDLFKRINAQKGVLFQEDQILDWFVQICLALKHVHDRKILHRDIKSQNIFLTKDGTVQLGDFGIARVLNSTVELARTCIGTPYYLSPEICENKPYNNKSDIWALGCVLYELCTLKHAFEAGSMKNLVLKIISGSFPPVSLHYSYDLRSLVSQLFKRNPRDRPSVNSILEKGFIAKRIEKFLSPQLIAEEFCLKTFSKFGSQPIPAKRPASGQNSISVMPAQKITKPAAKYGIPLAYKKYGDKKLHEKKPLQKHKQAHQTPEKRVNTGEERRKISEEAARKRRLEFIEKEKKQKDQIISLMKAEQMKRQEKERLERINRAREQGWRNVLSAGGSGEVKAPFLGSGGTIAPSSFSSRGQYEHYHAIFDQMQQQRAEDNEAKWKREIYGRGLPERQKGQLAVERAKQVEEFLQRKREAMQNKARAEGHMGILQNLAAMYGGRPSSSRGGKPRNKEEEVYLARLRQIRLQNFNERQQIKAKLRGEKKEANHSEGQEGSEEADMRRKKIESLKAHANARAAVLKEQLERKRKEAYEREKKVWEEHLVAKGVKSSDVSPPLGQHETGGSPSKQQMRSVISVTSALKEVGVDSSLTDTRETSEEMQKTNNAISSKREILRRLNENLKAQEDEKGKQNLSDTFEINVHEDAKEHEKEKSVSSDRKKWEAGGQLVIPLDELTLDTSFSTTERHTVGEVIKLGPNGSPRRAWGKSPTDSVLKILGEAELQLQTELLENTTIRSEISPEGEKYKPLITGEKKVQCISHEINPSAIVDSPVETKSPEFSEASPQMSLKLEGNLEEPDDLETEILQEPSGTNKDESLPCTITDVWISEEKETKETQSADRITIQENEVSEDGVSSTVDQLSDIHIEPGTNDSQHSKCDVDKSVQPEPFFHKVVHSEHLNLVPQVQSVQCSPEESFAFRSHSHLPPKNKNKNSLLIGLSTGLFDANNPKMLRTCSLPDLSKLFRTLMDVPTVGDVRQDNLEIDEIEDENIKEGPSDSEDIVFEETDTDLQELQASMEQLLREQPGEEYSEEEESVLKNSDVEPTANGTDVADEDDNPSSESALNEEWHSDNSDGEIASECECDSVFNHLEELRLHLEQEMGFEKFFEVYEKIKAIHEDEDENIEICSKIVQNILGNEHQHLYAKILHLVMADGAYQEDNDE

SEQ ID NO: 17299 - protein, 488 aa, Homo sapiens
MKRSLQALYCQLLSFLLILALTEALAFAIQEPSPRESLQVLPSGTPPGTMVTAPHSSTRHTSVVMLTPNPDGPPSQAAAPMATPTPRAEGHPPTHTISTIAATVTAPHSESSLSTGPAPAAMATTSSKPEGRPRGQAAPTILLTKPPGATSRPTTAPPRTTTRRPPRPPGSSRKGAGNSSRPVPPAPGGHSRSKEGQRGRNPSSTPLGQKRPLGKIFQIYKGNFTGSVEPEPSTLTPRTPLWGYSSSPQPQTVAATTVPSNTSWAPTTTSLGPAKDKPGLRRAAQGGGSTFTSQGGTPDATAASGAPVSPQAAPVPSQRPHHGDPQDGPSHSDSWLTVTPGTSRPLSTSSGVFTAATGPTPAAFDTSVSAPSQGIPQGASTTPQAPTHPSRVSESTISGAKEETVATLTMTDRVPSPLSTVVSTATGNFLNRLVPAGTWKPGTAGNISHVAEGDKPQHRATICLSKMDIAWVILAISVPISSCSDPIT

SEQ ID NO: 17300 - protein, 611 aa, Homo sapiens
MSDKSELKAELERKKQRLAQIREEKKRKEEERKKKETDQKKEAVAPVQEESDLEKKRREAEALLQSMGLTPESPIVPPPMSPSSKSVSTPSEAGSQDSGDGAVGSRRGPIKLGMAKITQVDFPPREIVTYTKETQTPVMAQPKEDEEEDDDVVAPKPPIEPEEEKTLKKDEENDSKAPPHELTEEEKQQILHSEEFLSFFDHSTRIVERALSEQINIFFDYSGRDLEDKEGEIQAGAKLSLNRQFFDERWSKHRVVSCLDWSSQYPELLVASYNNNEDAPHEPDGVALVWNMKYKKTTPEYVFHCQSAVMSATFAKFHPNLVVGGTYSGQIVLWDNRSNKRTPVQRTPLSAAAHTHPVYCVNVVGTQNAHNLISISTDGKICSWSLDMLSHPQDSMELVHKQSKAVAVTSMSFPVGDVNNFVVGSEEGSVYTACRHGSKAGISEMFEGHQGPITGIHCHAAVGAVDFSHLFVTSSFDWTVKLWTTKNNKPLYSFEDNADYVYDVMWSPTHPALFACVDGMGRLDLWNLNNDTEVPTASISVEGNPALNRVRWTHSGREIAVGDSEGQIVIYDVGEIAVPRNDEWARFGRTLAEINANRADAEEEAATRIPA

SEQ ID NO: 17301 - protein, 211 aa, Homo sapiens
LKGVILVICYFMMHYVDYSMMYHLIRGQSVIKLYIIYNMLEVADRLFSSFGQDILDALYWTATEPKERKRAHIGFVEIKGSVFKKFEKNNLFQMSNSDIKERFTNYVLLLIVCLRNMEQFSWNPDHLWVLFPDVCMVIASEIAVDIVKHAFITKFNDITADVYSEYRASLAFDLVSSRQKNAYTDYSDSVARRMGFIPLPLAVLVDIPEST

SEQ ID NO: 17302 - protein, 709 aa, Homo sapiens
MSYGEIEGKFLGPREEVTSEPRCKKLKSTTESYVFHNHSNADFHRIQEKTGNDWVPVTIIDVRGHSYLQENKIKTTDLHRPLHDEMPGNRPDVIESIDSQVLQEARPPLVSADDEIYSTSKAFIGPIYKPPEKKKRNEGRNEAHVLNGINDRGGQKEKQKFNSEKSEIDNELFQFYKEIEELEKEKDGFENSCKESEPSQEQFVPFYEGHNNGLLKPDEEKKDLSNKAMPSHCDYQQNLGNEPDKYPCNGQVIPTFCDTSFTSFRPEWQSVYPFIVPYGPPLPSLNYHLNIQRFSGPPNPPSNIFQAQDDSQIQNGYYVNNCHVNWNCMTFDQNNEYTDCSENRSSVHPSGNGCSMQDRYVSNGFCEVRERCWKDHCMDKHNGTDRFVNQQFQEEKLNKLQKLLILLRGLPGSGKTTLSRILLGQNRDGIVFSTDDYFHHQDGYRYNVNQLGDAHDWNQNRAKQAIDQGRSPVIIDNTNIQAWEMKPYVEVAIGKGYRVEFHEPETWWKFDPEELEKRNKHGVSRKKIAQMLDRYEYQMSISIVMNSVEPSHKSTQRPPPPQGRQRERVLKKTGHRLSKTKQKRNRKRNKKQNSQNRIMEENSLEFLSDLTPGDQDPSQSEEEDIEKTRRESEYPFIDGLQNEVGDFVTGYKEKRWKNKDPKDSFQNVMSIVELDNTPKNYLSKEGDNLFVSLLLRPNEISVTCPILTQ

SEQ ID NO: 17303 - protein, 190 aa, Homo sapiens
MQALNITPEQFSRLLRDHNLTREQFIALYRLRPLVYTPELPGRAKLALVLTGVLIFALALFGNALVFYVVTRSKAMRTVTNIFICSLALSDLLITFFCIPVTMLQNISDNWLGGAFICKMVPFVQSTAVVTEILTMTCIAVERHQGLVHPFKMKWQYTNRRAFTMLGVVWLVAVIVGSPMWHVQQLEALP

SEQ ID NO: 17304 - protein, 144 aa, Homo sapiens
MPKAPKGKSAGREKKVIHPYSRKAAQITREAHKQEKKEKLKNEKALRLNLVGEKLQWFQNHLDPQKKRYSKKDACELIERYLNRFSSELEQIELHNSIRDRQGRRHCSRETVIKQTMERERQQFEGYGLEIPDILNASNLKTFR

SEQ ID NO: 17305 - protein, 523 aa, Homo sapiens
MAEASRWHRGGASKHKLHYRKEVEITTTLQELLLYFIFLINLCILTFGMVNPHMYYLNKVMSSLFLDTSVPGEERTNFKSIRSITDFWKFMEGPLLEGLYWDSWYNNQQLYNLKNSSRIYYENILLGVPRVRQLKVRNNTCKVYSSFQSLMSECYGKYTSANEDLSNFGLQINTEWRYSTSNTNSPWHWGFLGVYRNGGYIFTLSKSKSETKNKFIDLRLNSWITRGTRVIFIDFSLYNANVNLFCIIRLVAEFPATGGILTSWQFYSVKLLRYVSYYDYFIASCEITFCIFLFVFTTQEVKKIKEFKSAYFKSIWNWLELLLLLLCFVAVSFNTYYNVQIFLLLGQLLKSTEKYSDFYFLACWHIYYNNIIAITIFFAWIKNMFLAIINDTYSEVKADYSIGRRLDFELGKMIKQSYKNVLEKFRLKKAQKDEDKKTKGSGDLAEQARREGFDENEIQNAEQMKKWKERLEKKYYSMEIQDDYQPVTQEEFRELFLYAVELEKELHYINLKLNQVVRKVSAL

SEQ ID NO: 17306 - protein, 351 aa, Homo sapiens
MRQTLPCIYFWGGLLPFGMLCASSTTKCTVSHEVADCSHLKLTQVPDDLPTNITVLNLTHNQLRRLPAANFTRYSQLTSLDVGFNTISKLEPELCQKLPMLKVLNLQHNELSQLSDKTFAFCTNLTELHLMSNSIQKIKNNPFVKQKNLITLDLSHNGLSSTKLGTQVQLENLQELLLSNNKIQALKSEELDIFANSSLKKLELSSNQIKEFSPGCFHAIGRLFGLFLNNVQLGPSLTEKLCLELANTSIRNLSLSNSQLSTTSNTTFLGLKWTNLTMLDLSYNNLNVWLKCLEHLNMEDNDIPGIKSNMFTGLINLKYLSLSNSFTSLRTLTNETFVSLAHSPLHILNLT

SEQ ID NO: 17307 - protein, 1240 aa, Homo sapiens
MWPSQLLIFMMLLAPIIHAFSRAPIPMAVVRRELSCESYPIELRCPGTDVIMIESANYGRTDDKICDSDPAQMENIRCYLPDAYKIMSQRCNNRTQCAVVAGPDVFPDPCPGTYKYLEVQYECVPYKVEQKVFLCPGLLKGVYQSEHLFESDHQSGAWCKDPLQASDKIYYMPWTPYRTDTLTEYSSKDDFIAGRPTTTYKLPHRVDGTGFVVYDGALFFNKERTRNIVKFDLRTRIKSGEAIIANANYHDTSPYRWGGKSDIDLAVDENGLWVIYATEQNNGKIVISQLNPYTLRIEGTWDTAYDKRSASNAFMICGILYVVKSVYEDDDNEATGNKIDYIYNTDQSKDSLVDVPFPNSYQYIAAVDYNPRDNLLYVWNNYHVVKYSLDFGPLDSRSGQAHHGQVSYISPPIHLDSELERPSVKDISTTGPLGMGSTTTSTTLRTTTLSPGRSTTPSVSGRRNRSTSTPSPAVEVLDDMTTHLPSASSQIPALEESCEAVEAREIMWFKTRQGQIAKQPCPAGTIGVSTYLCLAPDGIWDPQGPDLSNCSSPWVNHITQKLKSGETAANIARELAEQTRNHLNAGDITYSVRAMDQLVGLLDVQLRNLTPGGKDSAARSLNKLQKRERSCRAYVQAMVETVNNLLQPQALNAWRDLTTSDQLRAATMLLHTVEESAFVLADNLLKTDIVRENTDNIKLEVARLSTEGNLEDLKFPENMGHGSTIQLSANTLKQNGRNGEIRVAFVLYNNLGPYLSTENASMKLGTEALSTNHSVIVNSPVITAAINKEFSNKVYLADPVVFTVKHIKQSEENFNPNCSFWSYSKRTMTGYWSTQGCRLLTTNKTHTTCSCNHLTNFAVLMAHVEVKHSDAVHDLLLDVITWVGILLSLVCLLICIFTFCFFRGLQSDRNTIHKNLCISLFVAELLFLIGINRTDQPIACAVFAALLHFFFLAAFTWMFLEGVQLYIMLVEVFESEHSRRKYFYLVGYGMPALIVAVSAAVDYRSYGTDKVCWLRLDTYFIWSFIGPATLIIMLNVIFLGIALYKMFHHTAILKPESGCLDNINYEDNRPFIKSWVIGAIALLCLLGLTWAFGLMYINESTVIMAYLFTIFNSLQGMFIFIFHCVLQKKVRKEYGKCLRTHCCSGKSTESSIGSGKTSGSRTPGRYSTGSQSRIRRMWNDTVRKQSESSFITGDINSSASLNREPYRETSMGVKLNIAYQIGASEQCQGYKCHGYSTTEW

SEQ ID NO: 17308 - protein, 263 aa, Homo sapiens
MAKRLQAELSCPVCLDFFSCSISLSCTHVFCFDCIQRYILENHDFRAMCPLCRDVVKVPALEEWQVSVLTLMTKQHNSRLEQSLHVREELRHFREDVTLDAATASSLLVFSNDLRSAQCKKIHHDLTKDPRLACVLGTPCFSSGQHYWEVEVGEVKSWSLGVCKEPADRKSNDLFPEHGFWISMKAGAIHANTHLERIPASPRLRRVGIFLDADLEEIQFFDVDNNVLIYTHDGFFSLELLCPFFCLELLGEGESGNVLTICP

SEQ ID NO: 17309 - protein, 539 aa, Homo sapiens
MMAAEAGSEEGGPVTAGAGGGGAAAGSSAYPAVCRVKIPAALPVAAAPYPGLVETGVAGTLGGGAALGSEFLGAGSVAGALGGAGLTGGGTAAGVAGAAAGVAGAAVAGPSGDMALTKLPTSLLAETLGPGGGFPPLPPPPYLPPLGAGLGTVDEGDSLDGPEYEEEEVAIPLTAPPTNQWYHGKLDRTIAEERLRQAGKSGSYLIRESDRRPGSFVLSFLSQMNVVNHFRIIAMCGDYYIGGRRFSSLSDLIGYYSHVSCLLKGEKLLYPVAPPEPVEDRRRVRAILPYTKVPDTDEISFLKGDMFIVHNELEDGWMWVTNLRTDEQGLIVEDLVEEVGREEDPHEGKIWFHGKISKQEAYNLLMTVGQVCSFLVRPSDNTPGDYSLYFRTNENIQRFKICPTPNNQFMMGGRYYNSIGDIIDHYRKEQIVEGYYLKEPVPMQDQEQVLNDTVDGKEIYNTIRRKTKDAFYKNIVKKGYLLKKGKGKRWKNLYFILEGSDAQLIYFESEKRATKPKGLIDLSVCSVYVVHDSLFGRCS

SEQ ID NO: 17310 - protein, 683 aa, Homo sapiens
MLDSCKLKSACNLPFICNKKIINTAGTSNAEVPLADPGMYQLDITLRRGQSLAARDRGGTSDPYVKFKIGGKEVFRSKIIHKNLNPVWEEKACILVDHLREPLYIKVFDYDFGLQDDFMGSAFLDLTQLELNRPTDVTLTLKDPHYPDHDLGIILLSVILTPKEGESRDVFQTQSLRLSDLHRKSHLWRGIVSITLIEGRDLKAMDSNGLSDPYVKFRLGHQKYKSKIMPKTLNPQWREQFDFHLYEERGGVIDITAWDKDAGKRDDFIGRCQVDLSALSREQTHKLELQLEEGEGHLVLLVTLTASATVSISDLSVNSLEDQKEREEILKRYSPLRIFHNLKDVGFLQVKVIRAEGLMAADVTGKSDPFCVVELNNDRLLTHTVYKNLNPEWNKVFTFNIKDIHSVLEVTVYDEDRDRSADFLGKVAIPLLSIQNGEQKAYVLKNKQLTGPTKGVIYLEIDVIFNAVKASLRTLIPKEQKYIEEENRLSKQLLLRNFIRMKRCVMVLVNAAYYVNSCFDWDSPPRSLAAFVLFLFVVWNFELYMIPLVLLLLLTWNYFLIISGKDNRQRDTVVEDMLEDEEEEDDKDDKDSEKKGFINKIYAIQEVCVSVQNILDEVASFGERIKNTFNWTVPFLSWLAIVALCVFTAILYCIPLRYIVLVWGINKFTKKLRSPYAIDNNEL

SEQ ID NO: 17311 - protein, 1058 aa, Homo sapiens
MGQQVGRVGEAPGLQQPQPRGIRGSSAARPSGRRRDPAGRTTETGFNIFTQHEALHRPYGCDVEPQALNEAIRWSSKENLLGATESDPNLFVALYDFVASGDNTLSITKGEKLRVLGYNQNGEWSEVRSKNGQGWVPSNYITPVNSLEKHSWYHGPVSRSAAEYLLSSLINGSFLVRESESSPGQLSISLRYEGRVYHYRINTTADGKVYVTAESRFSTLAELVHHHSTVADGLVTTLHYPAPKCNKPTVYGVSPIHDKWEMERTDITMKHKLGGGQYGEVYVGVWKKYSLTVAVKTLKEDTMEVEEFLKEAAVMKEIKHPNLVQLLGVCTLEPPFYIVTEYMPYGNLLDYLRECNREEVTAVVLLYMATQISSAMEYLEKKNFIHRDLAARNCLVGENHVVKVADFGLSRLMTGDTYTAHAGAKFPIKWTAPESLAYNTFSIKSDVWAFGVLLWEIATYGMSPYPGIDLSQVYDLLEKGYRMEQPEGCPPKVYELMRACWKWSPADRPSFAETHQAFETMFHDSSISEEVAEELGRAASSSSVVPYLPRLPILPSKTRTLKKQVENKENIEGAQDATENSASSLAPGFIRGAQASSGSPALPRKQRDKSPSSLLEDAKETCFTRDRKGGFFSSFMKKRNAPTPPKRSSSFREMENQPHKKYELTGLPEQDRMAMTLPRNCQRSKLQLERTVSTSSQPEENVDRANDMLPKKSEESAAPSRERPKAKLLPRGATALPLRTPSGDLAITEKDPPGVGVAGVAAAPKGKEKNGGARLGMAGVPEDGEQPGWPSPAKAAPVLPTTHNHKVPVLISPTLKHTPADVQLIGTDSQGNKFKLLSEHQVTSSGDKDRPRRVKPKCAPPPPPVMRLLQHPSICSDPTEEPTALTAGQSTSETQEGGKKAALGAVPISGKAGRPVMPPPQVPLPTSSISPAKMANGTAGTKVALRKTKQAAEKISADKISKEALLECADLLSSALTEPVPNSQLVDTGHQLLDYCSGYVDCIPQTRNKFAFREAVSKLELSLQELQVSSAAAGVPGTNPVLNNLLSCVQEISDVVQR

SEQ ID NO: 17312 - protein, 569 aa, Homo sapiens
MITDAARHKLLVLTGQCFENTGELILQSGSFSFQNFIEIFTDQEIGELLSTTHPANKASLTLFCPEEGDWKNSNLDRHNLQDFINIKLNSASILPEMEGLSEFTEYLSESVEVPSPFDILEPPTSGGFLKLSKPCCYIFPGGRGDSALFAVNGFNMLINGGSERKSCFWKLIRHLDRVDSILLTHIGDDNLPGINSMLQRKIAELEEEQSQGSTTNSDWMKNLISPDLGVVFLNVPENLKNPEPNIKMKRSIEEACFTLQYLNKLSMKPEPLFRSVGNTIDPVILFQKMGVGKLEMYVLNPVKSSKEMQYFMQQWTGTNKDKAEFILPNGQEVDLPISYLTSVSSLIVWHPANPAEKIIRVLFPGNSTQYNILEGLEKLKHLDFLKQPLATQKDLTGQVPTPVVKQTKLKQRADSRESLKPAAKPLPSKSVRKESKEETPEVTKVNHVEKPPKVESKEKVMVKKDKPIKTETKPSVTEKEVPSKEEPSPVKAEVAEKQATDVKPKAAKEKTVKKETKVKPEDKKEEKEKPKKEVAKKEDKTPIKKEEKPKKEEVKKEVKKEIKKEEKKE

SEQ ID NO: 17313 - protein, 436 aa, Homo sapiens; identical to SEQ ID NO: 7345

SEQ ID NO: 17314 - protein, 207 aa, Homo sapiens
VIQQSGFSVFVVGVADVDYNELANIASKPSERHVFIVDDFESFEKIEDNLITFVCETATSSCPLIYLDGYTSPGFKMLEAYNLTEKNFASVQGVSLESGSFPSYSAYRIQKNAFVNQPTADLHPNGLPPSYTIILLFRLLPETPSDPFAIWQITDRDYKPQVGVIADPSSKTLSFFNKDTRGEVQTVTFDTEEVKTLFYGSFHKVKT

SEQ ID NO: 17315 - protein, 1283 aa, Homo sapiens
MWPSQLLIFMMLLAPIIHAFSRAPIPMAVVRRELSCESYPIELRCPGTDVIMIESANYGRTDDKICDSDPAQMENIRCYLPDAYKIMSQRCNNRTQCAVVAGPDVFPDPCPGTYKYLEVQYECVPYKVEQKVFLCPGLLKGVYQSEHLFESDHQSGAWCKDPLQASDKIYYMPWTPYRTDTLTEYSSKDDFIAGRPTTTYKLPHRVDGTGFVVYDGALFFNKERTRNIVKFDLRTRIKSGEAIIANANYHDTSPYRWGGKSDIDLAVDENGLWVIYATEQNNGKIVISQLNPYTLRIEGTWDTAYDKRSASNAFMICGILYVVKSVYEDDDNEATGNKIDYIYNTDQSKDSLVDVPFPNSYQYIAAVDYNPRDNLLYVWNNYHVVKYSLDFGPLDSRSGQAHHGQVSYISPPIHLDSELERPSVKDISTTGPLGMGSTTTSTTLRTTTLSPGRSTTPSVSGRRNRSTSTPSPAVEVLDDMTTHLPSASSQIPALEESCEAVEAREIMWFKTRQGQIAKQPCPAGTIGVSTYLCLAPDGIWDPQGPDLSNCSSPWVNHITQKLKSGETAANIARELAEQTRNHLNAGDITYSVRAMDQLVGLLDVQLRNLTPGGKDSAARSLNKLQKRERSCRAYVQAMVETVNNLLQPQALNAWRDLTTSDQLRAATMLLHTVEESAFVLADNLLKTDIVRENTDNIKLEVARLSTEGNLEDLKFPENMGHGSTIQLSANTLKQNGRNGEIRVAFVLYNNLGPYLSTENASMKLGTEALSTNHSVIVNSPVITAAINKEFSNKVYLADPVVFTVKHIKQSEENFNPNCSFWSYSKRTMTGYWSTQGCRLLTTNKTHTTCSCNHLTNFAVLMAHVEVKHSDAVHDLLLDVITWVGILLSLVCLLICIFTFCFFRGLQSDRNTIHKNLCISLFVAELLFLIGINRTDQPIACAVFAALLHFFFLAAFTWMFLEGVQLYIMLVEVFESEHSRRKYFYLVGYGMPALIVAVSAAVDYRSYGTDKVCWLRLDTYFIWSFIGPATLIIMLNVIFLGIALYKMFHHTAILKPESGCLDNINYEDNRPFIKSWVIGAIALLCLLGLTWAFGLMYINESTVIMAYLFTIFNSLQGMFIFIFHCVLQKKVRKEYGKCLRTHCCSGKSTESSIGSGKTSGSRTPGRYSTGSQSRIRRMWNDTVRKQSESSFITGDINSSASLNRGAMANHLISNALLRPHGTNNPYNTLLGEPAVCNNPSVSMYNAQEPYRETSMGVKLNIAYQIGASEQCQGYKCHGYSTTEW

SEQ ID NO: 17316 - protein, 95 aa, Homo sapiens
LRLRSGLRHLRATPNTRGSARLLCAEMPKKAGATTKGKSQSKEPERPLPPLGPVAVDPKGCVTIAIHAKPGSKQNAVTALLFHSSTIGGDSGGRF

SEQ ID NO: 17317 - protein, 374 aa, Homo sapiens
MWVTLPIDLNNKSAKQQEVQFKAYYLPKDDEYYQFCYVDEDGVVRGASIPFQFRPENEEDILVVTTQGEVEEIEQHNKELCKENQELKDSCISLQKQNSDMQAELQKKQEELETLQSINKKLELKVKEQKDYWETELLQLKEQNQKMSSENEKMGIRVDQLQAQLSTQEKEMEKLVQGDQDKTEQLEQLKKENDHLFLSLTEQRKDQKKLEQTVEQMKQNETTAMKKQQELMDENFDLSKRLSENEIICNALQRQKERLEGENDLLKRENSRLLSYMGLDFNSLPYQVPTSDEGGARQNPGLAYGNPYSGIQESSSPSPLSIKKCPICKADDICDHTLEQQQMQPLCFNCPICDKIFPATEKQIFEDHVFCHSL

SEQ ID NO: 17318 - protein, 670 aa, Homo sapiens
MATVVVEATEPEPSGSIANPAASTSPSLSHRFLDSKFYLLVVVGEIVTEEHLRRAIGNIELGIRSWDTNLIECNLDQELKLFVSRHSARFSPEVPGQKILHHRSDVLETVVLINPSDEAVSTEVRLMITDAARHKLLVLTGQCFENTGELILQSGSFSFQNFIEIFTDQEILKGGHNKCPVNLNFFKIGELLSTTHPANKASLTLFCPEEGDWKNSNLDRHNLQDFINIKLNSASILPEMEGLSEFTEYLSESVEVPSPFDILEPPTSGGFLKLSKPCCYIFPGGRGDSALFAVNGFNMLINGGSERKSCFWKLIRHLDRVDSILLTHIGDDNLPGINSMLQRKIAELEEEQSQGSTTNSDWMKNLISPDLGVVFLNVPENLKNPEPNIKMKRSIEEACFTLQYLNKLSMKPEPLFRSVGNTIDPVILFQKMGVGKLEMYVLNPVKSSKEMQYFMQQWTGTNKDKAEFILPNGQEVDLPISYLTSVSSLIVWHPANPAEKIIRVLFPGNSTQYNILEGLEKLKHLDFLKQPLATQKDLTGQVPTPVVKQTKLKQRADSRESLKPAAKPLPSKSVRKESKEETPEVTKVNHVEKPPKVESKEKVMVKKDKPIKTETKPSVTEKEVPSKEEPSPVKAEVAEKQATDVKPKAAKEKTVKKETKVKPEDKKEEK

SEQ ID NO: 17319 - protein, 234 aa, Homo sapiens
MTDSSKTDTLNSSSSGTTASSLEKIKVQANAPLIKPPAHPSAILTVLRKPNPPPPPPRLTPVKCEDPKRVVPTANPVKTNGTLLRNGGLPGGPNKIPNGDICCIPNSNLDKAPVQLLMHRPEKDRCPQAGPRERVRFNEKVQYHGYCPDCDTRYNIKNREVHLHSEPVHPPGKIPHQGPPLPPTPHLPPFPLENGGMGISHSNSFPPIRPATVPPPTAPKPQKTILRKSTTTTV

SEQ ID NO: 17320 - protein, 599 aa, Homo sapiens
MLKFQEAAKCVSGSTAISTYPKTLIARRYVLQQKLGSGSFGTVYLVSDKKAKRGEELKVLKEISVGELNPNETVQANLEAQLLSKLDHPAIVKFHASFVEQDNFCIITEYCEGRDLDDKIQEYKQAGKIFPENQIIEWFIQLLLGVDYMHERRILHRDLKSKNVFLKNNLLKIGDFGVSRLLMGSCDLATTLTGTPHYMSPEALKHQGYDTKSDIWSLACILYEMCCMNHAFAGSNFLSIVLKIVEGDTPSLPERYPKELNAIMESMLNKNPSLRPSAIEILKIPYLDEQLQNLMCRYSEMTLEDKNLDCQKEAAHIINAMQKRIHLQTLRALSEVQKMTPRERMRLRKLQAADEKARKLKKIVEEKYEENSKRMQELRSRNFQQLSVDVLHEKTHLKGMEEKEEQPEGRLSCSPQDEDEERWQGREEESDEPTLENLPESQPIPSMDLHELESIVEDATSDLGYHEIPEDPLVAEEYYADAFDSYCEESDEEEEEIALERPEKEIRNEGSQPAYRTNQQDSDIEALARCLENVLGCTSLDQPCRSWGQKYLKRSIITSREQGIRMLAKQRSASVWKKWCLKPATVLKWTSSCTLKSSC

SEQ ID NO: 17321 - protein, 1873 aa, Homo sapiens
MRTGWATPRRPAGLLMLLFWFFDLAEPSGRAANDPFTIVHGNTGKCIKPVYGWIVADDCDETEDKLWKWVSQHRLFHLHSQKCLGLDITKSVNELRMFSCDSSAMLWWKCEHHSLYGAARYRLALKDGHGTAISNASDVWKKGGSEESLCDQPYHEIYTRDGNSYGRPCEFPFLIDGTWHHDCILDEDHSGPWCATTLNYEYDRKWGICLKPENGCEDNWEKNEQFGSCYQFNTQTALSWKEAYVSCQNQGADLLSINSAAELTYLKEKEGIAKIFWIGLNQLYSARGWEWSDHKPLNFLNWDPDRPSAPTIGGSSCARMDAESGLWQSFSCEAQLPYVCRKPLNNTVELTDVWTYSDTRCDAGWLPNNGFCYLLVNESNSWDKAHAKCKAFSSDLISIHSLADVEVVVTKLHNEDIKEEVWIGLKNINIPTLFQWSDGTEVTLTYWDENEPNVPYNKTPNCVSYLGELGQWKVQSCEEKLKYVCKRKGEKLNDASSDKMCPPDEGWKRHGETCYKIYEDEVPFGTNCNLTITSRFEQEYLNDLMKKYDKSLRKYFWTGLRDVDSCGEYNWATVGGRRRAVTFSNWNFLEPASPGGCVAMSTGKSVGKWEVKDCRSFKALSICKKMSGPLGPEEASPKPDDPCPEGWQSFPASLSCYKVFHAERIVRKRNWEEAERFCQALGAHLSSFSHVDEIKEFLHFLTDQFSGQHWLWIGLNKRSPDLQGSWQWSDRTPVSTIIMPNEFQQDYDIRDCAAVKVFHRPWRRGWHFYDDREFIYLRPFACDTKLEWVCQIPKGRTPKTPDWYNPDRAGIHGPPLIIEGSEYWFVADLHLNYEEAVLYCASNHSFLATITSFVGLKAIKNKIANISGDGQKWWIRISEWPIDDHFTYSRYPWHRFPVTFGEECLYMSAKTWLIDLGKPTDCSTKLPFICEKYNVSSLEKYSPDSAAKVQCSEQWIPFQNKCFLKIKPVSLTFSQASDTCHSYGGTLPSVLSQIEQDFITSLLPDMEATLWIGLRWTAYEKINKWTDNRELTYSNFHPLLVSGRLRIPENFFEEESRYHCALILNLQKSPFTGTWNFTSCSERHFVSLCQKYSEVKSRQTLQNASETVKYLNNLYKIIPKTLTWHSAKRECLKSNMQLVSITDPYQQAFLSVQALLHNSSLWIGLFSQDDELNFGWSDGKRLHFSRWAETNGQLEDCVVLDTDGFWKTVDCNDNQPGAICYYSGNETEKEVKPVDSVKCPSPVLNTPWIPFQNCCYNFIITKNRHMATTQDEVHTKCQKLNPKSHILSIRDEKENNFVLEQLLYFNYMASWVMLGITYRNKSLMWFDKTPLSYTHWRAGRPTIKNEKFLAGLSTDGFWDIQTFKVIEEAVYFHQHSILACKIEMVDYKEEYNTTLPQFMPYEDGIYSVIQKKVTWYEALNMCSQSGGHLASVHNQNGQLFLEDIVKRDGFPLWVGLSSHDGSESSFEWSDGSTFDYIPWKGQTSPGNCVLLDPKGTWKHEKCNSVKDGAICYKPTKSKKLSRLTYSSRCPAAKENGSRWIQYKGHCYKSDQALHSFSEAKKLCSKHDHSATIVSIKDEDENKFVSRLMRENNNITMRVWLGLSQHSVDQSWSWLDGSEVTFVKWENKSKSGVGRCSMLIASNETWKKVECEHGFGRVVCKVPLDCPSSTWIQFQDSCYIFLQEAIKVESIEDVRNQCTDHGADMISIHNEEENAFILDTLKKQWKGPDDILLGMFYDTDDASFKWFDNSNMTFDKWTDQDDDEDLVDTCAFLHIKTGEWKKGNCEVSSVEGTLCKTAIPYKRKYLSDNHILISALVIASTVILTVLGAIIWFLYKKHSDSRFTTVFSTAPQSPYNEDCVLVVGEENEYPVQFD

SEQ ID NO: 17322 - protein, 901 aa, Homo sapiens
MEFSWGSGQESRRLLLLLLLLAAWEAGNGQLHYSVSEEAKHGTFVGRIAQDLGLELAELVPRLFRVASKGRGGLLEVNLQNGILFVNSRIDREELCRRSAECSIHLEVIVDRPLQVFHVDVEVRDINDNPPVFPATQKNLSIAESRPLDSRFPLEGASDADIGENALLTYRLSPNEYFSLEKPPDDELVKGLGLILRKSLDREEAPEIFLVLTATDGGKPELTGTVQLLITVLDANDNAPAFDRTIYKVRLLENVPNGTLVIKLNASDLDEGLNGDIVYSFSNDISPNVKSKFHIDPITGQIIVKGYIDFEESKSYEIIVEGIDKGQLPLSGHCRVIVEVEDNNDNVPDLEFKSLSLPIREDAPLGTVIALISVSDKDMGVNGLVTCSLTSHVPFKLVSTFKNYYSLVLDSALDRESVSAYELVVTARDGGSPSLWATASVSVEVADVNDNAPAFAQPEYTVFVKENNPPGCHIFTVSAWDADAQENALVSYSLVERRVGERALSSYVSVHAESGKVYALQPLDHEELELLQFQVTARDAGVPPLGSNVTLQVFVLDENDNAPALLAPRAGGTGGAVSELVPWSVGVGHVVAKVRAVDADSGYNAWLSYELQPGTGGARIPFRVGLYTGEISTTRALDETDAPRHRLLVLVKDHGEPALTATATVLVSLVESGQAPKASSRALVGAVGPDAALVDVNVYLIIAICAVSSLLVLTLLLYTALRCSALPTEGACAPGKPTLVCSSAVGSWSYSQQRRPRVCSGEGPPKTDLMAFSPSLPDSRDREDQLQTTEESFAKPRQPNPDWRYSASLRAGMHSSVHLEEAGILRAGPGGPDQQWPTVSSATPEPEAGEVSPPVGAGVNSNSWTFKYGPGNPKQSGPEPKKQTQVSFLLRRKGEASQPRQ

SEQ ID NO: 17323 - protein, 242 aa, Homo sapiens
MKETPLSNCERRFLLRAIEEKKRLDGRQTYDYRNIRISFGTDYGCCIVELGKTRVLGQVSCELVSPKLNRATEGILFFNLELSQMAAPAFEPGRQSDLLVKLNRLMERCLRNSKCIDTESLCVVAGEKVWQIRVDLHLLNHDGNIIDAASIAAIVALCHFRRPDVSVQGDEVTLYTPEERDPVPLSIHHMPICVSFAFFQQGTYLLVDPNEREERVMDGLLVIAMNKHREICTIQSSGSEMQ

SEQ ID NO: 17324 - protein, 516 aa, Homo sapiens
MSNDGRSRNRDRRYDEVPSDLPYQDTTIRTHPTLHDSERAVSADPLPPPPLPLQPPFGPDFYSSDTEEPAIAPDLKPVRRFVPDSWKNFFRGKKKDPEWDKPVSDIRYISDGVECSPPASPARPNHRSPLNSCKDPYGGSEGTFSSRKEADAVFPRDPYGSLDRHTQTVRTYSEKVEEYNLRYSYMKSWAGLLRILGVVELLLGAGVFACVTAYIHKDSEWYNLFGYSQPYGMGGVGGLGSMYGGYYYTGPKTPFVLVVAGLAWITTIIILVLGMSMYYRTILLDSNWWPLTEFGINVALFILYMAAAIVYVNDTNRGGLCYYPLFNTPVNAVFCRVEGGQIAAMIFLFVTMIVYLISALVCLKLWRHEAARRHREYMEQQEINEPSLSSKRKMCEMATSGDRQRDSEVNFKELRTAKMKPELLSGHIPPGHIPKPIVMPDYVAKYPVIQTDDERERYKAVFQDQFSEYKELSAEVQAVLRKFDELDAVMSRLPHHSESRQEHERISRIHEEFKKK

SEQ ID NO: 17325 - protein, 481 aa, Homo sapiens
MKRIFSLLEKTWLGAPIQFAWQKTSGNYLAVTGADYIVKIFDRHGQKRSEINLPGNCVAMDWDKDGDVLAVIAEKSSCIYLWDANTNKTSQLDNGMRDQMSFLLWSKVGSFLAVGTVKGNLLIYNHQTSRKIPVLGKHTKRITCGCWNAENLLALGGEDKMITVSNQEGDTIRQTQVRSEPSNMQFFLMKMDDRTSAAESMISVVLGKKTLFFLNLNEPDNPADLEFQQDFGNIVCYNWYGDGRIMIGFSCGHFVVISTHTGELGQEIFQARNHKDNLTSIAVSQTLNKVATCGDNCIKIQDLVDLKDMYVILNLDEENKGLGTLSWTDDGQLLALSTQRGSLHVFLTKLPILGDACSTRIAYLTSLLEVTVANPVEGELPITVSVDVEPNFVAVGLYHLAVGMNNRAWFYVLGENAVKKLKDMEYLGTVASICLHSDYAAALFEGKVQLHLKAKSWMLKKNVRLGFSQQWMISAVSYAMP

SEQ ID NO: 17326 - protein, 280 aa, Homo sapiens
MSEAGEEQPMETTGATENGHEAVPEGESPAGAGTGAAAGAGGATAAPPSGNQNGAEGDQINASKNEEDAGKMFVGGLSWDTSKKDLKDYFTKFGEVVDCTIKMDPNTGRSRGFGFILFKDAASVEKVLDQKEHRLDGRVIDPKKAMAMKKDPVKKIFVGGLNPEATEEKIREYFGEFGEIEAIELPMDPKLNKRRGFVFITFKEEEPVKKVLEKKFHTVSGSKCEIKVAQPKEVYQQQQYGSGGRGNRNRGNRGSGGGQGSTNYGKSQRRGGHQNNYKPY

SEQ ID NO: 17327 - protein, 501 aa, Homo sapiens
MIPMFTVTLEDSGTLWKSLHSSSESEMTTLPPLPMTRPKLTALARQKLPCSSRKIPRSQLIKEKDDIDHYLEVNFKGLSKEEVAAYRNSYKKNICVDMLRDGYHKSFTELFALMERWDALREAARVRSLFWLQKPLEEQPDKLDYLYHYLTRAEDAERKESFEDVHNNLYALACYFNNSEDKWVRNHFYERCFKIAQLIKIDCGKKEAEAHMHMGLLYEEDGQLLEAAEHYEAFHQLTQGRIWKDETGRSLNLLACESLLRTYRLLSDKMLENKEYKQAIKILIKASEIAKEGSDKKMEAEASYYLGLAHLAAEEYETALTVLDTYCKISTDLDDDLSLGRGYEAIAKVLQSQGEMTEAIKYLKKFVKIARNNFQSLDLVRASTMLGDIYNEKGYYNKASECFQQAFDTTVELMSMPLMDETKVHYGIAKAHQMMLTVNNYIESADLTSLNYLLSWKESRGNIEPDPVTEEFRGSTVEAVSQNSERLEELSRFPGDQKNET

SEQ ID NO: 17328 - protein, 867 aa, Homo sapiens
METKGYHSLPEGLDMERRWGQVSQAVERSSLGPTERTDENNYMEIVNVSCVSGAIPNNSTQGSSKEKQELLPCLQQDNNRPGILTSDIKTELESKELSATVAESMGLYMDSVRDADYSYEQQNQQGSMSPAKIYQNVEQLVKFYKGNGHRPSTLSCVNTPLRSFMSDSGSSVNGGVMRAVVKSPIMCHEKSPSVCSPLNMTSSVCSPAGINSVSSTTASFGSFPVHSPITQGTPLTCSPNVENRGSRSHSPAHASNVGSPLSSPLSSMKSSISSPPSHCSVKSPVSSPNNVTLRSSVSSPANINNSRCSVSSPSNTNNRSTLSSPAASTVGSICSPVNNAFSYTASGTSAGSSTLRDVVPSPDTQEKGAQEVPFPKTEEVESAISNGVTGQLNIVQYIKPEPDGAFSSSCLGGNSKINSDSSFSVPIKQESTKHSCSGTSFKGNPTVNPFPFMDGSYFSFMDDKDYYSLSGILGPPVPGFDGNCEGSGFPVGIKQEPDDGSYYPEASIPSSAIVGVNSGGQSFHYRIGAQGTISLSRSARDQSFQHLSSFPPVNTLVESWKSHGDLSSRRSDGYPVLEYIPENVSSSTLRSVSTGSSRPSKICLVCGDEASGCHYGVVTCGSCKVFFKRAVEGQHNYLCAGRNDCIIDKIRRKNCPACRLQKCLQAGMNLGGFKNLPLEDQITLIQYSWMCLSSFALSWRSYKHTNSQFLYFAPDLVFNEEKMHQSAMYELCQGMHQISLQFVRLQLTFEEYTIMKVLLLLSTIPKDGLKSQAAFEEMRTNYIKELRKMVTKCPNNSGQSWQRFYQLTKLLDSMHDLVSDLLEFCFYTFRESHALKVEFPAMLVEIISDQLPKVESGNAKPLYFHRK

SEQ ID NO: 17329 - protein, 257 aa, Homo sapiens
SRSGLYRSPSMPENLNRPRLKQVEKFKDNTIPDKVKKKYFSGQGKLRKGLCLKKTVSLCDITITQMLEEDSNQGHLIGDFSKVCALPTVSGKHQDLKYVNPETVSRFLEMVAALLSGKFQGLIEKFYVIDCRYPYEYLGGHIQGALNLYSQEELFNFFLKKPIVPLDTQKRIIIVFHCEFSSERGPRMCRCLREEDRSLNQYPALYYPELYILKGGYRDFFPEYMELCEPQSYCPMHHQDHKTELLRCRSQSKVQEG

SEQ ID NO: 17330 - protein, 727 aa, Homo sapiens
MEDSYKDRTSLMKGAKDIAREVKKQTVKKVNQAVDRAQDEYTQRSYSRFQDEEDDDDYYPAGETYNGEANDDEGSSEATEGHDEDDEIYEGEYQGIPSMNQAKDSIVSVGQPKGDEYKDRRELESERRADEEELAQQYELIIQECGHGRFQWALFFVLGMALMADGVEVFVVGFVLPSAETDLCIPNSGSGWLGSIVYLGMMVGAFFWGGLADKVGRKQSLLICMSVNGFFAFLSSFVQGYGFFLFCRLLSGFGIGGAIPTVFSYFAEVLAREKRGEHLSWLCMFWMIGGIYASAMAWAIIPHYGWSFSMGSAYQFHSWRVFVIVCALPCVSSVVALTFMPESPRFLLEVGKHDEAWMILKLIHDTNMRARGQPEKVFTVNKIKTPKQIDELIEIESDTGTWYRRCFVRIRTELYGIWLTFMRCFNYPVRDNTIKLTIVWFTLSFGYYGLSVWFPDVIKPLQSDEYALLTRNVERDKYANFTINFTMENQIHTGMEYDNGRFIGVKFKSVTFKDSVFKSCTFEDVTSVNTYFKNCTFIDTVFDNTDFEPYKFIDSEFKNCSFFHNKTGCQITFDDDYSAYWIYFVNFLGTLAVLPGNIVSALLMDRIGRLTMLGGSMVLSGISCFFLWFGTSESMMIGMLCLYNGLTISAWNSLDVVTVELYPTDRRATGFGFLNALCKAAAVLGNLIFGSLVSITKSIPILLASTVLVCGGLVGLCLPDTRTQVLM

SEQ ID NO: 17331 - protein, 1163 aa, Homo sapiens
MQFETLRQVCNSVLSHFHGVFSSPPNILQNELFGQTLNNARKRSPSVSRDQNRRYDQREEREEYSQYATSDTAMPRSPSDYADRRSQHEPQFYEDSDHLSYRDSNRRSHRHSKEYIVDDEDVESRDEYERQRREEEYQSRYRSDPNLARYPVKPQPYEEQMRIHAEVSRARHERRHSDVSLANADLEDSRISMLRMDRPSRQRSISERRAAMENQRSYSMERTREAQGPSSYAQRTTNHSPPTPRRSPLPIDRPDLRRTDSLRKQHHLDPSSAVRKTKREKMETMLRNDSLSSDQSESVRPPPPKPHKSKKGGKMRQISLSSSEEELASTPEYTSCDDVEIESESVSEKGDMDYNWLDHTSWHSSEASPMSLHPVTWQPSKDGDRLIGRILLNKRLKDGSVPRDSGAMLGLKVVGGKMTESGRLCAFITKVKKGSLADTVGHLRPGDEVLEWNGRLLQGATFEEVYNIILESKPEPQVELVVSRPIGDIPRIPDSTHAQLESSSSSFESQKMDRPSISVTSPMSPGMLRDVPQFLSGQLSIKLWFDKVGHQLIVTILGAKDLPSREDGRPRNPYVKIYFLPDRSDKNKRRTKTVKKTLEPKWNQTFIYSPVHRREFRERMLEITLWDQARVREEESEFLGEILIELETALLDDEPHWYKLQTHDVSSLPLPHPSPYMPRRQLHGESPTRRLQRSKRISDSEVSDYDCDDGIGVVSDYRHDGRDLQSSTLSVPEQVMSSNHCSPSGSPHRVDVIGRTRSWSPSVPPPQSRNVEQGLRGTRTMTGHYNTISRMDRHRVMDDHYSPDRDSHFLTLPRSRYSQTIDHHHRDGRDCEAADRQPYHRSRSTEQRPLLERTTTRSRSTERPDTNLMRSMPSLMTGRSAPPSPALSRSHPRTGSVQTSPSSTPVAGRRGRQLPQLPPKGTLDRKAGGKKLRSTVQRSTETGLAVEMRNWMTRQASRESTDGSMNSYSSEGNLIFPGVRLASDSQFSDFLDGLGPAQLVGRQTLATPAMGDIQVGMMDKKGQLEVEIIRARGLVVKPGSKTLPAPYVKVYLLDNGVCIAKKKTKVARKTLEPLYQQLLSFEESPQGKVLQIIVWGDYGRMDHKSFMGVAQILLDELELSNMVIGWFKLFPPSSLVDPTLAPLTRRASQSSLESSTGPSYSRS

SEQ ID NO: 17332 - protein, 425 aa, Homo sapiens
MKETRGYGGDAPFCTRLNHSYTGMWAPERSAEARGNLTRPPGSGEDCGSVSVAFPITMLLTGFVGNALAMLLVSRSYRRRESKRKKSFLLCIGWLALTDLVGQLLTTPVVIVVYLSKQRWEHIDPSGRLCTFFGLTMTVFGLSSLFIASAMAVERALAIRAPHWYASHMKTRATRAVLLGVWLAVLAFALLPVLGVGQYTVQWPGTWCFISTGRGGNGTSSSHNWGNLFFASAFAFLGLLALTVTFSCNLATIKALVSRCRAKATASQSSAQWGRITTETAIQLMGIMCVLSVCWSPLLIMMLKMIFNQTSVEHCKTHTEKQKECNFFLIAVRLASLNQILDPWVYLLLRKILLRKFCQMRKRRLREQAPLLPTSTVIDPSRFCAQPFRWFLDLSFPAMSSSHPQLPLTLASFKLLREPCSVQLS

SEQ ID NO: 17333 - protein, 372 aa, Homo sapiens
MSSRGGKKKSTKTSRSAKAGVIFPVGRMLRYIKKGHPKYRIGVGAPVYMAAVLEYLTAEILELAGNAARDNKKGRVTPRHILLAVANDEELNQLLKGVTIASGGVLPNIHPELLAKKRGSKGKLEAIITPPPAKKAKSPSQKKPVSKKAGGKKGARKSKKKQGEVSKAASADSTTEGTPADGFTVLSTKSLFLGQKLNLIHSEISNLAGFEVEAIINPTNADIDLKDDLGNTLEKKGGKEFVEAVLELRKKNGPLEVAGAAVSAGHGLPAKFVIHCNSPVWGADKCEELLEKTVKNCLALADDKKLKSIAFPSIGSGRNGFPKQTAAQLILKAISSYFVSTMSSSIKTVYFVLFDSESIGIYVQEMAKLDAN

SEQ ID NO: 17334 - protein, 210 aa, Homo sapiens
MPPKNKEKGKKSGAQKKKKNWGADVVAESRHRLVVLEKELLRDHLALRRDEARRAKASEDQLRQRLQGVEAELEGARSEGKAIYAEMSRQCHALQEDMQTRSKQLEEEVKGLRGQLEACQREAAAAREEAEQALGERDQALAQLRAHMADMEAKYEEILHDSLDRLLAKLRAIKQQWDGAALRLHARHKEQQRQFGLTPPGSLRPPAPSL

SEQ ID NO: 17335 - protein, 1167 aa, Homo sapiens
MVLGTVLLPPNSYGRDQDTSLCCLCTEASESALPDLTDHFASCVEDGFEGDKTGGSSPEALHRPYGCDVEPQALNEAIRWSSKENLLGATESDPNLFVALYDFVASGDNTLSITKGEKLRVLGYNQNGEWSEVRSKNGQGWVPSNYITPVNSLEKHSWYHGPVSRSAAEYLLSSLINGSFLVRESESSPGQLSISLRYEGRVYHYRINTTADGKVYVTAESRFSTLAELVHHHSTVADGLVTTLHYPAPKCNKPTVYGVSPIHDKWEMERTDITMKHKLGGGQYGEVYVGVWKKYSLTVAVKTLKEDTMEVEEFLKEAAVMKEIKHPNLVQLLGVCTLEPPFYIVTEYMPYGNLLDYLRECNREEVTAVVLLYMATQISSAMEYLEKKNFIHRDLAARNCLVGENHVVKVADFGLSRLMTGDTYTAHAGAKFPIKWTAPESLAYNTFSIKSDVWAFGVLLWEIATYGMSPYPGIDLSQVYDLLEKGYRMEQPEGCPPKVYELMRACWKWSPADRPSFAETHQAFETMFHDSSISEEVAEELGRAASSSSVVPYLPRLPILPSKTRTLKKQVENKENIEGAQDATENSASSLAPGFIRGAQASSGSPALPRKQRDKSPSSLLEDAKETCFTRDRKGGFFSSFMKKRNAPTPPKRSSSFREMENQPHKKYELTGNFSSVASLQHADGFSFTPAQQEANLVPPKCYGGSFAQRNLCNDDGGGGGGSGTAGGGWSGITGFFTPRLIKKTLGLRAGKPTASDDTSKPFPRSNSTSSMSSGLPEQDRMAMTLPRNCQRSKLQLERTVSTSSQPEENVDRANDMLPKKSEESAAPSRERPKAKLLPRGATALPLRTPSGDLAITEKDPPGVGVAGVAAAPKGKEKNGGARLGMAGVPEDGEQPGWPSPAKAAPVLPTTHNHKVPVLISPTLKHTPADVQLIGTDSQGNKFKLLSEHQVTSSGDKDRPRRVKPKCAPPPPPVMRLLQHPSICSDPTEEPTALTAGQSTSETQEGGKKAALGAVPISGKAGRPVMPPPQVPLPTSSISPAKMANGTAGTKVALRKTKQAAEKISADKISKEALLECADLLSSALTEPVPNSQLVDTGHQLLDYCSGYVDCIPQTRNKFAFREAVSKLELSLQELQVSSAAAGVPGTNPVLNNLLSCVQEISDVVQR

SEQ ID NO: 17336 - protein, 465 aa, Homo sapiens
MGRKKIQITRIMDERNRQVTFTKRKFGLMKKAYELSVLCDCEIALIIFNSTNKLFQYASTDMDKVLLKYTEYNEPHESRTNSDIVETLRKKGLNGCDSPDPDADDSVGHSPESEDKYRKINEDIDLMISRQRLCAVPPPNFEMPVSIPVSSHNSLVYSNPVSSLGNPNLLPLAHPSLQRNSMSPGVTHRPPSAGNTGGLMGGDLTSGAGTSAGNGYGNPRNSPGLLVSPGNLNKNMQAKSPPPMNLGMNNRKPDLRVLIPPGSKNTMPSVNQRINNSQSAQSLATPVVSVATPTLPGQGMGGYPSAISTTYGTEYSLSSADLSSLSGFNTASALHLGSVTGWQQQHLHNMPPSALSQLGACTSTHLSQSSNLSLPSTQSLNIKSEPVSPPRDRTTTPSRYPQHTRHEAGRSPVDSLSSCSSSYDGSDREDHRNEFHSPIGLTRPSPDERESPSVKRMRLSEGWAT

SEQ ID NO: 17337 - protein, 701 aa, Homo sapiens
MGPPSSSGFYVSRAVALLLAGLVAALLLALAVLAALYGHCERVPPSELPGLRDLEAESSPPLRQKPTPTPKPSSARELAVTTTPSNWRPPGPWDQLRLPPWLVPLHYDLELWPQLRPDELPAGSLPFTGRVNITVRCTVATSRLLLHSLFQDCERAEVRGPLSPGTGNATVGRVPVDDVWFALDTEYMVLELSEPLKPGSSYELQLSFSGLVKEDLREGLFLNVYTDQGERRALLASQLEPTFARYVFPCFDEPALKATFNITMIHHPSYVALSNMPKLGQSEKEDVNGSKWTVTTFSTTPHMPTYLVAFVICDYDHVNRTERGKEIRIWARKDAIANGSADFALNITGPIFSFLEDLFNISYSLPKTDIIALPSFDNHAMENWGLMIFDESGLLLEPKDQLTEKKTLISYVVSHEIGHQWFGNLVTMNWWNNIWLNEGFASYFEFEVINYFNPKLPRNEIFFSNILHNILREDHALVTRAVAMKVENFKTSEIQELFDIFTYSKGASMARMLSCFLNEHLFVSALKSYLKTFSYSNAEQDDLWRHFQMAIDDQSTVILPATIKNIMDSWTHQSGFPVITLNVSTGVMKQEPFYLENIKNRTLLTSNDTWIVPILWIKNGTTQPLVWLDQSSKVFPEMQVSDSDHDWVILNLNMTGYYRVNYDKLGWKKLNQQLEKDPKAIPVIHRLQLIDDAFSLSKGTY

SEQ ID NO: 17338 - protein, 672 aa, Homo sapiens
MDLILNRMDYLQVGVTSQKTMKLIPASRHRATQKVVIGDHDGVVMCFGMKKGEAAAVFKTLPGPKIARLELGGVINTPQEKIFIAAASEIRGFTKRGKQFLSFETNLTESIKAMHISGSDLFLSASYIYNHYCDCKDQHYYLSGDKINDVICLPVERLSRITPVLACQDRVLRVLQGSDVMYAVEVPGPPTVLALHNGNGGDSGEDLLFGTSDGKLALIQITTSKPVRKWEIQNEKKRGGILCIDSFDIVGDGVKDLLVGRDDGMVEVYSFDNANEPVLRFDQMLSESVTSIQGGCVGKDSYDEIVVSTYSGWVTGLTTEPIHKESGPGEELKINQEMQNKISSLRNELEHLQYKVLQERENYQQSSQSSKAKSAVPSFGINDKFTLNKDDASYSLILEVQTAIDNVLIQSDVPIDLLDVDKNSAVVSFSSCDSESNDNFLLATYRCQADTTRLELKIRSIEGQYGTLQAYVTPRIQPKTCQVRQYHIKPLSLHQRTHFIDHDRPMNTLTLTGQFSFAEVHSWVVFCLPEVPEKPPAGECVTFYFQNTFLDTQLESTYRKGEGVFKSDNISTISILKDVLSKEATKRKINLNISYEINEVSVKHTLKLIHPKLEYQLLLAKKVQLIDALKELQIHEGNTNFLIPEYHCILEEADHLQEEYKKQPAHLERLYG

SEQ ID NO: 17339 - protein, 491 aa, Homo sapiens
MGANNGKQYGSEGKGSSSISSDVSSSTDHTPTKAQKNVATSEDSDLSMRTLSTPSPALICPPNLPGFQNGRGSSTSSSSITGETVAMVHSPPPTRLTHPLIRLASRPQKEQASIDRLPDHSMVQIFSFLPTNQLCRCARVCRRWYNLAWDPRLWRTIRLTGETINVDRALKVLTRRLCQDTPNVCLMLETVTVSGCRRLTDRGLYTIAQCCPELRRLEVSGCYNISNEAVFDVVSLCPNLEHLDVSGCSKVTCISLTREASIKLSPLHGKQISIRYLDMTDCFVLEDEGLHTIAAHCTQLTHLYLRRCVRLTDEGLRYLVIYCASIKELSVSDCRFVSDFGLREIAKLESRLRYLSIAHCGRVTDVGIRYVAKYCSKLRYLNARGCEGITDHGVEYLAKNCTKLKSLDIGKCPLVSDTGLECLALNCFNLKRLSLKSCESITGQGLQIVAANCFDLQTLNVQDCEVSVEALRFVKRHCKRCVIEHTNPAFF

SEQ ID NO: 17340 - protein, 694 aa, Homo sapiens
MEGPHLPNKKKHKKQAVKTEPEKKSQSTKLSVVHEKKSQEGKPKEHTEPKSLPKQASDTGSNDAHNKKAVSRSAEQQPSEKSTEPKTKPQDMISAGGESVAGITAISGKPGDKKKEKKSLTPAVPVESKPDKPSGKSGMDAALDDLIDTLGGPEETEEENTTYTGPEVSDPMSSTYIEELGKREVTIPPKYRELLAKKEGITGPPADSSKPIGPDDAIDALSSDFTCGSPTAAGKKTEKEESTEVLKAQSAGTVRSAAPPQEKKRKVEKDTMSDQALEALSASLGTRQAEPELDLRSIKEVDEAKAKEEKLEKCGEDDETIPSEYRLKPATDKDGKPLLPEPEEKPKPRSESELIDELSEDFDRSECKEKPSKPTEKTEESKAAAPAPVSEAVCRTSMCSIQSAPPEPATLKGTVPDDAVEALADSLGKKEADPEDGKPVMDKVKEKAKEEDREKLGEKEETIPPDYRLEEVKDKDGKPLLPKESKEQLPPMSEDFLLDALSEDFSGPQNASSLKFEDAKLAAAISEVVSQTPASTTQAGAPPRDTSQSDKDLDDALDKLSDSLGQRQPDPDENKPMEDKVKEKAKAEHRDKLGERDDTIPPEYRHLLDDNGQDKPVKPPTKKSEDSKKPADDQDPIDALSGDLDSCPSTTETSQNTAKDKCKKAASSSKAPKNGGKAKDSAKTTEETSKPKDD

SEQ ID NO: 17341 - protein, 665 aa, Homo sapiens
GEVLQIAANQCCPECVLRTPGSCHHEKKIHEHGTEWASSPCSVCSCNHGEVRCTPQPCPPLSCGHQELAFIPEGSCCPVCVGLGKPCSYEGHVFQDGEDWRLSRCAKCLCRNGVAQCFTAQCQPLFCNQDETVVRVPGKCCPQCSARSCSAAGQVYEHGEQWSENACTTCICDRGEVRCHKQACLPLRCGKGQSRARRHGQCCEECVSPAGSCSYDGVVRYQDEMWKGSACEFCMCDHGQVTCQTGECAKVECARDEELIHLDGKCCPECISRNGYCVYEETGEFMSSNASEVKRIPEGEKWEDGPCKVCECRGAQVTCYEPSCPPCPVGTLALEVKGQCCPDCTSVHCHPDCLTCSQSPDHCDLCQDPTKLLQNGWCVHSCGLGFYQAGSLCLACQPQCSTCTSGLECSSCQPPLLMRHGQCVPTCGDGFYQDRHSCAVCHESCAGCWGPTEKHCLACRDPLHVLRDGGCESSCGKGFYNRQGTCSACDQSCDSCGPSSPRCLTCTEKTVLHDGKCMSECPGGYYADATGRCKVCHNSCASCSGPTPSHCTACSPPKALRQGHCLPRCGEGFYSDHGVCKACHSSCLACMGPAPSHCTGCKKPEEGLQVEQLSDVGIPSGECLAQCRAHFYLESTGICEGQNLDFCQNLEVISAVCLGISSTEN

SEQ ID NO: 17342 - protein, 440 aa, Homo sapiens
MREADTLRPPQLMEVSADIISTVEFNHTGELLATGDKGGRVVIFQREPESKNAPHSQGEYDVYSTFQSHEPEFDYLKSLEIEEKINKIKWLPQQNAAHSLLSTNDKTIKLWKITERDKRPEGYNLKDEEGKLKDLSTVTSLQVPVLKPMDLMVEVSPRRIFANGHTYHINSISVNSDCETYMSADDLRINLWHLAITDRSFNIVDIKPANMEDLTEVITASEFHPHHCNLFVYSSSKGSLRLCDMRAAALCDKHSKLFEEPEDPSNRSFFSEIISSVSDVKFSHSGRYMLTRDYLTVKVWDLNMEARPIETYQVHDYLRSKLCSLYENDCIFDKFECAWNGSDSVIMTGAYNNFFRMFDRNTKRDVTLEASRESSKPRAVLKPRRVCVGGKRRRDDISVDSLDFTKKILHTAWHPAENIIAIAATNNLYIFQDKVNSDMH

SEQ ID NO: 17343 - protein, 1159 aa, Homo sapiens
MEPITFTARKHLLSNEVSVDFGLQLVGSLPVHSLTTMPMLPWVVAEVRRLSRQSTRKEPVTKQVRLCVSPSGLRCEPEPGRSQQWDPLIYSSIFECKPQRVHKLIHNSHDPSYFACLIKEDAVHRQSICYVFKADDQTKVPEIISSIRQAGKIARQEELHCPSEFDDTFSKKFEVLFCGRVTVAHKKAPPALIDECIEKFNHVSGSRGSESPRPNPPHAAPTGSQEPVRRPMRKSFSQPGLRSLAFRKELQDGGLRSSGFFSSFEESDIENHLISGHNIVQPTDIEENRTMLFTIGQSEVYLISPDTKKIALEKNFKEISFCSQGIRHVDHFGFICRESSGGGGFHFVCYVFQCTNEALVDEIMMTLKQAFTVAAVQQTAKAPAQLCEGCPLQSLHKLCERIEGMNSSKTKLELQKHLTTLTNQEQATIFEEVQKLRPRNEQRENELIISFLRCLYEEKQKEHIHIGEMKQTSQMAAENIGSELPPSATRFRLDMLKNKAKRSLTESLESILSRGNKARGLQEHSISVDLDSSLSSTLSNTSKEPSVCEKEALPISESSFKLLGSSEDLSSDSESHLPEEPAPLSPQQAFRRRANTLSHFPIECQEPPQPARGSPGVSQRKLMRYHSVSTETPHERNVDPSPVGESKHRPGQSSAPAPPPRLNPSASSPNFFKYLKHNSSGEQSGNAVPKSISYRNALRKKLHSSSSVPNFLKFLAPVDENNTSDFMNTKRDFESKANHLGDSGGTPVKTRRHSWRQQIFLRVATPQKACDSSSRYEDYSELGELPPRSPLEPVCEDGPFGPPPEEKKRTSRELRELWQKAILQQILLLRMEKENQKLQASENDLLNKRLKLDYEEITPCLKEVTTVWEKMLSTPGRSKIKFDMEKMHSAVGQGVPRHHRGEIWKFLAEQFHLKHQFPSKQQPKDVPYKELLKQLTSQQHAILIDLGRTFPTHPYFSAQLGAGQLSLYNILKAYSLLDQEVGYCQGLSFVAGILLLHMSEEEAFKMLKFLMFDMGLRKQYRPDMIILQMEKTINQVFEMDIAKQLQAYEVEYHVLQEELIDSSPLSDNQRMDKLEKTNSSLRKQNLDLLEQLQVANGRIQSLEATIEKLLSSESKLKQAMLTLELERSALLQTVEELRRRSAEPSDREPECTQPEPTGD

SEQ ID NO: 17344 - protein, 238 aa, Homo sapiens
MLLWVQQALLALLLPTLLAQGEARRSRNTTRPALLRLSDYLLTNYRKGVRPVRDWRKPTTVSIDVIVYAILNVDEKNQVLTTYIWYRQYWTDEFLQWNPEDFDNITKLSIPTDSIWVPDILINEFVDVGKSPNIPYVYIRHQGEVQNYKPLQVVTACSLDIYNFPFDVQNCSLTFTSWLHTSGHPPAAPLLCGQPATAQHLPHGHGHRGLLPAPQQWREGLFQDYTPPGLLGLPDHRF

SEQ ID NO: 17345 - protein, 1288 aa, Homo sapiens
MGGCFCIPRERSLTRGPGKETPSKDPTVSSECIASSEYKEKCFLPQNINPDLTLSFCVKSRSRRCVNGPLQEAARRRLWALENEDQEVRMLFKDLSARLVSIQSQRAQFLITFKTMEEIWKFSTYLNLGYVSMCLEHLLFDHKYWLNCILVEDTEIQVSVDDKHLETIYLGLLIQEGHFFCRALCSVTPPAEKEGECLTLCKNELISVKMAEAGSELEGVSLVTGQRGLVLVSALEPLPLPFHQWFLKNYPGSCGLSRKRDWTGSYQIGRGRCKALTGYEPGEKDELNFYQGESIEIIGFVIPGLQWFIGKSTSSGQVGFVPTRNIDPDSYSPMSRNSAFLSDEERCSLLALGSDKQTECSSFLHTLARTDITSVYRLSGFESIQNPPNDLSASQPEGFKEVRPGRAWEEHQAVGSRQSSSSEDSSLEEELLSATSDSYRLPEPDDLDDPELLMDLSTGQEEEAENFAPILAFLDHEGYADHFKSLYDFSFSFLTSSFYSFSEEDEFVAYLEASRKWAKKSHMTWAHARLCFLLGRLSIRKVKLSQARVYFEEAIHILNGAFEDLSLVATLYINLAAIYLKQRLRHKGSALLEKAGALLACLPDRESSAKHELDVVAYVLRQGIVVGSSPLEARACFLAIRLLLSLGRHEEVLPFAERLQLLSGHPPASEAVASVLSFLYDKKYLPHLAVASVQQHGIQSAQGMSLPIWQVHLVLQNTTKLLGFPSPGWGEVSALACPMLRQALAACEELADRSTQRALCLILSKVYLEHRSPDGAIHYLSQALVLGQLLGEQESFESSLCLAWAYLLASQAKKALDVLEPLLCSLKETESLTQRGVIYNLLGLALQGEGRVNRAAKSYLRALNRAQEVGDVHNQAVAMANLGHLSLKSWAQHPARNYLLQAVRLYCELQASKETDMELVQVFLWLAQVLVSGHQLTHGLLCYEMALLFGLRHRHLKSQLQATKSLCHFYSSVSPNPEACITYHEHWLALAQQLRDREMEGRLLESLGQLYRNLNTARSLRRSLTCIKESLRIFIDLGETDKAAEAWLGAGRLHYLMQEDELVELCLQAAIQTALKSEEPLLALKLYEEAGDVFFNGTRHRHHAVEYYRAGAVPLARRLKAVRTELRIFNKLTELQISLEGYEKALEFATLAARLSTVTGDQRQELVAFHRLATVYYSLHMYEMAEDCYLKTLSLCPPWLQSPKEALYYAKVYYRLGRLTFCQLKDAHDATEYFLLALAAAVLLGDEELQDTIRSRLDNICQSPLWHSRPSGCSSERARWLSGGGLAL

SEQ ID NO: 17346 - protein, 504 aa, Homo sapiens
MIMNKMKNFKRRFSLSVPRTETIEESLAEFTEQFNQLHNRRNENLQLGPLGRDPPQECSTFSPTDSGEEPGQLSPGVQFQRRQNQRRFSMEVRASGALPRQVAGCTHKGVHRRAAALQPDFDVSKRLSLPMDIRLPQEFLQKLQMESPDLPKPLSRMSRRASLSDIGFGKLETYVKLDKLGEGTYATVFKGRSKLTENLVALKEIRLEHEEGAPCTAIREVSLLKNLKHANIVTLHDLIHTDRSLTLVFEYLDSDLKQYLDHCGNLMSMHNVKIFMFQLLRGLAYCHHRKILHRDLKPQNLLINERGELKLADFGLARAKSVPTKTYSNEVVTLWYRPPDVLLGSTEYSTPIDMWGVGCIHYEMATGRPLFPGSTVKEELHLIFRLLGTPTEETWPGVTAFSEFRTYSFPCYLPQPLINHAPRLDTDGIHLLSSLLLYESKSRMSAEAALSHSYFRSLGERVHQLEDTASIFSLKEIQLQKDPGYRGLAFQQPGRGKNRRQSIF

SEQ ID NO: 17347 - protein, 422 aa, Homo sapiens
MTFLIVTVAWAAHTRLFQVVGKTDDTLALLNLACMMTITFLPYTFSLMVTFPDVPLGIFLFCVCVIAIGVVQALIVGYAFHFPHLLSPQIQRSAHRALYRRHVLGIVLQGPALCFAAAIFSLFFVPLSYLLMVTVILLPYVSKVTGWCRDRLLGHREPSAHPVEVFSFDLHEPLSKERVEAFSDGVYAIVATLLILDICEDNVPDPKDVKERFSGSLVAALSATGPRFLAYFGSFATVGLLWFAHHSLFLHVRKATRAMGLLNTLSLAFVGGLPLAYQQTSAFARQPRDELERVRVSCTIIFLASIFQLAMWTTALLHQAETLQPSVWFGGREHVLMFAKLALYPCASLLAFASTCLLSRFSVGIFHLMQIAVPCAFLLLRLLVGLALATLRVLRGLARPEHPPPAPTGQDDPQSQLLPAPC

SEQ ID NO: 17348 - protein, 632 aa, Homo sapiens
MSSKNSESGTATTGTSLSAPDITVRNVVNIARPSSQQSSWTSANNDVIVTGIYSPASSSSRQGTNKHTDTQITEAHKIPIQKTATKNDTEFQLHIPVQRQVAHCKNASLLLGEKTIILSRQTSVLNAGNSVFNHAKKNYGNSSVQASEMTVPQKPSVCHRPCKIEPVGIQRSYKPEHTGPALHNLCGQKPTIRDPYCRTQNLEIREVFSLAVSDYPQRILGGNAPQKPSSAEGNCLSIAMETGDAEDEYAREEELASMRAQIPSYSRFYESGSSLRAENQSTTLPGPGRNMPNSQMVNIRDMSDNVLYQNRNYHLTPRTSLHTASSTMYSNTNPLRSNFSPHFASSNQLRLSQNQNNYQISGNLTVPWITGCSRKRALQDRTQFSDRDLATLKKYWDNGMTSLGSVCREKIEAVATELNVDCEIVRTWIGNRRRKYRLMGIEVPPPRGGPADFSEQPESGSLSALTPGEEAGPEVGEDNDRNDEVSICLSEGSSQEEPNEVVPNDARAHKEEDHHAVTTDNVKIEIIDDEESDMISNSEVEQVNSFLDYKNEEVKFIENELEIQKQKYFKLQTFVRSLILAMKADDKEQQQALLSDLPPELEEMDFNHASLEPDDTSFSVSSLSEKNVSESL

SEQ ID NO: 17349 - protein, 824 aa, Homo sapiens
MDERRRQNIAYEYLCHLEEAKRWMEVCLVEELPPTTELEEGLRNGVYLAKLAKFFAPKMVSEKKIYDVEQTRYKKSGLHFRHTDNTVQWLRAMESIGLPKIFYPETTDVYDRKNIPRMIYCIHALSLYLFKLGIAPQIQDLLGKVDFTEEEISNMRKELEKYGIQMPSFSKIGGILANELSVDEAALHAAVIAINEAVEKGIAEQTVVTLRNPNAVLTLVDDNLAPEYQKELWDAKKKKEENARLKNSCISEEERDAYEELLTQAEIQGNINKVNRQAAVDHINAVIPEGDPENTLLALKKPEAQLPAVYPFAAAMYQNELFNLQKQNTMNYLAHEELLIAVEMLSAVALLNQALESNDLVSVQNQLRSPAIGLNNLDKAYVERYANTLLSVKLEVLSQGQDNLSWNEIQNCIDMVNAQIQEENDRVVAVGYINEAIDEGNPLRTLETLLLPTANISDVDPAHAQHYQDVLYHAKSQKLGDSESVSKVLWLDEIQQAVDDANVDKDRAKQWVTLVVDVNQCLEGKKSSDILSVLKSSTSNANDIIPECADKYYDALVKAKELKSERVSSDGSWLKLNLHKKYDYYYNTDSKESSWVTPESCLYKESWLTGKEIEDIIEEVTVGYIRENIWSASEELLLRFQATSSGPILREEFEARKSFLHEQEENVVKIQAFWKGYKQRKEYMHRRQTFIDNTDSIVKIQSWFRMATARKSYLSRLQYFRDHNNEIVKIQSLLRANKARDDYKTLVGSENPPLTVIRKFVYLLDQSDLDFQEELEVARLREEVVTKIRANQQLEKDLNLMDIKIGLLVKNRITLEDVISHSKK

SEQ ID NO: 17350 - protein, 627 aa, Homo sapiens
MLDLSYNNLNVVGNDSFAWLPQLEYFFLEYNNIQHLFSHSLHGLFNVRYLNLKRSFTKQSISLASLPKIDDFSFQWLKCLEHLNMEDNDIPGIKSNMFTGLINLKYLSLSNSFTSLRTLTNETFVSLAHSPLHILNLTKNKISKIESDAFSWLGHLEVLDLGLNEIGQELTGQEWRGLENIFEIYLSYNKYLQLTRNSFALVPSLQRLMLRRVALKNVDSSPSPFQPLRNLTILDLSNNNIANINDDMLEGLEKLEILDLQHNNLARLWKHANPGGPIYFLKGLSHLHILNLESNGFDEIPVEVFKDLFELKIIDLGLNNLNTLPASVFNNQVSLKSLNLQKNLITSVEKKVFGPAFRNLTELDMRFNPFDCTCESIAWFVNWINETHTNIPELSSHYLCNTPPHYHGFPVRLFDTSSCKDSAPFELFFMINTSILLIFIFIVLLIHFEGWRISFYWNVSVHRVLGFKEIDRQTEQFEYAAYIIHAYKDKDWVWEHFSSMEKEDQSLKFCLEERDFEAGVFELEAIVNSIKRSRKIIFVITHHLLKDPLCKRFKVHHAVQQAIEQNLDSIILVFLEEIPDYKLNHALCLRRGMFKSHCILNWPVQKERIGAFRHKLQVALGSKNSVH

SEQ ID NO: 17351 - protein, 88 aa, Homo sapiens
MEADIITNLRCRLKEAEEERLKAAQYGLQLVESQNELQNQLDKCRNEMMTMTESYEQEKYTLQREVELKSRMLESLSCECEAIKQQQK

SEQ ID NO: 17352 - protein, 128 aa, Homo sapiens
MKLSMKNNIINTQQSFVTMPNVIVPDIEKEIRRMENGACSSFSEDDDSASTSEESENENPHARGSFSYKSLRKGGPSQREQYLPGAIALFNVNNSSNKDQEPEEKKKKKKEKKSKSDDKNENKNDPEK

SEQ ID NO: 17353 - protein, 488 aa, Homo sapiens
MGRHLALLLLLLLLFQHFGDSDGSQRLEQTPLQFTHLEYNVTVQENSAAKTYVGHPVKMGVYITHPAWEVRYKIVSGDSENLFKAEEYILGDFCFLRIRTKGGNTAILNREVKDHYTLIVKALEKNTNVEARTKVRVQVLDTNDLRPLFSPTSYSVSLPENTAIRTSIARVSATDADIGTNGEFYYSFKDRTDMFAIHPTSGVIVLTGRLDYLETKLYEMEILAADRGMKLYGSSGISSMAKLTVHIEQANECAPVITAVTLSPSELDRDPAYAIVTVDDCDQGANGDIASLSIVAGDLLQQFRTVRSFPGSKEYKVKAIGGIDWDSHPFGYNLTLQAKDKGTPPQFSSVKVIHVTSPQFKAGPVKFEKDVYRAEISEFAPPNTPVVMVKAIPAYSHLRYVFKSTPGKAKFSLNYNTGLISILEPVKRQQAAHFELEVTTSDRKASTKVLVKVLGANSNPPEFTQTAYKAAFDENVPIGTTVMSLSAV

SEQ ID NO: 17354 - protein, 611 aa, Homo sapiens
MSSKEVKTALKSARDAIRNKEYKEALKHCKGLANLYEKYNHINAKDDLPGVYQKLLDLYESVDKQKWCDVCKKLVDLYYQEKKHLEVARTWHKLIKTRQEQGAENEELHQLWRKLTQFLAESTEDQNNETQQLLFTAFENALGLSDKIPSEDHQVLYRHFIQSLSKFPHESARLKKACEGMINIYPTVQYPLEVLCLHLIESGNLTDEGQQYCCRLVEMDSKSGPGLIGLGIKALQDKKYEDAVRNLTEGLKESPVCTSGWYHLAEAQVKMHRPKEAVLSCSQALKIVDNLGASGNSLYQRNLCLHLKAEALIKLSDYDSSEEAIRTLDQISDADNIPGLLVLKSLAYRNKGSFDEAAKIMEDLLSSYPDLAEVHALEALIHFTKKDYLQAEKCFQRALEKDTEVAEYHYQLGLTYWFMGEETRKDKTKALTHFLKAARLDTYMGKVFCYLGHYYRDVVGDKNRARGCYRKAFELDDTDAESGAAAVDLSVELEDMEMALAILTTVTQKASAGTAKWAWLRRGLYYLKAGQHSQAVADLQAALRADPKDFNCWESLGEAYLSRGGYTTALKSFTKASELNPESIYSVFKVAAIQQILGKYKEAVAQYQMII

SEQ ID NO: 17355 - protein, 110 aa, Homo sapiens
MSKKRGALYQLIDRIRRIGFGLEQNNTVKGKVPLQFSGQNEKNRVPRAATSRTERIWPGGVIPYVIGGNFTGSQRAMFKQAMRHWEKHTCVTFIERSDEESYIVFTYRPC

SEQ ID NO: 17356 - protein, 435 aa, Homo sapiens
MPKEKYDPPDPRRIYTIMSAEEVANGKKSHWAELEISGRVRSLSTSLWSLTHLTALHLNDNYLSRIPPDIAKLHNLVYLDLSSNKLRSLPAELGNMVSLRELLLNNNLLRVLPYELGRLFQLQTLGLKGNPLSQDILNLYQDPDGTRKLLNFMLDNLAVHPEQLPPRPWITLKERDQILPSASFTVMCYNVLCDKYATRQLYGYCPSWALNWEYRKKGIMEEIVNCDADIISLQEVETEQYFTLFLPALKERGYDGFFSPKSRAKIMSEQERKHVDGCAIFFKTEKFTLVQKHTVEFNQVAMANSDGSEAMLNRVMTKDNIGVAVVLEVHKELFGAGMKPIHAADKQLLIVANAHMHWDPEYSDVKLIQTMMFVSEVKNILEKASSRPGSPTADPNSIPLVLCADLNSLPDSGVVEYLSNGGVADNHKDFKELRA

SEQ ID NO: 17357 - protein, 641 aa, Homo sapiens
MAEAPPRRLGLGPPPGDAPRAELVALTAVQSEQGEAGGGGSPRRLGLLGSPLPPGAPLPGPGSGSGSACGQRSSAAHKRYRRLQNWVYNVLERPRGWAFVYHVFIFLLVFSCLVLSVLSTIQEHQELANECLLILEFVMIVVFGLEYIVRVWSAGCCCRYRGWQGRFRFARKPFCVIDFIVFVASVAVIAAGTQGNIFATSALRSMRFLQILRMVRMDRRGGTWKLLGSVVYAHSKELITAWYIGFLVLIFASFLVYLAEKDANSDFSSYADSLWWGTITLTTIGYGDKTPHTWLGRVLAAGFALLGISFFALPAGILGSGFALKVQEQHRQKHFEKRRMPAANLIQAAWRLYSTDMSRAYLTATWYYYDSILPSFSSRMGIKDRIRMGSSQRRTGPSKQHLAPPTMPTSPSSEQVGEATSPTKVQKSWSFNDRTRFRASLRLKPRTSAEDAPSEEVAEEKSYQCELTVDDIMPAVKTVIRSIRILKFLVAKRKFKETLRPYDVKDVIEQYSAGHLDMLGRIKSLQTRVDQIVGRGPGDRKAREKGDKGPSDAEVVDEISMMGRVVKVEKQVQSIEHKLDLLLGFYSRCLRSGTSASLGAVQVPLFDPDITSDYHSPVDHEDISVSAQTLSISRSVSTNMD

SEQ ID NO: 17358 - protein, 998 aa, Homo sapiens
MKKCNLKYILVEKKQINKFKSFHETLLNYDTFTVEHNDLVLFRLHWKNTEVNLMLNDGKEKYEKEKIKSISSEHVNEEKAEEHMDLRLKHCLAYVLHTSGTTGIPKIVRVPHKCIVPNIQHFRVLFDITQEDVLFLASPLTFDPSVVEIFLALSSGASLLIVPTSVKLLPSKLASVLFSHHRVTVLQATPTLLRRFGSQLIKSTVLSATTSLRVLALGGEAFPSLTVLRSWRGEGNKTQIFNVYGITEVSSWATIYRIPEKTLNSTLKCELPVQLGFPLLGTVVEVRDTNGFTIQEGSGQVFLGGRNRVCFLDDEVTVPLGTMRATGDFVTVKDGEIFFLGRKDSQIKRHGKRLNIELVQQVAEELQQVESCAVTWYNQEKLILFMVSKDASVKEYIFKELQKYLPSHAVPDELVLIDSLPFTSHGKIDVSELNKIYLNYINLKSENKLSGKEDLWEKLQYLWKSTLNLPEDLLRVPDESLFLNSGGDSLKSIRLLSEIEKLVGTSVPGLLEIILSSSILEIYNHILQTVVPDEDVTFRKSCATKRKLSDINQEEASGTSLHQKAIMTFTCHNEINAFVVLSRGSQILSLNSTRFLTKLGHCSSACPSDSVSQTNIQNLKGLNSPVLIGKSKDPSCVAKVSEEGKPAIGTQKMELHVRWRSDTGKCVDASPLVVIPTFDKSSTTVYIGSHSHRMKAVDFYSGKVKWEQILGDRIESSACVSKCGNFIVVGCYNGLVYVLKSNSGEKYWMFTTEDAVKSSATMDPTTGLIYIGSHDQHAYALDIYRKKCVWKSKCGGTVFSSPCLNLIPHHLYFATLGGLLLAVNPATGNVIWKHSCGKPLFSSPQCCSQYICIGCVDGNLLCFTHFGEQVWQFSTSGPIFSSPCTSPSEQKIFFGSHDCFIYCCNMKGHLQWKFETTSRVYATPFAFHNYNGSNEMLLAAASTDGKVWILESQSGQLQSVYELPGEVFSSPVVLESMLIIGCRDNYVYCLDLLGGNQK

SEQ ID NO: 17359 - protein, 953 aa, Homo sapiens
MDSLLPPSRFSYFKKYPLHAIRRYLSTLRNQRAEEQVARFQKIPNGENETMIPVLTSKKASELPVSEVASILQADLQNGLNKCEVSHRRAFHGWNEFDISEDEPLWKKYISQFKNPLIMLLLASAVISVLMHQFDDAVSITVAILIVVTVAFVQEYRSEKSLEELSKLVPPECHCVREGKLEHTLARDLVPGDTVCLSVGDRVPADLRLFEAVDLSIDESSLTGETTPCSKVTAPQPAATNGDLASRSNIAFMGTLVRCGKAKGVVIGTGENSEFGEVFKMMQAEEAPKTPLQKSMDLLGKQLSFYSFGIIGIIMLVGWLLGKDILEMFTISVSLAVAAIPEGLPIVVTVTLALGVMRMVKKRAIVKKLPIVETLGCCNVICSDKTGTLTKNEMTVTHIFTSDGLHAEVTGVGYNQFGEVIVDGDVVHGFYNPAVSRIVEAGCVCNDAVIRNNTLMGKPTEGALIALAMKMGLDGLQQDYIRKAEYPFSSEQKWMAVKCVHRTQQDRPEICFMKGAYEQVIKYCTTYQSKGQTLTLTQQQRDVYQQEKARMGSAGLRVLALASGPELGQLTFLGLVGIIDPPRTGVKEAVTTLIASGVSIKMITGDSQETAVAIASRLGLYSKTSQSVSGEEIDAMDVQQLSQIVPKVAVFYRASPRHKMKIIKSLQKNGSVVAMTGDGVNDAVALKAADIGVAMGQTGTDVCKEAADMILVDDDFQTIMSAIEEGKGIYNNIKNFVRFQLSTSIAALTLISLATLMNFPNPLNAMQILWINIIMDGPPAQSLGVEPVDKDVIRKPPRNWKDSILTKNLILKILVSSIIIVCGTLFVFWRELRDNVITPRDTTMTFTCFVFFDMFNALSSRSQTKSVFEIGLCSNRMFCYAVLGSIMGQLLVIYFPPLQKVFQTESLSILDLLFLLGLTSSVCIVAEIIKKVERSREKIQKHVSSTSSSFLEV

SEQ ID NO: 17360 - protein, 1095 aa, Homo sapiens
MTEVQAMVEFSVELNKFYNVDLFQRGFYQIRASMKIPSRIPHRVEASLLHATGMTLAFPASVHDSLICSKTFQILYKNEEVVLNDVMIFKVKMLLDERKIEETLEEMNFLLSLDLHFTDGDYSADDLNALQLISSRTLKLHFSPHRGLHHHVNVMFDYFHLSVVSVTVHASLVALHQPLISFPRPVKTTWLNRNAPAQNKDSVIPTLESVVFGINYTKQLSPDGCSFIIADSFLHHAYRFHYTLCATLLLAFKGLHSYFITVTEEIPSCQKLELEEMDVEARLTELCEEVKKIENPDELAELINMNLAQLCSLLMALWGQFLEVITLHEELRILLAQEHHTLRVRRFSEAFFCFEHPREAAIAYQELHAQSHLQMCTAIKNTSFCSSLPPLPIECSELDGDLNSLPIIFEDRYLDSVTEGKLDISQDDSEITQMEHNLASRRSSDDCHDHQTTPSLGVRTIEIKPSNKDPFSGENITVKLGPWTELRQEEILVDNLLPNFESLESNDEETSSDVKSSCSSKPNLDTMCKGFQSPDKSNNSTGTAITLNSKLICLGTPCVISGSISSNTDVSEDRTMKKNSDVLNLTQMYSEIPTVESETHLGTSDPFSASTDIVKQGLVENYFGSQSSTDISDTCAVSYSNALSPQKETSEKEISNLQQEQDKEDEEEEQDQQMVQNGYYEETDYSALDGTINAHYTSRDELMEERLTKSEKINSDYLRDGINMPTVCTSGCLSFPSAPRESPCNVKYSSKSKFDAITKQPSSTSYNFTSSISWYESSPKPQIQAFLQAKEELKLLKLPGFMYSEVPLLASSVPYFSVEEEDGSEDGVHLIVCVHGLDGNSADLRLVKTYIELGLPGGRIDFLMSERNQNDTFADFDSMTDRLLDEIIQYIQIYSLTVSKISFIGHSLGNLIIRSVLTRPRFKYYLNKLHTFLSLSGPHLGTLYNSSALVNTGLWFMQKWKKSGSLLQLTCRDHSDPRQTFLYKLSNKAGLHYFKNVVLVGSLQDRYVPYHSARIEMCKTALKDKQSGQIYSEMIHNLLRPVLQSKDCNLVRYNVINALPNTADSLIGRAAHIAVLDSEIFLEKFFLVAALKYFQ

SEQ ID NO: 17361 - protein, 1308 aa, Homo sapiens
MWPSQLLIFMMLLAPIIHGGKHSERHPALAAPLRHAERSPGGALPPRHLLQQPAAERTAAHRGQGPRGATRGVRGPGAQGAQIAAQAFSRAPIPMAVVRRELSCESYPIELRCPGTDVIMIESANYGRTDDKICDSDPAQMENIRCYLPDAYKIMSQRCNNRTQCAVVAGPDVFPDPCPGTYKYLEVQYECVPYKVEQKVFLCPGLLKGVYQSEHLFESDHQSGAWCKDPLQASDKIYYMPWTPYRTDTLTEYSSKDDFIAGRPTTTYKLPHRVDGTGFVVYDGALFFNKERTRNIVKFDLRTRIKSGEAIIANANYHDTSPYRWGGKSDIDLAVDENGLWVIYATEQNNGKIVISQLNPYTLRIEGTWDTAYDKRSASNAFMICGILYVVKSVYEDDDNEATGNKIDYIYNTDQSKDSLVDVPFPNSYQYIAAVDYNPRDNLLYVWNNYHVVKYSLDFGPLDSRSGQAHHGQVSYISPPIHLDSELERPSVKDISTTGPLGMGSTTTSTTLRTTTLSPGRSTTPSVSGRRNRSTSTPSPAVEVLDDMTTHLPSASSQIPALEESCEAVEAREIMWFKTRQGQIAKQPCPAGTIGVSTYLCLAPDGIWDPQGPDLSNCSSPWVNHITQKLKSGETAANIARELAEQTRNHLNAGDITYSVRAMDQLVGLLDVQLRNLTPGGKDSAARSLNKLQKRERSCRAYVQAMVETVNNLLQPQALNAWRDLTTSDQLRAATMLLHTVEESAFVLADNLLKTDIVRENTDNIKLEVARLSTEGNLEDLKFPENMGHGSTIQLSANTLKQNGRNGEIRVAFVLYNNLGPYLSTENASMKLGTEALSTNHSVIVNSPVITAAINKEFSNKVYLADPVVFTVKHIKQSEENFNPNCSFWSYSKRTMTGYWSTQGCRLLTTNKTHTTCSCNHLTNFAVLMAHVEVKHSDAVHDLLLDVITWVGILLSLVCLLICIFTFCFFRGLQSDRNTIHKNLCISLFVAELLFLIGINRTDQPIACAVFAALLHFFFLAAFTWMFLEGVQLYIMLVEVFESEHSRRKYFYLVGYGMPALIVAVSAAVDYRSYGTDKVCWLRLDTYFIWSFIGPATLIIMLNVIFLGIALYKMFHHTAILKPESGCLDNINYEDNRPFIKSWVIGAIALLCLLGLTWAFGLMYINESTVIMAYLFTIFNSLQGMFIFIFHCVLQKKVRKEYGKCLRTHCCSGKSTESSIGSGKTSGSRTPGRYSTGSQSRIRRMWNDTVRKQSESSFITGDINSSASLNREPYRETSMGVKLNIAYQIGASEQCQGYKCHGYSTTEW

SEQ ID NO: 17362 - protein, 213 aa, Homo sapiens
MTLRIDYCQGLLVGVSSSGLNIIQIQCQAYPCSSDKECEVGRYCHSPHQGSSACMVCRRKKKRCHRDGMCCPSTRCNNGICIPVTESILTPHIPALDGTRHRDRNHGHYSNHDLGWQNLGRPHTKMSHIKGHEGDPCLRSSDCIEGFCCARHFWTKICKPVLHQGEVCTKQRKKGSHGLEIFQRCDCAKGLSCKVWKDATYSSKARLHVCQKI

SEQ ID NO: 17363 - protein, 1114 aa, Homo sapiens
MTTMLQKSDSNASFLRAARAGNLDKVVEYLKGGIDINTCNQNGLNALHLAAKEGHVGLVQELLGRGSSVDSATKKGNTALHIASLAGQAEVVKVLVKEGANINAQSQNGFTPLYMAAQENHIDVVKYLLENGANQSTATEDGFTPLAVALQQGHNQAVAILLENDTKGKVRLPALHIAARKDDTKSAALLLQNDHNADVQSKMMVNRTTESGFTPLHIAAHYGNVNVATLLLNRGAAVDFTARNGITPLHVASKRGNTNMVKLLLDRGGQIDAKTRDGLTPLHCAARSGHDQVVELLLERGAPLLARTKNGLSPLHMAAQGDHVECVKHLLQHKAPVDDVTLDYLTALHVAAHCGHYRVTKLLLDKRANPNARALNGFTPLHIACKKNRIKVMELLVKYGASIQAITESGLTPIHVAAFMGHLNIVLLLLQNGASPDVTNIRGETALHMAARAGQVEVVRCLLRNGALVDARAREEQTPLHIASRLGKTEIVQLLLQHMAHPDAATTNGYTPLHISAREGQVDVASVLLEAGAAHSLATKKGFTPLHVAAKYGSLDVAKLLLQRRAAADSAGKNGLTPLHVAAHYDNQKVALLLLEKGASPHATAKNGYTPLHIAAKKNQMQIASTLLNYGAETNIVTKQGVTPLHLASQEGHTDMVTLLLDKGANIHMSTKSGLTSLHLAAQEDKVNVADILTKHGADQDAHTKLGYTPLIVACHYGNVKMVNFLLKQGANVNAKTKNGYTPLHQAAQQGHTHIINVLLQHGAKPNATTANGNTALAIAKRLGYISVVDTLKVVTEEVTTTTTTITEKHKLNVPETMTEVLDVSDEEGDDTMTGDGGEYLRPEDLKELGDDSLPSSQFLDGMNYLRYSLEGGRSDSLRSFSSDRSHTLSHASYLRDSAVMDDSVVIPSHQVSTLAKEAERNSYRLSWGTENLDNVALSSSPIHSGFLVSFMVDARGGAMRGCRHNGLRIIIPPRKCTAPTRVTCRLVKRHRLATMPPMVEGEGLASRLIEVGPSGAQFLGKLHLPTAPPPLNEGESLVSRILQLGPPGTKFLGPVIVEIPHFAALRGKERELVVLRSENGDSWKEHFCDYTEDELNEILNGMDEVLDSPEDLE

SEQ ID NO: 17364 - protein, 284 aa, Homo sapiens
STTEALFASVEDYILVRGVSLVHTAKMNPVRMAEHALTVWMAPFVSVIRVLGEKGVRVISTSALETLACTGPSVRTRTAPITATAATSTGDVTARMLRPTTKVVDLDPCLSKKPLEEKPSQPYSARESLSEVQSLSSFQSESCDDNGYHWDTSDWMPSVPLPDIQEFPNYEVIDEQTPLYSADPNAIDTDYYPGGYDIESDFPPPPEDFPAADELPPLPPEFSNQFESIHPPRDMPAAGSLGSSSRNRQRFNLNQYLPNFYPLDMSEPQTKGTGENSTCREPHA

SEQ ID NO: 17365 - protein, 651 aa, Homo sapiens
CSYEGHVFQDGEDWRLSRCAKCLCRNGVAQCFTAQCQPLFCNQDETVVRVPGKCCPQCSARSCSAAGQVYEHGEQWSENACTTCICDRGEVRCHKQACLPLRCGKGQSRARRHGQCCEECVSPAGSCSYDGVVRYQDEMWKGSACEFCMCDHGQVTCQTGECAKVECARDEELIHLDGKCCPECISRNGYCVYEETGEFMSSNASEVKRIPEGEKWEDGPCKVCECRGAQVTCYEPSCPPCPVGTLALEVKGQCCPDCTSVHCHPDCLTCSQSPDHCDLCQDPTKLLQNGWCVHSCGLGFYQAGSLCLACQPQCSTCTSGLECSSCQPPLLMRHGQCVPTCGDGFYQDRHSCAVCHESCAGCWGPTEKHCLACRDPLHVLRDGGCESSCGKGFYNRQGTCSACDQSCDSCGPSSPRCLTCTEKTVLHDGKCMSECPGGYYADATGRCKVCHNSCASCSGPTPSHCTACSPPKALRQGHCLPRCGEGFYSDHGVCKACHSSCLACMGPAPSHCTGCKKPEEGLQVEQLSDVGIPSGECLAQCRAHFYLESTGICEACHQSCFRCAGKSPHNCTDCGPSHVLLDGQCLSQCPDGYFHQEGSCTECHPTCRQCHGPLESDCISCYPHISLTNGNCRTSCREEQFLNLVGYCAGE

SEQ ID NO: 17366 - protein, 900 aa, Homo sapiens
MSHLKTSTEDEEPTEEYENVGNAASKWPKVEDPMPESKVGDTCVWDSKVENQQKKPVENRMKEDKSSIREAISKAKSTANIKTEQEGEASEKSLHLSPQHITHQTMPIGQRGSEQGKRVENINGTSYPSLQQKTNAVKKLHKCDECGKSFKYNSRLVQHKIMHTGEKRYECDDCGGTFRSSSSLRVHKRIHTGEKPYKCEECGKAYMSYSSLINHKSTHSGEKNCKCDECGKSFNYSSVLDQHKRIHTGEKPYECGECGKAFRNSSGLRVHKRIHTGEKPYECDICGKTFSNSSGLRVHKRIHTGEKPYECDECGKAFITCRTLLNHKSIHFGDKPYKCDECEKSFNYSSLLIQHKVIHTGEKPYECDECGKAFRNSSGLIVHKRIHTGEKPYKCDVCGKAFSYSSGLAVHKSIHPGKKAHECKECGKSFSYNSLLLQHRTIHTGERPYVCDVCGKTFRNNAGLKVHRRLHTGEKPYKCDVCGKAYISRSSLKNHKGIHLGEKPYKCSYCEKSFNYSSALEQHKRIHTREKPFGCDECGKAFRNNSGLKVHKRIHTGERPYKCEECGKAYISLSSLINHKSVHPGEKPFKCDECEKAFITYRTLTNHKKVHLGEKPYKCDVCEKSFNYTSLLSQHRRVHTREKPYECDRCEKVFRNNSSLKVHKRIHTGERPYECDVCGKAYISHSSLINHKSTHPGRTPHTCDECGKAFFSSRTLISHKRVHLGEKPFKCVECGKSFSYSSLLSQHKRIHTGEKPYVCDRCGKAFRNSSGLTVHKRIHTGEKPYECDECGKAYISHSSLINHKSVHQGKQPYNCECGKSFNYRSVLDQHKRIHTGKKPYRCNECGKAFNIRSNLTKHKRTHTGEESLNVIYVGSYSGTSQKRTYEGGNALDGGRMRMPL

SEQ ID NO: 17367 - protein, 584 aa, Homo sapiens
MRAKFRAGAGHQRNPSISADHGVHELVYQTFPLGLGDGQFYSWTDGLRRKDWHDYESIQKEAMRSGKGEHGKPYPLTEEDHDDSAYRENGFNIFVSNNIALERSLPDIRHANCKHKMYLERLPNTSIIIPFHNEGWTSLLRTIHSIINRTPGSLIAEIILVDDFSEREHLKDKLEEYMARFSKVRIVRTKKREGLIRTRLLGASMARGEVLTFLDSHCEVNVNWLPPLLNQIALNHKTIVCPMIDVIDHNHFGYEAQAGDAMRGAFDWEMYYKRIPIPPELQRADPSDPFESPVMAGGLFAVDRKWFWELGGYDPGLEIWGGEQYEISFKVWMCGGEMFDVPCSRVGHIYRKYVPYKVPSGTSLARNLKRVAETWMDEFAEYIYQRRPEYRHLSTGDISAQKELRKQLKCKDFKWFMAAVAWDVPKYYPPVEPPPAAWGEIRNVAANLCVDSKHGATGTELRLDICVKDGSERTWSHEQLFTFGWREDIRPGEPLHTRKFCFDAISHNSPVTLYDCHGMKGNQLWGYRKDRTLFHPVSNSCMDCNPAEKKIFMARCDPLSETQQWIFEHINMTVLEKFNHHANS

SEQ ID NO: 17368 - protein, 1304 aa, Homo sapiens
MAAASYDQLLKQVEALKMENSNLRQELEDNSNHLTKLETEASNMKEVLKQLQGSIEDEAMASSGQIDLLERLKELNLDSSNFPGVKLRSKMSLRSYGSREGSVSSRSGECSPVPMGSFPRRGFVNGSRESTGYLEELEKERSLLLADLDKEEKEKDWYYAQLQNLTKRIDSLPLTENFSLQTDMTRRQLEYEARQIRVAMEEQLGTCQDMEKRAQRRIARIQQIEKDILRIRQLLQSQATEAERSSQNKHETGSHDAERQNEGQGVGEINMATSGNGQGSTTRMDHETASVLSSSSTHSAPRRLTSHLGTKVEMVYSLLSMLGTHDKDDMSRTLLAMSSSQDSCISMRQSGCLPLLIQLLHGNDKDSVLLGNSRGSKEARARASAALHNIIHSQPDDKRGRREIRVLHLLEQIRAYCETCWEWQEAHEPGMDQDKNPMPAPVEHQICPAVCVLMKLSFDEEHRHAMNELGGLQAIAELLQVDCEMYGLTNDHYSITLRRYAGMALTNLTFGDVANKATLCSMKGCMRALVAQLKSESEDLQQVIASVLRNLSWRADVNSKKTLREVGSVKALMECALEVKKESTLKSVLSALWNLSAHCTENKADICAVDGALAFLVGTLTYRSQTNTLAIIESGGGILRNVSSLIATNEDHRQILRENNCLQTLLQHLKSHSLTIVSNACGTLWNLSARNPKDQEALWDMGAVSMLKNLIHSKHKMIAMGSAAALRNLMANRPAKYKDANIMSPGSSLPSLHVRKQKALEAELDAQHLSETFDNIDNLSPKASHRSKQRHKQSLYGDYVFDTNRHDDNRSDNFNTGNMTVLSPYLNTTVLPSSSSSRGSLDSSRSEKDRSLERERGIGLGNYHPATENPGTSSKRGLQISTTAAQIAKVMEEVSAIHTSQEDRSSGSTTELHCVTDERNALRRSSAAHTHSNTYNFTKSENSNRTCSMPYAKLEYKRSSNDSLNSVSSSDGYGKRGQMKPSIESYSEDDESKFCSYGQYPADLAHKIHSANHMDDNDGELDTPINYSLKYSDEQLNSGRQSPSQNERWARPKHIIEDEIKQSEQRQSRNQSTTYPVYTESTDDKHLKFQPHFGQQECVSPYRSRGANGSETNRVGSNHGINQNVSQSLCQEDDYEDDKPTNYSERYSEEEQHEEEERPTNYSIKYNEEKRHVDQPIDYSLKYATDIPSSQKQSFSFSKSSSGQSSKTEHMSSSSENTSTPSSNAKRQNQLHPSSAQSRSGQPQKAATCKVSSINQETIQTYCVEDTPICFSRCSSLSSLSSAEDEIGCNQTTQEADSANTLQI

SEQ ID NO: 17369 - protein, 153 aa, Homo sapiens
MKSLLLLVLISICWADHLSDNYTLDHDRAIHIQAENGPHLLVEAEQAKVFSHRGGNVTLPCKFYRDPTAFGSGIHKIRIKWTKLTSDYLKEVDVFVSMGYHKKTYGGYQGRVFLKGGSDSDASLVITDLTLEDYGRYKCEVIEGLEDDTVVVA

SEQ ID NO: 17370 - protein, 424 aa, Homo sapiens
MENKKKDKDKSDDRMARPSGRSGHNTRGTGSSSSGVLMVGPNFRVGKKIGCGNFGELRLGKNLYTNEYVAIKLEPMKSRAPQLHLEYRFYKQLGSGDGIPQVYYFGPCGKYNAMVLELLGPSLEDLFDLCDRTFSLKTVLMIAIQLISRMEYVHSKNLIYRDVKPENFLIGRPGNKTQQVIHIIDFGLAKEYIDPETKKHIPYREHKSLTGTARYMSINTHLGKEQSRRDDLEALGHMFMYFLRGSLPWQGLKADTLKERYQKIGDTKRATPIEVLCENFPEEMATYLRYVRRLDFFEKPDYDYLRKLFTDLFDRKGYMFDYEYDWIGKQLPTPVGAVQQDPALSSNREAHQHRDKMQQSKNQVVSSTNGELNTDDPTAGRSNAPITAPTEVEVMDETNCQKVLNMWCCCFFKRRKRKTIQRHK

SEQ ID NO: 17371 - protein, 367 aa, Homo sapiens
MKTKLNIYNMQFLLFVFLVWDPARLVLANIQEDEAKNNITIFTRILDRLLDGYDNRLRPGLGDSITEVFTNIYVTSFGPVSDTDMEYTIDVFFRQKWKDERLKFKGPMNILRLNNLMASKIWTPDTFFHNGKKSVAHNMTMPNKLLRIQDDGTLLYTMRLTVQAECPMHLEDFPMDAHSCPLKFGSYAYTTSEVTYIWTYNASDSVQVAPDGSRLNQYDLLGQSIGKETIKSSTGEYTVMTAHFHLKRKIGYFVIQTYLPCIMTVILSQVSFWLNRESVPARTVFGVTTVLTMTTLSISARNSLPKVAYATAMDWFIAVCYAFVFSALIEFATVNYFTKRGWAWDGKSVVNDKVSESFRVIIIKKIP

SEQ ID NO: 17372 - protein, 370 aa, Homo sapiens
MKKDEPPLDFPDTLEGFEYAFNEKGQLRHIKTGEPFVFNYREDLHRWNQKRYEALGEIITKYVYELLEKDCNLKKVSIPVDATESEPKSFIFMSEDALTNPQKLMVLIHGSGVVRAGQWARRLIINEDLDSGTQIPFIKRAVAEGYGVIVLNPNENYIEVEKPKIHVQSSSDSSDEPAEKRERKDKVSKETKKRRDFYEKYRNPQREKEMMQLYIRENGSPEEHAIYVWDHFIAQAAAENVFFVAHSYGGLAFVELMIQREADVKNKVTAVALTDSVHNVWHQEAGKTIREWMRENCCNWVSSSEPLDTSVESMLPDCPRVSAGTDRHELTSWKSFPSIFKFFTEASEAKTSSLKPAVTRRSHRIKHEEL

SEQ ID NO: 17373 - protein, 775 aa, Homo sapiens
MTSDVPSLGPAIASGNSGPGIQGGGAIVQRAIKRRPGLDFDDDGEGNSKFLRCDDDQMSNDKERFARSDDEQSSADKERLARENHSEIERRRRNKMTAYITELSDMVPTCSALARKPDKLTILRMAVSHMKSLRGTGNTSTDGSYKPSFLTDQELKHLILEAADGFLFIVSCETGRVVYVSDSVTPVLNQPQSEWFGSTLYDQVHPDDVDKLREQLSTSENALTGRILDLKTGTVKKEGQQSSMRMCMGSRRSFICRMRCGSSSVDPVSVNRLSFVRNRCRNGLGSVKDGEPHFVVVHCTGYIKAWPPADDDPEAGQGSKFCLVAIGRLQVTSSPNCTDMSNVCQPTEFISRHNIEGIFTFVDHRCVATVGYQPQELLGKNIVEFCHPEDQQLLRDSFQQVVKLKGQVLSVMFRFRSKNQEWLWMRTSSFTFQNPYSDEIEYIICTNTNVKNSSQEPRPTLSNTIQRPQLGPTANLPLEMGSGQLAPRQQQQQTELDMVPGRDGLASYNHSQVVQPVTTTGPEHSKPLEKSDGLFAQDRDPRFSEIYHNINADQSKGISSSTVPATQQLFSQGNTFPPTPRPAENFRNSGLAPPVTIVQPSASAGQMLAQISRHSNPTQGATPTWTPTTRSGFSAQQVATQATAKTRTSQFGVGSFQTPSSFSSMSLPGAPTASPGAAAYPSLTNRGSNFAPETGQTAGQFQTRTAEGVGVWPQWQGQQPHHRSSSSEQHVQQPPAQQPGQPEVFQEMLSMLGDQSNSYNNEEFPDLTMFPPFSE

SEQ ID NO: 17374 - protein, 792 aa, Homo sapiens
MKVRLLRQLSAAAKVKAPSGLQGPPQAHQFISLLLEEYGALCQAARSISTFLGTLENEHLKKFQVTWELHNKHLFENLVFSEPLLQSNLPALVSQIRLGTTTHDTCSEDTYSTLLQRYQRSEEELRRVAEEWLECQKRIDAYVDEQMTMKTKQRMLTEDWELFKQRRFIEEQLTNKKAVTGENNFTDTMRHMLSSRLSMPDCPNCNYRRRCACDDCSLSHILTCGIMDPPVTDDIHIHQLPLQVDPAPDYLAERSPPSVSSASSGSGSSSPITIQQHPRLILTDSGSAPTFCSDDEDVAPLSAKFADIYPLSNYDDTEVVANMNGIHSELNGGGENMALKDESPQISSTSSSSSEADDEEADGESSGEPPGAPKEDGVLGSRSPRTEESKADSPPPSYPTQQAEQAPNTCECHVCKQEASGLTPSAMTAGALPPGHQFLSPEKPTHPALHLYPHIHGHVPLHTVPHLPRPLIHPTLYATPPFTHSKALPPAPVQNHTNKHQVFNASLQDHIYPSCFGNTPEWNSSKFISLWGSEVMNDKNWNPGTFLPDTISGSEILGPTLSETRPEALPPPSSNETPAVSDSKEKKNAAKKKCLYNFQDAFMEANKVVMATSSATSSVSCTATTVQSSNSQFRVSSKRPPSVGDVFHGISKEDHRHSAPAAPRNSPTGLAPLPALSPAALSPAALSPASTPHLANLAAPSFPKTATTTPGFVDTRKSFCPAPLPPATDGSISAPPSVCSDPDCEGHRCENGVYDPQQDDGDESADEDSCSEHSSSTSTSTNQKEASSCTNK

SEQ ID NO: 17375 - protein, 972 aa, Homo sapiens
MEAKTNEWNKNDDRLLQAVENGDAEKVASLLGKKGASATKHDSEGKTAFHLAAAKGHVECLRVMITHGVDVTAQDTTGHSALHLAAKNSHHECIRKLLQSKCPAESVDSSGKTALHYAAAQGCLQAVQILCEHKSPINLKDLDGNIPLLLAVQNGHSEICHFLLDHGADVNSRNKSGRTALMLACEIGSSNAVEALIKKGADLNLVDSLGYNALHYSKLSENAGIQSLLLSKISQDADLKTPTKPKQHDQVSKISSERSGTPKKRKAPPPPISPTQLSDVSSPRSITSTPLSGKESVFFAEPPFKAEISSIRENKDRLSDSTTGADSLLDISSEADQQDLLSLLQAKVASLTLHNKELQDKLQAKSPKEAEADLSFDSYHSTQTDLGPSLGKPGETSPPDSKSSPSVLIHSLGKSTTDNDVRIQQLQEILQDLQKRLESSEAERKQLQVELQSRRAELVCLNNTEISENSSDLSQKLKETQSKYEEAMKEVLSVQKQMKLGLVSPESMDNYSHFHELRVTEEEINVLKQDLQNALEESERNKEKVRELEEKLVEREKGTVIKPPVEEYEEMKSSYCSVIENMNKEKAFLFEKYQEAQEEIMKLKDTLKSQMTQEASDEAEDMKEAMNRMIDELNKQVSELSQLYKEAQAELEDYRKRKSLEDVTAEYIHKAEHEKLMQLTNVSRAKAEDALSEMKSQYSKVLNELTQLKQLVDAQKENSVSITEHLQVITTLRTAAKEMEEKISNLKEHLASKEVEVAKLEKQLLEEKAAMTDAMVPRSSYEKLQSSLESEVSVLASKLKESVKEKEKVHSEVVQIRSEVSQVKREKENIQTLLKSKEQEVNELLQKFQQAQEELAEMKRYAESSSKLEEDKDKKINEMSKEVTKLKEALNSLSQLSYSTSSSKRQSQQLEALQQQVKQLQNQLAECKKQHQEVISVYRMHLLYAVQGQMDEDVQKVLKQILTMCKNQSQKK

SEQ ID NO: 17376 - protein, 155 aa, Homo sapiens
MEEPQSDPSVEPPLSQETFSDLWKLLPENNVLYSPALNKMFCQLAKTCPVQLWVDSTPPPGTRVRAMAIYKQSQHMTEVVRRCPHHERCSDSDGLAPPQHLIRVEGNLRVEYLDDRNTFRHSVVVPYEPPEVGSDCTTIHYNYMCNSSCMGGMNR

SEQ ID NO: 17377 - protein, 276 aa, Homo sapiens
MEGSPSLRRMTVMREKGRRQAVRGPAFMFNDRGTSLTAEEERFLDAAEYGNIPVVRKMLEESKTLNVNCVDYMGQNALQLAVGNEHLEVTELLLKKENLARIGDALLLAISKGYVRIVEAILNHPGFAASKRLTLSPCEQELQDDDFYAYDEDGTRFSPDITPIILAAHCQKYEVVHMLLMKGARIERPHDYFCKCGDCMEKQRHDSFSHSRSRINAYKGLASPAYLSLSSEDPVLTALELSNELAKLANIEKEFKISEQVENSKFRLETVEKHLE

SEQ ID NO: 17378 - protein, 452 aa, Homo sapiens
MIWPKVECCHFKTAVEAPLGMKLDKKMEVFIPLSTSAASSGPWAHSLFAFIPSWPKKNLFKRESPITHRLYGDISREVQGTSENGVIFQKCALVSGSSEAQTARIWLLVNNTKTTSSANLSELLLLDSIAGLTIWDSVGNRTSEGFQAFSKKFLQVGDAFAVSYAATLQAGDLGNGESLKLPAQLTFQSSSRNRTQLKVLFSITAEENVTVLPHHGLHAAGFFIAFLLSLVLTWAALFLMVRYQCLKGNMLTRHRVWQYESKLEPLPFTSADGVNEDLSLNDQMIDILSSEDPGSMLQALEELEIATLNRADADLEACRTQISKDIIALLLKNLTSSGHLSPQVERKMSAVFKKQFLLLENEIQEEYDRKMVALTAECDLETRKKMENQYQREMMAMEEAEELLKRAVCCRVQQPSADPPWPGTGALEEVSRFATRRRLCQSSQTAGCFPEK

SEQ ID NO: 17379 - protein, 225 aa, Homo sapiens
LRLLRTGAPAAACLRLGTSAGTGSRRAMALYHTEERGQPCSQNYRLFFKNVTGHYISPFHDIPLKVNSKEENGIPMKKARNDEYEIATKEPMNPIKQYVKDGKLRYVANIFPYKGYIWNYGTLPQTWEDPHEKDKSTNCFGDNDPIDVCEIGSKILSCGEVIHVKILGILALIDEGETDWKLIAINANDPEASKFHDIDDVKKFKPGYLEATLNWFRLYKVPDGK

SEQ ID NO: 17380 - protein, 502 aa, Homo sapiens
MGNFKSRKPKSIFKAESGRSHGESQETEHVVSSQSECQVRAGTPAHESPQNNAFKCQETVRLQPRIDQRTAISPKDAFETRQDLNEEEAAQVHGVKDPAPASTQSVLADGTDSADPSPVHKDGQNEADSAPEDLHSVGTSRLLYHITDGDNPLLSPRCSIFSQSQRFNLDPESAPSPPSTQQFMMPRSSSRCSCGDGKEPQTITQLTKHIQSLKRKIRKFEEKFEQEKKYRPSHGDKTSNPEVLKWMNDLAKGRKQLKELKLKLSEEQGSAPKGPPRNLLCEQPTVPRENGKPEAAGPEPSSSGEETPDAALTCLKERREQLPPQEDSKVTKQDKNLIKPLYDRYRIIKQILSTPSLIPTIQEEEDSDEDRPQGSQQPSLADPASHLPVGDHLTYSNETEPVRALLPDEKKEVKPPALSMSNLHEATMPVLLDHLRETRADKKRLRKALREFEEQFFKQTGRSPQKEDRIPMADEYYEYKHIKAKLRLLEVLISKQDVAKTI

SEQ ID NO: 17381 - protein, 755 aa, Homo sapiens
MNVIYFPLHIFVVYSRAYTSLVLVGCTNLCAVLFARCLDDHLVSLRMSGSRKEFDVKQILKIRWRWFGHQASSPNSTVDSQQGEFWNRGQTGANGGRKFLDPCSLQLPLASIGYRRSSQLDFQNSPSWPMASTSEVPAFEFTAEDCGGAHWLDRPEVDDGTSEEENESDSSSCRTSNSSQTLSSCHTMEPCTSDEFFQALNHAEQTFKKMENYLRHKQLCDVILVAGDRRIPAHRLVLSSVSDYFAAMFTNDVREARQEEIKMEGVEPNSLWSLIQYAYTGRLELKEDNIECLLSTACLLQLSQVVEACCKFLMKQLHPSNCLGIRSFADAQGCTDLHKVAHNYTMEHFMEVIRNQEFVLLPASEIAKLLASDDMNIPNEETILNALLTWVRHDLEQRRKDLSKLLAYIRLPLLAPQFLADMENNVLFRDDIECQKLIMEAMKYHLLPERRPMLQSPRTKPRKSTVGTLFAVGGMDSTKGATSIEKYDLRTNMWTPVANMNGRRLQFGVAVLDDKLYVVGGRDGLKTLNTVECYNPKTKTWSVMPPMSTHRHGLGVAVLEGPMYAVGGHDGWSYLNTVERWDPQARQWNFVATMSTPRSTVGVAVLSGKLYAVGGRDGSSCLKSVECFDPHTNKWTLCAQMSKRRGGVGVTTWNGLLYAIGGHDAPASNLTSRLSDCVERYDPKTDMWTAVASMSISRDAVGVCLLGDKLYAVGGYDGQAYLNTVEAYDPQTNEWTQVAPLCLGRAGACVVTVKL

SEQ ID NO: 17382 - protein, 224 aa, Homo sapiens
MADEKPSNGVLVHMVKLLIKTFLDGIFDDLMENNVLNTDEIHLIGKCLKFVVSNAENLVDDITETAQIAGKIFREHLWNSKKQLSSDISSDGEREANMPGLNIRNKEFNYLHNRNGSELDLLGMUDLLENLGYSVVIKENLTAQMVLGLFGSPLTVEKPVQILMVGSCKVTSVMMLLQRLMWKRTSLLSNLPHHIMFLGDMKQMALSSFPKLSTTSESILGVII

SEQ ID NO: 17383 - protein, 101 aa, Homo sapiens
MPKAPKGKSAGREKKVIHPYSRKAAQITREAHKQEKKEKLKNEKALRLNLVGEKLQWFQNHLDPQKKRYSKKDACELIERIRENVIRSLYTFLDYRLLFIF

SEQ ID NO: 17384 - protein, 188 aa, Homo sapiens
LEPATEYMARVRCADASHFWKWSEWSGQNFTTLEAAPSEAPDVWRIVSLEPGNHTVTLFWKPLSKLHANGKILFYNVVVENLDKPSSSELHSIPAPANSTKLILDRCSYQICVIANNSVGASPASVIVISADPENSVSTCFSGTVPSVWGEGDFSHGSGHFCPGDSSTYMGNYLKFIQVTATLTNSHH

SEQ ID NO: 17385 - protein, 151 aa, Homo sapiens
MAAGGTGGLREEQRYGLSCGRLGQDNITVLHVKLTETAIRALETYQSHKNLIPFRPSIQFQGLHGVANLNSKDLSYTLKDYVFKELQRDWPGYSEIDRRSLESVLSRKLNPSQNAAGTSRSESPVCSSRDAVSSPQKRLLDSEFIDPLMNK

SEQ ID NO: 17386 - protein, 192 aa, Homo sapiens
MEWKLERTAPRRVRTEEEMLWVLDSVNATYSDFKSNFAKRLSAEVPVASSPITTRWQQSQTRALSSDSFGEEQSTTYLPEASGSVLKTPPEKETLTLGSRKEQLKTPSKGISETSNSALHFCKAPHAMDRDWKESVASKGQKCLKQLFVTQNVVQQANGKMQLCEQSECVWKDHFSGSMKKRFEQEDVGGKD

SEQ ID NO: 17387 - protein, 136 aa, Homo sapiens
FRQKYWNKLQTLRQQPFAYGTLTVRSLLDTREHCLNEFNFPDPYSKVKQRENGVALRCFPGVVRSLDALGWEERQLALVKGLLAGNVFDWGAKAVSAVLESDPYFGFEEAKRKLQERPWLVDSYSEWLQRLKITVE

SEQ ID NO: 17388 - protein, 503 aa, Homo sapiens
MSEARGEPGSGPEAGARFFCTAGRGLEPFVMREVRARLAATQVEYISGKVFFTTCSDLNMLKKLKSAERLFLLIKKQFPLIISSVSKGKIFNEMQRLINEDPGSWLNAISIWKNLLELDAKKEKLSQRDDNQLKRKVGENEIIAKKLKIEQMQKIEENRDCQLEKQIKEETLEQRDFTTKSEKFQEEEFQNDIEKAIDTHNQNDLTFRVSCRCSGTIGKAFTAQEVGKVIGIAIMKHFGWKADLRNPQLEIFIHLNDIYSVVGIPVFRVSLASRAYIKTAGLRSTIAWAMASLADIKAGAFVLDPMCGLGTILLEAAKEWPDVYYVGADVSDSQLLGTWDNLKAAGLEDKIELLKISVIELPLPSESVDIIISDIPFGKKFKLGKDIKSILQEMERVLHVGGTIVLLLSEDHHRRLTDCKESNIPFNSKDSHTDEPGIKKCLNPEEKTGAFKTASTSFEASNHKFLDRMSPFGSLVPVECYKVSLGKTDAFICKYKKSHSSGL

SEQ ID NO: 17389 - protein, 716 aa, Homo sapiens
MEGDGSDSPVTIKNIERELICPACKELFTHPLILPCQHSICHKCVKELLLTLDDSFNDVGSDNSNQSSPRLRLPSPSMDKIDRINRPGWKRNSLTPRTTVFPCPGCEHDVDLGERGINGLFRNFTLETIVERYRQAARAATAIMCDLCKPPPQESTKSCMDCSASYCNECFKIHHPWGTIKAQHEYVGPTTNFRPKILMCPEHETERINMYCELCRRPVCHLCKLGGNHANHRVTTMSSAYKTLKEKLSKDIDYLIGKESQVKSQISELNLLMKETECNGERAKEEAITHFEKLFEVLEERKSSVLKAIDSSKKLRLDKFQTQMEEYQGLLENNGLVGYAQEVLKETDQSCFVQTAKQLHLRIQKATESLKSFRPAAQTSFEDYVVNTSKQTELLGELSFFSSGIDVPEINEEQSKVYNNALINWHHPEKDKADSYVLEYRKINRDDEMSWNEIEVCGTSKIIQDLENSSTYAFRVRAYKGSICSPCSRELILHTPPAPVFSFLFDEKCGYNNEHLLLNLKRDRVESRAGFNLLLAAERIQVGYYTSLDYIIGDTGITKGKHFWAFRVEPYSYLVKVGVASSDKLQEWLRSPRDAVSPRYEQDSGHDSGSEDACFDSSQPFTLVTIGMQKFFIPKSPTSSNEPENRVLPMPTSIGIFLDCDKGKVDFYDMDQMKCLYERQVDCSHTLYPAFALMGSGGIQLEEPITAKYLEYQEDM

SEQ ID NO: 17390 - protein, 833 aa, Homo sapiens
MEPAALRCAYFRYSDSTFTFTYVGGPRSVSYSVHVSEDYPDNTYVSSSENDEDVLVTTEPIPVIFHRIATELRKTNDINCCLSIKSKLQKENGEESRQNSTVEEDSEGDNDSEEFYYGGQVNYDGELHKHPQLEADLSAVREIYGPHAVSLREYGAIDDVDIDLHIDVSFLDEEIAVAWEVIRTEPIIVRLHCSLTQYLNGPVPTVDVFQISTKERFGLGHQLKKIMQTFVTQQWKQSKEKSNCLHNKKLSEKKVKSPLHLFSTLRRSPSYPPPGCGKSKSKLKSEQDGISKTHKLLRRTCSSTVKTDDVCVTKSHRTFGRSLSSDPRAEQAMTAIKSHKLLNRPCPAAVKSEECLTLKSHRLLTRSCSGDPRCEHNTNLKPHKLLSRSYSSNLRMEELYGLKNHKLLSKSYSSAPKSSKTELFKEPNAEGRRLSLTSGLIGILTPSSSSSSQLAPNGAKCIPVRDRGFLVQTIEFAEQRIPVLNEYCVVCDEPHVFQNGPMLRPTVCERELCVFAFQTLGVMNEAADEIATGAQVVDLLVSMCRSALESPRKVVIFEPYPSVVDPNDPQMLAFNPRKKNYDRVMKALDSITSIREMTQAPYLEIKKQMDKQDPLAHPLLQWVISSNRSHIVKLPVNRQLKFMHTPHQFLLLSSPPAKESNFRAAKKLFGSTFAFHGSHIENWHSILRNGLVVASNTRLQLHGAMYGSGIYLSPMSSISFGYSGMNKKQKVSAKDEPASSSKSSNTSQSQKKGQQSQFLQSRNLKCIALCEVITSSDLHKHGEIWVVPNTDHVCTRFFFVYEDGQVGDANINTQEGGIHKEILRVIGNQTATG

SEQ ID NO: 17391 - protein, 345 aa, Homo sapiens
MAELGKKYCVYCLAEEDMAAHVGASRTPQEVMEHYVSMYIHGNLGKACIPDTIPNRVTDHTCPSGGPLSPSLTTPLPPLDISVAEQQQLGYMPLRDDYEIEYDQDAETLISGLSVNYDDDDVEIELKRAHVDMYVRKLKERQRRKNIARDYNLVPAFLGKDKKEKEKALKRKITKEEKELRLKLRPLYQFMSCKEFDDLFENMHKEKMLRAKIRELQRYRRNGITKMEESAEYEAARHKREKRKENKNLAGSKRGKEDGKDSEFAAIENLPGFELLSDREKVLCSSLNLSPARYVTVKTIIIKDHLQKRQGIPSKSRLPSYLDKVLKKRILNFLTESGWISRDAS

SEQ ID NO: 17392 - protein, 334 aa, Homo sapiens
MKDSPFQVTKLYWLNEKWDFIASASDMAAEQGQILVIATAAVGGFTLLVILTLFFLITGRCQWYIKAKMKSEEKRRNHLQNGHLRFPGIKTYIDPDTYEDPSLAVHEFAKEIDPSRIRIERVIGAGEFGEVCSGRLKTPGKREIPVAIKTLKGGHMDRQRRDFLREASIMGQFDHPNIIRLEGVVTKRSFPAIGVEAFCPSFLRAGFLNSIQAPHPVPGGGSLPPRIPAGRPVMIVVEYMENGSLDSFLRKHDGHFTVIQLVGMLRGIASGMKYLSDMGYVHRDLAARNILVNSNLVCKVSDFGLSRVLEDDPEAAYTTTDLFQTLTLNLCYSA

SEQ ID NO: 17393 - protein, 341 aa, Homo sapiens
MYGKGKSNSSAVPSDSQAREKLALYVYEYLLHVGAQKSAQTFLSEIRWEKNITLGEPPGFLHSWWCVFWDLYCAAPERRETCEHSSEAKAFHDYSAAAAPSPVLGNIPPGDGMPVGPVPPGFFQALGGVPGSQPLLPSGMDPTRQQGHPNMGGPMQRMTPPRGMVPLGPQNYGGAMRPPLNALGGPGMPGMNMGPGGGRPWPNPTNANSIPYSSASPGNYVGPPGGGGPPGTPIMPSPADSTNSGDNMYTLMNAVPPGPNRPNFPMGPGSDGPMGGLGGMESHHMNGSLGSGDMDSISKNSPNNMSLSNQPGTPRDDGEMGGNFLNPFQSESYSPSMTMSV

SEQ ID NO: 17394 - protein, 295 aa, Homo sapiens
MADEKPSNGVLVHMVKLLIKTFLDGIFDDLMENNVLNTDEIHLIGKCLKFVVSNAENLVDDITETAQIAGKIFREHLWNSKKQLSSDISSDGEREANMPGLNIRNKEFNYLHNRNGSELDLLGMUDLLENLGYSVVIKENLTAQEMETALRQFAAHPEHQSSDSTFLVFMSHSILNGICGTKHWDQEPDVLHDDTIFEIFNNRNCQSLKDKPKMVLGLFGSPLTVEKPVQILMVGSCKVTSVMMLLQRLMWKRTSLLSNLPHHVQHSFETPNILTQLPTIERLSMTRYFYLFPGN

SEQ ID NO: 17395 - protein, 271 aa, Homo sapiens
MTDLEGCFECCIKCLGGIPYASLIATILLYAGVALFCGCGHEALSGTVNILQTYFEMARTAGDTLDVFTMIDIFKYVIYGIAAAFFVYGILLMVEGFFTTGAIKDLYGDFKITTCGRCVSAWFIMLTYLFMLAWLGVTAFTSLPVYMYFNLWTICRNTTLVEGANLCLDLRQFGIVTIGEEKKICTVSENFLRMCESTELNMTFHLFIVALAGAGAAVIAMVHYLMVLSANWAYVKDACRMQKYEDIKSKEEQELHDIHSTRSKERLNAYT

SEQ ID NO: 17396 - protein, 155 aa, Homo sapiens
RCDSGGSATRQGSPGAVLPRSAVWSTGPTSPATPRPSSASGGFVDSSEGSAGSGPLWCSAESCLPSTRRRPSLSQERLAGAGTPLPWASSSPTSTPALGGRRGLLRCRSQPCVLSGKRSRRKRRREEDARWTRPSLDFLKMTQVASRTVSPSMLP

SEQ ID NO: 17397 - protein, 86 aa, Homo sapiens
MNWFGSNFFRCPEDLSLLNIYSPLLSHMSSEDEHFISNLRGHVPASAVVKQPVRGASGRTTITAIVQTGGGWSTGLFSVCRDRRIL

SEQ ID NO: 17398 - protein, 246 aa, Homo sapiens
MALYLNGATVVAGFGGALGYLLGAIDWAHLELGRLLGTEFQVMFFFSALVLTLCFTVHLCSISEAPLTEVAKGIPPQQTPQDPPLSSDGMYEYGSIEKVKNGYVNPELAMQGAKNKNHAEQTRRAMTLKSLLRALVNMPPHYRYLCISHLIGWTAFLSNMLFFTDFMGQIVYRGDPYSAHNSTEFLIYERGVEVGCWGLCINSVFSSLYSYFQKVLVSYIGLKGLYFTGYLLFGLGTGFIGLFPNV

SEQ ID NO: 17399 - protein, 1351 aa, Homo sapiens
MWPSQLLIFMMLLAPIIHGGKHSERHPALAAPLRHAERSPGGALPPRHLLQQPAAERTAAHRGQGPRGATRGVRGPGAQGAQIAAQAFSRAPIPMAVVRRELSCESYPIELRCPGTDVIMIESANYGRTDDKICDSDPAQMENIRCYLPDAYKIMSQRCNNRTQCAVVAGPDVFPDPCPGTYKYLEVQYECVPYKVEQKVFLCPGLLKGVYQSEHLFESDHQSGAWCKDPLQASDKIYYMPWTPYRTDTLTEYSSKDDFIAGRPTTTYKLPHRVDGTGFVVYDGALFFNKERTRNIVKFDLRTRIKSGEAIIANANYHDTSPYRWGGKSDIDLAVDENGLWVIYATEQNNGKIVISQLNPYTLRIEGTWDTAYDKRSASNAFMICGILYVVKSVYEDDDNEATGNKIDYIYNTDQSKDSLVDVPFPNSYQYIAAVDYNPRDNLLYVWNNYHVVKYSLDFGPLDSRSGQAHHGQVSYISPPIHLDSELERPSVKDISTTGPLGMGSTTTSTTLRTTTLSPGRSTTPSVSGRRNRSTSTPSPAVEVLDDMTTHLPSASSQIPALEESCEAVEAREIMWFKTRQGQIAKQPCPAGTIGVSTYLCLAPDGIWDPQGPDLSNCSSPWVNHITQKLKSGETAANIARELAEQTRNHLNAGDITYSVRAMDQLVGLLDVQLRNLTPGGKDSAARSLNKLQKRERSCRAYVQAMVETVNNLLQPQALNAWRDLTTSDQLRAATMLLHTVEESAFVLADNLLKTDIVRENTDNIKLEVARLSTEGNLEDLKFPENMGHGSTIQLSANTLKQNGRNGEIRVAFVLYNNLGPYLSTENASMKLGTEALSTNHSVIVNSPVITAAINKEFSNKVYLADPVVFTVKHIKQSEENFNPNCSFWSYSKRTMTGYWSTQGCRLLTTNKTHTTCSCNHLTNFAVLMAHVEVKHSDAVHDLLLDVITWVGILLSLVCLLICIFTFCFFRGLQSDRNTIHKNLCISLFVAELLFLIGINRTDQPIACAVFAALLHFFFLAAFTWMFLEGVQLYIMLVEVFESEHSRRKYFYLVGYGMPALIVAVSAAVDYRSYGTDKVCWLRLDTYFIWSFIGPATLIIMLNVIFLGIALYKMFHHTAILKPESGCLDNINYEDNRPFIKSWVIGAIALLCLLGLTWAFGLMYINESTVIMAYLFTIFNSLQGMFIFIFHCVLQKKVRKEYGKCLRTHCCSGKSTESSIGSGKTSGSRTPGRYSTGSQSRIRRMWNDTVRKQSESSFITGDINSSASLNRGAMANHLISNALLRPHGTNNPYNTLLGEPAVCNNPSVSMYNAQEPYRETSMGVKLNIAYQIGASEQCQGYKCHGYSTTEW

SEQ ID NO: 17400 - protein, 341 aa, Homo sapiens
MADEKPSNGVLVHMVKLLIKTFLDGIFDDLMENNVLNTDEIHLIGKCLKFVVSNAENLVDDITETAQIAGKIFREHLWNSKKQLSSDISSDGEREANMPGLNIRNKEFNYLHNRNGSELDLLGMUDLLENLGYSVVIKENLTAQEMETALRQFAAHPEHQSSDSTFLVFMSHSILNGICGTKHWDQEPDVLHDDTIFEIFNNRNCQSLKDKPKVIIMQACRGNGAGIVWFTTDSGKASADTHGRLLQGNICNDAVTKAHVEKDFIAFKSSTPHNVSWRHETNGSVFISQIIYYFREYSWSHHLEEIFQKVQHSFETPNILTQLPTIERLSMTRYFYLFPGN

SEQ ID NO: 17401 - protein, 299 aa, Homo sapiens
MITFLYIFFSILIMVLFVLGNFANGFIALVNFIDWVKRKKISSADQILTALAVSRIGLLWALLLNWYLTVLNPAFYSVELRITSYNAWVVTNHFSMWLAANLSIFYLLKIANFSNLLFLHLKRRVRSVILVILLGTLIFLVCHLLVANMDESMWAEEYEGNMTGKMKLRNTVHLSYLTVTTLWSFIPFTLSLISFLMLICSLCKHLKKMQLHGEGSQDLSTKVHIKALQTLISFLLLCAIFFLFLIVSVWSPRRLRNDPVVMVSKAVGNIYLAFDSFILIWRTKKLKHTFLLILCQIRC

SEQ ID NO: 17402 - protein, 218 aa, Homo sapiens
MNGRADFREPNAEVPRPIPPVPLAATSMLITQGLISKGILSSHPKYGSIPKLILACIMGYFAGKLSYVKTCQEKFKKLENSPLGEALRSGQARRSSPPGHYYQKSKYDSSVSGQSSFVTSPAADNIEMLPHYEPIPFSSSMNESAPTGITDHIVQGPDPNLEESPKRKNITYEELRNKNRESYEVSLTQKTDPSVRPMHERVPKKEVKVNKYGDTWDE

SEQ ID NO: 17403 - protein, 821 aa, Homo sapiens
MLSDKDPMLGSASNQFCLPVLDSNDPNFQMPCSTVVGLDDIMDEGVVKESGNDTIDEEELILPNRNLRDKVEENSVRSPRKSPRLMAQEQVRSLRQSTIAKRSNAAPLSNTKKASGKTVSTAKAGVKQPERSQVKEEVCMSLKPEYHKENRRCSRNSGQIEVVPEVSVSSSHSSVSSCLEMKDEDGLDSKHKCNNPGEIDVPSHELNCSLLSETCVTIGEKKNEALMECKAKPVGSPLFKFSDKEEHEQNDSISGKTGETVVEEMIATRKVEQDSKETVKLSHEDDHILEDAGSSDISSDAACTNPNKTENSLVGLPSCVDEVTECNLELKDTMGIADKTENTLERNKIEPLGYCEDAESNRQLESTEFNKSNLEVVDTSTFGPESNILENAICDVPDQNSKQLNAIESTKIESHETANLQDDRNSQSSSVSYLESKSVKSKHTKPVIHSKQNMTTDAPKKIVAAKYEVIHSKTKVNVKSVKRNTDVPESQQNFHRPVKVRKKQIDKEPKIQSCNSGVKSVKNQAHSVLKKTLQDQTLVQIFKPLTHSLSDKSHAHPGCLKEPHHPAQTGHVSHSSQKQCHKPQQQAPAMKTNSHVKEELEHPGVEHFKEEDKLKLKKPEKNLQPRQRRSSKSFSLDEPPLFIPDNIATIRREGSDHSSSFESKYMWTPSKQCGFCKKPHGNRFMVGCGRCDDWFHGDCVGLSLSQAQQMGEEDKEYVCVKCCAEEDKKTEILDPDTLENQATVEFHSGDKTMECEKLGLSKHTTNDRTKYIDDTVKHKVKILKRESGEGRNSSDCRDNEIKKWQLAPLRKMGQPVLPRRS

SEQ ID NO: 17404 - protein, 709 aa, Homo sapiens
MESMGMVYSVPSSCNGPTESTFSTSWKGDAFTYMTPSATSQSNQVNENGKNPSCGNSWVSLNKVPPLVPKEAATLLVARDNPAGCSGSAGYPERLIQQRHMPERPSKIGLLTSGTSRLETGPGGASRFRERSLSVPTDSGTTDVDYDEEQKANEACALPFASTSSEGSNSADNIASLSAQQEAQHRRQRSKSISLRKAKKKPSPPTRSVSLVKDEPGLLPEGGSALPKDQRPKSLCLSLEHQGHHSSHPDAQGHPAIPNHKDPESTQFSHHWYLTDWKSGDTYQSLSSSSTATGTTVIECTQVQGSSESLASPSTSRATTPSQLSIEVEAREISSPGRPPGLMSPSSGYSSQSETPTPTVSMSLTLGHLPPPSSSVRVRPVVPERKSSLPPTSPMEKFPKSRLSFDLPLTSSPNLDLSGMSISIRSKTKVSRHHSETNFGVKLAQKTNPNQPIMPMVTQSDLRSVRLRSVSKSEPEDDIESPEYAEEPRAEEVFTLPERKTKPPVAEKPPVARRPPSLVHKPPSVPEEYALTSPTLAMPPRSSIQHARPLPQDSYTVVRKPKPSSFPDGRSPGESTAPSSLVFTPFASSSDAFFSGTQQPPQGSVEDEGPKVRVLPERISLQSQEEAEKKKGKIPPPVPKKPSVLYLPLTSPTAQMEAYVAEPRLPLSPIITLEEDTKCPATGDDLQSLGQRVTSTPQADSEREASPLG

SEQ ID NO: 17405 - protein, 1026 aa, Homo sapiens
MRDFGFGVLQTAPLRSSSPGPLFCGEAYGPYAVGSVNPLPSATPFGPLSPPPLPVTGFLEAASPFSVPLGGGAGSPAAAASSSSPFLAHQQTMQDELLLGLTQQPARPLSGAAATEKLPDHHPGGGTIAGVTHLLPSQDFKPSLHHPSSSSASSCCCCRTSSPQDFSKRQQQQLSSQKRKEFSPPHLPHPPDSKPPPPPPPLHCPGRFSPPPPPAGPLLQPAQLAQRQQQQPPQQFSLLHQQHLSPQDFAPRQRPADLPPLPQLPPSPPAAPRRRHGGAGSPRKTPAAGEGSAAESPNAGLASSTPVNPAPGSMESPNHPLLNSPSNLLPGGALGAGAFSSLQSPDLPHPGGGGGGGGGGPPGGGGGGGSASPPPLPGFGTPWSVQTASPPPQPQQPPPTQPQQQPPPPQQPPQPQPQPPGSSATTPGGGSGGSLSAMPPPSPDSENGFYPGLPSSMNPAFFPSFSPVSPHGCTGLSVPTSGGGGGGFGGPFSATAVPPPPPPAMNIPQQQPPPPAAPQQPQSRRSPVSPQLQQQHQAAAAAFLQQRNSYNHHQPLLKQSPWSNHQSSGWGTGSMSWGAMHGRDHRRTGNMGIPGTMNQISPLKKPFSGNVIAPPKFTRSTPSLTPKSWIEDNVFRTDNNSNTLLPLQVRSSLQLPAWGSDSLQDSWCTAAGTSRIDQDRSRMYDSLNMHSLENSLIDIMRAEHDPLKGRLSYPHPGTDNLLMLNGRSSLFPIDDGLLDDGHSDQVGVLNSPTCYSAHQNGERIERFSRKVFVGGLPPDIDEDEITASFRRFGPLVVDWPHKAESKSYFPPKGYAFLLFQEESSVQALIDACIEEDGKLYLCVSSPTIKDKPVQIRPWNLSDSDFVMDGSQPLDPRKTIFVGGVPRPLRAVELAMIMDRLYGGVCYAGIDTDPELKYPKGAGRVAFSNQQSYIAAISARFVQLQHGDIDKRVEVKPYVLDDQMCDECQGARCGGKFAPFFCANVTCLQYYCEFCWANIHSRAGREFHKPLVKEGADRPRQIHFRWN

SEQ ID NO: 17406 - protein, 906 aa, Homo sapiens
MVGLLLFFFPAIFLEVSLLPRSPGRKVLLAGASSQRSVARMDGDVIIGALFSVHHQPPAEKVPERKCGEIREQYGIQRVEAMFHTLDKINADPVLLPNITLGSEIRDSCWHSSVALEQSIEFIRDSLISIRDEKDGINRCLPDGQSLPPGRTKKPIAGVIGPGSSSVAIQVQNLLQLFDIPQIAYSATSIDLSDKTLYKYFLRVVPSDTLQARAMLDIVKRYNWTYVSAVHTEGNYGESGMDAFKELAAQEGLCIAHSDKIYSNAGEKSFDRLLRKLRERLPKARVVVCFCEGMTVRGLLSAMRRLGVVGEFSLIGSDGWADRDEVIEGYEVEANGGITIKLQSPEVRSFDDYFLKLRLDTNTRNPWFPEFWQHRFQCRLPGHLLENPNFKRICTGNESLEENYVQDSKMGFVINAIYAMAHGLQNMHHALCPGHVGLCDAMKPIDGSKLLDFLIKSSFIGVSGEEVWFDEKGDAPGRYDIMNLQYTEANRYDYVHVGTWHEGVLNIDDYKIQMNKSGVVRSVCSEPCLKGQIKVIRKGEVSCCWICTACKENEYVQDEFTCKACDLGWWPNADLTGCEPIPVRYLEWSNIESIIAIAFSCLGILVTLFVTLIFVLYRDTPVVKSSSRELCYIILAGIFLGYVCPFTLIAKPTTTSCYLQRLLVGLSSAMCYSALVTKTNRIARILAGSKKKICTRKPRFMSAWAQVIIASILISVQLTLVVTLIIMEPPMPILSYPSIKEVYLICNTSNLGVVAPLGYNGLLIMSCTYYAFKTRNVPANFNEAKYIAFTMYTTCIIWLAFVPIYFGSNYKIITTCFAVSLSVTVALGCMFTPKMYIIIAKPERNVRSAFTTSDVVRMHVGDGKLPCRSNTFLNIFRRKKAGAGNAKKRQPEFSPTSQCPSAHVQL

SEQ ID NO: 17407 - protein, 807 aa, Homo sapiens
MEIPFEEVLERAKAGDPKAQTEVGKHYLQLAGDTDEELNSCTAVDWLVLAAKQGRREAVKLLRRCLADRRGITSENEREVRQLSSETDLERAVRKAALVMYWKLNPKKKKQVAVAELLENVGQVNEHDGGAQPGPVPKSLQKQRRMLERLVSSESKNYIALDDFVEITKKYAKGVIPSSLFLQDDEDDDELAGKSPEDLPLRLKVVKYPLHAIMEIKEYLIDMASRAGMHWLSTIIPTHHINALIFFFIVSNLTIDFFAFFIPLVIFYLSFISMVICTLKVFQDSKAWENFRTLTDLLLRFEPNLDVEQAEVNFGWNHLEPYAHFLLSVFFVIFSFPIASKDCIPCSELAVITGFFTVTSYLSLSTHAEPYTRRALATEVTAGLLSLLPSMPLNWPYLKVLGQTFITVPVGHLVVLNVSVPCLLYVYLLYLFFRMAQLRNFKGTYCYLVPYLVCFMWCELSVVILLESTGLGLLRASIGYFLFLFALPILVAGLALVGVLQFARWFTSLELTKIAVTVAVCSVPLLLRWWTKASFSVVGMVKSLTRSSMVKLILVWLTAIVLFCWFYVYRSEGMKVYNSTLTWQQYGALCGPRAWKETNMARTQILCSHLEGHRVTWTGRFKYVRVTDIDNSAESAINMLPFFIGDWMRCLYGEAYPACSPGNTSTAEEELCRLKLLAKHPCHIKKFDRYKFEITVGMPFSSGADGSRSREEDDVTKDIVLRASSEFKSVLLSLRQGSLIEFSTILEGRLGSKWPVFELKAISCLNCMAQLSPTRRHVKIEHDWRSTVHGAVKFAFDFFFFPFLSAA

SEQ ID NO: 17408 - protein, 165 aa, Homo sapiens
MEEPQSDPSVEPPLSQETFSDLWKLLPENNVLSPLPSQAMDDLMLSPDDIEQWFTEDPGPDEAPRMPEAAPPVAPAPAAPTPAAPAPAPSWPLSSSVPSQKTYQGSYGFRLGFLHSGTAKSVTCTYSPALNKMFCQLAKTCPVQLWVDSTPPPGTRVRAMAIYKQ

SEQ ID NO: 17409 - protein, 1231 aa, Homo sapiens
MWPSQLLIFMMLLAPIIHAFSRAPIPMAVVRRELSCESYPIELRCPGTDVIMIESANYGRTDDKICDSDPAQMENIRCYLPDAYKIMSQRCNNRTQCAVVAGPDVFPDPCPGTYKYLEVQYECVPYKVEQKVFLCPGLLKGVYQSEHLFESDHQSGAWCKDPLQASDKIYYMPWTPYRTDTLTEYSSKDDFIAGRPTTTYKLPHRVDGTGFVVYDGALFFNKERTRNIVKFDLRTRIKSGEAIIANANYHDTSPYRWGGKSDIDLAVDENGLWVIYATEQNNGKIVISQLNPYTLRIEGTWDTAYDKRSASNAFMICGILYVVKSVYEDDDNEATGNKIDYIYNTDQSKDSLVDVPFPNSYQYIAAVDYNPRDNLLYVWNNYHVVKYSLDFGPLDSRSGQAHHGQVSYISPPIHLDSELERPSVKDISTTGPLGMGSTTTSTTLRTTTLSPGRSTTPSVSGRRNRSTSTPSPAVEVLDDMTTHLPSASSQIPALEESCEAVEAREIMWFKTRQGQIAKQPCPAGTIGVSTYLCLAPDGIWDPQGPDLSNCSSPWVNHITQKLKSGETAANIARELAEQTRNHLNAGDITYSVRAMDQLVGLLDVQLRNLTPGGKDSAARSLNKLQKRERSCRAYVQAMVETVNNLLQPQALNAWRDLTTSDQLRAATMLLHTVEESAFVLADNLLKTDIVRENTDNIKLEVARLSTEGNLEDLKFPENMGHGSTIQLSANTLKQNGRNGEIRVAFVLYNNLGPYLSTENASMKLGTEALSTNHSVIVNSPVITAAINKEFSNKVYLADPVVFTVKHIKQSEENFNPNCSFWSYSKRTMTGYWSTQGCRLLTTNKTHTTCSCNHLTNFAVLMAHVEVKHSDAVHDLLLDVITWVGILLSLVCLLICIFTFCFFRGLQSDRNTIHKNLCISLFVAELLFLIGINRTDQPIACAVFAALLHFFFLAAFTWMFLEGVQLYIMLVEVFESEHSRRKYFYLVGYGMPALIVAVSAAVDYRSYGTDKVCWLRLDTYFIWSFIGPATLIIMLNVIFLGIALYKMFHHTAILKPESGCLDNIKSWVIGAIALLCLLGLTWAFGLMYINESTVIMAYLFTIFNSLQGMFIFIFHCVLQKKVRKEYGKCLRTHCCSGKSTESSIGSGKTSGSRTPGRYSTGSQSRIRRMWNDTVRKQSESSFITGDINSSASLNREPYRETSMGVKLNIAYQIGASEQCQGYKCHGYSTTEW

SEQ ID NO: 17410 - protein, 999 aa, Homo sapiens
MEPRAAAAGEPEPPAASSSFQARLWKNLQLGVGRSKGGGGGRAGGPERRTADTPSPSPPPPVGTGNAPARGSGAGSRWSGFKKRKQVLDRVFSSSQPNLCCSSPEPLEPGGAGRAEQGSTLRRRIREHLLPAVKGPAAASGAAGGTPPGGRSPDSAPSSSSASSSLSSSPQPPPRGDRARDEGARRQGPGAHLCHQKSSSLPGTACLEQLLEPPPPPAEPARSPAESRAPETGEEHGSSQKIINTAGTSNAEVPLADPGMYQLDITLRRGQSLAARDRGGTSDPYVKFKIGGKEVFRSKIIHKNLNPVWEEKACILVDHLREPLYIKVFDYDFGLQDDFMGSAFLDLTQLELNRPTDVTLTLKDPHYPDHDLGIILLSVILTPKEGESRDVTMLMRKSWKRSSKELSENEVVGSYFSVKSLFWRTCGRPALPVLGFCRAELQNPYCKNVQFQTQSLRLSDLHRKSHLWRGIVSITLIEGRDLKAMDSNGLSDPYVKFRLGHQKYKSKIMPKTLNPQWREQFDFHLYEERGGVIDITAWDKDAGKRDDFIGRCQVDLSALSREQTHKLELQLEEGEGHLVLLVTLTASATVSISDLSVNSLEDQKEREEILKRYSPLRIFHNLKDVGFLQVKVIRAEGLMAADVTGKSDPFCVVELNNDRLLTHTVYKNLNPEWNKVFTFNIKDIHSVLEVTVYDEDRDRSADFLGKVAIPLLSIQNGEQKAYVLKNKQLTGPTKGVIYLEIDVIFNAVKASLRTLIPKEQKYIEEENRLSKQLLLRNFIRMKRCVMVLVNAAYYVNSCFDWDSPPRSLAAFVLFLFVVWNFELYMIPLVLLLLLTWNYFLIISGKDNRQRDTVVEDMLEDEEEEDDKDDKDSEKKGFINKIYAIQEVCVSVQNILDEVASFGERIKNTFNWTVPFLSWLAIVALCVFTAILYCIPLRYIVLVWGINKFTKKLRSPYAIDNNELLDFLSRVPSDVQVVQYQELKPDPSHSPYKRKKNNLG

SEQ ID NO: 17411 - protein, 662 aa, Homo sapiens
MIAGGNQSILLWIKKENSYVNLKRTIPTLNEGTVKRWIADVETKRWQSTKREIQEIFSSPACLTGSFLRKRRTTEMMPVYLDLNKARNIFKELTQKDWITNMITTCLKDNLLKRLPFHSPPQEALEIFFLLPECPMMHISNNWESLVVPFAKVVCKMSDQSSLVLEEYWATLQESTFSKLVQMFKTAVICQLDYWDESAEENGNVQALLEMLKKLHRVNQVKCQLPESIFQVDELLHRLNFFVEVCRRYLWKMTVDASENVQCCVIFSHFPFIFNNLSKIKLLHTDTLLKIESKKHKAYLRSAAIEEERESEFALRPTFDLTVRRNHLIEDVLNQLSQFENEDLRKELWVSFSGEIGYDLGGVKKEFFYCLFAEMIQPEYGMFMYPEGASCMWFPVKPKFEKKRYFFFGVLCGLSLFNCNVANLPFPLALFKKLLDQMPSLEDLKELSPDLGKNLQTLLDDEGDNFEEVFYIHFNVHWDRNDTNLIPNGSSITVNQTNKRDYVSKYINYIFNDSVKAVYEEFRRGFYKMCDEDIIKLFHPEELKDVIVGNTDYDWKTFEKNARYEPGYNSSHPTIVMFWKAFHKLTLEEKKKFLVFLTGTDRLQMKDLNNMKITFCCPESWNERDPIRALTCFSVLFLPKYSTMETVEEALQEAINNNRGFG

SEQ ID NO: 17412 - protein, 203 aa, Homo sapiens
MAAEGWIWRWGWGRRCLGRPGLLGPGPGPTTPLFLLLLLGSVTADITDGNSEHLKREHSLIKPYQGVGSSSMPLWDFQGSTMLTSQYVRLTPDERSKEGSIWNHQPCFLKDWEMHVHFKVHGTGKKNLHGDGIALWYTRDRLVPGPVFGSKDNFHGLAIFLDTYPNDETTEHRLDQDRAQRQLPQVAQRQRGRPHGELPQRAP

SEQ ID NO: 17413 - protein, 118 aa, Homo sapiens
METNCRKLVSACVQLEKDKSQQGKNEDVGAEDPSKKKRQRRQRTHFTSQQLQELEATFQRNRYPDMSTREEIAVWTNLTEARVRVWFKNRRAKWRKRERNQQAELCKNGFGPQFNGLM

SEQ ID NO: 17414 - protein, 367 aa, Homo sapiens
DSKLNKNIYSDIPPQVPVRPISYTPSIPSDSRNNLDRNSFEGSAIPEHPEFSTFNPESVHGHRKAVAVCSVAPNLPPPPPSNSPSDSDSIQKPSWDFDYDTKVVDLDPCLSKKPLEEKPSQPYSARESLSEVQSLSSFQSESCDDNESLAAPDLSKPRGYHWDTSDWMPSVPLPDIQEFPNYEVIDEQTPLYSADPNAIDTDYYPGGYDIESDFPPPPEDFPAADELPPLPPEFSNQFESIHPPRDMPAAGSLGSSSRNRQRFNLNQYLPNFYPLDMSEPQTKGTGENSTCREPHAPYPPGYQRHFEAPAVESMPMSVYASTASCSDVSACCEVESEVMMSDYESGDDGHFEEVTIPPLDSQQHTEV

SEQ ID NO: 17415 - protein, 35 aa, Homo sapiens
ARLLCAEMPKKAGATTKASSRVKARARNQRDHFLP

SEQ ID NO: 17416 - protein, 489 aa, Homo sapiens
MDECGSRIRRRVSLPKRNRPSLGCIFGAPTAAELVPGDEGKEEEEMVAENRRRKTAGVLPVEVQPLLLSDSPECLVLGGGDTNPDLLRHMPTDRGVGDQPNDSEVDMFGDYDSFTENSFIAQVDDLEQKYMQLPEHKKHATDFATENLCSESIKNKLSITTIGNLTELQTDKHTENQSGYEGVTIEPGADLLYDVPSSQAIYFENLQNSSNDLGDHSMKERDWKSSSHNTVNEELPHNCIEQPQQNDESSSKVRTSSDMNRRKSIKDHLKNAMTGNAKAQTPIFSRSKQLKDTLLSEEINVAKKTVESSSNDLGPFYSLPSKVRDLYAQFKGIEKLYEWQHTCLTLNSVQERKNLIYSLPTSGGKTLVAEILMLQELLCCRKDVLMILPYVAIVQEKISGLSSFGIELGFFVEEYAGSKGRFPPTKRREKKSLYIATIEKGHSLVNSLIETGRIDSLGLVVVDELHMIGEGSRGATLEMTLAKILYTSS

SEQ ID NO: 17417 - protein, 478 aa, Homo sapiens
MLLWVQQALLALLLPTLLAQGEARRSRNTTRPALLRLSDYLLTNYRKGVRPVRDWRKPTTVSIDVIVYAILNVDEKNQVLTTYIWYRQYWTDEFLQWNPEDFDNITKLSIPTDSIWVPDILINEFVDVGKSPNIPYVYIRHQGEVQNYKPLQVVTACSLDIYNFPFDVQNCSLTFTSWLHTIQDINISLWRLPEKVKSDRSVFMNQGEWELLGVLPYFREFSMESSNYYAEMKFYVVIRRRPLFYVVSLLLPSIFLMVMDIVGFYLPPNSGERVSFKITLLLGYSVFLIIVSDTLPATAIGTPLIGVYFVVCMALLVISLAETIFIVRLVHKQDLQQPVPAWLRHLVLERIAWLLCLREQSTSQRPPATSQATKTDDCSAMGNHCSHMGGPQDFEKSPRDRCSPPPPPREASLAVCGLLQELSSIRQFLEKRDEIREVARDWLRVGSVLDKLLFHIYLLAVLAYSITLVMLWSIWQYA

SEQ ID NO: 17418 - protein, 567 aa, Homo sapiens
MARLTKRRQADTKAIQHLWAAIEIIRNQKQIANIDRITKYMSRVHGMHPKETTRQLSLAVKDGLIVETLTVGCKGSKAGIEQEGYWLPGDEIDWETENHDWYCFECHLPGEVLICDLCFRVYHSKCLSDEFRLRDSSSPWQCPVCRSIKKKNTNKQEMGTYLRFIVSRMKERAIDLNKKGKDNKHPMYRRLVHSAVDVPTIQEKVNEGKYRSYEEFKADAQLLLHNTVIFYGDSEQADIARMLYKDTCHELDELQLCKNCFYLSNARPDNWFCYPCIPNHELVWAKMKGFGFWPAKVMQKEDNQVDVRFFGHHHQRAWIPSENIQDITVNIHRLHVKRSMGWKKACDELELHQRFLREGRFWKSKNEDRGEEEAESSISSTSNEQLKVTQEPRAKKGRRNQSVEPKKEEPEPETEAVSSSQEIPTMPQPIEKVSVSTQTKKLSASSPRMLHRSTQTTNDGVCQSMCHDKYTKIFNDFKDRMKSDHKRETERVVREALEKLRSEMEEEKRQAVNKAVANMQGEMDRKCKQVKEKCKEEFVEEIKKLATQHKQLISQTKKKQWVNTSLF

SEQ ID NO: 17419 - protein, 244 aa, Homo sapiens
INDIAFKPDGTQLILAAGSRLLVYDTSDGTLLQPLKGHKDTVYCVAYAKDGKRFASGSADKSVIIWTSKLEGILKYTHNDAIQCVSYNPITHQLASCSSSDFGLWSPEQKSVSKHKSSSKIICCREERNDILAVADWGQKVSFYQLSGKQIGKDRALNFDPCCISYFTKGEYILLGGSDKQVSLFTKDGVRLGTVGEQNSWVWTCQAKPDSNYVVVGCQDGTISFYQLIFSTVHGLYKDRYAYR

SEQ ID NO: 17420 - protein, 975 aa, Homo sapiens
MKQSPALAPEERCRRAGSPKPVLRADDNNMGNGCSQKLATANLLRFLLLVLIPCICALVLLLVILLSYVGACMNITHSQCQMLPYHATLTPLLSVVRNMEMEKFLKFFTYLHRLSCYQHIMLFGCTLAFPECIIDGDDSHGLLPCRSFCEAAKEGCESVLGMVNYSWPDFLRCSQFRNQTESSNVSRICFSPQQENGKQLLCGRGENFLCASGICIPGKLQCNGYNDCDDWSDEAHCNCSENLFHCHTGKCLNYSLVCDGYDDCGDLSDEQNCDCNPTTEHRCGDGRCIAMEWVCDGDHDCVDKSDEVNCSCHSQGLVECRNGQCIPSTFQCDGDEDCKDGSDEENCSVIQTSCQEGDQRCLYNPCLDSCGGSSLCDPNNSLNNCSQCEPITLELCMNLPYNSTSYPNYFGHRTQKEASISWESSLFPALVQTNCYKYLMFFSCTILVPKCDVNTGEHIPPCRALCEHSKERCESVLGIVGLQWPEDTDCSQFPEENSDNQTCLMPDEYVEECSPSHFKCRSGQCVLASRRCDGQADCDDDSDEENCGCKERDLWECPSNKQCLKHTVICDGFPDCPDYMDEKNCSFCQDDELECANHACVSRDLWCDGEADCSDSSDEWDCVTLSINVNSSSFLMVHRAATEHHVCADGWQEILSQLACKQMGLGEPSVTKLIQEQEKEPRWLTLHSNWESLNGTTLHELLVNGQSCESRSKISLLCTKQDCGRRPAARMNKRILGGRTSRPGRWPWQCSLQSEPSGHICGCVLIAKKWVLTVAHCFEGRENAAVWKVVLGINNLDHPSVFMQTRFVKTIILHPRYSRAVVDYDISIVELSEDISETGYVRPVCLPNPEQWLEPDTYCYITGWGHMGNKMPFKLQEGEVRIISLEHCQSYFDMKTITTRMICAGYESGTVDSCMGDSGGPLVCEKPGGRWTLFGLTSWGSVCFSKVLGPGVYSNVSYFVEWIKRQIYIQTFLLN

SEQ ID NO: 17421 - protein, 743 aa, Homo sapiens
MGTSHPAFLVLGCLLTGLSLILCQLSLPSILPNENEKVVQLNSSFSLRCFGESEVSWQYPMSEEESSDVEIRNEENNSGLFVTVLEVSSASAAHTGLYTCYYNHTQTEENELEGRHIYIYVPDPDVAFVPLGMTDYLVIVEDDDSAIIPCRTTDPETPVTLHNSEGVVPASYDSRQGFNGTFTVGPYICEATVKGKKFQTIPFNVYALKATSELDLEMEALKTVYKSGETIVVTCAVFNNEVVDLQWTYPGEVKGKGITMLEEIKVPSIKLVYTLTVPEATVKDSGDYECAARQATREVKEMKKVTISVHEKGFIEIKPTFSQLEAVNLHEVKHFVVEVRAYPPPRISWLKNNLTLIENLTEITTDVEKIQEIRYRSKLKLIRAKEEDSGHYTIVAQNEDAVKSYTFELLTQVPSSILDLVDDHHGSTGGQTVRCTAEGTPLPDIEWMICKDIKKCNNETSWTILANNVSNIITEIHSRDRSTVEGRVTFAKVEETIAVRCLAKNLLGAENRELKLVAPTLRSELTVAAAVLVLLVIVIISLIVLVVIWKQKPRYEIRWRVIESISPDGHEYIYVDPMQLPYDSRWEFPRDGLVLGRVLGSGAFGKVVEGTAYGLSRSQPVMKVAVKMLKPTARSSEKQALMSELKIMTHLGPHLNIVNLLGACTKSGPIYIITEYCFYGDLVNYLHKNRDSFLSHHPEKPKKELDIFGLNPADESTRSSGQGCLSSGTLQELSVDLQARGPC

SEQ ID NO: 17422 - protein, 2263 aa, Homo sapiens
QQLCILPPHHVNVLPPLHIKTEQSFRLIPLQHSKVASVVRDQNLSNVWTVEYALELLFIGGLVPEAVWLAYKLGDWKTSVSIGVAFQLFCKRDSNFMRSKKKSLNLPLRMTPAQIFQEKLQCVLGQPASLEAKNEMGSKYKQFTDPIEEEDANLLFGSVQEVLKASVMADADILSETFQLLIDSAKDFSKRLWGLVPFGLYLPAPPLYCPQPAILSEEDGDDLLLKAEKNNRQKVSGILQRVLLLFRAAQCSFPVAQWYILQLRWARKVMQKIRMKGSLPSLSPFPQSLLNYCKGGIAFFRPGAAGDHKLDEVSIRAIGCFRELCALCWMLHVRDKLSYSCRQYQKARENVKGEKDLEVEFDSCMIEHCLSAVEWAYRMLPFSRFFNMEELIQDIILSLIGELPPIRKVAEIFVKAFPYPEDVRVPLRDKYHSLHQRLRHCVVKGPQTEEMMSVVMHSIQKVRVKALKRVQRNIGSFEVNIWEPIEEEKPDEAPGVDRYSLGTSLSRSTLTELGDSVVHSDADTFSEALSVEEKSRINIYQRNAPNHMELTSIHKPTDKRKMCNQKENPTKKEDHEKLSQNTLPVIGVWEFERDDDEYIKFLDLFLSYILERDLPYSRDADIPFLTSFSGKLREHELNSLLFDVHTTLKRHQSKTKSQNVFRAGSCFVVAPESYESEKSSSLNDEYGMHLENQKLSSSVLVNQGIKPFLQYPSNEVNKNEGMSGLFGLKQRSIYKIQDDTREKCLIQRSSNHIFWTPKSIKTRRCIFKAIQCNDINPQEDLPLALNTFGSIGRLLEWMIRWSNRRLLCDSGITESSSEYSPVIRVKTSTAAILTSLWLLEQPYFATYKAKNAIIKMVENRDTGCQIGPNIERESKSDAGGSVAVATPGGTEERNGQNKSCQNILNRMPTEAKNPDIKEINDDIISITHNTKKEFIDIDENLLEVEAFTEEEMDMHISDYEEDIEESVGGFRSPSLAICMMTLPQQLEEEFTEEVQCQREEPLETIMEEKSTEQKGMIEAFSHPGHTTPQSMQVDTSSEISSAQISTYKEKSSSVPLLISNGVNVASQPPAPTPQKTQRNEFTAQLPDCSESVRQMLQDEMFKLVQLQQINFMSLMQIVGSSFANLPDTQQLVQQSQSVHLGESQESNLRGCGDVEDSNKNLKERFFIKPQSMGENAREPRKNSPHCHEGTIPSGQNSTGNVQNVPHGSIPLCQLNGQPRKKGPIPSSQNLPSTSFYPAPAGNTHLYLLSTPSVVQKAPRLIPHAKTFSPGDGFPLLQFKSKQEFQPLFLHTGSIPQVPFRPLPQPREAWGLSDSFQPALPQRAAQTTPASHLNVSQYNTEARKKEVEQKTWAETVITEIPNHVNLDQYVGQENLTPQQDSSVFIKPEKLFDVKPGTLEISPHHSFGLPLLYLPLKPPNMFPSTSRASITVPSTPIQPIAEERKYPRLSLLHSHLSPENRCKKTQLIPLENLIAFKQSQQKLTHNLFEQGDAGHLQLLKVKIEPPEVRQGKDSKKRQRRRAEKELQEKRCEKLRRKPNVTFRPENSIINNDDSEIIKKPKEQQEHCGSHPLDDFDVPFEMLQDDNTSAGLHFMASVKKKAIGSQDASTNTDPEHEPLTAPQLLVPDVYLNLKLSSEMSEKPWSPSIPHTVTNLVGHTYINVIDIEANDLLQELPVREEPSNDNVIKQQSDHLAVPSSAELHYMAASVTNAVPPHNFKSQGLPKPEFRFKGQSTKSDSAEDYLLWKRLQGVSAACPAPSSAAHQLEHLSAKLQKIDEQLLAIQNIAENIEQDFPKPEMLDLHCDKIGPVDHIEFSSGPEFKKTLASKTISISEEVRFLTHMDEEDQSDKKETSEPEFSITENYSGQKTCVFPTADSAVSLSSSSDQNTTSPGMNSSDELCESVSVHPLQMTGLTDIADIIDDLIIKDGVSSEELGLTEQAMGTSRIQHYSGRHSQRTDKERREIQAWMKRKRKERMAKYLNELAEKRGQEHDPFCPRSNPLYMTSREIRLRQKMKHEKDRLLLSEHYSRRISQAYGLMNELLSESVQLPTLPQKPLPNKPSPTQSSSCQHCPSPRGENQHGHSFLINRPGKVKYMSKPSYIHKRKSFGQPQGSPWPHGTATFTIQKKAGGAKAAVRKATQSPVTFQKGSNAPCHSLQHTKKHGSAGLAPQTKQVCVEYEREETVVSPWTIPSEIHKILHESHNSLLQDLSPTEEEEPEHPFGVGGVDSVSESTGSILSKLDWNAIEDMVASVEDQGLSVHWALDL

SEQ ID NO: 17423 - protein, 2699 aa, Homo sapiens
MDVKERRPYCSLTKSRREKERRYTNSSADNEECRVPTQKSYSSSETLKAFDHDSSRLLYGNRVKDLVHREADEFTRQGQNFTLRQLGVCEPATRRGLAFCAEMGLPHRGYSISAGSDADTENEAVMSPEHAMRLWGRGVKSGRSSCLSSRSNSALTLTDTEHENKSDSENEQPASNQGQSTLQPLPPSHKQHSAQHHPSITSLNRNSLTNRRNQSPAPPAALPAELQTTPESVQLQDSWVLGSNVPLESRHFLFKTGTGTTPLFSTATPGYTMASGSVYSPPTRPLPRNTLSRSAFKFKKSSKYCSWKCTALCAVGVSVLLAILLSYFIAMHLFGLNWQLQQTENDTFENGKVNSDTMPTNTVSLPSGDNGKLGGFTQENNTIDSGELDIGRRAIQEIPPGIFWRSQLFIDQPQFLKFNISLQKDALIGVYGRKGLPPSHTQYDFVELLDGSRLIAREQRSLLETERAGRQARSVSLHEAGFIQYLDSGIWHLAFYNDGKNAEQVSFNTIVIESVVECPRNCHGNGECVSGTCHCFPGFLGPDCSRAACPVLCSGNGQYSKGRCLCFSGWKGTECDVPTTQCIDPQCGGRGICIMGSCACNSGYKGESCEEADCIDPGCSNHGVCIHGECHCSPGWGGSNCEILKTMCPDQCSGHGTYLQESGSCTCDPNWTGPDCSNEICSVDCGSHGVCMGGTCRCEEGWTGPACNQRACHPRCAEHGTCKDGKCECSQGWNGEHCTIEGCPGLCNSNGRCTLDQNGWHCVCQPGWRGAGCDVAMETLCTDSKDNEGDGLIDCMDPDCCLQSSCQNQPYCRGLPDPQDIISQSLQSPSQQAAKSFYDRISFLIGSDSTHVIPGESPFNKSLASVIRGQVLTADGTPLIGVNVSFFHYPEYGYTITRQDGMFDLVANGGASLTLVFERSPFLTQYHTVWIPWNVFYVMDTLVMKKEENDIPSCDLSGFVRPNPIIVSSPLSTFFRSSPEDSPIIPETQVLHEETTIPGTDLKLSYLSSRAAGYKSVLKITMTQSIIPFNLMKVHLMVAVVGRLFQKWFPASPNLAYTFIWDKTDAYNQKVYGLSEAVVSVGYEYESCLDLTLWEKRTAILQGYELDASNMGGWTLDKHHVLDVQNGILYKGNGENQFISQQPPVVSSIMGNGRRRSISCPSCNGQADGNKLLAPVALACGIDGSLYVGDFNYVRRIFPSGNVTSVLELSSNPAHRYYLATDPVTGDLYVSDTNTRRIYRPKSLTGAKDLTKNAEVVAGTGEQCLPFDEARCGDGGKAVEATLMSPKGMAVDKNGLIYFVDGTMIRKVDQNGIISTLLGSNDLTSARPLTCDTSMHISQVRLEWPTDLAINPMDNSIYVLDNNVVLQITENRQVRIAAGRPMHCQVPGVEYPVGKHAVQTTLESATAIAVSYSGVLYITETDEKKINRIRQVTTDGEISLVAGIPSECDCKNDANCDCYQSGDGYAKDAKLSAPSSLAASPDGTLYIADLGNIRIRAVSKNKPLLNSMNFYEVASPTDQELYIFDINGTHQYTVSLVTGDYLYNFSYSNDNDITAVTDSNGNTLRIRRDPNRMPVRVVSPDNQVIWLTIGTNGCLKSMTAQGLELVLFTYHGNSGLLATKSDETGWTTFFDYDSEGRLTNVTFPTGVVTNLHGDMDKAITVDIESSSREEDVSITSNLSSIDSFYTMVQDQLRNSYQIGYDGSLRIIYASGLDSHYQTEPHVLAGTANPTVAKRNMTLPGENGQNLVEWRFRKEQAQGKVNVFGRKLRVNGRNLLSVDFDRTTKTEKIYDDHRKFLLRIAYDTSGHPTLWLPSSKLMAVNVTYSSTGQIASIQRGTTSEKVDYDGQGRIVSRVFADGKTWSYTYLEKSMVLLLHSQRQYIFEYDMWDRLSAITMPSVARHTMQTIRSIGYYRNIYNPPESNASIITDYNEEGLLLQTAFLGTSRRVLFKYRRQTRLSEILYDSTRVSFTYDETAGVLKTVNLQSDGFICTIRYRQIGPLIDRQIFRFSEDGMVNARFDYSYDNSFRVTSMQGVINETPLPIDLYQFDDISGKVEQFGKFGVIYYDINQIISTAVMTYTKHFDAHGRIKEIQYEIFRSLMYWITIQYDNMGRVTKREIKIGPFANTTKYAYEYDVDGQLQTVYLNEKIMWRYNYDLNGNLHLLNPSNSARLTPLRYDLRDRITRLGDVQYRLDEDGFLRQRGTEIFEYSSKGLLTRVYSKGSGWTVIYRYDGLGRRVSSKTSLGQHLQFFYADLTYPTRITHVYNHSSSEITSLYYDLQGHLFAMEISSGDEFYIASDNTGTPLAVFSSNGLMLKQIQYTAYGEIYFDSNIDFQLVIGFHGGLYDPLTKLIHFGERDYDILAGRWTTPDIEIWKRIGKDPAPFNLYMFRNNNPASKIHDVKDYITDVNSWLVTFGFHLHNAIPGFPVPKFDLTEPSYELVKSQQWDDIPPIFGVQQQVARQAKAFLSLGKMAEVQVSRRRAGGAQSWLWFATVKSLIGKGVMLAVSQGRVQTNVLNIANEDCIKVAAVLNNAFYLENLHFTIEGKDTHYFIKTTTPESDLGTLRLTSGRKALENGINVTVSQSTTVVNGRTRRFADVEMQFGALALHVRYGMTLDEEKARILEQARQRALARAWAREQQRVRDGEEGARLWTEGEKRQLLSAGKVQGYDGYYVLSVEQYPELADSANNIQFLRQSEIGRR

SEQ ID NO: 17424 - protein, 571 aa, Homo sapiens
MMRQATMDFSTPSVFDQQRGDSSEEVDLTMVYQAASNGDVNALTAVIREDPSILECCDSEGCTPLMHAVSGRQADTVKLLLKMGANINMQDAYGRTSLCLATYLGWLEGCVSLLRNGAKHNIPDKNGRLPLHAATAEPDMRLLTVLLQQSNISEINHQDNESGNRILCSIILSHHQGPSIINYDDESGKTCVHIAAAAGFSDIIHELARVPECNLQALDVDDRTPLHWAAAAGKAECVQSLLELGMDSNLRDINESTPLAYALYCGHTACVKLLSQESRTEPTRPPPSQSSRPQKKERRFNVLNQIFCKNKKEEQRAHQKDPSRDRYREEDTSEVNDIITTFDSIVGTNCQEQPGDQVAMVEFKKKTSDNSKYLLPEKKPLARKGLPPIRTQSLPPITLGNNFLTASHRATSHAGLSSAPHHMAQRSQKSRSEQDLLNNRTGCQMLLDNPWKSDSNQVFSYKVWTVSSSDKLLDRLLSVRPGHQEVSVPPHLRHLHNPSSGQNFQHLSPNRHKIRDLPFTRNNLAPLPDQKFLSGEPLRTNRVLPAIPSQRRHSTAAEESEHSANPTSDEN

SEQ ID NO: 17425 - protein, 3144 aa, Homo sapiens
MTDKSIVILSLMVFHSSFINGKTCRRQLVEEWHPQPSSYVVNWTLTENICLDFYRDCWFLGVNTKIDTSGNQAVPQICPLQIQLGDILVISSEPSLQFPEINLMNVSETSFVGCVQNTTTEDQLLFGCRLKGMHTVNSKWLSVGTHYFITVMASGPSPCPLGLRLNVTVKQQFCQESLSSEFCSGHGKCLSEAWSKTYSCHCQPPFSGKYCQELDACSFKPCKNNGSCINKRENWDEQAYECVCHPPFTGKNCSEIIGQCQPHVCFHGNCSNITSNSFICECDEQFSGPFCEVSAKPCVSLLFWKRGICPNSSSAYTYECPKGSSSQNGETDVSEFSLVPCQNGTDCIKISNDVMCICSPIFTDLLCKSIQTSCESFPLRNNATCKKCEKDYPCSCISGFTEKNCEKAIDHCKLLSINCLNEEWCFNIIGRFKYVCIPGCTKNPCWFLKNVYLIHQHLCYCGVTFHGICQDKGPAQFEYVWQLGFAGSEGEKCQGVIDAYFFLAANCTEDATYVNDPEDNNSSCWFPHEGTKEICANGCSCLSEEDSQEYRYLCFLRWAGNMYLENTTDDQENECQHEAVCKDEINRPRCSCSLSYIGRLCVVNVDYCLGNHSISVHGLCLALSHNCNCSGLQRYERNICEIDTEDCKSASCKNGTTSTHLRGYFFRKCVPGFKGTQCEIDIDECASHPCKNGATCIDQPGNYFCQCVPPFKVVDGFSCLCNPGYVGIRCEQDIDDCILNACEHNSTCKDLHLSYQCVCLSDWEGNFCEQESNECKMNPCKNNSTCTDLYKSYRCECTSGWTGQNCSEEINECDSDPCMNGGLCHESTIPGQFVCLCPPLYTGQFCHQRYNLCDLLHNPCRNNSTCLALVDANQHCICREEFEGKNCEIDVKDCLFLSCQDYGDCEDMVNNFRCICRPGFSGSLCEIEINECSSEPCKNNGTCVDLTNRFFCNCEPEYHGPFCELDVNKCKISPCLDEENCVYRTDGYNCLCAPGYTGINCEINLDECLSEPCLHDGVCIDGINHYTCDCKSGFFGTHCETNANDCLSNPCLHGRCTELINEYPCSCDADGTSTQCKIKINDCTSIPCMNEGFCQKSAHGFTCICPRGYTGAYCEKSIDNCAEPELNSVICLNGGICVDGPGHTFDCRCLPGFSGQFCEININECSSSPCLHGADCEDHINGYVCKCQPGWSGHHCENELECIPNSCVHELCMENEPGSTCLCTPGFMTCSIGLLCGDEIRRITCLTPIFQRTDPISTQTYTIPPSETLVSSFPSIKATRIPAIMDTYPVDQGPKQTGIVKHDILPTTGLATLRISTPLESYLLQELIVTRELSAKHSLLSSADVSSSRFLNFGIRDPAQIVQDKTSVSHMPIRTSAATLGFFFPDRRARTPFIMSSLMSDFIFPTQSLLFENCQTVALSATPTTSVIRSIPGADIELNRQSLLSRGFLLIAASISATPVVSRGAQEDIEEYSADSLISRREHWRLLSPSMSPIFPAKVIISKQVTILNSSALHRFSTKAFNPSEYQAITEASSNQRLTNIKSQAADSLRELSQTCATCSMTEIKSSREFSDQVLHSKQSHFYETFWMNSAILASWYALMGAQTITSGHSFSSATEITPSVAFTEVPSLFPSKKSAKRTILSSSLEESITLSSNLDVNLCLDKTCLSIVPSQTISSDLMNSDLTSKMTTDELSVSENILKLLKIRQYGITMGPTEVLNQESLLDMEKSKGSHTLFKLHPSDSSLDFELNLQIYPDVTLKTYSEITHANDFKNNLPPLTGSVPDFSEVTTNVAFYTVSATPALSIQTSSSMSVIRPDWPYFTDYMTSLKKEVKTSSEWSKWELQPSVQYQEFPTASRHLPFTRSLTLSSLESILAPQRLMISDFSCVRYYGDSYLEFQNVALNPQNNISLEFQTFSSYGLLLYVKQDSNLVDGFFIQLFIENGTLKYHFYCPGEAKFKSINTTVRVDNGQKYTLLIRQELDPCNAELTILGRNTQICESINHVLGKPLPKSGSVFIGGFPDLHGKIQMPVPVKNFTGCIEVIEINNWRSFIPSKAVKNYHINNCRSQGFMLSPTASFVDASDVTQGVDTMWTSVSPSVAAPSVCQQDVCHNGGTCHAIFLSSGIVSFQCDCPLHFTGRFCEKDAGLFFPSFNGNSYLELPFLKFVLEKEHNRTVTIYLTIKTNSLNGTILYSNGNNCGKQFLHLFLVEGRPSVKYGCGNSQNILTVSANYSINTNAFTPITIRYTTPVGSPGVVCMIEMTADGKPPVQKKDTEISHASQAYFESMFLGHIPANVQIHKKAGPVYGFRGCILDLQVNNKEFFIIDEARHGKNIENCHVPWCAHHLCRNNGTCISDNENLFCECPRLYSGKLCQFASCENNPCGNGATCVPKSGTDIVCLCPYGRSGPLCTDAINITQPRFSGTDAFGYTSFLAYSRISDISFHYEFHLKFQLANNHSALQNNLIFFTGQKGHGLNGDDFLAVGLLNGSVVYSYNLGSGIASIRSEPLNLSLGVHTVHLGKFFQEGWLKVDDHKNKSIIAPGRLVGLNVFSQFYVGGYSEYTPDLLPNGADFKNGFQGCIFTLQVRTEKDGHFRGLGNPEGHPNAGRSVGQCHASPCSLMKCGNGGTCIESGTSVYCNCTTGWKGSFCTETVSTCDPEHDPPHHCSRGATCISLPHGYTCFCPLGTTGIYCEQALSISDPSFRSNELSWMSFASFHVRKKTHIQLQFQPLAADGILFYAAQHLKAQSGDFLCISLVNSSVQLRYNLGDRTIILETLQKVTINGSTWHIIKAGRVGAEGYLDLDGINVTEKASTKMSSLDTNTDFYIGGVSSLNLVNPMAIENEPVGFQGCIRQVIINNQELQLTEFGAKGGSNVGDCDGTACGYNTCRNGGECTVNGTTFSCRCLPDWAGNTCNQSVSCLNNLCLHQSLCIPDQSFSYSCLCTLGWVGRYCENKTSFSTAKFMGNSYIKYIDPNYRMRNLQFTTISLNFSTTKTEGLIVWMGIAQNEENDFLAIGLHNQTLKIAVNLGERISVPMSYNNGTFCCNKWHHVVVIQNQTLIKAYINNSLILSEDIDPHKNFVALNYDGICYLGGFEYGRKVNIVTQEIFKTNFVGKIKDVVFFQEPKNIELIKLEGYNVYDGDEQNEVT

SEQ ID NO: 17426 - protein, 771 aa, Homo sapiens
MTVMSLSRDLKDDFHSDTVLSILNEQRIRGILCDVTIIVEDTKFKAHSNVLAASSLYFKNIFWSHTICISSHVLELDDLKAEVFTEILNYIYSSTVVVKRQETVTDLAAAGKKLGISFLEDLTDRNFSNSPGPYVFCITEKGVVKEEKNEKRHEEPAITNGPRITNAFSIIETENSNNMFSPLDLRASFKKVSDSMRTASLCLERTDVCHEAEPVRTLAEHSYAVSSVAEAYRSQPVREHDGSSPGNTGKENCEALAAKPKTCRKPKTFSIPQDSDSATENIPPPPVSNLEVNQERSPQPAAVLTRSKSPNNEGDVHFSREDENQSSDVPGPPAAEVPPLVYNCSCCSKAFDSSTLLSAHMQLHKPTQEPLVCKYCNKQFTTLNRLDRHEQICMRSSHMPIPGGNQRFLENYPTIGQNGGSFTGPEPLLSENRIGEFSSTGSTLPDTDHMVKFVNGQMLYSCVVCKRSYVTLSSLRRHANVHSWRRTYPCHYCNKVFALAEYRTRHEIWHTGERRYQCIFCLETFMTYYILKNHQKSFHAIDHRLSISKKTANGGLKPSVYPYKLYRLLPMKCKRAPYKSYRNSSYENARENSQMNESAPGTYVVQNPHSSELPTLNFQDTVNTLTNSPAIPLETSACQDIPTSANVQNAEGTKWGEEALKMDLDNNFYSTEVSVSSTENAVSSDLRAGDVPVLSLSNSSENAASVISYSGSAPSVIVHSSQFSSVIMHSNAIAAMTSSNHRAFSDPAVSQSLKDDSKPEPDKVGRFASRP

SEQ ID NO: 17427 - protein, 1503 aa, Homo sapiens
MWPSQLLIFMMLLAPIIHAFSRAPIPMAVVRRELSCESYPIELRCPGTDVIMIESANYGRTDDKICDSDPAQMENIRCYLPDAYKIMSQRCNNRTQCAVVAGPDVFPDPCPGTYKYLEVQYECVPYKVEQKVFLCPGLLKGVYQSEHLFESDHQSGAWCKDPLQASDKIYYMPWTPYRTDTLTEYSSKDDFIAGRPTTTYKLPHRVDGTGFVVYDGALFFNKERTRNIVKFDLRTRIKSGEAIIANANYHDTSPYRWGGKSDIDLAVDENGLWVIYATEQNNGKIVISQLNPYTLRIEGTWDTAYDKRSASNAFMICGILYVVKSVYEDDDNEATGNKIDYIYNTDQSKDSLVDVPFPNSYQYIAAVDYNPRDNLLYVWNNYHVVKYSLDFGPLDSRSGQAHHGQVSYISPPIHLDSELERPSVKDISTTGPLGMGSTTTSTTLRTTTLSPGRSTTPSVSGRRNRSTSTPSPAVEVLDDMTTHLPSASSQIPALEESCEAVEAREIMWFKTRQGQIAKQPCPAGTIGVSTYLCLAPDGIWDPQGPDLSNCSSPWVNHITQKLKSGETAANIARELAEQTRNHLNAGDITYSVRAMDQLVGLLDVQLRNLTPGGKDSAARSLNKLQKRERSCRAYVQAMVETVNNLLQPQALNAWRDLTTSDQLRAATMLLHTVEESAFVLADNLLKTDIVRENTDNIKLEVARLSTEGNLEDLKFPENMGHGSTIQLSANTLKQNGRNGEIRVAFVLYNNLGPYLSTENASMKLGTEALSTNHSVIVNSPVITAAINKEFSNKVYLADPVVFTVKHIKQSEENFNPNCSFWSYSKRTMTGYWSTQGCRLLTTNKTHTTCSCNHLTNFAVLMAHVEVKHSDAVHDLLLDVITWVGILLSLVCLLICIFTFCFFRGLQSDRNTIHKNLCISLFVAELLFLIGINRTDQPIACAVFAALLHFFFLAAFTWMFLEGVQLYIMLVEVFESEHSRRKYFYLVGYGMPALIVAVSAAVDYRSYGTDKVCWLRLDTYFIWSFIGPATLIIMLNVIFLGIALYKMFHHTAILKPESGCLDNIKSWVIGAIALLCLLGLTWAFGLMYINESTVIMAYLFTIFNSLQGMFIFIFHCVLQKKVRKEYGKCLRTHCCSGKSTESSIGSGKTSGSRTPGRYSTGSQSRIRRMWNDTVRKQSESSFITGDINSSASLNRGAMANHLISNALLRPHGTNNPYNTLLGEPAVCNNPSVSMYNAQEGLLNNARDTSVMDTLPLNGNHGNSYSIASGEYLSNCVQIIDRGYNHNETALEKKILKELTSNYIPSYLNNHERSSEQNRNLMNKLVNNLGSGREDDAIVLDDATSFNHEESLGLELIHEESDAPLLPPRVYSTENHQPHHYTRRRIPQDHSESFFPLLTNEHTEDLQSPHRDSLYTSMPTLAGVAATESVTTSTQTEPPPAKCGDAEDVYYKSMPNLGSRNHVHQLHTYYQLGRGSSDGFIVPPNKDGTPPEGSSKGPAHLVTSL

SEQ ID NO: 17428 - protein, 573 aa, Homo sapiens
MCDLCKPPPQESTKSCMDCSASYCNECFKIHHPWGTIKAQHEYVGPTTNFRPKILMCPEHETERINMYCELCRRPVCHLCKLGGNHANHRVTTMSSAYKTLKEKLSKDIDYLIGKESQVKSQISELNLLMKETECNGERAKEEAITHFEKLFEVLEERKSSVLKAIDSSKKLRLDKFQTQMEEYQGLLENNGLVGYAQEVLKETDQSCFVQTAKQLHLRIQKATESLKSFRPAAQTSFEDYVVNTSKQTELLGELSFFSSGIDVPEINEEQSKVYNNALINWHHPEKDKADSYVLEYRKINRDDEMSWNEIEVCGTSKIIQDLENSSTYAFRVRAYKGSICSPCSRELILHTPPAPVFSFLFDEKCGYNNEHLLLNLKRDRVESRAGFNLLLAAERIQVGYYTSLDYIIGDTGITKGKHFWAFRVEPYSYLVKVGVASSDKLQEWLRSPRDAVSPRYEQDSGHDSGSEDACFDSSQPFTLVTIGMQKFFIPKSPTSSNEPENRVLPMPTSIGIFLDCDKGKVDFYDMDQMKCLYERQVDCSHTLYPAFALMGSGGIQLEEPITAKYLEYQEDM

SEQ ID NO: 17429 - protein, 287 aa, Homo sapiens
MAAASYDQLLKQVEALKMENSNLRQELEDNSNHLTKLETEASNMKEVLKQLQGSIEDEAMASSGQIDLLERLKELNLDSSNFPGVKLRSKMSLRSYGSREGSVSSRSGECSPVPMGSFPRRGFVNGSRESTGYLEELEKERSLLLADLDKEEKEKDWYYAQLQNLTKRIDSLPLTENFSLQTDMTRRQLEYEARQIRVAMEEQLGTCQDMEKRAQRRIARIQQIEKDILRIRQLLQSQATEAERSSQNKHETGSHDAERQNEGQGVGEINMATSGNGQIEKMRMFEC

SEQ ID NO: 17430 - protein, 346 aa, Homo sapiens
MGSRQSHNSHQSLNSLVTISSNHVPENFSLELTHATPAVEQVSQLLSMLHQGQYQPRPSFRGNKYSRSYRYALQDMDKFSLKDSGRGDSEAGDSDYDLGRDSPIDRLLGEGFSDLFLTDGRIPAAMRLCTEECRVLGHSDQCWMPPLPSPSSDYRSNMFIPGEEFPTQPQQQHPHQSLEDDAQPADSGEKKKSFSTFGKDSPNDEDTGDTSTSSLLSEMSSVFQRLLPPSLDTYSECSEVDRSNSLERRKGPLPAKTVGYPQGVAAWAASTHFQNPTTNCGPPLGTHSSVQPSSKWLPAMEEIPENYEEDDFDNVLNHLNDGKHELMDASELVAEINKLLQDVRQS

SEQ ID NO: 17431 - protein, 483 aa, Homo sapiens
MSNYSVSLVGPAPWGFRLQGGKDFNMPLTISSLKDGGKAAQANVRIGDVVLSIDGINAQGMTHLEAQNKIKGCTGSLNMTLQRASAAPKPEPVPVQKPTVTSVCSETSQELAEGQRRGSQGDSKQQNGKIPPKRPPRKHIVERYTEFYHVPTHSDASKKRLIEDTEDWRPRTGTTQSRSFRILAQITGTEHLKESEADNTKKANNSQEPSPQLASSVASTRSMPESLDSPTSGRPGVTSLTAAAAFKPVGSTGVIKSPSWQRPNQGVPSTGRISNSATYSGSVAPANSALGQTQPSDQDTLVQRAEHIPAGKRTPMCAHCNQVIRGPFLVALGKSWHPEEFNCAHCKNTMAYIGFVEEKGALYCELCYEKFFAPECGRCQRKILGEVISALKQTWHVSCFVCVACGKPIRNNVFHLEDGEPYCETDYYALFGTICHGCEFPIEAGDMFLEALGYTWHDTCFVCSVCCESLEGQTFFSKKDKPL

SEQ ID NO: 17432 - protein, 1243 aa, Homo sapiens
MPKIVLNGVTVDFPFQPYKCQQEYMTKVLECLQQKVNGILESPTGTGKTLCLLCTTLAWREHLRDGISARKIAERAQGELFPDRALSSWGNAAAAAGDPIACYTDIPKIIYASRTHSQLTQVINELRNTSYRSRCRATLWVLETAPPRPTVLSPTRPKVCVLGSREQLCIHPEVKKQESNHLQIHLCRKKVASRSCHFYNNVEEKSLEQELASPILDIEDLVKSGSKHRVCPYYLSRNLKQQADIIFMPYNYLLDAKSRRAHNIDLKGTVVIFDEAHNVEKMCEESASFDLTPHDLASGLDVIDQVLEEQTKAAQQGEPHPEFSADSPSPGLNMELEDIAKLKMILLRLEGAIDAVELPGDDSGVTKPGSYIFELFAEAQITFQTKGCILDSLDQIIQHLAGRAGVFTNTAGLQKLADIIQIVFSVDPSEGSPGSPAGLGALQSYKVHIHPDAGHRRTAQRSDAWSTTAARKRGKVLSYWCFSPGHSMHELVRQGVRSLILTSGTLAPVSSFALEMQIPFPVCLENPHIIDKHQIWVGVVPRGPDGAQLSSAFDRRFSEECLSSLGKALGNIARVVPYGLLIFFPSYPVMEKSLEFWRARDLARKMEALKPLFVEPRSKGSFSETISAYYARVAAPGSTGATFLAVCRGKASEGLDFSDTNGRGVIVTGLPYPPRMDPRVVLKMQFLDEMKGQGGAGGQFLSGQEWYRQQASRAVNQAIGRVIRHRQDYGAVFLCDHRFAFADARAQLPSWVRPHVRVYDNFGHVIRDVAQFFRVAERTMPAPAPRATAPSVRGEDAVSEAKSPGPFFSTRKAKSLDLHVPSLKQRSSGSPAAGDPESSLCVEYEQEPVPARQRPRGLLAALEHSEQRAGSPGEEQAHSCSTLSLLSEKRPAEEPRGGRKKIRLVSHPEEPVAGAQTDRAKLFMVAVKQELSQANFATFTQALQDYKGSDDFAALAACLGPLFAEDPKKHNLLQGFYQFVRPHHKQQFEEVCIQLTGRGCGYRPEHSIPRRQRAQPVLDPTGRTAPDPKLTVSTAAAQQLDPQEHLNQGRPHLSPRPPPTGDPGSQPQWGSGVPRAGKQGQHAVSAYLADARRALGSAGCSQLLAALTAYKQDDDLDKVLAVLAALTTAKPEDFPLLHRFSMFVRPHHKQRFSQTCTDLTGRPYPGMEPPGPQEERLAVPPVLTHRAPQPGPSRSEKTGKTQSKISSFLRQRPAGTVGAGGEDAGPSQSSGPPHGPAASEWGL

SEQ ID NO: 17433 - protein, 1165 aa, Homo sapiens
MLLTLIILLPVVSKFSFVSLSAPQHWSCPEGTLAGNGNSTCVGPAPFLIFSHGNSIFRIDTEGTNYEQLVVDAGVSVIMDFHYNEKRIYWVDLERQLLQRVFLNGSRQERVCNIEKNVSGMAINWINEEVIWSNQQEGIITVTDMKGNNSHILLSALKYPANVAVDPVERFIFWSSEVAGSLYRADLDGVGVKALLETSEKITAVSLDVLDKRLFWIQYNREGSNSLICSCDYDGGSVHISKHPTQHNLFAMSLFGDRIFYSTWKMKTIWIANKHTGKDMVRINLHSSFVPLGELKVVHPLAQPKAEDDTWEPDVNECAFWNHGCTLGCKNTPGSYYCTCPVGFVLLPDGKRCHQLVSCPRNVSECSHDCVLTSEGPLCFCPEGSVLERDGKTCSGCSSPDNGGCSQLCVPLSPVSWECDCFPGYDLQLDEKSCAASGPQPFLLFANSQDIRHMHFDGTDYGTLLSQQMGMVYALDHDPVENKIYFAHTALKWIERANMDGSQRERLIEEGVDVPEGLAVDWIGRRFYWTDRGKSLIGRSDLNGKRSKIITKENISQPRGIAVHPMAKRLFWTDTGINPRIESSSLQGLGRLVIASSDLIWPSGITIDFLTDKLYWCDAKQSVIEMANLDGSKRRRLTQNDVGHPFAVAVFEDYVWFSDWAMPSVMRVNKRTGKDRVRLQGSMLKPSSLVVVHPLAKPGADPCLYQNGGCEHICKKRLGTAWCSCREGFMKASDGKTCLALDGHQLLAGGEVDLKNQVTPLDILSKTRVSEDNITESQHMLVAEIMVSDQDDCAPVGCSMYARCISEGEDATCQCLKGFAGDGKLCSDIDECEMGVPVCPPASSKCINTEGGYVCRCSEGYQGDGIHCLDIDECQLGEHSCGENASCTNTEGGYTCMCAGRLSEPGLICPDSTPPPHLREDDHHYSVRNSDSECPLSHDGYCLHDGVCMYIEALDKYACNCVVGYIGERCQYRDLKWWELRHAGHGQQQKVIVVAVCVVVLVMLLLLSLWGAHYYRTQKLLSKNPKNPYEESSRDVRSRRPADTEDGMSSCPQPWFVVIKEHQDLKNGGQPVAGEDGQAADGSMQPTSWRQEPQLCGMGTEQGCWIPVSSDKGSCPQVMERSFHMPSYGTQTLEGGVEKPHSLLSANPLWQQRALDPPHQMELTQ

SEQ ID NO: 17434 - protein, 261 aa, Homo sapiens
MGPGEALLAGLLVMVLAVALLSNALVLLCCAYSAELRTRASGVLLVNLSLGHLLLAALDMPFTLLGVMRGRTPSAPGACQVIGFLDTFLASNAALSVAALSADQWLAVGFPLRYAGRLRPRYAGLLLGCAWGQSLAFSGAALGCSWLGYSSAFASCSLRLPPEPERPRFAAFTATLHAVGFVLPLAVLCLTSLQVHRVARRHCQRMDTVTMKALALLADLHPSVRQRCLIQQKRRRHRATRKIGIAIATFLICFAPYVMTR

SEQ ID NO: 17435 - protein, 439 aa, Homo sapiens
MAAARCWRPLLRGPRLSLHTAANAAATATETTCQDVAATPVARYPPIVASMTADSKAARLRRIERWQATVHAAESVDEKLRILTKMQFMKYMVYPQTFALNADRWYQYFTKTVFLSGLPPPPAEPEPEPEPEPEPALDLAALRAVACDCLLQEHFYLRRRRRVHRYEESEVISLPFLDQLVSTLVGLLSPHNPALAAAALDYRCPVHFYWVRGEEIIPRGHRRGRIDDLRYQIDDKPNNQIRISKQLAEFVPLDYSVPIEIPTIKCKPDKLPLFKRQYENHIFVGSKTADPCCYGHTQFHLLPDKLRRERLLRQNCADQIEVVFRANAIASLFAWTGAQAMYQGFWSEADVTRPFVSQAVITDGKYFSFFCYQLNTLALTTQADQNNPRKNICWGTQSKPLYETIEDNDVKGFNDDVLLQIVHFLLNRPKEEKSQLLEN

SEQ ID NO: 17436 - protein, 236 aa, Homo sapiens
AVQSQGFINYCQKKIDASQTEFEKNVWSFLKVNFEDDSRGKYLELLGYRKEDLGKKHIKEEKEESEFLPSSGGTFNISVSGDIDGLITQALLTGNFESAVDLCLHDNRMADAIILAIAGGQELLARTQKKYFAKSQSKITRLITAVVMKNWKEIVESCDLKNWREALAAVLTYAKPDEFSALCGNVEKLVACWTKAQDGSHPLSLQDLIEKVVILRKAVQLTQAMDTSTVGVLLAA

SEQ ID NO: 17437 - protein, 402 aa, Homo sapiens
MKETRGYGGDAPFCTRLNHSYTGMWAPERSAEARGNLTRPPGSGEDCGSVSVAFPITMLLTGFVGNALAMLLVSRSYRRRESKRKKSFLLCIGWLALTDLVGQLLTTPVVIVVYLSKQRWEHIDPSGRLCTFFGLTMTVFGLSSLFIASAMAVERALAIRAPHWYASHMKTRATRAVLLGVWLAVLAFALLPVLGVGQYTVQWPGTWCFISTGRGGNGTSSSHNWGNLFFASAFAFLGLLALTVTFSCNLATIKALVSRCRAKATASQSSAQWGRITTETAIQLMGIMCVLSVCWSPLLIMMLKMIFNQTSVEHCKTHTEKQKECNFFLIAVRLASLNQILDPWVYLLLRKILLRKFCQMRKRRLREQEMGPDGRCFCHAWRQVPRTWCSSHDREPCSVQLS

SEQ ID NO: 17438 - protein, 467 aa, Homo sapiens
MEETIKDPPTSAVLLDHCHFSQVIFNSVEKFYIPGGDVTCHYTFTQHFIPRRKDWIGIFRCSLNQTIQLLITPDTGSIWHQVGWKTTREYYTFMWVTLPIDLNNKSAKQQEVQFKAYYLPKDDEYYQFCYVDEDGVVRGASIPFQFRPENEEDILVVTTQGEVEEIEQHNKELCKENQELKDSCISLQKQNSDMQAELQKKQEELETLQSINKKLELKVKEQKDYWETELLQLKEQNQKMSSENEKMGIRVDQLQAQLSTQEKEMEKLVQGDQDKTEQLEQLKKENDHLFLSLTEQRKDQKKLEQTVEQMKQNETTAMKKQQELMDENFDLSKRLSENEIICNALQRQKERLEGENDLLKRENSRLLSYMGLDFNSLPYQVPTSDEGGARQNPGLAYGNPYSGIQESSSPSPLSIKKCPICKADDICDHTLEQQQMQPLCFNCPICDKIFPATEKQIFEDHVFCHSL

SEQ ID NO: 17439 - protein, 625 aa, Homo sapiens
MSNYSVSLVGPAPWGFRLQGGKDFNMPLTISSLKDGGKAAQANVRIGDVVLSIDGINAQGMTHLEAQNKIKGCTGSLNMTLQRASAAPKPEPVPVQKPTVTSVCSETSQELAEGQRRGSQGDSKQQNGKIPPKRPPRKHIVERYTEFYHVPTHSDASKKRLIEDTEDWRPRTGTTQSRSFRILAQITGTEHLKESEADNTKKAKFDSALEDLPKSGPHPPATPQVLTIGSQVATLSKVATTYSSLSSSTGNVEDSFEGFRNFSTFSSPARYSAAVLSSAAATVSAVIATKTRLYTPERYHSLLDALCISPVSKPLAFSYLQSSRKSTGSIHVKKTSNSQEPSPQLASSVASTRSMPESLDSPTSGRPGVTSLTAAAAFKPVGSTGVIKSPSWQRPNQGVPSTGRISNSATYSGSVAPANSALGQTQPSDQDTLVQRAEHIPAGKRTPMCAHCNQVIRGPFLVALGKSWHPEEFNCAHCKNTMAYIGFVEEKGALYCELCYEKFFAPECGRCQRKILGEVISALKQTWHVSCFVCVACGKPIRNNVFHLEDGEPYCETDYYALFGTICHGCEFPIEAGDMFLEALGYTWHDTCFVCSVCCESLEGQTFFSKKDKPLCKKHAHSVNF

SEQ ID NO: 17440 - protein, 151 aa, Homo sapiens
MKTKLNIYNMQFLLFVFLVWDPARLVLANIQEDEAKNNITIFTRILDRLLDGYDNRLRPGLGDSITEVFTNIYVTSFGPVSDTDMEYTIDVFFRQKWKDERLKFKGPMNILRLNNLMASKIWTPDTFFHNGKKSVAHNMTMPNKLLRIQDD

SEQ ID NO: 17441 - protein, 1160 aa, Homo sapiens
MSKVIQKKNHWTSRVHECTVKRGPQGELGVTVLGGAEHGEFPYVGAVAAVEAAGLPGGGEGPRLGEGELLLEVQGVRVSGLPRYDVLGVIDSCKEAVTFKAVRQGGRLNKDLRHFLNQRFQKGSPDHELQQTIRDNLYRHAVPCTTRSPREGEVPGVDYNFLTVKEFLDLEQSGTLLEVGTYEGNYYGTPKPPSQPVSGKVITTDALHSLQSGSKQSTPKRTKSYNDMQNAGIVHAENEEEDDVPEMNSSFTADSGEQEEHTLQETALPPVNSSIIAAPITDPSQKFPQYLPLSAEDNLGPLPENWEMAYTENGEVYFIDHNTKTTSWLDPRCLNKQQKPLEECEDDEGVHTEELDSELELPAGWEKIEDPVYGIYYVDHINRKTQYENPVLEAKRKKQLEQQQQQQQQQQQQQQQQQQQQTEEWTEDHSALVPPVIPNHPPSNPEPAREVPLQGKPFFTRNPSELKGKFIHTKLRKSSRGFGFTVVGGDEPDEFLQIKSLVLDGPAALDGKMETGDVIVSVNDTCVLGHTHAQVVKIFQSIPIGASVDLELCRGYPLPFDPDDPNTSLVTSVAILDKEPIIVNGQETYDSPASHSSKTGKVNGMKDARPSSPADVASNSSHGYPNDTVSLASSIATQPELITVHIVKGPMGFGFTIADSPGGGGQRVKQIVDSPRCRGLKEGDLIVEVNKKNVQALTHNQVVDMLVECPKGSEVTLLVQRGGLPVPKKSPKSQPLERKDSQNSSQHSVSSHRSLHTASPSHSTQVLPEFPPAEAQAPDQTDSSGQKKPDPFKIWAQSRSMYENRLPDYQEQDIFLWRKETGFGFRILGGNEPGEPIYIGHIVPLGAADTDGRLRSGDELICVDGTPVIGKSHQLVVQLMQQAAKQGHVNLTVRRKVVFAVPKTENEVPSPASSHHSSNQPASLTEEKRTPQGSQNSLNTVSSGSGSTSGIGSGGGGGSGVVSTVVQPYDVEIRRGENEGFGFVIVSSVSRPEAGTTFESSNATLLTNAEKIATITTTHTPSQQGTQETRNTTKPKQESQFEFKAPQATQEQDFYTVELERGAKGFGFSLRGGREYNMDLYVLRLAEDGPAERCGKMRIGDEILEINGETTKNMKHSRAIELIKNGGRRVRLFLKRGDGSVPEYGGSNYENIPSFPGMTP

SEQ ID NO: 17442 - protein, 529 aa, Homo sapiens
MSLPKTPSTPLNSTSTSESKKLKVSVAKEGTRGLPELKEKKNMVDRSKLLPTSLQNEFIPKEVLLSLTYAANAGPCPENLLPPKKIKTPKGTLPRLVDHVWHHPVRRNKFKYLIDHPVSLTGAGRDISFLYDVTYAKGQTREKAVCPPHLARSLQSHDGVIVPHKPKTLTDTLIPEEFHIVSSTGVSGLECYDDKYTTLLTDSENRLLLFPSMKPNKRVEVAQLNDVMDTMLERAGVENQEYTGPTKMHKLLHILKKEQTIYNMIFHELIRQVSVDCADRGELLSKVRERYVQMLDQIARQMIDFYKDLVTQRVMDQRILEELYNFKHVIEELTRELCLVRAHDVKLTKETEKAHKDLAQALLNAEKNAKIVEEYHDLYTLQRERMENDMKKLVAERDIWSSATYELALKVIERNRVILARRLYLNEKGWNKYTKHFIILLSNKDTEDLALLQKLTQKWRNLVNKLKQEVEQMEESTSETLKIVKDGLIKWQEFFNEKDILSPNKGNIFNSVLLDFKQWQKVTPKFFQV

SEQ ID NO: 17443 - protein, 300 aa, Homo sapiens
MSPSMLTGNSPRGCRLPSISSTTCGRQLEKVPEKRDSGMTEVERTYSANCSDFLESKGCFANTTPSGKSVSSSSSVETGPSVSEPPGLPRVSAYVDTTADLDRKLSFSHSDHSSEMSLPEVQKDKYPEEFSLLKLQTKDGHRPEWTFYPRFSSNIHTYHVGKQCFFNGVFLGNKRSLSERTVDKCFGRKKYDIDPRNGIPKLTPGDNPYMYPEQSKGFHKAGSMLPPVNFSIVPYEKKFDTFIPLEPLPQIPNLPFWVKEKANSLKNEIQEVEELDNWQPAVPLMHMLHLSGALDFPRQS

SEQ ID NO: 17444 - protein, 917 aa, Homo sapiens
YLCLAPDGIWDPQGPDLSNCSSPWVNHITQKLKSGETAANIARELAEQTRNHLNAGDITYSVRAMDQLVGLLDVQLRNLTPGGKDSAARSLNKAMVETVNNLLQPQALNAWRDLTTSDQLRAATMLLHTVEESAFVLADNLLKTDIVRENTDNIKLEVARLSTEGNLEDLKFPENMGHGSTIQLSANTLKQNGRNGEIRVAFVLYNNLGPYLSTENASMKLGTEALSTNHSVIVNSPVITAAINKEFSNKVYLADPVVFTVKHIKQSEENFNPNCSFWSYSKRTMTGYWSTQGCRLLTTNKTHTTCSCNHLTNFAVLMAHVEVKHSDAVHDLLLDVITWVGILLSLVCLLICIFTFCFFRGLQSDRNTIHKNLCISLFVAELLFLIGINRTDQPIACAVFAALLHFFFLAAFTWMFLEGVQLYIMLVEVFESEHSRRKYFYLVGYGMPALIVAVSAAVDYRSYGTDKVCWLRLDTYFIWSFIGPATLIIMLNVIFLGIALYKMFHHTAILKPESGCLDNIKSWVIGAIALLCLLGLTWAFGLMYINESTVIMAYLFTIFNSLQGMFIFIFHCVLQKKVRKEYGKCLRTHCCSGKSTESSIGSGKTSGSRTPGRYSTGSQSRIRRMWNDTVRKQSESSFITGDINSSASLNREGLLNNARDTSVMDTLPLNGNHGNSYSIASGEYLSNCVQIIDRGYNHNETALEKKILKELTSNYIPSYLNNHERSSEQNRNLMNKLVNNLGSGREDDAIVLDDATSFNHEESLGLELIHEESDAPLLPPRVYSTENHQPHHYTRRRIPQDHSESFFPLLTNEHTEDLQSPHRDSLYTSMPTLAGVAATESVTTSTQTEPPPAKCGDAEDVYYKSMPNLGSRNHVHQLHTYYQLGRGSSDGFIVPPNKDGTPPEGSSKGPAHLVTSL

SEQ ID NO: 17445 - protein, 462 aa, Homo sapiens
MKETDREAVATAVQRVAGMLQRPDQLDKVEQYRRREARKKASVEARLKAAIQSQLDGVRTGLSQLHNALNDVKDIQQSLADVSKDWRQSINTIESLKDVKDAVVQHSQLAAAVENLKNIFSVPEIVRETQDLIEQGALLQAHRKLMDLECSRDGLMYEQYRMDSGNTRDMTLIHGYFGSTQGLSDELAKQLWMVLQRSLVTVRRDPTLLVSVVRIIEREEKIDRRILDRKKQTGFVPPGRPKNWKEKMFTILERTVTTRIEGTQADTRESDKMWLVRHLEIIRKYVLDDLIVAKNLMVQCFPPHYEIFKNLLNMYHQALSTRMQDLASEDLEANEIVSLLTWVLNTYTRYKDEAQLYKEEHLRNRQHPHCYVQYMIAIINNCQTFKESIVSLKRKYLKNEVEEGVSPSQPSMDGILDAIAKEGCSGLLEEVFLDLEVGLALSSCRFLGRSPVLPHCPLGHRL

SEQ ID NO: 17446 - protein, 959 aa, Homo sapiens
MEMKLPGQEGFEASSAPRNIPSGELDSNPDPGTGPSPDGPSDTESKELGVPKDPLLFIQLNELLGWPQALEWRETGRWVLFEEKLEVAAGRWSAPHVPTLALPSLQKLRSLLAEGLVLLDCPAQSLLELVEQVTRVESLSPELRGQLQALLLQRPQHYNQTTGTRPCWGSTHPRKASDNEEAPLREQCQNPLRQKLPPGAEAGTVLAGELGFLAQPLGAFVRLRNPVVLGSLTEVSLPSRFFCLLLGPCMLGKGYHEMGRAAAVLLSDPQFQWSVRRASNLHDLLAALDAFLEEVTVLPPGRWDPTARIPPPKCLPSQHKRLPSQQREIRGPAVPRLTSAEDRHRHGPHAHSPELQRTGRLFGGLIQDVRRKVPWYPSDFLDALHLQCFSAVLYIYLATVTNAITFGGLLGDATDGAQGVLESFLGTAVAGAAFCLMAGQPLTILSSTGPVLVFERLLFSFSRDYSLDYLPFRLWVGIWVATFCLVLVATEASVLVRYFTRFTEEGFCALISLIFIYDAVGKMLNLTHTYPIQKPGSSAYGCLCQYPGPGGNESQWIRTRPKDRDDIVSMDLGLINASLLPPPECTRQGGHPRGPGCHTVPDIAFFSLLLFLTSFFFAMALKCVKTSRFFPSVVRKGLSDFSSVLAILLGCGLDAFLGLATPKLMVPREFKPTLPGRGWLVSPFGANPWWWSVAAALPALLLSILIFMDQQITAVILNRMEYRLQKGAGFHLDLFCVAVLMLLTSALGLPWYVSATVISLAHMDSLRRESRACAPGERPNFLGIREQRLTGLVVFILTGASIFLAPVLKFIPMPVLYGIFLYMGVAALSSIQFTNRVKLLLMPAKHQPDLLLLRHVPLTRVHLFTAIQLACLGLLWIIKSTPAAIIFPLMLLGLVGVRKALERVFSPQELLWLDELMPEEERSIPEKGLEPEHSFSGSDSEDSELMYQPKAPEINISVN

SEQ ID NO: 17447 - protein, 821 aa, Homo sapiens
MYVCVEIITFIDCLIKITEHLGSTAALLKKEEKEICNLCGMHDECTPQQTMSSIQDTKAADIAARGELNVIETATVSPTNGEESHYTNQVQLEKNKTHMSSALVEKENNTSLNGRVLGQEESQNKMFPDNAENEDDKQIEHMTVENINGNREETHGIIQTTETEIQETSESPREEMTTSSIICDISKKYINSTLPNDSENIKHKNNIMEKEYLDVLSDVTGPQVSCYITAPSYVLQQLECRIINHMSSLIVGDNEELVSNVITIECSDKEKRVPFPIGIAIPFTARYRGNYRDIMVKVCDINLQSSYLNPNSLEGMKGGYKGTCASVKVYKLGIFSVVSCLKKESFTVTKKGLALKSSMDSRISLNYPPGVFTSPVLVQLKIQPVDPALVAHLKAQQDTFYSVQSTSPLIHIQHPSTYPFQKPVTLFLPCSPYLDKNNLGSEIDHKRRASATINRITPSYFNRTKIASIRKPRKNASECLKLLGFRSQDSGWCGLDDVVKTIQSGLVSVELYEHLERFIVLHLSSTMDNSHLVTFVKSLEEAMLSTTACIVLSHQKDNPHRIAVLVVPSKDLSQVLKDLHLEGFGGPPEPSRHFQVREGEQLLLRFTGNIFASSNGKDYGKDYTLIFHLQRKPRLELQIKEVDEFGNYSCPHYKGTIVVYKVPKGKIVPNLNQSLVINENHSQLPICKLPLKLPKHKKLINRPQSTKRVSKDPVEALWDNLLHWLAEELSEENAESLSSTLPLRRSTIQLIKLKNPDDLTEQIHEFLCFWKKSLPTFTDKLRLLARHLRKIGRSDLAEELKFKWENKVFTEPQQCFDVAPE

SEQ ID NO: 17448 - protein, 725 aa, Homo sapiens
MDRGQVLEQLLPELTGLLSLLDHEYLSDTTLEKKMAVASILQSLQPLPAKEVSYLYVNTADLHSGPSFVESLFEEFDCDLSDLRDMPEDDGEPSKGASPELAKSPRLRNAADLPPPLPNKPPPEDYYEEALPLGPGKSPEYISSHNGCSPSHSIVDGYYEDADSSYPATRVNGELKSSYNDSDAMSSSYESYDEEEEEGKSPQPRHQWPSEEASMHLVRECRICAFLLRKKRFGQWAKQLTVIREDQLLCYKSSKDRQPHLRLALDTCSIIYVPKDSRHKRHELRFTQGATEVLVLALQSREQAEEWLKVIREVSKPVGGAEGVEVPRSPVLLCKLDLDKRLSQEKQTSDSDSVGVGDNCSTLGRRETCDHGKGKKSSLAELKGSMSRAAGRKITRIIGFSKKKTLADDLQTSSTEEEVPCCGYLNVLVNQGWKERWCRLKCNTLYFHKDHMDLRTHVNAIALQGCEVAPGFGPRHPFAFRILRNRQEVAILEASCSEDMGRWLGLLLVEMGSRVTPEALHYDYVDVETLTSIVSAGRNSFLYARSCQNQWPEPRVYDDVPYEKMQDEEPERPTGAQVKRHASSCSEKSHRVDPQVKVKRHASSANQYKYGKNRAEEDARRYLVEKEKLEKEKETIRTELIALRQEKRELKEAIRSSPGAKLKALEEAVATLEAQCRAKEERRIDLELKLVAVKERLQQSLAGGPALGLSVSSKPKSGEWEMKKT

SEQ ID NO: 17449 - protein, 1069 aa, Homo sapiens
MACPALGLEALQPLQPEPPPEPAFSEAQKWIEQVTGRSFGDKDFRTGLENGILLCELLNAIKPGLVKKINRLPTPIAGLDNIILFLRGCKELGLKESQLFDPSDLQDTSNRVTVKSLDYSRKLKNVLVTIYWLGKAANSCTSYSGTTLNLKEFEGLLAQMRKDTDDIESPKRSIRDSGYIDCWDSERSDSLSPPRHGRDDSFDSLDSFGSRSRQTPSPDVVLRGSSDGRGSDSESDLPHRKLPDVKKDDMSARRTSHGEPKSAVPFNQYLPNKSNQTAYVPAPLRKKKAEREEYRKSWSTATSPLGGERPFRSTSMFDMRCEEEAAVQPHSRARQEQLQLINNQLREEDDKWQDDLARWKSRRRSVSQDLIKKEEERKKMEKLLAGEDGTSERRKSIKTYREIVQEKERRERELHEAYKNARSQEEAEGILQQYIERFTISEAVLERLEMPKILERSHSTEPNLSSFLNDPNPMKYLRQQSLPPPKFTATVETTIARASVLDTSMSAGSGSPSKTVTPKAVPMLTPKPYSQPKNSQDVLKTFKVDGKVSVNGETVHREEEKERECPTVAPAHSLTKSQMFEGVARVHGSPLELKQDNGSIEINIKKPNSVPQELAATTEKTEPNSQEDKNDGGKSRKGNIELASSEPQHFTTTVTRCSPTVAFVEFPSSPQLKNDVSEEKDQKKPENEMSGKVELVLSQKVVKPKSPEPEATLTFPFLDKMPEANQLHLPNLNSQESPGTASVPLRVQNSWRRSQFFSQSVDSPSSEKSPVMTPFKFWAWDPEEERRRQEKWQQEQERLLQERYQKEQDKLKEEWEKAQKEVEEEERRYYEEERKIIEDTVVPFTVSSSSADQLSTSSSMTEGSGTMNKIDLGNCQDEKQDRRWKKSFQGDDSDLLLKTRESDRLEEKGSLTEGALAHSGNPVSKGVHEDHQLDTEAGAPHCGTNPQLAQDPSQNQQTSNPTHSSEDVKPKTLPLDKSINHQIESPSERRKSISGKKLCSSCGLPLGKGAAMIIETLNLYFHIQCFRCGICKGQLGDAVSGTDVRIRNGLLNCNDCYMRSRSAGQPTTL

SEQ ID NO: 17450 - protein, 791 aa, Homo sapiens
MDGESEVDFSSNSITPLWRRRSIPQPHQVLGRSKPRPQSYQSPNGLLITDFPVEDGGTLLAAQIPAQVPTASDSRTVHRSPLLLGAQRRAVANGGTASPEYRAASPRLRRPKSPKLPKAVPGGSPKSPANGAVTLPAPPPPPVLRPPRTPNAPAPCTPEEDLTGLTASPVPSPTANGLAANNDSPGSGSQSGRKAKDPERGLFPGPQKSSSEQKLPLQRLPSQENELLENPSVVLSTNSPAALKVGKQQIIPKSLASEIKISKSNNQNVEPHKRLLKVRSMVEGLGGPLGHAGEESEVDNDVDSPGSLRRGLRSTSYRRAVVSGFDFDSPTSSKKKNRMSQPVLKVVMEDKEKFSSLGRIKKKMLKGQGTFDGEENAVLYQNYKEKALDIDSDEESEPKEQKSDEKIVIHHKPLRSTWSQLSAVKRKGLSQTVSQEERKRQEAIFEVISSEHSYLLSLEILIRMFKNSKELSDTMTKTERHHLFSNITDVCEASKKFFIELEARHQNNIFIDDISDIVEKHTASTFDPYVKYCTNEVYQQRTLQKLLATNPSFKEVLSRIESHEDCRNLPMISFLILPMQRVTRLPLLMDTICQKTPKDSPKYEVCKRALKEVSKLVRLCNEGARKMERTEMMYTINSQLEFKIKPFPLVSSSRWLVKRGELTAYVEDTVLFSRRTSKQQVYFFLFNDVLIITKKKSEESYNVNDYSLRDQLLVESCDNEELNSSPGKNSSTMLYSRQSSASHLFTLTVLSNHANEKVEMLLGAETQSERARWITALGHSSGKPPADRTCG

SEQ ID NO: 17451 - protein, 1166 aa, Homo sapiens
MKLKEVDRTAMQAWSPAQNHPIYLATGTSAQQLDATFSTNASLEIFELDLSDPSLDMKSCATFSSSHRYHKLIWGPYKMDSKGDVSGVLIAGGENGNIILYDPSKIIAGDKEVVIAQNDKHTGPVRALDVNIFQTNLVASGANESEIYIWDLNNFATPMTPGAKTQPPEDISCIAWNRQVQHILASASPSGRATVWDLRKNEPIIKVSDHSNRMHCSGLAWHPDVATQMVLASEDDRLPVIQMWDLRFASSPLRVLENHARGILAIAWSMADPELLLSCGKDAKILCSNPNTGEVLYELPTNTQWCFDIQWCPRNPAVLSAASFDGRISVYSIMGGSTDGLRQKQVDKLSSSFGNLDPFGTGQPLPPLQIPQQTAQHSIVLPLKKPPKWIRRPVGASFSFGGKLVTFENVRMPSHQGAEQQQQQHHVFISQVVTEKEFLSRSDQLQQAVQSQGFINYCQKKIDASQTEFEKNVWSFLKVNFEDDSRGKYLELLGYRKEDLGKKHIKEEKEESEFLPSSGGTFNISVSGDIDGLITQALLTGNFESAVDLCLHDNRMADAIILAIAGGQELLARTQKKYFAKSQSKITRLITAVVMKNWKEIVESCDLKNWREALAAVLTYAKPDEFSALCDLLGTRLENEGDSLLQTQACLCYICAGNVEKLVACWTKAQDGSHPLSLQDLIEKVVILRKAVQLTQAMDTSTVGVLLAAKMSQYANLLAAQGSIAAALAFLPDNTNQPNIMQLRDRLCRAQGEPVAGHESPKIPYEKQQLPKGRPGPVAGHHQMPRVQTQQYYPHGENPPPPGFIMHGNVNPNAAGQLPTSPGHMHTQVPPYPQPQPYQPAQPYPFGTGGSAMYRPQQPVAPPTSNAYPNTPYISSASSYTGQSQLYAAQHQASSPTSSPATSFPPPPSSGASFQHGGPGAPPSSSAYALPPGTTGPQNGWNDPPALNRVPKKKKMPENFMPPVPITSPIMNPLGDPQSQMLQQQPSAPVPLSSQSSFPQPHLPGGQPFHGVQQPLGQTGMPPSFSKPNIEGAPGAPIGNTFQHVQSLPTKKITKKPIPDEHLILKTTFEDLIQRCLSSATDPQTKRKLDDASKRLEFLYDKLREQTLSPTITSGLHNIARSIETRNYSEGLTMHTHIVSTSNFSETSAFMPVLKVVLTQANKLGV

SEQ ID NO: 17452 - protein, 716 aa, Homo sapiens
SNSASEEESGKPFQCPICGLVIKRKSYWKRHMVIHTGLKSHQCPLCPFRCARKDNLKSHMKVHQHQDRGETFQCQLCPFTSSRHFSLKLHMRCHQHFLRTEAKVKEEIPDPDVKGSPHLSDSACLGQQREGGGTELVGTMMTSNTPERTSQGGAGVSPLLVKEEPKEDNGLPTSFTLNAADRPANHTKLKDPSEYVANSASALFSQDISVKMASDFLMKLSAANQKEPMNLNFKVKEEPKEGESLSTTLPRSSYVFSPESEVSAPGVSEDALKPQEGKGSVLRRDVSVKAASELLMKLSAESYKETQMVKIKEEPMEVDIQDSHVSISPSRNVGYSTLIGREKTEPLQKMPEGRVPPERNLFSQDISVKMASELLFQLSEKVSKEHNHTKENTIRTTTSPFFSEDTFRQSPFTSNSKELLPSDSVLHGRISAPETEKIVLEAGNGLPSWKFNDQLFPCDVCGKVFGRQQTLSRHLSLHTEERKYKCHLCPYAAKCRANLNQHLTVHSVKLVSTDTEDIVSAVTSEGSDGKKHPYYYSCHVCGFETELNVQFVSHMSLHVDKEQWMFSICCTACDFVTMEEAEIKTHIGTKHTGEDRKTPSESNSPSSSSLSALSDSANSKDDSDGSQKNKGGNNLLVISVMPGSQPSLNSEEKPEKGFECVFCNFVCKTKNMFERHLQIHLITRMFECDVCHKFMKTPEQLLEHKKCHTVPTGGLK

SEQ ID NO: 17453 - protein, 514 aa, Homo sapiens
MYTPNAQYCQMRCTFHPRCLLFSFLPASSINDMEKRFGCFLKDSVTGTLPKVHRTGAVSGHSLKQCGHQISACHRDIYKGVDMRGVNFNVSKVSSVEECQKRCTSNIRCQFFSYATQTFHKAEYRNNCLLKYSPGGTPTAIKVLSNVESGFSLKPCALSEIGCHMNIFQHLAFSDVDVARVLTPDAFVCRTICTYHPNCLFFTFYTNVWKIESQRNVCLLKTSESGTPSSSTPQENTISGYSLLTCKRTLPEPCHSKIYPGVDFGGEELNVTFVKGVNVCQETCTKMIRCQFFTYSLLPEDCKEEKCKCFLRLSMDGSPTRIAYGTQGSSGYSLRLCNTGDNSVCTTKTSTRIVGGTNSSWGEWPWQVSLQVKLTAQRHLCGGSLIGHQWVLTAAHCFDGLPLQDVWRIYSGILNLSDITKDTPFSQIKEIIIHQNYKVSEGNHDIALIKLQAPLNYTEFQKPICLPSKGDTSTIYTNCWVTGWGFSKEKGRFRWSLSLQTQWNVAFGGHHQLG

SEQ ID NO: 17454 - protein, 527 aa, Homo sapiens
MLNNLLLFSLQISLIGTTLGGNVLIWPMEGSHWLNVKIIIDELIKKEHNVTVLVASGALFITPTSNPSLTFEIYKVPFGKERIEGVIKDFVLTWLENRPSPSTIWRFYQEMAKVIKDFHMVSQEICDGVLKNQQLMAKLKKSKFEVLVSDPVFPCGDIVALKLGIPFMYSLRFSPASTVEKHCGKVPYPPSYVPAVLSELTDQMSFTDRIRNFISYHLQDYMFETLWKSWDSYYSKALGRPTTLCETMGKAEIWLIRTYWDFEFPRPYLPNFEFVGGLHCKPAKPLPKEMEEFIQSSGKNGVVVFSLGSMVKNLTEEKANLIASALAQIPQKVLWRYKGKKPATLGNNTQLFDWIPQNDLLGHPKTKAFITHGGTNGIYEAIYHGVPMVGVPMFADQPDNIAHMKAKGAAVEVNLNTMTSVDLLSALRTVINEPSYKENAMRLSRIHHDQPVKPLDRAVFWIEFVMRHKGAKHLRVAAHDLTWFQYHSLDVIGFLLVCVTTAIFLVIQCCLFSCQKFGKIGKKKKRE

SEQ ID NO: 17455 - protein, 1154 aa, Homo sapiens
MGDMTNSDFYSKNQRNESSHGGEFGCTMEELRSLMELRGTEAVVKIKETYGDTEAICRRLKTSPVEGLPGTAPDLEKRKQIFGQNFIPPKKPKTFLQLVWEALQDVTLIILEIAAIISLGLSFYHPPGEGNEGCATAQGGAEDEGEAEAGWIEGAAILLSVICVVLVTAFNDWSKEKQFRGLQSRIEQEQKFTVVRAGQVVQIPVAEIVVGDIAQVKYGDLLPADGLFIQGNDLKIDESSLTGESDQVRKSVDKDPMLLSGTHVMEGSGRMLVTAVGVNSQTGIIFTLLGAGGEEEEKKDKKAKQQDGAAAMEMQPLKSAEGGDADDRKKASMHKKEKSVLQGKLTKLAVQIGKAGLVMSAITVIILVLYFTVDTFVVNKKPWLPECTPVYVQYFVKFFIIGVTVLVVAVPEGLPLAVTISLAYSVKKMMKDNNLVRHLDACETMGNATAICSDKTGTLTTNRMTVVQAYVGDVHYKEIPDPSSINTKTMELLINAIAINSAYTTKILPPEKEGALPRQVGNKTECGLLGFVLDLKQDYEPVRSQMPEEKLYKVYTFNSVRKSMSTVIKLPDESFRMYSKGASEIVLKKCCKILNGAGEPRVFRPRDRDEMVKKVIEPMACDGLRTICVAYRDFPSSPEPDWDNENDILNELTCICVVGIEDPVRPEVPEAIRKCQRAGITVRMVTGDNINTARAIAIKCGIIHPGEDFLCLEGKEFNRRIRNEKGEIEQERIDKIWPKLRVLARSSPTDKHTLVKGIIDSTHTEQRQVVAVTGDGTNDGPALKKADVGFAMGIAGTDVAKEASDIILTDDNFSSIVKAVMWGRNVYDSISKFLQFQLTVNVVAVIVAFTGACITQDSPLKAVQMLWVNLIMDTFASLALATEPPTETLLLRKPYGRNKPLISRTMMKNILGHAVYQLALIFTLLFVGEKMFQIDSGRNAPLHSPPSEHYTIIFNTFVMMQLFNEINARKIHGERNVFDGIFRNPIFCTIVLGTFAIQIVIVQFGGKPFSCSPLQLDQWMWCIFIGLGELVWGQVIATIPTSRLKFLKEAGRLTQKEEIPEEELNEDVEEIDHAERELRRGQILWFRGLNRIQTQIEVVNTFKSGASFQGALRRQSSVTSQSQDVANLSSPSRVSLSNALSSPTSLPPAAAGQG

SEQ ID NO: 17456 - protein, 485 aa, Homo sapiens
MNEENIDGTNGCSKVRTGIQNEAALLALMEKTGYNMVQENGQRKFGGPPPGWEGPPPPRGCEVFVGKIPRDMYEDELVPVFERAGKIYEFRLMMEFSGENRGYAFVMYTTKEEAQLAIRILNNYEIRPGKFIGVCVSLDNCRLFIGAIPKEKKKEEILDEMKKVTEGVVDVIVYPSATDKTKNRGFAFVEYESHRAAAMARRKLIPGTFQLWGHTIQVDWADPEKEVDEETMQRVKVLYVRNLMISTTEETIKAEFNKFKPGAVERVKKLRDYAFVHFFNREDAVAAMSVMNGKCIDGASIEVTLAKPVNKENTWRQHLNGQISPNSENLIVFANKEESHPKTLGKLPTLPARLNGQHSPSPPEVERCTYPFYPGTKLTPISMYSLKSNHFNSAVMHLDYYCNKNNWAPPEYYLYSTTSQDGKVLLVYKIVIPAIANGSQSYFMPDKLCTTLEDAKELAAQFTLLHLDREHNLFSLDLCRRIWRK

SEQ ID NO: 17457 - protein, 444 aa, Homo sapiens
MSSVKRSLKQEIVTQFHCSAAEGDIAKLTGILSHSPSLLNETSENGWTALMCDRSIVNKSRQTALDIAVFWGYKHIANLLATAKGGKKPWFLTNEVEECENYFSKTLLDRKSEKRNNSDWLLAKESHPATVFILFSDLNPLVTLGGNKESFQQPEVRLCQLNYTDIKDYLAQPEKITLIFLGVELEIKDKLLNYAGEVPREEEDGLVAWFALGIDPIAAEEFKQRHENCYFLHPPMPALLQLKEKEAGVVAQARSVLAWHSRYKFCPTCGNATKIEEGGYKRLCLKEDCPSLNGVHNTSYPRVDPVVIMQVIHPDGTKCLLGRQKRFPPGMFTCLAGFIEPGETIEDAVRREVEEESGVKVGHVQYVACQPWPMPSSLMIGCLALAVSTEIKVDKNEIEDARWFTREQVLDVLTKGKQQAFFVPPSRAIAHQLIKHWIRINPNL

SEQ ID NO: 17458 - protein, 278 aa, Homo sapiens
SSAEDSDFEEMGKNIENMLQNKKTSSQLSREREEQERKELQRMLLAGSAASGNNHRDDDTASVTSLNSSATGRCLKIYRTFRDEEGKEYVRCETVRKPAVIDAYVRIRTTKDEEFIRKFALFDEQHREEMRKERRRIQEQLRRLKRNQEKEKLKGPPEKKPKKMKERPDLKLKCGACGAIGHMRTNKFCPLYYQTNAPPSNPVAMTEEQEEELEKTVIHNDNEELIKVEGTKIVLGKQLIESADEVRRKSLVLKFPKQQLPPKKKRRVGTTVHCDYLN

SEQ ID NO: 17459 - protein, 476 aa, Homo sapiens
MAQALPWLLLWMGAGVLPAHGTQHGIRLPLRSGLGGAPLGLRLPRETDEEPEEPGRRGSFVEMVDNLRGKSGQGYYVEMTVGSPPQTLNILVDTGSSNFAVGAAPHPFLHRYYQRQLSSTYRDLRKGVYVPYTQGKWEGELGTDLVSIPHGPNVTVRANIAAITESDKFFINGSNWEGILGLAYAEIARLCGAGFPLNQSEVLASVGGSMIIGGIDHSLYTGSLWYTPIRREWYYEVIIVRVEINGQDLKMDCKEYNYDKSIVDSGTTNLRLPKKVFEAAVKSIKAASSTEKFPDGFWLGEQLVCWQAGTTPWNIFPVISLYLMGEVTNQSFRITILPQQYLRPVEDVATSQDDCYKFAISQSSTGTVMGAVIMEGFYVVFDRARKRIGFAVSACHVHDEFRTAAVEGPFVTLDMEDCGYNIPQTDESTLMTIAYVMAAICALFMLPLCLMVCQWRCLRCLRQQHDDFADDISLLK

SEQ ID NO: 17460 - protein, 246 aa, Homo sapiens
ESFQNEEIGRLLSEDFVSVKVDREERPDVDKVYMTFVQATSSGGGWPMNVWLTPNLQPFVGGTYFPPEDGLTRVGFRTVLLRIREQWKQNKNTLLENSQRVTTALLARSEISVGDRQLPPSAATVNNRCFQQLDEGYDEEYGGFAEAPKFPTPVILSFLFSYWLSHRLTQDGSRAQQMALHTLKMMANGGIRDHVGQTASGTSLTLRRCSMTRHSSLWPIRRPSSSLVMNSTLTWPKASCSTWLGA

SEQ ID NO: 17461 - protein, 1034 aa, Homo sapiens
MDECGSRIRRRVSLPKRNRPSLGCIFGAPTAAELVPGDEGKEEEEMVAENRRRKTAGVLPVEVQPLLLSDSPECLVLGGGDTNPDLLRHMPTDRGVGDQPNDSEVDMFGDYDSFTENSFIAQVDDLEQKYMQLPEHKKHATDFATENLCSESIKNKLSITTIGNLTELQTDKHTENQSGYEGVTIEPGADLLYDVPSSQAIYFENLQNSSNDLGDHSMKERDWKSSSHNTVNEELPHNCIEQPQQNDESSSKVRTSSDMNRRKSIKDHLKNAMTGNAKAQTPIFSRSKQLKDTLLSEEINVAKKTVESSSNDLGPFYSLPSKVRDLYAQFKGIEKLYEWQHTCLTLNSVQERKNLIYSLPTSGGKTLVAEILMLQELLCCRKDVLMILPYVAIVQEKLHMIGEGSRGATLEMTLAKILYTSKTTQIIGMSATLNNVEDLQKFLQAEYYTSQFRPVELKEYLKINDTIYEVDSKAENGMTFSRLLNYKYSDTLKKMDPDHLVALVTEVIPNYSCLVFCPSKKNCENVAEMICKFLSKEYLKHKEKEKCEVIKNLKNIGNGNLCPVLKRTIPFGVAYHHSGLTSDERKLLEEAYSTGVLCLFTCTSTLAAGVNLPARRVILRAPYVAKEFLKRNQYKQMIGRAGRAGIDTIGESILILQEKDKQQVLELITKPLENCYSHLVQEFTKGIQTLFLSLIGLKIATNLDDIYHFMNGTFFGVQQKVLLKEKSLWEITVESLRYLTEKGLLQKDTIYKSEEEVQYNFHITKLGRASFKGTIDLAYCDILYRDLKKGLEGLVLESLLHLIYLTTPYDLVSQCNPDWMIYFRQFSQLSPAEQNVAAILGVSESFIGKKASGQAIGKKVDKNVVNRLYLSFVLYTLLKETNIWTVSEKFNMPRGYIQNLLTGTASFSSCVLHFCEELEEFWVYRALLVELTKKLTYCVKAELIPLMEVTGVLEGRAKQLYSAGYKSLMHLANANPEVLVRTIDHLSRRQAKQIVSSAKMLLHEKAEALQEEVEELLRLPSDFPGAVASSTDKA

SEQ ID NO: 17462 - protein, 801 aa, Homo sapiens [sequence omitted]

SEQ ID NO: 17463 - protein, 1349 aa, Homo sapiens
MPRRKQEQPKRLPSHVSRQEEAEGELSEGEHWYGNSSETPSEASYGEVQENYKLSLEDRIQEQSTSPDTSLGSTTPSSHTLELVALDSEVLRDSLQCQDHLSPGVSSLCDDDPGSNKPLSSNLRRLLEAGSLKLDAAATANGRVESPVNVGSNLSFSPPSHHAQQLSVLARKLAEKQEQNDQYTPSNRFIWNQGKWLPNSTTTCSLSPDSAILKLKAAANAVLQDKSLTRTEETMRFESFSSPFSSQSASSTLAALSKKVSERSLTPGQEHPPPASSFLSLASMTSSAALLKEVAARAAGSLLAEKSSLLPEDPLPPPPSEKKPEKVTPPPPPPPPPPPPPPPQSLELLLLPVPKGRVSKPSNSASEEESGKPFQCPICGLVIKRKSYWKRHMVIHTGLKSHQCPLCPFRCARKDNLKSHMKVHQHQDRGETFQCQLCPFTSSRHFSLKLHMRCHQHFLRTEAKVKEEIPDPDVKGSPHLSDSACLGQQREGGGTELVGTMMTSNTPERTSQGGAGVSPLLVKEEPKEDNGLPTSFTLNAADRPANHTKLKDPSEYVANSASALFSQDISVKMASDFLMKLSAANQKEPMNLNFKVKEEPKEGESLSTTLPRSSYVFSPESEVSAPGVSEDALKPQEGKGSVLRRDVSVKAASELLMKLSAESYKETQMVKIKEEPMEVDIQDSHVSISPSRNVGYSTLIGREKTEPLQKMPEGRVPPERNLFSQDISVKMASELLFQLSEKVSKEHNHTKENTIRTTTSPFFSEDTFRQSPFTSNSKELLPSDSVLHGRISAPETEKIVLEAGNGLPSWKFNDQLFPCDVCGKVFGRQQTLSRHLSLHTEERKYKCHLCPYAAKCRANLNQHLTVHSVKLVSTDTEDIVSAVTSEGSDGKKHPYYYSCHVCGFETELNVQFVSHMSLHVDKEQWMFSICCTACDFVTMEEAEIKTHIGTKHTGEDRKTPSESNSPSSSSLSALSDSANSKDDSDGSQKNKGGNNLLVISVMPGSQPSLNSEEKPEKGFECVFCNFVCKTKNMFERHLQIHLITRMFECDVCHKFMKTPEQLLEHKKCHTVPTGGLKCPFCIYSTNRPAAMECHLKTHYKMEYKCRICQTVKANQLELETHTREHRLGNHYKCDQCGYLSKTANKLIEHVRVHTGERPFHCDQCSYSCKRKDNLNLHKKLKHAPRQTFSCEECLFKTTHPFVFSRHVKKHQSGDCPEEDKKGLCPAPKEPAGPGAPLLVVGSSRNLLSPLSVMSASQALQTVALSAAHGSSSEPNLALKALAFNGSPLRFDKYRNSDFAHLIPLTMLYPKNHLDLTFHPPRPQTAPPSIPSPKHSFLAYLGLRERAETV

SEQ ID NO: 17464 - protein, 348 aa, Homo sapiens
MGARGAPSRRRQAGRRLRYLPTGSFPFLLLLLLLCIQLGGGQKKKENLLAEKVEQLMEWSSRRSIFRMNGDKFRKFIKAPPRNYSMIVMFTALQPQRQCSVCRQANEEYQILANSWRYSSAFCNKLFFSMVDYDEGTDVFQQLNMNSAPTFMHFPPKGRPKRADTFDLQRIGFAAEQLAKWIADRTDVHIRVFRPPNYSGTIALALLVSLVGGLLYLRRNNLEFIYNKTGWAMVSLCIVFAMTSGQMWNHIRGPPYAHKNPHNGQVSYIHGSSQAQFVAESHIILVLNAAITMGMVLLNEAATSKGDVGKRRIICLVGLGLVVFFFSFLLSIFRSKYHGYPYSDLDFE

SEQ ID NO: 17465 - protein, 160 aa, Homo sapiens
MPVERMRMRPWLEEQINSNTIPGLKWLNKEKKIFQIPWMHAARHGWDVEKDAPLFRNWAIHTGKHQPGVDKPDPKTWKANFRCAMNSLPDIEEVKDKSIKKGNNAFRVYRMLPLSERPSKKGKKPKTEKEDKVKHIKQEPVESSLGLSNGVSDLSPEYAV

SEQ ID NO: 17466 - protein, 591 aa, Homo sapiens
MNKWVRCICDICGFNPTEEDPVKPPGSSLQAPADLPLAINTAPPSTQADSSSATLPPPYQLINVPPHLETLGIQEDPQDYLLLINCQSKKPEPTRTHADSAKSTSSETDCNDNVPSHKNPASSQSKHGMNGFFQQQMIYDSPPSRAPSASVDSSLYNLPRSYSHDVLPKVSPSSTEADGELYVFNTPSGTSSVETQMRHVSISYDIPPTPGNTYQIPRTFPEGTLGQTSKLDTIPDIPPPRPPKPHPAHDRSPVETCSIPRTASDTDSSYCIPTAGMSPSRSNTISTVDLNKLRKDASSQDCYDIPRAFPSDRSSSLEGFHNHFKVKNVLTVGSVSSEELDENYVPMNPNSPPRQHSSSFTEPIQEANYVPMTPGTFDFSSFGMQVPPPAHMGFRSSPKTPPRRPVPVADCEPPPVDRNLKPDRKVKPAPLEIKPLPEWEELQAPVRSPITRSFARDSSRFPMSPRPDSVHSTTSSSDSHDSEENYVPMNPNLSSEDPNLFGSNSLDGGSSPMIKPKGDKQVEYLDLDLDSGKSTPPRKQKSSGSGSSVADERVDYVVVDQQKTLALKSTREAWTDGRQSTESETPAKSVK

SEQ ID NO: 17467 - protein, 610 aa, Homo sapiens
MASGGSGGVSVPALWSEVNRYGQNGDFTRALKTVNKILQINKDDVTALHCKVVCLIQNGSFKEALNVINTHTKVLANNSLSFEKAYCEYRLNRIENALKTIESANQQTDKLKELYGQVLYRLERYDECLAVYRDLVRNSQDDYDEERKTNLSAVVAAQSNWEKVVPENLGLQEGTHELCYNTACALIGQGQLNQAMKILQKAEDLCRRSLSEDTDQNVFDSKKKVKLTNAEGVEFKLSKKQLQAIEFNKALLAMYTNQAEQCRKISASLQSQSPEHLLPVLIQAAQLCREKQHTKAIELLQEFSDQHPENAAEIKLTMAQLKISQGNISKACLILRSIEELKHKPGMVSALVTMYSHEEDIDSAIEVFTQAIQWYQNHQPKSPAHLSLIREAANFKLKYGRKKEAISDLQQLWKQNPKDIHTLAQLISAYSLVDPEKAKALSKHLPSSDSMSLKVDVEALENSAGATYIRKKGGKVTGDSQPKEQGQGDLKKKKKKKKGKLPKNYDPKVTPDPERWLPMRERSYYRGRKKGKKKDQIGKGTQGATAGASSELDASKTVSSPPTSPRPGSAATVSASTSNIIPPRHQKPAGAPATKKKQQQKKKKGGKGGW

SEQ ID NO: 17468 - protein, 501 aa, Homo sapiens
MPRRKRNAGSSSDGTEDSDFSTDLEHTDSSESDGTSRRSARVTRSSARLSQSSQDSSPVRNLQSFGTEEPAYSTRRVTRSQQQPTPVTPKKYPLRQTRSSGSETEQVVDFSDRGHLTGKHERHFSISGCPLYHNLSADECKAPTERQLRYKEKVAELRKKRNSGLSKEQKEKYMEHRQTYGNTREPLLENLTSEYDLDLFRRAQARASEDLEKLRLQGQITEGSNMIKTIAFGRYELDTWYHSPYPEEYARLGRLYMCEFCLKYMKSQTILRRHMAKCVWKHPPGDEIYRKGSISVFEVDGKKNKIYCQNLCLLAKLFLDHKTLYYDVEPFLFYVMTEADNTGCHLIGYFSKEKNSFLNYNVSCILTMPQYMRQGYGKMLIDFSYLLSKVEEKVGSPERPLSDLGLISYRSYWKEVLLRYLHNFQGKEISIKEISQETAVNPVDIVSTLQALQMLKYWKGKHLVLKRQDLIDEWIAKEAKRSNSNKTMDPSCLKWTPPKGT

SEQ ID NO: 17469 - protein, 610 aa, Homo sapiens
MAFPVDMLENCSHEELENSAEDYMSDLRCGDPENPECFSLLNITIPISLSNVGFVPLYGGDQTQKILALFAPEDSLTAVALYLADQWWAIDDIVKTSVPSREGLKQVSTLGERVVLYVLNRIIYRKQEMERNEIPFLCHSSTDYAKILWKKGEAIGFYSVKPTACKQYFEKYPGDHELLWEVEGVGHWYQRIPVTRALQREALKILALSQNEPKRPMSGEYGPASVPEYEARTEDNQSSEMQLTIDSLKDAFASTSEGHDKTSVSTHTRSGNLKRPKIGKRFQDSEFSSSQGEDEKTSQTSLTASINKLESTARPSESSEEFLEEEPEQRGIEFEDESSDRDARPALETQPQQEKQDGEKESELEPMNGEIMDDSLKTSLITEEEDSTSEVLDEELKLQPFNSSEDSTNLVPLVVESSKPPEVDAPDKTPRIPDSEMLMDEGTSDEKGHMEEKLSLLPRKKAHLGSSDNVATMSNEERSDGGFPNSVIAEFSEEPVSENLSPNTTSSLEDQGEEGVSEPQETSTALPQSSLIEVELEDVPFSQNAGQKNQSEEQSEASSEQLDQFTQSAEKAVDSSSEEIEVEVPVVDRRNLRRKAKGHKGPAKKKAKLT

SEQ ID NO: 17470 - protein, 340 aa, Homo sapiens
MALMLSLVLSLLKLGSGQWQVFGPDKPVQALVGEDAAFSCFLSPKTNAEAMEVRFFRGQFSSVVHLYRDGKDQPFMQMPQYQGRTKLVKDSIAEGRISLRLENITVLDAGLYGCRISSQSYYQKAIWELQVSALGSVPLISITGYVDRDIQLLCQSSGWFPRPTAKWKGPQGQDLSTDSRTNRDMHGLFDVEISLTVQENAGSISCSMRHAHLSREVESRVQIGDTFFEPISWHLATKVLGILCCGLFFGIVGLKIFFSKFQCKREREAWAGALFMVPAGTGSEMLPHPAASLLLVLASRGPGPKKLEKKARTGRIERRPETRSGGDSGSRDGSPEALRF

SEQ ID NO: 17471 - protein, 818 aa, Homo sapiens
MESEQLFHRGYYRNSYNSITSASSDEELLDGAGVIMDFQTSEDDNLLDGDTAVGTHYTMTNGGSINSSTHLLDLLDEPIPGVGTYDDFHTIDWVREKCKDRERHRRINSKKKESAWEMTKSLYDAWSGWLVVTLTGLASGALAGLIDIAADWMTDLKEGICLSALWYNHEQCCWGSNETTFEERDKCPQWKTWAELIIGQAEGPGSYIMNYIMYIFWALSFAFLAVSLVKVFAPYACGSGIPEIKTILSGFIIRGYLGKWTLMIKTITLVLAVASGLSLGKEGPLVHVACCCGNIFSYLFPKYSTNEAKKREVLSAASAAGVSVAFGAPIGGVLFSLEEVSYYFPLKTLWRSFFAALVAAFVLRSINPFGNSRLVLFYVEYHTPWYLFELFPFILLGVFGGLWGAFFIRANIAWCRRRKSTKFGKYPVLEVIIVAAITAVIAFPNPYTRLNTSELIKELFTDCGPLESSSLCDYRNDMNASKIVDDIPDRPAGIGVYSAIWQLCLALIFKIIMTVFTFGIKVPSGLFIPSMAIGAIAGRIVGIAVEQLAYYHHDWFIFKEWCEVGADCITPGLYAMVGAAACLGGVTRMTVSLVVIVFELTGGLEYIVPLMAAVMTSKWVGDAFGREGIYEAHIRLNGYPFLDAKEEFTHTTLAADVMRPRRNDPPLAVLTQDNMTVDDIENMINETSYNGFPVIMSKESQRLVGFALRRDLTIAIESARKKQEGIVGSSRVCFAQHTPSLPAESPRPLKLRSILDMSPFTVTDHTPMEIVVDIFRKLGLRQCLVTHNGRLLGIITKKDILRHMAQTANQDPASIMFN

SEQ ID NO: 17472 - protein, 441 aa, Homo sapiens
MGRKKIQITRIMDERNRQVTFTKRKFGLMKKAYELSVLCDCEIALIIFNSTNKLFQYASTDMDKVLLKYTEYNEPHESRTNSDIVETLRKKGLNGCDSPDPDADDSVGHSPESEDKYRKINEDIDLMISRQRLCAVPPPNFEMPVSIPVSSHNSLVYSNPVSSLGNPNLLPLAHPSLQRNSMSPGVTHRPPSAGNTGGLMGGDLTSGAGTSAGNGYGNPRNSPGLLVSPGNLNKNMQAKSPPPMNLGMNNRKPDLRVLIPPGSKNTMPSVSEDVDLLLNQRINNSQSAQSLATPVVSVATPTLPGQGMGGYPSAISTTYGTEYSLSSADLSSLSGFNTASALHLGSVTGWQQQHLHNMPPSALSQLGDRTTTPSRYPQHTRHEAGRSPVDSLSSCSSSYDGSDREDHRNEFHSPIGLTRPSPDERESPSVKRMRLSEGWAT

SEQ ID NO: 17473 - protein, 348 aa, Homo sapiens
MVNNFSQAEAVELCYKNVNESCIKTPYSPGPRSILYAVLGFGAVLAAFGNLLVMIAILHFKQLHTPTNFLIASLACADFLVGVTVMPFSTVRSVESCWYFGDSYCKFHTCFDTSFCFASLFHLCCISVDRYIAVTDPLTYPTKFTVSVSGICIVLSWFFSVTYSFSIFYTGANEEGIEELVVALTCVGGCQAPLNQNWVLLCFLLFFIPNVAMVFIYSKIFLVAKHQARKIESTASQAQSSSESYKERVAKRERKAAKTLGIAMAAFLVSWLPYLVDAVIDAYMNFITPPYVYEILVWCVYYNSAMNPLIYAFFYQWFGKAIKLIVSGKVLRTDSSTTNLFSEEVETD

SEQ ID NO: 17474 - protein, 499 aa, Homo sapiens
MAGYKPVAIQTYPILGEKITQDTLYWNNYKPPYNYAVTASSRIHIYGRYSQEPIKTFSRFKDTAYCATFRQDGRLLVAGSEDGGVQLFDISGRAPLRQFEGHTKAVHTVDFTADKYHVVSGADDYTVKLWDIPNSKEILTFKEHSDYVRCGCASKLNPDLFITGSYDHTVKMFDARTSESVLSVEHGQPVESVLLFPSGGLLVSAGGRYVKVWDMLKGGQLLVSLKNHHKTVTCLCLSSSGQRLLSGSLDRKVKVYSTTSYKVVHSFDYAASILSLALAHEDETIVVGMTNGILSVKHRKSEAKKESLPRRRRPAYRTFIKGKNYMKQRDDILINRPAKKHLELYDRDLKHFRISKALDRVLDPTCTIKTPEITVSIIKELNRRGVLANALAGRDEKEISHVLNFLIRNLSQPRFAPVLINAAEIIIDIYLPVIGQSPVVDKKFLLLQGLVEKEIDYQRELLETLGMMDMLFATMRRKEGTSVLEHTSDGFPENKKIES

SEQ ID NO: 17475 - protein, 718 aa, Homo sapiens
MGSPLRFDGRVVLVTGAGAVNDLGGDFKGVGKGSLAADKVVEEIRRRGGKAVANYDSVEEGEKVVKTALDAFGRIDVVVNNAGILRDRSFARISDEDWDIIHRVHLRGSFQVTRAAWEHMKKQKYGRIIMTSSASGIYGNFGQANYSAAKLGLLGLANSLAIEGRKSNIHCNTIAPNAGSRMTQTVMPEDLVEALKPEYVAPLVLWLCHESCEENGGLFEVGAGWIGKLRWERTLGAIVRQKNHPMTPEAVKANWKKICDFENASKPQSIQESTGSIIEVLSKIDSEGGVSANHTSRATSTATSGFAGAIGQKLPPFSYAYTELEAIMYALGVGASIKDPKDLKFIYEGSSDFSCLPTFGVIIGQKSMMGGGLAEIPGLSINFAKVLHGEQYLELYKPLPRAGKLKCEAVVADVLDKGSGVVIIMDVYSYSEKELICHNQFSLFLVGSGGFGGKRTSDKVKVAVAIPNRPPDAVLTDTTSLNQAALYRLSGDWNPLHIDPNFASLAGFDKPILHGLCTFGFSARRVLQQFADNDVSRFKAIKARFAKPVYPGQTLQTEMWKEGNRIHFQTKVQETGDIVISNAYVDLAPTSGTSAKTPSEGGKLQSTFVFEEIGRRLKDIGPEVVKKVNAVFEWHITKGGNIGAKWTIDLKSGSGKVYQGPAKGAADTTIILSDEDFMEVVLGKLDPQKAFFSGRLKARGNIMLSQKLQMILKDYAKL

SEQ ID NO: 17476 - protein, 816 aa, Homo sapiens
MDPSAHRSRAAPPNMDPDPQAGVQVGMRVVRGVDWKWGQQDGGEGGVGTVVELGRHGSPSTPDRTVVVQWDQGTRTNYRAGYQGAHDLLLYDNAQIGVRHPNIICDCCKKHGLRGMRWKCRVCLDYDLCTQCYMHNKHELAHAFDRYETAHSRPVTLSPRQGLPRIPLRGIFQGAKVVRGPDWEWGSQDGGEGKPGRVVDIRGWDVETGRSVASVTWADGTTNVYRVGHKGKVDLKCVGEAAGGFYYKDHLPRLGKPAELQRRVSADSQPFQHGDKVKCLLDTDVLREMQEGHGGWNPRMAEFIGQTGTVHRITDRGDVRVQFNHETRWTFHPGALTKHHSFWVGDVVRVIGDLDTVKRLQAGHGEWTDDMAPALGRVGKVVKVFGDGNLRVAVAGQRWTFSPSCLVAYRPEEDANLDVAERARENKSSLSVALDKLRAQKSDPEHPGRLVVEVALGNAARALDLLRRRPEQVDTKNQGRTALQVAAYLGQVELIRLLLQARAGVDLPDDEGNTALHYAALGNQPEATRVLLSAGCRADAINSTQSTALHVAVQRGFLEVVRALCERGCDVNLPDAHSDTPLHSAISAGTGASGIVEVLTEVPNIDVTATNSQGFTLLHHASLKGHALAVRKILARARQLVDAKKEDGFTALHLAALNNHREVAQILIREGRCDVNVRNRKLQSPLHLAVQQAHVGLVPLLVDAGCSVNAEDEEGDTALHVALQRHQLLPLVADGAGGDPGPLQLLSRLQASGLPGSAELTVGAAVACFLALEGADVSYTNHRGRSPLDLAAEGRVLKALQGCAQRFRERQAGGGR

SEQ ID NO: 17477 - protein, 1275 aa, Homo sapiens
MDWDDEYSHNSFDLHCLLNSFPGDLEFEQIFSDIDEKIEQNAASIKHCIKEIQSEINKQCPGVQLQTTTDCFEWLTNYNYSTSESSFISHGDLIKFFKTLQDLLKNEQNQEEMTLDLLWDLSCHSSVSFPSTLSGTSFHFLSRTSLHSVEDNSSMDVKSMWDDIRLHLRRFLVSKLQSHNEINNSQQKILLKKQCLQQLLFLYPESEVIIKYQNIQNKLLANLLWNCFPSYNRDSNLDVIAHGYQSTMLKLYSVIKEDFNTLCEILAPSSMVKFIKETYLDTVTEEMAKFLENFCELQFRENAVRVVKTSKSSSKHRGAVHALVTTECPQKGRNFSLPLDKVEFLSQLIKSFMKLEKGVQELFDEILLSLKITRDTSGILEKSDREVVMEKPRANETNIPSEQSLPGKEATLLDFGWRSAFKEVSLPMAHCVVTAIEGFSTKILQQEQNERSSAVSYAMNLVNVQQVWQDSHMFPEEEQPKKIGKFCSDIMEKLDTMLPLALACRDDSFQEIRANLVEACCKVATAVLQRLQERAKEVPSKAPLKNLHTYLSTAVYVFQHFKRYDNLMKEMTKKPIFLVLVQRYQEFINTLQFQVTNYCVRVCATSILQDAESHHWDDYKAFYEGERCSFSIQMWHYFCWSLHYDLWTILPPKLAQEILVEVLEKSLSLLASRYARAHPSRKRTPQLRLDVTTILICTENMLWSVCTSVQKLLNPHQHTDDKIFKIHTHCNNLFTTLVILTSPLTELYKTFQHGLDESASDSLKSFFKQPLYWVSCISHFYPSLLRTPSAGGLKAEGQLKLLLSQPRCNWNLLLETLLHHDGLLLRILLKSSKQVSDTENNLNQGPSLMEAIFKILYHCSFSPQTFANVFVSYMEEEQLWDFLYNIPVSTCVEYELEVIRCLRLALTDAIKDTVQQIVSVMSSRRNCETNLNKHIVPDCLLESMPKEWNYSPKETNRKESCKSFTRLTAQAVSIVISKLPTVIACLPPPVKYFFFLSERKMSKKFVELKKAGLLVWNLIVIICRIFEDGNTVELLTGASLDRWSKEKLGLICMCLKSIMGDQTSIHNQMIQKVIQSIEQQKPNWIERQLLKARKLSTECAFMTIEKSTALQEGDVALELTEQKINTMVLDLCHKPGGREYLRQIYHIMQLNEEYLKEQLFSMNSSEEKPLPIRPLKTTLRSIEDQPSAFNPFHVYKAFSENMLDQSAITKWNWNWAKLLPNYLRLDKMTFSVLLKNRWEMKKDETLEEEEKAILEHLKQICTPQNSSASDNIEEQ

SEQ ID NO: 17478 - protein, 895 aa, Homo sapiens
MERASERRTASALFAGFRALGLFSNDIPHVVRFSALKRRFYVTTCVGKSFHTYDVQKLSLVAVSNSVPQDICCMAADGRLVFAAYGNVFSAFARNKEIVHTFKGHKAEIHFLQPFGDHIISVDTDGILIIWHIYSEEEYLQLTFDKSVFKISAILHPSTYLNKILLGSEQGSLQLWNVKSNKLLYTFPGWKVGVTALQQAPAVDVVAIGLMSGQVIIHNIKFNETLMKFRQDWGPITSISFRTDGHPVMAAGSPCGHIGLWDLEDKKLINQMRNAHSTAIAGLTFLHREPLLVTNGADNALRIWIFDGPTGEGRLLRFRMGHSAPLTNIRYYGQNGQQILSASQDGTLQSFSTVHEKFNKSLGHGLINKKRVKRKGLQNTMSVRLPPITKFAAEEARESDWDGIIACHQGKLSCSTWNYQKSTIGAYFLKPKELKKDDITATAVDITSCGNFAVIGLSSGTVDVYNMQSGIHRGSFGKDQAHKGSVRGVAVDGLNQLTVTTGSEGLLKFWNFKNKILIHSVSLSSSPNIMLLHRDSGILGLALDDFSISVLDIETRKIVREFSGHQGQINDMAFSPDGRWLISAAMDCSIRTWDLPSGCLIDCFLLDSAPLNVSMSPTGDFLATSHVDHLGIYLWSNISLYSVVSLRPLPADYVPSIVMLPGTCQTQDVEVSEETVEPSDELIEYDSPEQLNEQLVTLSLLPESRWKNLLNLDVIKKKNKPKEPPKVPKSAPFFIPTIPGLVPRYAAPEQNNDPQQSKVVNLGVLAQKSDFCLKLEEGLVNNKYDTALNLLKESGPSGIETELRSLSPDCGGSIEVMQSFLKMIGMMLDRKRDFELAQAYLALFLKLHLKMLPSEPVLLEEITNLSSQVEENWTHLQSLFNQSMCILNYLKSALL

SEQ ID NO: 17479 - protein, 1205 aa, Homo sapiens
MKLKEVDRTAMQAWSPAQNHPIYLATGTSAQQLDATFSTNASLEIFELDLSDPSLDMKSCATFSSSHRYHKLIWGPYKMDSKGDVSGVLIAGGENGNIILYDPSKIIAGDKEVVIAQNDKHTGPVRALDVNIFQTNLVASGANESEIYIWDLNNFATPMTPGAKTQPPEDISCIAWNRQVQHILASASPSGRATVWDLRKNEPIIKVSDHSNRMHCSGLAWHPDVATQMVLASEDDRLPVIQMWDLRFASSPLRVLENHARGILAIAWSMADPELLLSCGKDAKILCSNPNTGEVLYELPTNTQWCFDIQWCPRNPAVLSAASFDGRISVYSIMGGSTDGLRQKQVDKLSSSFGNLDPFGTGQPLPPLQIPQQTAQHSIVLPLKKPPKWIRRPVGASFSFGGKLVTFENVRMPSHQGAEQQQQQHHVFISQVVTEKEFLSRSDQLQQAVQSQGFINYCQKKIDASQTEFEKNVWSFLKVNFEDDSRGKYLELLGYRKEDLGKKIALALNKVDGANVALKDSDQVAQSDGEESPAAEEQLLGEHIKEEKEESEFLPSSGGTFNISVSGDIDGLITQALLTGNFESAVDLCLHDNRMADAIILAIAGGQELLARTQKKYFAKSQSKITRLITAVVMKNWKEIVESCDLKNWREALAAVLTYAKPDEFSALCDLLGTRLENEGDSLLQTQACLCYICAGNVEKLVACWTKAQDGSHPLSLQDLIEKVVILRKAVQLTQAMDTSTVGVLLAAKMSQYANLLAAQGSIAAALAFLPDNTNQPNIMQLRDRLCRAQGEPVAGHESPKIPYEKQQLPKGRPGPVAGHHQMPRVQTQQYYPHGENPPPPGFIMHGNVNPNAAGQLPTSPGHMHTQVPPYPQPQPYQPAQPYPFGTGGSAMYRPQQPVAPPTSNAYPNTPYISSASSYTGQSQLYAAQHQASSPTSSPATSFPPPPSSGASFQHGGPGAPPSSSAYALPPGTTGPQNGWNDPPALNRVPKKKKMPENFMPPVPITSPIMNPLGDPQSQMLQQQPSAPVPLSSQSSFPQPHLPGGQPFHGVQQPLGQTGMPPSFSKPNIEGAPGAPIGNTFQHVQSLPTKKITKKPIPDEHLILKTTFEDLIQRCLSSATDPQTKRKLDDASKRLEFLYDKLREQTLSPTITSGLHNIARSIETRNYSEGLTMHTHIVSTSNFSETSAFMPVLKVVLTQANKLGV

SEQ ID NO: 17480 - protein, 241 aa, Homo sapiens
MAAEQGQILVIATAAVGGFTLLVILTLFFLITGRCQWYIKAKMKSEEKRRNHLQNGHLRFPGIKTYIDPDTYEDPSLAVHEFAKEIDPSRIRIERVIGAGEFGEVCSGRLKTPGKREIPVAIKTLKGGHMDRQRRDFLREASIMGQFDHPNIIRLEGVVTKRSFPAIGVEAFCPSFLRAGFLNSIQAPHPVPGGGSLPPRIPAGRPVMIVVEYMENGSLDSFLRLYPKAEYNGKQCSRYSI

SEQ ID NO: 17481 - protein, 411 aa, Homo sapiens
MCIKFSSVIAKKNERWHSDGIVYPKPTWLGEELLAKLAKWSVENKKSDFKSTLSLISIMKYSKAYQELKEKYKEMVKVWPEVTDPEKFVYEDVAIAAYLLILWEEERAERRLTARQSFVDLGCGNGLLVHILSSEGHPGRGIDVRRRKIWDMYGPQTQLEEDAITPNDKTLFPDVDWLIGNHSDELTPWIPVIAARSSYNCRFFVLPCCFFDFIGRYSRRQSKKTQYREYLDFIKEVGFTCGFHVDEDCLRIPSTKRVCLVGKSRTYPSSREASVDEKRTQYIKSRRGCPVSPPGWELSPSPRWVAAGSAGHCDGQQALDARVGCVTRAWAAEHGAGPQAEGPWLPGFHPREKAERVRNCAALPRDFIDQVVLQVANLLLGGKQLNTRSSRNGSLKTWNGGGKLSTILGRG

SEQ ID NO: 17482 - protein, 1057 aa, Homo sapiens
MACPALGLEALQPLQPEPPPEPAFSEAQKWIEQVTGRSFGDKDFRTGLENGILLCELLNAIKPGLVKKINRLPTPIAGLDNIILFLRGCKELGLKESQLFDPSDLQDTSNRVTVKSLDYSRKLKNVLVTIYWLGKAANSCTSYSGTTLNLKEFEGLLAQMRKDTDDIESPKRSIRDSGYIDCWDSERSDSLSPPRHGRDDSFDSLDSFGSRSRQTPSPDVVLRGSSDGRGSDSESDLPHRKLPDVKKDDMSARRTSHGEPKSAVPFNQYLPNKSNQTAYVPAPLRKKKAEREEYRKSWSTATSPLGGERPFRYGPRTPVSDDAESTSMFDMRCEEEAAVQPHSRARQEQLQLINNQLREEDDKWQDDLARWKSRRRSVSQDLIKKEEERKKMEKLLAGEDGTSERRKSIKTYREIVQEKERRERELHEAYKNARSQEEAEGILQQYIERFTISEAVLERLEMPKILERSHSTEPNLSSFLNDPNPMKYLRQQSLPPPKFTATVETTIARASVLDTSMSAGSGSPSKTVTPKAVPMLTPKPYSQPKNSQDVLKTFKVDGKVSVNGETVHREEEKERECPTVAPAHSLTKSQMFEGVARVHGSPLELKQDNGSIEINIKKPNSVPQELAATTEKTEPNSQEDKNDGGKSRKGNIELASSEPQHFTTTVTRCSPTVAFVEFPSSPQLKNDVSEEKDQKKPENEMSGKVELVLSQKVVKPKSPEPEATLTFPFLDKMPEANQLHLPNLNSQVDSPSSEKSPVMTPQFKFWAWDPEEERRRQEKWQQEQERLLQERYQKEQDKLKEEWEKAQKEVEEEERRYYEEERKIIEDTVVPFTVSSSSADQLSTSSSMTEGSGTMNKIDLGNCQDEKQDRRWKKSFQGDDSDLLLKTRESDRLEEKGSLTEGALAHSGNPVSKGVHEDHQLDTEAGAPHCGTNPQLAQDPSQNQQTSNPTHSSEDVKPKTLPLDKSINHQIESPSERRKSISGKKLCSSCGLPLGKGAAMIIETLNLYFHIQCFRCGICKGQLGDAVSGTDVRIRNGLLNCNDCYMRSRSAGQPTTL

SEQ ID NO: 17483 - protein, 420 aa, Homo sapiens
MAAAVRQDLAQLMNSSGSHKDLAGKYRQILEKAIQLSGAEQLEALKAFVEAMVNENVSLVISRQLLTDFCTHLPNLPDSTAKEIYHFTLEKIQPRVISFEEQVASIRQHLASIYEKEEDWRNAAQVLVGIPLETGQKQYNVDYKLETYLKIARLYLEDDDPVQAEAYINRASLLQNESTNEQLQIHYKVCYARVLDYRRKFIEAAQRYNELSYKTIVHESERLEALKHALHCTILASAGQQRSRMLATLFKDERCQQLAAYGILEKMYLDRIIRGNQLQEFAAMLMPHQKATTADGSSILDRAVIEHNLLSASKLYNNITFEELGALLEIPAAKAEKIASQMITEGRMNGFIDQIDGIVHFETSGNHQSIFCLWIYLVWIVHINGIIQYVTCDLLADSTQHSIFRVHPCHGSTRSPANVG

SEQ ID NO: 17484 - protein, 339 aa, Homo sapiens
MYGKGKSNSSAVPSDSQAREKLALYVYEYLLHVGAQKSAQTFLSEIRWEKNITLGEPPGFLHSWWCVFWDLYCAAPERRETCEHSSEAKAFHDYPFMSPRYPGGPRPPLRIPNQALGGVPGSQPLLPSGMDPTRQQGHPNMGGPMQRMTPPRGMVPLGPQSDPWLSLQNYGGAMRPPLNALGGPGMPGMNMGPGGGRPWPNPTNANSIPYSSASPGNYVGPPGGGGPPGTPIMPSPADSTNSGDNMYTLMNAVPPGPNRPNFPMGPGSDGPMGGLGGMESHHMNGSLGSGDMDSISKNSPNNMSLSNQPGTPRDDGEMGGNFLNPFQSESYSPSMTMSV

SEQ ID NO: 17485 - protein, 1746 aa, Homo sapiens
MDEEEDGAGAEESGQPRSFMRLNDLSGAGGRPGPGSAEKDPGSADSEAEGLPYPALAPVVFFYLSQDSRPRSWCLRTVCNPWFERISMLVILLNCVTLGMFRPCEDIACDSQRCRILQAFDDFIFAFFAVEMVVKMVALGIFGKKCYLGDTWNRLDFFIVIAGMLEYSLDLQNVSFSAVRTVRVLRPLRAINRVPSMRILVTLLLDTLPMLGNVLLLCFFVFFIFGIVGVQLWAGLLRNRCFLPENFSLPLSVDLERYYQTENEDESPFICSQPRENGMRSCRSVPTLRGDGGGGPPCGLDYEAYNSSSNTTCVNWNQYYTNCSAGEHNPFKGAINFDNIGYAWIAIFQVITLEGWVDIMYFVMDAHSFYNFIYFILLIIVGSFFMINLCLVVIATQFSETKQRESQLMREQRVRFLSNASTLASFSEPGSCYEELLKYLVYILRKAARRLAQVSRAAGVRVGLLSSPAPLGGQETQPSSSCSRSHRRLSVHHLVHHHHHHHHHYHLGNGTLRAPRASPEIQDRDANGSRRLMLPPPSTPALSGAPPGGAESVHSFYHADCHLEPVRCQAPPPRSPSEASGRTVGSGKVYPTVHTSPPPETLKEKALVEVAASSGPPTLTSLNIPPGPYSSMHKLLETQSTGACQSSCKISSPCLKADSGACGPDSCPYCARAGAGEVELADREMPDSDSEAVYEFTQDAQHSDLRDPHSRRQRSLGPDAEPSSVLAFWRLICDTFRKIVDSKYFGRGIMIAILVNTLSMGIEYHEQPEELTNALEISNIVFTSLFALEMLLKLLVYGPFGYIKNPYNIFDGVIVVISVWEIVGQQGGGLSVLRTFRLMRVLKLVRFLPALQRQLVVLMKTMDNVATFCMLLMLFIFIFSILGMHLFGCKFASERDGDTLPDRKNFDSLLWAIVTVFQILTQEDWNKVLYNGMASTSSWAALYFIALMTFGNYVLFNLLVAILVEGFQAEGDANKSESEPDFFSPSLDGDGDRKKCLALVSLGEHPELRKSLLPPLIIHTAATPMSLPKSTSTGLGEALGPASRRTSSSGSAEPGAAHEMKSPPSARSSPHSPWSAASSWTSRRSSRNSLGRAPSLKRRSPSGERRSLLSGEGQESQDEEESSEEERASPAGSDHRHRGSLEREAKSSFDLPDTLQVPGLHRTASGRGSASEHQDCNGKSASGRLARALRPDDPPLDGDDADDEGNLSKGERVRAWIRARLPACCLERDSWSAYIFPPQSRFRLLCHRIITHKMFDHVVLVIIFLNCITIAMERPKIDPHSAERIFLTLSNYIFTAVFLAEMTVKVVALGWCFGEQAYLRSSWNVLDGLLVLISVIDILVSMVSDSGTKILGMLRVLRLLRTLRPLRVISRAQGLKLVVETLMSSLKPIGNIVVICCAFFIIFGILGVQLFKGKFFVCQGEDTRNITNKSDCAEASYRWVRHKYNFDNLGQALMSLFVLASKDGWVDIMYDGLDAVGVDQQPIMNHNPWMLLYFISFLLIVAFFVLNMFVGVVVENFHKCRQHQEEEEARRREEKRLRRLEKKRRNLMLDDVIASGSSASAASEAQCKPYYSDYSRFRLLVHHLCTSHYLDLFITGVIGLNVVTMAMEHYQQPQILDEALKICNYIFTVIFVLESVFKLVAFGFRRFFQDRWNQLDLAIVLLSIMGITLEEIEVNASLPINPTIIRIMRVLRIARVLKLLKMAVGMRALLDTLWAWSSLETWSVTRHTPVRAWAVMPPFGTLAWPS

SEQ ID NO: 17486 - protein, 853 aa, Homo sapiens
FQVSYFAFKFAKKDCPVSNINNSSIPSALPEPMTASEAAARKSQIKARITDTIGPTETSIAPRQRPKANSATTATPSVLTIQSSATPVKVLAPGEFGNHRPKGALRPGNGPEILLGQGPPQQPPQQHRVLQQLQQGDWRLQQLHLQHRHPHQQQQQQQQQQQQQQQQQQQQQQQQQQQHHHHHHHHLLQDAYMQQYQHATQQQQMLQQQFLMHSVYQPQPSASQYPTMMPQYQQAFFQQQMLAQHQPSQQQASPEYLTSPQEFSPALVSYTSSLPAQVGTIMDSSYSANRSVADKEAIANFTNQKNISNPPDMSGWNPFGEDNFSKLTEEELLDREFDLLRSNRLEERASSDKNVDSLSAPHNHPPEDPFGSVPFISHSGSPEKKAEHSSINQENGTANPIKNGKTSPASKDQRTGKKTSVQGQVQKGNDESESDFESDPPSPKSSEEEEQDDEEVLQGEQGDFNDDDTEPENLGHRPLLMDSEDEEEEEKHSSDSDYEQAKAKYSDMSSVYRDRSGSGPTQDLNTILLTSAQLSSDVAVETPKQEFDVFGAVPFFAVRAQQPQQEKNEKNLPQHRFPAAGLEQEEFDVFTKAPFSKKVNVQECHAVGPEAHTIPGYPKSVDVFGSTPFQPFLTSTSKSESNEDLFGLVPFDEITGSQQQKVKQRSLQKLSSRQRRTKQDMSKSNGKRHHGTPTSTKKTLKPTYRTPERARRHKKVGRRDSQSSNEFLTISDSKENISVALTDGKDRGNVLQPEESLLDPFGAKPFHSPDLSWHPPHQGLSDIRADHNTVLPGRPRQNSLHGSFHSADVLKMDDFGAVPFTELVVQSITPHQSQQSQPVELDPFGAAPFPSKQ

SEQ ID NO: 17487 - protein, 279 aa, Homo sapiens
RYTDIILYASGSLALAVLLLLAGLYRGQALHGRHPRPPATVQKLSRFPLARQSGSSGKSSSSLVRGVRLSSSGPALLAGLVSLDLPLDPLWEFPRDRLVLGKPLGEGCFGQVVRAEAFGMDPARPDQASTVAVKMLKDNASDKDLADLVSEMEVMKLIGRHKNIINLLGVCTQEGPLYVIVECAAKGNLREFLRARRPPGPDLSPDGPRSSEGPLSFPVLVSCAYQVARGMQYLESRKCIHRDLAARNVLVTEDNVMKIADFGLARGVHHIDYYKKTSN

SEQ ID NO: 17488 - protein, 1072 aa, Homo sapiens
MSLKPEYHKENRRCSRNSGQIEVVPEVSVSSSHSSVSSCLEMKDEDGLDSKHKCNNPGEIDVPSHELNCSLLSETCVTIGEKKNEALMECKAKPVGSPLFKFSDKEEHEQNDSISGKTGETVVEEMIATRKVEQDSKETVKLSHEDDHILEDAGSSDISSDAACTNPNKTENSLVGLPSCVDEVTECNLELKDTMGIADKTENTLERNKIEPLGYCEDAESNRQLESTEFNKSNLEVVDTSTFGPESNILENAICDVPDQNSKQLNAIESTKIESHETANLQDDRNSQSSSVSYLESKSVKSKHTKPVIHSKQNMTTDAPKKIVAAKYEVIHSKTKVNVKSVKRNTDVPESQQNFHRPVKVRKKQIDKEPKIQSCNSGVKSVKNQAHSVLKKTLQDQTLVQIFKPLTHSLSDKSHAHPGCLKEPHHPAQTGHVSHSSQKQCHKPQQQAPAMKTNSHVKEELEHPGVEHFKEEDKLKLKKPEKNLQPRQRRSSKSFSLDEPPLFIPDNIATIRREGSDHSSSFESKYMWTPSKQCGFCKKPHGNRFMVGCGRCDDWFHGDCVGLSLSQAQQMGEEDKEYVCVKCCAEEDKKTEILDPDTLENQATVEFHSGDKTMECEKLGLSKHTTNDRTKYIDDTVKHKVKILKRESGEGRNSSDCRDNEIKKWQLAPLRKMGQPVLPRRSSEEKSEKIPKESTTVTCTGEKASKPGTHEKQEMKKKKVEKGVLNVHPAASASKPSADQIRQSVRHSLKDILMKRLTDSNLKVPEEKAAKVATKIEKELFSFFRDTDAKYKNKYRSLMFNLKDPKNNILFKKVLKGEVTPDHLIRMSPEELASKELAAWRRRENRHTIEMIEKEQREVERRPITKITHKGEIEIESDAPMKEQEAAMEIQEPAANKSLEKPEGSEKQKEEVDSMSKDTTSQHRQHLFDLNCKICIGRMAPPVDDLSPKKVKVVVGVARKHSDNEAESIADALSSTSNILASEFFEEEKQESPKSTFSPAPRPEMPGTVEVESTFLARLNFIWKGFINMPSVAKFVTKAYPVSGSPEYLTEDLPDSIQVGGRISPQTVWDYV

SEQ ID NO: 17489 - protein, 1079 aa, Homo sapiens
MGQQVGRVGEAPGLQQPQPRGIRGSSAARPSGRRRDPAGRTTETGFNIFTQHDHFASCVEDGFEGDKTGGSSPEALHRPYGCDVEPQALNEAIRWSSKENLLGATESDPNLFVALYDFVASGDNTLSITKGEKLRVLGYNQNGEWSEVRSKNGQGWVPSNYITPVNSLEKHSWYHGPVSRSAAEYLLSSLINGSFLVRESESSPGQLSISLRYEGRVYHYRINTTADGKVYVTAESRFSTLAELVHHHSTVADGLVTTLHYPAPKCNKPTVYGVSPIHDKWEMERTDITMKHKLGGGQYGEVYVGVWKKYSLTVAVKTLKEDTMEVEEFLKEAAVMKEIKHPNLVQLLGVCTLEPPFYIVTEYMPYGNLLDYLRECNREEVTAVVLLYMATQISSAMEYLEKKNFIHRDLAARNCLVGENHVVKVADFGLSRLMTGDTYTAHAGAKFPIKWTAPESLAYNTFSIKSDVWAFGVLLWEIATYGMSPYPGIDLSQVYDLLEKGYRMEQPEGCPPKVYELMRACWKWSPADRPSFAETHQAFETMFHDSSISEEVAEELGRAASSSSVVPYLPRLPILPSKTRTLKKQVENKENIEGAQDATENSASSLAPGFIRGAQASSGSPALPRKQRDKSPSSLLEDAKETCFTRDRKGGFFSSFMKKRNAPTPPKRSSSFREMENQPHKKYELTGLPEQDRMAMTLPRNCQRSKLQLERTVSTSSQPEENVDRANDMLPKKSEESAAPSRERPKAKLLPRGATALPLRTPSGDLAITEKDPPGVGVAGVAAAPKGKEKNGGARLGMAGVPEDGEQPGWPSPAKAAPVLPTTHNHKVPVLISPTLKHTPADVQLIGTDSQGNKFKLLSEHQVTSSGDKDRPRRVKPKCAPPPPPVMRLLQHPSICSDPTEEPTALTAGQSTSETQEGGKKAALGAVPISGKAGRPVMPPPQVPLPTSSISPAKMANGTAGTKVALRKTKQAAEKISADKISKEALLECADLLSSALTEPVPNSQLVDTGHQLLDYCSGYVDCIPQTRNKFAFREAVSKLELSLQELQVSSAAAGVPGTNPVLNNLLSCVQEISDVVQR

SEQ ID NO: 17490 - protein, 232 aa, Homo sapiens
MPGWFKKAWYGLASLLSFSSFILIIVALVVPHWLSGKILCQTGVDLVNATDRELVKFIGDIYYGLFRGCKVRQCGLGGRQSQFTIFPHLVKELNAGLHVMILLLLFLALALALVSMGFAILNMIQVPYRAVSGPGGICLWNVLAGGVVALAIASFVAAVKFHDLTERIANFQEKLFQFVVVEEQYEESFWICVASASAHAANLVVVAISQIPLPEIKTKIEEATVTAEDILY

SEQ ID NO: 17491 - protein, 1730 aa, Homo sapiens
MMNEDAAQKSDSGEKFNGSSQRRKRPKKVTCPQMKPEAANIEKSDSNASFLRAARAGNLDKVVEYLKGGIDINTCNQNGLNALHLAAKEGHVGLVQELLGRGSSVDSATKKGNTALHIASLAGQAEVVKVLVKEGANINAQSQNGFTPLYMAAQENHIDVVKYLLENGANQSTATEDGFTPLAVALQQGHNQAVAILLENDTKGKVRLPALHIAARKDDTKSAALLLQNDHNADVQSKMMVNRTTESGFTPLHIAAHYGNVNVATLLLNRGAAVDFTARNGITPLHVASKRGNTNMVKLLLDRGGQIDAKTRDGLTPLHCAARSGHDQVVELLLERGAPLLARTKNGLSPLHMAAQGDHVECVKHLLQHKAPVDDVTLDYLTALHVAAHCGHYRVTKLLLDKRANPNARALNGFTPLHIACKKNRIKVMELLVKYGASIQAITESGLTPIHVAAFMGHLNIVLLLLQNGASPDVTNIRGETALHMAARAGQVEVVRCLLRNGALVDARAREEQTPLHIASRLGKTEIVQLLLQHMAHPDAATTNGYTPLHISAREGQVDVASVLLEAGAAHSLATKKGFTPLHVAAKYGSLDVAKLLLQRRAAADSAGKNGLTPLHVAAHYDNQKVALLLLEKGASPHATAKNGYTPLHIAAKKNQMQIASTLLNYGAETNIVTKQGVTPLHLASQEGHTDMVTLLLDKGANIHMSTKSGLTSLHLAAQEDKVNVADILTKHGADQDAHTKLGYTPLIVACHYGNVKMVNFLLKQGANVNAKTKNGYTPLHQAAQQGHTHIINVLLQHGAKPNATTANGNTALAIAKRLGYISVVDTLKVVTEEVTTTTTTITEKHKLNVPETMTEVLDVSDEEGDDTMTGDGGEYLRPEDLKELGDDSLPSSQFLDGMNYLRYSLEGGRSDSLRSFSSDRSHTLSHASYLRDSAVMDDSVVIPSHQVSTLAKEAERNSYRLSWGTENLDNVALSSSPIHSGFLVSFMVDARGGAMRGCRHNGLRIIIPPRKCTAPTRVTCRLVKRHRLATMPPMVEGEGLASRLIEVGPSGAQFLGKLHLPTAPPPLNEGESLVSRILQLGPPGTKFLGPVIVEIPHFAALRGKERELVVLRSENGDSWKEHFCDYTEDELNEILNGMDEVLDSPEDLEKKRICRIITRDFPQYFAVVSRIKQDSNLIGPEGGVLSSTVVPQVQAVFPEGALTKRIRVGLQAQPMHSELVKKILGNKATFSPIVTLEPRRRKFHKPITMTIPVPKASSDVMLNGFGGDAPTLRLLCSITGGTTPAQWEDITGTTPLTFVNECVSFTTNVSARFWLIDCRQIQESVTFASQVYREIICVPYMAKFVVFAKSHDPIEARLRCFCMTDDKVDKTLEQQENFAEVARSRDVEVLEGKPIYVDCFGNLVPLTKSGQHHIFSFFAFKENRLPLFVKVRDTTQEPCGRLSFMKEPKSTRGLVHQAICNLNITLPIYTKESESDQEQEEEIDMTSEKNDETESTETSVLKSHLVNEVPVLASPDLLSEVSEMKQDLIKMTAILTTDVSDKAGSIKVKELVKAAEEEPGEPFEIVERVKEDLEKVNEILRSGTCTRDESSVQSSRSERGLVEEEWVIVSDEEIEEARQKAPLEITEYPCVEVRIDKEIKGKVEKDSTGLVNYLTDDLNTCVPLPKEQLQTVQDKAGKKCEALAVGRSSEKEGKDIPPDETQSTQKQHKPSLGIKKPVRRKLKEKQKQK

SEQ ID NO: 17492 - protein, 624 aa, Homo sapiens
MAEASRWHRGGASKHKLHYRKEVEITTTLQELLLYFIFLINLCILTFGMVNPHMYYLNKVMSSLFLDTSVPGEERTNFKSIRSITDFWKFMEGPLLEGLYWDSWYNNQQLYNLKNSSRIYYENILLGVPRVRQLKVRNNTCKVYSSFQSLMSECYGKYTSANEDLSNFGLQINTEWRYSTSNTNSPWHWGFLGVYRNGGYIFTLSKSKSETKNKFIDLRLNSWITRGTRVIFIDFSLYNANVNLFCIIRLVAEFPATGGILTSWQFYSVKLLRYVSYYDYFIASCEITFCIFLFVFTTQEVKKIKEFKSAYFKSIWNWLELLLLLLCFVAVSFNTYYNVQIFLLLGQLLKSTEKYSDFYFLACWHIYYNNIIAITIFFAWIKIFKFISFNKTMSQLSSTLSRCVKDIVGFAIMFFIIFFAYAQLGFLVFGSQVDDFSTFQNSIFAQFRIVLGDFNFAGIQQANPILGPIYFITFIFFVFFVLLNMFLAIINDTYSEVKADYSIGRRLDFELGKMIKQSYKNVLEKFRLKKAQKDEDKKTKGSGDLAEQARREGFDENEIQNAEQMKKWKERLEKKYYSMEIQDDYQPVTQEEFRELFLYAVELEKELHYINLKLNQVVRKVSAL

SEQ ID NO: 17493 - protein, 113 aa, Homo sapiens
MSQPRTPEQALDTPGDCPPGRRDEDAGEGIQCSQRMLSFSDALLSIIATVMILPVTHTEISPEQFDRSVQRLLATRIAVYLMTFLIVTVAWAAHTRLFQVVGKTDDTLALLNL

SEQ ID NO: 17494 - protein, 341 aa, Homo sapiens
MGRRRRLCLQLYFLWLGCVVLWAQGTAGQPQPPPPKPPRPQPPPQQVRSATAGSEGGFLAPEYREEGAAVASRVRRRGQQDVLRGPNVCGSRFHSYCCPGWKTLPGGNQCIVPICRNSCGDGFCSRPNMCTCSSGQISSTCGSKSIQQCSVRCMNGGTCADDHCQCQKGYIGTYCGQPVCENGCQNGGRCIGPNRCACVYGFTGPQCERDYRTGPCFTQVNNQMCQGQLTGIVCTKTLCCATIGRAWGHPCEMCPAQPQPCRRGFIPNIRTGACQDVDECQAIPGICQGGNCINTVGSFECRCPAGHKQSETTQKCEVHVDKAQAGARCPCVILPSRLYLR

SEQ ID NO: 17495 - protein, 1286 aa, Homo sapiens
MEKYVRLQKIGEGSFGKAILVKSTEDGRQYVIKEINISRMSSKEREESRREVAVLANMKHPNIVQYRESFEENGSLYIVMDYCEGGDLFKRINAQKGVLFQEDQILDWFVQICLALKHVHDRKILHRDIKSQNIFLTKDGTVQLGDFGIARVLNSTVELARTCIGTPYYLSPEICENKPYNNKSDIWALGCVLYELCTLKHAFEAGSMKNLVLKIISGSFPPVSLHYSYDLRSLVSQLFKRNPRDRPSVNSILEKGFIAKRIEKFLSPQLIAEEFCLKTFSKFGSQPIPAKRPASGQNSISVMPAQKITKPAAKYGIPLAYKKYGDKKLHEKKPLQKHKQAHQTPEKRVNTGEERRKISEEAARKRRLEFIEKEKKQKDQIISLMKAEQMKRQEKERLERINRAREQGWRNVLSAGGSGEVKAPFLGSGGTIAPSSFSSRGQYEHYHAIFDQMQQQRAEDNEAKWKREIYGRGLPERGILPGVRPGFPYGAAGHHHFPDADDIRKTLKRLKAVSKQANANRQKGQLAVERAKQVEEFLQRKREAMQNKARAEGHMGILQNLAAMYGGRPSSSRGGKPRNKEEEVYLARLRQIRLQNFNERQQIKAKLRGEKKEANHSEGQEGSEEADMRRKKIESLKAHANARAAVLKEQLERKRKEAYEREKKVWEEHLVAKGVKSSDVSPPLGQHETGGSPSKQQMRSVISVTSALKEVGVDSSLTDTRETSEEMQKTNNAISSKREILRRLNENLKAQEDEKGKQNLSDTFEINVHEDAKEHEKEKSVSSDRKKWEAGGQLVIPLDELTLDTSFSTTERHTVGEVIKLGPNGSPRRAWGKSPTDSVLKILGEAELQLQTELLENTTIRSEISPEGEKYKPLITGEKKVQCISHEINPSAIVDSPVETKSPEFSEASPQMSLKLEGNLEEPDDLETEILQEPSGTNKDESLPCTITDVWISEEKETKETQSADRITIQENEVSEDGVSSTVDQLSDIHIEPGTNDSQHSKCDVDKSVQPEPFFHKVVHSEHLNLVPQVQSVQCSPEESFAFRSHSHLPPKNKNKNSLLIGLSTGLFDANNPKMLRTCSLPDLSKLFRTLMDVPTVGDVRQDNLEIDEIEDENIKEGPSDSEDIVFEETDTDLQELQASMEQLLREQPGEEYSEEEESVLKNSDVEPTANGTDVADEDDNPSSESALNEEWHSDNSDGEIASECECDSVFNHLEELRLHLEQEMGFEKFFEVYEKIKAIHEDEDENIEICSKIVQNILGNEHQHLYAKILHLVMADGAYQEDNDE

SEQ ID NO: 17496 - protein, 837 aa, Homo sapiens
MTGRKASGGTPCTLRKGAPIITLGKNWTERLAAGDSVGCSGARCHRPLSRQLCASQRSMRTLEDSSGTVLHRLIQEQLRYGNLTETRTLLAIQQQALRGGAGTGGTGSPQASLEILAPEDSQVLQQATRQEPQGQEHQGGENHLAENTLYRLCPQPSKGEELPTYEEAKAHSQYYAAQQAGTRPHAGDRDPRGAPGGSRRQDEALRELRHGHVRSLSERLLQLSLERNGARAPSHMSSSHSFPQLARNQQGPPLRGPPAEGPESRGPPPQYPHVVLAHETTTAVTDPRYRARGSPHFQHAEVRILQAQVPPVFLQQQQQYQYLQQSQEHPPPPHPAALGHGPLSSLSPPAVEGPVSAQASSATSGSAHLAQMEAVLRENARLQRDNERLQRELESSAEKAGRIEKLESEIQRLSEAHESLTRASSKREALEKTMRNKMDSEMRRLQDFNRDLRERLESANRRLASKTQEAQAGSQDMVAKLLAQSYEQQQEQEKLEREMALLRGAIEDQRRRAELLEQALGNAQGRAARAEEELRKKQAYVEKVERLQQALGQLQAACEKREQLELRLRTRLEQELKALRAQQRQAGAPGGSSGSGGSPELSALRLSEQLREKEEQILALEADMTKWEQKYLEERAMRQFAMDAAATAAAQRDTTLIRHSPQPSPSSSFNEGLLTGGHRHQEMESRLKVLHAQILEKDAVIKVLQQRSRRDPGKAIQGSLRPAKSVPSVFAAAAAGTQGWQGLSSSERQTADAPARLTTDRAPTEEPVVTAPPAAHAKHGSRDGSTQTEGPPDSTSTCLPPEPDSLLGCSSSQRAASLDSVATSRVQDLSDMVEILI

SEQ ID NO: 17497 - protein, 510 aa, Homo sapiens
MLLWVQQALLALLLPTLLAQGEARRSRNTTRPALLRLSDYLLTNYRKGVRPVRDWRKPTTVSIDVIVYAILNVDEKNQVLTTYIWYRQYWTDEFLQWNPEDFDNITKLSIPTDSIWVPDILINEFVDVGKSPNIPYVYIRHQGEVQNYKPLQVVTACSLDIYNFPFDVQNCSLTFTSWLHTIQDINISLWRLPEKVKSDRSVFMNQGEWELLGVLPYFREFSMESSNYYAEMKFYVVIRRRPLFYVVSLLLPSIFLMVMDIVGFYLPPNSGERVSFKITLLLGYSVFLIIVSDTLPATAIGTPLIGKAPPGSRAQSGEKPAPSHLLHVSLASALGCTGVYFVVCMALLVISLAETIFIVRLVHKQDLQQPVPAWLRHLVLERIAWLLCLREQSTSQRPPATSQATKTDDCSAMGNHCSHMGGPQDFEKSPRDRCSPPPPPREASLAVCGLLQELSSIRQFLEKRDEIREVARDWLRVGSVLDKLLFHIYLLAVLAYSITLVMLWSIWQYA

SEQ ID NO: 17498 - protein, 438 aa, Homo sapiens
MAAAVRQDLAQLMNSSGSHKDLAGKYRQILEKAIQLSGAEQLEALKAFVEAMVNENVSLVISRQLLTDFCTHLPNLPDSTAKEIYHFTLEKIQPRVISFEEQVASIRQHLASIYEKEEDWRNAAQVLVGIPLETGQKQYNVDYKLETYLKIARLYLEDDDPVQAEAYINRASLLQNESTNEQLQIHYKVCYARVLDYRRKFIEAAQRYNELSYKTIVHESERLEALKHALHCTILASAGQQRSRMLATLFKDERCQQLAAYGILEKMYLDRIIRGNQLQEFAAMLMPHQKATTADETGSLHFAQAGLELLGSSSSSHLGFPKCWDDRGSSILDRAVIEHNLLSASKLYNNITFEELGALLEIPAAKAEKIASQMITEGRMNGFIDQIDGIVHFETREALPTWDKQIQSLCFQVNNLLEKISQTAPEWTAQAMEAQMAQ

SEQ ID NO: 17499 - protein, 894 aa, Homo sapiens
MPYTTYLVEKGASHSFVAEAKPPTVTMPRIKALMTGSLPGFVDVIRNLNSPALLEDSVIRQAKAAGKRIVFYGDETWVKLFPKHFVEYDGTTSFFVSDYTEVDNNVTRHLDKVLKRGDWDILILHYLGLDHIGHISGPNSPLIGQKLSEMDSVLMKIHTSLQSKERETPLPNLLVLCGDHGMSETGSHGASSTEEVNTPLILISSAFERKPGDIRHPKHVQQTDVAATLAIALGLPIPKDSVGSLLFPVVEGRPMREQLRFLHLNTVQLSKLLQENVPSYEKDPGFEQFKMSERLHGNWIRLYLEEKHSEVLFNLGSKVLRQYLDALKTLSLSLSAQVAQYDIYSMMVGTVVVLEVLTLLLLSVPQALRRKAELEVPLSSPGFSLLFYLVILVLSAVHVIVCTSAESSCYFCGLSWLAAGGVMVLASALLCVIVSVLTNVLVGGNTPRKNPMHPSSRWSELDLLILLGTAGHVLSLGASSFVEEEHQTWYFLVNTLCLALSQETYRNYFLGDDGEPPCGLCVEQGHDGATAAWQDGPGCDVLERDKGHGSPSTSEVLRGREKWMVLASPWLILACCRLLRSLNQTGVQWAHRPDLGHWLTSSDHKAELSVLAALSLLVVFVLVQRGCSPVSKAALALGLLGVYCYRAAIGSVRFPWRPDSKDISKGIIEARFVYVFVLGILFTGTKDLLKSQVIAADFKLKTVGLWEIYSGLVLLAALLFRPHNLPVLAFSLLIQTLMTKFIWKPLRHDAAEITVMHYWFGQAFFYFQGNSNNIATVDISAGFVGLDTYVEIPAVLLTAFGTYAGPVLWASHLVHFLSSETRSGSALSHACFCYALICSIPVFTYIVLVTSLRYHLFIWSVFSPKLLYEGMHLLITAAVCVFFTAMDQTRLTQS

SEQ ID NO: 17500 - protein, 190 aa, Homo sapiens
MAGTARHDREMAIQAKKKLTTATDPIERLRLQCLARGSAGIKGLGRVFRIMDDDNNRTLDFKEFMKGLNDYAVVMEKEEVEELFRRFDKDGNGTIDFNEFLLTLRPPMSRARKEVIMQAFRKLDKTGDGVITIEDLREVYNAKHHPKYQNGEWSEEQVFRKFLDNFDSPYDKDGLVTPEEFMNYYAGVSA

SEQ ID NO: 17501 - protein, 812 aa, Homo sapiens
MGMCSRQERIQKDIDVVIQKSRAEKDCLFADFRYSDSTFTFTYVGGPRSVSYSVHVSEDYPDNTYVSSSENDEDVLVTTEPIPVIFHRIATELRKTNDINCCLSIKSKLQKENGEESRQNSTVEEDSEGDNDSEEFYYGGQVNYDGELHKHPQLEADLSAVREIYGPHAVSLREYGAIDDVDIDLHIDVSFLDEEIAVAWEVIRTEPIIVRLHCSLTQYLNGPVPTVDVFQISTKERFGLGHQLKKIMQTFVTQQWKQSKEKSNCLHNKKLSEKKVKSPLHLFSTLRRSPSYPPPGCGKSKSKLKSEQDGISKTHKLLRRTCSSTVKTDDVCVTKSHRTFGRSLSSDPRAEQAMTAIKSHKLLNRPCPAAVKSEECLTLKSHRLLTRSCSGDPRCEHNTNLKPHKLLSRSYSSNLRMEELYGLKNHKLLSKSYSSAPKSSKTELFKEPNAEGRRLSLTSGLIGILTPSSSSSSQLAPNGAKCIPVRDRGFLVQTIEFAEQRIPVLNEYCVVCDEPHVFQNGPMLRPTVCERELCVFAFQTLGVMNEAADEIATGAQKKNYDRVMKALDSITSIREMTQAPYLEIKKQMDKQDPLAHPLLQWVISSNRSHIVKLPVNRQLKFMHTPHQFLLLSSPPAKESNFRAAKKLFGSTFAFHGSHIENWHSILRNGLVVASNTRLQLHGAMYGSGIYLSPMSSISFGYSGMNKKQKVSAKDEPASSSKSSNTSQSQKKGQQSQFLQSRNLKCIALCEVITSSDLHKHGEIWVVPNTDHVCTRFFFVYEDGQVGDANINTQEGGIHKEILRVIGNQTATG

SEQ ID NO: 17502 - protein, 1056 aa, Homo sapiens
MACPALGLEALQPLQPEPPPEPAFSEAQKWIEQVTGRSFGDKDFRTGLENGILLCELLNAIKPGLVKKINRLPTPIAGLDNIILFLRGCKELGLKESQLFDPSDLQDTSNRVTVKSLDYSRKLKNVLVTIYWLGKAANSCTSYSGTTLNLKEFEGLLAQMRKDTDDIESPKRSIRDSGYIDCWDSERSDSLSPPRHGRDDSFDSLDSFGSRSRQTPSPDVVLRGSSDGRGSDSESDLPHRKLPDVKKDDMSARRTSHGEPKSAVPFNQYLPNKSNQTAYVPAPLRKKKAEREEYRKSWSTATSPLGGERPFRYGPRTPVSDDAESTSMFDMRCEEEAAVQPHSRARQEQLQLINNQLREEDDKWQDDLARWKSRRRSVSQDLIKKEEERKKMEKLLAGEDGTSERRKSIKTYREIVQEKERRERELHEAYKNARSQEEAEGILQQYIERFTISEAVLERLEMPKILERSHSTEPNLSSFLNDPNPMKYLRQQSLPPPKFTATVETTIARASVLDTSMSAGSGSPSKTVTPKAVPMLTPKPYSQPKNSQDVLKTFKVDGKVSVNGETVHREEEKERECPTVAPAHSLTKSQMFEGVARVHGSPLELKQDNGSIEINIKKPNSVPQELAATTEKTEPNSQEDKNDGGKSRKGNIELASSEPQHFTTTVTRCSPTVAFVEFPSSPQLKNDVSEEKDQKKPENEMSGKVELVLSQKVVKPKSPEPEATLTFPFLDKMPEANQLHLPNLNSQVDSPSSEKSPVMTPFKFWAWDPEEERRRQEKWQQEQERLLQERYQKEQDKLKEEWEKAQKEVEEEERRYYEEERKIIEDTVVPFTVSSSSADQLSTSSSMTEGSGTMNKIDLGNCQDEKQDRRWKKSFQGDDSDLLLKTRESDRLEEKGSLTEGALAHSGNPVSKGVHEDHQLDTEAGAPHCGTNPQLAQDPSQNQQTSNPTHSSEDVKPKTLPLDKSINHQIESPSERRKSISGKKLCSSCGLPLGKGAAMIIETLNLYFHIQCFRCGICKGQLGDAVSGTDVRIRNGLLNCNDCYMRSRSAGQPTTL

SEQ ID NO: 17503 - protein, 1319 aa, Homo sapiens
MAQSLRLHFAARRSNTYPLSETSGDDLDSHVHMCFKRPTRISTSNVVQMKLTPRQTALAPLIKENVQSQERSSVPSSENVNKKSSCLQISLQPTRYSGYLQSSNVLADSDDASFTCILKDGIYSSAVVDNELNAVNDGHLVSSPAICSGSLSNFSTSDNGSYSSNGSDFGSCASITSGGSYTNSVISDSSSYTFPPSDDTFLGGNLPSDSTSNRSVPNRNTTPCEIFSRSTSTDPFVQDDLEHGLEIMKLPVSRNTKIPLKRYSSLVIFPRSPSTTRPTSPTSLCTLLSKGSYQTSHQFIISPSEIAHNEDGTSAKGFLSTAVNGLRLSKTICTPGEVRDIRPLHRKGSLQKKIVLSNNTPRQTVCEKSSEGYSCVSVHFTQRKAATLDCETTNGDCKPEMSEIKLNSDSEYIKLMHRTSACLPSSQNVDCQININGELERPHSQMNKNHGILRRSISLGGAYPNISCLSSLKHNCSKGGPSQLLIKFASGNEGKVDNLSRDSNRDCTNELSNSCKTRDDFLGQVDVPLYPLPTENPRLERPYTFKDFVLHPRSHKSRVKGYLRLKMTYLPKTSGSEDDNAEQAEELEPGWVVLDQPDAACHLQQQQEPSPLPPGWEERQDILGRTYYVNHESRRTQWKRPTPQDNLTDAENGNIQLQAQRAFTTRRQISEETESVDNRESSENWEIIREDEATMYSNQAFPSPPPSSNLDVPTHLAEELNARLTIFGNSAVSQPASSSNHSSRRGSLQAYTFEEQPTLPVLLPTSSGLPPGWEEKQDERGRSYYVDHNSRTTTWTKPTVQATVETSQLTSSQSSAGPQSQASTSDSGQQVTQPSEIEQGFLPKGWEVRHAPNGRPFFIDHNTKTTTWEDPRLKIPAHLRGKTSLDTSNDLGPLPPGWEERTHTDGRIFYINHNIKRTQWEDPRLENVAITGPAVPYSRDYKRKYEFFRRKLKKQNDIPNKFEMKLRRATVLEDSYRRIMGVKRADFLKARLWIEFDGEKGLDYGGVAREWFFLISKEMFNPYYGLFEYSATDNYTLQINPNSGLCNEDHLSYFKFIGRVAGMAVYHGKLLDGFFIRPFYKMMLHKPITLHDMESVDSEYYNSLRWILENDPTELDLRFIIDEELFGQTHQHELKNGGSEIVVTNKNKKEYIYLVIQWRFVNRIQKQMAAFKEGFFELIPQDLIKIFDENELELLMCGLGDVDVNDWREHTKYKNGYSANHQVIQWFWKAVLMMDSEKRIRLLQFVTGTSRVPMNGFAELYGSNGPQSFTVEQWGTPEKLPRAHTCFNRLDLPPYESFEELWDKLQMAIENTQGFDGVD

SEQ ID NO: 17504 - protein, 109 aa, Homo sapiens
MEEPEMQLKGKKVTDKFTESVYVLANEPSVALYRLQEHVRRSLPELAQHKADMQRWEEQSQGAIYTVEYACSAVKNLVDSSVYFRSVEGLLKQAISIRDHMNASAQGHR

SEQ ID NO: 17505 - protein, 724 aa, Homo sapiens
MGDEDWEAEINPHMSSYVPIFEKDRYSGENGDNFNRTPASSSEMDDGPSRRDHFMKSGFASGRNFGNRDAGECNKRDNTSTMGGFGVGKSFGNRGFSNSRFEDGDSSGFWRESSNDCEDNPTRNRGFSKRGGYRDGNNSEASGPYRRGGRGSFRGCRGGFGLGSPNNDLDPDECMQRTGGLFGSRRPVLSGTGNGDTSQSRSGSGSERGGYKGLNEEVITGSGKNSWKSEAEGGESSDTQGPKVTYIPPPPPEDEDSIFAHYQTGINFDKYDTILVEVSGHDAPPAILTFEEANLCQTLNNNIAKAGYTKLTPVQKYSIPIILAGRDLMACAQTGSGKTAAFLLPILAHMMHDGITASRFKELQEPECIIVAPTRELVNQIYLEARKFSFGTCVRAVVIYGGTQLGHSIRQIVQGCNILCATPGRLMDIIGKEKIGLKQIKYLVLDEADRMLDMGFGPEMKKLISCPGMPSKEQRQTLMFSATFPEEIQRLAAEFLKSNYLFVAVGQVGGACRDVQQTVLQVGQFSKREKLVEILRNIGDERTMVFVETKKKADFIATFLCQEKISTTSIHGDREQREREQALGDFRFGKCPVLVATSVAARGLDIENVQHVINFDLPSTIDEYVHRIGRTGRCGNTGRAISFFDLESDNHLAQPLVKVLTDAQQDVPAWLEEIAFSTYIPGFSGSTRGNVFASVDTRKGKSTLNTAGFSSSQAPNPVDDESWD

SEQ ID NO: 17506 - protein, 608 aa, Homo sapiens
MWNQFFLLEEYTGSDYQYVGKLHSDQDRGDGSLKYILSGDGAGDLFIINENTGDIQATKRLDREEKPVYILRAQAINRRTGRPVEPESEFIIKIHDINDNEPIFTKEVYTATVPEMSDVGTFVVQVTATDADDPTYGNSAKVVYSILQGQPYFSVESETGIIKTALLNMDRENREQYQVVIQAKDMGGQMGGLSGTTTVNITLTDVNDNPPRFPQSTYQFKTPESSPPGTPIGRIKASDADVGENAEIEYSITDGEGLDMFDVITDQETQEGIITVKKLLDFEKKKVYTLKVEASNPYVEPRFLYLGPFKDSATVRIVVEDVDEPPVFSKLAYILQIREDAQINTTIGSVTAQDPDAARNPVKYSVDRHTDMDRIFNIDSGNGSIFTSKLLDRETLLWHNITVIATEINNPKQSSRVPLYIKVLDVNDNAPEFAEFYETFVCEKAKADQLIQTLHAVDKDDPYSGHQFSFSLAPEAASGSNFTIQDNKDNTAGILTRKNGYNRHEMSTYLLPVVISDNDYPVQSSTGTVTVRVCACDHHGNMQSCHAEALIHPTGLSTGALVAILLCIVILLGKLVLPASYLPMVRGSHCYCDTLDLSASPIKAYSLI

SEQ ID NO: 17507 - protein, 618 aa, Homo sapiens
MAGSGPRPRSWGRREAGARDEAAAAGGRGPGPCRCSQGRRAWIAPGKPAMPAAWTPFMAAEEMHWPVPMKAIGAQNLLTMPGGVAKAGYLHKKGGTQLQLLKWPLRFVIIHKRCVYYFKSSTSASPQGAFSLSGYNRVMRAAEETTSNNVFPFKIIHISKKHRTWFFSASSEEERKSWMALLRREIGHFHEKKDLPLDTSDSSSDTDSFYGAVERPVDISLSPYPTDNEDYEHDDEDDSYLEPDSPEPGRLEDALMHPPAYPPPPVPTPRKPAFSDMPRAHSFTSKGPGPLLPPPPPKHGLPDVGLAAEDSKRDPLCPRRAEPCPRVPATPRRMSDPPLSTMPTAPGLRKPPCFRESASPSPEPWTPGHGACSTSSAAIMATATSRNCDKLKSFHLSPRGPPTSEPPPVPANKPKFLKIAEEDPPREAAMPGLFVPPVAPRPPALKLPVPEAMARPAVLPRPEKPQLPHLQRSPPDGQSFRSFSFEKPRQPSQADTGGDDSDEDYEKVPLPNSVFVNTTESCEVERLFKATSPRGEPQDGLYCIRNSSTKSGKVLVVWDETSNKVRNYRIFEKDSKFYLEGEVLFVSVGSMVEHYHTHVLPSHQSLLLRHPYGYTGPR

SEQ ID NO: 17508 - protein, 194 aa, Homo sapiens
VPCAPAPRCWRSWPRSWPRPRWPRPRPRTWCMWTRPARCGPCGASGGAQASAPRCHTARLTSTSSAGTSSSTSPMWAPSLTAASSRGSTGRGLSYNFTHLDGYLDLLRENQLLPGFELMGSASGHFTDFEDKQQVFEWKDLVSSLARRYIGRYGLAHVSKWNFETWNEPDHHDFDNVSMTMQGFLNYYDACSEG

SEQ ID NO: 17509 - protein, 745 aa, Homo sapiens
MAQQTSPDTLTVPEVDNPHCPNPWLNEDLVKSLRENLLQHEKSKTARKSVSPKLSPVISPRNSPRLLRRMLLSSNIPKQRRFTVAHTCFDVDNGTSAGRSPLDPMTSPGSGLILQANFVHSQRRESFLYRSDSDYDLSPKSMSRNSSIASDIHGDDLIVTPFAQVLASLRTVRNNFAALTNLQDRAPSKRSPMCNQPSINKATITEEAYQKLASETLEELDWCLDQLETLQTRHSVSEMASNKFKRMLNRELTHLSEMSRSGNQVSEFISNTFLDKQHEVEIPSPTQKEKEKKKRPMSQISGVKKLMHSSSLTNSSIPRFGVKTEQEDVLAKELEDVNKWGLHVFRIAELSGNRPLTVIMHTIFQERDLLKTFKIPVDTLITYLMTLEDHYHADVAYHNNIHAADVVQSTHVLLSTPALEAVFTDLEILAAIFASAIHDVDHPGVSNQFLINTNSELALMYNDSSVLENHHLAVGFKLLQEENCDIFQNLTKKQRQSLRKMVIDIVLATDMSKHMNLLADLKTMVETKKVTSSGVLLLDNYSDRIQVLQNMVHCADLSNPTKPLQLYRQWTDRIMEEFFRQGDRERERGMEISPMCDKHNASVEKSQVGFIDYIVHPLWETWADLVHPDAQDILDTLEDNREWYQSTIPQSPSPAPDDPEEGRQGQTEKFQFELTLEEDGESDTEKDSGSQVEEDTSCSDSKTLCTQDSESTEIPLDEQVEEEAVGEEEESQPEACVIDDRSPDT

SEQ ID NO: 17510 - protein, 807 aa, Homo sapiens
MLRNSTFKNMQRRHTTLREKGRRQAIRGPAYMFNEKGTSLTPEEERFLDSAEYGNIPVVRKMLEESKTLNFNCVDYMGQNALQLAVGNEHLEVTELLLKKENLARVGDALLLAISKGYVRIVEAILNHPAFAQGQRLTLSPLEQELRDDDFYAYDEDGTRFSHDITPIILAAHCQEYEIVHILLLKGARIERPHDYFCKCNECTEKQRKDSFSHSRSRMNAYKGLASAAYLSLSSEDPVLTALELSNELARLANIETEFKNDYRKLSMQCKDFVVGVLDLCRDTEEVEAILNGDVNFQVWSDHHRPSLSRIKLAIKYEVKKLGRTLRSPFMKFVAHAVSFTIFLGLLVVNASDRFEGVKTLPNETFTDYPKQIFRVKTTQFSWTEMLIMKWVLGMIWSECKEIWEEGPREYVLHLWNLLDFGMLSIFVASFTARFMAFLKATEAQLYVDQHVQDDTLHNVSLPPEVAYFTYARDKWWPSDPQIISEGLYAIAVVLSFSRIAYILPANESFGPLQISLGRTVKDIFKFMVIFIMVFVAFMIGMFNLYSYYRGAKYNPAFTTVEESFKTLFWSIFGLSEVISVVLKYDHKFIENIGYVLYGVYNVTMVVVLLNMLIAMINNSYQEIEEDADVEWKFARAKLWLSYFDEGRTLPAPFNLVPSPKSFYYLIMRIKMCLIKLCKSKAKSCENDLEMGMLNSKFKKTRYQAGMRNSENLTANNTLSKPTRYQKIMKRLIKRYVLKAQVDRENDEVNEGELKEIKQDISSLRYELLEEKSQATGELADLIQQLSEKFGKNLNKDHLRVNKGKDI

SEQ ID NO: 17511 - protein, 154 aa, Homo sapiens
YRDDKIWSSYTEYIFFRSLTMSLCSILRLNIWLFMIACQIKHESRCRTRARCLAAGPPQKIVSPKQEHEDRKHDKVTDKGSESGTSCNELSTSSCDSHSEASTPQDNPSSAQQATAHQPNTLTLDRPSKKAPVQWIPPPDKRRNSELFQTLISK

SEQ ID NO: 17512 - protein, 126 aa, Homo sapiens
AEEQPVEPDGPLPGSDNNQEKKVRLSPAKMSTKNSTDLVEYVDKSHAFLPIIPNTQRGQLEDRLNNQARTIAFLLEQAFRIKEDISACLQGTHGFRKEESLARKLLESHIQTITSIVKKLSQNIEM

SEQ ID NO: 17513 - protein, 182 aa, Homo sapiens
MEGPLLEGLYWDSWYNNQQLYNLKNSSRIYYENILLGVPRVRQLKVRNNTCKVYSSFQSLMSECYGKYTSANEDLSNFGLQINTEWRYSTSNTNSPWHWGFLGVYRNGGYIFTLSKSKSETKNKFIDLRLNSWITRGTRVIFIDFSLYNANVNLFCIIRLVAEFPATGGILTSWQFYSVKLL

SEQ ID NO: 17514 - protein, 555 aa, Homo sapiens
MRLIGMPKEKYDPPDPRRIYTIMSAEEVANGKKSHWAELEISGRVRSLSTSLWSLTHLTALHLNDNYLSRIPPDIAKLHNLVYLDLSSNKLRSLPAELGNMVSLRELLLNNNLLRVLPYELGRLFQLQTLGLKGNPLSQDILNLYQDPDGTRKLLNFMLDNLAVHPEQLPPRPWITLKERDQILPSASFTVMCYNVLCDKYATRQLYGYCPSWALNWEYRKKGIMEEIVNCDADIISLQEVETEQYFTLFLPALKERGYDGFFSPKSRAKIMSEQERKHVDGCAIFFKTEKFTLVQKHTVEFNQVAMANSDGSEAMLNRVMTKDNIGVAVVLEVHKELFGAGMKPIHAADKQLLIVANAHMHWDPEYSDVKLIQTMMFVSEVKNILEKASSRPGSPTADPNSIPLVLCADLNSLPDSGVVEYLSNGGVADNHKDFKELRYNECLMNFSCNGKNGSSEGRITHGFQLKSAYENNLMPYTNYTFDFKGVIDYIFYSKTHMNVLGVLGPLDPQWLVENNITGCPHPHIPSDHFSLLTQLELHPPLLPLVNGVHLPNRR

SEQ ID NO: 17515 - protein, 201 aa, Homo sapiens
MRLLLALLGVLLSVPGPPVLSLEASEEVELEPCLAPSLEQQEQELTVALGQPVRLCCGRAERGGHWYKEGSRLAPAGRVRGWRGRLEIASFLPEDAGRYLCLARGSMIVLQNLTLITGDSLTSSNDDEDPKSHRDPSNRHSYPQQAPYWTHPQRMEKKLHAVPAGNTVKFRCPAAGNPTPTIRWLKDGQAFHGENRIGGIR

SEQ ID NO: 17516 - protein, 313 aa, Homo sapiens
EGALIALAMKMGLDGLQQDYIRKAEYPFSSEQKWMAVKCVHRTQQDRPEICFMKGAYEQVIKYCTTYQSKGQTLTLTQQQRDVYQQEKARMGSAGLRASRLGLYSKTSQSVSGEEIDAMDVQQLSQIVPKVAVFYRASPRHKMKIIKSLQKNGSVVAMTGDGVNDAVALKAADIGVAMGQTGTDVCKEAADMILVDDDFQTIMSAIEEGKGIYNNIKNFVRFQLSTSIAALTLISLATLMNFPNPLNAMQILWINIIMDGPPAQSLGVEPVDKDVIRKPPRNWKDSILTKNLILKILVSSIIIVCGTLFVFWR

SEQ ID NO: 17517 - protein, 575 aa, Homo sapiens
MKITSTSCICPVLVCLCFVQRCYGTAHHSSIKVMRNQTKHIEGETEVHHRPKRGWVWNQFFVLEEHMGPDPQYVGKLHSNSDKGDGSVKYILTGEGAGTIFIIDDTTGDIHSTKSLDREQKTHYVLHAQAIDRRTNKPLEPESEFIIKVQDINDNAPKFTDGPYIVTVPEMSDMGTSVLQVTATDADDPTYGNSARVVYSILQGQPYFSVDPKTGVIRTALHNMDREAREHYSVVIQAKDMAGQVGGLSGSTTVNITLTDVNDNPPRFPQKHYQLYVPESAQVGSAVGKIKANDADTGSNADMTYSIINGDGMGIFSISTDKETREGILSLKKPLNYEKKKSYTLNIEGANTHLDFRFSHLGPFKDATMLKIIVGDVDEPPLFSMPSYLMEVYENAKIGTVVGTVLAQDPDSTNSLVRYFINYNVEDDRFFNIDANTGTIRTTKVLDREETPWYNITVTASEIDNPDLLSHVTVGIRVLDVNDNPPELAREYDIIVCENSKPGQVIHTISATDKDDFANGPRFNFFLDERLPVNPNFTLKDNEAAAAPSPSGFVHAREMGVCGPAMQKPSCPRLV

SEQ ID NO: 17518 - protein, 1189 aa, Homo sapiens
MEKYVRLQKIGEGSFGKAILVKSTEDGRQYVIKEINISRMSSKEREESRREVAVLANMKHPNIVQYRESFEENGSLYIVMDYCEGGDLFKRINAQKGVLFQEDQILDWFVQICLALKHVHDRKILHRDIKSQNIFLTKDGTVQLGDFGIARVLNSTVELARTCIGTPYYLSPEICENKPYNNKSDIWALGCVLYELCTLKHAFEAGSMKNLVLKIISGSFPPVSLHYSYDLRSLVSQLFKRNPRDRPSVNSILEKGFIAKRIEKFLSPQLIAEEFCLKTFSKFGSQPIPAKRPASGQNSISVMPAQKITKPAAKYGIPLAYKKYGDKKLHEKKPLQKHKQAHQTPEKRVNTGEERRKISEEAARKRRLEFIEKEKKQKDQIISLMKAEQMKRQEKERAPFLGSGGTIAPSSFSSRGQYEHYHAIFDQMQQQRAEDNEAKWKREIYGRGLPERQKGQLAVERAKQVEEFLQRKREAMQNKARAEGHMVYLARLRQIRLQNFNERQQIKAKLRGEKKEANHSEGQEGSEEADMRRKKIESLKAHANARAAVLKEQLERKRKEAYEREKKVWEEHLVAKGVKSSDVSPPLGQHETGGSPSKQQMRSVISVTSALKEVGVDSSLTDTRETSEEMQKTNNAISSKREILRRLNENLKAQEDEKGKQNLSDTFEINVHEDAKEHEKEKSVSSDRKKWEAGGQLVIPLDELTLDTSFSTTERHTVGEVIKLGPNGSPRRAWGKSPTDSVLKILGEAELQLQTELLENTTIRSEISPEGEKYKPLITGEKKVQCISHEINPSAIVDSPVETKSPEFSEASPQMSLKLEGNLEEPDDLETEILQEPSGTNKDESLPCTITDVWISEEKETKETQSADRITIQENEVSEDGVSSTVDQLSDIHIEPGTNDSQHSKCDVDKSVQPEPFFHKVVHSEHLNLVPQVQSVQCSPEESFAFRSHSHLPPKNKNKNSLLIGLSTGLFDANNPKMLRTCSLPDLSKLFRTLMDVPTVGDVRQDNLEIDEIEDENIKEGPSDSEDIVFEETDTDLQELQASMEQLLREQPGEEYSEEEESVLKNSDVEPTANGTDVADEDDNPSSESALNEEWHSDNSDGEIASECECDSVFNHLEELRLHLEQEMGFEKFFEVYEKIKAIHEDEDENIEICSKIVQNILGNEHQHLYAKILHLVMADGAYQEDNDE

SEQ ID NO: 17519 - protein, 736 aa, Homo sapiens
MGSPLRFDGRVVLVTGAGAGLGRAYALAFAERGALVVVNDLGGDFKGVGKGSLAADKVVEEIRRRGGKAVANYDSVEEGEKVVKTALDAFGRIDVVVNNAGILRDRSFARISDEDWDIIHRVHLRGSFQVTRAAWEHMKKQKYGRIIMTSSASGIYGNFGQANYSAAKLGLLGLANSLAIEGRKSNIHCNTIAPNAGSRMTQTVMPEDLVEALKPEYVAPLVLWLCHESCEENGGLFEVGAGWIGKLRWERTLGAIVRQKNHPMTPEAVKANWKKICDFENASKPQSIQESTGSIIEVLSKIDSEGGVSANHTSRATSTATSGFAGAIGQKLPPFSYAYTELEAIMYALGVGASIKDPKDLKFIYEGSSDFSCLPTFGVIIGQKSMMGGGLAEIPGLSINFAKVLHGEQYLELYKPLPRAGKLKCEAVVADVLDKGSGVVIIMDVYSYSEKELICHNQFSLFLVGSGGFGGKRTSDKVKVAVAIPNRPPDAVLTDTTSLNQAALYRLSGDWNPLHIDPNFASLAGFDKPILHGLCTFGFSARRVLQQFADNDVSRFKAIKARFAKPVYPGQTLQTEMWKEGNRIHFQTKVQETGDIVISNAYVDLAPTSGTSAKTPSEGGKLQSTFVFEEIGRRLKDIGPEVVKKVNAVFEWHITKGGNIGAKWTIDLKSGSGKVYQGPAKGAADTTIILSDEDFMEVVLGKLDPQKAFFSGRLKARGNIMLSQKLQMILKDYAKL

SEQ ID NO: 17520 - protein, 89 aa, Homo sapiens
MKRLDVNAAGIWEPKKGDVLCSRHFKKTDFDRSAPNIKLKPGVIPSIFDSPYHLQISMFKRKCLFKAKNYFSVTIIANIYKVPIFIQST

SEQ ID NO: 17521 - protein, 443 aa, Homo sapiens
NQYPPPMLEDACRLINLGGENIQNDGFQFVTELQEDFLGGNGFIGQELNSGRESPFVKTEDNGSDYLVYLPSQMFEPQKLMINYEKDQKSAEIASLTSGHENYGRKEEPDHTYEPGDVSLQEYYMDVAFLIDASQRVGSDEFKEVKAFITSVLDYFHIAPTPLTSTLGDRVAVLSYSPPGYMPNTEECPVYLEFDLVTYNSIHQMKHHLQDSQQLNGDVFIGHALQWTIDNVFVGTPNLRKNKVIFVISAGETNSLDKDVLRNVSLRAKCQGYSIFVFSFGPKHNDKELEELASHPLDHHLVQLGRTHKPDWNYIIKFVKPFVHLIRRAINKYPTEDMKATCVNMTSPNPENGGTENTVLLLPGIYEIKTENGDLFDEFDSQAQHLLVLGNNHSSGSETATDLMQKLYLLFSTEKLAMKDKEKAHLEEISALVVDKQQEKEDL

SEQ ID NO: 17522 - protein, 639 aa, Homo sapiens
RKKMVRNDMFYNHYPYVPETEQETNVAKPARYRRAVSYDSKEYYMRLASGNPAIVQDAIVESSEGEAAQQEPEHGEDTIAKVKGLVKPPLKRSRSAPDGGDEENQEQLQDQIAEGSSIEEEEKTDNATLLRLLEEGEKIQHMYRCARVQGLDTSEGLLLFGKEHFYVIDGFTMTATREIRDIETLPPNMHEPIIPRGARQGPSQLKRTCSIFAYEDIKEVHKRRYLLQPIAVEVFSGDGRNYLLAFQKGIRNKVYQRFLAVVPSLTDSSESVSGQRPNTSVEQGSGLLSTLVGEKSVTQRWERGEISNFQYLMHLNTLAGRSYNDLMQYPVFPWILADYDSEEVDLTNPKTFRNLAKPMGAQTDERLAQYKKRYKDWEDPNGETPAYHYGTHYSSAMIVASYLVRMEPFTQIFLRLQGGHFDLADRMFHSVREAWYSASKHNMADVKELIPEFFYLPEFLFNSNNFDLGCKQNGTKLGDVILPPWAKGDPREFIRVHREALECDYVSAHLHEWIDLIFGYKQQGPAAVEAVNVFHHLFYEGQVDIYNINDPLKETATIGFINNFGQIPKQLFKKPHPPKRVRSRLNGDNAGISVLPGSTSDKIFFHHLDNLRPSLTPVKELKEPVGQIVCTDKGILAVE

SEQ ID NO: 17523 - protein, 438 aa, Homo sapiens
MLLNRMSSDDRHLGSSCGSFIKTEPSSPSSGIDALSHHSPSGSSDASGGFGLALGTHANGLDSPPMFAGAGLGGTPCRKSYEDCASGIMEDSAIKCEYMLNAIPKRLCLVCGDIASGYHYGVASCEACKAFFKRTIQGNIEYSCPATNECEITKRRRKSCQACRFMKCLKVGMLKEGVRLDRVRGGRQKYKRRLDSESSPYLSLQISPPAKKPLTKIVSYLLVAEPDKLYAMPPPGMPEGDIKALTTLCDLADRELVVIIGWAKHIPGFSSLSLGDQMSLLQSAWMEILILGIVYRSLPYDDKLVYAEDYIMDEEHSRLAGLLELYRAILQLVRRYKKLKVEKEEFVTLKALALANSDSMYIEDLEAVQKLQDLLHEALQDYELSQRHEEPWRTGKLLLTLPLLRQTAAKAVQHFYSVKLQGKVPMHKLFLEMLEAKV

SEQ ID NO: 17524 - protein, 795 aa, Homo sapiens
MPRAPRCRAVRSLLRSHYREVLPLATFVRRLGPQGWRLVQRGDPAAFRALVAQCLVCVPWDARPPPAAPSFRQVSCLKELVARVLQRLCERGAKNVLAFGFALLDGARGGPPEAFTTSVRSYLPNTVTDALRGSGAWGLLLRRVGDDVLVHLLARCALFVLVAPSCAYQVCGPPLYQLGAATQARPPPHASGPRRRLGCERAWNHSVREAGVPLGLPAPGARRRGGSASRSLPLPKRPRRGAAPEPERTPVGQGSWAHPGRTRGPSDRGFCVVSPARPAEEATSLEGALSGTRHSHPSVGRQHHAGPPSTSRPPRPWDTPCPPVYAETKHFLYSSGDKEQLRPSFLLSSLRPSLTGARRLVETIFLGSRPWMPGTPRRLPRLPQRYWQMRPLFLELLGNHAQCPYGVLLKTHCPLRAAVTPAAGVCAREKPQGSVAAPEEEDTDPRRLVQLLRQHSSPWQVYGFVRACLRRLVPPGLWGSRHNERRFLRNTKKFISLGKHAKLSLQELTWKMSVRDCAWLRRSPGVGCVPAAEHRLREEILAKFLHWLMSVYVVELLRSFFYVTETTFQKNRLFFYRKSVWSKLQSIGIRQHLKRVQLRELSEAEVRQHREARPALLTSRLRFIPKPDGLRPIVNMDYVVGARTFRREKRAERLTSRVKALFSVLNYERARRPGLLGASVLGLDDIHRAWRTFVLRVRAQDPPPELYFVKDRLTEVIASIIKPQNTYCVRRYAVVQKAAHGHVRKAFKSHVLRPVPGDPAGLHPLHAALQPVLRRHGEQAVCGDSAGRAAPAFGG

SEQ ID NO: 17525 - protein, 151 aa, Homo sapiens
MVDRSKLLPTSLQNEFIPKEVLLSLTYAANAGPCPENLLPPKKIKTPKGTLPRLVDHVWHHPVRRNKFKYLIDHPVSLTGAGRDISFLYDVTYAKGQTREKAVCPPHLARSLQSHDGVIVPHKPKTLTDTLIPEEFHIVSSTGVSGLECYD

SEQ ID NO: 17526 - protein, 503 aa, Homo sapiens
LGSFFTEYLQNQLLTKGMVILRDKIRFYEELQRDKAAAAAVLGAVRKRPSVVPMAGQDPALSTSHPFYDVARHGILQVAGDDRFGRRVVTFSCCRMPPSHELDHQRLLEYLKYTLDQYVENDYTIVYFHYGLNSRNKPSLGWLQSAYKEFDRKYKKNLKALYVVHPTSFIKVLWNILKPLISHKFGKKVIYFNYLSELHEHLKYDQLVIPPEVLRYDEKLQSLHEGRTPPPTKTPPPRPPLPTQQFGVSLQYLKDKNQGELIPPVLRFTVTYLREKGLRTEGLFRRSASVQTVREIQRLYNQGKPVNFDDYGDIHIPAVILKTFLRELPQPLLTFQAYEQILGITSLPLAPLELSREPHALPGVESSLRVTGCRQILRSLPEHNYVVLRYLMGFLHAVSRESIFNKMNSSNLACVFGLNLIWPSQGVSSLSALVPLNMFTELLIEYYEKIFSTPEAPGEHGLAPWEQGSRAAPLQEAVPRTQATGLTKPTLPPSPLMAARRRL

SEQ ID NO: 17527 - protein, 395 aa, Homo sapiens
MDPDPQAGVQVGMRVVRGVDWKWGQQDGGEGGVGTVVELGRHGSPSTPDRTVVVQWDQGTRTNYRAGYQGAHDLLLYDNAQIGVRHPNIICDCCKKHGLRGMRWKCRVCLDYDLCTQCYMHNKHELAHAFDRYETAHSRPVTLSPRQGLPRIPLRGIFQGAKVVRGPDWEWGSQDGGEGKPGRVVDIRGWDVETGRSVASVTWADGTTNVYRVGHKGKVDLKCVGEAAGGFYYKDHLPRLGKPAELQRRVSADSQPFQHGDKVKCLLDTDVLREMQEGHGGWNPRMAEHHSFWVGDVVRVIGDLDTVKRLQAGHGEWTDDMAPALGRVGKVVKVFGDGNLRVAVAGQRWTFSPSCLVAYRPEEDANLDVAERARENKSAAQLRRPVGGGAAPGHH

SEQ ID NO: 17528 - protein, 1299 aa, Homo sapiens
MWPSQLLIFMMLLAPIIHGGKHSERHPALAAPLRHAERSPGGALPPRHLLQQPAAERTAAHRGQGPRGATRGVRGPGAQGAQIAAQAFSRAPIPMAVVRRELSCESYPIELRCPGTDVIMIESANYGRTDDKICDSDPAQMENIRCYLPDAYKIMSQRCNNRTQCAVVAGPDVFPDPCPGTYKYLEVQYECVPYKVEQKVFLCPGLLKGVYQSEHLFESDHQSGAWCKDPLQASDKIYYMPWTPYRTDTLTEYSSKDDFIAGRPTTTYKLPHRVDGTGFVVYDGALFFNKERTRNIVKFDLRTRIKSGEAIIANANYHDTSPYRWGGKSDIDLAVDENGLWVIYATEQNNGKIVISQLNPYTLRIEGTWDTAYDKRSASNAFMICGILYVVKSVYEDDDNEATGNKIDYIYNTDQSKDSLVDVPFPNSYQYIAAVDYNPRDNLLYVWNNYHVVKYSLDFGPLDSRSGQAHHGQVSYISPPIHLDSELERPSVKDISTTGPLGMGSTTTSTTLRTTTLSPGRSTTPSVSGRRNRSTSTPSPAVEVLDDMTTHLPSASSQIPALEESCEAVEAREIMWFKTRQGQIAKQPCPAGTIGVSTYLCLAPDGIWDPQGPDLSNCSSPWVNHITQKLKSGETAANIARELAEQTRNHLNAGDITYSVRAMDQLVGLLDVQLRNLTPGGKDSAARSLNKLQKRERSCRAYVQAMVETVNNLLQPQALNAWRDLTTSDQLRAATMLLHTVEESAFVLADNLLKTDIVRENTDNIKLEVARLSTEGNLEDLKFPENMGHGSTIQLSANTLKQNGRNGEIRVAFVLYNNLGPYLSTENASMKLGTEALSTNHSVIVNSPVITAAINKEFSNKVYLADPVVFTVKHIKQSEENFNPNCSFWSYSKRTMTGYWSTQGCRLLTTNKTHTTCSCNHLTNFAVLMAHVEVKHSDAVHDLLLDVITWVGILLSLVCLLICIFTFCFFRGLQSDRNTIHKNLCISLFVAELLFLIGINRTDQPIACAVFAALLHFFFLAAFTWMFLEGVQLYIMLVEVFESEHSRRKYFYLVGYGMPALIVAVSAAVDYRSYGTDKVCWLRLDTYFIWSFIGPATLIIMLNVIFLGIALYKMFHHTAILKPESGCLDNIKSWVIGAIALLCLLGLTWAFGLMYINESTVIMAYLFTIFNSLQGMFIFIFHCVLQKKVRKEYGKCLRTHCCSGKSTESSIGSGKTSGSRTPGRYSTGSQSRIRRMWNDTVRKQSESSFITGDINSSASLNREPYRETSMGVKLNIAYQIGASEQCQGYKCHGYSTTEW

SEQ ID NO: 17529 - protein, 900 aa, Homo sapiens
MGDSGSRRSTLVSRLPIFRRSINRRHDSLPSSPSSSNTVGVHSSSPSSTNSSSGSTGKRRSIFRTPSISFHHKKGSEPKQEPTNQNLSISNGAQPGHSNMQKLSLEEHIKTRGRHSVGFSSSRNKKITRSLTEDFEREKEHSTNKNVFINCLSSGKSEGDDSGFTEDQTRRSVKQSTRKLLPKSFSSHYKFSKPVLQSQSISLVQQSEFSLEVTQYQEREPVLVRASPSCSVDVTERAGSSLQSPLLSADLTTAQTPSEFLALTEDSVSEMDAFSKSGSMASHCDNFGHNDSTSQMSLNSAAVTKTTTELTGTVPCAIMSPGKYRLEGQCSTESNSLPETSAANQKEVLLQIAELPATSVSHSESNLPADSEREENIGLQNGETMLGTNSPRKLGFYEQHKAIAEHVKGIHPISDSKIIPTSGDHHIFNKTSHGYEANPAKVLASSLSPFREGRFIERRLRSSSEGTAGSSRMILKPKDGNIEEVNSLRKQRAGSSSSKMNSLDVLNNLGSCELDEDDLMLDLEFLEEQSLHPSVCREDSYHSVVSCAAVVLTPMEPMIEMKKREEPEFPEPSKQNLSLKLTKDVDQEARCSHISRMPNSPSADWPLQGVEENGGIDSLPFRLMLQDCTAVKTLLLKMKRVLQESADMSPASSTTSLPVSPLTEEPVPFKDIMKDECSMLKLQLKEKDELISQLQEELGKVRHLQKAFASRVDKSTQTELLCYDGLNLKRLETVQGGREATYRNRIVSQNLSTRDRKAIHTPTEDRFRYSAADQTSPYKNKTCQLPSLCLSNFLKDKELAEVIKHSRGTYETLTSDVTQNLRATVGQSSLKPTAKTEGLSTFLEKPKDQVATARQHSTFTGRFGQPPRGPISLHMYSRKNVFLHHNLHSTELQTLGQQDG

SEQ ID NO: 17530 - protein, 157 aa, Homo sapiens
IPGYGLEGEMSIVELRERLALLKENQRRKEEEKRDQIIQGKHTKSQELQNMVEQISLCRAAMGRSAALRWEEKKALAAAPAAPSQDERVQQLRRRISERAAERSRQAALLHVSAPRTARPKPRAQLEAQHWLELERSRERRLQALQQGGSGPGPARR

SEQ ID NO: 17531 - protein, 1143 aa, Homo sapiens
MPRRAGSGQLPLPRGWEEARDYDGKVFYIDHNTRRTSWIDPRDRLTKPLSFADCVGDELPWGWEAGFDPQIGVYYIDHINKTTQIEDPRKQWRGEQEKMLKDYLSVAQDALRTQKELYHVKEQRLALALDEYVRLNDAYKEKSSSHTSLFSGSSSSTKYDPDILKAEISTTRLRVKKLKRELSQMKQELLYKEQGFETLQQIDKKMSGGQSGYELSEAKAILTELKSIRKAISSGEKEKQDLMQSLAKLQERFHLDQNIGRSEPDLRCSPVNSHLCLSRQTLDAGSQTSISGDIGVRSRSNLAEKVRLSLQYEEAKRSMANLKIELSKLDSEAWPGALDIEKEKLMLINEKEELLKELQFVTPQKRTQDELERLEAERQRLEEELLSVRGTPSRALAERLRLEERRKELLQKLEETTKLTTYLHSQLKSLSASTLSMSSGSSLGSLASSRGSLNTSSRGSLNSLSSTELYYSSQSDQIDVDYQYKLDFLLQEKSGYIPSGPITTIHENEVVKSPSQPGQSGLCGVAAAATGHTPPLAEAPKSVASLSSRSSLSSLSPPGSPLVLEGTFPMSSSHDASLHQFTADFEDYVEKSLPKRRVIHLLGEKTTCVSAAVSDESVAGDSGVYEAFVKQPSEMEDVTYSEEDVAIVETAQVQIGLRYNAKSSSFMVIIAQLRNLHAFLIPHTSKVYFRVAVLPSSTDVSCLFRTKVHPPTESILFNDVFRVAISQTALQQKTLRVDLCSVSKHRREECLAGTQISLADLPFSSEVFTLWYNLLPSKQMPCKKNEENEDSVFQPNQPLVDSIDLDAVSALLARTSAELLAVEQELAQEEEEESGQEEPRGPDGDWLTMLREASDEIVAEKEAEVKLPEDSSCTEDLSSCTSVPEMNEDGNRKESNCAKDLRSQPPTRIPTLVDKETNTDEAANDNMAVRPKERSSLSSRQHPFVRSSVIVRSQTFSPGERNQYICRLNRSDSDSSTLAKKSLFVRNSTERRSLRVKRTVCQSVLRRTTQECPVRTSLDLELDLQASLTRQSRLNDELQALRDLRQKLEELKAQGETDLPPGVLEDERFQRLLKQAEKQAEQSKEEQKQGLNAEKLMRQVSKDVCRLREQSQKVPRQVQSFREKIAYFTRAKISIPSLPADDV

SEQ ID NO: 17532 - protein, 551 aa, Homo sapiens
MFGKMFFVFCQESGYDTILRVLGSNVREFLQNLDALHDHLATIYPGMRAPSFRCTDAEKGKGLILHYYSEREGLQDIVIGIIKTVAQQIHGTEIDMKVIQQRNEECDHTQFLIEEKESKEEDFYEDLDRFEENGTQESRISPYTFCKAFPFHIIFDRDLVVTQCGNAIYRVLPQLQPGNCSLLSVFSLVRPHIDISFHGILSHINTVFVLRSKEGLLDVEKLECEDELTGTEISCLRLKGQMIYLPEADSILFLCSPSVMNLDDLTRRGLYLSDIPLHDATRDLVLLGEQFREEYKLTQELEILTDRLQLTLRALEDEKKKTDTLLYSVLPPSVANELRHKRPVPAKRYDNVTILFSGIVGFNAFCSKHASGEGAMKIVNLLNDLYTRFDTLTDSRKNPFVYKVETVGDKYMTVSGLPEPCIHHARSICHLALDMMEIAGQVQVDGESVQITIGIHTGEVVTGVIGQRMPRYCLFGNTVNLTSRTETTGEKGKINVSEYTYRCLMSPENSDPQFHLEHRGPVSMKGKKEPMQVWFLSRKNTGTEETKQDDD

SEQ ID NO: 17533 - protein, 199 aa, Homo sapiens
MFCQLAKTCPVQLWVDSTPPPGTRVRAMAIYKQSQHMTEVVRRCPHHERCSDSDGLAPPQHLIRVEGNLRVEYLDDRNTFRHSVVVPYEPPEVGSDCTTIHYNYMCNSSCMGGMNRRPILTIITLEDSSGNLLGRNSFEVRVCACPGRDRRTEEENLRKKGEPHHELPPGSTKRALPNNTSSSPQPKKKPLDGEYFTLQ

SEQ ID NO: 17534 - protein, 260 aa, Homo sapiens
MRKGLRATAARCGLGLGYLLQMLVLPALALLSASGTGSAAQDDDFFHELPETFPSDPPEPLPHFLIEPEEAYIVKNKPVNLYCKASPATQIYFKCNSEWVHQKDHIVDERVDETSGLIVREVSIEISRQQVEELFGPEDYWCQCVAWSSAGTTKSRKAYVRIAYLRKTFEQEPLGKEVSLEQEVLLQCRPPEGIPVAEVEWLKNEDIIDPVEDRNFYITIDHNLIIKQARLSDTANYTCVAKNIVAKRKSTTATVIVYGP

SEQ ID NO: 17535 - protein, 890 aa, Homo sapiens
MEYEWKPDEQGLQQILQLLKESQSPDTTIQRTVQQKLEQLNQYPDFNNYLIFVLTKLKSEDEPTRSLSGLILKNNVKAHFQNFPNGVTDFIKSECLNNIGDSSPLIRATVGILITTIASKGELQNWPDLLPKLCSLLDSEDYNTCEGAFGALQKICEDSAEILDSDVLDRPLNIMIPKFLQFFKHSSPKIRSHAVACVNQFIISRTQALMLHIDSFIENLFALAGDEEPEVRKNVCRALVMLLEVRMDRLLPHMHNIVEYMLQRTQDQDENVALEACEFWLTLAEQPICKDVLVRHLPKLIPVLVNGMKYSDIDIILLKGDVEEDETIPDSEQDIRPRFHRSRTVAQQHDEDGIEEEDDDDDEIDDDDTISDWNLRKCSAAALDVLANVYRDELLPHILPLLKELLFHHEWVVKESGILVLGAIAEGCMQGMIPYLPELIPHLIQCLSDKKALVRSITCWTLSRYAHWVVSQPPDTYLKPLMTELLKRILDSNKRVQEAACSAFATLEEEACTELVPYLAYILDTLVFAFSKYQHKNLLILYDAIGTLADSVGHHLNKPEYIQMLMPPLIQKWNMLKDEDKDLFPLLECLSSVATALQSGFLPYCEPVYQRCVNLVQKTLAQAMLNNAQPDQYEAPDKDFMIVALDLLSGLAEGLGGNIEQLVARSNILTLMYQCMQDKMPEVRQSSFALLGDLTKACFQHVKPCIADFMPILGTNLNPEFISVCNNATWAIGEISIQMGIEMQPYIPMVLHQLVEIINRPNTPKTLLENTAITIGRLGYVCPQEVAPMLQQFIRPWCTSLRNIRDNEEKDSAFRGICTMISVNPSGVIQDFIFFCDAVASWINPKDDLRDMFCKILHGFKNQVGDENWRRFSDQFPLPLKERLAAFYGV

SEQ ID NO: 17536 - protein, 323 aa, Homo sapiens
EEEEEEEDVDKDPHPTQNTCLRCRHFSLRERKREPRRTMGGCEVREFLLQFGFFLPLLTAWPGDCSHVSNNQVVLLDTTTVLGELGWKTYPLNGWDAITEMDEHNRPIHTYQVCNVMEPNQNNWLRTNWISRDAAQKIYVEMKFTLRDCNSIPWVLGTCKETFNLFYMESDESHGIKFKPNQYTKIDTIAADESFTQMDLGDRILKLNTEIREVGPIERKGFYLAFQDIGACIALVSVRVFYKKCPFTVRNLAMFPDTIPRVDSSSLVEVRGSCVKSAEERDTPKLYCGADGDWLVPLGRCICSTGYEEIEGSCHGASKGRCF

SEQ ID NO: 17537 - protein, 1178 aa, Homo sapiens
MSLQSAQYLRQAEVLKADMTDSKLGPAEVWTSRQALQDLYQKMLVTDLEYALDKKVEQDLWNHAFKNQITTLQGQAKNRANPNRSEVQANLSLFLEAASGFYTQLLQELCTVFNVDLPCRVKSSQLGIISNKQTHTSAIVKPQSSSCSYICQHCLVHLGDIARYRNQTSQAESYYRHAAQLVPSNGQPYNQLAILASSKGDHLTTIFYYCRSIAVKFPFPAASTNLQKALSKALESRDEVKTKWGVSDFIKAFIKFHGHVYLSKSLEKLSPLREKLEEQFKRLLFQKAFNSQQLVHVTVINLFQLHHLRDFSNETEQHTYSQDEQLCWTQLLALFMSFLGILCKCPLQNESQEESYNAYPLPAVKVSMDWLRLRPRVFQEAVVDERQYIWPWLISLLNSFHPHEEDLSSISATPLPEEFELQGFLALRPSFRNLDFSKGHQGITGDKEGQQRRIRQQRLISIGKWIADNQPRLIQCENEVGKLLFITEIPELILEDPSEAKENLILQETSVIESLAADGSPGLKSVLSTSRNLSNNCDTGEKPVVTFKENIKTREVNRDQGRSFPPKEVKSQTELRKTPVSEARKTPVTQTPTQASNSQFIPIHHPGAFPPLPSRPGFPPPTYVIPPPVAFSMGSGYTFPAGVSVPGTFLQPTAHSPAGNQVQAGKQSHIPYSQQRPSGPGPMNQGPQQSQPPSQQPLTSLPAQPTAQSTSQLQVQALTQQQQSPTKAVPALGKSPPHHSGFQQYQQADASKQLWNPPQVQGPLGKIMPVKQPYYLQTQDPIKLFEPSLQPPVMQQQPLEKKMKPFPMEPYNHNPSEVKVPEFYWDSSYSMADNRSVMAQQANIDRRGKRSPGVFRPEQDPVPRMPFEDPKSSPLLPPDLLKSLAALEEEEELIFSNPPDLYPALLGPLASLPGRSLFKSLLEKPSELMSHSSSFLSLTGFSLNQERYPNNSMFNEVYGKNLTSSSKAELSPSMAPQETSLYSLFEGTPWSPSLPASSDHSTPASQSPHSSNPSSLPSSPPTHNHNSVPFSNFGPIGTPDNRDRRTADRWKTDKPAMGGFGIDYLSATSSSESSWHQASTPSGTWTGHGPSMEDSSAVLMESLKKQQHGVQQLGPKRQSEEEGSSSICVAHRGPRPLPSCSLPASTFRVKFKAARTCAHQAQKKTRRRPFWKRRKKGK

SEQ ID NO: 17538 - protein, 915 aa, Homo sapiens
MELEKREKRSLLNKNLEEKLTVSAGGSEAKPLIFTFVPTVRRLPTHTQLADTSKFLVKIPEESSDKSPETVNRSKSNDYLTLNAGSQQERDQAKLTCPSEVSGTILQEREFEANKLQGMQQSDLFKAEYVLIVDSEGEDEAASRKVEQGPPGGIGTAAVRPKSLAISSSLVSDVVRPKTQGTDLKTSSHPEMLHGMAPQQKHGQLTSSPTTSEQLACKPPAFSFVSPTNPNTPPDPVNLEGASVLEEFHTRRLDVGGAVVEESATYFQTTAHSTPFSASKGTSSTLLFPHSTQLSGSNLPSSTAADPKPGLTSEVLKKTTLTSHVLSHGESPRTSSSPPSSSASLKSNSASYIPVRIVTHSLSPSPKPFTSSFHGSSSTICSQMSSSGNLSKSGVKSPVPSRLALLTAILKSNPSHQRPFSPASCPTFSLNSPASSTLTLDQKEKQTPPTPKKSLSSCSLRAGSPDQGELQVSELTQQSFHLPVFTKSTPLSQAPSLSPTKQASSSLASMNVERTPSPTLKSNTMLSLLQTSTSSSVGLPPVPPSSSLSSLKSKQDGDLRGPENPRNIHTYPSTLASSALSSLSPPINQRATFSSSEKCFHPSPALSSLINRSKRASSQLSGQELNPSALPSLPVSSADFASLPNLRSSSLPHANLPTLVPQLSPSALHPHCGSGTLPSRLGKSESTTPNHRSPVSTPSLPISLTRTEELISPCALSMSTGPENKKSKQYKTKSSYKAFAAIPTNTLLLEQKALDEPAKTESVSKDNTLEPPVELYFPAQLRQQTEELCATIDKVLQDSLSMHSSDSPSRSPKTLLGSDTVKTPTTLPRAAGRETKYANLSSPSSTVSESQLTKPGVIRPVPVKSRILLKKEEEVYEPNPFSKYLEDNSDLFSEQAAHSVDSYCNGSDTSGPWLL

SEQ ID NO: 17539 - protein, 427 aa, Homo sapiens
MEDTGIQRGIWDGDAKAVQQCLTDIFTSVYTTCDIPENAIFGPCVLSHTSLYDSIAFIALKSTDKRTVPYIFRVDTSAANGSSEGLMWLRLVQSARDKEEQNLEAYIKNGQLFYRSLRRIAKDEELLVWYGKELTELLLLCPSRSHNKMNGSSPYTCLECSQRFQFEFPYVAHLRFRCPKRLHSADISPQDEQGGGVGTKDHGGGGGGGKDQQQQQQEAPLGPGPKFCKAGPLHHYPSPSPESSNPSAAAGGSSAKPSTDFHNLARELENSRGGSSCSPAQSLSSGSGSGGGGGHQEAELSPDGIATGGGKGKRKFPEEAAEGGGGAGLVGGRGRFVERPLPASKEDLVCTPQQYRASGSYFGLEENGRLFAPPSPETGEAKRSAFVEVKKAARAASLQEEGTADGAGVASEDQDAGGGGGSSTPAA

SEQ ID NO: 17540 - protein, 1765 aa, Homo sapiens
MDEEEDGAGAEESGQPRSFMRLNDLSGAGGRPGPGSAEKDPGSADSEAEGLPYPALAPVVFFYLSQDSRPRSWCLRTVCNPWFERISMLVILLNCVTLGMFRPCEDIACDSQRCRILQAFDDFIFAFFAVEMVVKMVALGIFGKKCYLGDTWNRLDFFIVIAGMLEYSLDLQNVSFSAVRTVRVLRPLRAINRVPSMRILVTLLLDTLPMLGNVLLLCFFVFFIFGIVGVQLWAGLLRNRCFLPENFSLPLSVDLERYYQTENEDESPFICSQPRENGMRSCRSVPTLRGDGGGGPPCGLDYEAYNSSSNTTCVNWNQYYTNCSAGEHNPFKGAINFDNIGYAWIAIFQVITLEGWVDIMYFVMDAHSFYNFIYFILLIIVGSFFMINLCLVVIATQFSETKQRESQLMREQRVRFLSNASTLASFSEPGSCYEELLKYLVYILRKAARRLAQVSRAAGVRVGLLSSPAPLGGQETQPSSSCSRSHRRLSVHHLVHHHHHHHHHYHLGNGTLRAPRASPEIQDRDANGSRRLMLPPPSTPALSGAPPGGAESVHSFYHADCHLEPVRCQAPPPRSPSEASGRTVGSGKVYPTVHTSPPPETLKEKALVEVAASSGPPTLTSLNIPPGPYSSMHKLLETQSTGACQSSCKISSPCLKADSGACGPDSCPYCARAGAGEVELADREMPDSDSEAVYEFTQDAQHSDLRDPHSRRQRSLGPDAEPSSVLAFWRLICDTFRKIVDSKYFGRGIMIAILVNTLSMGIEYHEQPEELTNALEISNIVFTSLFALEMLLKLLVYGPFGYIKNPYNIFDGVIVVISVWEIVGQQGGGLSVLRTFRLMRVLKLVRFLPALQRQLVVLMKTMDNVATFCMLLMLFIFIFSILGMHLFGCKFASERDGDTLPDRKNFDSLLWAIVTVFQILTQEDWNKVLYNGMASTSSWAALYFIALMTFGNYVLFNLLVAILVEGFQAEEISKREDASGQLSCIQLPVDSQGGDANKSESEPDFFSPSLDGDGDRKKCLALVSLGEHPELRKSLLPPLIIHTAATPMSLPKSTSTGLGEALGPASRRTSSSGSAEPGAAHEMKSPPSARSSPHSPWSAASSWTSRRSSRNSLGRAPSLKRRSPSGERRSLLSGEGQESQDEEESSEEERASPAGSDHRHRGSLEREAKSSFDLPDTLQVPGLHRTASGRGSASEHQDCNGKSASGRLARALRPDDPPLDGDDADDEGNLSKGERVRAWIRARLPACCLERDSWSAYIFPPQSRFRLLCHRIITHKMFDHVVLVIIFLNCITIAMERPKIDPHSAERIFLTLSNYIFTAVFLAEMTVKVVALGWCFGEQAYLRSSWNVLDGLLVLISVIDILVSMVSDSGTKILGMLRVLRLLRTLRPLRVISRAQGLKLVVETLMSSLKPIGNIVVICCAFFIIFGILGVQLFKGKFFVCQGEDTRNITNKSDCAEASYRWVRHKYNFDNLGQALMSLFVLASKDGWVDIMYDGLDAVGVDQQPIMNHNPWMLLYFISFLLIVAFFVLNMFVGVVVENFHKCRQHQEEEEARRREEKRLRRLEKKRRSKEKQMAEAQCKPYYSDYSRFRLLVHHLCTSHYLDLFITGVIGLNVVTMAMEHYQQPQILDEALKICNYIFTVIFVLESVFKLVAFGFRRFFQDRWNQLDLAIVLLSIMGITLEEIEVNASLPINPTIIRIMRVLRIARVLKLLKMAVGMRALLDTVMQALPQLWAWSSLETWSVTRHTPVRAWAVMPPFGTLAWPS

SEQ ID NO: 17541 - protein, 179 aa, Homo sapiens
MSQPRTPEQALDTPGDCPPGRRDEDAGEGIQCSQRMLSFSDALLSIIATVMQFDRSVQRLLATRIAVYLMTFLIVTVAWAAHTRLFQVVGKTDDTLALLNLACMMTITFLPYTFSLMVTFPDVPLGIFLFCVCVIAIGVVQALIVGYAFHFPHLLSPQIQRSAHRALYRRHVLGIVLQG

SEQ ID NO: 17542 - protein, 444 aa, Homo sapiens
MRTLSTPSPALICPPNLPGFQNGRGSSTSSSSITGETVAMVHSPPPTRLTHPLIRLASRPQKEQASIDRLPDHSMVQIFSFLPTNQLCRCARVCRRWYNLAWDPRLWRTIRLTGETINVDRALKVLTRRLCQDTPNVCLMLETVTVSGCRRLTDRGLYTIAQCCPELRRLEVSGCYNISNEAVFDVVSLCPNLEHLDVSGCSKVTCISLTREASIKLSPLHGKQISIRYLDMTDCFVLEDEGLHTIAAHCTQLTHLYLRRCVRLTDEGLRYLVIYCASIKELSVSDCRFVSDFGLREIAKLESRLRYLSIAHCGRVTDVGIRYVAKYCSKLRYLNARGCEGITDHGVEYLAKNCTKLKSLDIGKCPLVSDTGLECLALNCFNLKRLSLKSCESITGQGLQIVAANCFDLQTLNVQDCEVSVEALRFVKRHCKRCVIEHTNPAFF

SEQ ID NO: 17543 - protein, 120 aa, Homo sapiens
RTQTQKEEEEEKPQTTYSAFIQLLPVLVIVIISVITQLLATNPPYSLFYKSTLGYTISRETQNLQVPYFVDKNFDKAYRGASLHDLEKTIEKDYIDYIQTSCWKEKQQRGTLLTEVLAHV

SEQ ID NO: 17544 - protein, 600 aa, Homo sapiens
MEVQLGLGRVYPRPPSKTYRGAFQNLFQSVREVIQNPGPRHPEAASAAPPGASLLLLQQQQQQQQQQQQQQQQQQQQQQQETSPRQQQQQQGEDGSPQAHRRGPTGYLVLDEEQQPSQPQSALECHPERGCVPEPGAAVAASKGLPQQLPAPPDEDDSAAPSTLSLLGPTFPGLSSCSADLKDILSEASTMQLLQQQQQEAVSEGSSSGRAREASGAPTSSKDNYLGGTSTISDNAKELCKAVSVSMGLGVEALEHLSPGEQLRGDCMYAPLLGVPPAVRPTPCAPLAECKGSLLDDSAGKSTEDTAEYSPFKGGYTKGLEGESLGCSGSAAAGSSGTLELPSTLSLYKSGALDEAAAYQSRDYYNFPLALAGPPPPPPPPHPHARIKLENPLDYGSAWAAAAAQCRYGDLASLHGAGAAGPGSGSPSAAASSSWHTLFTAEEGQLYGPCGGGGGGGGGGGGGGGGGGGGGGGEAGAVAPYGYTRPPQGLAGQESDFTAPDVWYPGGMVSRVPYPSPTCVKSEMGPWMDSYSGPYGDMRLETARDHVLPIDYYFPPQKTCLICGDEASGCHYGALTCGSCKVFFKRAAEGFFRMNKLKES

SEQ ID NO: 17545 - protein, 1274 aa, Homo sapiens
MWPSQLLIFMMLLAPIIHAFSRAPIPMAVVRRELSCESYPIELRCPGTDVIMIESANYGRTDDKICDSDPAQMENIRCYLPDAYKIMSQRCNNRTQCAVVAGPDVFPDPCPGTYKYLEVQYECVPYKVEQKVFLCPGLLKGVYQSEHLFESDHQSGAWCKDPLQASDKIYYMPWTPYRTDTLTEYSSKDDFIAGRPTTTYKLPHRVDGTGFVVYDGALFFNKERTRNIVKFDLRTRIKSGEAIIANANYHDTSPYRWGGKSDIDLAVDENGLWVIYATEQNNGKIVISQLNPYTLRIEGTWDTAYDKRSASNAFMICGILYVVKSVYEDDDNEATGNKIDYIYNTDQSKDSLVDVPFPNSYQYIAAVDYNPRDNLLYVWNNYHVVKYSLDFGPLDSRSGQAHHGQVSYISPPIHLDSELERPSVKDISTTGPLGMGSTTTSTTLRTTTLSPGRSTTPSVSGRRNRSTSTPSPAVEVLDDMTTHLPSASSQIPALEESCEAVEAREIMWFKTRQGQIAKQPCPAGTIGVSTYLCLAPDGIWDPQGPDLSNCSSPWVNHITQKLKSGETAANIARELAEQTRNHLNAGDITYSVRAMDQLVGLLDVQLRNLTPGGKDSAARSLNKLQKRERSCRAYVQAMVETVNNLLQPQALNAWRDLTTSDQLRAATMLLHTVEESAFVLADNLLKTDIVRENTDNIKLEVARLSTEGNLEDLKFPENMGHGSTIQLSANTLKQNGRNGEIRVAFVLYNNLGPYLSTENASMKLGTEALSTNHSVIVNSPVITAAINKEFSNKVYLADPVVFTVKHIKQSEENFNPNCSFWSYSKRTMTGYWSTQGCRLLTTNKTHTTCSCNHLTNFAVLMAHVEVKHSDAVHDLLLDVITWVGILLSLVCLLICIFTFCFFRGLQSDRNTIHKNLCISLFVAELLFLIGINRTDQPIACAVFAALLHFFFLAAFTWMFLEGVQLYIMLVEVFESEHSRRKYFYLVGYGMPALIVAVSAAVDYRSYGTDKVCWLRLDTYFIWSFIGPATLIIMLNVIFLGIALYKMFHHTAILKPESGCLDNIKSWVIGAIALLCLLGLTWAFGLMYINESTVIMAYLFTIFNSLQGMFIFIFHCVLQKKVRKEYGKCLRTHCCSGKSTESSIGSGKTSGSRTPGRYSTGSQSRIRRMWNDTVRKQSESSFITGDINSSASLNRGAMANHLISNALLRPHGTNNPYNTLLGEPAVCNNPSVSMYNAQEPYRETSMGVKLNIAYQIGASEQCQGYKCHGYSTTEW

SEQ ID NO: 17546 - protein, 665 aa, Homo sapiens
MQFETLRQVCNSVLSHFHGVFSSPPNILQNELFGQTLNNARKRSPSVSRDQNRRYDQREEREEYSQYATSDTAMPRSPSDYADRRSQHEPQFYEDSDHLSYRDSNRRSHRHSKEYIVDDEDVESRDEYERQRREEEYQSRYRSDPNLARYPVKPQPYEEQMRIHAEVSRARHERRHSDVSLANADLEDSRISMLRMDRPSRQRSISERRAAMENQRSYSMERTREAQGPSSYAQRTTNHSPPTPRRSPLPIDRPDLRRTDSLRKQHHLDPSSAVRKTKREKMETMLRNDSLSSDQSESVRPPPPKPHKSKKGGKMRQISLSSSEEELASTPEYTSCDDVEIESESVSEKGDMDYNWLDHTSWHSSEASPMSLHPVTWQPSKDGDRLIGRILLNKRLKDGSVPRDSGAMLGLKVVGGKMTESGRLCAFITKVKKGSLADTVGHLRPGDEVLEWNGRLLQGATFEEVYNIILESKPEPQVELVVSRPIGDIPRIPDSTHAQLESSSSSFESQKMDRPSISVTSPMSPGMLRDVPQFLSGQLSIKLWFDKVGHQLIVTILGAKDLPSREDGRPRNPYVKIYFLPDRSDKNKRRTKTVKKTLEPKWNQTFIYSPVHRREFRERMLEITLWDQARVREEESEFLGEILIELETALLDDEPHWYKLQTHDV

SEQ ID NO: 17547 - protein, 384 aa, Homo sapiens
MALMLSLVLSLLKLGSALGSVPLISITGYVDRDIQLLCQSSGWFPRPTAKWKGPQGQDLSTDSRTNRDMHGLFDVEISLTVQENAGSISCSMRHAHLSREVESRVQIGDTFFEPISWHLATKVLGILCCGLFFGIVGLKIFFSKFQWKIQAELDWRRKHGQAELRDARKHAVEVTLDPETAHPKLCVSDLKTVTHRKAPQEVPHSEKRFTRKSVVASQSFQAGKHYWEVDGGHNKRWRVGVCRDDVDRRKEYVTLSPDHGYWVLRLNGEHLYFTLNPRFISVFPRTPPTKIGVFLDYECGTISFFNINDQSLIYTLTCRFEGLLRPYIEYPSYNEQNGTPIVICPVTQESEKEASWQRASAIPETSNSESSSQATTPFLPRGEM

SEQ ID NO: 17548 - protein, 273 aa, Homo sapiens
MRALPGLLEARARTPRLLLLQCLLAAARPSSADGSAPDSPFTSPPLREEIMANNFSLESHNISLTGSTLYTQYRFTIINSKQMGSYSCFFREEKEQRGTFNFKVPELHGKNKPLISYVGDSTVLTCKCQNCFPLNWTWYSSNGSVKVPVGVQMNKYVINGTYANETKLKITQLLEEDGESYWCRALFQLGESEEHIELVVLSYLVPLKPFLVIVAEVILLVATILLCEKYTQKKKKHSDEGKEFEQIEQLKSDDSNGIENNVPRHRKNESLGQ

SEQ ID NO: 17549 - protein, 910 aa, Homo sapiens
MRKDTDDIESPKRSIRDSGYIDCWDSERSDSLSPPRHGRDDSFDSLDSFGSRSRQTPSPDVVLRGSSDGRGSDSESDLPHRKLPDVKKDDMSARRTSHGEPKSAVPFNQYLPNKSNQTAYVPAPLRKKKAEREEYRKSWSTATSPLGGERPFRSTSMFDMRCEEEAAVQPHSRARQEQLQLINNQLREEDDKWQDDLARWKSRRRSVSQDLIKKEEERKKMEKLLAGEDGTSERRKSIKTYREIVQEKERRERELHEAYKNARSQEEAEGILQQYIERFTISEAVLERLEMPKILERSHSTEPNLSSFLNDPNPMKYLRQQSLPPPKFTATVETTIARASVLDTSMSAGSGSPSKTVTPKAVPMLTPKPYSQPKNSQDVLKTFKVDGKVSVNGETVHREEEKERECPTVAPAHSLTKSQMFEGVARVHGSPLELKQDNGSIEINIKKPNSVPQELAATTEKTEPNSQEDKNDGGKSRKGNIELASSEPQHFTTTVTRCSPTVAFVEFPSSPQLKNDVSEEKDQKKPENEMSGKVELVLSQKVVKPKSPEPEATLTFPFLDKMPEANQLHLPNLNSQESPGTASVPLRVQNSWRRSQFFSQSVDSPSSEKSPVMTPFKFWAWDPEEERRRQEKWQQEQERLLQERYQKEQDKLKEEWEKAQKEVEEEERRYYEEERKIIEDTVVPFTVSSSSADQLSTSSSMTEGSGTMNKIDLGNCQDEKQDRRWKKSFQGDDSDLLLKTRESDRLEEKGSLTEGALAHSGNPVSKGVHEDHQLDTEAGAPHCGTNPQLAQDPSQNQQTSNPTHSSEDVKPKTLPLDKSINHQIESPSERRKSISGKKLCSSCGLPLGKGAAMIIETLNLYFHIQCFRCGICKGQLGDAVSGTDVRIRNGLLNCNDCYMRSRSAGQPTTL

SEQ ID NO: 17550 - protein, 813 aa, Homo sapiens
MDEGVVKESGNDTIDEEELILPNRNLRDKVEENSVRSPRKSPRLMAQEQVRSLRQSTIAKRSNAAPLSNTKKASGKTVSTAKAGVKQPERSQVKEEVCMSLKPEYHKENRRCSRNSGQIEVVPEVSVSSSHSSVSSCLEMKDEDGLDSKHKCNNPGEIDVPSHELNCSLLSETCVTIGEKKNEALMECKAKPVGSPLFKFSDKEEHEQNDSISGKTGETVVEEMIATRKVEQDSKETVKLSHEDDHILEDAGSSDISSDAACTNPNKTENSLVGLPSCVDEVTECNLELKDTMGIADKTENTLERNKIEPLGYCEDAESNRQLESTEFNKSNLEVVDTSTFGPESNILENAICDVPDQNSKQLNAIESTKIESHETANLQDDRNSQSSSVSYLESKSVKSKHTKPVIHSKQNMTTDAPKKIVAAKYEVIHSKTKVNVKSVKRNTDVPESQQNFHRPVKVRKKQIDKEPKIQSCNSGVKSVKNQAHSVLKKTLQDQTLVQIFKPLTHSLSDKSHAHPGCLKEPHHPAQTGHVSHSSQKQCHKPQQQAPAMKTNSHVKEELEHPGVEHFKEEDKLKLKKPEKNLQPRQRRSSKSFSLDEPPLFIPDNIATIRREGSDHSSSFESKYMWTPSKQCGFCKKPHGNRFMVGCGRCDDWFHGDCVGLSLSQAQQMGEEDKEYVCVKCCAEEDKKTEILDPDTLENQATVEFHSGDKTMECEKLGLSKHTTNDRTKYIDDTVKHKVKILKRESGEGRNSSDCRDNEIKKWQLAPLRKMGQPVLPRRSSEEKSEKIPKESTTVTCTGEKASKPGTHEKQEM

SEQ ID NO: 17551 - protein, 902 aa, Homo sapiens
KCEVSHRRAFHGWNEFDISEDEPLWKKYISQFKNPLIMLLLASAVISVLMHQFDDAVSITVAILIVVTVAFVQEYRSEKSLEELSKLVPPECHCVREGKLEHTLARDLVPGDTVCLSVGDRVPADLRLFEAVDLSIDESSLTGETTPCSKVTAPQPAATNGDLASRSNIAFMGTLVRCGKAKGVVIGTGENSEFGEVFKMMQAEEAPKTPLQKSMDLLGKQLSFYSFGIIGIIMLVGWLLGKDILEMFTISVSLAVAAIPEGLPIVVTVTLALGVMRMVKKRAIVKKLPIVETLGCCNVICSDKTGTLTKNEMTVTHIFTSDGLHAEVTGVGYNQFGEVIVDGDVVHGFYNPAVSRIVEAGCVCNDAVIRNNTLMGKPTEGALIALAMKMGLDGLQQDYIRKAEYPFSSEQKWMAVKCVHRTQQDRPEICFMKGAYEQVIKYCTTYQSKGQTLTLTQQQRDVYQQEKARMGSAGLRVLALASGPELGQLTFLGLVGIIDPPRTGVKEAVTTLIASGVSIKMITGDSQETAVAIASRLGLYSKTSQSVSGEEIDAMDVQQLSQIVPKVAVFYRASPRHKMKIIKSLQKNGSVVAMTGDGVNDAVALKAADIGVAMGQTGTDVCKEAADMILVDDDFQTIMSAIEEGKGIYNNIKNFVRFQLSTSIAALTLISLATLMNFPNPLNAMQILWINIIMDGPPAQSLGVEPVDKDVIRKPPRNWKDSILTKNLILKILVSSIIIVCGTLFVFWRELRDNVITPRDTTMTFTCFVFFDMFNALSSRSQTKSVFEIGLCSNRMFCYAVLGSIMGQLLVIYFPPLQKVFQTESLSILDLLFLLGLTSSVCIVAEIIKKVERSREKIQKHVSSTSSSFLEVWLWERSGQQLVEIHPHLETGLPLTEDVSCV

SEQ ID NO: 17552 - protein, 1868 aa, Homo sapiens
MSEEPKEKNAKPAHRKRKGKKSDANASYLRAARAGHLEKALDYIKNGVDINICNQNGLNALHLASKEGHVEVVSELLQREANVDAATKKGNTALHIASLAGQAEVVKVLVTNGANVNAQSQNGFTPLYMAAQENHLEVVKFLLDNGASQSLATEDGFTPLAVALQQGHDQVVSLLLENDTKGKVRLPALHIAARKDDTKAAALLLQNDNNADVESKSGFTPLHIAAHYGNINVATLLLNRAAAVDFTARNDITPLHVASKRGNANMVKLLLDRGAKIDAKTRDGLTPLHCGARSGHEQVVEMLLDRAAPILSKTKNGLSPLHMATQGDHLNCVQLLLQHNVPVDDVTNDYLTALHVAAHCGHYKVAKVLLDKKANPNAKALNGFTPLHIACKKNRIKVMELLLKHGASIQAVTESGLTPIHVAAFMGHVNIVSQLMHHGASPNTTNVRGETALHMAARSGQAEVVRYLVQDGAQVEAKAKDDQTPLHISARLGKADIVQQLLQQGASPNAATTSGYTPLHLSAREGHEDVAAFLLDHGASLSITTKKGFTPLHVAAKYGKLEVANLLLQKSASPDAAGKSGLTPLHVAAHYDNQKVALLLLDQGASPHAAAKNGYTPLHIAAKKNQMDIATTLLEYGADANAVTRQGIASVHLAAQEGHVDMVSLLLGRNANVNLSNKSGLTPLHLAAQEDRVNVAEVLVNQGAHVDAQTKMGYTPLHVGCHYGNIKIVNFLLQHSAKVNAKTKNGYTPLHQAAQQGHTHIINVLLQNNASPNELTVNGNTALGIARRLGYISVVDTLKIVTEETMTTTTVTEKHKMNVPETMNEVLDMSDDEVRKANAPEMLSDGEYISDVEEGNRCTWYKIPKVQEFTVKSEDAMTGDTDKYLGPQDLKELGDDSLPAEGYMGFSLGARSASLRSFSSDRSYTLNRSSYARDSMMIEELLVPSKEQHLTFTREFDSDSLRHYSWAADTLDNVNLVSSPIHSGFLVSFMVDARGGSMRGSRHHGMRIIIPPRKCTAPTRITCRLVKRHKLANPPPMVEGEGLASRLVEMGPAGAQFLGPVIVEIPHFGSMRGKERELIVLRSENGETWKEHQFDSKNEDLTELLNGMDEELDSPEELGKKRICRIITKDFPQYFAVVSRIKQESNQIGPEGGILSSTTVPLVQASFPEGALTKRIRVGLQAQPVPDEIVKKILGNKATFSPIVTVEPRRRKFHKPITMTIPVPPPSGEGVSNGYKGDTTPNLRLLCSITGGTSPAQWEDITGTTPLTFIKDCVSFTTNVSARFWLADCHQVLETVGLATQLYRELICVPYMAKFVVFAKMNDPVESSLRCFCMTDDKVDKTLEQQENFEEVARSKDIEVLEGKPIYVDCYGNLAPLTKGGQQLVFNFYSFKENRLPFSIKIRDTSQEPCGRLSFLKEPKTTKGLPQTAVCNLNITLPAHKKIEKTDRRQSFASLALRKRYSYLTEPGMSPQSPCERTDIRMAIVADHLGLSWTELARELNFSVDEINQIRVENPNSLISQSFMLLKKWVTRDGKNATTDALTSVLTKINRIDIVTLLEGPIFDYGNISGTRSFADENNVFHDPVDGYPSLQVELETPTGLHYTPPTPFQQDDYFSDISSIESPLRTPSRLSDGLVPSQGNIEHSADGPPVVTAEDASLEDSKLEDSVPLTEMPEAVDVDESQLENVCLSWQNETSSGNLESCAQARRVTGGLLDRLDDSPDQCRDSITSYLKGEAGKFEANGSHTEITPEAKTKSYFPESQNDVGKQSTKETLKPKIHGSGHVEEPASPLAAYQKSLEETSKLIIEETKPCVPVSMKKMSRTSPADGKPRLSLHEEEGSSGSEQKQGEGFKVKTKKEIRHVEKKSHS

SEQ ID NO: 17553 - protein, 287 aa, Homo sapiens
MQASPIRIPTVSNDIDWDFCFHMSQQTEIPAHQQTDELYPTGGCGESEEETKAKEKEKAIDCMSHPKEKLAQSQKKVAQLIKEKMNTQANKELIRCVILSRIIFGDHHWKCARALANLAYGYLTLRGLPVQAKKHATSAKNTLLTWKANTTSNKEKEEILEALVKLYYTLGVAWLLQNRGREAYFNLQKAERNMKELKELYKGGVCELQVSENDLTLALGRASLAIHRLNLALAYFEKAIGDVIAAKGDRTSDLISLYEEAAQIEQLRRNHNQAIQYLQQMLLRYIS

SEQ ID NO: 17554 - protein, 334 aa, Homo sapiens
MLCRLGGRWLRPLPALQLWARDLPLAPVPTSGAKRPTLPVWAVAPVSAVHANGWYEALAASSPVRVAEEVLLGVHAATGLPWWGSILLSTVALRGAVTLPLAAYQHYILAKVENLQPEIKTIARHLNQEVAVRANQLGWSKRDARLTYLKNMRRLISELYVRDNCHPFKATVLVWIQLPMWIFMSFALRNLSTGAAHSEAGFSVQEQLATGGILWFPDLTAPDSTWILPISVGVINLLIVEICALQKIGMSRFQTYITYFVRAMSVLMIPIAATVPSSIVLYWLCSSFVGLSQNLLLRSPGFRQLCRIPSTKSDSETPYKDIFAAFNTKFISRK

SEQ ID NO: 17555 - protein, 257 aa, Homo sapiens
MSPEKQHREEDEVDSVLLSASKILNSSEGVKESGCSDTEYGCIAESENQIQPQSALKVLQQQLESFQALRMQTLQNVSMVQSEISEILNKSIIEVENPQFSSEKNLVFGTRIEKDLEKWTIRDENKETPVLKTLKDPTENQEENLSMEKSHHFEDSKTLHSVEEKLSGDSVNSLPQSVNVPSQIHSEDTLTLRTSTDNLSSNIIIHPSENSDILKNYNNFYRFLPTAPPNVMSQADTVILDKSKITVPFLKHGFCEN

SEQ ID NO: 17556 - protein, 386 aa, Homo sapiens
MSQLSTTMSRCAKDLFGFAIMFFIIFLAYAQLAYLVFGTQVDDFSTFQECIFTQFRIILGDINFAEIEEANRVLGPIYFTTFVFFMFFILLNMFLAIINDTYSEVKSDLAQQKAEMELSDLIRKGYHKALVKLKLKKNTVDDISESLRQGGGKLNFDELRQDLKGKGHTDAEIEAIFTKYDQDGDQELTEHEHQQMRDDLEKEREDLDLDHSSLPRPMSSRSFPRSLDDSEEDDDEDSGHSSRRRGSISSGVSYEEFQVLVRRVDRMEHSIGSIVSKIDAVIVKLEIMERAKLKRREVLGRLLDGVAEDERLGRDSEIHREQMERLVREELERWESDDAASQISHGLGTPVGLNGQPRPRSSRPSSSQSTEGMEGAGGNGSSNVHV

SEQ ID NO: 17557 - protein, 150 aa, Homo sapiens
MTILGTTFGMVFSLLQVVSGESGYAQNGDLEDAELDDYSFSCYSQLEVNGSQHSLTCAFEDPDVNITNLEFEICGALVEVKCLNFRKLQEIYFIETKKFLLIGKSNICVKVGEKSLTCKKIDLTTIGKKLYIKVWLSLLGYLKTLCLDIL

SEQ ID NO: 17558 - protein, 944 aa, Homo sapiens
MDSLLPPSRFSYFKKYPLHAIRRYLSTLRNQRAEEQVARFQKIPNGENETMIPVLTSKKASELPVSEVASILQFKNPLIMLLLASAVISVLMHQFDDAVSITVAILIVVTVAFVQEYRSEKSLEELSKLVPPECHCVREGKLEHTLARDLVPGDTVCLSVGDRVPADLRLFEAVDLSIDESSLTGETTPCSKVTAPQPAATNGDLASRSNIAFMGTLVRCGKAKGVVIGTGENSEFGEVFKMMQAEEAPKTPLQKSMDLLGKQLSFYSFGIIGIIMLVGWLLGKDILEMFTISVSLAVAAIPEGLPIVVTVTLALGVMRMVKKRAIVKKLPIVETLGCCNVICSDKTGTLTKNEMTVTHIFTSDGLHAEVTGVGYNQFGEVIVDGDVVHGFYNPAVSRIVEAGCVCNDAVIRNNTLMGKPTEGALIALAMKMGLDGLQQDYIRKAEYPFSSEQKWMAVKCVHRTQQDRPEICFMKGAYEQVIKYCTTYQSKGQTLTLTQQQRDVYQQEKARMGSAGLRVLALASGPELGQLTFLGLVGIIDPPRTGVKEAVTTLIASGVSIKMITGDSQETAVAIASRLGLYSKTSQSVSGEEIDAMDVQQLSQIVPKVAVFYRASPRHKMKIIKSLQKNGSVVAMTGDGVNDAVALKAADIGVAMGQTGTDVCKEAADMILVDDDFQTIMSAIEEGKGIYNNIKNFVRFQLSTSIAALTLISLATLMNFPNPLNAMQILWINIIMDGPPAQSLGVEPVDKDVIRKPPRNWKDSILTKNLILKILVSSIIIVCGTLFVFWRELRDNVITPRDTTMTFTCFVFFDMFNALSSRSQTKSVFEIGLCSNRMFCYAVLGSIMGQLLVIYFPPLQKVFQTESLSILDLLFLLGLTSSVCIVAEIIKKVERSREKIQKHVSSTSSSFLEVWLWERSGQQLVEIHPHLETGLPLTEDVSCV

SEQ ID NO: 17559 - protein, 725 aa, Homo sapiens
MDASSDPYLPYDGGGDSIPLRELHKRGTHYTMTNGGSINSSTHLLDLLDEPIPGVGTYDDFHTIDWVREKCKDRERHRRINSKKKESAWEMTKSLYDAWSGWLVVTLTGLASGALAGLIDIAADWMTDLKEGICLSALWYNHEQCCWGSNETTFEERDKCPQWKTWAELIIGQAEGPGSYIMNYIMYIFWALSFAFLAVSLVKVFAPYACGSGIPEIKTILSGFIIRGYLGKWTLMIKTITLVLAVASGLSLGKEGPLVHVACCCGNIFSYLFPKYSTNEAKKREVLSAASAAGVSVAFGAPIGGVLFSLEEVSYYFPLKTLWRSFFAALVAAFVLRSINPFGNSRLVLFYVEYHTPWYLFELFPFILLGVFGGLWGAFFIRANIAWCRRRKSTKFGKYPVLEVIIVAAITAVIAFPNPYTRLNTSELIKELFTDCGPLESSSLCDYRNDMNASKIVDDIPDRPAGIGVYSAIWQLCLALIFKIIMTVFTFGIKVPSGLFIPSMAIGAIAGRIVGIAVEQLAYYHHDWFIFKEWCEVGADCITPGLYAMVGAAACLGGVTRMTVSLVVIVFELTGGLEYIVPLMAAVMTSKWVGDAFGREGIYEAHIRLNGYPFLDAKEEFTHTTLAADVMRPRRNDPPLAVLTQDNMTVDDIENMINETSYNGFPVIMSKESQRLVGFALRRDLTIAIESARKKQEGIVGSSRVCFAQHTPSLPAESPRPLKLR

SEQ ID NO: 17560 - protein, 860 aa, Homo sapiens
MVGCGRCDDWFHGDCVGLSLSQAQQMGEEDKEYVCVKCCAEEDKKTEILDPDTLENQATVEFHSGDKTMECEKLGLSKHTTNDRTKYIDDTVKHKVKILKRESGEGRNSSDCRDNEIKKWQLAPLRKMGQPVLPRRSSEEKSEKIPKESTTVTCTGEKASKPGTHEKQEMKKKKVEKGVLNVHPAASASKPSADQIRQSVRHSLKDILMKRLTDSNLKVPEEKAAKVATKIEKELFSFFRDTDAKYKNKYRSLMFNLKDPKNNILFKKVLKGEVTPDHLIRMSPEELASKELAAWRRRENRHTIEMIEKEQREVERRPITKITHKGEIEIESDAPMKEQEAAMEIQEPAANKSLEKPEGSEKQKEEVDSMSKDTTSQHRQHLFDLNCKICIGRMAPPVDDLSPKKVKVVVGVARKHSDNEAESIADALSSTSNILASEFFEEEKQESPKSTFSPAPRPEMPGTVEVESTFLARLNFIWKGFINMPSVAKFVTKAYPVSGSPEYLTEDLPDSIQVGGRISPQTVWDYVEKIKASGTKEICVVRFTPVTEEDQISYTLLFAYFSSRKRYGVAANNMKQVKDMYLIPLGATDKIPHPLVPFDGPGLELHRPNLLLGLIIRQKLKRQHSACASTSHIAETPESAPPIALPPDKKSKIEVSTEEAPEEENDFFNSFTTVLHKQRNKPQQNLQEDLPTAVEPLMEVTKQEPPKPLRFLPGVLIGWENQPTTLELANKPLPVDDILQSLLGTTGQVYDQAQSVMEQNTVKEIPFLNEQTNSKIEKTDNVEVTDGENKEIKVKVDNISESTDKSAEIETSVVGSSSISAGSLTSLSLRGKPPDVSTEAFLTNLSIQSKQEETVESKEK

SEQ ID NO: 17561 - protein, 241 aa, Homo sapiens
GRKRVASPPGLQSPASHSAPGRVQPPAASSLPPLPASTQPKAPKGKSAGREKKVIHPYSRKAAQITREAHKQEKKEKLKNEKALRLNLVGEKLQWFQNHLDPQKKRYSKKDACELIERYLNRFSSELEQIELHNSIRDRQGRRHCSRETVIKQTMERERQQFEGYGLEIPDILNASNLKTFREWDFDLKKLPNIKMRKICANDAIPKTCKRKTIITVDQDLGELELNDESSDSDEEMTAVA

SEQ ID NO: 17562 - protein, 334 aa, Homo sapiens
MMVREFNGQHFILEEAITGDFALVKAWKADRAGNVIFRKSARNFNLPMCKAAETTVVEVEEIVDIGAFAPEDIHIPQIYVHRLIKGEKYEKRIERLSIRKEGDGEAKSAKPGDDVRERIIKRAALEFEDGMYANLGIGIPLLASNFISPNITVHLQSENGVLGLGPYPRQHEADADLINAGKETVTILPGASFFSSDESFAMIRGGHVDLTMLGAMQVSKYGDLANWMIPGKMVKGMGGAMDLVSSAKTKVVVTMEHSAKGNAHKIMEKCTLPLTGKQCVNRIITEKAVFDVDKKKGLTLIELWEGLTVDDVQKSTGCDFAVSPKLMPMQQIAN

SEQ ID NO: 17563 - protein, 1250 aa, Homo sapiens
MKPPQQSLYLLVDSVDEGCNITEGEQTSTSLSGTVAALLAGHHEFFPPWLLLLCSARKQSKAVTKMFTGFRKISLDDLRKAYIVKDVQQYILHRLDQEEALRQHLTKETAEMLNQLHIKSSGCFLYLERVLDGVVENFIMLREIRDIPGTLNGLYLWLCQRLFVRKQFAKVQPILNVILAACRPLTITELYHAVWTKNMSLTLEDFQRKLDILSKLLVDGLGNTKILFHYSFAEWLLDVKHCTQKYLCNAAEGHRMLAMSYTCQAKNLTPLEAQEFALHLINSNLQLETAELALWMIWNGTPVRDSLSTLIPKEQEVLQLLVKAGAHVNSEDDRTSCIVRQALEREDSIRTLLDNGASVNQCDSNGRTLLANAAYSGSLDVVNLLVSRGADLEIEDAHGHTPLTLAARQGHTKVVNCLIGCGANINHTDQDGWTALRSAAWGGHTEVVSALLYAGVKVDCADADSRTALRAAAWGGHEDIVLNLLQHGAEVNKADNEGRTALIAAAYMGHREIVEHLLDHGAEVNHEDVDGRTALSVAALCVPASKGHASVVSLLIDRGAEVDHCDKDGMTPLLVAAYEGHVDVVDLLLEGGADVDHTDNNGRTPLLAAASMGHASVVNTLLFWGAAVDSIDSEGRTVLSIASAQGNVEVVRTLLDRGLDENHRDDAGWTPLHMAAFEGHRLICEALIEQGARTNEIDNDGRIPFILASQEGHYDCVQILLENKSNIDQRGYDGRNALRVAALEGHRDIVELLFSHGADVNCKDADGRPTLYILALENQLTMAEYFLENGANVEASDAEGRTALHVSCWQGHMEMVQVLIAYHADVNAADNEKRSALQSAAWQGHVKVVQLLIEHGAVVDHTCNQGATALCIAAQEGHIDVVQVLLEHGADPNHADQFGRTAMRVAAKNGHSQIIKLLEKYGASSLNGCSPSPVHTMEQKPLQSLSSKVQSLTIKSNSSGSTGGGDMQPSLRGLPNGPTHAFSSPSESPDSTVDRQKSSLSNNSLKSSKNSSLRTTSSTATAQTVPIDSFHNLSFTEQIQQHSLPRSRSRQSIVSPSSTTQSLGQSHNSPSSEFEWSQVKPSLKSTKASKGGKSENSAKSGSAGKKAKQSNSSQPKVLEYEMTQFDRRGPIAKSGTAAPPKQMPAESQCKIMIPSAQQEIGRSQQQFLIHQQSGEQKKRNGIMTNPNYHLQSNQVFLGRVSVPRTMQDRGHQEVLEGYPSSETELSLKQALKLQIEGSDPSFNYKKETPL

SEQ ID NO: 17564 - protein, 44 aa, Homo sapiens
MEADIITNLRCRLKEAEEERLKAAQVMNKKNIPFKEKLNSRVEC

SEQ ID NO: 17565 - protein, 704 aa, Homo sapiens
MGDEDWEAEINPHMSSYVPIFEKDRYSGENGDNFNRTPASSSEMDDGPSRRDHFMKSGFASGRNFGNRDAGECNKRDNTSTMGGFGVGKSFGNRGFSNSRFEDGDSSGFWRGYRDGNNSEASGPYRRGGRGSFRGCRGGFGLGSPNNDLDPDECMQRTGGLFGSRRPVLSGTGNGDTSQSRSGSGSERGGYKGLNEEVITGSGKNSWKSEAEGGESSDTQGPKVTYIPPPPPEDEDSIFAHYQTGINFDKYDTILVEVSGHDAPPAILTFEEANLCQTLNNNIAKAGYTKLTPVQKYSIPIILAGRDLMACAQTGSGKTAAFLLPILAHMMHDGITASRFKELQEPECIIVAPTRELVNQIYLEARKFSFGTCVRAVVIYGGTQLGHSIRQIVQGCNILCATPGRLMDIIGKEKIGLKQIKYLVLDEADRMLDMGFGPEMKKLISCPGMPSKEQRQTLMFSATFPEEIQRLAAEFLKSNYLFVAVGQVGGACRDVQQTVLQVGQFSKREKLVEILRNIGDERTMVFVETKKKADFIATFLCQEKISTTSIHGDREQREREQALGDFRFGKCPVLVATSVAARGLDIENVQHVINFDLPSTIDEYVHRIGRTGRCGNTGRAISFFDLESDNHLAQPLVKVLTDAQQDVPAWLEEIAFSTYIPGFSGSTRGNVFASVDTRKGKSTLNTAGFSSSQAPNPVDDESWD

SEQ ID NO: 17566 - protein, 409 aa, Homo sapiens
MKNASPETREGVIRESYLKGHDQLVPVTLLAIAVILAFVMGAVFSGITVYCVCDHRRKDVAVVQRKEKELTHSRRGSMSSVTKLSGLFGDTQSKDPKPEAILTPLMHNGKLATPGNTAKMLIKADQHHLDLTALPTPESTPTLQQKRKPSRGSREWERNQNLINACTKDMPPMGSPVIPTDLPLRASPSHIPSVVVLPITQQGYQHEYVDQPKMSEVAQMALEDQAATLEYKTIKEHLSSKSPNHGVNLVENLDSLPPKVPQREASLGPPGASLSQTGLSKRLEMHHSSSYGVDYKRSYPTNSLTRSHQATTLKRNNTNSSNSSHLSRNQSFGRGDNPPPAPQRVDSIQVHSSQPSGQAVTVSRQPSLNAYNSLTRSGLKRTPSLKPDVPPKPSFAPLSTSMKPNDACT

SEQ ID NO: 17567 - protein, 118 aa, Homo sapiens
MFPPSGSTGLIPPSHFQARPLSTLPRMAPTWLSDIPLVQPPGHQDVSERRLDTQRPQVTMWERDVSSDRQEPGRRGRSWGLEGSQALSQQAEVIVRQLQELRRLEEEVRLLRETSLQQ

SEQ ID NO: 17568 - protein, 236 aa, Homo sapiens
MVPWVRTMGQKLKQRLRLDVGREICRQYPLFCFLLLCLSAASLLLNRYIHILMIFWSFVAGVVTFYCSLGPDSLLPNIFFTIKYKPKLGLQELFPQGHSCAVCGKVKCKRHRPSLLLENYQPWLDLKISSKVDASLSEVLELVLENFVYPWYRDVTDDESFVDELRITLRFFASVLIRRIHKVDIPSIITKKLLKAAMKHIEVIVKARQKVKNTEFLQQAALEEYGPELHVALRSR

SEQ ID NO: 17569 - protein, 827 aa, Homo sapiens
MNSPVDPGARQALRKKPPERTPEDLNTIYSYLHGMEILSNLREHQLRLMSARARYERYSGNQVLFCSETIARCWYILLSGSVLVKGSMVLPPCSFGKQFGGKRGCDCLVLEPSEMIVVENAKDNEDSILQREIPARQSRRRFRKINYKGERQTITDDVEVNSYLSLPADLTKMHLTENPHPQVTHVSSSQSGCSIASDSGSSSLSDIYQATESEVGDVDLTRLPEGPVDSEDDEEEDEEIDRTDPLQGRDLVRECLEKEPADKTDDDIEQLLEFMHQLPAFANMTMSVRRELCSVMIFEVVEQAGAIILEDGQELDSWYVILNGTVEISHPDGKVENLFMGNSFGITPTLDKQYMHGIVRTKVDDCQFVCIAQQDYWRILNHVEKNTHKVEEEGEIVMVHEHRELDRSGTRKGHIVIKATPERLIMHLIEEHSIVDPTYIEDFLLTYRTFLESPLDVGIKLLEWFKIDSLRDKVTRIVLLWVNNHFNDFEGDPAMTRFLEEFEKNLEDTKMNGHLRLLNIACAAKAKWRQVVLQKASRESPLQFSLNGGSEKGFGIFVEGVEPGSKAADSGLKRGDQIMEVNGQNFENITFMKAVEILRNNTHLALTVKTNIFVFKELLFRTEQEKSGVPHIPKIAEKKSNRHSIQHVPGDIEQTSQEKGSKKVKANTVSGGRNKIRKILDKTRFSILPPKLFSDGGLSQSQDDSIVGTRHCRHSLAIMPIPGTLSSSSPDLLQPTTSMLDFSNPSDIPDQVIRVFKVDQQSCYIIISKDTTAKEVVFHAVHEFGLTGASDTYSLCEVSVTPEGVIKQRRLPDQFSKLADRIQLNGR

SEQ ID NO: 17570 - protein, 472 aa, Homo sapiens
MPQTPPFSAMFDSSGYNRNLYQSAEDSCGGLYYHDNNLLSGSLEALIQHLVPNVDYYPDRTYIFTFLLSSRLFMHPYELMAKVCHLCVEHQRLSDPDSDKNQMRKIAPKILQLLTEWTETFPYDFRDERMMRNLKDLAHRIASGEETYRKNVQQMMQCLIRKLAALSQYEEVLAKISSTSTDRLTVLKTKPQSIQRDIITVCNDPYTLAQQLTHIELERLNYIGPEEFVQAFVQKDPLDNDKSCYSERKKTRNLEAYVEWFNRLSYLVATEICMPVKKKHRARMIEYFIDVARECFNIGNFNSLMAIISGMNMSPVSRLKKTWAKVKTAKFDILEHQMDPSSNFYNYRTALRGAAQRSLTAHSSREKIVIPFFSLLIKDIYFLNEGCANRLPNGHVNFEKFWELAKQVSEFMTWKQVECPFERDRKILQYLLTVPVFSEDALYLASYESEGPENHIEKDRWKSLRSSLLGRV

SEQ ID NO: 17571 - protein, 567 aa, Homo sapiens
MRDDTEDPNYLMANERMNLMNMAKLSIKGLIESALNLGRTLDSDYAPLQQFFVVMEHCLKHGLKAKKTFLGQNKSFWGPLELVEKLVPEAAEITASVKDLPGLKTPVGRGRAWLRLALMQKKLSEYMKALINKKELLSEFYEPNALMMEEEGAIIAGLLVGLNVIDANFCMKGEDLDSQVGVIDFSMYLKDGNSSKGTEGDGQITAILDQKNYVEELNRHLNATVNNLQAKVDALEKSNTKLTEELAVANNRIITLQEEMERVKEESSYILESNRKGPKQDRTAEGQALSEARKHLKEETQLRLDVEKELEMQISMRQEMELAMKMLEKDVCEKQDALVSLRQQLDDLRALKHELAFKLQSSDLGVKQKSELNSRLEEKTNQMAATIKQLEQRLRQAERSRQSAELDNRLFKQDFGDKINSLQLEVEELTRQRNQLELELKQEKERRLQNDRSIPGRGSQKSESKMDGKHKMQEENVKLKKPLEESHRLQPHPMDEQDQLLLSEKPQLCQLCQEDGSLTKNVCKNCSGTFCDACSTNELPLPSSIKLERVCNPCHKHLMKQYSTSPS

SEQ ID NO: 17572 - protein, 1005 aa, Homo sapiens
MKQSPALAPEERCRRAGSPKPVLRADDNNMGNGCSQKLATANLLRFLLLVLIPCICALVLLLVILLSYVGTLQKVYFKSNGSEPLVTDGEIQGSDVILTNTIYNQSTVVSTAHPDQHVPAWTTDASLPGDQSHRNTSACMNITHSQCQMLPYHATLTPLLSVVRNMEMEKFLKFFTYLHRLSCYQHIMLFGCTLAFPECIIDGDDSHGLLPCRSFCEAAKEGCESVLGMVNYSWPDFLRCSQFRNQTESSNVSRICFSPQQENGKQLLCGRGENFLCASGICIPGKLQCNGYNDCDDWSDEAHCNCSENLFHCHTGKCLNYSLVCDGYDDCGDLSDEQNCACHSQGLVECRNGQCIPSTFQCDGDEDCKDGSDEENCSVIQTSCQEGDQRCLYNPCLDSCGGSSLCDPNNSLNNCSQCEPITLELCMNLPYNSTSYPNYFGHRTQKEASISWESSLFPALVQTNCYKYLMFFSCTILVPKCDVNTGEHIPPCRALCEHSKERCESVLGIVGLQWPEDTDCSQFPEENSDNQTCLMPDEYVEECSPSHFKCRSGQCVLASRRCDGQADCDDDSDEENCGCKERDLWECPSNKQCLKHTVICDGFPDCPDYMDEKNCSFCQDDELECANHACVSRDLWCDGEADCSDSSDEWDCVTLSINVNSSSFLMVHRAATEHHVCADGWQEILSQLACKQMGLGEPSVTKLIQEQEKEPRWLTLHSNWESLNGTTLHELLVNGQSCESRSKISLLCTKQDCGRRPAARMNKRILGGRTSRPGRWPWQCSLQSEPSGHICGCVLIAKKWVLTVAHCFEGRENAAVWKVVLGINNLDHPSVFMQTRFVKTIILHPRYSRAVVDYDISIVELSEDISETGYVRPVCLPNPEQWLEPDTYCYITGWGHMGNKMPFKLQEGEVRIISLEHCQSYFDMKTITTRMICAGYESGTVDSCMGDSGGPLVCEKPGGRWTLFGLTSWGSVCFSKVLGPGVYSNVSYFVEWIKRQIYIQTFLLN

SEQ ID NO: 17573 - protein, 632 aa, Homo sapiens
MNQSGTNQSSLSDSNQAGINQPSTNSLGMNQMDMNQGSASLYEMNQVDMKQPSMSQAGMRQSGTNLPDINQPDMKQPDTWQLGRSQPGMLQQELSQLVLSKAGISQPDPSQPGPSQSGPSQSRMRQIGTNQSGMSQPVMQQLDSQSGGSQPSMRQVGTSQLGTSQIGMSQPGTWQTGLSQPVLRQPNMSPPGMWQPGVQQPGISQQVPSHPDMSQPGMSQQVPSQPGIRQPDTSQSCKNQTDMSQPDANQSSLSDSNQTGIIQPSPSLLGMNQMDMNQWSASLYEMNQVDMKQPSMSQAGMRQSGTNLPDINQPGMKQPGTWQLGRSQPGMWPQSLSELVLSEASISQPGPPQRAPSQSGPRQSSTSQAGTNQSGISQPVMWQLDMRQSGGSQPSMRQVGTSQSGTSQIGMSQPGTWQTGLSQPVPRQPNKSPPGMWQRGMWQPGMSQQVPSQLGMRQPGTSQSSKNQTGMSHPGRGQPGIWEPGPSQPGLSQQDLNQLVLSQPGLSQPGRSQPSVSQMGMRQTSMDYFQIRHAEAGDCPEILRLIKELAACENMLDAMELTAADLLRDGFGDNPLFYCLIAEVNDQQKPSGKLTVGFAMYYFTYDSWTGKVLYLEDFYVTQAYQDSHHNSM

SEQ ID NO: 17574 - protein, 902 aa, Homo sapiens
MAVYTYLRLIVDHHGTAQLQALRQKEVDFCISLLRERFMECLMIGRDLVRLLQNVARIPEFELLWKDIIHNPQALSPQFTGILQLLQSRTSRKFLACRLTPDMETKLLFMTSRVRFGQQKRYQDWFQRQYLSTPDSQSLRCDLIRYICGVVHPSNEVLSSDILPRWAIIGWLLTTCTSNVAASNAKLALFYDWLFFSPDKDSIMNIEPAILVMHHSMKPHPAITATLLDFMCRIIPNFYPPLEGHVRQGVFSSLNHIVEKRVLAHLAPLFDNPKLDKELRAMLREKFPEFCSSPSPPVEVKIEEPVSMEMDNHMSDKDESCYDNAEAAFSDDEEDLNSKGKKREFRFHPIKETVVEEPVDITPYLDQLDESLRDKVLQLQKGSDTEAQCEVMQEIVDQVLEEDFDSEQLSVLASCLQELFKAHFRGEVLPEEITEESLEESVGKPLYLIFRNLCQMQEDNSSFSLLLDLLSELYQKQPKIGYHLLYYLRASKAAAGKMNLYESFAQATQLGDLHTCLMMDMKACQEDDVRLLCHLTPSIYTEFPDETLRSGELLNMIVAVIDSAQLQELVCHVMMGNLVMFRKDSVLNILIQSLDWETFEQYCAWQLFLAHNIPLETIIPILQHLKYKEHPEALSCLLLQLRREKPSEEMVKMVLSRPCHPDDQFTTSILRHWCMKHDELLAEHIKSLLIKNNSLPRKRQSLRSSSSKLAQLTLEQILEHLDNLRLNLTNTKQNCMPSTLGVQCRRCCPGPDYAWSQAGGRGRTPGATTHTRDKTTCACCLISSQTSDCFSFPALPFLPLVFSQTPILQALQHVQASCDEAHKMKFSDLFSLAEEYEDSSTKPPKSRRKAALSSPRSRKNATQPPNAEEESGSSSASEEEDTKPKPTKRKRKGSSAVGSDSD

SEQ ID NO: 17575 - protein, 979 aa, Homo sapiens
MVYRDDYFIRHSISVSAVIVRAWITHKYSGRDWNVKWEENLLHAVAKNYTLLQTIPPFERPFKDHQVCLEWNMGYIWNLRANRIPQCPLENDVVALLGFPYASSGENTGIVKKFPRFRNRELEATRRQRMDYPVFTVSLWLYLLHYCKANLCGILYFVDSNEMYGTPSVFLTEEGYLHIQMHLVKGEDLAVKTKFIIPLKEWFRLDISFNGGQIVVTTSIGQDLKSYHNQTISFREDFHYNDTAGYFIIGGSRYVAGIEGFFGPLKYYRLRSLHPAQIFNPLLEKQLAEQIKLYYERCAEVQEIVSVYASAAKHGGERQEACHLHNSYLDLQRRYGRPSMCRAFPWEKELKDKHPSLFQALLEMDLLTVPRNQNESVSEIGGKIFEKAVKRLSSIDGLHQISSIVPFLTDSSCCGYHKASYYLAVFYETGLNVPRDQLQGMLYSLVGGQGSERLSSMNLGYKHYQGIDNYPLDWELSYAYYSNIATKTPLDQHTLQGDQAYVETIRLKDDEILKVQTKEDGDVFMWLKHEATRGNAAAQQRLAQMLFWGQQGVAKNPEAAIEWYAKGALETEDPALIYDYAIVLFKGQGVKKNRRLALELMKKAASKGLHQAVNGLGWYYHKFKKNYAKAAKYWLKAEEMGNPDASYNLGVLHLDGIFPGVPGRNQTLAGEYFHKAAQGGHMEGTLWCSLYYITGNLETFPRDPEKAVVWAKHVAEKNGYLGHVIRKGLNAYLEGSWHEALLYYVLAAETGIEVSQTNLAHICEERPDLARRYLGVNCVWRYYNFSVFQIDAPSFAYLKMGDLYYYGHQNQSQDLELSVQMYAQAALDGDSQGFFNLALLIEEGTIIPHHILDFLEIDSTLHSNNISILQELYERCWSHSNEESFSPCSLAWLYLHLRLLWGAILHSALIYFLGTFLLSILIAWTVQYFQSVSASDPPPRPSQASPDTATSTASPAVTPAADASDQDQPTVTNNPEPRG

SEQ ID NO: 17576 - protein, 2023 aa, Homo sapiens
MIQEEQIQLEGSLVDGPEASLMEQDRTNHVEGNRLSPFLIPSPPICQTEPLATKLQNGSPLPERAHPEVNGDTKWHSFKSYYGIPCMKGSQNSRVSPDFTQESRGYSKCLQNGGIKRTVSEPSLSGLLQIKKLKQDQKANGERRNFGVSQERNPGESSQPNVSDLSDKKESVSSVAQENAVKDFTSFSTHNCSGPENPELQILNEQEGKSANYHDKNIVLLKNKAVLMPNGATVSASSVEHTHGELLEKTLSQYYPDCVSIAVQKTTSHINAINSQATNELSCEITHPSHTSGQINSAQTSNSELPPKPAAVVSEACDADDADNASKLAAMLNTCSFQKPEQLQQQKSVFEICPSPAENNIQGTTKLASGEEFCSGSSSNLQAPGGSSERYLKQNEMNGAYFKQSSVFTKDSFSATTTPPPPSQLLLSPPPPLPQVPQLPSEGKSTLNGGVLEEHHHYPNQSNTTLLREVKIEGKPEAPPSQSPNPSTHVCSPSPMLSERPQNNCVNRNDIQTAGTMTVPLCSEKTRPMSEHLKHNPPIFGSSGELQDNCQQLMRNKEQEILKGRDKEQTRDLVPPTQHYLKPGWIELKAPRFHQAESHLKRNEASLPSILQYQPNLSNQMTSKQYTGNSNMPGGLPRQAYTQKTTQLEHKSQMYQVEMNQGQSQGTVDQHLQFQKPSHQVHFSKTDHLPKAHVQSLCGTRFHFQQRADSQTEKLMSPVLKQHLNQQASETEPFSNSHLLQHKPHKQAAQTQPSQSSHLPQNQQQQQKLQIKNKEEILQTFPHPQSNNDQQREGSFFGQTKVEECFHGENQYSKSSEFETHNVQMGLEEVQNINRRNSPYSQTMKSSACKIQVSCSNNTHLVSENKEQTTHPELFAGNKTQNLHHMQYFPNNVIPKQDLLHRCFQEQEQKSQQASVLQGYKNRNQDMSGQQAAQLAQQRYLIHNHANVFPVPDQGGSHTQTPPQKDTQKHAALRWHLLQKQEQQQTQQPQTESCHSQMHRPIKVEPGCKPHACMHTAPPENKTWKKVTKQENPPASCDNVQQKSIIETMEQHLKQFHAKSLFDHKALTLKSQKQVKVEMSGPVTVLTRQTTAAELDSHTPALEQQTTSSEKTPTKRTAASVLNNFIESPSKLLDTPIKNLLDTPVKTQYDFPSCRCVEQIIEKDEGPFYTHLGAGPNVAAIREIMEERFGQKGKAIRIERVIYTGKEGKSSQGCPIAKWVVRRSSSEEKLLCLVRERAGHTCEAAVIVILILVWEGIPLSLADKLYSELTETLRKYGTLTNRRCALNEERTCACQGLDPETCGASFSFGCSWSMYYNGCKFARSKIPRKFKLLGDDPKEEEKLESHLQNLSTLMAPTYKKLAPDAYNNQIEYEHRAPECRLGLKEGRPFSGVTACLDFCAHAHRDLHNMQNGSTLVCTLTREDNREFGGKPEDEQLHVLPLYKVSDVDEFGSVEAQEEKKRSGAIQVLSSFRRKVRMLAEPVKTCRQRKLEAKKAAAEKLSSLENSSNKNEKEKSAPSRTKQTENASQAKQLAELLRLSGPVMQQSQQPQPLQKQPPQPQQQQRPQQQQPHHPQTESVNSYSASGSTNPYMRRPNPVSPYPNSSHTSDIYGSTSPMNFYSTSSQAAGSYLNSSNPMNPYPGLLNQNTQYPSYQCNGNLSVDNCSPYLGSYSPQSQPMDLYRYPSQDPLSKLSLPPIHTLYQPRFGNSQSFTSKYLGYGNQNMQGDGFSSCTIRPNVHHVGKLPPYPTHEMDGHFMGATSRLPPNLSNPNMDYKNGEHHSPSHIIHNYSAAPGMFNSSLHALHLQNKENDMLSHTANGLSKMLPALNHDRTACVQGGLHKLSDANGQEKQPLALVQGVASGAEDNDEVWSDSEQSFLDPDIGGVAVAPTHGSILIECAKRELHATTPLKNPNRNHPTRISLVFYQHKSMNEPKHGLALWEAKMAEKAREKEEECEKYGPDYVPQKSHGKKVKREPAEPHETSEPTYLRFIKSLAERTMSVTTDSTVTTSPYAFTRVTGPYNRYI

SEQ ID NO: 17577 - protein, 2239 aa, Homo sapiens
MDEEEDGAGAEESGQPRSFMRLNDLSGAGGRPGPGSAEKDPGSADSEAEGLPYPALAPVVFFYLSQDSRPRSWCLRTVCNPWFERISMLVILLNCVTLGMFRPCEDIACDSQRCRILQAFDDFIFAFFAVEMVVKMVALGIFGKKCYLGDTWNRLDFFIVIAGMLEYSLDLQNVSFSAVRTVRVLRPLRAINRVPSMRILVTLLLDTLPMLGNVLLLCFFVFFIFGIVGVQLWAGLLRNRCFLPENFSLPLSVDLERYYQTENEDESPFICSQPRENGMRSCRSVPTLRGDGGGGPPCGLDYEAYNSSSNTTCVNWNQYYTNCSAGEHNPFKGAINFDNIGYAWIAIFQVITLEGWVDIMYFVMDAHSFYNFIYFILLIIVGSFFMINLCLVVIATQFSETKQRESQLMREQRVRFLSNASTLASFSEPGSCYEELLKYLVYILRKAARRLAQVSRAAGVRVGLLSSPAPLGGQETQPSSSCSRSHRRLSVHHLVHHHHHHHHHYHLGNGTLRAPRASPEIQDRDANGSRRLMLPPPSTPALSGAPPGGAESVHSFYHADCHLEPVRCQAPPPRSPSEASGRTVGSGKVYPTVHTSPPPETLKEKALVEVAASSGPPTLTSLNIPPGPYSSMHKLLETQSTGACQSSCKISSPCLKADSGACGPDSCPYCARAGAGEVELADREMPDSDSEAVYEFTQDAQHSDLRDPHSRRQRSLGPDAEPSSVLAFWRLICDTFRKIVDSKYFGRGIMIAILVNTLSMGIEYHEQPEELTNALEISNIVFTSLFALEMLLKLLVYGPFGYIKNPYNIFDGVIVVISVWEIVGQQGGGLSVLRTFRLMRVLKLVRFLPALQRQLVVLMKTMDNVATFCMLLMLFIFIFSILGMHLFGCKFASERDGDTLPDRKNFDSLLWAIVTVFQILTQEDWNKVLYNGMASTSSWAALYFIALMTFGNYVLFNLLVAILVEGFQAEEISKREDASGQLSCIQLPVDSQGGDANKSESEPDFFSPSLDGDGDRKKCLALVSLGEHPELRKSLLPPLIIHTAATPMSLPKSTSTGLGEALGPASRRTSSSGSAEPGAAHEMKSPPSARSSPHSPWSAASSWTSRRSSRNSLGRAPSLKRRSPSGERRSLLSGEGQESQDEEESSEEERASPAGSDHRHRGSLEREAKSSFDLPDTLQVPGLHRTASGRGSASEHQDCNGKSASGRLARALRPDDPPLDGDDADDEGNLSKGERVRAWIRARLPACCLERDSWSAYIFPPQSRFRLLCHRIITHKMFDHVVLVIIFLNCITIAMERPKIDPHSAERIFLTLSNYIFTAVFLAEMTVKVVALGWCFGEQAYLRSSWNVLDGLLVLISVIDILVSMVSDSGTKILGMLRVLRLLRTLRPLRVISRAQGLKLVVETLMSSLKPIGNIVVICCAFFIIFGILGVQLFKGKFFVCQGEDTRNITNKSDCAEASYRWVRHKYNFDNLGQALMSLFVLASKDGWVDIMYDGLDAVGVDQQNFHKCRQHQEEEEARRREEKRLRRLEKKRRSKEKQMAEAQCKPYYSDYSRFRLLVHHLCTSHYLDLFITGVIGLNVVTMAMEHYQQPQILDEALKICNYIFTVIFVLESVFKLVAFGFRRFFQDRWNQLDLAIVLLSIMGITLEEIEVNASLPINPTIIRIMRVLRIARVLKLLKMAVGMRALLDTVMQALPQVGNLGLLFMLLFFIFAALGVELFGDLECDETHPCEGLGRHATFRNFGMAFLTLFRVSTGDNWNGIMKDTLRDCDQESTCYNTVISPIYFVSFVLTAQFVLVNVVIAVLMKHLEESNKEAKEEAELEAELELEMKTLSPQPHSPLGSPFLWPGVEGPDSPDSPKPGALHPAAHARSASHFSLEHPTMQPHPTELPGPDLLTVRKSGVSRTHSLPNDSYMCRHGSTAEGPLGHRGWGLPKAQSGSVLSVHSQPADTSYILQLPKDAPHLLQPHSAPTWGTIPKLPPPGRSPLAQRPLRRQAAIRTDSLDVQGLGSREDLLAEVSGPSPPLARAYSFWGQSSTQAQQHSRSHSKISKHMTPPAPCPGPEPNWGKGPPETRSSLELDTELSWISGDLLPPGGQEEPPSPRDLKKCYSVEAQSCQRRPTSWLDEQRRHSIAVSCLDSGSQPHLGTDPSNLGGQPLGGPGSRPKKKLSPPSITIDPPESQGPRTPPSPGICLRRRAPSSDSKDPLASGPPDSMAASPSPKKDVLSLSGLSSDPADLDP

SEQ ID NO: 17578 - protein, 443 aa, Homo sapiens
MSTELFSSTREEGSSGSGPSFRSNQRKMLNLLLERDTSFTVCPDVPRTPVGKFLGDSANLSILSGGTPKRCLDLSNLSSGEITATQLTTSADLDETGHLDSSGLQEVHLAGMNHDQHLMKCSPDNGNLVDSEMKYLGSPITTVPKLDKNPNLGEDQAEEISDELMEFSLKDQEAKVSRSGLYRSPSMPENLNRPRLKQVEKFKDNTIPDKVKKKYFSGQGKLRKGLCLKKTVSLCDITITQMLEEDSNQGHLIGDFSKVCALPTVSGKHQDLKYVNPETVAALLSGKFQGLIEKFYVIDCRYPYEYLGGHIQGALNLYSQEELFNFFLKKPIVPLDTQKRIIIVFHCEFSSERGPRMCRCLREEDRSLNQYPALYYPELYILKGGYRDFFPEYMELCEPQSYCPMHHQDHKTELLRCRSQSKVQEGERQLREQIALLVKDMSP

SEQ ID NO: 17579 - protein, 611 aa, Homo sapiens
ATFKEFKMHEQIENEYIIGLLQQRSQTIYNVHSDNKLSEMLSLFEKGLKNVKVFQPMLMEYFTYEELKDIKKKVIAQHCSQKDTAELLRGLSLWNHAEERQKFFKYSVDEKSDKEAEVSEHSTGITHLPPEVMLSIFSYLNPQELCRCSQVSMKWSQLTKTGSLWKHLYPVHWARGDWYSGPATELDTEPDDEWVKNRKDESRAFHEWDEDADIDESEESAEESIAISIAQMEKRLLHGLIHNVLPYVGTSVKTLVLAYSSAVSSKMVRQILELCPNLEHLDLTQTDISDSAFDSWSWLGCCQSLRHLDLSGCEKITDVALEKISRALGILTSHQSGFLKTSTSKITSTAWKNKDITMQSTKQYACLHDLTNKGIGEEIDNEHPWTKPVSSENFTSPYVWMLDAEDLADIEDTVEWRHRNVESLCVMETASNFSCSTSGCFSKDIVGLRTSVCWQQHCASPAFAYCGHSFCCTGTALRTMSSLPESSAMCRKAARTRLPRGKDLIYFGSEKSDQETGRVLLFLSLSGCYQITDHGLRVLTLGGGLPYLEHLNLSGCLTITGAGLQDLVSACPSLNDEYFYYCDNINGPHADTASGCQNLQCGFRACCRSGE

SEQ ID NO: 17580 - protein, 777 aa, Homo sapiens
MRTLEDSSGTVLHRLIQEQLRYGNLTETRTLLAIQQQALRGGAGTGGTGSPQASLEILAPEDSQVLQQATRQEPQGQEHQGGENHLAENTLYRLCPQPSKGEELPTYEEAKAHSQYYAAQQAGTRPHAGDRDPRGAPGGSRRQDEALRELRHGHVRSLSERLLQLSLERNGARAPSHMSSSHSFPQLARNQQGPPLRGPPAEGPESRGPPPQYPHVVLAHETTTAVTDPRYRARGSPHFQHAEVRILQAQVPPVFLQQQQQYQYLQQSQEHPPPPHPAALGHGPLSSLSPPAVEGPVSAQASSATSGSAHLAQMEAVLRENARLQRDNERLQRELESSAEKAGRIEKLESEIQRLSEAHESLTRASSKREALEKTMRNKMDSEMRRLQDFNRDLRERLESANRRLASKTQEAQAGSQDMVAKLLAQSYEQQQEQEKLEREMALLRGAIEDQRRRAELLEQALGNAQGRAARAEEELRKKQAYVEKVERLQQALGQLQAACEKREQLELRLRTRLEQELKALRAQQAGAPGGSSGSGGSPELSALRLSEQLREKEEQILALEADMTKWEQKYLEERAMRQFAMDAAATAAAQRDTTLIRHSPQPSPSSSFNEGLLTGGHRHQEMESRLKVLHAQILEKDAVIKVLQQRSRRDPGKAIQGSLRPAKSVPSVFAAAAAGTQGWQGLSSSERQTADAPARLTTDRAPTEEPVVTAPPAAHAKHGSRDGSTQTEGPPDSTSTCLPPEPDSLLGCSSSQRAASLDSVATSRVQDLSDMVEILI

SEQ ID NO: 17581 - protein, 611 aa, Homo sapiens
MGKSEGPVGMVESAGRAGQKRPGFLEGGLLLLLLLVTAALVALGVLYADRRGKQLPRLASRLCFLQEERTFVKRKPRGIPEAQEVSEVCTTPGCVIAAARILQNMDPTTEPCDDFYQFACGGWLRRHVIPETNSRYSIFDVLRDELEVILKAVLENSTAKDRPAVEKARTLYRSCMNQSVIEKRGSQPLLDILEVVGGWPVAMDRWNETVGLEWELERQLALMNSQFNRRVLIDLFIWNDDQNSSRHIIYIDQPTLGMPSREYYFNGGSNRKVREAYLQFMVSVATLLREDANLPRDSCLVQEDMVQVLELETQLAKATVPQEERHDVIALYHRMGLEELQSQFGLKGFNWTLFIQTVLSSVKIKLLPDEEVVVYGIPYLQNLENIIDTYSARTIQNYLVWRLVLDRIGSLSQRFKDTRVNYRKALFGTMVEEVRWRECVGYVNSNMENAVGSLYVREAFPGDSKSMVRELIDKVRTVFVETLDELGWMDEESKKKAQEKAMSIREQIGHPDYILEEMNRRLDEEYSNLNFSEDLYFENSLQNLKVGAQRSLRKLREKVDPNLWIIGAAVVNAFYSPNRNQIAYSLSRPWGQYSLPGSSSPPSSARSSHRP

SEQ ID NO: 17582 - protein, 663 aa, Homo sapiens
MCPFMQFIEGGRRYQCGFCNCVNDVPPFYFQHLDHIGRRLDHYEKPELSLGSYEYVATLDYCRKSKPPNPPAFIFMIDVSYSNIKNGLVKLICEELKTMLEKIPKEEQEETSAIRVGFITYNKVLHFFNVKSNLAQPQMMVVTDVGEVFVPLLDGFLVNYQESQSVIHNLLDQIPDMFADSNENETVFAPVIQAGMEALKAADCPGKLFIFHSSLPTAEAPGKLKNRDDKKLVNTDKEKILFQPQTNVYDSLAKDCVAHGCSVTLFLFPSQYVDVASLGLVPQLTGGTLYKYNNFQMHLDRQQFLNDLRNDIEKKIGFDAIMRVRTSTGFRATDFFGGILMNNTTDVEMAAIDCDKAVTVEFKHDDKLSEDSGALIQCAVLYTTISGQRRLRIHNLGLNCSSQLADLYKSCETDALINFFAKSAFKAVLHQPLKVIREILVNQTAHMLACYRKNCASPSAASQLILPDSMKVLPVYMNCLLKNCVLLSRPEISTDERAYQRQLVMTMGVADSQLFFYPQLLPIHTLDVKSTMLPAAVRCSESRLSEEGIFLLANGLHMFLWLGVSSPPELIQGIFNVPSFAHINTDMTLLPEVGNPYSQQLRMIMGIIQQKRPYSMKLTIVKQREQPEMVFRQFLVEDKGLYGGSSYVDFLCCVHKEICQLLN

SEQ ID NO: 17583 - protein, 839 aa, Homo sapiens
MNKDYQKFWSSPSDPVHFEVDTSHEKVESMSESDTMNVSNLSQGVMLSHSPICMETTGTTCDLPQNEIKNFERENEYESTLCEDAYGTLDNLLNDNNIENYSTNALIQPVDTISISSLRQFETVCKFHWVEAFDDEMTEKPEFQSQVYNYAKDNNIKQDSFKEENPMETSVSANTDQLGNEYFRQPPPRSPPLIHCSGEMLKFTEKSLAKSIAKESALNPSQPPSFLCKTAVPSKEIQNYGEIPEMSVSYEKEVTAEGVERPEIVSTWSSAGISWRSEACRENCEMPDWEQSAESLQPVQEDMALNEVLQKLKHTNRKQEVRIQELQCSNLYLEKRVKELQMKITKQQVFIDVINKLKENVEELIEDKYKIILEKNDTKKTLQNLEEVLANTQKHLQESRNDKEMLQLQFKKIKANYVCLQERYMTEMQQKNKSVSQYLEMDKTLSKKEEEVERLQQLKKELEKATASALDLLKREKEAQEQEFLSLQEEFQKLEKENLEERQKLKSRLEKLLTQVRNLQFMSENERTKNIKLQQQINEVKNENAKLKQQVARSEEQNYVPKFETAQLKDQLEEVLKSDITKDTKTTHSNLLPDCSPCEERLNPADIKRASQLASKMHSLLALMVGLLTCQDIINSDAEHFKESEKVSDIMLQKLKSLHLKKKTLDKELLKHKDRITTFRELIAKEKAFQDHAIKVIDCDSDEAKSIRDVPTLLGAKLDKYHSLNEELDFLITKLGHLLESKENHCNRLIEENDKYQRHLGNLIKKVTSYEEIIECADQRLAISHSQIAHLEERNKHLEDLIRKPREKARKPRSKSLENHPKSMTMMPALFKENRNDLD

SEQ ID NO: 17584 - protein, 356 aa, Homo sapiens
MATTAAPAGGARNGAGPEWGGFEENIQEPLSSQGGGSAVIDMENMDDTSGSSFEDMGELHQRLREEEVDADAADAAAAEEEDGEFLGMKGFKGQLSRQVADQMWQAGKRQASRAFSLYANIDILRPYFDVEPAQVRSRLLESMIPIKMVNFPQKIAGELYGPLMLVFTLVAILLHGMKTSDTIIREGTLMGTAIGTCFGYWLGVSSFIYFLAYLCNAQITMLQMLALLGYGLFGHCIVLFITYNIHLHALFYLFWLLVGGLSTLRMVAVLVSRTVGPTQRLLLCGTLAALHMLFLLYLHFAYHKVVEGILDTLEGPNIPPIQRVPRDIPAMLPAARLPTTVLNATAKAVAVTLQSH

SEQ ID NO: 17585 - protein, 1154 aa, Homo sapiens
GDEVVSINGNPCADLTYPEVIKLMESITDSLQMLIKRPSSGISEALISENENKNLEHLTHGGYVESTTLQIRPATKTQCTEFFLAPVKTEVPLAENQRSGPDCAGSLKEETGPSYQRAPQMPDSQRGRVAEELILREKVEAVQPGPVVELQLSLSQERHKGASGPLVALPGAEKSKSPDPDPNLSHDRIVHINSIPTNEKADPFLRSSKIIQISSGRELRVIQESEAGDAGLPRVEVILDCSDRQKTEGCRLQAGKECVDSPVEGGQSEAPPSLVSFAVSSEGTEQGEDPRSEKDHSRPHKHRARHARLRRSESLSEKQVKEAKSKCKSIALLLTDAPNPNSKGVLMFKKRRRRARKYTLVSYGTGELEREADEEEEGDKEDTCEVAFLGASESEVDEELLSDVDDNTQVVNFDWDSGLVDIEKKLNRGDKMEMLPDTTGKGALMFAKRRERMDQITAQKEEDKVGGTPSREQDAAQTDGLRTTTSYQRKEEESVRTQSSVSKSYIEVSHGLGHVPQQNGFSGTSETANIQRMVPMNRTAKPFPGSVNQPATPFSPTRNMTSPIADFPAPPPYSAVTPPPDAFSRGVSSPIAGPAQPPPWPQPAPWSQPAFYDSSERIASRDERISVPAKRTGILQEAKRRSTTKPMFTFKEPKVSPNPELLSLLQNSEGKRGTGAGGDSGPEEDYLSLGAEACNFMQSSSAKQKTPPPVAPKPAVKSSSSQPVTPVSPVWSPGVAPTQPPAFPTSNPSKGTVVSSIKIAQPSYPPARPASTLNVAGPFKGPQAAVASQNYTPKPTVSTPTVNAVQPGAVGPSNELPGMSGRGAQLFAKRQSRMEKYVVDSDTVQAHAARAQSPTPSLPASWKYSSNVRAPPPVAYNPIHSPSYPLAALKSQPSAAQPSKMGKKKGKKPLNALDVMKHQPYQLNASLFTFQPPDAKDGLPQKSSVKVNSALAMKQALPPRPVNAASPTNVQASSVYSESGRSLSLPGRSVPPPISTSPWVYQPTYSYSSKPTDGLEKANKRPTPWEAAAKSPLGLVDDAFQPRNIQESIVANVVSAARRKVLPGPPEDWNERLSYIPQTQKAYMGSCGRQEYNVTANNNMSTTSQYGSQLPYAYYRQASRNDSAIMSMETRSDYCLPVADYNYNPHPRGWRRQT

SEQ ID NO: 17586 - protein, 693 aa, Homo sapiens
MLNNLLLFSLQISLIGTTLGGNVLIWPMEGSHWLNVKIIIDELIKKEHNVTVLVASGALFITPTSNPSLTFEIYKVPFGKERIEGVIKDFVLTWLENRPSPSTIWRFYQEMAKVIKDFHMVSQEICDGVLKNQQLMAKLKKSKFEVLVSDPVFPCGDIVALKLGIPFMYSLRFSPASTVEKHCGKVPYPPSYVPAVLSELTDQMSFTDRIRNFISYHLQDYMFETLWKSWDSYYSKALDGSHWLNIKIILEELIQRNHNVTVLASSATLFINSNPDSPVNFEVIPVSYKKSNIDSLIEHMIMLWIDHRPTPLTIWAFYKELGKLLDTFFQINIQLCDGVLKNPKLMARLQKGGFDVLVADPVTICGDLVALKLGIPFMYTLRFSPASTVERHCGKIPAPVSYVPAALSELTDQMTFGERIKNTISYSLQDYIFQSYWGEWNSYYSKILGRPTTLCETMGKAEIWLIRTYWDFEFPRPYLPNFEFVGGLHCKPAKPLPKVLWRYKGKKPATLGNNTQLFDWIPQNDLLGHPKTKAFITHGGTNGIYEAIYHGVPMVGVPMFADQPDNIAHMKAKGAAVEVNLNTMTSVDLLSALRTVINEPSYKENAMRLSRIHHDQPVKPLDRAVFWIEFVMRHKGAKHLRVAAHDLTWFQYHSLDVIGFLLVCVTTAIFLVIQCCLFSCQKFGKIGKKKKRE

SEQ ID NO: 17587 - protein, 169 aa, Homo sapiens
MKKMSNIYESAANTLGIFNSPCLTKVELRVACKGISDRDALSKPDPCVILKMQSHGQWFEVDRTEVIRTCINPVYSKLFTVDFYFEEVQRLRFEVHDISSNHNGLKEADFLGGMECTLGQIVSQRKLSKSLLKHGNTAGKSSITVIAEELSGNDDYVELAFNARKLDDK

SEQ ID NO: 17588 - protein, 602 aa, Homo sapiens
MAEASRWHRGGASKHKLHYRKEVEITTTLQELLLYFIFLINLCILTFGMVNPHMYYLNKVMSSLFLDTSVPGEERTNFKSIRSITDFWKFMEGPLLEGLYWDSWYNNQQLYNLKNSSRIYYENILLGVPRVRQLKVRNNTCKVYSSFQSLMSECYGKYTSANEDLSNFGLQINTEWRYSTSNTNSPWHWGFLGVYRNGGYIFTLSKSKSETKNKFIDLRLNSWITRGTRVIFIDFSLYNANVNLFCIIRLVAEFPATGGILTSWQFYSVKLLRYVSYYDYFIASCEITFCIFLFVFTTQEVKKIKEFKSAYFKSIWNWLELLLLLLLKSTEKYSDFYFLACWHIYYNNIIAITIFFAWIKIFKFISFNKTMSQLSSTLSRCVKDIVGFAIMFFIIFFAYAQLGFLVFGSQVDDFSTFQNSIFAQFRIVLGDFNFAGIQQANPILGPIYFITFIFFVFFVLLNMFLAIINDTYSEVKADYSIGRRLDFELGKMIKQSYKNVLEKFRLKKAQKDEDKKTKGSGDLAEQARREGFDENEIQNAEQMKKWKERLEKKYYSMEIQDDYQPVTQEEFRELFLYAVELEKELHYINLKLNQVVRKVSAL

SEQ ID NO: 17589 - protein, 291 aa, Homo sapiens
LCHQKSSSLPGTACLEQLLEPPPPPAEPARSPAESRAPETGEEHGSSQKIINTAGTSNAEVPLADPGMYQLDITLRRGQSLAARDRGGTSDPYVKFKIGGKEVFRSKIIHKNLNPVWEEKACILVDHLREPLYIKVFDYDFGLQDDFMGSAFLDLTQLELNRPTDVTLTLKDPHYPDHDLGIILLSVILTPKEGESRDVTMLMRKSWKRSSKFQTQSLRLSDLHRKSHLWRGIVSITLIEGRDLKAMDSNGLSDPYVKFRLGHQKYKSKIMPKTLNPQWREQFDFHLYEER

SEQ ID NO: 17590 - protein, 2306 aa, Homo sapiens
MDEEEDGAGAEESGQPRSFMRLNDLSGAGGRPGPGSAEKDPGSADSEAEGLPYPALAPVVFFYLSQDSRPRSWCLRTVCNPWFERISMLVILLNCVTLGMFRPCEDIACDSQRCRILQAFDDFIFAFFAVEMVVKMVALGIFGKKCYLGDTWNRLDFFIVIAGMLEYSLDLQNVSFSAVRTVRVLRPLRAINRVPSMRILVTLLLDTLPMLGNVLLLCFFVFFIFGIVGVQLWAGLLRNRCFLPENFSLPLSVDLERYYQTENEDESPFICSQPRENGMRSCRSVPTLRGDGGGGPPCGLDYEAYNSSSNTTCVNWNQYYTNCSAGEHNPFKGAINFDNIGYAWIAIFQVITLEGWVDIMYFVMDAHSFYNFIYFILLIIVGSFFMINLCLVVIATQFSETKQRESQLMREQRVRFLSNASTLASFSEPGSCYEELLKYLVYILRKAARRLAQVSRAAGVRVGLLSSPAPLGGQETQPSSSCSRSHRRLSVHHLVHHHHHHHHHYHLGNGTLRAPRASPEIQDRDANGSRRLMLPPPSTPALSGAPPGGAESVHSFYHADCHLEPVRCQAPPPRSPSEASGRTVGSGKVYPTVHTSPPPETLKEKALVEVAASSGPPTLTSLNIPPGPYSSMHKLLETQSTGACQSSCKISSPCLKADSGACGPDSCPYCARAGAGEVELADREMPDSDSEAVYEFTQDAQHSDLRDPHSRRQRSLGPDAEPSSVLAFWRLICDTFRKIVDSKYFGRGIMIAILVNTLSMGIEYHEQPEELTNALEISNIVFTSLFALEMLLKLLVYGPFGYIKNPYNIFDGVIVVISVWEIVGQQGGGLSVLRTFRLMRVLKLVRFLPALQRQLVVLMKTMDNVATFCMLLMLFIFIFSILGMHLFGCKFASERDGDTLPDRKNFDSLLWAIVTVFQILTQEDWNKVLYNGMASTSSWAALYFIALMTFGNYVLFNLLVAILVEGFQAEGDANKSESEPDFFSPSLDGDGDRKKCLALVSLGEHPELRKSLLPPLIIHTAATPMSLPKSTSTGLGEALGPASRRTSSSGSAEPGAAHEMKSPPSARSSPHSPWSAASSWTSRRSSRNSLGRAPSLKRRSPSGERRSLLSGEGQESQDEEESSEEERASPAGSDHRHRGSLEREAKSSFDLPDTLQVPGLHRTASGRGSASEHQDCNGKSASGRLARALRPDDPPLDGDDADDEGNLSKGERVRAWIRARLPACCLERDSWSAYIFPPQSRFRLLCHRIITHKMFDHVVLVIIFLNCITIAMERPKIDPHSAERIFLTLSNYIFTAVFLAEMTVKVVALGWCFGEQAYLRSSWNVLDGLLVLISVIDILVSMVSDSGTKILGMLRVLRLLRTLRPLRVISRAQGLKLVVETLMSSLKPIGNIVVICCAFFIIFGILGVQLFKGKFFVCQGEDTRNITNKSDCAEASYRWVRHKYNFDNLGQALMSLFVLASKDGWVDIMYDGLDAVGVDQQPIMNHNPWMLLYFISFLLIVAFFVLNMFVGVVVENFHKCRQHQEEEEARRREEKRLRRLEKKRRNLMLDDVIASGSSASAASEAQCKPYYSDYSRFRLLVHHLCTSHYLDLFITGVIGLNVVTMAMEHYQQPQILDEALKICNYIFTVIFVLESVFKLVAFGFRRFFQDRWNQLDLAIVLLSIMGITLEEIEVNASLPINPTIIRIMRVLRIARVLKLLKMAVGMRALLDTVMQALPQVGNLGLLFMLLFFIFAALGVELFGDLECDETHPCEGLGRHATFRNFGMAFLTLFRVSTGDNWNGIMKDTLRDCDQESTCYNTVISPIYFVSFVLTAQFVLVNVVIAVLMKHLEESNKEAKEEAELEAELELEMKTLSPQPHSPLGSPFLWPGVEGPDSPDSPKPGALHPAAHARSASHFSLEHPTIPLAEMEALSLTSEIVSEPSCSLALTDDSLPDDMHTLLLSALESNMQPHPTELPGPDLLTVRKSGVSRTHSLPNDSYMCRHGSTAEGPLGHRGWGLPKAQSGSVLSVHSQPADTSYILQLPKDAPHLLQPHSAPTWGTIPKLPPPGRSPLAQRPLRRQAAIRTDSLDVQGLGSREDLLAEVSGPSPPLARAYSFWGQSSTQAQQHSRSHSKISKHMTPPAPCPGPEPNWGKGPPETRSSLELDTELSWISGDLLPPGGQEEPPSPRDLKKCYSVEAQSCQRRPTSWLDEQRRHSIAVSCLDSGSQPHLGTDPSNLGGQPLGGPGSRPKKKLSPPSITIDPPESQGPRTPPSPGICLRRRAPSSDSKDPLASGPPDSMAASPSPKKDVLSLSGLSSDPADLDP

SEQ ID NO: 17591 - protein, 1234 aa, Homo sapiens
MRAVLTWRDKAEHCINDIAFKPDGTQLILAAGSRLLVYDTSDGTLLQPLKGHKDTVYCVAYAKDGKRFASGSADKSVIIWTSKLEGILKYTSWSVMSSLHLHLPFLGLHKTVRVTATDKAPKGQGGRIDCLRPSVQNQPGQKHNDAIQCVSYNPITHQLASCSSSDFGLWSPEQKSVSKHKSSSKIICCSWTNDGQYLALGMFNGIISIRNKNGEEKVKIERPGGSLSPIWSICWNPSREERNDILAVADWGQKVSFYQLSGKQIGKDRALNFDPCCISYFTKGEYILLGGSDKQVSLFTKDGVRLGTVGEQNSWVWTCQAKPDSNYVVVGCQDGTISFYQLIFSTVHGLYKDRYAYRDSMTDVIVQHLITEQKVRIKCKELVKKIAIYRNRLAIQLPEKILIYELYSEDLSDMHYRVKEKIIKKFECNLLVVCANHIILCQEKRLQCLSFSGVKEREWQMESLIRYIKVIGGPPGREGLLVGLKNGQILKIFVDNLFAIVLLKQATAVRCLDMSASRKKLAVVDENDTCLVYDIDTKELLFQEPNANSVAWNTQCEDMLCFSGGGYLNIKASTFPVHRQKLQGFVVGYNGSKIFCLHVFSISAVEVPQSAPMYQYLDRKLFKEAYQIACLGVTDTDWRELAMEALEGLDFETAKKAFIRVQDLRYLELISSIEERKKRGETNNDLFLADVFSYQGKFHEAAKLYKRSGHENLALEMYTDLCMFEYAKDFLGSGDPKETKMLITKQADWARNIKEPKAAVEMYISAGEHVKAIEICGDHGWVDMLIDIARKLDKAEREPLLLCATYLKKLDSPGYAAETYLKMGDLKSLVQLHVETQRWDEAFALGEKHPEFKDDIYMPYAQWLAENDRFEEAQKAFHKAGRQREAVQVLEQLTNNAVAESRFNDAAYYYWMLSMQCLDIAQADPAQKDTMLGKFYHFQRLAELYHGYHAIHRHTEDPFSVHRPETLFNISRFLLHSLPKDTPSGISKVKILFTLAKQSKALGAYRLARHAYDKLRGLYIPARFQKSIELGTLTIRAKPFHDSEELVPLCYRCSTNNPLLNNLGNVCINCRQPFIFSASSYDVLHLVEFYLEEGITDEEAISLIDLEVLRPKRDDRQLEIANNSSQILRLVETKDSIGDEDPFTAKLSFEQGGSEFVPVVVSRLVLRSMSRRDVLIKRWPPPLRWQYFRSLLPDASITMCPSCFQMFHSEDYELLVLQHGCCPYCRRCKDDPGP

SEQ ID NO: 17592 - protein, 1123 aa, Homo sapiens
MSGTSSHESFYDSLSDMQEESKNTDFFPGLSAFLSQEEINKSLDLARRAIADSETEDFDSEKEISQIFSTSPASLCEHPSHKETKLGEHASRRPQDNRSTPVQPLAEKQTKSISSPVSKRKPAMSPLLTRPSYIRSLRKAEKRGAKTPSTNVKPKTPHQRKGGPQSQLCDKAANLIEELTSIFKAAKPRNRSPNGESSSPDSGYLSPKNQPSALLSASASQSPMEDQGEMEREVKSPGARHCYQDNQDLAVPHNRKSHPQPHSALHFPAAPRFIQKLRSQEVAEGSRVYLECRVTGNPTPRVRWFCEGKELHNTPDIQIHCEGGDLHTLIIAEAFEDDTGRYTCLATNPSGSDTTSAEVFIEGASSTDSDSESLAFKSRAGAMPQAQKKTTSVSLTIGSSSPKTGVTTAVIQPLSVPVQQVHSPTSYLCRPDGTTTAYFPPVFTKELQNTAVAEGQVVVLECRVRGAPPLQVQWFRQGSEIQDSPDFRILQKKPRSTAEPEEICTLVIAETFPEDAGIFTCSARNDYGSATSTAQLVVTSANTENCSYESMGESNNDHFQHFPPPPPILETSSLELASKKPSEIQQVNNPELGLSRAALQMQFNAAERETNGVHPSRGVNGLINGKANSNKSLPTPAVLLSPTKEPPPLLAKPKLGFPKKASRTARIASDEEIQGTKDAVIQDLERKLRFKEDLLNNGQPRLTYEERMARRLLGADSATVFNIQEPEEETANQDIGSPHASVGSPLDGQKEYKVSSCEQRLISEIEYRLERSPVDESGDEVQYGDVPVENGMAPFFEMKLKHYKIFEGMPVTFTCRVAGNPKPKIYWFKDGKQISPKSDHYTIQRDLDGTCSLHTTASTLDDDGNYTIMAANPQGRISCTGRLMVQAVNQRGRSPRSPSGHPHVRRPRSRSRDSGDENEPIQERFFRPHFLQAPGDLTVQEGKLCRMDCKVSGLPTPDLSWQLDGKPVRPDSAHKMLVRENGVHSLIIEPVTSRDAGIYTCIATNRAGQNSFSLELVVAAKEAHKPPVFIEKLQNTGVADGYPVRLECRVLGVPPPQIFWKKENESLTHSTDRVSMHQDNHGYICLLIQGATKEDAGWYTVSAKNEAGIVSCTARLDVYISRH

SEQ ID NO: 17593 - protein, 550 aa, Homo sapiens
MPKEKYDPPDPRRIYTIMSAEEVANGKKSHWAELEISGRVRSLSTSLWSLTHLTALHLNDNYLSRIPPDIAKLHNLVYLDLSSNKLRSLPAELGNMVSLRELLLNNNLLRVLPYELGRLFQLQTLGLKGNPLSQDILNLYQDPDGTRKLLNFMLDNLAVHPEQLPPRPWITLKERDQILPSASFTVMCYNVLCDKYATRQLYGYCPSWALNWEYRKKGIMEEIVNCDADIISLQEVETEQYFTLFLPALKERGYDGFFSPKSRAKIMSEQERKHVDGCAIFFKTEKFTLVQKHTVEFNQVAMANSDGSEAMLNRVMTKDNIGVAVVLEVHKELFGAGMKPIHAADKQLLIVANAHMHWDPEYSDVKLIQTMMFVSEVKNILEKASSRPGSPTADPNSIPLVLCADLNSLPDSGVVEYLSNGGVADNHKDFKELRYNECLMNFSCNGKNGSSEGRITHGFQLKSAYENNLMPYTNYTFDFKGVIDYIFYSKTHMNVLGVLGPLDPQWLVENNITGCPHPHIPSDHFSLLTQLELHPPLLPLVNGVHLPNRR

SEQ ID NO: 17594 - protein, 316 aa, Homo sapiens
VFLCDHRFAFADARAQLPSWVRPHVRVYDNFGHVIRDVAQFFRVAERTMPAPAPRATAPSVRGEDAVSEAKSPGPFFSTRKAKSLDLHVPSLKQRSSGSPAAGDPESSLCVEYEQEPVPARQRPRGLLAALEHSEQRAGSPGEEQAHSCSTLSLLSEKRPAEEPRGGRKKIRLVSHPEEPVAGAQTDRAKLFMVAVKQELSQANFATFTQALQDYKGSDDFAALAACLGPLFAEDPKKHNLLQGFYQFVRPHHKQQFEEVCIQLTGRGCGYRPEHSIPRRQRAQPVLDPTGNFPDALDQLCGSTSLHQEERRRIPS

SEQ ID NO: 17595 - protein, 139 aa, Homo sapiens
MFPPSGSTGLIPPSHFQARPLSTLPRMAPTWLSDIPLVQPPGHQDVSERRLDTQRPQVTMWERDVSSDRQEPGRRGRSWGLEGSQALSQQAEVIVRQLQELRRLEEEVRLLRETSLQQKMRLEAQAMELEALARAEKAG

SEQ ID NO: 17596 - protein, 1473 aa, Homo sapiens
MGRRRRLCLQLYFLWLGCVVLWAQGTAGQPQPPPPKPPRPQPPPQQVRSATAGSEGGFLAPEYREEGAAVASRVRRRGQQDVLRGPNVCGSRFHSYCCPGWKTLPGGNQCIVLQQCSVRCMNGGTCADDHCQCQKGYIGTYCGQPVCENGCQNGGRCIGPNRCACVYGFTGPQCERDYRTGPCFTQVNNQMCQGQLTGIVCTKTLCCATIGRAWGHPCEMCPAQPQPCRRGFIPNIRTGACQDVDECQAIPGICQGGNCINTVGSFECRCPAGHKQSETTQKCEDIDECSIIPGICETGECSNTVGSYFCVCPRGYVTSTDGSRCIDQRTGMCFSGLVNGRCAQELPGRMTKMQCCCEPGRCWGIGTIPEACPVRGSEEYRRLCMDGLPMGGIPGSAGSRPGGTGGNGFAPSGNGNGYGPGGTGFIPIPGGNGFSPGVGGAGVGAGGQGPIITGLTILNQTIDICKHHANLCLNGRCIPTVSSYRCECNMGYKQDANGDCIDVDECTSNPCTNGDCVNTPGSYYCKCHAGFQRTPTKQACIDIDECIQNGVLCKNGRCVNTDGSFQCICNAGFELTTDGKNCVDHDECTTTNMCLNGMCINEDGSFKCICKPGFVLAPNGRYCTDVDECQTPGICMNGHCINSEGSFRCDCPPGLAVGMDGRVCVDTHMRSTCYGGIKKGVCVRPFPGAVTKSECCCANPDYGFGEPCQPCPAKNSAEFHGLCSSGVGITVDGRDINECALDPDICANGICENLRGSYRCNCNSGYEPDASGRNCIDIDECLVNRLLCDNGLCRNTPGSYSCTCPPGYVFRTETETCEDINECESNPCVNGACRNNLGSFNCECSPGSKLSSTGLICIDSLKGTCWLNIQDSRCEVNINGATLKSECCATLGAAWGSPCERCELDTACPRGLARIKGVTCEDVNECEVFPGVCPNGRCVNSKGSFHCECPEGLTLDGTGRVCLDIRMEQCYLKWDEDECIHPVPGKFRMDACCCAVGAAWGTECEECPKPGTKEYETLCPRGAGFANRGDVLTGRPFYKDINECKAFPGMCTYGKCRNTIGSFKCRCNSGFALDMEERNCTDIDECRISPDLCGSGICVNTPGSFECECFEGYESGFMMMKNCMDIDECERNPLLCRGGTCVNTEGSFQCDCPLGHELSPSREDCVDINECSLSDNLCRNGKCVNMIGTYQCSCNPGYQATPDRQGCTDIDECMIMNGGCDTQCTNSEGSYECSCSEGYALMPDGRSCADIDECENNPDICDGGQCTNIPGEYRCLCYDGFMASMDMKTCIDVNECDLNSNICMFGECENTKGSFICHCQLGYSVKKGTTGCTDVDECEIGAHNCDMHASCLNIPGSFKCSCREGWIGNGIKCIDLDECSNGTHQCSINAQCVNTPGSYRCACSEGFTGDGFTCSDVDECAENINLCENGQCLNVPGAYRCECEMGFTPASDSRSCQGGSPGFQLIFKLDQPQ

SEQ ID NO: 17597 - protein, 903 aa, Homo sapiens
MNITHSQCQMLPYHATLTPLLSVVRNMEMEKFLKFFTYLHRLSCYQHIMLFGCTLAFPECIIDGDDSHGLLPCRSFCEAAKEGCESVLGMVNYSWPDFLRCSQFRNQTESSNVSRICFSPQQENGKQLLCGRGENFLCASGICIPGKLQCNGYNDCDDWSDEAHCNCSENLFHCHTGKCLNYSLVCDGYDDCGDLSDEQNCDCNPTTEHRCGDGRCIAMEWVCDGDHDCVDKSDEVNCSCHSQGLVECRNGQCIPSTFQCDGDEDCKDGSDEENCSVIQTSCQEGDQRCLYNPCLDSCGGSSLCDPNNSLNNCSQCEPITLELCMNLPYNSTSYPNYFGHRTQKEASISWESSLFPALVQTNCYKYLMFFSCTILVPKCDVNTGEHIPPCRALCEHSKERCESVLGIVGLQWPEDTDCSQFPEENSDNQTCLMPDEYVEECSPSHFKCRSGQCVLASRRCDGQADCDDDSDEENCGCKERDLWECPSNKQCLKHTVICDGFPDCPDYMDEKNCSFCQDDELECANHACVSRDLWCDGEADCSDSSDEWDCVTLSINVNSSSFLMVHRAATEHHVCADGWQEILSQLACKQMGLGEPSVTKLIQEQEKEPRWLTLHSNWESLNGTTLHELLVNGQSCESRSKISLLCTKQDCGRRPAARMNKRILGGRTSRPGRWPWQCSLQSEPSGHICGCVLIAKKWVLTVAHCFEGRENAAVWKVVLGINNLDHPSVFMQTRFVKTIILHPRYSRAVVDYDISIVELSEDISETGYVRPVCLPNPEQWLEPDTYCYITGWGHMGNKMPFKLQEGEVRIISLEHCQSYFDMKTITTRMICAGYESGTVDSCMGDSGGPLVCEKPGGRWTLFGLTSWGSVCFSKVLGPGVYSNVSYFVEWIKRQIYIQTFLLN

SEQ ID NO: 17598 - protein, 679 aa, Homo sapiens
MSIIMKPRSRSTSSLRTAEAVCFDVDNGTSAGRSPLDPMTSPGSGLILQANFVHSQRRESFLYRSDSDYDLSPKSMSRNSSIASDIHGDDLIVTPFAQVLASLRTVRNNFAALTNLQDRAPSKRSPMCNQPSINKATITEEAYQKLASETLEELDWCLDQLETLQTRHSVSEMASNKFKRMLNRELTHLSEMSRSGNQVSEFISNTFLDKQHEVEIPSPTQKEKEKKKRPMSQISGVKKLMHSSSLTNSSIPRFGVKTEQEDVLAKELEDVNKWGLHVFRIAELSGNRPLTVIMHTIFQERDLLKTFKIPVDTLITYLMTLEDHYHADVAYHNNIHAADVVQSTHVLLSTPALEAVFTDLEILAAIFASAIHDVDHPGVSNQFLINTNSELALMYNDSSVLENHHLAVGFKLLQEENCDIFQNLTKKQRQSLRKMVIDIVLATDMSKHMNLLADLKTMVETKKVTSSGVLLLDNYSDRIQVLQNMVHCADLSNPTKPLQLYRQWTDRIMEEFFRQGDRERERGMEISPMCDKHNASVEKSQVGFIDYIVHPLWETWADLVHPDAQDILDTLEDNREWYQSTIPQSPSPAPDDPEEGRQGQTEKFQFELTLEEDGESDTEKDSGSQVEEDTSCSDSKTLCTQDSESTEIPLDEQVEEEAVGEEEESQPEACVIDDRSPDT

SEQ ID NO: 17599 - protein, 801 aa, Homo sapiens
EVTRRIEMWISILELNELGEYAAVELHQAKDVNTGGIFQLRQGHSRRVQVTVKPVQHSGTLPLMVEAILSVSIGCVTARSTKLQRGLDSYQEEDLNCVRERWSDALIKRREYLDEQIKKVSNKTEKTEDDVEREAQLVEQWVGLTEERNAVLVPAPGSGIPGAPADWIPPPGMETHIPVLFLDLNADDLSANEQLVGPHASGVNSILPKEHGSQFFYLPIIKHSDDEVSATASWDSSVHDSVHLNRVTPQNERIYLIVKTTVQLSHPAAMELVLRKRIAANIYNKQSFTQSLKRRISLKNIFYSCGVTYEIVSNIPKATEEIEDRETLALLAARSENEGTSDGETYIEKYTRGVLQVENILSLERLRQAVTVKEALSTKARHIRRSLSTPNVHNVSSSRPDLSGFDEDDKGWPENQLDMSDYSSSYQDVACYGTLPRDSPRRNKEGCTSETPHALTVSPFKAFSPQPPKFFKPLMPVKEEHKKRIALEARPLLSQESMPPPQAHNPGCIVPSGSNGSSMPVEHNSKREKKIDSEEEENELEAINRKLISSQPYVPVEFADFSVYNASLENREWFSSKVDLSNSRVLEKEVSRSPTTSSITSGYFSHSASNATLSDMVVPSSDSSDQLAIQTKDADSTEHSTPSLVHDFRPSSNKELTEVEKGLVKDKIIVVPLKENSALAKGSPSSQSIPEKNSKSLCRTGSCSELDACPSKISQPARGFCPREVTVEHTTNILEDHSFTEFMGVSEGKDFDGLTDSSAGELSSRRSLPNKTGGKTVSDGLHHPSQLHSKLENDQGGTTSR

SEQ ID NO: 17600 - protein, 269 aa, Homo sapiens
ISLVSFLVERLLHIIIDDNKRTQIVTEIISEIRAPIVTVGVNNDPADVRKKELKMAEIKVKLIEAKEALENCITLQDFNRASELKEEIKALEDARINLLKETEQLEIKEVHIEKVQNDAETLQKCLILCYELLKQMSISTGLSATMNGIIESLILPGIISIHPVVRNLAVLCLGCCGLQNQDFARKHFVLLLQVLQIDDVTIKISALKAIFDQLMTFGIEPFKTKKIKTLHCEGTEINSDDEQESKEVEETATAKNVLKLLSDFLDSEV

SEQ ID NO: 17601 - protein, 1259 aa, Homo sapiens
MGGCFCIPRERSLTRGPGKETPSKDPTVSSECIASSEYKEKCFLPQNINPDLTLSFCVKSRSRRCVNGPLQEAARRRLWALENEDQEVRMLFKDLSARLVSIQSQRAQFLITFKTMEEIWKFSTYLNLGYVSMCLEHLLFDHKYWLNCILVEDTEIQVSVDDKHLETIYLGLLIQEGHFFCRALCSVTPPAEKEGECLTLCKNELISVKMAEAGSELEGVSLVTGQRGLVLVSALEPLPLPFHQWFLKNYPGSCGLSRKRDWTGSYQIGRGRCKALTGYEPGEKDELNFYQGESIEIIGFVIPGLQWFIGKSTSSGQVGFVPTRNIDPDSYSPMSRNSAFLSDEERCSLLALGSDKQTECSSFLHTLARTDITSVYRLSGFESIQNPPNDLSASQPEGFKEVRPGRAWEEHQAVGSRQSSSSEDSSLEEELLSATSDSYRLPEPDDLDDPELLMDLSTGQEEEAENFAPILAFLDHEGYADHFKSLYDFSFSFLTSSFYSFSEEDEFVAYLEASRKWAKKSHMTWAHARLCFLLGRLSIRKVKLSQARVYFEEAIHILNGAFEDLSLVATLYINLAAIYLKQRLRHKGSALLEKAGALLACLPDRESSAKHELDVVAYVLRQGIVVGSSPLEARACFLAIRLLLSLGRHEEVLPFAERLQLLSGHPPASEAVASVLSFLYDKKYLPHLAVASVQQHGIQSAQGMSLPIWQVHLVLQNTTKLLGFPSPGWGEVSALACPMLRQALAACEELADRSTQRALCLILSKVYLEHRSPDGAIHYLSQALVLGQLLGEQESFESSLCLAWAYLLASQAKKALDVLEPLLCSLKETESLTQRGVIYNLLGLALQGEGRVNRAAKSYLRALNRAQEVGDVHNQAVAMANLGHLSLKSWAQHPARNYLLQAVRLYCELQASKETDMELVQVFLWLAQVLVSGHQLTHGLLCYEMALLFGLRHRHLKSQLQATKSLCHFYSSVSPNPEACITYHEHWLALAQQLRDREMEGRLLESLGQLYRNLNTARSLRRSLTCIKESLRIFIDLGETDKAAEAWLGAGRLHYLMQEDELVELCLQAAIQTALKSEEPLLALKLYEEAGDVFFNGTRHRHHAVEYYRAGAVPLARRLKAVRTELRIFNKLTELQISLEGYEKALEFATLAARLSTVTGDQRQELVAFHRLATVYYSLHMYEMAEDCYLKTLSLCPPWLQSPKEALYYAKVYYRLGRLTFCQLKFLLCCPGWSSVVQSGLPATSDSGAQVILQCQPPE

SEQ ID NO: 17602 - protein, 833 aa, Homo sapiens
MKMKTFVIIHFHLIQLGLQELFPQGHSCAVCGKVKCKRHRPSLLLENYQPWLDLKISSKVDASLSEVLELVLENFVYPWYRDVTDDESFVDELRITLRFFASVLIRRIHKVDIPSIITKKLLKAAMKHIEVIVKARQKVKNTEFLQQAALEEYGPELHVALRSRRDELHYLRKLTELLFPYILPPKATDCRSLTLLIREILSGSVFLPSLDFLADPDTVNHLLIIFIDDSPPEKATEPASPLVPFLQKFAEPRNKKPSVLKLELKQIREQQDLLFRFMNFLKQEGAVHVLQFCLTVEEFNDRILRPELSNDEMLSLHEELQKIYKTYCLDESIDKIRFDPFIVEEIQRIAEGPYIDVVKLQTMRCLFEAYEHVLSLLENVFTPMFCHSDEYFRQLLRGAESPTRNSKLNRNTQKRGESFGISRIGSKIKGVFKSTTMEGAMLPNYGVAEGEDDFIEEGIVVMEDDSPVEAVSTPNTPRNLAAWKISIPYVDFFEDPSSERKEKKERIPVFCIDVERNDRRAVGHEPEHWSVYRRYLEFYVLESKLTEFHGAFPDAQLPSKRIIGPKNYEFLKSKREEFQEYLQKLLQHPELSNSQLLADFLSPNGGETQFLDKILPDVNLGKIIKSVPGKLMKEKGQHLEPFIMNFINSCESPKPKPSRPELTILSPTSENNKKLFNDLFKNNANRAENTERKQNQNYFMEVMTVEGVYDYLMYVGRVVFQVPDWLHHLLMGTRILFKNTLEMYTDYYLQCKLEQLFQEHRLVSLITLLRDAIFCENTEPRSLQDKQKGAKQTFEEMMNYIPDLLVKCIGEETKYESIRLLFDGLQQPVLNKQ

SEQ ID NO: 17603 - protein, 1467 aa, Homo sapiens
MRKDTDDIESPKRSIRDSGYIDCWDSERSDSLSPPRHGRDDSFDSLDSFGSRSRQTPSPDVVLRGSSDGRGSDSESDLPHRKLPDVKKDDMSARRTSHGEPKSAVPFNQYLPNKSNQTAYVPAPLRKKKAEREEYRKSWSTATSPLGGERPFSFPETIEEEGSEVGSAGEDNPAGQMNPGWKPSDGGCELPDGSGKEHPSSDGAVVAPAPKSEEKDAAEIQKRKRLEQAGIKVMPAAQRFASQKQLSEEKEAIRDIVLRKENSFLTHQHGNDSEAEGEVVCRLPDLEKDDFAARRARMNQTKPMVPLNQLLYGPYPKKGAEKSDGSKQLSKGISKKRSLEYKRNQGHTEEVKLIVTCNMRAQESEPVEGGLRKVPDLHKDDLAQQRIQGSLAPHREPPSFITLSNITEADLETWERLKVSEKARDGDVQHICASEPSPEIKAETAIRDDFANRKARASKKASSPRQKFVHFGPVTELDQQKWKRLSIGKAGPREDEEEVICHGSKIQMDSVSPVSAATSSLKGHQIFNRQNDCRTMNCGRGDYCRRASWLAPVPESQEEWVCSLGECPRGTEEVTSKQLPQDGKEETESAPRDSERLSKAERSEDSSQPLVCPLASECEASGTEEKLEKMTAPAWSGSGLKGQRKLDDSRKDDMMARRTGMSLRHTGSNPNQFLPVPFAKQQDVEESSKGLPMKDQRYGPRTPVSDDAESTSMFDMRCEEEAAVQPHSRARQEQLQLINNQLREEDDKWQDDLARWKSRRRSVSQDLIKKEEERKKMEKLLAGEDGTSERRKSIKTYREIVQEKERRERELHEAYKNARSQEEAEGILQQYIERFTISEAVLERLEMPKILERSHSTEPNLSSFLNDPNPMKYLRQQSLPPPKFTATVETTIARASVLDTSMSAGSGSPSKTVTPKAVPMLTPKPYSQPKNSQDVLKTFKVDGKVSVNGETVHREEEKERECPTVAPAHSLTKSQMFEGVARVHGSPLELKQDNGSIEINIKKPNSVPQELAATTEKTEPNSQEDKNDGGKSRKGNIELASSEPQHFTTTVTRCSPTVAFVEFPSSPQLKNDVSEEKDQKKPENEMSGKVELVLSQKVVKPKSPEPEATLTFPFLDKMPEANQLHLPNLNSQVDSPSSEKSPVMTPFKFWAWDPEEERRRQEKWQQEQERLLQERYQKEQDKLKEEWEKAQKEVEEEERRYYEEERKIIEDTVVPFTVSSSSADQLSTSSSMTEGSGTMNKIDLGNCQDEKQDRRWKKSFQGDDSDLLLKTRESDRLEEKGSLTEGALAHSGNPVSKGVHEDHQLDTEAGAPHCGTNPQLAQDPSQNQQTSNPTHSSEDVKPKTLPLDKSINHQIESPSERRKKSPREHFQAGPFSPCSPTPPGQSPNRSISGKKLCSSCGLPLGKGAAMIIETLNLYFHIQCFRCGICKGQLGDAVSGTDVRIRNGLLNCNDCYMRSRSAGQPTTL

SEQ ID NO: 17604 - protein, 399 aa, Homo sapiens
MGRKKIQITRIMDERNRQVTFTKRKFGLMKKAYELSVLCDCEIALIIFNSTNKLFQYASTDMDKVLLKYTEYNEPHESRTNSDIVETLRKKGLNGCDSPDPDADDSVGHSPESEDKYRKINEDIDLMISRQRLCAVPPPNFEMPVSIPVSSHNSLVYSNPVSSLGNPNLLPLAHPSLQRNSMSPGVTHRPPSAGNTGGLMGGDLTSGAGTSAGNGYGNPRNSPGLLVSPGNLNKNMQAKSPPPMNLGMNNRKPDLRVLIPPGSKNTMPSVSEDVDLLLNQRINNSQSAQSLATPVVSVATPTLPGQGMGGYPSAISTTYGTEYSLSSADLSSLSGFNTASALHLGSVTGWQQQHLHNMPPSALSQLGQNLFLLLETVPPPLRDTHNTRATRRGDLLLTA

SEQ ID NO: 17605 - protein, 813 aa, Homo sapiens
MKPILLFMERACISLGSRTRAIGNAAKSQIVTNVRNTIHGFKKLHGRSFDDPIVQTERIRLPYELQKMPNGSAGVKVRYLEEERPFAIEQVTGMLLAKLKETSENALKKPVADCVISIPSFFTDAERRSVMAAAQVAGLNCLRLMNETTAVALAYGIYKQDLPPLDEKPRNVVFIDMGHSAYQVLVCAFNKGKLKVLATTFDPYLGGRNFDEALVDYFCDEFKTKYKINVKENSRALLRLYQECEKLKKLMSANASDLPLNIECFMNDLDVSSKMNRAQFEQLCASLLARVEPPLKAVMEQANLQREDISSIEIVGGATRIPAVKEQITKFFLKDISTTLNADEAVARGCALQCAILSPAFKVREFSITDLVPYSITLRWKTSFEDGSGECEVFCKNHPAPFSKVITFHKKEPFELEAFYTNLHEVPYPDARIGSFTIQNVFPQSDGDSSKVKVKVRVNIHGIFSVASASVIEKQNLEGDHSDAPMETETSFKNENKDNMDKMQVDQEEGHQKCHAEHTPEEEIDHTGAKTKSAVSDKQDRLNQTLKKGKVKSIDLPIQSSLCRQLGQDLLNSYIENEGKMIMQDKLEKERNDAKNAVEEYVYDFRDRLGTVYEKFITPEDLSKLSAVLEDTENWLYEDGEDQPKQVYVDKLQELKKYGQPIQMKYMEHEERPKALNDLGKKIQLVMKVIEAYRNKDERYDHLDPTEMEKVEKCISDAMSWLNSKMNAQNKLSLTQDPVVKVSEIVAKSKELDNFCNPIIYKPKPKAEVPEDKPKANSEHNGPMDGQSGTETKSDSTKDSSQHTKSSGEMEVD

SEQ ID NO: 17606 - protein, 315 aa, Homo sapiens
MPKVSGSRDTVSQLLSMLHQGQYQPRPSFRGNKYSRSYRYALQDMDKFSLKDSGRGDSEAGDSDYDLGRDSPIDRLLGEGFSDLFLTDGRIPAAMRLCTEECRVLGHSDQCWMPPLPSPSSDYRSNMFIPGEEFPTQPQQQHPHQSLEDDAQPADSGEKKKSFSTFGKDSPNDEDTGDTSTSSLLSEMSSVFQRLLPPSLDTYSECSEVDRSNSLERRKGPLPAKTVGYPQGVAAWAASTHFQNPTTNCGPPLGTHSSVQPSSKWLPAMEEIPENYEEDDFDNVLNHLNDGKHELMDASELVAEINKLLQDVRQS

SEQ ID NO: 17607 - protein, 277 aa, Homo sapiens
MADEKPSNGVLVHMVKLLIKTFLDGIFDDLMENNVLNTDEIHLIGKCLKFVVSNAENLVDDITETAQIAGKIFREHLWNSKKQLSSDISSDGEREANMPGLNIRNKEFNYLHNRNGSELDLLGMUDLLENLGYSVVIKENLTAQEMETALRQFAAHPEHQSSDSTFLVFMSHSILNGICGTKHWDQEPDVLHDDTIFEIFNNRNCQSLKDKPKVIIMQACRGNGAGIVWFTTDSGKASADTHGRLLQGNICNDAVTKAHVEKDFIAFKSSTPRSTFI

SEQ ID NO: 17608 - protein, 436 aa, Homo sapiens
MTIHQFLLLFLFWVCLPHFCSPEIMFRRTPVPQQRILSSRVPRSDGKILHRQKRGWMWNQFFLLEEYTGSDYQYVGKLHSDQDKGDGSLKYILSGDGAGTLFIIDEKTGDIHATRRIDREEKAFYTLRAQAINRRTLRPVEPESEFVIKIHDINDNEPTFPEEIYTASVPEMSVVGTSVVQVTATDADDPSYGNSARVIYSILQGQPYFSVEPETGIIRTALPNMNRENREQYQVVIQAKDMGGQMGGLSGTTTVNITLTDVNDNPPRFPQNTIHLRVLESSPVGTAIGSVKATDADTGKNAEVEYRIIDGDGTDMFDIVTEKDTQEGIITVKKPLDYESRRLYTLKVEAENTHVDPRFYYLGPFKDTTIVKISIEDVDEPPVFSRSSYLFEVHEDIEVGTIIGTVMARDPDSISSPIRQSQRDNTRGCFCENFGC

SEQ ID NO: 17609 - protein, 1429 aa, Homo sapiens
MTNPWEEKVCKMAQTSLLQGKQFYCREWVFHKLQHCLQEKSNCCNSAVNAPSLVMNSGNNASGVSGKGAAWGVLLVGGPGSGKTALCTELLWPSSPASLQRGLHRQALAFHFCKAQDSDTLCVGGFIRGLVAQICRSGLLQGYEDKLRDPAVQSLLQPGECERNPAEAFKRCVLLPLLGMKPPQQSLYLLVDSVDEGCNITEGEQTSTSLSGTVAALLAGHHEFFPPWLLLLCSARKQSKAVTKMFTGFRKISLDDLRKAYIVKDVQQYILHRLDQEEALRQHLTKETAEMLNQLHIKSSGCFLYLERVLDGVVENFIMLREIRDIPGTLNGLYLWLCQRLFVRKQFAKVQPILNVILAACRPLTITELYHAVWTKNMSLTLEDFQRKLDILSKLLVDGLGNTKILFHYSFAEWLLDVKHCTQKYLCNAAEGHRMLAMSYTCQAKNLTPLEAQEFALHLINSNLQLETAELALWMIWNGTPVRDSLSTLIPKEQEVLQLLVKAGAHVNSEDDRTSCIVRQALEREDSIRTLLDNGASVNQCDSNGRTLLANAAYSGSLDVVNLLVSRGADLEIEDAHGHTPLTLAARQGHTKVVNCLIGCGANINHTDQDGWTALRSAAWGGHTEVVSALLYAGVKVDCADADSRTALRAAAWGGHEDIVLNLLQHGAEVNKADNEGRTALIAAAYMGHREIVEHLLDHGAEVNHEDVDGRTALSVAALCVPASKGHASVVSLLIDRGAEVDHCDKDGMTPLLVAAYEGHVDVVDLLLEGGADVDHTDNNGRTPLLAAASMGHASVVNTLLFWGAAVDSIDSEGRTVLSIASAQGNVEVVRTLLDRGLDENHRDDAGWTPLHMAAFEGHRLICEALIEQGARTNEIDNDGRIPFILASQEGHYDCVQILLENKSNIDQRGYDGRNALRVAALEGHRDIVELLFSHGADVNCKDADGRPTLYILALENQLTMAEYFLENGANVEASDAEGRTALHVSCWQGHMEMVQVLIAYHADVNAADNEKRSALQSAAWQGHVKVVQLLIEHGAVVDHTCNQGATALCIAAQEGHIDVVQVLLEHGADPNHADQFGRTAMRVAAKNGHSQIIKLLEKYGASSLNGCSPSPVHTMEQKPLQSLSSKVQSLTIKSNSSGSTGGGDMQPSLRGLPNGPTHAFSSPSESPDSTVDRQKSSLSNNSLKSSKNSSLRTTSSTATAQTVPIDSFHNLSFTEQIQQHSLPRSRSRQSIVSPSSTTQSLGQSHNSPSSEFEWSQVKPSLKSTKASKGGKSENSAKSGSAGKKAKQSNSSQPKVLEYEMTQFDRRGPIAKSGTAAPPKQMPAESQCKIMIPSAQQEIGRSQQQFLIHQQSGEQKKRNGIMTNPNYHLQSNQVFLGRVSVPRTMQDRGHQEVLEGYPSSETELSLKQALKLQIEGSDPSFNYKKETPL

SEQ ID NO: 17610 - protein, 636 aa, Homo sapiens
MNPTETKAVKTEPEKKSQSTKLSVVHEKKSQEGKPKEHTEPKSLPKQASDTGSNDAHNKKAVSRSAEQQPSEKSTEPKSGMDAALDDLIDTLGGPEETEEENTTYTGPEVSDPMSSTYIEELGKREVTIPPKYRELLAKKEGITGPPADSSKPIGPDDAIDALSSDFTCGSPTAAGKKTEKEESTEVLKAQSAGTVRSAAPPQEKKRKVEKDTMSDQALEALSASLGTRQAEPELDLRSIKEVDEAKAKEEKLEKCGEDDETIPSEYRLKPATDKDGKPLLPEPEEKPKPRSESELIDELSEDFDRSECKEKPSKPTEKTEESKAAAPAPVSEAVCRTSMCSIQSAPPEPATLKGTVPDDAVEALADSLGKKEADPEDGKPVMDKVKEKAKEEDREKLGEKEETIPPDYRLEEVKDKDGKPLLPKESKEQLPPMSEDFLLDALSEDFSGPQNASSLKFEDAKLAAAISEVVSQTPASTTQAGAPPRDTSQSDKDLDDALDKLSDSLGQRQPDPDENKPMEDKVKEKAKAEHRDKLGERDDTIPPEYRHLLDDNGQDKPVKPPTKKSEDSKKPADDQDPIDALSGDLDSCPSTTETSQNTAKDKCKKAASSSKAPKNGGKAKDSAKTTEETSKPKDD

SEQ ID NO: 17611 - protein, 140 aa, Homo sapiens
MAPTWLSDIPLVQPPGHQDVSERRLDTQRPQVTMWERDVSSDRQEPGRRGRSWGLEGSQALSQQAEVIVRQLQELRRLEEEVRLLRETSLQQKMRLEAQAMELEALARAEKAGRAEAEGLRAALAGAEVVRKNLEEGSQR

SEQ ID NO: 17612 - protein, 2259 aa, Homo sapiens
MDEEEDGAGAEESGQPRSFMRLNDLSGAGGRPGPGSAEKDPGSADSEAEGLPYPALAPVVFFYLSQDSRPRSWCLRTVCNPWFERISMLVILLNCVTLGMFRPCEDIACDSQRCRILQAFDDFIFAFFAVEMVVKMVALGIFGKKCYLGDTWNRLDFFIVIAGMLEYSLDLQNVSFSAVRTVRVLRPLRAINRVPSMRILVTLLLDTLPMLGNVLLLCFFVFFIFGIVGVQLWAGLLRNRCFLPENFSLPLSVDLERYYQTENEDESPFICSQPRENGMRSCRSVPTLRGDGGGGPPCGLDYEAYNSSSNTTCVNWNQYYTNCSAGEHNPFKGAINFDNIGYAWIAIFQVITLEGWVDIMYFVMDAHSFYNFIYFILLIIVGSFFMINLCLVVIATQFSETKQRESQLMREQRVRFLSNASTLASFSEPGSCYEELLKYLVYILRKAARRLAQVSRAAGVRVGLLSSPAPLGGQETQPSSSCSRSHRRLSVHHLVHHHHHHHHHYHLGNGTLRAPRASPEIQDRDANGSRRLMLPPPSTPALSGAPPGGAESVHSFYHADCHLEPVRCQAPPPRSPSEASGRTVGSGKVYPTVHTSPPPETLKEKALVEVAASSGPPTLTSLNIPPGPYSSMHKLLETQSTGACQSSCKISSPCLKADSGACGPDSCPYCARAGAGEVELADREMPDSDSEAVYEFTQDAQHSDLRDPHSRRQRSLGPDAEPSSVLAFWRLICDTFRKIVDSKYFGRGIMIAILVNTLSMGIEYHEQPEELTNALEISNIVFTSLFALEMLLKLLVYGPFGYIKNPYNIFDGVIVVISVWEIVGQQGGGLSVLRTFRLMRVLKLVRFLPALQRQLVVLMKTMDNVATFCMLLMLFIFIFSILGMHLFGCKFASERDGDTLPDRKNFDSLLWAIVTVFQILTQEDWNKVLYNGMASTSSWAALYFIALMTFGNYVLFNLLVAILVEGFQAEEISKREDASGQLSCIQLPVDSQGGDANKSESEPDFFSPSLDGDGDRKKCLALVSLGEHPELRKSLLPPLIIHTAATPMSLPKSTSTGLGEALGPASRRTSSSGSAEPGAAHEMKSPPSARSSPHSPWSAASSWTSRRSSRNSLGRAPSLKRRSPSGERRSLLSGEGQESQDEEESSEEERASPAGSDHRHRGSLEREAKSSFDLPDTLQVPGLHRTASGRGSASEHQDCNGKSASGRLARALRPDDPPLDGDDADDEGNLSKGERVRAWIRARLPACCLERDSWSAYIFPPQSRFRLLCHRIITHKMFDHVVLVIIFLNCITIAMERPKIDPHSAERIFLTLSNYIFTAVFLAEMTVKVVALGWCFGEQAYLRSSWNVLDGLLVLISVIDILVSMVSDSGTKILGMLRVLRLLRTLRPLRVISRAQGLKLVVETLMSSLKPIGNIVVICCAFFIIFGILGVQLFKGKFFVCQGEDTRNITNKSDCAEASYRWVRHKYNFDNLGQALMSLFVLASKDGWVDIMYDGLDAVGVDQQPIMNHNPWMLLYFISFLLIVAFFVLNMFVGVVVENFHKCRQHQEEEEARRREEKRLRRLEKKRRKAQCKPYYSDYSRFRLLVHHLCTSHYLDLFITGVIGLNVVTMAMEHYQQPQILDEALKICNYIFTVIFVLESVFKLVAFGFRRFFQDRWNQLDLAIVLLSIMGITLEEIEVNASLPINPTIIRIMRVLRIARVLKLLKMAVGMRALLDTVGNLGLLFMLLFFIFAALGVELFGDLECDETHPCEGLGRHATFRNFGMAFLTLFRVSTGDNWNGIMKDTLRDCDQESTCYNTVISPIYFVSFVLTAQFVLVNVVIAVLMKHLEESNKEAKEEAELEAELELEMKTLSPQPHSPLGSPFLWPGVEGPDSPDSPKPGALHPAAHARSASHFSLEHPTMQPHPTELPGPDLLTVRKSGVSRTHSLPNDSYMCRHGSTAEGPLGHRGWGLPKAQSGSVLSVHSQPADTSYILQLPKDAPHLLQPHSAPTWGTIPKLPPPGRSPLAQRPLRRQAAIRTDSLDVQGLGSREDLLAEVSGPSPPLARAYSFWGQSSTQAQQHSRSHSKISKHMTPPAPCPGPEPNWGKGPPETRSSLELDTELSWISGDLLPPGGQEEPPSPRDLKKCYSVEAQSCQRRPTSWLDEQRRHSIAVSCLDSGSQPHLGTDPSNLGGQPLGGPGSRPKKKLSPPSITIDPPESQGPRTPPSPGICLRRRAPSSDSKDPLASGPPDSMAASPSPKKDVLSLSGLSSDPADLDP

SEQ ID NO: 17613 - protein, 857 aa, Homo sapiens
MMNRFRKWLYKPKRSDPQLLARFYYADEELNQVAAELDSLDGRKDPQRCTLLVSQFRSCQDNVLNIINQIMDECIPQDRAPRDFCVKFPEEIRHDNLAGQLWFGAECLAAGSIIMNRELESMAMRPLAKELTRSLEDVRGALRDQALRDLNTYTEKMREALRHFDVLFAEFELSYVSAMVPVKSPREYYVQQEVIVLFCETVESGLVVYADGPLNLDRKVEDMSELFRPFHTLLRKIRDLLQTLTEEELHTLERNLCISQDVEFPIRADVQGPAALAPALSAPLPPEGPLSAKAKDPDAELACSMQYDDQELEQLSRMVHRAGDEMSSLLSPPIACQSPAHRPGAEGSPGGEASPGRPRLRSGSDEEERVFFMDDVEGTAEALARPESPAGPFGWAGSTWADPQEKGQGGPGGAAGISLPASEKEEDLSNNNLEAEGTDGASLAGTSSCSCLDSRLHLDGWEVGADDAETAEMIAHRTGGMKLSATVIFNPKSPTSLDSAVATQEAASEPVAEGMDGGPHKLSTGATNCLLHSCVCCGSCGDSREDVVERLREKCSPGGVIGASYAAGLAKASDRAPERQEEAPPPSEDASNGREPKAPTSDKCLPHTSGSQVDTASGLQGEAGVAGQQEPEARELHAGSPSAHEAPQALSGSSSSTAGSCSSDKMGPEAAPAATHAAPQATREKIRSRFHGSHDLIHRLFVCISGVADQLQTNYASDLRSILKTLFEVMATKPETDDKEKLRKVTQTLRSAALEDCALCQETLSSSELAAKTRDGDFEDPPEWVPDEACGFCTACKAPFTVIRRKHHCRSCGKIFCSRCSSHSAPLPRYGQVKPVRVCTHCYMFHVTPFYSDKAGL

SEQ ID NO: 17614 - protein, 791 aa, Homo sapiens
MSQPGQKPAASPRPRRAAAARRTHEHVSEKTSESPSKPGEKKGSDEKKAASLGSSQSSRTYAGGTASATKVSASSGATSKSSSMNPTETKAIPVSQQMEGPHLPNKKKHKKQAVKTEPEKKSQSTKLSVVHEKKSQEGKPKEHTEPKSLPKQASDTGSNDAHNKKAVSRSAEQQPSEKSTEPKTKPQDMISAGGESVAGITAISGKPGDKKKEKKSLTPAVPVESKPDKPSGKSGMDAALDDLIDTLGGPEETEEENTTYTGPEVSDPMSSTYIEELGKREVTIPPKYRELLAKKEGITGPPADSSKPIGPDDAIDALSSDFTCGSPTAAGKKTEKEESTEVLKAQSAGTVRSAAPPQEKKRKVEKDTMSDQALEALSASLGTRQAEPELDLRSIKEVDEAKAKEEKLEKCGEDDETIPSEYRLKPATDKDGKPLLPEPEEKPKPRSESELIDELSEDFDRSECKEKPSKPTEKTEESKAAAPAPVSEAVCRTSMCSIQSAPPEPATLKGTVPDDAVEALADSLGKKEADPEDGKPVMDKVKEKAKEEDREKLGEKEETIPPDYRLEEVKDKDGKPLLPKESKEQLPPMSEDFLLDALSEDFSGPQNASSLKFEDAKLAAAISEVVSQTPASTTQAGAPPRDTSQSDKDLDDALDKLSDSLGQRQPDPDENKPMEDKVKEKAKAEHRDKLGERDDTIPPEYRHLLDDNGQDKPVKPPTKKSEDSKKPADDQDPIDALSGDLDSCPSTTETSQNTAKDKCKKAASSSKAPKNGGKAKDSAKTTEETSKPKDD

SEQ ID NO: 17615 - protein, 570 aa, Homo sapiens
MQKMNNEVVDKSDRLLIKGGRIINDDQSLYADVYLEDGLIKQIGENLIVPGGVKTIEANGRMVIPGGIDVNTYLQKPSQGMTAADDFFQGTRAALVGGTTMIIDHVVPEPGSSLLTSFEKWHEAADTKSCCDYSLHVDITSWYDGVREELEVLVQDKGVNSFQVYMAYKDVYQMSDSQLYEAFTFLKGLGAVILVHAENGDLIAQEQKRILEMGITGPEGHALSRPEELEAEAVFRAITIAGRINCPVYITKVMSKSAADIIALARKKGPLVFGEPIAASLGTDGTHYWSKNWAKAAAFVTSPPLSPDPTTPDYLTSLLACGDLQVTGSGHCPYSTAQKAVGKDNFTLIPEGVNGIEERMTVVWDKAVATGKMDENQFVAVTSTNAAKIFNLYPRKGRIAVGSDADVVIWDPDKLKTITAKSHKSAVEYNIFEGMECHGSPLVVISQGKIVFEDGNINVNKGMGRFIPRKAFPEHLYQRVKIRNKVFGLQGVSRGMYDGPVYEVPATPKYATPAPSAKSSPSKHQPPPIRNLHQSNFSLSGAQIDDNNPRRTGHRIVAPPGGRSNITSLG

SEQ ID NO: 17616 - protein, 133 aa, Homo sapiens
MSQPRTPEQALDTPGDCPPGRRDEDAGEGIQCSQRMLSFSDALLSIIATVMILPVTHTEISPEQQFDRSVQRLLATRIAVYLMTFLIVTVAWAAHTRLFQVVGKTDDTLALLNLACMMTITFLPYTFSLMVTF

SEQ ID NO: 17617 - protein, 1204 aa, Homo sapiens
MNSPVDPGARQALRKKPPERTPEDLNTIYSYLHGMEILSNLREHQLRLMSARARYERYSGNQVLFCSETIARCWYILLSGSVLVKGSMVLPPCSFGKQFGGKRGCDCLVLEPSEMIVVENAKDNEDSILQREIPARQSRRRFRKINYKGERQTITDDVEVNSYLSLPADLTKMHLTENPHPQVTHVSSSQSGCSIASDSGSSSLSDIYQATESEVGDVDLTRLPEGPVDSEDDEEEDEEIDRTDPLQGRDLVRECLEKEPADKTDDDIEQLLEFMHQLPAFANMTMSVRRELCSVMIFEVVEQAGAIILEDGQELDSWYVILNGTVEISHPDGKVENLFMGNSFGITPTLDKQYMHGIVRTKVDDCQFVCIAQQDYWRILNHVEKNTHKVEEEGEIVMVHEHRELDRSGTRKGHIVIKATPERLIMHLIEEHSIVDPTYIEDFLLTYRTFLESPLDVGIKLLEWFKIDSLRDKVTRIVLLWVNNHFNDFEGDPAMTRFLEEFEKNLEDTKMNGHLRLLNIACAAKAKWRQVVLQKASRESPLQFSLNGGSEKGFGIFVEGVEPGSKAADSGLKRGDQIMEVNGQNFENITFMKAVEILRNNTHLALTVKTNIFVFKELLFRTEQEKSGVPHIPKIAEKKSNRHSIQHVPGDIEQTSQEKGSKKVKANTVSGGRNKIRKILDKTRFSILPPKLFSDGGLSQSQDDSIVGTRHCRHSLAIMPIPGTLSSSSPDLLQPTTSMLDFSNPSDIPDQVIRVFKVDQQSCYIIISKDTTAKEVVFHAVHEFGLTGASDTYSLCEVSVTPEGVIKQRRLPDQFSKLADRIQLNGRYYLKNNMETETLCSDEDAQELVKESQLSMLQLSTIEVATQLSMRDFDLFRNIEPTEYIDDLFKLNSKTGNTHLKRFEDIVNQETFWVASEILTEANQLKRMKIIKHFIKIALHCRECKNFNSMFAIISGLNLASVARLRGTWEKLPSKYEKHLQDLQDIFDPSRNMAKYRNILSSQSMQPPIIPLFPVVKKDMTFLHEGNDSKVDGLVNFEKLRMISKEIRQVVRMTSANMDPAMMFRQRSLSQGSTNSNMLDVQGGAHKKRARRSSLLNAKKLYEDAQMARKVKQYLSSLDVETDEEKFQMMSLQWEPAYGTLTKNLSEKRSAKSSEMSPVPMRSAGQTTKAHLHQPHRVSQVLQVPAVNLHPIRKKGQTKDPALM

SEQ ID NO: 17618 - protein, 474 aa, Homo sapiens
MTTLPPLPMTRPKLTALARQKLPCSSRKIPRSQLIKEKDDIDHYLEVNFKGLSKEEVAAYRNSYKKNICVDMLRDGYHKSFTELFALMERWDALREAARVRSLFWLQKPLEEQPDKLDYLYHYLTRAEDAERKESFEDVHNNLYALACYFNNSEDKWVRNHFYERCFKIAQLIKIDCGKKEAEAHMHMGLLYEEDGQLLEAAEHYEAFHQLTQGRIWKDETGRSLNLLACESLLRTYRLLSDKMLENKEYKQAIKILIKASEIAKEGSDKKMEAEASYYLGLAHLAAEEYETALTVLDTYCKISTDLDDDLSLGRGYEAIAKVLQSQGEMTEAIKYLKKFVKIARNNFQSLDLVRASTMLGDIYNEKGYYNKASECFQQAFDTTVELMSMPLMDETKVHYGIAKAHQMMLTVNNYIESADLTSLNYLLSWKESRGNIEPDPVTEFRGSTVEAVSQNSERLEELSRFPGDQKNET

SEQ ID NO: 17619 - protein, 423 aa, Homo sapiens
MNLCLQRLDGRQTYDYRNIRISFGTDYGCCIVELGKTRVLGQVSCELVSPKLNRATEGILFFNLELSQMAAPAFEPGRQSDLLVKLNRLMERCLRNSKCIDTESLCVVAGEKVWQIRVDLHLLNHDGNIIDAASIAAIVALCHFRRPDVSVQGDEVTLYTPEERDPVPLSIHHMPICVSFAFFQQGTYLLVDPNEREERVMDGLLVIAMNKHREICTIQSSGGIMLLKDQVLRCSKIAGVKVAEITELILKALENDQKVRKEGGKFGFAESIANQRITAFKMEKAPIDTSDVEEKAEEIIAEAEPPSEVVSTPVLWTPGTAQIGEGVENSWGDLEDSEKEDDEGGGDQAIILDGIKMDTGVEVSDIGSQDAPIILSDSEEEEMIILEPDKNPKKIRTQTTSAKQEKAPSKKPVKRRKKKRAAN

SEQ ID NO: 17620 - protein, 1084 aa, Homo sapiens
IYYKVIKDIEPGEELLVHVKEGVYPLGTVPPGLDEEPTFRCDECDELFQSKLDLRRHKKYTCGSVGAALYEGLAEELKPEGLGGGSGQAHECKDCERMFPNKYSLEQHMVIHTEEREYKCDQCPKAFNWKSNLIRHQMSHDSGKRFECENCVKVFTDPSNLQRHIRSQHVGARAHACPDCGKTFATSSGLKQHKHIHSTVKPFICEVCHKSYTQFSNLCRHKRMHADCRTQIKCKDCGQMFSTTSSLNKHRRFCEGKNHYTPGGIFAPGLPLTPSPMMDKAKPSPSLNHASLGFNEYFPSRPHPGSLPFSTAPPTFPALTPGFPGIFPPSLYPRPPLLPPTSLLKSPLNHTQDAKLPSPLGNPALPLVSAVSNSSQGTTAAAGPEEKFESRLEDSCVEKLKTRSSDMSDGSDFEDVNTTTGTDLDTTTGTGSDLDSDVDSDPDKDKGKGKSAEGQPKFGGGLAPPGAPNSVAEVPVFYSQHSFFPPPDEQLLTATGAAGDSIKAIASIAEKYFGPGFMGMQEKKLGSLPYHSAFPFQFLPNFPHSLYPFTDRALAHNLLVKAEPKSPRDALKVGGPSAECPFDLTTKPKDVKPILPMPKGPSAPASGEEQPLDLSIGSRARASQNGGGREPRKNHVYGERKLGAGEGLPQVCPARMPQQPPLHYAKPSPFFMDPIYRVEKRKVTDPVGALKEKYLRPSPLLFHPQMSAIETMTEKLESFAAMKADSGSSLQPLPHHPFNFRSPPPTLSDPILRKGKERYTCRYCGKIFPRSANLTRHLRTHTGEQPYRCKYCDRSFSISSNLQRHVRNIHNKEKPFKCHLCNRCFGQQTNLDRHLKKHEHENAPVSQHPGVLTNHLGTSASSPTSESDNHALLDEKEDSYFSEIRNFIANSEMNQASTRTEKRADMQIVDGSAQCPGLASEKQEDVEEEDDDDLEEDDEDSLAGKSQDDTVSPAPEPQAAYEDEEDEEPAASLAVGFDHTRRCAEDHEGGLLALEPMPTFGKGLDLRRAAEEAFEVKDVLNSTLDSEALKHTLCRQAKNQAYAMMLSLSEDTPLHTPSQGSLDAWLKVTGATSESGAFHPINHL

SEQ ID NO: 17621 - protein, 733 aa, Homo sapiens
MEASWRQVAGGRGRSRGRATAAPSGNGVHLRGAGGGREKGSVGAVPSGTSPGGVATTAAAGSRHSPAGSQALQTTAASELMSQKKFEEIKKANQAAARKLVEEQFSSSSEEGDEDFEGKQGKILANTFITYTTQTDGDTRELERTKQYVNEAFQAGAMTCLICIASVKRNQAVWSCSGCFCIFHMPCIQKWAKDSQFLVSSVTDDDFGKKDCPWPCPKCRFEYKRSETPSRYYCYCGKVEDPPLDPWLVPHSCGQVCEREFKPPCGHKCLLLCHPGPCPPCPKMVTTTCYCKKAKPIPRRCSAKEWSCQLPCGQKLLCGQHKCENPCHAGSCQPCPRVSRQKCVCGKKVAERSCASPLWHCDQVCGKTLPCGNHTCEQVCHVGACGECPRSGKRFCPCQKSKFSLPCTEDVPTCGDSCDKVLECGIHRCSQRCHRGPCETCRQEVEKHCRCGKHTKRMPCHKPYLCETKCVKMRDCQKHQCRRKCCPGNCPPCDQNCGRTLGCRNHKCPSVCHRGSCYPCPETVDVKCNCGNTKVTVPCGRERTTRPPKCKEQCSRPPTCHHTSQEKHRCHFGSCPPCHQPCQKVLEKCGHLCPAPCHDQALIKQTGRHQPTGPWEQPSEPAFIQTALPCPPCQVPIPMECLGKHEVSPLPCHAVGPYSCKRVCGRILDCQNHTCMKECHKVTKTDGCTGKNKIGKLKLCDLSMILQQESSKSESTVPDLLTPSPMCSSTHVI

SEQ ID NO: 17622 - protein, 387 aa, Homo sapiens
MERSGPSEVTGSDASGPDPQLAVTMGFTGFGKKARTFDLEAMFEQTRRTAVERSRKTLEAREKEEEMNREKELRRQNEDIEPTSSRSNVVRDCSKSSSRDTSSSESEQSSDSSDDELIGPPLPPKMVGKPVNFMEEDILGPLPPPLNEEEEEAEEEEEEEEEEENPVHKIPDSHEITLKHGTKTVSALGLDPSGARLVTGGYDYDVKFWDFAGMDASFKAFRSLQPCECHQIKSLQYSNTGDMILVVSGSSQAKVIDRDGFEVMECIKGDQYIVDMANTKGHTAMLHTGSWHPKIKGEFMTCSNDATVRTWEVENPKKQKSVFKPRTMQGKKVIPTTCTYSRDGNLIAAACQNGSIQIWDRNLTSNKLRLSYGTVCMLWAHTEVCVM

SEQ ID NO: 17623 - protein, 829 aa, Homo sapiens
MAKYNTGGNPTEDVSVNSRPFRVTGPNSSSGIQARKNLFNNQGNASPPAGPSNVPKFGSPKPPVAVKPSSEEKPDKEPKPPFLKPTGAGQRFGTPASLTTRDPEAKVGFLKPVGPKPINLPKEDSKPTFPWPPGNKPSLHSVNQDHDLKPLGPKSGPTPPTSENEQKQAFPKLTGVKGKFMSASQDLEPKPLFPKPAFGQKPPLSTENSHEDESPMKNVSSSKGSPAPLGVRSKSGPLKPAREDSENKDHAGEISSLPFPGVVLKPAASRGGPGLSKNGEEKKEDRKIDAAKNTFQSKINQEELASGTPPARFPKAPSKLTVGGPWGQSQEKEKGDKNSATPKQKPLPPLFTLGPPPPKPNRPPNVDLTKFHKTSSGNSTSKGQTSYSTTSLPPPPPSHPASQPPLPASHPSQPPVPSLPPRNIKPPFDLKSPVNEDNQDGVTHSDGAGNLDEEQDSEGETYEDIEASKEREKKREKEEKKRLELEKKEQKEKEKKEQEIKKKFKLTGPIQVIHLAKACCDVKGGKNELSFKQGEQIEIIRITDNPEGKWLGRTARGSYGYIKTTAVEIDYDSLKLKKDSLGAPSRPIEDDQEVYDDVAEQDDISSHSQSGSGGIFPPPPDDDIYDGIEEEDADDGSTLQVQEKSNTWSWGILKMLKGKDDRKKSIREKPKVSDSDNNEGSSFPAPPKQLDMGDEVYDDVDTSDFPVSSAEMSQGTNVGKAKTEEKDLKKLKKQEKEEKDFRKKFKYDGEIRVLYSTKVTTSITSKKWGTRDLQVKPGESLEVIQTTDDTKVLCRNEEGKYGYVLRSYLADNDGEIYDDIADGCIYDND

SEQ ID NO: 17624 - protein, 590 aa, Homo sapiens
MKITSTSCICPVLVCLCFVQRCYGTAHHSSIKVMRNQTKHIEGETEVHHRPKRGWVWNQFFVLEEHMGPDPQYVGKLHSNSDKGDGSVKYILTGEGAGTIFIIDDTTGDIHSTKSLDREQKTHYVLHAQAIDRRTNKPLEPESEFIIKVQDINDNAPKFTDGPYIVTVPEMSDMGTSVLQVTATDADDPTYGNSARVVYSILQGQPYFSVDPKTGVIRTALHNMDREAREHYSVVIQAKDMAGQVGGLSGSTTVNITLTDVNDNPPRFPQKHYQLYVPESAQVGSAVGKIKANDADTGSNADMTYSIINGDGMGIFSISTDKETREGILSLKKPLNYEKKKSYTLNIEGANTHLDFRFSHLGPFKDATMLKIIVGDVDEPPLFSMPSYLMEVYENAKIGTVVGTVLAQDPDSTNSLVRYFINYNVEDDRFFNIDANTGTIRTTKVLDREETPWYNITVTASEIDNPDLLSHVTVGIRVLDVNDNPPELAREYDIIVCENSKPGQVIHTISATDKDDFANGPRFNFFLDERLPVNPNFTLKDNEGEHIYTYLFIYVVSALTLYVIGFILIYTQTSCKSAFKVSLMLLCYDL

SEQ ID NO: 17625 - protein, 875 aa, Homo sapiens
PAAAPGHSFRKVTLTKPTFCHLCSDFIWGLAGFLCDVCNFMSHEKCLKHVRIPCTSVAPSLVRVPVAHCFGPRGLHKRKFCAVCRKVLEAPALHCEVCELHLHPDCVPFACSDCRQCHQDGHQDHDTHHHHWREGNLPSGARCEVCRKTCGSSDVLAGVRCEWCGVQAHSLCSAALAPECGFGRLRSLVLPPACVRLLPGGFSKTQSFRIVEAAEPGEGGDGADGSAAVGPGRETQATPESGKQTLKIFDGDDAVRRSQFRLVTVSRLAGAEEVLEAALRAHHIPEDPGHLELCRLPPSSQACDAWAGGKAGSAVISEEGRSPGSGEATPEAWVIRALPRAQEVLKIYPGWLKVGVAYVSVRVTPKSTARSVVLEVLPLLGRQAESPESFQLVEVAMGCRHVQRTMLMDEQPLLDRLQDIRQMSVRQVSQTRFYVAESRDVAPHVSLFVGGLPPGLSPEEYSSLLHEAGATKGAVVLDVACFAEAERLYMLLKDMAVRGRLLTALVLPDLLHAKLPPDSCPLLVFVNPKSGGLKGRDLLCSFRKLLNPHQVFDLTNGGPLPGLHLFSQVPCFRVLVCGGDGTVGWVLGALEETRYRLACPEPSVAILPLGTGNDLGRVLRWGAGYSGEDPFSVLLSVDEADAVLMDRWTILLDAHEAGSAENDTADAEPPKIVQMSNYCGIGIDAELSLDFHQAREEEPGKFTSRLHNKGVYVRVGLQKISHSRSLHKQIRLQVERQEVELPSIEGLIFINIPSWGSGADLWGSDSDTRFEKPRMDDGLLEVVGVTGVVHMGQVQGGLRSGIRIAQGSYFRVTLLKATPVQVDGEPWVQAPGHMIISAAGPKVHMLRKAKQKPRRAGTTRDARADAAPAPESDPR

SEQ ID NO: 17626 - protein, 119 aa, Homo sapiens
MEEPEMQLKGKKVTDKFTESVYVLANEPSVALYRLQEHVRRSLPELAQHKADMQRWEEQSQGAIYTVEYACSAVKNLVDSSVYFRSVEGLLKQAISIRDHMNASAQGHSPEEPPPPSSA

SEQ ID NO: 17627 - protein, 463 aa, Homo sapiens
MSVAIRKRSWEEHVTHWMGQPFNSDDRNTACHHGLVADSLQASMEKDATLNVDRKEKCVSLPDCCHGSELRDFPGRPMGHLSKDVDENDSHEGEDQFLSLEASTETLVHVSDEDNNADLCLTDDKQVLNTQGQKTSGQHMIQGAGSLEKALPIIQSNQVSSNSWGIAGETELALVKESGERKVTDSISKSLELCNEISLSEIKDAPKVNAVDTLNVKDIAPEKQLLNSAVIAQQRRKPDPPKDENERSTCNVVQNEFLDTPCTNRGLPLLKTDFGSCLLQPPSCPNGMSAENGLEKSGFSQHQNKSPPKVKAEDGMQCLQLKETLATQEPTDNQVRLRKRKEIREDRDRARLDSMVLLIMKLDQLDQDIENALSTSSSPSGTPTNLRRHVPDLESGSESGADTISVNQTRVNLSSDTESTDLPSSTPVANSGTKPKTTAIQGISEKEKAGKLTFWFCFLANLF

SEQ ID NO: 17628 - protein, 1571 aa, Homo sapiens
MWPSQLLIFMMLLAPIIHGGKHSERHPALAAPLRHAERSPGGALPPRHLLQQPAAERTAAHRGQGPRGATRGVRGPGAQGAQIAAQAFSRAPIPMAVVRRELSCESYPIELRCPGTDVIMIESANYGRTDDKICDSDPAQMENIRCYLPDAYKIMSQRCNNRTQCAVVAGPDVFPDPCPGTYKYLEVQYECVPYKVEQKVFLCPGLLKGVYQSEHLFESDHQSGAWCKDPLQASDKIYYMPWTPYRTDTLTEYSSKDDFIAGRPTTTYKLPHRVDGTGFVVYDGALFFNKERTRNIVKFDLRTRIKSGEAIIANANYHDTSPYRWGGKSDIDLAVDENGLWVIYATEQNNGKIVISQLNPYTLRIEGTWDTAYDKRSASNAFMICGILYVVKSVYEDDDNEATGNKIDYIYNTDQSKDSLVDVPFPNSYQYIAAVDYNPRDNLLYVWNNYHVVKYSLDFGPLDSRSGQAHHGQVSYISPPIHLDSELERPSVKDISTTGPLGMGSTTTSTTLRTTTLSPGRSTTPSVSGRRNRSTSTPSPAVEVLDDMTTHLPSASSQIPALEESCEAVEAREIMWFKTRQGQIAKQPCPAGTIGVSTYLCLAPDGIWDPQGPDLSNCSSPWVNHITQKLKSGETAANIARELAEQTRNHLNAGDITYSVRAMDQLVGLLDVQLRNLTPGGKDSAARSLNKLQKRERSCRAYVQAMVETVNNLLQPQALNAWRDLTTSDQLRAATMLLHTVEESAFVLADNLLKTDIVRENTDNIKLEVARLSTEGNLEDLKFPENMGHGSTIQLSANTLKQNGRNGEIRVAFVLYNNLGPYLSTENASMKLGTEALSTNHSVIVNSPVITAAINKEFSNKVYLADPVVFTVKHIKQSEENFNPNCSFWSYSKRTMTGYWSTQGCRLLTTNKTHTTCSCNHLTNFAVLMAHVEVKHSDAVHDLLLDVITWVGILLSLVCLLICIFTFCFFRGLQSDRNTIHKNLCISLFVAELLFLIGINRTDQPIACAVFAALLHFFFLAAFTWMFLEGVQLYIMLVEVFESEHSRRKYFYLVGYGMPALIVAVSAAVDYRSYGTDKVCWLRLDTYFIWSFIGPATLIIMLNVIFLGIALYKMFHHTAILKPESGCLDNIKSWVIGAIALLCLLGLTWAFGLMYINESTVIMAYLFTIFNSLQGMFIFIFHCVLQKKVRKEYGKCLRTHCCSGKSTESSIGSGKTSGSRTPGRYSTGSQSRIRRMWNDTVRKQSESSFITGDINSSASLNRGAMANHLISNALLRPHGTNNPYNTLLGEPAVCNNPSVSMYNAQEGLLNNARDTSVMDTLPLNGNHGNSYSIASGEYLSNCVQIIDRGYNHNETALEKKILKELTSNYIPSYLNNHERSSEQNRNLMNKLVNNLGSGREDDAIVLDDATSFNHEESLGLELIHEESDAPLLPPRVYSTENHQPHHYTRRRIPQDHSESFFPLLTNEHTEDLQSPHRDSLYTSMPTLAGVAATESVTTSTQTEPPPAKCGDAEDVYYKSMPNLGSRNHVHQLHTYYQLGRGSSDGFIVPPNKDGTPPEGSSKGPAHLVTSL

SEQ ID NO: 17629 - protein, 58 aa, Homo sapiens
MSSDEEKYSLPVVQNDSSRGSSVSSNLQKILMNSSYTLYKGFNQHSKRKNMKNCFIML

SEQ ID NO: 17630 - protein, 416 aa, Homo sapiens
MAATTANPEMTSDVPSLGPAIASGNSGPGIQGGGAIVQRAIKRRPGLDFDDDGEGNSKFLRCDDDQMSNDKERFARSDDEQSSADKERLARENHSEIERRRRNKMTAYITELSDMVPTCSALARKPDKLTILRMAVSHMKSLRGTGNTSTDGSYKPSFLTDQELKHLILEAADGFLFIVSCETGRVVYVSDSVTPVLNQPQSEWFGSTLYDQVHPDDVDKLREQLSTSENALTGRILDLKTGTVKKEGQQSSMRMCMGSRRSFICRMRCGSSSVDPVSVNRLSFVRNRCRNGLGSVKDGEPHFVVVHCTGYIKAWPPAGVSLPDDDPEAGQGSKFCLVAIGRLQVTSSPNCTDMSNVCQPTEFISRHNIEGIFTFVDHRCVATVGYQPQELLGKNIVEFCHPEDQQLLRDSFQQEL

SEQ ID NO: 17631 - protein, 914 aa, Homo sapiens
MGVPQRSGSSILKISISDSNDNSPAFEQQSYIIQLLENSPVGTLLLDLNATDPDEGANGKIVYSFSSHVSPKIMETFKIDSERGHLTLFKQVDYEITKSYEIDVQAQDLGPNSIPAHCKIIIKVVDVNDNKPEININLMSPGKEEISYIFEGDPIDTFVALVRVQDKDSGLNGEIVCKLHGHGHFKLQKTYENNYLILTNATLDREKRSEYSLTVIAEDRGTPSLSTVKHFTVQINDINDNPPHFQRSRYEFVISENNSPGAYITTVTATDPDLGENGQVTYTILESFILGSSITTYVTIDPSNGAIYALRIFDHEEVSQITFVVEARDGGSPKQLVSNTTVVLTIIDENDNVPVVIGPALRNNTAEITIPKGAESGFHVTRIRAIDRDSGVNAELSCAIVAGNEENIFIIDPRSCDIHTNVSMDSVPYTEWELSVIIQDKGNPQLHTKVLLKCMIFEYAESVTSTAMTSVSQASLDVSMIIIISLGAICAVLLVIMVLFATRCNREKKDTRSYNCRVAESTYQHHPKRPSRQIHKGDITLVPTINGTLPIRSHHRSSPSSSPTLERGQMGSRQSHNSHQSLNSLVTISSNHVPENFSLELTHATPAVEVSQLLSMLHQGQYQPRPSFRGNKYSRSYRYALQDMDKFSLKDSGRGDSEAGDSDYDLGRDSPIDRLLGEGFSDLFLTDGRIPAAMRLCTEECRVLGHSDQCWMPPLPSPSSDYRSNMFIPGEEFPTQPQQQHPHQSLEDDAQPADSGEKKKSFSTFGKDSPNDEDTGDTSTSSLLSEMSSVFQRLLPPSLDTYSECSEVDRSNSLERRKGPLPAKTVGYPQGVAAWAASTHFQNPTTNCGPPLGTHSSVQPSSKWLPAMEEIPENYEEDDFDNVLNHLNDGKHELMDASELVAEINKLLQDVRQS

SEQ ID NO: 17632 - protein, 654 aa, Homo sapiens
MLAMYNLSLEGSGRQGYFRWKEDICAFIEKHWTFLLGNRKKTSTWWSTVAGCLSVGSPMYFRSGAQEFGEPGWWKLVHNKPPTMKPEGEKLSASTLKIKAASKPTLDPIITVEGLRKRASRNPVESAMELKEKRSRTQEAKDIRRAQKEAAGFLDRSTSSTPVKFISRGRRPDVILEKGEVIDFSSLSSSDRTPLTSPSPSPSLDFSAPGTPASHSATPSLLSEADLIPDVMPPQALFHDDDEMEGDGVIDPGMEYVPPPAGSVASGPVVGVRKKVRGPEQIKQEVESEEEKPDRMDIDSEDTDSNTSLQTRAREKRKPQLEKDTKPKEPRYTPVSIYEEKLLLKRLEACPGAVAMTPEARRLKRKLIVRQAKRDRGLPLFDLDQVVNAALLLVDGIYGAKEGGISRLPAGQATYRTTCQDFRILDRYQTSLPSRKGFRHQTTKFLYRLVGSEDMAVDQSIVSPYTSRILKPYIRRDYETKPPKLQLLSQIRSHLHRSDPHWTPEPDAPLDYCYVRPNHIPTINSMCQEFFWPGIDLSECLQYPDFSVVVLYKKVIIAFGFMVPDVKYNEAYISFLFVHPEWRRAGIATFMIYHLIQTCMGKDVTLHVSASNPAMLLYQKFGFKTEEYVLDFYDKYYPLESTECKHAFFLRLRR

SEQ ID NO: 17633 - protein, 149 aa, Homo sapiens
MEADIITNLRCRLKEAEEERLKAAQYGLQLVESQNELQNQLDKCRNEMMTMTESYEQEKYTLQREVELKSRMLESLSCECEAIKQQQKMHLEKLEEQLSRSHGQEVNELKTKIEKLKVELDEARLSEKQLKHQVDHQKELLSCKSEELR

SEQ ID NO: 17634 - protein, 805 aa, Homo sapiens
MDTAEEGRIYKCLFTGSVSSLLTLPLDMLSTENLLADCLQGCFVVTCTLCAFISLVWLREQIVHGGAPIWLEHAAPPFNAAGHHQNEAPAGGNGAENVAADQPANPPAENAVVGENPDAQDDQAEEEEEDNEEEDDAGVEDAADANNGAQDDMNWNALEWDRAAEELTWERMLGLDGSLVFLEHVFWVVSLNTLFILVFAFCPYHIGHFSLVGLGFEEHVQASHFEGLITTIVGYILLAITLIICHGLATLVKFHRSRRLLGVCYIVVKVSLLVVVEIGVFPLICGWWLDICSLEMFDATLKDRELSFQSAPGTTMFLHWLVGMVYVFYFASFILLLREVLRPGVLWFLRNLNDPDFNPVQEMIHLPIYRHLRRFILSVIVFGSIVLLMLWLPIRIIKSVLPNFLPYNVMLYSDAPVSELSLELLLLQVVLPALLEQGHTRQWLKGLVRAWTVTAGYLLDLHSYLLGDQEENENSANQQVNNNQHARNNNAIPVVGEGLHAAHQAILQQGGPVGFQPYRRPLNFPLRIFLLIVFMCITLLIASLICLTLPVFAGRWLMSFWTGTAKIHELYTAACGLYVCWLTIRAVTVMVAWMPQGRRVIFQKVKEWSLMIMKTLIVAVLLAGVVPLLLGLLFELVIVAPLRVPLDQTPLFYPWQDWALGVLHAKIIAAITLMGPQWWLKTVIEQVYANGIRNIDLHYIVRKLAAPVISVLLLSLCVPYVIASGVVPLLGVTAEMQNLVHRRIYPFLLMVVVLMAILSFQVRQFKRLYEHIKNDKYLVGQRLVNYERKSGKQGSSPPPPQSSQE

SEQ ID NO: 17635 - protein, 472 aa, Homo sapiens
KEDVMTCLIKGCNFVLKNIPHEAFVYQKDSDPEFRFQTNHPHIFPYLLVNIGSGVSIVKVETEDRFEWVGGSSIGGGTFWGLGALLTKTKKFDELLHLASRGQHSNVDMLVRDVYGGAHQTLGLSGNLIASSFGKSATADQEFSKEDMAKSLLHMISNDIGQLACLHARLHSLDRVYFGGFFIRGHPVTMRTITYSINFFSKGEVQALFLRHEGYLGAIGAFLKGAEQDNPNQYSWGENYAGSSGLMSASPELGPAQRARSGTFDLLEMDRLERPLVDLPLLLDPPSYVPDTVDLTDDALARKYWLTCFEEALDGVVKRAVASQPDSVDAAERAEKFRQKYWNKLQTLRQQPFAYGTLTVRSLLDTREHCLNEFNFPDPYSKVKQRENGVALRCFPGVVRSLDALGWEERQLALVKGLLAGNVFDWGAKAVSAVLESDPYFGFEEAKRKLQERPWLVDSYSEWLQRLKITVE

SEQ ID NO: 17636 - protein, 5256 aa, Homo sapiens
MECPSCQHVSKEETPKFCSQCGERLPPAAPIADSENNNSTMASASEGEMECGQELKEEGGPCLFPGSDSWQENPEEPCSKASWTVQEGATSEVLVDAAVDLISDEWEAANAIPSKRRKQDAAPLEAASVPSADCEQSKKKKRKKKKKGNKSASSELASLPLSPASPCHLTLLSNPWPQDTALPHSQAQQSGPTGQPSQPPGTATTPLEGDGLSAPTEVGDSPLQAQALGEAGVATGSEAQSSPQFQDHTEGEDQDASIPSGGRGLSQEGTGPPTSAGEGHSRTEDAAQELLLPESKGGSSEPGTELQTTEQQAGASASMAVDAVAEPANAVKGAGKEMKEKTQRMKQPPATTPPFKTHCQEAETKTKDEMAAAEEKVGKNEQGEPEDLKKPEGKNRSAAAVKNEKEQKNQEADVQEVKASTLSPGGGVTVFFHAIISLHFPFNPDLHKVFIRGGEEFGESKWDSNICELHYTRDLGHDRVLVEGIVCISKKHLDKYIPYKYVIYNGESFEYEFIYKHQQKKGEYVNRCLFIKSSLLGSGDWHQYYDIVYMKPHGRLQKVMNHITDGPRKDLVKGKQIAAALMLDSTFSILQTWDTINLNSFFTQFEQFCFVLQQPMIYEGQAQLWTDLQYREKEVKRYLWQHLKKHVVPLPDGKSTDFLPVDCPVRSKLKTGLIVLFVVEKIELLLEGSLDWLCHLLTSDASSPDEFHRDLSHILGIPQSWRLYLVNLCQRCMDTRTYTWLGALPVLHCCMELAPRHKDAWRQPEDTWAALEGLSFSPFREQMLDTSSLLQFMREKQHLLSIDEPLFRSWFSLLPLSHLVMYMENFIEHLGRFPAHILDCLSGIYYRLPGLEQVLNTQDVQDVQNVQNILEMLLRLLDTYRDKIPEEALSPSYLTVCLKLHEAICSSTKLLKFYELPALSAEIVCRMIRLLSLVDSAGQRDETGNNSVQTVFQGTLAATKRWLREVFTKNMLTSSGASFTYVKEIEVWRRLVEIQFPAEHGWKESLLGDMEWRLTKEEPLSQITAYCNSCWDTKGLEDSVAKTFEKCIIEAVSSACQSQTSILQGFSYSDLRKFGIVLSAVITKSWPRTADNFDDILKHLLTLADVKHVFRLCGTDEKILANVTEDAKRLIAVADSVLTKVVGDLLSGTILVGQLELIIKHKNQFLDIWQLREKSLSPQDEQCAVEEALDWRREELLLLKKEKRCVDSLLKMCGNVKHLIQVDFGVLAVRHSQDLSSKRLNDTVTVRLSTSSNSQRATHYHLSSQVQEMAGKIDLLRDSHIFQLFWREAAEPLSEPKEDQEAAELLSEPEEESERHILELEEVYDYLYQPSYRKFIKLHQDLKSGEVTLAEIDVIFKDFVNKYTDLDSELKIMCTVDHQDQRDWIKDRVEQIKEYHHLHQAVHAAKVILQVKESLGLNGDFSVLNTLLNFTDNFDDFRRETLDQINQELIQAKKLLQDISEARCKGLQALSLRKEFICWVREALGGINELKVFVDLASISAGENDIDVDRVACFHDAVQGYASLLFKLDPSVDFSAFMKHLKKLWKALDKDQYLPRKLCDSARNLEWLKTVNESHGSVERSSLTLATAINQRGIYVIQAPKGGQKISPDTVLHLILPESPGSHEESREYSLEEVKELLNKLMLMSGKKDRNNTEVERFSEVFCSVQRLSQAFIDLHSAGNMLFRTWIAMAYCSPKQGVSLQMDFGLDLVTELKEGGDVTELLAALCRQMEHFLDSWKRFVTQKRMEHFYLNFYTAEQLVYLSTELRKQPPSDAALTMLSFIKSNCTLRDVLRASVGCGSEAARYRMRRVMEELPLMLLSEFSLVDKLRIIMEQSMRCLPAFLPDCLDLETLGHCLAHLAGMGGSPVERCLPRGLQVGQPNLVVCGHSEVLPAALAVYMQTPSQPLPTYDEVLLCTPATTFEEVALLLRRCLTLGSLGHKVYSLLFADQLSYEVARQAEELFHNLCTQQHREDYQLVMVCDGDWEHCYLPSAFSQHKVFVTPQAPLEAIQAYLAGHYRVPKQTLSAAAVFNDRLCVGIVASERAGVGKSLYVKRLHDKMKMQLNVKNVPLKTIRLIDPQVDESRVLGALLPFLDAQYQKVPVLFHLDVTSSVQTGIWVFLFKLLILQYLMDINGKMWLRNPCHLYIVEILERRTSVPSRSSSALRTRVPQFSFLDIFPKVTCRPPKEVIDMELSALRSDTEPGMDLWEFCSETFQRPYQYLRRFNQNQDLDTFQYQEGSVEGTPEECLQHFLFHCGVINPSWSELRNFARFLNYQLRDCEASLFCNPSFIGDTLRGFKKFVVTFMIFMARDFATPSLHTSDQSPGKHMVTMDGVREEDLAPFSLRKRWESEPHPYVFFNDDHTTMTFIGFHLQPNINGSVDAISHLTGKVIKRDVMTRDLYQGLLLQRVPFNVDFDKLPRHKKLERLCLTLGIPQATDPDKTYELTTDNMLKILAIEMRFRCGIPVIIMGETGCGKTRLIKFLSDLRRGGTNADTIKLVKVHGGTTADMIYSRVREAENVAFANKDQHQLDTILFFDEANTTEAISCIKEVLCDHMVDGQPLAEDSGLHIIAACNPYRKHSEEMICRLESAGLGYRVSMEETADRLGSIPLRQLVYRVHALPPSLIPLVWDFGQLSDVAEKLYIQQIVQRLVESISLDENGTRVITEVLCASQGFMRKTEDECSFVSLRDVERCVKVFRWFHEHSAMLLAQLNAFLSKSSVSKNHTERDPVLWSLMLAIGVCYHASLEKKDSYRKAIARFFPKPYDDSRLLLDEITRAQDLFLDGVPLRKTIAKNLALKENVFMMVVCIELKIPLFLVGKPGSSKSLAKTIVADAMQGPAAYSDLFRSLKQVHLVSFQCSPHSTPQGIISTFRQCARFQQGKDLQQYVSVVVLDEVGLAEDSPKMPLKTLHPLLEDGCIEDDPAPHKKVGFVGISNWALDPAKMNRGIFVSRGSPNETELIESAKGICSSDILVQDRVQGYFASFAKAYETVCKRQDKEFFGLRDYYSLIKMVFAAAKASNRKPSPQDIAQAVLRNFSGKDDIQALDIFLANLPEAKCSEEVSPMQLIKQNIFGPSQKVPGGEQEDAESRYLLVLTKNYVALQILQQTFFEGDQQPEIIFGSGFPKDQEYTQLCRNINRVKICMETGKMVLLLNLQNLYESLYDALNQYYVHLGGQKYVDLGLGTHRVKCRVHPNFRLIVIEEKDVVYKHFPIPLINRLEKHYLDINTVLEKWQKSIVEELCAWVEKFINVKAHHFQKRHKYSPSDVFIGYHSDACASVVLQVIERQGPRALTEELHQKVSEEAKSILLNCATPDAVVRLSAYSLGGFAAEWLSQEYFHRQRHNSFADFLQAHLHTADLERHAIFTEITTFSRLLTSHDCEILESEVTGRAPKPTLLWLQQFDTEYSFLKEVRNCLTNTAKCKILIFQTDFEDGIRSAQLIASAKYSVINEINKIRENEDRIFVYFITKLSRVGRGTAYVGFHGGLWQSVHIDDLRRSTLMVSDVTRLQHVTISQLFAPGDLPELGLEHRAEDGHEEAMETEASTSGEVAEVAEEAMETESSEKVGKETSELGGSDVSILDTTRLLRSCVQSAVGMLRDQNESCTRNMRRVVLLLGLLNEDDACHASFLRVSKMRLSVFLKKQEESQFHPLEWLAREACNQDALQEAGTFRHTLWKRVQGAVTPLLASMISFIDRDGNLELLTRPDTPPWARDLWMFIFSDTMLLNIPLVMNNERHKGEMAYIVVQNHMNLSENASNNVPFSWKIKDYLEELWVQAQYITDAEGLPKKFVDIFQQTPLGRFLAQLHGEPQQELLQCYLKDFILLTMRVSTEEELKFLQMALWSCTRKLKAASEAPEEEVSLPWVHLAYQRFRSRLQNFSRILTIYPQVLHSLMEARWNHELAGCEMTLDAFAAMACTEMLTRNTLKPSPQAWLQLVKNLSMPLELICSDEHMQGSGSLAQAVIREVRAQWSRIFSTALFVEHVLLGTESRVPELQGLVTEHVFLLDKCLRENSDVKTHGPFEAVMRTLCECKETASKTLSRFGIQPCSICLGDAKDPVCLPCDHVHCLRCLRAWFASEQMICPYCLTALPDEFSPAVSQAHREAIEKHARFRQMCNSFFVDLVSTICFKDNAPPEKEVIESLLSLLFVQKGRLRDAAQRHCEHTKSLSPFNDVVDKTPVIRSVILKLLLKYSFHDVKDYIQEYLTLLKKKAFITEDKTELYMLFINCLEDSILEKTSAYSRNDELNHLEEEGRFLKAYSPASRGREPANEASVEYLQEVARIRLCLDRAADFLSEPEGGPEMAKEKQCYLQQVKQFCIRVENDWHRVYLVRKLSSQRGMEFVQGLSKPGRPHQWVFPKDVVKQQGLRQDHPGQMDRYLVYGDEYKALRDAVAKAVLECKPLGIKTALKACKTPQSQQSAYFLLTLFREVAILYRSHNASLHPTPEQCEAVSKFIGECKILSPPDISRFATSLVDNSVPLLRAGPSDSNLDGTVTEMAIHAAAVLLCGQNELLEPLKNLAFSPATMAHAFLPTMPEDLLAQARRWKGLERVHWYTCPNGHPCSVGECGRPMEQSICIDCHAPIGGIDHKPRDGFHLVKDKADRTQTGHVLGNPQRRDVVTCDRGLPPVVFLLIRLLTHLALLLGASQSSQALINIIKPPVRDPKGFLQQHILKDLEQLAKMLGHSADETIGVVHLVLRRLLQEQHQLSSRRLLNFDTELSTKEMRNNWEKEIAAVISPELEHLDKTLPTMNNLISQDKRISSNPVAKIIYGDPVTFLPHLPRKSVVHCSKIWSCRKRITVEYLQHIVEQKNGKERVPILWHFLQKEAELRLVKFLPEILALQRDLVKQFQNVQQVEYSSIRGFLSKHSSDGLRQLLHNRITVFLSTWNKLRRSLETNGEINLPKDYCSTDLDLDTEFEILLPRRRGLGLCATALVSYLIRLHNEIVYAVEKLSKENNSYSVDAAEVTELHVISYEVERDLTPLILSNCQYQVEEGRETVQEFDLEKIQRQIVSRFLQGKPRLSLKGIPTLVYRHDWNYEHLFMDIKNKMAQDSLPSSVISAISGQLQSYSDACEVLSVVEVTLGFLSTAGGDPNMQLNVYTQDILQMGDQTIHVLKALNRCQLKHTIALWQFLSAHKSEQLLRLHKEPFGEISSRYKADLSPENAKLLSTFLNQTGLDAFLLELHEMIILKLKNPQTQTEERFRPQWSLRDTLVSYMQTKESEILPEMASQFPEEILLASCVSVWKTAAVLKWNREMR

SEQ ID NO: 17637 - protein, 1594 aa, Homo sapiens
MPTLPPSYNTSEFLRIKWSKIEVDKNGKDLKETTVLVAQNGNIKIGQDYKGRVSVPTHPEAVGDASLTVVKLLASDAGLYRCDVMYGIEDTQDTVSLTVDGVVFHYRAATSRYTLNFEAAQKACLDVGAVIATPEQLFAAYEDGFEQCDAGWLADQTVRYPIRAPRVGCYGDKMGKAGVRTYGFRSPQETYDVYCYVDHLDGDVFHLTVPSKFTFEEAAKECENQDARLATVGELQAAWRNGFDQCDYGWLSDASVRHPVTVARAQCGGGLLGVRTLYRFENQTGFPPPDSRFDAYCFKPKEATTIDLSILAETASPSLSKEPQMVSDRTTPIIPLVDELPVIPTEFPPVGNIVSFEQKATVQPQAITDSLATKLPTPTGSTKKPWDMDDYSPSASGPLGKLDISEIKEEVLQSTTGVSHYATDSWDGVVEDKQTQESVTQIEQIEVGPLVTSMEILKHIPSKEFPVTETPLVTARMILESKTEKKMVSTVSELVTTGHYGFTLGEEDDEDRTLTVGSDESTLIFDQIPEVITVSKTSEDTIHTHLEDLESVSASTTVSPLIMPDNNGSSMDDWEERQTSGRITEEFLGKYLSTTPFPSQHRTEIELFPYSGDKILVEGISTVIYPSLQTEMTHRRERTETLIPEMRTDTYTDEIQEEITKSPFMGKTEEEVFSGMKLSTSLSEPIHVTESSVEMTKSFDFPTLITKLSAEPTEVRDMEEDFTATPGTTKYDENITTVLLAHGTLSVEAATVSKWSWDEDNTTSKPLESTEPSASSKLPPALLTTVGMNGKDKDIPSFTEDGADEFTLIPDSTQKQLEEVTDEDIAAHGKFTIRFQPTTSTGIAEKSTLRDSTTEEKVPPITSTEGQVYATMEGSALGEVEDVDLSKPVSTVPQFAHTSEVEGLAFVSYSSTQEPTTYVDSSHTIPLSVIPKTDWGVLVPSVPSEDEVLGEPSQDILVIDQTRLEATISPETMRTTKITEGTTQEEFPWKEQTAEKPVPALSSTAWTPKEAVTPLDEQEGDGSAYTVSEDELLTGSERVPVLETTPVGKIDHSVSYPPGAVTEHKVKTDEVVTLTPRIGPKVSLSPGPEQKYETEGSSTTGFTSSLSPFSTHITQLMEETTTEKTSLEDIDLGSGLFEKPKATELIEFSTIKVTVPSDITTAFSSVDRLHTTSAFKPSSAITKKPPLIDREPGEETTSDMVIIGESTSHVPPTTLEDIVAKETETDIDREYFTTSSPPATQPTRPPTVEDKEAFGPQALSTPQPPASTKFHPDINVYIIEVRENKTGPDRCKMNPCLNGGTCYPTETSYVCTCVPGYSGDQCELDFDECHSNPCRNGATCVDGFNTFRCLCLPSYVGALCEQDTETCDYGWHKFQGQCYKYFAHRRTWDAAERECRLQGAHLTSILSHEEQMFVNRVGHDYQWIGLNDKMFEHDFRWTDGSTLQYENWRPNQPDSFFSAGEDCVVIIWHENGQWNDVPCNYHLTYTCKKGTVACGQPPVVENAKTFGKMKPRYEINSLIRYHCKDGFIQRHLPTIRCLGNGRWAIPKITCMNPSAYQRTYSMKYFKNSSSAKDNSINTSKHDHRWSRRWQESRR

SEQ ID NO: 17638 - protein, 195 aa, Homo sapiens
MNYLDRYLSCVPTRKAQLQLLGAVCMLLASKLRETTPLTIEKLCIYTDHAVSPRQLRDWEVLVLGKLKWDLAAVIAHDFLAFILHRLSLPRDRQALVKKHAQTFLALCATGLPAGLSGADRSCTQGEPQGSLSDQLQPSAQSPPGLQQPRAQPDQHSYRCHSHTPVALERPSGVATKQRRGRCHPPPCLQEPHHI

SEQ ID NO: 17639 - protein, 278 aa, Homo sapiens
MAVLIVTENYLEFGLETGFTNFSDSAMQFLEKQGLESQSPVSKLTFKFFLAIFCSFIGAFLTFPGLRLAQMHLDALNLATEKITQTLLHINFLAPLFMVLLWVKPITKDYIMNPPLGKESIPFHLQAYLNLAQKCVDQMKKEAGRISTVELQKMVARVFYYLCVIALQYVAPLVMLLHTTLLLKTLGNHSWGIYPESISTLPVDNSLLSNSVYSELPSAEGKMKVTVTQITVALSSLKNIFTPLLFRGLLSFLTWWIAACLFSTSLFGLFYHQYLTVA

SEQ ID NO: 17640 - protein, 599 aa, Homo sapiens
MKKQKYGRIIMTSSASGIYGNFGQANYSAAKLGLLGLANSLAIEGRKSNIHCNTIAPNAGSRMTQTVMPEDLVEALKPEYVAPLVLWLCHESCEENGGLFEVGAGWIGKLRWERTLGAIVRQKNHPMTPEAVKANWKKICDFENASKPQSIQESTGSIIEVLSKIDSEGGVSANHTSRATSTATSGFAGAIGQKLPPFSYAYTELEAIMYALGVGASIKDPKDLKFIYEGSSDFSCLPTFGVIIGQKSMMGGGLAEIPGLSINFAKVLHGEQYLELYKPLPRAGKLKCEAVVADVLDKGSGVVIIMDVYSYSEKELICHNQFSLFLVGSGGFGGKRTSDKVKVAVAIPNRPPDAVLTDTTSLNQAALYRLSGDWNPLHIDPNFASLAGFDKPILHGLCTFGFSARRVLQQFADNDVSRFKAIKARFAKPVYPGQTLQTEMWKEGNRIHFQTKVQETGDIVISNAYVDLAPTSGTSAKTPSEGGKLQSTFVFEEIGRRLKDIGPEVVKKVNAVFEWHITKGGNIGAKWTIDLKSGSGKVYQGPAKGAADTTIILSDEDFMEVVLGKLDPQKAFFSGRLKARGNIMLSQKLQMILKDYAKL

SEQ ID NO: 17641 - protein, 335 aa, Homo sapiens
MVAVGICHTDDHVVSGNLVTPLPVILGHEAAGIVESVGEGVTTVKPGDKVIPLFTPQCGKCRVCKNPESNYCLKNDLGNPRGTLQDGTRRFTCRGKPIHHFLGTSTFSQYTVVDENAVAKIDAASPLEKVCLIGCGFSTGYGSAVNVAKVTPGSTCAVFGLGGVGLSAVMGCKAAGAARIIAVDINKDKFAKAKELGATECINPQDYKKPIQEVLKEMTDGGVDFSFEVIGRLDTMMASLLCCHEACGTSVIVGVPPASQNLSINPMLLLTGRTWKGAVYGGFKSKEGIPKLVADFMAKKFSLDALITHVLPFEKINEGFDLLHSGKSIRTVLTF

SEQ ID NO: 17642 - protein, 877 aa, Homo sapiens
MKLKEVDRTAMQAWSPAQNHPIYLATGTSAQQLDATFSTNASLEIFELDLSDPSLDMKSCATFSSSHRYHKLIWGPYKMDSKGDVSGVLIAGGENGNIILYDPSKIIAGDKEVVIAQNDKHTGPVRALDVNIFQTNLVASGANESEIYIWDLNNFATPMTPGAKTQPPEDISCIAWNRQVQHILASASPSGRATVWDLRKNEPIIKVSDHSNRMHCSGLAWHPDVATQMVLASEDDRLPVIQMWDLRFASSPLRVLENHARGILAIAWSMADPELLLSCGKDAKILCSNPNTGEVLYELPTNTQWCFDIQWCPRNPAVLSAASFDGRISVYSIMGGSTDGLRQKQVDKLSSSFGNLDPFGTGQPLPPLQIPQQTAQHSIVLPLKKPPKWIRRPVGASFSFGGKLVTFENVRMPSHQGAEQQQQQHHVFISQVVTEKEFLSRSDQLQQAVQSQGFINYCQKKIDASQTEFEKNVWSFLKVNFEDDSRGKYLELLGYRKEDLGKKIALALNKVDGANVALKDSDQVAQSDGEESPAAEEQLLGEHIKEEKEESEFLPSSGGTFNISVSGDIDGLITQALLTGNFESAVDLCLHDNRMADAIILAIAGGQELLARTQKKYFAKSQSKITRLITAVVMKNWKEIVESCDLKNWREALAAVLTYAKPDEFSALCDLLGTRLENEGDSLLQTQACLCYICAGNVEKLVACWTKAQDGSHPLSLQDLIEKVVILRKAVQLTQAMDTSTVGVLLAAKMSQYANLLAAQGSIAAALAFLPDNTNQPNIMQLRDRLCRAQGEPVAGHESPKIPYEKQQLPKGRPGPVAGHHQMPRVQTQQYYPHGENPPPPGFIMHGNVNPNAAGQLPTSPGHMHTQVPPYPQPQRK

SEQ ID NO: 17643 - protein, 1122 aa, Homo sapiens
MNGRLHLGHTFSLSKCEFAVGYQRLKGKCCLFPFGLHCTGMPIKACADKLKREIELYGCPPDFPDEEEEEEETSVKTEDIIIKDKAKGKKSKAAAKAGSSKYQWGIMKSLGLSDEEIVKFSEAEHWLDYFPPLAIQDLKRMGLKVDWRRSFITTDVNPYYDSFVRWQFLTLRERNKIKFGKRYTIYSPKDGQPCMDHDRQTGEGVGPQEYTLLKLKVLEPYPSKLSGLKGKNIFLVAATLRPETMFGQTNCWVRPDMKYIGFETVNGDIFICTQKAARNMSYQGFTKDNGVVPVVKELMGEEILGASLSAPLTSYKVIYVLPMLTIKEDKGTGVVTSVPSDSPDDIAALRDLKKKQALRAKYGIRDDMVLPFEPVPVIEIPGFGNLSAVTICDELKIQSQNDREKLAEAKEKIYLKGFYEGIMLVDGFKGQKVQDVKKTIQKKMIDAGDALIYMEPEKQVMSRSSDECVVALCDQWYLDYGEENWKKQTSQCLKNLETFCEETRRNFEATLGWLQEHACSRTYGLGTHLPWDEQWLIESLSDSTIYMAFYTVAHLLQGGNLHGQAESPLGIRPQQMTKEVWDYVFFKEAPFPKTQIAKEKLDQLKQEFEFWYPVDLRVSGKDLVPNHLSYYLYNHVAMWPEQSDKWPTAVRANGHLLLNSEKMSKSTGNFLTLTQAIDKFSADGMRLALADAGDTVEDANFVEAMADAGILRLYTWVEWVKEMVANWDSLRSGPASTFNDRVFASELNAGIIKTDQNYEKMMFKEALKTGFFEFQAAKDKYRELAVEGMHRELVFRFIEVQTLLLAPFCPHLCEHIWTLLGKPDSIMNASWPVAGPVNEVLIHSSQYLMEVTHDLRLRLKNYMMPAKGKKTDKQPLQKPSHCTIYVAKNYPPWQHTTLSVLRKHFEANNGKLPDNKVIASELGSMPELKKYMKKVMPFVAMIKENLEKMGPRILDLQLEFDEKAVLMENIVYLTNSLELEHIEVKFASEAEDKIREDCCPGKPLNVFRIEPGVSVSLVNPQPSNGHFSTKIEIRQGDNCDSIIRRLMKMNRGIKDLSKVKLMRFDDPLLGPRRVPVLGKEYTEKTPISEHAVFNVDLMSKKIHLTENGIRVDIGDTIIYLVH

SEQ ID NO: 17644 - protein, 297 aa, Homo sapiens
LNGVSCEVGTETQVSVAFQVTNAMEKYSPKFEIYSENILNSLKDITVKGPSLLNANLLDSLWDTFQNKSAARGKVVLLFSDGLDDDVEKLEQKSDELRKEGLNALITVALDGPADSSDLADLPYIEFGKGFEYRTQLSIGMRELGSRLSKQLVNVAERTCCCLFCKCIGGDGTMGDPGPPGKRGPPGFKGSEGYLGEEGIAGERGAPGPVGEQGTKGCYGTKGPKGNRGLNGQEGEVGENGIDGLNGEQGDNGLPGRKGEKGDEGSQGSPGKRGTPGDRGAKGLRGDPVSARAANWS

SEQ ID NO: 17645 - protein, 273 aa, Homo sapiens
MAVEEGESFPEQSDANASYLRAARAGHLEKALDYIKNGVDINICNQNGLNALHLASKEGHVEVVSELLQREANVDAATKKGNTALHIASLAGQAEVVKVLVTNGANVNAQSQNGFTPLYMAAQENHLEVVKFLLDNGASQSLATEDGFTPLAVALQQGHDQVVSLLLENDTKGKVRLPALHIAARKDDTKAAALLLQNDNNADVESKSGFTPLHIAAHYGNINVATLLLNRAAAVDFTARNDITPLHVASKRGNANMVKLLLDRGAKIDAKTR

SEQ ID NO: 17646 - protein, 421 aa, Homo sapiens
MMEDNKQLALRIDGAVQSASQEVTNLRAELTATNRRLAELSGGGGPGPGPGAAASASAAGDSAATNMENPQLGAQVLLREEVSRLQEEVHLLRQMKEMLAKDLEESQGGKSSEVLSATELRVQLAQKEQELARAKEALQAMKADRKRLKGEKTDLVSQMQQLYATLESREEQLRDFIRNYEQHRKESEDAVKALAKEKDLLEREKWELRRQAKEATDHATALRSQLDLKDNRMKELEAELAMAKQSLATLTKDVPKRHSLAMPGETVLNGNQEWVVQADLPLTAAIRQSQQTLYHSHPPHPADRQAVRVSPCHSRQPSVISDASAAEGDRSSTPSDINSPRHRTHSLCNGDSPGPVQKNLHNPIVQSLEDLEDQKRKKKKEKMGFGSISRVFARGKQRKSLDPGLFDGTAPDYYIEEDADW

SEQ ID NO: 17647 - protein, 1071 aa, Homo sapiens
MGCFKGVVAVGYINEAIDEGNPLRTLETLLLPTANISDVDPAHAQHYQDVLYHAKSQKLGDSESVSKVLWLDEIQQAVDDANVDKDRAKQWVTLVVDVNQCLEGKKSSDILSVLKSSTSNANDIIPECADKYYDALVKAKELKSERVSSDGSWLKLNLHKKYDYYYNTDSKESSWVTPESCLYKESWLTGKEIEAFWKGYKQRKEYMHRRQTFIDNTDSIVKIQSWFRMATARKSYLSRLQYFRDHNNEIVKIQSLLRANKARDDYKTLVGSENPPLTVIRKFVYLLDQSDLDFQEELEVARLREEVVTKIRANQQLEKDLNLMDIKIGLLVKNRITLEDVISHSKKLNKKKGGEMEILNNTDNQGIKSLSKERRKTLETYQQLFYLLQTNPLYLAKLIFQMPQNKSTKFMDTVIFTLYNYASNQREEYLLLKLFKTALEEEIKSKVDQVQDIVTGNPTVIKMVVSFNRGARGQNTLRQLLAPVVKEIIDDKSLIINTNPVEVYKAWVNQLETQTGEASKLPYDVTTEQALTYPEVKNKLEASIENLRRVTDKVLNSIISSLDLLPYGLRYIAKVLKNSIHEKFPDATEDELLKIVGNLLYYRYMNPAIVAPDGFDIIDMTAGGQINSDQRRNLGSVAKVLQHAASNKLFEGENEHLSSMNNYLSETYQEFRKYFKEACNVPEPEEKFNMDKYTDLVTVSKPVIYISIEEIISTHSLLLEHQDAIAPEKNDLLSELLGSLGEVPTVESFLGEGAVDPNDPNKANTLSQLSKTEISLVLTSKYDIEDGEAIDSRSLMIKTKKLIIDVIRNQPGNTLTEILETPATAQQEVDHATDMVSRAMIDSRTPEEMKHSQSMIEDAQLPLEQKKRKIQRNLRTLEQTGHVSSENKYQDILNEIAKDIRNQRIYRKLRKAELAKLQQTLNALNKKAAFYEEQINYYDTYIKTCLDNLKRKNTRRSIKLDGKGEPKGAKRAKPVKYTAAKLHEKGVLLDIDDLQTNQFKNVTFDIIATEDVGIFDVRSKFLGVEMEKVQLNIQDLLQMQYEGVAVMKMFDKVKVNVNLLIYLLNKKFYGK

SEQ ID NO: 17648 - protein, 326 aa, Homo sapiens
MFKRHKSLASERKRALLSQRATRFILKDDMRNFHFLSKLVLSAGPLRPTPAVKHSKTTHFEIEIFDAQTRKQICILDKVTQSSTIHDVKQKFHKACPKWYPSRVGLQLECGGPFLKDYITIQSIAASSIVTLYATDLGQQVSWTTVFLAEYTGPLLIYLLFYLRIPCIYDGKESARRLRHPVVHLACFCHCIHYIRYLLETLFVHKVSAGHTPLKNLIMSCAFYWGFTSWIAYYINHPLYTPPSFGNRQITVSAINFLICEAGNHFINVMLSHPNHTGNNACFPSPNYNPFTWMFFLVSCPNYTYEIGSWISFTVMTQTLPGGLTA

SEQ ID NO: 17649 - protein, 1166 aa, Homo sapiens
MCRKRTRARTSAAEASLRASILARDCAAAAAIVFLVDRFLYGLDVSGKLLQVAKGLHKLQPATPIAPQVVIRQARISVNSGKLLKAEYILSSLISNNGATGTWLYRNESDKVLVQSVCIQIRGQILQKLGMWYEAAELIWASIVGYLALPQPDKKGLSTSLGILADIFVSMSKNDYEKFKNNPQINLSLLKEFDHHLLSAAEACKLAAAFSAYTPLFVLTAVNIRGTCLLSYSSSNDCPPELKNLHLCEAKEAFEIGLLTKRDDEPVTGKQELHSFVKAAFGLTTVHRRLHGETGTVHAASQLCKEAMGKLYNFSTSSRSQDREALSQEVMSVIAQVKEHLQVQSFSNVDDRSYVPESFECRLDKLILHGQGDFQKILDTYSQHHTSVCEVFESDCGNNKNEQKDAKTGVCITALKTEIKNIDTVSTTQEKPHCQRDTGISSSLMGKNVQRELRRGGRRNWTHSDAFRVSLDQDVETETEPSDYSNGEGAVFNKSLSGSQTSSAWSNLSGFSSSASWEEVNYHVDDRSARKEPGKEHLVDTQCSTALSEELENDREGRAMHSLHSQLHDLSLQEPNNDNLEPSQNQPQQQMPLTPFSPHNTPGIFLAPGAGLLEGAPEGIQEVRNMGPRNTSAHSRPSYRSASWSSDSGRPKNMGTHPSVQKEEAFEIIVEFPETNCDVKDRQGKEQGEEISERGAGPTFKASPSWVDPEGETAESTEDAPLDFHRVLHNSLGNISMLPCSSFTPNWPVQNPDSRKSGGPVAEQGIDPDASTVDEEGQLLDSMDVPCTNGHGSHRLCILRQPPGQRAETPNSSVSGNILFPVLSEDCTTTEEGNQPGNMLNCSQNSSSSSVWWLKSPAFSSGSSEGDSPWSYLNSSGSSWVSLPGKMRKEILEARTLQPDDFEKLLAGVRHDWLFQRLENTGVFKPSQLHRAHSALLLKYSKKSELWTAQETIVYLGDYLTVKKKGRQRNAFWVHHLHQEEILGRYVGKDYKEQKGLWHHFTDVERQMTAQHYVTEFNKRLYEQNIPTQIFYIPSTILLILEDKTIKGCISVEPYILGEFVKLSNNTKVVKTEYKATEYGLAYGHFSYEFSNHRDVVVDLQGWVTGNGKGLIYLTDPQIHSVDQKVFTTNFGKRGIFYFFNNQHVECNEICHRLSLTRPSMEKPCT

SEQ ID NO: 17650 - protein, 157 aa, Homo sapiens
MKNHLLFWGVLAVFIKAVHVKGSRDSSASASRVAGITAQEDERIVLVDNKCKCARITSRIIRSSEDPNEDIVERNIRIIVPLNNRENISDPTSPLRTRFVYHLSDLCKKCDPTEVELDNQIVTATQSNICDEDSATETCYTYDRNKCYTAVVPLVYG

SEQ ID NO: 17651 - protein, 1306 aa, Homo sapiens
MQRGAALCLRLWLCLGLLDGLVSGYSMTPPTLNITEESHVIDTGDSLSISCRGQHPLEWAWPGAQEAPATGDKDSEDTGVVRDCEGTDARPYCKVLLLHEVHANDTGSYVCYYKYIKARIEGTTAASSYVFVRDFEQPFINKPDTLLVNRKDAMWVPCLVSIPGLNVTLRSQSSVLWPDGQEVVWDDRRGMLVSTPLLHDALYLQCETTWGDQDFLSNPFLVHITGNELYDIQLLPRKSLELLVGEKLVLNCTVWAEFNSGVTFDWDYPGKQAERGKWVPERRSQQTHTELSSILTIHNVSQHDLGSYVCKANNGIQRFRESTEVIVHENPFISVEWLKGPILEATAGDELVKLPVKLAAYPPPEFQWYKDGKALSGRHSPHALVLKEVTEASTGTYTLALWNSAAGLRRNISLELVVNVPPQIHEKEASSPSIYSRHSRQALTCTAYGVPLPLSIQWHWRPWTPCKMFAQRSLRRRQQQDLMPQCRDWRAVTTQDAVNPIESLDTWTEFVEGKNKTVSKLVIQNANVSAMYKCVVSNKVGQDERLIYFYVTTIPDGFTIESKPSEELLEGQPVLLSCQADSYKYEHLRWYRLNLSTLHDAHGNPLLLDCKNVHLFATPLAASLEEVAPGARHATLSLSIPRVAPEHEGHYVCEVQDRRSHDKHCHKKYLSVQALEAPRLTQNLTDLLVNVSDSLEMQCLVAGAHAPSIVWYKDERLLEEKSGVDLADSNQKLSIQRVREEDAGRYLCSVCNAKGCVNSSASVAVEGSEDKGSMEIVILVGTGVIAVFFWVLLLLIFCNMRRPAHADIKTGYLSIIMDPGEVPLEEQCEYLSYDASQWEFPRERLHLGRVLGYGAFGKVVEASAFGIHKGSSCDTVAVKMLKEGATASEHRALMSELKILIHIGNHLNVVNLLGACTKPQGPLMVIVEFCKYGNLSNFLRAKRDAFSPCAEKSPEQRGRFRAMVELARLDRRRPGSSDRVLFARFSKTEGGARRASPDQEAEDLWLSPLTMEDLVCYSFQVARGMEFLASRKCIHRDLAARNILLSESDVVKICDFGLARDIYKDPDYVRKGSARLPLKWMAPESIFDKVYTTQSDVWSFGVLLWEIFSLGASPYPGVQINEEFCQRLRDGTRMRAPELATPAIRRIMLNCWSGDPKARPAFSELVEILGDLLQGRGLQEEEEVCMAPRSSQSSEEGSFSQVSTMALHIAQADAEDSPPSLQRHSLAARYYNWVSFPGCLARGAETRGSSRMKTFEEFPMTPTTYKGSVDNQTDSGMVLASEEFEQIESRHRQESGFRGTRRTRGA

SEQ ID NO: 17652 - protein, 1233 aa, Homo sapiens
MSNITIDPDVKPGEYVIKSLFAEFAVQAEKKIEVVMAEPLEKLLSRSLQRGEDLQFDQLISSMSSVAEHCLPSLLRTLFDWYRRQNGTEDESYEYRPRSSTKSKGDEQQRERDYLLERRDLAVDFIFCLVLVEVLKQIPVHPVPDPLVHEVLNLAFKHFKHKEGYSGTNTGNVHIIADLYAEVIGVLAQSKFQAVRKKFVTELKELRQKEQSPHVVQSVISLIMGMKFFRVKMYPVEDFEASFQFMQECAQYFLEVKDKDIKHALAGLFVEILIPVAAAVKNEVNVPCLKNFVEMLYQTTFELSSRKKHSLALYPLITCLLCVSQKQFFLNNWHIFLQNCLSHLKNKDPKMSRVALESLYRLLWVYVIRIKCESNTVTQSRLMSIVSALFPKGSRSVVPRDTPLNIFVKIIQFIAQERLDFAMKEIIFDLLSVGKSTKTFTINPERMNIGLRVFLVIADSLQQKDGEPPMPTTGVILPSGNTLRVKKIFLNKTLTDEEAKVIGMSVYYPQVRKALDSILRHLDKEVGRPMCMTSVQMSNKEPEDMITGERKPKIDLFRTCIAAIPRLIPDGMSRTDLIELLARLTIHMDEELRALAFNTLQALMLDFPDWREDVLSGFVYFIVREVTDVHPTLLDNAVKMLVQLINQWKQAAQMHNKNQDTQHGVANGASHPPPLERSPYSNVFHVVEGFALVILCSSRPATRRLAVSVLREIRALFALLEIPKGDDELAIDVMDRLSPSILESFIHLTGADQTTLLYCPSSIDLQTLAEWNSSPISHQFDVISPSHIWIFAHVTQGQDPWIISLSSFLKQENLPKHCSTAVSYAWMFAYTRLQLLSPQVDINSPINAKKVNTTTSSDSYIGLWRNYLILCCSAATSSSSTSAGSVRCSPPETLASTPDSGYSIDSKIIGIPSPSSLFKHIVPMMRSESMEITESLVLGLGRTNPGAFRELIEELHPIIKEALERRPENMKRRRRRDILRVQLVRIFELLADAGVISHSASGGLDNETHFLNNTLLEYVDLTRQLLEAENEKDSDTLKDIRCHFSALVANIIQNVPVHQRRSIFPQQSLRHSLFMLFSHWAGPFSIMFTPLDRYSDRNMQINRHQYCALKAMSAVLCCGPVADNVGLSSDGYLYKWLDNILDSLDKKVHQLGCEAVTLLLELNPDQSNLMYWAVDRCYTGSGRVAAGCFKAIANVFQNRDYQCDTVMLLNLILFKAADSSRSIYEVAMQLLQR

SEQ ID NO: 17653 - protein, 862 aa, Homo sapiens
MLRNSTFKNMQRRHTTLREKGRRQAIRGPAYMFNEKGTSLTPEEERFLDSAEYGNIPVVRKMLEESKTLNFNCVDYMGQNALQLAVGNEHLEVTELLLKKENLARVGDALLLAISKGYVRIVEAILNHPAFAQGQRLTLSPLEQELRDDDFYAYDEDGTRFSHDITPIILAAHCQEYEIVHILLLKGARIERPHDYFCKCNECTEKQRKDSFSHSRSRMNAYKGLASAAYLSLSSEDPVLTALELSNELARLANIETEFKNDYRKLSMQCKDFVVGVLDLCRDTEEVEAILNGDVNFQVWSDHHRPSLSRIKLAIKYEVKKFVAHPNCQQQLLTMWYENLSGLRQQSIAVKFLAVFGVSIGLPFLAIAYWIAPCSKLGRTLRSPFMKFVAHAVSFTIFLGLLVVNASDRFEGVKTLPNETFTDYPKQIFRVKTTQFSWTEMLIMKWVLGMIWSECKEIWEEGPREYVLHLWNLLDFGMLSIFVASFTARFMAFLKATEAQLYVDQHVQDDTLHNVSLPPEVAYFTYARDKWWPSDPQIISEGLYAIAVVLSFSRIAYILPANESFGPLQISLGRTVKDIFKFMVIFIMVFVAFMIGMFNLYSYYRGAKYNPAFTTVEESFKTLFWSIFGLSEVISVVLKYDHKFIENIGYVLYGVYNVTMVVVLLNMLIAMINNSYQEIEEDADVEWKFARAKLWLSYFDEGRTLPAPFNLVPSPKSFYYLIMRIKMCLIKLCKSKAKSCENDLEMGMLNSKFKKTRYQAGMRNSENLTANNTLSKPTRYQKIMKRLIKRYVLKAQVDRENDEVNEGELKEIKQDISSLRYELLEEKSQATGELADLIQQLSEKFGKNLNKDHLRVNKGKDI

SEQ ID NO: 17654 - protein, 223 aa, Homo sapiens
MEGLVFLNALATRLLFLLHSLVGVWRVTEVKKEPRYWLLALLNLLLFLETALTLKFKRGRGYKWFSPAIFLYLISIVPSLWLLELHHETQYCSIQAEGTSQNTSRKEDFNQTLTSNEQTSRADDLIETAKVFVNNLSTVCEKVWTLGLHQTFLLMLIIGRWLLPIGGGITRDQLSQLLLMFVGTAADILEFTSETLEEQNVRLCWKNSTNRRHTNPKWQLVLF

SEQ ID NO: 17655 - protein, 542 aa, Homo sapiens
MAASGLDHLKNGYRRRFCRPSRARDINTEQGQNVLEILQDCFEEKSLANDFSTNSTKSVPNSTRKIKDTCIQSPSKECQKSHPKSVPVSSKKKEASLQFVVEPSEATNRSVQAHEVHQKILATDVSSKNTPDSKKISSRNINDHHSEADEEFYLSVGSPSVLLDAKTSVSQNVIPSSAQKRETYTFENSVNMLPSSTEVSVKTKKRLNFDDKVMLKKIEIDNKVSDEEDKTSEGQERKPSGSSQNRIRDSEYEIQRQAKKSFSTLFLETVKRKSESSPIVRHAATAPPHSCPPDDTKLIEDEFIIDESDQSFASRSWITIPRKAGSLKQRTISPAESTALLQGRKSREKHHNILPKTLANDKHSHKPHPVETSQPSDKTVLDTSYALIGETVNNYRSTKYEMYSKNAEKPSRSKRTIKQKQRRKFMAKPAEEQLDVGQSKDENIHTSHITQDEFQRNSDRNMEEHEEMGNDCVSKKQMPPVGSKKSSTRKDKEESKKKRFSSESKNKLVPEEVTSTVTKSRRISRRPSDWWVVKSEESCLKC

SEQ ID NO: 17656 - protein, 1509 aa, Homo sapiens
MNSPVDPGARQALRKKPPERTPEDLNTIYSYLHGMEILSNLREHQLRLMSARARYERYSGNQVLFCSETIARCWYILLSGSVLVKGSMVLPPCSFGKQFGGKRGCDCLVLEPSEMIVVENAKDNEDSILQREIPARQSRRRFRKINYKGERQTITDDVEVNSYLSLPADLTKMHLTENPHPQVTHVSSSQSGCSIASDSGSSSLSDIYQATESEVGDVDLTRLPEGPVDSEDDEEEDEEIDRTDPLQGRDLVRECLEKEPADKTDDDIEQLLEFMHQLPAFANMTMSVRRELCSVMIFEVVEQAGAIILEDGQELDSWYVILNGTVEISHPDGKVENLFMGNSFGITPTLDKQYMHGIVRTKVDDCQFVCIAQQDYWRILNHVEKNTHKVEEEGEIVMVHEHRELDRSGTRKGHIVIKATPERLIMHLIEEHSIVDPTYIEDFLLTYRTFLESPLDVGIKLLEWFKIDSLRDKVTRIVLLWVNNHFNDFEGDPAMTRFLEEFEKNLEDTKMNGHLRLLNIACAAKAKWRQVVLQKASRESPLQFSLNGGSEKGFGIFVEGVEPGSKAADSGLKRGDQIMEVNGQNFENITFMKAVEILRNNTHLALTVKTNIFVFKELLFRTEQEKSGVPHIPKIAEKKSNRHSIQHVPGDIEQTSQEKGSKKVKANTVSGGRNKIRKILDKTRFSILPPKLFSDGGLSQSQDDSIVGTRHCRHSLAIMPIPGTLSSSSPDLLQPTTSMLDFSNPSAVGFYYIPDQVIRVFKVDQQSCYIIISKDTTAKEVVFHAVHEFGLTGASDTYSLCEVSVTPEGVIKQRRLPDQFSKLADRIQLNGRYYLKNNMETETLCSDEDAQELVKESQLSMLQLSTIEVATQLSMRDFDLFRNIEPTEYIDDLFKLNSKTGNTHLKRFEDIVNQETFWVASEILTEANQLKRMKIIKHFIKIALHCRECKNFNSMFAIISGLNLASVARLRGTWEKLPSKYEKHLQDLQDIFDPSRNMAKYRNILSSQSMQPPIIPLFPVVKKDMTFLHEGNDSKVDGLVNFEKLRMISKEIRQVVRMTSANMDPAMMFRQRKKRWRSLGSLSQGSTNSNMLDVQGGAHKKRARRSSLLNAKKLYEDAQMARKVKQYLSSLDVETDEEKFQMMSLQWEPAYGTLTKNLSEKRSAKSSEMSPVPMRSAGQTTKAHLHQPHRVSQVLQVPAVNLHPIRKKGQTKDPALNTSLPQKVLGTTEEISGKKHTEDTISVASSLHSSPPASPQGSPHKGYTLIPSAKSDNLSDSSHSEISSRSSIVSNCSVDSMSAALQDERCSSQALAVPESTGALEKTEHASGIGDHSQHGPGWTLLKPSLIKCLAVSSSVSNEEISQEHIIIEAADSGRGSWTSCSSSSHDNFQSLPNPKSWDFLNSYRHTHLDDPIAEVEPTDSEPYSCSKSCSRTCGQCKGSLERKSWTSSSSLSDTYEPNYGTVKQRVLESTPAESSEGLDPKDATDPVYKTVTSSTEKGLIENEQVSAV

SEQ ID NO: 17657 - protein, 1036 aa, Homo sapiens
MGLGTLSPRMLVWLVASGIVFYGELWVCAGLDYDYTFDGNEEDKTETIDYKDPCKAAVFWGDIALDDEDLNIFQIDRTIDLTQNPFGNLGHTTGGLGDHAMSKKRGALYQLIDRIRRIGFGLEQNNTVKGKVPLQFSGQNEKNRVPRAATSRTERIWPGGVIPYVIGGNFTGSQRAMFKQAMRHWEKHTCVTFIERSDEESYIVFTYRPCGCCSYVGRRGNGPQAISIGKNCDKFGIVVHELGHVIGFWHEHTRPDRDNHVTIIRENIQPGQEYNFLKMEPGEVNSLGERYDFDSIMHYARNTFSRGMFLDTILPSRDDNGIRPAIGQRTRLSKGDIAQARKLYRCPACGETLQESNGNLSSPGFPNGYPSYTHCIWRVSVTPGEKIVLNFTTMDLYKSSLCWYDYIEVRDGYWRKSPLLGRFCGDKLPEVLTSTDSRMWIEFRSSSNWVGKGFAAVYEAICGGEIRKNEGQIQSPNYPDDYRPMKECVWKITVSESYHVGLTFQSFEQEHQENPGIASKARESLILIWKPIERHDNCAYDYLEVRDGTSENSPLIGRFCGYDKPEDIRSTSNTLWMKFVSDGTVNKAGFAANFFKEEDECAKPDRGGCEQRCLNTLGSYQCACEPGYELGPDRRSCEAACGGLLTKLNGTITTPGWPKEYPPNKNCVWQVVAPTQYRISVKFEFFELEGNEVCKYDYVEIWSGLSSESKLHGKFCGAEVPEVITSQFNNMRIEFKSDNTVSKKGFKAHFFSDKDECSKDNGGCQHECVNTMGSYMCQCRNGFVLHDNKHDCKEAECEQKIHSPSGLITSPNWPDKYPSRKECTWEISATPGHRIKLAFSEFEIEQHQECAYDHLEVFDGETEKSPILGRLCGNKIPDPLVATGNKMFVRFVSDASVQRKGFQATHSTECGGRLKAESKPRDLYSHAQFGDNNYPGQVDCEWLLVSERGSRLELSFQTFEVEEEADCGYDYVELFDGLDSTAVGLGRFCGSGPPEEIYSIGDSVLIHFHTDDTINKKGFHIRYKSIRYPDTTHTKK

SEQ ID NO: 17658 - protein, 375 aa, Homo sapiens
MSTAGKVIKCKAAVLWELKKPFSIEEVEVAPPKAHEVRIKMVAAGICRSDEHVVSGNLVTPLPVILGHEAAGIVESVGEGVTTVKPGDKVIPLFTPQCGKCRICKNPESNYCLKNDLGNPRGTLQDGTRRFTCSGKPIHHFVGVSTFSQYTVVDENAVAKIDAASPLEKVCLIGCGFSTGYGSAVKVAKVTPGSTCAVFGLGGVGLSVVMGCKAAGAARIIAVDINKDKFAKAKELGATECINPQDYKKPIQEVLKEMTDGGVDFSFEVIGRLDTMMASLLCCHEACGTSVIVGVPPDSQNLSINPMLLLTGRTWKGAIFGGFKSKESVPKLVADFMAKKFSLDALITNILPFEKINEGFDLLRSGKSIRTVLTF

SEQ ID NO: 17659 - protein, 856 aa, Homo sapiens
MALVLGSLLLLGLCGNSFSGGQPSSTDAPKAWNYELPATNYETQDSHKAGPIGILFELVHIFLYVVQPRDFPEDTLRKFLQKAYESKIDYDKIVYYEAGIILCCVLGLLFIILMPLVGYFFCMCRCCNKCGGEMHQRQKENGPFLRKCFAISLLVICIIISIGIFYGFVANHQVRTRIKRSRKLADSNFKDLRTLLNETPEQIKYILAQYNTTKDKAFTDLNSINSVLGGGILDRLRPNIIPVLDEIKSMATAIKETKEALENMNSTLKSLHQQSTQLSSSLTSVKTSLRSSLNDPLCLVHPSSETCNSIRLSLSQLNSNPELRQLPPVDAELDNVNNVLRTDLDGLVQQGYQSLNDIPDRVQRQTTTVVAGIKRVLNSIGSDIDNVTQRLPIQDILSAFSVYVNNTESYIHRNLPTLEEYDSYWWLGGLVICSLLTLIVIFYYLGLLCGVCGYDRHATPTTRGCVSNTGGVFLMVGVGLSFLFCWILMIIVVLTFVFGANVEKLICEPYTSKELFRVLDTPYLLNEDWEYYLSGKLFNKSKMKLTFEQVYSDCKKNRGTYGTLHLQNSFNISEHLNINEHTGSISSELESLKVNLNIFLLGAAGRKNLQDFAACGIDRMNYDSYLAQTGKSPAGVNLLSFAYDLEAKANSLPPGNLRNSLKRDAQTIKTIHQQRVLPIEQSLSTLYQSVKILQRTGNGLLERVTRILASLDFAQNFITNNTSSVIIEETKKYGRTIIGYFEHYLQWIEFSISEKVASCKPVATALDTAVDVFLCSYIIDPLNLFWFGIGKATVFLLPALIFAVKLAKYYRRMDSEDVYDDVETIPMKNMENGNNGYHKDHVYGIHNPVMTSPSQH

SEQ ID NO: 17660 - protein, 2284 aa, Homo sapiens
MDEEEDGAGAEESGQPRSFMRLNDLSGAGGRPGPGSAEKDPGSADSEAEGLPYPALAPVVFFYLSQDSRPRSWCLRTVCNPWFERISMLVILLNCVTLGMFRPCEDIACDSQRCRILQAFDDFIFAFFAVEMVVKMVALGIFGKKCYLGDTWNRLDFFIVIAGMLEYSLDLQNVSFSAVRTVRVLRPLRAINRVPSMRILVTLLLDTLPMLGNVLLLCFFVFFIFGIVGVQLWAGLLRNRCFLPENFSLPLSVDLERYYQTENEDESPFICSQPRENGMRSCRSVPTLRGDGGGGPPCGLDYEAYNSSSNTTCVNWNQYYTNCSAGEHNPFKGAINFDNIGYAWIAIFQVITLEGWVDIMYFVMDAHSFYNFIYFILLIIVGSFFMINLCLVVIATQFSETKQRESQLMREQRVRFLSNASTLASFSEPGSCYEELLKYLVYILRKAARRLAQVSRAAGVRVGLLSSPAPLGGQETQPSSSCSRSHRRLSVHHLVHHHHHHHHHYHLGNGTLRAPRASPEIQDRDANGSRRLMLPPPSTPALSGAPPGGAESVHSFYHADCHLEPVRCQAPPPRSPSEASGRTVGSGKVYPTVHTSPPPETLKEKALVEVAASSGPPTLTSLNIPPGPYSSMHKLLETQSTGACQSSCKISSPCLKADSGACGPDSCPYCARAGAGEVELADREMPDSDSEAVYEFTQDAQHSDLRDPHSRRQRSLGPDAEPSSVLAFWRLICDTFRKIVDSKYFGRGIMIAILVNTLSMGIEYHEQPEELTNALEISNIVFTSLFALEMLLKLLVYGPFGYIKNPYNIFDGVIVVISVWEIVGQQGGGLSVLRTFRLMRVLKLVRFLPALQRQLVVLMKTMDNVATFCMLLMLFIFIFSILGMHLFGCKFASERDGDTLPDRKNFDSLLWAIVTVFQILTQEDWNKVLYNGMASTSSWAALYFIALMTFGNYVLFNLLVAILVEGFQAEEISKREDASGQLSCIQLPVDSQGGDANKSESEPDFFSPSLDGDGDRKKCLALVSLGEHPELRKSLLPPLIIHTAATPMSLPKSTSTGLGEALGPASRRTSSSGSAEPGAAHEMKSPPSARSSPHSPWSAASSWTSRRSSRNSLGRAPSLKRRSPSGERRSLLSGEGQESQDEEESSEEERASPAGSDHRHRGSLEREAKSSFDLPDTLQVPGLHRTASGRGSASEHQDCNGKSASGRLARALRPDDPPLDGDDADDEGNLSKGERVRAWIRARLPACCLERDSWSAYIFPPQSRFRLLCHRIITHKMFDHVVLVIIFLNCITIAMERPKIDPHSAERIFLTLSNYIFTAVFLAEMTVKVVALGWCFGEQAYLRSSWNVLDGLLVLISVIDILVSMVSDSGTKILGMLRVLRLLRTLRPLRVISRAQGLKLVVETLMSSLKPIGNIVVICCAFFIIFGILGVQLFKGKFFVCQGEDTRNITNKSDCAEASYRWVRHKYNFDNLGQALMSLFVLASKDGWVDIMYDGLDAVGVDQQPIMNHNPWMLLYFISFLLIVAFFVLNMFVGVVVENFHKCRQHQEEEEARRREEKRLRRLEKKRRNLMLDDVIASGSSASAASEAQCKPYYSDYSRFRLLVHHLCTSHYLDLFITGVIGLNVVTMAMEHYQQPQILDEALKICNYIFTVIFVLESVFKLVAFGFRRFFQDRWNQLDLAIVLLSIMGITLEEIEVNASLPINPTIIRIMRVLRIARVLKLLKMAVGMRALLDTVMQALPQVGNLGLLFMLLFFIFAALGVELFGDLECDETHPCEGLGRHATFRNFGMAFLTLFRVSTGDNWNGIMKDTLRDCDQESTCYNTVISPIYFVSFVLTAQFVLVNVVIAVLMKHLEESNKEAKEEAELEAELELEMKTLSPQPHSPLGSPFLWPGVEGPDSPDSPKPGALHPAAHARSASHFSLEHPTMQPHPTELPGPDLLTVRKSGVSRTHSLPNDSYMCRHGSTAEGPLGHRGWGLPKAQSGSVLSVHSQPADTSYILQLPKDAPHLLQPHSAPTWGTIPKLPPPGRSPLAQRPLRRQAAIRTDSLDVQGLGSREDLLAEVSGPSPPLARAYSFWGQSSTQAQQHSRSHSKISKHMTPPAPCPGPEPNWGKGPPETRSSLELDTELSWISGDLLPPGGQEEPPSPRDLKKCYSVEAQSCQRRPTSWLDEQRRHSIAVSCLDSGSQPHLGTDPSNLGGQPLGGPGSRPKKKLSPPSITIDPPESQGPRTPPSPGICLRRRAPSSDSKDPLASGPPDSMAASPSPKKDVLSLSGLSSDPADLDP

SEQ ID NO: 17661 - protein, 402 aa, Homo sapiens
MVGQRVLLLVAFLLSGVLLSEAAKILTISTLDIKEEEKSYQVIRWFSPEDHQKRIKKHFDSYIETALDGRKESEALVKLMEIFGTQCSYLLSRKDIMDSLKNENYDLVFVEAFDFCSFLIAEKLVKPFVAILPTTFGSLDFGLPSPLSYVPVFPSLLTDHMDFWGRVKNFLMFFSFSRSQWDMQSTFDNTIKEHFPEGSRPVLSHLLLKAELWFVNSDFAFDFARPLLPNTVYIGGLMEKPIKPVPQDLDNFIANFGDAGFVLVAFGSMLNTHQSQEVLKKMHNAFAHLPQGVIWTCQSSHWPRDVHLATNVKIVDWLPQSDLLAHPSIRLFVTHGGQNSVMEAIRHGVPMVGLPVNGDQHGNMVRVVAKNYGVSIRLNQVTADTLTLTMKQVIEDKRYVAL

SEQ ID NO: 17662 - protein, 1070 aa, Homo sapiens
MAGALRRGRALGSRPSGPTVSSRRSPQCPVAQEGLGARSRPRVAPRSLARCGPSSRLMGWKPSEARGQSQSFQASGLQPRSLKAARRATGRPDRSRAARPTMDPSAHRSRAAPPNMDPDPQAGVQVGMRVVRGVDWKWGQQDGGEGGVGTVVELGRHGSPSTPDRTVVVQWDQGTRTNYRAGYQGAHDLLLYDNAQIGVRHPNIICDCCKKHGLRGMRWKCRVCLDYDLCTQCYMHNKHELAHAFDRYETAHSRPVTLSPRQGLPRIPLRGIFQGAKVVRGPDWEWGSQDGGEGKPGRVVDIRGWDVETGRSVASVTWADGTTNVYRVGHKGKVDLKCVGEAAGGFYYKDHLPRLGKPAELQRRVSADSQPFQHGDKVKCLLDTDVLREMQEGHGGWNPRMAEFIGQTGTVHRITDRGDVRVQFNHETRWTFHPGALTKHHSFWVGDVVRVIGDLDTVKRLQAGHGEWTDDMAPALGRVGKVVKVFGDGNLRVAVAGQRWTFSPSCLVAYRPEEDANLDVAERARENKSSLSVALDKLRAQKSDPEHPGRLVVEVALGNAARALDLLRRRPEQVDTKNQGRTALQVAAYLGQVELIRLLLQARAGVDLPDDEGNTALHYAALGNQPEATRVLLSAGCRADAINSTQSTALHVAVQRGFLEVVRALCERGCDVNLPDAHSDTPLHSAISAGTGASGIVEVLTEVPNIDVTATNSQGFTLLHHASLKGHALAVRKILARARQLVDAKKEDGFTALHLAALNNHREVAQILIREGRCDVNVRNRKLQSPLHLAVQQAHVGLVPLLVDAGCSVNAEDEEGDTALHVALQRHQLLPLVADGAGGDPGPLQLLSRLQASGLPGSAELTVGAAVACFLALEGADVSYTNHRGRSPLDLAAEGRVLKALQGCAQRFRERQAGGGAAPGPRQTLGTPNTVTNLHVGAAPGPEAAECLVCSELALLVLFSPCQHRTVCEECARRMKKCIRCQVVVSKKLRPDGSEVASAAPAPGPPRQLVEELQSRYRQMEERITCPICIDSHIRLVFQCGHGACAPCGSALSACPICRQPIRDRIQIFV

SEQ ID NO: 17663 - protein, 969 aa, Homo sapiens
MDPSAHRSRAAPPNMDPDPQAGVQVGMRVVRGVDWKWGQQDGGEGGVGTVVELGRHGSPSTPDRTVVVQWDQGTRTNYRAGYQGAHDLLLYDNAQIGVRHPNIICDCCKKHGLRGMRWKCRVCLDYDLCTQCYMHNKHELAHAFDRYETAHSRPVTLSPRQGLPRIPLRGIFQGAKVVRGPDWEWGSQDGGEGKPGRVVDIRGWDVETGRSVASVTWADGTTNVYRVGHKGKVDLKCVGEAAGGFYYKDHLPRLGKPAELQRRVSADSQPFQHGDKVKCLLDTDVLREMQEGHGGWNPRMAEFIGQTGTVHRITDRGDVRVQFNHETRWTFHPGALTKHHSFWVGDVVRVIGDLDTVKRLQAGHGEWTDDMAPALGRVGKVVKVFGDGNLRVAVAGQRWTFSPSCLVAYRPEEDANLDVAERARENKSSLSVALDKLRAQKSDPEHPGRLVVEVALGNAARALDLLRRRPEQVDTKNQGRTALQVAAYLGQVELIRLLLQARAGVDLPDDEGNTALHYAALGNQPEATRVLLSAGCRADAINSTQSTALHVAVQRGFLEVVRALCERGCDVNLPDAHSDTPLHSAISAGTGASGIVEVLTEVPNIDVTATNSQGFTLLHHASLKGHALAVRKILARARQLVDAKKEDGFTALHLAALNNHREVAQILIREGRCDVNVRNRKLQSPLHLAVQQAHVGLVPLLVDAGCSVNAEDEEGDTALHVALQRHQLLPLVADGAGGDPGPLQLLSRLQASGLPGSAELTVGAAVACFLALEGADVSYTNHRGRSPLDLAAEGRVLKALQGCAQRFRERQAGGGAAPGPRQTLGTPNTVTNLHVGAAPGPEAAECLVCSELALLVLFSPCQHRTVCEECARRMKKCIRCQVVVSKKLRPDGSEVASAAPAPGPPRQLVEELQSRYRQMEERITCPICIDSHIRLVFQCGHGACAPCGSALSACPICRQPIRDRIQIFV

SEQ ID NO: 17664 - protein, 609 aa, Homo sapiens
MDFLLALVLVSSLYLQAAAEFDGRWPRQIVSSIGLCRYGGRIDCCWGWARQSWGQCQPFYVLRQRIARIRCQLKAVCQPRCKHGECIGPNKCKCHPGYAGKTCNQDEHIPAPLDQGSEQPLFQPLDHQATSLPSRDLNECGLKPRPCKHRCMNTYGSYKCYCLNGYMLMPDGSCSSALTCSMANCQYGCDVVKGQIRCQCPSPGLQLAPDGRTCVDVDECATGRASCPRFRQCVNTFGSYICKCHKGFDLMYIGGKYQCHDIDECSLGQYQCSSFARCYNIRGSYKCKCKEGYQGDGLTCVYIPKVMIEPSGPIHVPKGNGTILKGDTGNNNWIPDVGSTWWPPKTPYIPPIITNRPTSKPTTRPTPKPTPIPTPPPPPPLPTELRTPLPPTTPERPTTGLTTIAPAASTPPGGITVDNRVQTDPQKPRGDVFIPRQPSNDLFEIFEIERGVSADDEAKDDPGVLVHSCNFDHGLCGWIREKDNDLHWEPIRDPAGGQYLTVSAAKAPGGKAARLVLPLGRLMHSGDLCLSFRHKVTGLHSGTLQVFVRKHGAHGAALWGRNGGHGWRQTQITLRGADIKSVVFKGEKRRGHTGEIGLDDVSLKKGHCS

SEQ ID NO: 17665 - protein, 597 aa, Homo sapiens
MRKGLRATAARCGLGLGYLLQMLVLPALALLSASGTGSAAQDDDFFHELPETFPSDPPEPLPHFLIEPEEAYIVKNKPVNLYCKASPATQIYFKCNSEWVHQKDHIVDERVDETSGLIVREVSIEISRQQVEELFGPEDYWCQCVAWSSAGTTKSRKAYVRIAYLRKTFEQEPLGKEVSLEQEVLLQCRPPEGIPVAEVEWLKNEDIIDPVEDRNFYITIDHNLIIKQARLSDTANYTCVAKNIVAKRKSTTATVIVYVNGGWSTWTEWSVCNSRCGRGYQKRTRTCTNPAPLNGGAFCEGQSVQKIACTTLCPVDGRWTPWSKWSTCGTECTHWRRRECTAPAPKNGGKDCDGLVLQSKNCTDGLCMQSFIYPISTEQRTQNEYGFSSAPDSDDVALYVGIVIAVIVCLAISVVVALFVYRKNHRDFESDIIDSSALNGGFQPVNIKAARQDLLAVPPDLTSAAAMYRGPVYALHDVSDKIPMTNSPILDPLPNLKIKVYNTSGAVTPQDDLSEFTSKLSPQMTQSLLENEALSLKNQSLARQTDPSCTAFGSFNSLGGHLIVPNSGVSLLIPAGAIPQGRVYEMYVTVHRKETMR

SEQ ID NO: 17666 - protein, 1231 aa, Homo sapiens
MAVEGSTITSRIKNLLRSPSIKLRRSKAGNRREDLSSKVTLEKVLGITVSGGRGLACDPRSGLVAYPAGCVVVLFNPRKHKQHHILNSSRKTITALAFSPDGKYLVTGESGHMPAVRVWDVAEHSQVAELQEHKYGVACVAFSPSAKYIVSVGYQHDMIVNVWAWKKNIVVASNKVSSRVTAVSFSEDCSYFVTAGNRHIKFWYLDDSKTSKVNATVPLLGRSGLLGELRNNLFTDVACGRGKKADSTFCITSSGLLCEFSDRRLLDKWVELRTTVAHCISVSQDYIFCGCADGTVRLFNPSNLHFLSTLPRPHALGTDIASVTEASRLFSGVANARYPDTIALTFDPTNQWLSCVYNDHSIYVWDVRDPKKVGKVYSALYHSSCVWSVEVYPEVKDSNQACLPPSSFITCSSDNTIRLWNTESSGVHGSTLHRNILSSDLIKIIYVDGNTQALLDTELPGGDKADASLLDPRVGIRSVCVSPNGQHLASGDRMGTLRVHELQSLSEMLKVEAHDSEILCLEYSKPDTGLKLLASASRDRLIHVLDAGREYSLQQTLDEHSSSITAVKFAASDGQVRMISCGADKSIYFRTAQKSGDGVQFTRTHHVVRKTTLYDMDVEPSWKYTAIGCQDRNIRIFNISSGKQKKLFKGSQGEDGTLIKVQTDPSGIYIATSCSDKNLSIFDFSSGECVATMFGHSEIVTGMKFSNDCKHLISVSGDSCIFVWRLSSEMTISMRQRLAELRQRQRGGKQQGPSSPQRASGPNRHQAPSMLSPGPALSSDSDKEGEDEGTEEELPALPVLAKSTKKALASVPSPALPRSLSHWEMSRAQESVGFLDPAPAANPGPRRRGRWVQPGVELSVRSMLDLRQLETLAPSLQDPSQDSLAIIPSGPRKHGQEALETSLTSQNEKPPRPQASQPCSYPHIIRLLSQEEGVFAQDLEPAPIEDGIVYPEPSDNPTMDTSEFQVQAPARGTLGRVYPGSRSSEKHSPDSACSVDYSSSCLSSPEHPTEDSESTEPLSVDGISSDLEEPAEGDEEEEEEEGGMGPYGLQEGSPQTPDQEQFLKQHFETLASGAAPGAPVQVPERSESRSISSRFLLQVQTRPLREPSPSSSSLALMSRPAQVPQASEPAVSLEQCEQLVAELRGSVRQAVRLYHSVAGCKMPSAEQSRIAQLLRDTFSSVRQELEAVAGAVLSSPGSSPGAVGAEQTQALLEQYSELLLRAVERRMERKL

SEQ ID NO: 17667 - protein, 2287 aa, Homo sapiens
MDEEEDGAGAEESGQPRSFMRLNDLSGAGGRPGPGSAEKDPGSADSEAEGLPYPALAPVVFFYLSQDSRPRSWCLRTVCNPWFERISMLVILLNCVTLGMFRPCEDIACDSQRCRILQAFDDFIFAFFAVEMVVKMVALGIFGKKCYLGDTWNRLDFFIVIAGMLEYSLDLQNVSFSAVRTVRVLRPLRAINRVPSMRILVTLLLDTLPMLGNVLLLCFFVFFIFGIVGVQLWAGLLRNRCFLPENFSLPLSVDLERYYQTENEDESPFICSQPRENGMRSCRSVPTLRGDGGGGPPCGLDYEAYNSSSNTTCVNWNQYYTNCSAGEHNPFKGAINFDNIGYAWIAIFQVITLEGWVDIMYFVMDAHSFYNFIYFILLIIVGSFFMINLCLVVIATQFSETKQRESQLMREQRVRFLSNASTLASFSEPGSCYEELLKYLVYILRKAARRLAQVSRAAGVRVGLLSSPAPLGGQETQPSSSCSRSHRRLSVHHLVHHHHHHHHHYHLGNGTLRAPRASPEIQDRDANGSRRLMLPPPSTPALSGAPPGGAESVHSFYHADCHLEPVRCQAPPPRSPSEASGRTVGSGKVYPTVHTSPPPETLKEKALVEVAASSGPPTLTSLNIPPGPYSSMHKLLETQSTGACQSSCKISSPCLKADSGACGPDSCPYCARAGAGEVELADREMPDSDSEAVYEFTQDAQHSDLRDPHSRRQRSLGPDAEPSSVLAFWRLICDTFRKIVDSKYFGRGIMIAILVNTLSMGIEYHEQPEELTNALEISNIVFTSLFALEMLLKLLVYGPFGYIKNPYNIFDGVIVVISVWEIVGQQGGGLSVLRTFRLMRVLKLVRFLPALQRQLVVLMKTMDNVATFCMLLMLFIFIFSILGMHLFGCKFASERDGDTLPDRKNFDSLLWAIVTVFQILTQEDWNKVLYNGMASTSSWAALYFIALMTFGNYVLFNLLVAILVEGFQAEEISKREDASGQLSCIQLPVDSQGGDANKSESEPDFFSPSLDGDGDRKKCLALVSLGEHPELRKSLLPPLIIHTAATPMSLPKSTSTGLGEALGPASRRTSSSGSAEPGAAHEMKSPPSARSSPHSPWSAASSWTSRRSSRNSLGRAPSLKRRSPSGERRSLLSGEGQESQDEEESSEEERASPAGSDHRHRGSLEREAKSSFDLPDTLQVPGLHRTASGRGSASEHQDCNGKSASGRLARALRPDDPPLDGDDADDEGNLSKGERVRAWIRARLPACCLERDSWSAYIFPPQSRFRLLCHRIITHKMFDHVVLVIIFLNCITIAMERPKIDPHSAERIFLTLSNYIFTAVFLAEMTVKVVALGWCFGEQAYLRSSWNVLDGLLVLISVIDILVSMVSDSGTKILGMLRVLRLLRTLRPLRVISRAQGLKLVVETLMSSLKPIGNIVVICCAFFIIFGILGVQLFKGKFFVCQGEDTRNITNKSDCAEASYRWVRHKYNFDNLGQALMSLFVLASKDGWVDIMYDGLDAVGVDQQNFHKCRQHQEEEEARRREEKRLRRLEKKRRSKEKQMAEAQCKPYYSDYSRFRLLVHHLCTSHYLDLFITGVIGLNVVTMAMEHYQQPQILDEALKICNYIFTVIFVLESVFKLVAFGFRRFFQDRWNQLDLAIVLLSIMGITLEEIEVNASLPINPTIIRIMRVLRIARVLKLLKMAVGMRALLDTVMQALPQVGNLGLLFMLLFFIFAALGVELFGDLECDETHPCEGLGRHATFRNFGMAFLTLFRVSTGDNWNGIMKDTLRDCDQESTCYNTVISPIYFVSFVLTAQFVLVNVVIAVLMKHLEESNKEAKEEAELEAELELEMKTLSPQPHSPLGSPFLWPGVEGPDSPDSPKPGALHPAAHARSASHFSLEHPTDRQLFDTISLLIQGSLEWELKLMDELAGPGGQPSAFPSAPSLGGSDPQMQPHPTELPGPDLLTVRKSGVSRTHSLPNDSYMCRHGSTAEGPLGHRGWGLPKAQSGSVLSVHSQPADTSYILQLPKDAPHLLQPHSAPTWGTIPKLPPPGRSPLAQRPLRRQAAIRTDSLDVQGLGSREDLLAEVSGPSPPLARAYSFWGQSSTQAQQHSRSHSKISKHMTPPAPCPGPEPNWGKGPPETRSSLELDTELSWISGDLLPPGGQEEPPSPRDLKKCYSVEAQSCQRRPTSWLDEQRRHSIAVSCLDSGSQPHLGTDPSNLGGQPLGGPGSRPKKKLSPPSITIDPPESQGPRTPPSPGICLRRRAPSSDSKDPLASGPPDSMAASPSPKKDVLSLSGLSSDPADLDP

SEQ ID NO: 17668 - protein, 241 aa, Homo sapiens
MKEERNYNFDGVSTNRLKQQLLEEVRKKDAVQLSIFELRHKITELEAKLNTDNEGSEWKTRYETQLELNDELEKQIVYLKEKVEKIHGNSSDRLSSIRVYERMPVESLNTLLKQLEEEKKTLESQVKYYALKLEQESKAYQKINNERRTYLAEMSQGSGLHQVSKRQQVDQLPRMQENLVKTLLLKEELDPLKVSCLETLGFSAAGVAGPENRTCLGQKALWPACLHGSSTLAVCQTHLKS

SEQ ID NO: 17669 - protein, 435 aa, Homo sapiens
MNKSRWQSRRRHGRRSHQQNPWFRLRDSEDRSDSRAAQPAHDSGHGDDESPSTSSGTAGTSSVPELPGFYFDPEKKRYFRLLPGHNNCNPLTKESIRQKEMESKRLRLLQEEDRRKKADTNSDRLFTVNDVKVGGSKYGIINLQSLKTPTLKVFMHENLYFTNRKVNSVCWASLNHLDSHILLCLMGLAETPGCATLLPASLFVNSHPAGIDRPGMLCSFRIPGAWSCAWSLNIQANNCFSTGLSRRVLLTNVVTGHRQSFGTNSDVLAQQFALMAPLLFNGCRSGEIFAIDLRCGNQGKGWKATRLFHDSAVTSVRILQDEQYLMASDMAGKIKLWDLRTTKCVRQYEGHVNEYAYLPLHVHEEEGILVAVGQDCYTRIWSLHDARLLRTIPSPYPASKADIPSVAFSSRLGGSRGAPGLLMAVGQDLYCYSYS

SEQ ID NO: 17670 - protein, 453 aa, Homo sapiens
FSKFRYLYEIARRHPYFYAPELLFFAKRYKAAFTECCQAADKAACLLPKLDELRDEGKASSAKQRLKCASLQKFGERAFKAWAVARLSQRFPKAEFAEVSKLVTDLTKVHTECCHGDLLECADDRADLAKYICENQDSISSKLKECCEKPLLEKSHCIAEVENDEMPADLPSLAADFVESKDVCKNYAEAKDVFLGMFLYEYARRHPDYSVVLLLRLAKTYETTLEKCCAAADPHECYAKVFDEFKPLVEEPQNLIKQNCELFEQLGEYKFQNALLVRYTKKVPQVSTPTLVEVSRNLGKVGSKCCKHPEAKRMPCAEDYLSVVLNQLCVLHEKTPVSDRVTKCCTESLVNRRPCFSALEVDETYVPKEFNAETFTFHADICTLSEKERQIKKQTALVELVKHKPKATKEQLKAVMDDFAAFVEKCCKADDKETCFAEEGKKLVAASQAALGL

SEQ ID NO: 17671 - protein, 331 aa, Homo sapiens
MYGKGKSNSSAVPSDSQAREKLALYVYEYLLHVGAQKSAQTFLSEIRWEKNITLGEPPGFLHSWWCVFWDLYCAAPERRETCEHSSEAKAFHDYPFMSPRYPGGPRPPLRIPNQALGGVPGSQPLLPSGMDPTRQQGHPNMGGPMQRMTPPRGMVPLGPQNYGGAMRPPLNALGGPGMPGMNMGPGGGRPWPNPTNANSIPYSSASPGNYVGPPGGGGPPGTPIMPSPADSTNSGDNMYTLMNAVPPGPNRPNFPMGPGSDGPMGGLGGMESHHMNGSLGSGDMDSISKNSPNNMSLSNQPGTPRDDGEMGGNFLNPFQSESYSPSMTMSV

SEQ ID NO: 17672 - protein, 867 aa, Homo sapiens
MPESKVGDTCVWDSKVENQQKKPVENRMKEDKSSIREAISKAKSTANIKTEQEGEASEKSLHLSPQHITHQTMPIGQRGSEQGKRVENINGTSYPSLQQKTNAVKKLHKCDECGKSFKYNSRLVQHKIMHTGEKRYECDDCGGTFRSSSSLRVHKRIHTGEKPYKCEECGKAYMSYSSLINHKSTHSGEKNCKCDECGKSFNYSSVLDQHKRIHTGEKPYECGECGKAFRNSSGLRVHKRIHTGEKPYECDICGKTFSNSSGLRVHKRIHTGEKPYECDECGKAFITCRTLLNHKSIHFGDKPYKCDECEKSFNYSSLLIQHKVIHTGEKPYECDECGKAFRNSSGLIVHKRIHTGEKPYKCDVCGKAFSYSSGLAVHKSIHPGKKAHECKECGKSFSYNSLLLQHRTIHTGERPYVCDVCGKTFRNNAGLKVHRRLHTGEKPYKCDVCGKAYISRSSLKNHKGIHLGEKPYKCSYCEKSFNYSSALEQHKRIHTREKPFGCDECGKAFRNNSGLKVHKRIHTGERPYKCEECGKAYISLSSLINHKSVHPGEKPFKCDECEKAFITYRTLTNHKKVHLGEKPYKCDVCEKSFNYTSLLSQHRRVHTREKPYECDRCEKVFRNNSSLKVHKRIHTGERPYECDVCGKAYISHSSLINHKSTHPGRTPHTCDECGKAFFSSRTLISHKRVHLGEKPFKCVECGKSFSYSSLLSQHKRIHTGEKPYVCDRCGKAFRNSSGLTVHKRIHTGEKPYECDECGKAYISHSSLINHKSVHQGKQPYNCECGKSFNYRSVLDQHKRIHTGKKPYRCNECGKAFNIRSNLTKHKRTHTGEESLNVIYVGSYSGTSQKRTYEGGNALDGGRMRMPL

SEQ ID NO: 17673 - protein, 688 aa, Homo sapiens
MGEIEDGEADHITTDVQGQKCALVCECTAPESVSGKDNLPFLNSVLKNPVCKLYRFPTSDNKWMRIREQMSESILSFHIPKELISLHIKEDLCRNQEIKELGELSPHWDNLRKNVLTHCDQMVNMYQDILTELSKETGSSFKSSSSKGEKTLEFVPINLHLQRMQVHSPHLKDALYDVITVGAPAAHFQGFKNGGLRKLLHRFETERRNTGYQFIYYSPENTAKAKEVLSNINQLQPLIATHADLLLNSASQHSPDSLKNSLKMLSEKTELFVHAFKDQLVRSALLALYTARPGGILKKPPSPKSSTEESSPQDQPPVMRGQDSIPHHSDYDEEEWDRVWANVGKSLNCIIAMVDKLIERDGGSEGSGGNNDGEKEPSLTDAIPSHPREDWYEQLYPLILTLKDCMGEVVNRAKQSLTFVLLQELAYSLPQCLMLTLRRDIVFSQALAGLVCGFIIKLQTSLYDPGFLQQLHTVGLIVQYEGLLSTYSDEIGMLEDMAVGISDLKKVAFKIIEAKSNDVLPVITGRREHYVVEVKLPARMFESLPLQIKEGQLLHVYPVLFNVGINEQQTLAERFGDVSLQESINQENFELLQEYYKIFMEKMPPDYISHFQEQNDLKALLENLLQNIQSKKRKNVEIMWLAATICRKLNGIRFTCCKSAKDRTSMSVTLEQCSILRDEHQLHKDFFI

SEQ ID NO: 17674 - protein, 218 aa, Homo sapiens
SSREPVGHKEESPKGPGGGPAASGGVAEGIANGRLVQHHGAEPSSLDKRKEIFSKDTLFKPLHSTLSVNSYHKSSLSLLKSHPKTPADTLPGRCEKLEPSLGTSAAQAMPASQRQQESGGNQEASFDYYNVSDDDDSEEGANKNTEEEKNREDVGTMQWLLEREKERDLQRKFEKNLTLLAPKETDSSSNQRATHSARLDSMDSSSITVDSGFNSPRN

SEQ ID NO: 17675 - protein, 400 aa, Homo sapiens
MSLHAWEWEEDPASIEPISSITSFYQSTSECDVEEHLKAKARAQESDSDRPCSSIESSSEPASTFSSDVPHVVPCKFTISLAFPVNMGQKGKYASLIEKYKKHPKTDSSVTKMRRFYHIEYFLLPDDEEPKKVDILLFPMVAKVFLESGVKTVKPWHEGDKAWVSWEQTFNITVTKELLKKINFHKITLRLWNTKDKMSRKVRYYRLKTAGFTDDVGAFHKSEVRHLVLNQRKLSEQGIENTNIVREESNQEHPPGKQEKTEKHPKSLQGSHQAEPETSSKNSEEYEKSLKMDDSSTIQWSVSRTPTISLAGASMMEIKELIESESLSSLTNILDRQRSQIKGKDSEGRRKIQRRHKKPLAEEEADPTLTGPRKQSAFSIQLAVMPLLAVRKKKGNSPIS

SEQ ID NO: 17676 - protein, 375 aa, Homo sapiens
MRTKQVNLLITLVAVALFSFSCFSIYRITQTNNQLINCRNHILEFKENMLHLRNKTEKNTQEMMKVLNRMKYEITKREILSGNLVAQKADILNKNETVSNTFEDLKFFFPHLRKEGRIYPDVIIGKGKTGVSFALGISTVNRGNYSYLKQTLTSVVSRMTLSQEKDSVVIVLVADSNEDYLHSVVKMITKKFKRQVRSGSLEVISIPAFLYSSMLNAKHLAEASQKLASWRIKQVLDFCILLLYAQPKAKYYLQLEDDIIAKEMYFTKITDFVGNISSNNWFFIEFSMLGFIGKLFRSEDLTHFVRFFLMFYKEKPIDWLLNDIFQVKVCDAGEDLRNCMKRKKQIRIQYKPSLFQHVGIHSSFPRKEQYEKDVY

SEQ ID NO: 17677 - protein, 2321 aa, Homo sapiens
MDEEEDGAGAEESGQPRSFMRLNDLSGAGGRPGPGSAEKDPGSADSEAEGLPYPALAPVVFFYLSQDSRPRSWCLRTVCNPWFERISMLVILLNCVTLGMFRPCEDIACDSQRCRILQAFDDFIFAFFAVEMVVKMVALGIFGKKCYLGDTWNRLDFFIVIAGMLEYSLDLQNVSFSAVRTVRVLRPLRAINRVPSMRILVTLLLDTLPMLGNVLLLCFFVFFIFGIVGVQLWAGLLRNRCFLPENFSLPLSVDLERYYQTENEDESPFICSQPRENGMRSCRSVPTLRGDGGGGPPCGLDYEAYNSSSNTTCVNWNQYYTNCSAGEHNPFKGAINFDNIGYAWIAIFQVITLEGWVDIMYFVMDAHSFYNFIYFILLIIVGSFFMINLCLVVIATQFSETKQRESQLMREQRVRFLSNASTLASFSEPGSCYEELLKYLVYILRKAARRLAQVSRAAGVRVGLLSSPAPLGGQETQPSSSCSRSHRRLSVHHLVHHHHHHHHHYHLGNGTLRAPRASPEIQDRDANGSRRLMLPPPSTPALSGAPPGGAESVHSFYHADCHLEPVRCQAPPPRSPSEASGRTVGSGKVYPTVHTSPPPETLKEKALVEVAASSGPPTLTSLNIPPGPYSSMHKLLETQSTGACQSSCKISSPCLKADSGACGPDSCPYCARAGAGEVELADREMPDSDSEAVYEFTQDAQHSDLRDPHSRRQRSLGPDAEPSSVLAFWRLICDTFRKIVDSKYFGRGIMIAILVNTLSMGIEYHEQPEELTNALEISNIVFTSLFALEMLLKLLVYGPFGYIKNPYNIFDGVIVVISVWEIVGQQGGGLSVLRTFRLMRVLKLVRFLPALQRQLVVLMKTMDNVATFCMLLMLFIFIFSILGMHLFGCKFASERDGDTLPDRKNFDSLLWAIVTVFQILTQEDWNKVLYNGMASTSSWAALYFIALMTFGNYVLFNLLVAILVEGFQAEEISKREDASGQLSCIQLPVDSQGGDANKSESEPDFFSPSLDGDGDRKKCLALVSLGEHPELRKSLLPPLIIHTAATPMSLPKSTSTGLGEALGPASRRTSSSGSAEPGAAHEMKSPPSARSSPHSPWSAASSWTSRRSSRNSLGRAPSLKRRSPSGERRSLLSGEGQESQDEEESSEEERASPAGSDHRHRGSLEREAKSSFDLPDTLQVPGLHRTASGRGSASEHQDCNGKSASGRLARALRPDDPPLDGDDADDEGNLSKGERVRAWIRARLPACCLERDSWSAYIFPPQSRFRLLCHRIITHKMFDHVVLVIIFLNCITIAMERPKIDPHSAERIFLTLSNYIFTAVFLAEMTVKVVALGWCFGEQAYLRSSWNVLDGLLVLISVIDILVSMVSDSGTKILGMLRVLRLLRTLRPLRVISRAQGLKLVVETLMSSLKPIGNIVVICCAFFIIFGILGVQLFKGKFFVCQGEDTRNITNKSDCAEASYRWVRHKYNFDNLGQALMSLFVLASKDGWVDIMYDGLDAVGVDQQPIMNHNPWMLLYFISFLLIVAFFVLNMFVGVVVENFHKCRQHQEEEEARRREEKRLRRLEKKRRSKEKQMAEAQCKPYYSDYSRFRLLVHHLCTSHYLDLFITGVIGLNVVTMAMEHYQQPQILDEALKICNYIFTVIFVLESVFKLVAFGFRRFFQDRWNQLDLAIVLLSIMGITLEEIEVNASLPINPTIIRIMRVLRIARVLKLLKMAVGMRALLDTVMQALPQVGNLGLLFMLLFFIFAALGVELFGDLECDETHPCEGLGRHATFRNFGMAFLTLFRVSTGDNWNGIMKDTLRDCDQESTCYNTVISPIYFVSFVLTAQFVLVNVVIAVLMKHLEESNKEAKEEAELEAELELEMKTLSPQPHSPLGSPFLWPGVEGPDSPDSPKPGALHPAAHARSASHFSLEHPTDRQLFDTISLLIQGSLEWELKLMDELAGPGGQPSAFPSAPSLGGSDPQMQPHPTELPGPDLLTVRKSGVSRTHSLPNDSYMCRHGSTAEGPLGHRGWGLPKAQSGSVLSVHSQPADTSYILQLPKDAPHLLQPHSAPTWGTIPKLPPPGRSPLAQRPLRRQAAIRTDSLDVQGLGSREDLLAEVSGPSPPLARAYSFWGQSSTQAQQHSRSHSKISKHMTPPAPCPGPEPNWGKGPPETRSSLELDTELSWISGDLLPPGGQEEPPSPRDLKKCYSVEAQSCQRRPTSWLDEQRRHSIAVSCLDSGSQPHLGTDPSNLGGQPLGGPGSRPKKKLSPPSITIDPPESQGPRTPPSPGICLRRRAPSSDSKDPLASGPPDSMAASPSPKKDVLSLSGLSSDPADLDP

SEQ ID NO: 17678 - protein, 132 aa, Homo sapiens
MRTYHYIPLFIWTYMFHTVDTILLQEKPNSYLSSKKIAGLTKDDGKMLRRTKRGWMWNQFFLLEEYTGTDTQYVGKLHTDQDKGDGNLKYILTGDGAGSLFVIDENTGDIHAAKKLDREEKSLYILRAKAID

SEQ ID NO: 17679 - protein, 749 aa, Homo sapiens
MSNEVETSATNGQPDQQAAPKAPSKKEKKKGPEKTDEYLLARFKGDGVKYKAKLIGIDDVPDARGDKMSQDSMMKLKGMAAAGRSQGQHKQRIWVNISLSGIKIIDEKTGVIEHEHPVNKISFIARDVTDNRAFGYVCGGEGQHQFFAIKTGQQAEPLVVDLKDLFQVIYNVKKKEEEKKKIEEASKAVENGSEALMILDDQTNKLKSESKDILLVDLNSEIDTNQNSLRENPFLTNGITSCSLPRPTPQASFLPENAFSANLNFFPTPNPDPFRDDPFTQPDQSTPSSFDSLKSPDQKKENSSSSSTPLSNGPLNGDVDYFGQQFDQISNRTGKQEAQAGPWPFSSSQTQPAVRTQNGVSEREQNGFSVKSSPNPFVGSPPKGLSIQNGVKQDLESSVQSSPHDSIAIIPPPQSTKPGRGRRTAKSSANDLLASDIFAPPVSEPSGQASPTGQPTALQPNPLDLFKTSAPAPVGPLVGLGGVTVTLPQAGPWNTASLVFNQSPSMAPGAMMGGQPSGFSQPVIFGTSPAVSGWNQPSPFAASTPPPVPVVWGPSASVAPNAWSTTSPLGNPFQSNIFPAPAVSTQPPSMHSSLLVTPPQPPPRAGPPKDISSDAFTALDPLGDKEIKDVKEMFKDFQLRQPPAVPARKGEQTSSGTLSAFASYFNSKVGIPQENADHDDFDANQLLNKINEPPKPAPRQVSLPVTKSTDNAFENPFFKDSFGSSQASVASSQPVSSEMYRDPFGNPFA

SEQ ID NO: 17680 - protein, 1240 aa, Homo sapiens
MFINIKSILWMCSTLIVTHALHKVKVGKSPPVRGSLSGKVSLPCHFSTMPTLPPSYNTSEFLRIKWSKIEVDKNGKDLKETTVLVAQNGNIKIGQDYKGRVSVPTHPEAVGDASLTVVKLLASDAGLYRCDVMYGIEDTQDTVSLTVDGVVFHYRAATSRYTLNFEAAQKACLDVGAVIATPEQLFAAYEDGFEQCDAGWLADQTVRYPIRAPRVGCYGDKMGKAGVRTYGFRSPQETYDVYCYVDHLDGDVFHLTVPSKFTFEEAAKECENQDARLATVGELQAAWRNGFDQCDYGWLSDASVRHPVTVARAQCGGGLLGVRTLYRFENQTGFPPPDSRFDAYCFKRRMSDLSVIGHPIDSESKEDEPCSEETDPVHDLMAEILPEFPDIIEIDLYHSEENEEEEEECANATDVTTTPSVQYINGKHLVTTVPKDPEAAEARRGQFESVAPSQNFSDSSESDTHPFVIAKTELSTAVQPNESTETTESLEVTWKPETYPETSEHFSGGEPDVFPTVPFHEEFESGTAKKGAESVTERDTEVGHQAHEHTEPVSLFPEESSGEIAIDQESQKIAFARATEVTFGEEVEKSTSVTYTPTIVPSSASAYVSEEEAVTLIGNPWPDDLLSTKESWVEATPRQVVELSGSSSIPITEGSGEAEEDEDTMFTMVTDLSQRNTTDTLITLDTSRIITESFFEVPATTIYPVSEQPSAKVVPTKFVSETDTSEWISSTTVEEKKRKEEEGTTGTASTFEVYSSTQRSDQLILPFELESPNVATSSDSGTRKSFMSLTTPTQSEREMTDSTPVFTETNTLENLGAQTTEHSSIHQPGVQEGLTTLPRSPASVFMEQGSGEAAADPETTTVSSFSLNVEYAIQAEKEVAGTLSPHVETTFSTEPTGLVLSTVMDRVVAENITQTSREIVISERLGEPNYGAEIRGFSTGFPLEEDFSGDFREYSTVSHPIAKEETVMMEGSGDAAFRDTQTSPSTVPTSVHISHISDSEGPSSTMVSTSAFPWEEFTSSAEGSGEQLVTVSSSVVPVLPSAVQKFSGTASSIIDEGLGEVGTVNEIDRRSTILPTAEVEGTKAPVEKEEVKVSGTVSTNFPQTIEPAKLWSRQEVNPVRQEIESETTSEEQIQEEKSFESPQNSPATEQTIFDSQTFTETELKTTDYSVLTTKKTYSDDKEMKEEDTSLVNMSTPDPDANGLESYTTLPEATEKSHFFLATALVTESIPAEHVVTDSPI

SEQ ID NO: 17681 - protein, 127 aa, Homo sapiens
MEEPQSDPSVEPPLSQETFSDLWKLLPENNVLSPLPSQAMDDLMLSPDDIEQWFTEDPGPDEAPRMPEAAPPVAPAPAAPTPAAPAPAPSWPLSSSVPSQKTYQGSYGFRLGFLHSGTAKSVTCTYS

SEQ ID NO: 17682 - protein, 240 aa, Homo sapiens
MSEILCQWLNKELKVSRTVSPKSFAKAFSSGYLLGEVLHKFELQDDFSEFLDSRVSSAKLNNFSRLEPTLNLLGVQFDQNVAHGIITEKPGVATKLLYQLYIALQKKKKSGLTGVEMQTMQRLTNLRLQNMKSDTFQEQYLNRRRQNEIMAKIQAAIIQIPKPASNRTLKALEAQKMMKKKKEAEDVADEIKKFEALIKKDLQAKESASKTSLDTAGQTTTDLLNTYSDDEYIKKIQKRL

SEQ ID NO: 17683 - protein, 2273 aa, Homo sapiens
MDEEEDGAGAEESGQPRSFMRLNDLSGAGGRPGPGSAEKDPGSADSEAEGLPYPALAPVVFFYLSQDSRPRSWCLRTVCNPWFERISMLVILLNCVTLGMFRPCEDIACDSQRCRILQAFDDFIFAFFAVEMVVKMVALGIFGKKCYLGDTWNRLDFFIVIAGMLEYSLDLQNVSFSAVRTVRVLRPLRAINRVPSMRILVTLLLDTLPMLGNVLLLCFFVFFIFGIVGVQLWAGLLRNRCFLPENFSLPLSVDLERYYQTENEDESPFICSQPRENGMRSCRSVPTLRGDGGGGPPCGLDYEAYNSSSNTTCVNWNQYYTNCSAGEHNPFKGAINFDNIGYAWIAIFQVITLEGWVDIMYFVMDAHSFYNFIYFILLIIVGSFFMINLCLVVIATQFSETKQRESQLMREQRVRFLSNASTLASFSEPGSCYEELLKYLVYILRKAARRLAQVSRAAGVRVGLLSSPAPLGGQETQPSSSCSRSHRRLSVHHLVHHHHHHHHHYHLGNGTLRAPRASPEIQDRDANGSRRLMLPPPSTPALSGAPPGGAESVHSFYHADCHLEPVRCQAPPPRSPSEASGRTVGSGKVYPTVHTSPPPETLKEKALVEVAASSGPPTLTSLNIPPGPYSSMHKLLETQSTGACQSSCKISSPCLKADSGACGPDSCPYCARAGAGEVELADREMPDSDSEAVYEFTQDAQHSDLRDPHSRRQRSLGPDAEPSSVLAFWRLICDTFRKIVDSKYFGRGIMIAILVNTLSMGIEYHEQPEELTNALEISNIVFTSLFALEMLLKLLVYGPFGYIKNPYNIFDGVIVVISVWEIVGQQGGGLSVLRTFRLMRVLKLVRFLPALQRQLVVLMKTMDNVATFCMLLMLFIFIFSILGMHLFGCKFASERDGDTLPDRKNFDSLLWAIVTVFQILTQEDWNKVLYNGMASTSSWAALYFIALMTFGNYVLFNLLVAILVEGFQAEEISKREDASGQLSCIQLPVDSQGGDANKSESEPDFFSPSLDGDGDRKKCLALVSLGEHPELRKSLLPPLIIHTAATPMSLPKSTSTGLGEALGPASRRTSSSGSAEPGAAHEMKSPPSARSSPHSPWSAASSWTSRRSSRNSLGRAPSLKRRSPSGERRSLLSGEGQESQDEEESSEEERASPAGSDHRHRGSLEREAKSSFDLPDTLQVPGLHRTASGRGSASEHQDCNGKSASGRLARALRPDDPPLDGDDADDEGNLSKGERVRAWIRARLPACCLERDSWSAYIFPPQSRFRLLCHRIITHKMFDHVVLVIIFLNCITIAMERPKIDPHSAERIFLTLSNYIFTAVFLAEMTVKVVALGWCFGEQAYLRSSWNVLDGLLVLISVIDILVSMVSDSGTKILGMLRVLRLLRTLRPLRVISRAQGLKLVVETLMSSLKPIGNIVVICCAFFIIFGILGVQLFKGKFFVCQGEDTRNITNKSDCAEASYRWVRHKYNFDNLGQALMSLFVLASKDGWVDIMYDGLDAVGVDQQPIMNHNPWMLLYFISFLLIVAFFVLNMFVGVVVENFHKCRQHQEEEEARRREEKRLRRLEKKRRSKEKQMAEAQCKPYYSDYSRFRLLVHHLCTSHYLDLFITGVIGLNVVTMAMEHYQQPQILDEALKICNYIFTVIFVLESVFKLVAFGFRRFFQDRWNQLDLAIVLLSIMGITLEEIEVNASLPINPTIIRIMRVLRIARVLKLLKMAVGMRALLDTVMQALPQVGNLGLLFMLLFFIFAALGVELFGDLECDETHPCEGLGRHATFRNFGMAFLTLFRVSTGDNWNGIMKDTLRDCDQESTCYNTVISPIYFVSFVLTAQFVLVNVVIAVLMKHLEESNKEAKEEAELEAELELEMKTLSPQPHSPLGSPFLWPGVEGPDSPDSPKPGALHPAAHARSASHFSLEHPTMQPHPTELPGPDLLTVRKSGVSRTHSLPNDSYMCRHGSTAEGPLGHRGWGLPKAQSGSVLSVHSQPADTSYILQLPKDAPHLLQPHSAPTWGTIPKLPPPGRSPLAQRPLRRQAAIRTDSLDVQGLGSREDLLAEVSGPSPPLARAYSFWGQSSTQAQQHSRSHSKISKHMTPPAPCPGPEPNWGKGPPETRSSLELDTELSWISGDLLPPGGQEEPPSPRDLKKCYSVEAQSCQRRPTSWLDEQRRHSIAVSCLDSGSQPHLGTDPSNLGGQPLGGPGSRPKKKLSPPSITIDPPESQGPRTPPSPGICLRRRAPSSDSKDPLASGPPDSMAASPSPKKDVLSLSGLSSDPADLDP

SEQ ID NO: 17684 - protein, 185 aa, Homo sapiens
MSRVPSPPPPAEMSSGPVAESWCYTQIKVVKFSYMWTINNFSFCREEMGEVIKSSTFSSGANDKLKWCLRVNPKGLDEESKDYLSLYLLLVSCPKSEVRAKFKFSILNAKGEETKAMESQRAYRFVQGKDWGFKKFIRRDFLLDEANGLLPDDKLTLFCEVSVVQDSVNISGQNTMNMVKVPECR

SEQ ID NO: 17685 - protein, 474 aa, Homo sapiens
MISAHYNLCPLGSSDSPTSASQVAGITESTGSIIEVLSKIDSEGGVSANHTSRATSTATSGFAGAIGQKLPPFSYAYTELEAIMYALGVGASIKDPKDLKFIYEGSSDFSCLPTFGVIIGQKSMMGGGLAEIPGLSINFAKVLHGEQYLELYKPLPRAGKLKCEAVVADVLDKGSGVVIIMDVYSYSEKELICHNQFSLFLVGSGGFGGKRTSDKVKVAVAIPNRPPDAVLTDTTSLNQAALYRLSGDWNPLHIDPNFASLAGFDKPILHGLCTFGFSARRVLQQFADNDVSRFKAIKARFAKPVYPGQTLQTEMWKEGNRIHFQTKVQETGDIVISNAYVDLAPTSGTSAKTPSEGGKLQSTFVFEEIGRRLKDIGPEVVKKVNAVFEWHITKGGNIGAKWTIDLKSGSGKVYQGPAKGAADTTIILSDEDFMEVVLGKLDPQKAFFSGRLKARGNIMLSQKLQMILKDYAKL

SEQ ID NO: 17686 - protein, 952 aa, Homo sapiens
QLCWLPLLAPLLLLRPPGVQSAGPIRAFVVPHSHMDVGWVYTVQESMRAYAANVYTSVVEELARGQQRRFIAVEQEFFRLWWDGVASDQQKYQVRQLLEEGRLEFVIGGQVMHDEAVTHLDDQILQLTEGHGFLYETFGIRPQFSWHVDPFGASATTPTLFALAGFNAHLGSRIDYDLKAAMQEARGLQFVWRGSPSLSERQEIFTHIMDQYSYCTPSHIPFSNRSGFYWNGVAVFPKPPQDGVYPNMSEPVTPANINLYAEALVANVKQRAAWFRTPHVLWPWGCDKQFFNASVQFANMDPLLDHINSHAAELGVSVQYATLGDYFRALHALNVTWRVRDHHDFLPYSTEPFQAWTGFYTSRSSLKGLARRASALLYAGESMFTRYLWPAPRGHLDPTWALQQLQQLRWAVSEVQHHDAITGTESPKVRDMYATHLASGMLGMRKLMASIVLDELQPQAPMAASSDAGPAGHFASVYNPLAWTVTTIVTLTVGFPGVRVTDEAGHPVPSQIQNSTETPSAYDLLILTTIPGLSYRHYNIRPTAGAQEGTQEPAATVASTLQFGRRLRRRTSHAGRYLVPVANDCYIVLLDQDTNLMHSIWERQSNRTVRVTQEFLEYHVNGDVKQGPISDNYLFTPGKAAVPAWEAVEMEIVAGQLVTEIRQYFYRNMTAQNYTYAIRSRLTHVPQGHDGELLCHRIEQEYQAGPLELNREAVLRTSTNLNSQQVIYSDNNGYQMQRRPYVSYVNNSIARNYYPMVQSAFMEDGKSRLVLLSERAHGISSQGNGQVEVMLHRRLWNNFDWDLGYNLTLNDTSVVHPVLWLLLGSWSLTTALRQRSALALQHRPVVLFGDLAGTAPKLPGPQQQEAVTLPPNLHLQILSIPGWRYSSNHTEHSQNLRKGHRGEAQADLRRVLLRLYHLYEVGEDPVLSQPVTVNLEVNFPTPIQTISQGSKP

SEQ ID NO: 17687 - protein, 429 aa, Homo sapiens
MMLGTEGGEGFVVKVRGLPWSCSADEVQRFFSDCKIQNGAQGIRFIYTREGRPSGEAFVELESEDEVKLALKKDRETMGHRYVEVFKSNNVEMDWVLKHTGPNSPDTANDGFVRLRGLPFGCSKEEIVQFFSGLEIVPNGITLPVDFQGRSTGEAFVQFASQEIAEKALKKHKERIGHRYIEIFKSSRAEVRTHYDPPRKLMAMQRPGPYDRPGAGRGYNSIGRGAGFERMRRGAYGGGYGGYDDYNGYNDGYGFGSDRFGRDLNYCFSGMSDHRYGDGGSTFQSTTGHCVHMRGLPYRATENDIYNFFSPLNPVRVHIEIGPDGRVTGEADVEFATHEDAVAAMSKDKANMQHRYVELFLNSTAGASGGAYGSQMLGGMGLSNQSSYGGPASQQLSGGYGGGYGGQSSMSGYDQVLQENSSDFQSNIA

SEQ ID NO: 17688 - protein, 383 aa, Homo sapiens
MDSNYQQSSAGQPINAKPSQTANAKPIPRTPDHEIQGSKEALIQDLERKLKCKDTLLHNGNQRLTYEEKMARRLLGPQNAAAVFQAQDDSGAQDSQQHNSEHARLQVPTSQVRSRSTSRGDVNDQDAIQEKFYPPRFIQVPENMSIDEGRFCRMDFKVSGLPAPDVSWYLNGRTVQSDDLHKMIVSEKGLHSLIFEVVRASDAGAYACVAKNRAGEATFTVQLDVLAKEHKRAPMFIYKPQSKKVLEGDSVKLECQISAIPPPKLFWKRNNEMVQFNTDRISLYQDNTGRVTLLIKDVNKKDAGWYTVSAVNEAGVTTCNTRLDVTARPNQTLPAPKQLRVRPTFSKYLALNGKGLNVKQAFNPEGEFQRLAAQSGLYESEEL

SEQ ID NO: 17689 - protein, 306 aa, Homo sapiens
MKKDEPPLDFPDTLEGFEYAFNEKGQLRHIKTGEPFVFNYREDLHRWNQKRYEALGEIITKYVYELLEKDCNLKKVSIPEGYGVIVLNPNENYIEVEKPKIHVQSSSDSSDEPAEKRERKDKVSKETKKRRDFYEKYRNPQREKEMMQLYIRENGSPEEHAIYVWDHFIAQAAAENVFFVAHSYGGLAFVELMIQREADVKNKVTAVALTDSVHNVWHQEAGKTIREWMRENCCNWVSSSEPLDTSVESMLPDCPRVSAGTDRHELTSWKSFPSIFKFFTEASEAKTSSLKPAVTRRSHRIKHEEL

SEQ ID NO: 17690 - protein, 408 aa, Homo sapiens
MASVASCDSRPSSDELPGDPSSQEEDEDYDFEDRVSDSGSYSSASSDYDDLEPEWLDSVQKNGELFYLELSEDEEESLLPETPTVNHVRFSENEIIIEDDYKERKKYEPKLKQFTKILRRKRLLPKRCNKKNSNDNGPVSILKHQSNQKTGVIVQQRYKDVNVYVNPKKLTVIKAKEQLKLLEVLVGIIHQTKWSWRRTGKQGDGERLVVHGLLPGGSAMKSGQVLIGDVLVAVNDVDVTTENIERVLSCIPGPMQVKLTFENAYDVKRETSHPRQKKTQSNTSDLVKLLWGEEVEGIQQSGLNTPHIIMYLTLQLDSETSKEEQEILYHYPMSEASQKLKSVRGIFLTLCDMLENVTGTQVTSSSLLLNGKQIHVAYWKESDKLLLIGLPAEEIELPSSAHTHGERN

SEQ ID NO: 17691 - protein, 993 aa, Homo sapiens
MLSEQGLLSDCGNNYFQMTSCILSGSIQTTPQVSAGGSEAKPLIFTFVPTVRRLPTHTQLADTSKFLVKIPEESSDKSPETVNRSKSNDYLTLNAGSQQERDQAKLTCPSEVSGTILQEREFEANKLQGMQQSDLFKAEYVLIVDSEGEDEAASRKVEQGPPGGIGTAAVRPKSLAISSSLVSDVVRPKTQGTDLKTSSHPEMLHGMAPQQKHGQLTSSPTTSEQLACKPPAFSFVSPTNPNTPPDPVNLEGASVLEEFHTRRLDVGGAVVEESATYFQTTAHSTPFSASKGTSSTLLFPHSTQLSGSNLPSSTAADPKPGLTSEVLKKTTLTSHVLSHGESPRTSSSPPSSSASLKSNSASYIPVRIVTHSLSPSPKPFTSSFHGSSSTICSQMSSSGNLSKSGVKSPVPSRLALLTAILKSNPSHQRPFSPASCPTFSLNSPASSTLTLDQKEKQTPPTPKKSLSSCSLRAGSPDQGELQVSELTQQSFHLPVFTKSTPLSQAPSLSPTKQASSSLASMNVERTPSPTLKSNTMLSLLQTSTSSSVGLPPVPPSSSLSSLKSKQDGDLRGPENPRNIHTYPSTLASSALSSLSPPINQRATFSSSEKCFHPSPALSSLINRSKRASSQLSGQELNPSALPSLPVSSADFASLPNLRSSSLPHANLPTLVPQLSPSALHPHCGSGTLPSRLGKSESTTPNHRSPVSTPSLPISLTRTEELISPCALSMSTGPENKKSKQYKTKSSYKAFAAIPTNTLLLEQKALDEPAKTESVSKDNTLEPPVELYFPAQLRQQTEELCATIDKVLQDSLSMHSSDSPSRSPKTLLGSDTVKTPTTLPRAAGRETKYANLSSPSSTVSESQLTKPGVIRPVPVKSRILLKKEEEVYEPNPFSKYLEDNSDLFSEQDVTVPPKPVSLHPLYQTKLYPPAKSLLHPQTLSHADCLAPGPFSHLSFSLSDEQENSHTLLSHNACNKLSHPMVAIPEHEALDSKEQ

SEQ ID NO: 17692 - protein, 414 aa, Homo sapiens
TLKDPHYPDHDLGIILLSVILTPKEGESRDVELSENEVVGSYFSVKSLFWRFQTQSLRLSDLHRKSHLWRGIVSITLIEGRDLKAMDSNGLSDPYVKFRLGHQKYKSKIMPKTLNPQWREQFDFHLYEERGGVIDITAWDKDAGKRDDFIGRCQVDLSALSREQTHKLELQLEEGEGHLVLLVTLTASATVSISDLSVNSLEDQKEREEILKRYSPLRIFHNLKDVGFLQVKVIRAEGLMAADVTGKSDPFCVVELNNDRLLTHTVYKNLNPEWNKVFTFNIKDIHSVLEVTVYDEDRDRSADFLGKVAIPLLSIQNGEQKAYVLKNKQLTGPTKGVIYLEIDVIFNAVKASLRTLIPKEQKYIEEENRLSKQLLLRNFIRMKRCVMVLVNAAYYVNSCFDWDSPPRSLAAFVV

SEQ ID NO: 17693 - protein, 817 aa, Homo sapiens
MDECIPQDRAPRDFCVKFPEEIRHDNLAGQLWFGAECLAAGSIIMNRELESMAMRPLAKELTRSLEDVRGALRDQALRDLNTYTEKMREALRHFDVLFAEFELSYVSAMVPVKSPREYYVQQEVIVLFCETVERALDFGYLTQDMIDDYEPALMFSIPRLAIVCGLVVYADGPLNLDRKVEDMSELFRPFHTLLRKIRDLLQTLTEEELHTLERNLCISQDVEFPIRADVQGPAALAPALSAPLPPEGPLSAKAKDPDAELACSMQYDDQELEQLSRMVHRAGDEMSSLLSPPIACQSPAHRPGAEGSPGGEASPGRPRLRSGSDEEERVFFMDDVEGTAEALARPESPAGPFGWAGSTWADPQEKGQGGPGGAAGISLPASEKEEDLSNNNLEAEGTDGASLAGTSSCSCLDSRLHLDGWEVGADDAETAEMIAHRTGGMKLSATVIFNPKSPTSLDSAVATQEAASEPVAEGMDGGPHKLSTGATNCLLHSCVCCGSCGDSREDVVERLREKCSPGGVIGASYAAGLAKASDRAPERQEEAPPPSEDASNGREPKAPTSDKCLPHTSGSQVDTASGLQGEAGVAGQQEPEARELHAGSPSAHEAPQALSGSSSSTAGSCSSDKMGPEAAPAATHAAPQATREKIRSRFHGSHDLIHRLFVCISGVADQLQTNYASDLRSILKTLFEVMATKPETDDKEKLRKVTQTLRSAALEDCALCQETLSSSELAAKTRDGDFEDPPEWVPDEACGFCTACKAPFTVIRRKHHCRSCGKIFCSRCSSHSAPLPRYGQVKPVRVCTHCYMFHVTPFYSDKAGL

SEQ ID NO: 17694 - protein, 1776 aa, Homo sapiens
MDEEEDGAGAEESGQPRSFMRLNDLSGAGGRPGPGSAEKDPGSADSEAEGLPYPALAPVVFFYLSQDSRPRSWCLRTVCNPWFERISMLVILLNCVTLGMFRPCEDIACDSQRCRILQAFDDFIFAFFAVEMVVKMVALGIFGKKCYLGDTWNRLDFFIVIAGMLEYSLDLQNVSFSAVRTVRVLRPLRAINRVPSMRILVTLLLDTLPMLGNVLLLCFFVFFIFGIVGVQLWAGLLRNRCFLPENFSLPLSVDLERYYQTENEDESPFICSQPRENGMRSCRSVPTLRGDGGGGPPCGLDYEAYNSSSNTTCVNWNQYYTNCSAGEHNPFKGAINFDNIGYAWIAIFQVITLEGWVDIMYFVMDAHSFYNFIYFILLIIVGSFFMINLCLVVIATQFSETKQRESQLMREQRVRFLSNASTLASFSEPGSCYEELLKYLVYILRKAARRLAQVSRAAGVRVGLLSSPAPLGGQETQPSSSCSRSHRRLSVHHLVHHHHHHHHHYHLGNGTLRAPRASPEIQDRDANGSRRLMLPPPSTPALSGAPPGGAESVHSFYHADCHLEPVRCQAPPPRSPSEASGRTVGSGKVYPTVHTSPPPETLKEKALVEVAASSGPPTLTSLNIPPGPYSSMHKLLETQSTGACQSSCKISSPCLKADSGACGPDSCPYCARAGAGEVELADREMPDSDSEAVYEFTQDAQHSDLRDPHSRRQRSLGPDAEPSSVLAFWRLICDTFRKIVDSKYFGRGIMIAILVNTLSMGIEYHEQPEELTNALEISNIVFTSLFALEMLLKLLVYGPFGYIKNPYNIFDGVIVVISVWEIVGQQGGGLSVLRTFRLMRVLKLVRFLPALQRQLVVLMKTMDNVATFCMLLMLFIFIFSILGMHLFGCKFASERDGDTLPDRKNFDSLLWAIVTVFQILTQEDWNKVLYNGMASTSSWAALYFIALMTFGNYVLFNLLVAILVEGFQAEEISKREDASGQLSCIQLPVDSQGGDANKSESEPDFFSPSLDGDGDRKKCLALVSLGEHPELRKSLLPPLIIHTAATPMSLPKSTSTGLGEALGPASRRTSSSGSAEPGAAHEMKSPPSARSSPHSPWSAASSWTSRRSSRNSLGRAPSLKRRSPSGERRSLLSGEGQESQDEEESSEEERASPAGSDHRHRGSLEREAKSSFDLPDTLQVPGLHRTASGRGSASEHQDCNGKSASGRLARALRPDDPPLDGDDADDEGNLSKGERVRAWIRARLPACCLERDSWSAYIFPPQSRFRLLCHRIITHKMFDHVVLVIIFLNCITIAMERPKIDPHSAERIFLTLSNYIFTAVFLAEMTVKVVALGWCFGEQAYLRSSWNVLDGLLVLISVIDILVSMVSDSGTKILGMLRVLRLLRTLRPLRVISRAQGLKLVVETLMSSLKPIGNIVVICCAFFIIFGILGVQLFKGKFFVCQGEDTRNITNKSDCAEASYRWVRHKYNFDNLGQALMSLFVLASKDGWVDIMYDGLDAVGVDQQPIMNHNPWMLLYFISFLLIVAFFVLNMFVGVVVENFHKCRQHQEEEEARRREEKRLRRLEKKRRNLMLDDVIASGSSASAASEAQCKPYYSDYSRFRLLVHHLCTSHYLDLFITGVIGLNVVTMAMEHYQQPQILDEALKICNYIFTVIFVLESVFKLVAFGFRRFFQDRWNQLDLAIVLLSIMGITLEEIEVNASLPINPTIIRIMRVLRIARVLKLLKMAVGMRALLDTVMQALPQLWAWSSLETWSVTRHTPVRAWAVMPPFGTLAWPS

SEQ ID NO: 17695 - protein, 215 aa, Homo sapiens
GPVCGLDGKTYRNECALLKARCKEQPELEVQYQGRCKKTCRDVFCPGSSTCVVDQTNNAYCVTCNRICPEPASSEQYLCGNDGVTYSSACHLRKATCLLGRSIGLAYEGKCITKSCEDIQCTGGKKCLWDFKVGRGRCSLCDELCPDSKSDEPVCASDNATYASECAMKEAACSSGVLLEVKHSGSCNSISEDTEEEEEDEDQDYSFPISSILEW

SEQ ID NO: 17696 - protein, 338 aa, Homo sapiens
MLKVSAVLCVCAAAWCSQSLAAAAAVAAAGGRSDGGNFLDDKQWLTTISQYDKEVGQWNKFRDCKLEYQACVLGKQISVKCEGHCPCPSDKPTSTSRNVKRACSDLEFREVANRLRDWFKALHESGSQNKKTKTLLRPERSRFDTSILPICKDSLGWMFNRLDTNYDLLLDQSELRSIYLDKNEQCTKAFFNSCDTYKDSLISNNEWCYCFQRQQDPPCQTELSNIQKRQGVKKLLGQYIPLCDEDGYYKPTQCHGSVGQCWCVDRYGNEVMGSRINGVADCAIDFEISGDFASGDFHEWTDDEDDEDDIMNDEDEIEDDDEDEGDDDDGGDDHDVYI

SEQ ID NO: 17697 - protein, 599 aa, Homo sapiens
MLMCFIKEAQLDEEGQFLVRIIYDDSKTYDLVAAASKVLNLNAGEILQMFGKMFFVFCQESGYDTILRVLGSNVREFLQNLDALHDHLATIYPGMRAPSFRCTDAEKGKGLILHYYSEREGLQDIVIGIIKTVAQQIHGTEIDMKVIQQRNEECDHTQFLIEEKESKEEDFYEDLDRFEENGTQESRISPYTFCKAFPFHIIFDRDLVVTQCGNAIYRVLPQLQPGNCSLLSVFSLVRPHIDISFHGILSHINTVFVLRSKEGLLDVEKLECEDELTGTEISCLRLKGQMIYLPEADSILFLCSPSVMNLDDLTRRGLYLSDIPLHDATRDLVLLGEQFREEYKLTQELEILTDRLQLTLRALEDEKKKTDTLLYSVLPPSVANELRHKRPVPAKRYDNVTILFSGIVGFNAFCSKHASGEGAMKIVNLLNDLYTRFDTLTDSRKNPFVYKVETVGDKYMTVSGLPEPCIHHARSICHLALDMMEIAGQVQVDGESVQITIGIHTGEVVTGVIGQRMPRYCLFGNTVNLTSRTETTGEKGKINVSEYTYRCLMSPENSDPQFHLEHRGPVSMKGKKEPMQVWFLSRKNTGTEETKQDDD

SEQ ID NO: 17698 - protein, 41 aa, Homo sapiens
MDGSGEQPRGGVSSRIEQGEWGGRHPSWPWTRCLRMRPPRS

SEQ ID NO: 17699 - protein, 897 aa, Homo sapiens
MLRHWREQGFYYNTRDTDDIESPKRSIRDSGYIDCWDSERSDSLSPPRHGRDDSFDSLDSFGSRSRQTPSPDVVLRGSSDGRGSDSESDLPHRKLPDVKKDDMSARRTSHGEPKSAVPFNQYLPNKSNQTAYVPAPLRKKKAEREEYRKSWSTATSPLGGERPFRSTSMFDMRCEEEAAVQPHSRARQEQLQLINNQLREEDDKWQDDLARWKSRRRSVSQDLIKKEEERKKMEKLLAGEDGTSERRKSIKTYREIVQEKERRERELHEAYKNARSQEEAEGILQQYIERFTISEAVLERLEMPKILERSHSTEPNLSSFLNDPNPMKYLRQQSLPPPKFTATVETTIARASVLDTSMSAGSGSPSKTVTPKAVPMLTPKPYSQPKNSQDVLKTFKVDGKVSVNGETVHREEEKERECPTVAPAHSLTKSQMFEGVARVHGSPLELKQDNGSIEINIKKPNSVPQELAATTEKTEPNSQEDKNDGGKSRKGNIELASSEPQHFTTTVTRCSPTVAFVEFPSSPQLKNDVSEEKDQKKPENEMSGKVELVLSQKVVKPKSPEPEATLTFPFLDKMPEANQLHLPNLNSQVDSPSSEKSPVMTPFKFWAWDPEEERRRQEKWQQEQERLLQERYQKEQDKLKEEWEKAQKEVEEEERRYYEEERKIIEDTVVPFTVSSSSADQLSTSSSMTEGSGTMNKIDLGNCQDEKQDRRWKKSFQGDDSDLLLKTRESDRLEEKGSLTEGALAHSGNPVSKGVHEDHQLDTEAGAPHCGTNPQLAQDPSQNQQTSNPTHSSEDVKPKTLPLDKSINHQIESPSERRKSISGKKLCSSCGLPLGKGAAMIIETLNLYFHIQCFRCGICKGQLGDAVSGTDVRIRNGLLNCNDCYMRSRSAGQPTTL

SEQ ID NO: 17700 - protein, 1889 aa, Homo sapiens
QQLCILPPHHVNVLPPLHIKTEAVWLAYKLGDWKTSVSIGVAFQLFCKRDSNFMRSKKKSLNLPLRMTPAQIFQEKLQCVLGQPASLEAKNEMGSKYKQFTDPIEEEDANLLFGSVQEVLKASVMADADILSETFQLLIDSAKDFSKRLWGLVPFGLYLPAPPLYCPQPAILSEEDGDDLLLKAEKNNRQKVSGILQRVLLLFRAAQCSFPVAQWYILQLRWARKVMQKIRMKGSLPSLSPFPQSLLNYCKGGIAFFRPGAAGDHKLDEVSIRAIGCFRELCALCWMLHVRDKLSYSCRQYQKARENVKGEKDLEVEFDSCMIEHCLSAVEWAYRMLPFSRFFNMEELIQDIILSLIGELPPIRKVAEIFVKAFPYPEDVRVPLRDKYHSLHQRLRHCVVKGPQTEEMMSVVMHSIQKVRVKALKRVQRNIGSFEVNIWEPIEEEKPDEAPGVDRYSLGTSLSRSTLTELGDSVVHSDADTFSEALSVEEKSRINIYQRNAPNHMELTSIHKPTDKRKMCNQKENPTKKEDHEKLSQNTLPVIGVWEFERDDDEYIKFLDLFLSYILERDLPYSRDADIPFLTSFSGKLREHELNSLLFDVHTTLKRHQSKTKSQNVFRAGSCFVVAPESYESEKSSSLNDEYGMHLENQKLSSSVLVNQGIKPFLQYPSNEVNKNEGMSGLFGLKQRSIYKIQDDTREKCLIQRSSNHIFWTPKSIKTRRCIFKAIQCNDINPQEDLPLALNTFGSIGRLLEWMIRWSNRRLLCDSGITESSSEYSPVIRVKTSTAAILTSLWLLEQPYFATYKAKNAIIKMVENRDTGCQIGPNIERESKSDAGGSVAVATPGGTEERNGQNKSCQNILNRMPTEAKNPDIKEINDDIISITHNTKKEFIDIDENLLEVEAFTEEEMDMHISDYEDIEESVGGFRSPSLAICMMTLPQQLEEEFTEEVQCQREEPLETIMEEKSTEQKGMIEAFSHPGHTTPQSMQVDTSSEISSAQISTYKEKSSSVPLLISNGVNVASQPPAPTPQKTQRNEFTAQLPDCSESVRQMLQDEMFKLVQLQQINFMSLMQIVGSSFANLPDTQQLVQQSQSVHLGESQESNLRGCGDVEDSNKNLKERFFIKPQSMGENAREPRKNSPHCHEGTIPSGQNSTGNVQNVPHGSIPLCQLNGQPRKKGPIPSSQNLPSTSFYPAPAGNTHLYLLSTPSVVQKAPRLIPHAKTFSPGDGFPLLQFKSKQEFQPLFLHTGSIPQVPFRPLPQPREAWGLSDSFQPALPQRAAQTTPASHLNVSQYNTEARKKEVEQKTWAETVITEIPNHVNLDQYVGQENLTPQQDSSVFIKPEKLFDVKPGTLEISPHHSFGLPLLYLPLKPPNMFPSTSRASITVPSTPIQPIAEERKYPRLSLLHSHLSPENRCKKTQLIPLENLIAFKQSQQKLTHNLFEQGDAGHLQLLKVKIEPPEVRQGKDSKKRQRRRAEKELQEKRCEKLRRKPNVTFRPENSIINNDDSEIIKKPKEQQEHCGSHPLDDFDVPFEMLQDDNTSAGLHFMASVKKKAIGSQDASTNTDPEHEPLTAPQLLVPDVYLNLKLSSEMSEKPWSPSIPHTVTNLVGHTYINVIDIEANDLLQELPVREEPSNDNVIKQQSDHLAVPSSAELHYMAASVTNAVPPHNFKSQEVTPACLDGKSLRAGITEVKEPSVTSPTPSDIQQNKGLPKPEFRFKGQSTKSDSAEDYLLWKRLQGVSAACPAPSSAAHQLEHLSAKLQKIDEQLLAIQNIAENIEQDFPKPEMLDLHCDKIGPVDHIEFSSGPEFKKTLASKTISISEEVRFLTHMDEEDQSDKKETSEPEFSITENYSGQKTCVFPTADSAVSLSSSSDQNTTSPVFQYIRSR

SEQ ID NO: 17701 - protein, 177 aa, Homo sapiens
ADITPEELFNVFFGGHFPTGNIHMFSNVTDDTYYYRRRHRHERTQTQKEEEEEKPQTTYSAFIQLLPVLVIVIISVITQLLATNPPYSLFYKSTLGYTISRETQNLQVPYFVDKNFDKAYRGASLHDLEKTIEKDYIDYIQTSCWKEKQQRFWHSPCFRTSAQQMSFEERILRSRKQ

SEQ ID NO: 17702 - protein, 2546 aa, Homo sapiens
IKAPIEDLDLEGQKLLQRIQSSESFPKKNSGSGNADLQNLLPKVSTMLDRLHSTRQHLHQMWHVRKLKLDQCFQLRLFEQDAEKMFDWITHNKGLFLNSYTEIGTSHPHAMELQTQHNHFAMNCMNVYVNINRIMSVANRLVESGHYASQQIRQIASQLEQEWKAFAAALDERSTLLDMSSIFHQKAEKYMSNVDSWCKACGEVDLPSELQDLEDAIHHHQGIYEHITLAYSEVSQDGKSLLDKLQRPLTPGSSDSLTASANYSKAVHHVLDVIHEVLHHQRQLENIWQHRKVRLHQRLQLCVFQQDVQQVLDWIENHGEAFLSKHTGVGKSLHRARALQKRHEDFEEVAQNTYTNADKLLEAAEQLAQTGECDPEEIYQAAHQLEDRIQDFVRRVEQRKILLDMSVSFHTHVKELWTWLEELQKELLDDVYAESVEAVQDLIKRFGQQQQTTLQVTVNVIKEGEDLIQQLRDSAISSNKTPHNSSINHIETVLQQLDEAQSQMEELFQERKIKLELFLQLRIFERDAIDIISDLESWNDELSQQMNDFDTEDLTIAEQRLQHHADKALTMNNLTFDVIHQGQDLLQYVNEVQASGVELLCDRDVDMATRVQDLLEFLHEKQQELDLAAEQHRKHLEQCVQLRHLQAEVKQVLGWIRNGESMLNAGLITASSLQEAEQLQREHEQFQHAIEKTHQSALQVQQKAEAMLQANHYDMDMIRDCAEKVASHWQQLMLKMEDRLKLVNASVAFYKTSEQVCSVLESLEQEYKREEDWCGGADKLGPNSETDHVTPMISKHLEQKEAFLKACTLARRNADVFLKYLHRNSVNMPGMVTHIKAPEQQVKNILNELFQRENRVLHYWTMRKRRLDQCQQYVVFERSAKQALEWIHDNGEFYLSTHTSTGSSIQHTQELLKEHEEFQITAKQTKERVKLLIQLADGFCEKGHAHAAEIKKCVTAVDKRYRDFSLRMEKYRTSLEKALGISSDSNKSSKSLQLDIIPASIPGSEVKLRDAAHELNEEKRKSARRKEFIMAELIQTEKAYVRDLRECMDTYLWEMTSGVEEIPPGIVNKELIIFGNMQEIYEFHNNIFLKELEKYEQLPEDVGHCFVTWADKFQMYVTYCKNKPDSTQLILEHAGSYFDEIQQRHGLANSISSYLIKPVQRITKYQLLLKELLTCCEEGKGEIKDGLEVMLSVPKRANDAMHLSMLEGFDENIESQGELILQESFQVWDPKTLIRKGRERHLFLFEMSLVFSKEVKDSSGRSKYLYKSKLFTSELGVTEHVEGDPCKFALWVGRTPTSDNKIVLKASSIENKQDWIKHIREVIQERTIHLKGALKEPIHIPKTAPATRQKGRRDGEDLDSQGDGSSQPDTISIASRTSQNTLDSDKLSGGCELTVVIHDFTACNSNELTIRRGQTVEVLERPHDKPDWCLVRTTDRSPAAEGLVPCGSLCIAHSRSSMEMEGIFNHKDSLSVSSNDASPPASVASLQPHMIGAQSSPGPKRPGNTLRKWLTSPVRRLSSGKADGHVKKLAHKHKKSREVRKSADAGSQKDSDDSAATPQDETVEERGRNEGLSSGTLSKSSSSGMQSCGEEEGEEGADAVPLPPPMAIQQHSLLQPDSQDDKASSRLLVRPTSSETPSAAELVSAIEELVKSKMALEDRPSSLLVDQGDSSSPSFNPSDNSLLSSSSPIDEMEERKSSSLKRRHYVLQELVETERDYVRDLGYVVEGYMALMKEDGVPDDMKGKDKIVFGNIHQIYDWHRDFFLGELEKCLEDPEKLGSLFVKHERRLHMYIAYCQNKPKSEHIVSEYIDTFFEDLKQRLGHRLQLTDLLIKPVQRIMKYQLLLKDFLKYSKKASLDTSELERAVEVMCIVPRRCNDMMNVGRLQGFDGKIVAQGKLLLQDTFLVTDQDAGLLPRCRERRIFLFEQIVIFSEPLDKKKGFSMPGFLFKNSIKVSCLCLEENVENDPCKFALTSRTGDVVETFILHSSSPSVRQTWIHEINQILENQRNFLNALTSPIEYQRNHSGGGGGGGSGGSGGGGGSGGGGAPSGGSGHSGGPSSCGGAPSTSRSRPSRIPQPVRHHPPVLVSSAASSQAEADKMSGTSTPGPSLPPPGAAPEAGPSAPSRRPPGADAEGSEREAEPIPKMKVLESPRKGAANASGSSPDAPAKDARASLGTLPLGKPRAGAASPLNSPLSSAVPSLGKEPFPPSSPLQKGGSFWSSIPASPASRPGSFTFPGDSDSLQRQTPRHAAPGKDTDRMSTCSSASEQSVQSTQSNGSESSSSSNISTMLVTHDYTAVKEDEINVYQGEVVQILASNQQNMFLVFRAATDQCPAAEGWIPGFVLGHTSAVIVENPDGTLKKSTSWHTALRLRKKSEKKDKDGKREGKLENGYRKSREGLSNKVSVKLLNPNYIYDVPPEFVIPLSEVTCETGETVVLRCRVCGRPKASITWKGPEHNTLNNDGHYSISYSDLGEATLKIVGVTTEDDGIYTCIAVNDMGSASSSASLRVLGPGMDGIMVTWKDNFDSFYSEVAELGRANWNNWSPY

SEQ ID NO: 17703 - protein, 955 aa, Homo sapiens
MVNPTLGVHEADLLKTSGTLISFIYPAQNPELLNKLSQRKTTVLAMDQVPRVTIAQGYDALSSMANIAGYKAVVLAANHFGRFFTGQITAAGKVPPAKILIVGGGVAGLASAGAAKSMGAIVRGFDTRAAALEQFKSLGAEPLEVDLKESGEGQGGYAKEMSKEFIEAEMKLFAQQCKEVDILISTALIPGKKAPVLFNKEMIESMKEGSVVVDLAAEAGGNFETTKPGELYIHKGITHIGYTDLPSRMATQASTLYSNNITKLLKAISPDKDNFYFDVKDDFDFGTMGHVIRGTVVMKDGKVIFPAPTPKNIPQGAPVKQKTVAELEAEKAATITPFRKTMSTASAYTAGLTGILGLGIAAPNLAFSQMVTTFGLAGIVGYHTVWGVTPALHSPLMSVTNAISGLTAVGGLALMGGHLYPSTTSQGLAALAAFISSVNIAGGFLVTQRMLDMFKRPTDPPEYNYLYLLPAGTFVGGYLAALYSGYNIEQIMYLGSGLCCVGALAGLSTQGTARLGNALGMIGVAGGLAATLGVLKPGPELLAQMSGAMALGGTIGLTIAKRIQISDLPQLVAAFHSLVGLAAVLTCIAEYIIEYPHFATDAAANLTKIVAYLGTYIGGVTFSGSLIAYGKLQGLLKSAPLLLPGRHLLNAGLLAASVGGIIPFMVDPSFTTGITCLGSVSALSAVMGVTLTAAIGGADMPVVITVLNSYSGWALCAEGFLLNNNLLTIVGALIGSSGAILSYIMCVAMNRSLANVILGGYGTTSTAGGKPMEISGTHTEINLDNAIDMIREANSIIITPGYGLCAAKAQYPIADLVKMLTEQGKKVRFGIHPVAGRMPGQLNVLLAEAGVPYDIVLEMDEINHDFPDTDLVLVIGANDTVNSAAQEDPNSIIAGMPVLEVWKSKQVIVMKRSLGVGYAAVDNPIFYKPNTAMLLGDAKKTCDALQAKVRESYQK

SEQ ID NO: 17704 - protein, 88 aa, Homo sapiens
MKKARNDEYENLFNMIVEIPRWTNAKMEIATKEPMNPIKQYVKDGKLRYVANIFPYKGYIWNYGTLPQTWEDPHEKDKSTNCFGDNDP

SEQ ID NO: 17705 - protein, 277 aa, Homo sapiens
MANNFSLESHNISLTEHSSMPVEKNITLERPSNVNLTCQFTTSGDLNAVNVTWKKDGEQLENNYLVSATGSTLYTQYRFTIINSKQMGSYSCFFREEKEQRGTFNFKVPELHGKNKPLISYVGDSTVLTCKCQNCFPLNWTWYSSNGSVKVPVGVQMNKYVINGTYANETKLKITQLLEEDGESYWCRALFQLGESEEHIELVVLSYLVPLKPFLVIVAEVILLVATILLCEKYTQKKKKHSDEGKEFEQIEQLKSDDSNGIENNVPRHRKNESLGQ

SEQ ID NO: 17706 - protein, 1338 aa, Homo sapiens
MSSPMPDCTSKCRSLKHALDVLSVVTKGSENQIKAFLSSHCYNAATIKDVFGRNALHLVSSCGKKGVLDWLIQKGVDLLVKDKESGWTALHRSIFYGHIDCVWSLLKHGVSLYIQDKEGLSALDLVMKDRPTHVVFKNTDPTDVYTWGDNTNFTLGHGSQNSKHHPELVDLFSRSGIYIKQVVLCKFHSVFLSQKGQVYTCGHGPGGRLGHGDEQTCLVPRLVEGLNGHNCSQVAAAKDHTVVLTEDGCVYTFGLNIFHQLGIIPPPSSCNVPRQIQAKYLKGRTIIGVAAGRFHTVLWTREAVYTMGLNGGQLGCLLDPNGEKCVTAPRQVSALHHKDIALSLVAASDGATVCVTTRGDIYLLADYQCKKMASKQLNLKKVLVSGGHMEYKVDPEHLKENGGQKICILAMDGAGRVFCWRSVNSSLKQCRWAYPRQVFISDIALNRNEILFVTQDGEGFRGRWFEEKRKSSEKKEILSNLHNSSSDVSYVSDINSVYERIRLEKLTFAHRAVSVSTDPSGCNFAILQSDPKTSLYEIPAVSSSSFFEEFGKLLREADEMDSIHDVTFQVGNRLFPAHKYILAVHSDFFQKLFLSDGNTSEFTDIYQKDEDSAGCHLFVVEKVHPDMFEYLLQFIYTDTCDFLTHGFKPRIHLNKNPEEYQGTLNSHLNKVNFHEDDNQKSAFEVYKSNQAQTVSERQKSKPKSCKKGKNIREDDPVRMLQTVAKKFDFSNLSSRLDGVRFENEKINVIAKNTGNKLKLSQKKCSFLCDVTMKSVDGKEFPCHKCVLCARLEYFHSMLSSSWIEASSCAALEMPIHSDILKVILDYLYTDEAVVIKESQNVDFICSVLVVADQLLITRLKEICEVALTEKLTLKNAAMLLEFAAMYSAKQLKLSCLQFIGLNMAALLEARSLDVLSDGVLKDLSEFYRKMIPAMDRRVITPYQDGPDISYLEVEDGDIFLKEEINMEQNHSETMFKKAKTKAKKKPRKRSDSSGGYNLSDIIQSPSSTELLTSDSEGSYAGVGSPRDLQSPDFTTGFHSDKIEAKVKPYVNGTSPVYSREDLKPWEKSPILKISAPQPIPSNRIDTTSSASWVAGSFSPVSPPVVDLRTIMEIEESRQKCGATPKSHLGKTVSHGVKLSQKQRKMIALTTKENNSGMNSMETVLFTPSKAPKPVNAWASSLHSVSSKSFRDFLLEEKKSVTSHSSGDHVKKVSFKGIENSQAPKIVRCSTHGTPGPEGNHISDLPLLDSPNPWLSSSVTAPSMVAPVTFASIVEEELQQEAALIRSREKPLALIQIEEHAIQDLLVFYEAFGNPEEFVIVERTPQGPLAVPMWNKHGC

SEQ ID NO: 17707 - protein, 515 aa, Homo sapiens
MDSNGLSDPYVKFRLGHQKYKSKIMPKTLNPQWREQFDFHLYEERGGVIDITAWDKDAGKRDDFIGRCQVDLSALSREQTHKLELQLEEGEGHLVLLVTLTASATVSISDLSVNSLEDQKEREEILKRYSPLRIFHNLKDVGFLQVKVIRAEGLMAADVTGKSDPFCVVELNNDRLLTHTVYKNLNPEWNKVFTFNIKDIHSVLEVTVYDEDRDRSADFLGKVAIPLLSIQNGEQKAYVLKNKQLTGPTKGVIYLEIDVIFNAVKASLRTLIPKEQKYIEEENRLSKQLLLRNFIRMKRCVMVLVNAAYYVNSCFDWDSPPRSLAAFVLFLFVVWNFELYMIPLVLLLLLTWNYFLIISGKDNRQRDTVVEDMLEDEEEEDDKDDKDSEKKGFINKIYAIQEVCVSVQNILDEVASFGERIKNTFNWTVPFLSWLAIVALCVFTAILYCIPLRYIVLVWGINKFTKKLRSPYAIDNNELLDFLSRVPSDVQVVQYQELKPDPSHSPYKRKKNNLG

SEQ ID NO: 17708 - protein, 704 aa, Homo sapiens
MGIRGLMSFVEDHSNEFFTDLKLRDTKIVIDGYALFHRLCFSSNLDLRYGGDYDSFADVVQKFFESLFACNICPYVVLDGGCDISDKKLTTLKDRAREKIQMAHSLSVGGSGYVCPLLIREVFIQVLIKLRVCFVQCFSEADRDIMTLANHWNCPVLSSDSDFCIFDLKTGFCPLNSFQWRNMNTIKGTQNYIPAKCFSLDAFCHHFSNMNKALLPLFAVLCGNDHVNLPIMETFLSKARLPLGATSSKGRRHHRILGLLNWLSHFANPTEALDNVLKYLPKKDRENVKELLCCSMEEYQQSQVKLQDFFQCGTYVCPDALNLGLPEWVLVALAKGQLSPFISDALVLRRTILPTQVENMQQPNAHRISQPIRQIIYGLLLNASPHLDKTSWNALPPQPLAFSEVERINKNIRTSIIDAVELAKDHSDLSRLTELSLRRRQMLLLETLKVKQTILEPIPTSLKLPIAVSCYWLQHTETKAKLHHLQSLLLTMLVGPLIAIINSPGKEELQEDGAKMLYAEFQRVKAQTRLGTRLDLDTAHIFCQWQSCLQMGMYLNQLLSTPLPEPDLTRPSAFNTLNEDIWTHTKYGGTLHVSRLYSGSLVHGLCQQLLASTSVESLLSICPEAKQLYEYLFNATRSYAPAEIFLPKGRSNSKKKRQKKQNTSCSKNRGRTTAHTKCWYEGNNRFGLLMVENLEEHSEASNIE

SEQ ID NO: 17709 - protein, 300 aa, Homo sapiens
AARRTHEHVSEKTSESPSKPGEKKGSDEKKAASLGSSQSSRTYAGGTASATKVSASSGATSKSSSMNPTETKAVKTEPEKKSQSTKLSVVHEKKSQEGKPKEHTEPKSLPKQASDTGSNDAHNKKAVSRSAEQQPSEKSTEPKKKEKKSLTPAVPVESKPDKPSGKSGMDAALDDLIDTLGGPEETEEENTTYTGPEVSDPMSSTYIEELGKREVTIPPKYRELLAKKEGITGPPADSSKPIGPDDAIDALSSDFTCGSPTAAGKKTEKEESTEVLKAQSAGTVRSAAPPQEKKRKVEKV

SEQ ID NO: 17710 - protein, 1399 aa, Homo sapiens
PPPPPPPMWNPMIPAFDLFQGNHGFVAPVVTTAAHWRSVNYTFPPSVISHTSPTKVWRNKDGTSAYQVQETPVSQVVRKKTSYVGLVLVLLRGLPGSGKSFLARTLQEDNPSGVILSTDDYFYINGQYQFDVKYLGEAHEWNQNRAKEAFEKKISPIIIDNTNLQAWEMKPYVALSQKHKYKVLFREPDTWWKFKPKELARRNIHGVSKEKITRMLEHYQRFVSVPIIMSSSVPEKIERIELCAYSCEDRSTSPRDDEDIISEKEENILSLSLKHLEFTEEKNLDVTKETMLPENVAYLSNADLNKRRKEISDMNPSIQSALILETPHMYFSDSESKLQATDKSENEQIEMVAVKGYSKTDTDSSMERVSPSTCCSENNQEDCDLANSGPLQNEKSSPGEIVEERATVTKKAFGKQKSKSTLEKFPRHELSNFVGDWPVDKTIGQRTKRNRKTEKTSSVQSDKKYNYPQSHKLVNSVSVNTDCVQQRGSPHESVEDGRKSQCDDASEPLNSYKYDAYKNIDKNSFNIMGDWPSSDSLAQREHRSRMPKTGLSEPNLEIGTNDKMNEISLSTAHEACWGTSSQKLKTLGSSNLGSSEMLLSEMTCESQTCLSKKSHGQHTSLPLTFTNSAPTVSGVVEPQTLAECQEQMPKRDPGKEVGMCTQTEPQDFALLWKIEKNKISISDSIKVLTGRLDGFKPKVFNINTKSDVQEAIPYRVMYDKSTFVEESELTSADESENLNILCKLFGSFSLEALKDLYERCNKDIIWATSLLLDSETKLCEDTEFENFQKSCDGSQIGPFSLGLNLKEIISQRGTLENSNSPVPEFSHGIGISNADSQSTCDAERGNSEQAEMRAVTPENHESMTSIFPSAAVGLKNNNDILPNSQEELLYSSKQSFPGILKATTPKDMSETEKNLVVTETGDNIHSPSHFSDIFNFVSSTSNLELNEEIYFTDSLEIKRNENFPKDYVKFSDEEEFMNEDEKEMKEILMAGSSLSAGVSGEDKTEILNPTPAMAKSLTIDCLELALPPELAFQLNELFGPVGIDSGSLTVEDCVVHIDLNLAKVIHEKWKESVMERQRQEEVSCGKFMQDPSLVGHTGLDNPEQKSSQRTGKKLLKTLTASEMLPLLDHWNTQTKKVSLREIMSEEIALQEKHNLKRETLMFEKDCATKLKEKQLFKIFPAINQNFLVDIFKDHNYSLEHTVQFLNCVLEGDPVKTVVAQEFVHQNENVTSHTGQKSKEKKDFEYPDYDDYRAEAFLHQQKRMECYSKAKEAYRIGKKNVATFYAQQGTLHEQKMKEANHLAAIEIFEKVNASLLPQNVLDLHGLHVDEALEHLMRVLEKKTEEFKQNGGKPYLSVITGRGNHSQGGVARIKPAVIKYLISHSFRFSEIKPGCLKVMLK

SEQ ID NO: 17711 - protein, 600 aa, Homo sapiens
MLDSCKLKSACNLPFICNKKIINTAGTSNAEVPLADPGMYQLDITLRRGQSLAARDRGGTSDPYVKFKIGGKEVFRSKIIHKNLNPVWEEKACILVDHLREPLYIKVFDYDFGLQDDFMGSAFLDLTQLELNRPTDVTLTLKDPHYPDHDLGIILLSVILTPKEGESRDVTMLMRKSWKRSSKELSENEVVGSYFSVKSLFWRTCGRPALPVLGFCRAELQNPYCKNVQFQTQSLRLSDLHRKSHLWRGIVSITLIEGRDLKAMDSNGLSDPYVKFRLGHQKYKSKIMPKTLNPQWREQFDFHLYEERGGVIDITAWDKDAGKRDDFIGRCQVDLSALSREQTHKLELQLEEGEGHLVLLVTLTASATVSISDLSVNSLEDQKEREEILKRYSPLRIFHNLKDVGFLQVKVIRAEGLMAADVTGKSDPFCVVELNNDRLLTHTVYKNLNPEWNKVFTFNIKDIHSVLEVTVYDEDRDRSADFLGKVAIPLLSIQNGEQKAYVLKNKQLTGPTKGVIYLEIDVIFNAVKASLRTLIPKEQKYIEEENRLSKQLLLRNFIRMKRCVMVLVNAAYYVNSCFDWDSPPRSLAAFVALYGTFINV

SEQ ID NO: 17712 - protein, 142 aa, Homo sapiens
AFLLGSIHEPAGALMEPQPCPGSLAESFLEEELRLNAELSQLQFSEPVGIIYNPVEYAWEPHRNYVTRYCQGPKEVLFLGMNPGPFGMAQTGVPFGEVSMVRDWLGIVGPVLTPPQEHPKRPVLGLECPQSEKILAAVLRTD

SEQ ID NO: 17713 - protein, 209 aa, Homo sapiens
KMFIGGLSWDTTKKDLKDYFSKFGEVVDCTLKLDPITGRSRGFGFVLFKESESVDKVMDQKEHKLNGKVIDPKRAKAMKTKEPVKKIFVGGLSPDTPEEKIREYFGGFGEVESIELPMDNKTNKRRGFCFITFKEEEPVKKIMEKKYHNVGLSKCEIKVAMSKEQYQQQQQWGSRGGFAGRARGRGGDQQSGYGKVSRRGGHQNSYKPY

SEQ ID NO: 17714 - protein, 544 aa, Homo sapiens
MASDSMSSKQARNHITKGKRQQQHQQIKNRSSISDGDGEDSFIFEANEAWKDFHGSLLRFYENGELCDVTLKVELVARACCEYMKLHFHPSNCLAVRAFAESHNRIDLMDMADQYACDHFTEVVECEDFVSVSPQHLHKLLSSSDLNIENEKQVYNAAIKWLLANPQHHSKWLDETLAQVRLPLLPVDFLMGVVAKEQIVKQNLKCRDLLDEARNYHLHLSSRAVPDFEYSIRTTPRKHTAGVLFCVGGRGGSGDPFRSIECYSINKNSWFFGPEMNSRRRHVGVISVEGKVYAVGGHDGNEHLGSMEMFDPLTNKWMMKASMNTKRRGIALASLGGPIYAIGGLDDNTCFNDVERYDIESDQWSTVAPMNTPRGGVGSVALVNHVYAVGGNDGMASLSSVERYDPHLDKWIEVKEMGQRRAGNGVSKLHGCLYVVGGFDDNSPLSSVERYDPRSNKWDYVAALTTPRGGVGIATVMGKIFAVGGHNGNAYLNTVEAFDPVLNRWELVGSVSHCRAGAGVAVCSCLTSQIRDVGHGSNNVVDCM

SEQ ID NO: 17715 - protein, 970 aa, Homo sapiens
MQHKIVTSLDWRCCPGYSGPKCQLRAQEQQSLIHTNQAESHTAVGRGVAEQQQQQGCGDPEVMQKMTDQVNYQAMKLTLLQKKIDNISLTVNDVRNTYSSLEGKVSEDKSREFQSLLKGLKSKSINVLIRDIVREQFKIFQNDMQETVAQLFKTVSSLSEDLESTRQIIQKVNESVVSIAAQQKFVLVQENRPTLTDIVELRNHIVNVRQEMTLTCEKPIKELEVKQTHLEGALEQEHSRSILYYESLNKTLSKLKEVHEQLLSTEQVSDQKNAPAAESVSNNVTEYMSTLHENIKKQSLMMLQMFEDLHIQESKINNLTVSLEMEKESLRGECEDMLSKCRNDFKFQLKDTEENLHVLNQTLAEVLFPMDNKMDKMSEQLNDLTYDMEILQPLLEQGASLRQTMTYEQPKEAIVIRKKIENLTSAVNSLNFIIKELTKRHNLLRNEVQGRDDALERRINEYALEMEDGLNKTMTIINNAIDFIQDNYALKETLSTIKDNSEIHHKCTSDMETILTFIPQFHRLNDSIQTLVNDNQRYNFVLQVAKTLAGIPRDEKLNQSNFQKMYQMFNETTSQVRKYQQNMSHLEEKLLLTTKISKNFETRLQDIESKVTQTLIPYYISVKKGSVVTNERDQALQLQVLNSRFKALEAKSIHLSINFFSLNKTLHEVLTMCHNASTSVSELNATIPKWIKHSLPDIQLLQKGLTEFVEPIIQIKTQAALSNLTCCIDRSLPGSLANVVKSQKQVKSLPKKINALKKPTVNLTTVLIGRTQRNTDNIIYPEEYSSCSRHPCQNGGTCINGRTSFTCACRHPFTGDNCTIKLVEENALAPDFSKGSYRYAPMVAFFASHTYGMTIPGPILFNNLDVNYGASYTPRTGKFRIPYLGVYVFKYTIESFSAHISGFLVVDGIDKLAFESENINSEIHCDRVLTGDALLELNYGQEVWLRLAKGTIPAKFPPVTTFSGYLLYRT

SEQ ID NO: 17716 - protein, 125 aa, Homo sapiens
MKFPGPLENQRLSFLLEKAITREAQMWKVNVRKMPSNQNVSPSQRDEVIQWLAKLKYQFNLYPETFALASSLLDRFLATVKAHPKYLSCIAISCFFLAAKTVEEDERIPVLKVLARDSFCGCSSS

SEQ ID NO: 17717 - protein, 114 aa, Homo sapiens
MRLLLALLGVLLSVPGPPVLSLEASEEVELEPCLAPSLEQQEQELTVALGQPVRLCCGRAERGGHWYKEGSRLAPAGRVRGWRGRLEIASFLPEDAGRYLCLARGSMIVLQNLT

SEQ ID NO: 17718 - protein, 394 aa, Homo sapiens
GGREPQGLAEKSPLQTIGEEQTQNPYTELLVLKAHHDIVRFLVQLDDYRFASAGDDGIVVVWNAQTGEKLLELNGHTQKITAIITFPSLESCEEKNQLILTASADRTVIVWDGDTTRQVQRISCFQSTVKCLTVLQRLDVWLSGGNDLCVWNRKLDLLCKTSHLSDTDLSFVTGSHVGELIIWDALDWTMQAYERNFWDPSPQLDTQQEIKLCQKSNDISIHHFTCDEENVFAAVGRGLYVYSLQMKRVIACQKTAHDSNVLHVARLPNRQLISCSEDGSVRIWELREKQQLAAEPVPTGFFNMWGFGRVSKQASQPVKKQQENATSCSLELIGDLIGHSSSVEMFLYFEDHGLVTCSADHLIILWKNGERESGLRSLRLFQKLEENGDLYLAV

SEQ ID NO: 17719 - protein, 676 aa, Homo sapiens
MVASARVQKLVRRYKLAIATALAILLLQGLVVWSFSGLEEDEAGEKGRQRKPRPLDPGEGSKDTDSSAGRRGSTGRRHGRWRGRAESPGVPVAKVVRAVTSRQRASRRVPPAPPPEAPGRQNLSGAAAGEALVGAAGFPPHGDTGSVEGAPQPTDNGFTPKCEIVGKDALSALARASTKQCQQEIANVVCLHQAGSLMPKAVPRHCQLTGKMSPGIQWDESQAQQPMDGPPVRIAYMLVVHGRAIRQLKRLLKAVYHEQHFFYIHVDKRSDYLHREVVELAQGYDNVRVTPWRMVTIWGGASLLRMYLRSMRDLLEVPGWAWDFFINLSATDYPTRTNEELVAFLSKNRDKNFLKSHGRDNSRFIKKQGLDRLFHECDSHMWRLGERQIPAGIVVDGGSDWFVLTRSFVEYVVYTDDPLVAQLRQFYTYTLLPAESFFHTVLENSLACETLVDNNLRVTNWNRKLGCKCQYKHIVDWCGCSPNDFKPQDFLRLQQVSRPTFFARKFESTVNQEVLEILDFHLYGSYPPGTPALKAYWENTYDAADGPSGLSDVMLTAYTAFARLSLHHAATAAPPMGTPLCRFEPRGLPSSVHLYFYDDHFQGYLVTQAVQPSAQGPAETLEMWLMPQGSLKLLGRSDQASRLQSLENRGLSMLPRLVSNSWPQAVLPLQPPKALG

SEQ ID NO: 17720 - protein, 623 aa, Homo sapiens
MEAEETMECLQEFPEHHKMILDRLNEQREQDRFTDITLIVDGHHFKAHKAVLAACSKFFYKFFQEFTQEPLVEIEGVSKMAFRHLIEFTYTAKLMIQGEEEANDVWKAAEFLQMLEAIKALEVRNKENSAPLEENTTGKNEAKKRKIAETSNVITESLPSAESEPVEIEVEIAEGTIEVEDEGIETLEEVASAKQSVKYIQSTGSSDDSALALLADITSKYRQGDRKGQIKEDGCPSDPTSKQVEGIEIVELQLSHVKDLFHCEKCNRSFKLFYHFKEHMKSHSTESFKCEICNKRYLRESAWKQHLNCYHLEEGGVSKKQRTGKKIHVCQYCEKQFDHFGHFKEHLRKHTGEKPFECPNCHERFARNSTLKCHLTACQTGVGAKKGRKKLYECQVCNSVFNSWDQFKDHLVIHTGDKPNHCTLCDLWFMQGNELRRHLSDAHNISERLVTEEVLSVETRVQTEPVTSMTIIEQVGKVHVLPLLQVQVDSAQVTVEQVHPDLLQDSQVHDSHMSELPEQVQVSYLEVGRIQTEEGTEVHVEELHVERVNQMPVEVQTELLEADLDHVTPEIMNQEERESSQADAAEAAREDHEDAEDLETKPTVDSEAEKAENEDRTALPVLE

SEQ ID NO: 17721 - protein, 54 aa, Homo sapiens
MAGLALQPGTALLCYSCKAQVSNEDCLQVENCTQLGEQCWTARIREWGDDSRQA

SEQ ID NO: 17722 - protein, 1134 aa, Homo sapiens
MSSMSSAEEQFQWQSQDGQKDIEDELTTGLELVDSCIRSLQESGILDPQDYSTGERPSLLSQSALQLNSKPEGSFQYPASYHSNQTLALGETTPSQLPARGTQARATGQSFSQGTTSRAGHLAGPEPAPPPPPPPREPFAPSLGSAFHLPDAPPAAAAAALYYSSSTLPAPPRGGSPLAAPQGGSPTKLQRGGSAPEGATYAAPRGSSPKQSPSRLAKSYSTSSPINIVVSSAGLSPIRVTSPPTVQSTISSSPIHQLSSTIGTYATLSPTKRLVHASEQYSKHSQELYATATLQRPGSLAAGSRASYSSQHGHLGPELRALQSPEHHIDPIYEDRVYQKPPMRSLSQSQGDPLPPAHTGTYRTSTAPSSPGVDSVPLQRTGSQHGPQNAAAATFQRASYAAGPASNYADPYRQLQYCPSVESPYSKSGPALPPEGTLARSPSIDSIQKDPREFGWRDPELPEVIQMLQHQFPSVQSNAAAYLQHLCFGDNKIKAEIRRQGGIQLLVDLLDHRMTEVHRSACGALRNLVYGKANDDNKIALKNCGGIPALVRLLRKTTDLEIRELVTGVLWNLSSCDALKMPIIQDALAVLTNAVIIPHSGWENSPLQDDRKIQLHSSQVLRNATGCLRNVSSAGEEARRRMRECDGLTDALLYVIQSALGSSEIDSKTVENCVCILRNLSYRLAAETSQGQHMGTDELDGLLCGEANGKDAESSGCWGKKKKKKKSQDQWDGVGPLPDCAEPPKGIQMLWHPSIVKPYLTLLSECSNPDTLEGAAGALQNLAAGSWKWSVYIRAAVRKEKGLPILVELLRIDNDRVVCAVATALRNMALDVRNKELIGKYAMRDLVHRLPGGNNSNNTASKAMSDDTVTAVCCTLHEVITKNMENAKALRDAGGIEKLVGISKSKGDKHSPKVVKAASQVLNSMWQYRDLRSLYKKDGWSQYHFVASSSTIERDRQRPYSSSRTPSISPVRVSPNNRSASAPASPREMISLKERKTDYECTGSNATYHGAKGEHTSRKDAMTAQNTGISTLYRNSYGAPAEDIKHNQVSAQPVPQEPSRKDYETYQPFQNSTRNYDESFFEDQVHHRPPASEYTMHLGLKSTGNYVDFYSAARPYSELNYETSHYPASPDSWV

SEQ ID NO: 17723 - protein, 671 aa, Homo sapiens
METSRSRGGGGAVSERGGAGASVGVCRRKAEAGAGTGTLAADMDLHCDCAAETPAAEPPSGKINKAAFKLFKKRKSGGTMPSIFGVKNKGDGKSSGPTGLVRSRTHDGLAEVLVLESGRKEEPRGGGDSGGGGGGRPNPGPPRAAGPGGGSLASSSVAKSHSFFSLLKKNGRSENGKGEPVDASKAGGKQKRGLRGLFSGMRWHRKDKRAKAEAAEGRAPGGGLILPGSLTASLECVKEETPRAAREPEEPSQDAPRDPAGEPAGGEEVPAPADRAPARSCREAEGLAHPGDTGARGEDAAGHRRAEPGPGEVRTAEDASRTGAVPVKTVPLVDSEGGSGRAPAAPDPASVDPPSDPSADRICLMFSDVTSLKSFDSLTGCGDIIADQEEEAGPSCDKHVPGPGKPALSKKNPGVVAYQGGGEEMASPDEVDDTYLQEFWDMLSQTEEQGPEPQEGAAKVAAALETKVVPETPKDTRCVEAAKDASSVKRRRLNRIPIEPHPKEEPKHPEKEQQEGVPNSDEGYWDSTTPGPEEDSSSSGKKAGIPRDSYSGDALYDLYADPDGSPATLPGGKDNEETSSLSRLKPVSPGTITCPLRTPGSLLKDSKIPISIKHLTNLPSSHPVVHQQPSRSEMPRTKIPVSKVLVRRVSNRGLAGTTIRATACHDSAKKL

SEQ ID NO: 17724 - protein, 234 aa, Homo sapiens
MASSAKSAEMPTISKTVNPTPDPHQEYLDPRITIALFEIGSHSPSSWGSLPFLKNSSHQVTEQQTAQKFNNLLKEIKDILKNMAGFEEKITEAKELFEETNITEDVSAHKENIRGLDKINEMLSTNLPVSLAPEKEDNEKKQEMILETNITEDVSAHKENIRGLDKINEMLSTNLPVSLAPEKEDNEKKQQMIMENQNSENTAQVFARDLVNRLEEKKVLNETQQSQEKAKNRL

SEQ ID NO: 17725 - protein, 1690 aa, Homo sapiens
MEPWSSRWKTKRWLWDFTVTTLALTFLFQAREVRGAAPVDVLKALDFHNSPEGISKTTGFCTNRKNSKGSDTAYRVSKQAQLSAPTKQLFPGGTFPEDFSILFTVKPKKGIQSFLLSIYNEHGIQQIGVEVGRSPVFLFEDHTGKPAPEDYPLFRTVNIADGKWHRVAISVEKKTVTMIVDCKKKTTKPLDRSERAIVDTNGITVFGTRILDEEVFEGDIQQFLITGDPKAAYDYCEHYSPDCDSSAPKAAQAQEPQIDEYAPEDIIEYDYEYGEAEYKEAESVTEGPTVTEETIAQTEINGHGAYGEKGQKGEPAVVEPGMLVEGPPGPAGPAGIMGPPGLQGPTGPPGDPGDRGPPGRPGLPGADGLPGPPGTMLMLPFRYGGDGSKGPTISAQEAQAQAILQQARIALRGPPGPMGLTGRPGPVGGPGSSGAKGESGDPGPQGPRGVQGPPGPTGKPGKRGRPGADGGRGMPGEPGAKGDRGFDGLPGLPGDKGHRGERGPQGPPGPPGDDGMRGEDGEIGPRGLPGEAGPRGLLGPRGTPGAPGQPGMAGVDGPPGPKGNMGPQGEPGPPGQQGNPGPQGLPGPQGPIGPPGEKGPQGKPGLAGLPGADGPPGHPGKEGQSGEKGALGPPGPQGPIGYPGPRGVKGADGVRGLKGSKGEKGEDGFPGFKGDMGLKGDRGEVGQIGPRGEDGPEGPKGRAGPTGDPGPSGQAGEKGKLGVPGLPGYPGRQGPKGSTGFPGFPGANGEKGARGVAGKPGPRGQRGPTGPRGSRGARGPTGKPGPKGTSGGDGPPGPPGERGPQGPQGPVGFPGPKGPPGPPGKDGLPGHPGQRGETGFQGKTGPPGPGGVVGPQGPTGETGPIGERGHPGPPGPPGEQGLPGAAGKEGAKGDPGPQGISGKDGPAGLRGFPGERGLPGAQGAPGLKGGEGPQGPPGPVGSPGERGSAGTAGPIGLPGRPGPQGPPGPAGEKGAPGEKGPQGPAGRDGVQGPVGLPGPAGPAGSPGEDGDKGEIGEPGQKGSKGDKGENGPPGPPGLQGPVGAPGIAGGDGEPGPRGQQGMFGQKGDEGARGFPGPPGPIGLQGLPGPPGEKGENGDVGPMGPPGPPGPRGPQGPNGADGPQGPPGSVGSVGGVGEKGEPGEAGNPGPPGEAGVGGPKGERGEKGEAGPPGAAGPPGAKGPPGDDGPKGNPGPVGFPGDPGPPGEPGPAGQDGVGGDKGEDGDPGQPGPPGPSGEAGPPGPPGKRGPPGAAGAEGRQGEKGAKGEAGAEGPPGKTGPVGPQGPAGKPGPEGLRGIPGPVGEQGLPGAAGQDGPPGPMGPPGLPGLKGDPGSKGEKGHPGLIGLIGPPGEQGEKGDRGLPGTQGSPGAKGDGGIPGPAGPLGPPGPPGLPGPQGPKGNKGSTGPAGQKGDSGLPGPPGSPGPPGEVIQPLPILSSKKTRRHTEGMQADADDNILDYSDGMEEIFGSLNSLKQDIEHMKFPMGTQTNPARTCKDLQLSHPDFPDGEYWIDPNQGCSGDSFKVYCNFTSGGETCIYPDKKSEGVRISSWPKEKPGSWFSEFKRGKLLSYLDVEGNSINMVQMTFLKLLTASARQNFTYHCHQSAAWYDVSSGSYDKALRFLGSNDEEMSYDNNPFIKTLYDGCASRKGYEKTVIEINTPKIDQVPIVDVMINDFGDQNQKFGFEVGPVCFLG

SEQ ID NO: 17726 - protein, 118 aa, Homo sapiens
MAAASYDQLLKQVEALKMENSNLRQELEDNSNHLTKLETEASNMKEVLKQLQGSIEDEAMASSGQIDLLERLKELNLDSSNFPGVKLRSKMSLRSYGSREGSVSSRSGECSPVPMGSF

SEQ ID NO: 17727 - protein, 160 aa, Homo sapiens
MEAPEYLDLDEIDFSDDISDNRSQGNRLQKLGLEDTDREDAMGFGSHRAKLTVVAALGACHCPENEYSVTSLKTIPELCRRCDTQNEDRSVSSSSWNCGISTLITNTQKPTGIADVYSKFRPVKRVSPLKHQPETLENNESDDQKNQKVVEYQKGGESDL

SEQ ID NO: 17728 - protein, 1735 aa, Homo sapiens
MDEEEDGAGAEESGQPRSFMRLNDLSGAGGRPGPGSAEKDPGSADSEAEGLPYPALAPVVFFYLSQDSRPRSWCLRTVCNPWFERISMLVILLNCVTLGMFRPCEDIACDSQRCRILQAFDDFIFAFFAVEMVVKMVALGIFGKKCYLGDTWNRLDFFIVIAGMLEYSLDLQNVSFSAVRTVRVLRPLRAINRVPSMRILVTLLLDTLPMLGNVLLLCFFVFFIFGIVGVQLWAGLLRNRCFLPENFSLPLSVDLERYYQTENEDESPFICSQPRENGMRSCRSVPTLRGDGGGGPPCGLDYEAYNSSSNTTCVNWNQYYTNCSAGEHNPFKGAINFDNIGYAWIAIFQVITLEGWVDIMYFVMDAHSFYNFIYFILLIIVGSFFMINLCLVVIATQFSETKQRESQLMREQRVRFLSNASTLASFSEPGSCYEELLKYLVYILRKAARRLAQVSRAAGVRVGLLSSPAPLGGQETQPSSSCSRSHRRLSVHHLVHHHHHHHHHYHLGNGTLRAPRASPEIQDRDANGSRRLMLPPPSTPALSGAPPGGAESVHSFYHADCHLEPVRCQAPPPRSPSEASGRTVGSGKVYPTVHTSPPPETLKEKALVEVAASSGPPTLTSLNIPPGPYSSMHKLLETQSTGACQSSCKISSPCLKADSGACGPDSCPYCARAGAGEVELADREMPDSDSEAVYEFTQDAQHSDLRDPHSRRQRSLGPDAEPSSVLAFWRLICDTFRKIVDSKYFGRGIMIAILVNTLSMGIEYHEQPEELTNALEISNIVFTSLFALEMLLKLLVYGPFGYIKNPYNIFDGVIVVISVWEIVGQQGGGLSVLRTFRLMRVLKLVRFLPALQRQLVVLMKTMDNVATFCMLLMLFIFIFSILGMHLFGCKFASERDGDTLPDRKNFDSLLWAIVTVFQILTQEDWNKVLYNGMASTSSWAALYFIALMTFGNYVLFNLLVAILVEGFQAEGDANKSESEPDFFSPSLDGDGDRKKCLALVSLGEHPELRKSLLPPLIIHTAATPMSLPKSTSTGLGEALGPASRRTSSSGSAEPGAAHEMKSPPSARSSPHSPWSAASSWTSRRSSRNSLGRAPSLKRRSPSGERRSLLSGEGQESQDEEESSEEERASPAGSDHRHRGSLEREAKSSFDLPDTLQVPGLHRTASGRGSASEHQDCNGKSASGRLARALRPDDPPLDGDDADDEGNLSKGERVRAWIRARLPACCLERDSWSAYIFPPQSRFRLLCHRIITHKMFDHVVLVIIFLNCITIAMERPKIDPHSAERIFLTLSNYIFTAVFLAEMTVKVVALGWCFGEQAYLRSSWNVLDGLLVLISVIDILVSMVSDSGTKILGMLRVLRLLRTLRPLRVISRAQGLKLVVETLMSSLKPIGNIVVICCAFFIIFGILGVQLFKGKFFVCQGEDTRNITNKSDCAEASYRWVRHKYNFDNLGQALMSLFVLASKDGWVDIMYDGLDAVGVDQQPIMNHNPWMLLYFISFLLIVAFFVLNMFVGVVVENFHKCRQHQEEEEARRREEKRLRRLEKKRRKAQCKPYYSDYSRFRLLVHHLCTSHYLDLFITGVIGLNVVTMAMEHYQQPQILDEALKICNYIFTVIFVLESVFKLVAFGFRRFFQDRWNQLDLAIVLLSIMGITLEEIEVNASLPINPTIIRIMRVLRIARVLKLLKMAVGMRALLDTVMQALPQLWAWSSLETWSVTRHTPVRAWAVMPPFGTLAWPS

SEQ ID NO: 17729 - protein, 442 aa, Homo sapiens
FGTGQPLPPLQIPQQTAQHSIVLPLKKPPKWIRRPVGASFSFGGKLVTFENVRMPSHQGAEQQQQQHHVFISQVVTEKEFLSRSDQLQQAVQSQGFINYCQKKIDASQTEFEKNVWSFLKVNFEDDSRGKYLELLGYRKEDLGKKIALALNKVDGANVHIKEEKEESEFLPSSGGTFNISVSGDIDGLITQALLTGNFESAVDLCLHDNRMADAIILAIAGGQELLARTQKKYFAKSQSKITRLITAVVMKNWKEIVESCDLKNWREALAAVLTYAKPDEFSALCDLLGTRLENEGDSLLQTQACLCYICAGNVEKLVACWTKAQDGSHPLSLQDLIEKVVILRKAVQLTQAMDTSTVGVLLAAKMSQYANLLAAQGSIAAALAFLPDNTNQPNIMQLRDRLCRAQGEPVAGHESPKIPYEKQQLPKGRPGPVAGHHQMPRV

SEQ ID NO: 17730 - protein, 257 aa, Homo sapiens
MADISSDGEREANMPGLNIRNKEFNYLHNRNGSELDLLGMUDLLENLGYSVVIKENLTAQEMETALRQFAAHPEHQSSDSTFLVFMSHSILNGICGTKHWDQEPDVLHDDTIFEIFNNRNCQSLKDKPKVIIMQACRGNGAGIVWFTTDSGKASADTHGRLLQGNICNDAVTKAHVEKDFIAFKSSTPHNVSWRHETNGSVFISQIIYYFREYSWSHHLEEIFQKVQHSFETPNILTQLPTIERLSMTRYFYLFPGN

SEQ ID NO: 17731 - protein, 298 aa, Homo sapiens
MAETLFWTPLLVVLLAGLGDTEAQQTTLHPLVGRVFVHTLDHETFLSLPEHVAVPPAVHITYHAHLQGHPDLPRWLRYTQRSPHHPGFLYGSATPEDRGLQVIEVTAYNRDSFDTTRQRLVLEIGDPEGPLLPYQAEFLVRSHDAEEVLPSTPASRFLSALGGLWEPGELQLLNVTSALDRGGRVPLPIEGRKEGVYIKVGSASPFSTCLKMVASPDSHARCAQGQPPLLSCYDTLAPHFRVDWCNVTLAEERPGYLRHPDGPPLHHPREHRGAAADGGQPRGAPATLHPAHVQCAHR

SEQ ID NO: 17732 - protein, 57 aa, Homo sapiens [sequence omitted]

SEQ ID NO: 17733 - protein, 182 aa, Homo sapiens
MKSLLLLVLISICWADHLSDNYTLDHDRAIHIQENGPHLLVEAEQAKVFSHRGGNVTLPCKFYRDPTAFGSGIHKIRIKWTKLTSDYLKEVDVFVSMGYHKKTYGGYQGRVFLKGGSDSDASLVITDLTLEDYGRYKCEVIEGLEDDTVVVALDLQGVVFPYFPRLGRYNLNFHEAQQACLD

SEQ ID NO: 17734 - protein, 376 aa, Homo sapiens
MIPCGWLMNKNEKHDDKLVMFTNQSEDSERCESMELDKKIQDLIERNASPHPKRFTPEAMPTHRNLCSLKTPGKTASMAHFVQGTSRMIAAESSTEHKECAEPSTRKNLMNSLEQKIRCLEKQRKELLEVNQQWDQQFRSMKELYERKVAELKTKLDAAERFLSTREKDPHQRQRKDDRQREDDRQRDLTRDRLQREEKEKERLNEELHELKEENKLLKGKNTLANKEKEHYECEIKRLNKALQDALNIKCSFSEDCLRKSRVEFCHEEMRTEMEVLKQQVQIYEEDFKKERSDRERLNQEKEELQQINETSQSQLNRLNSQIKACQMEKEKLEKQLKQMYCPPCNCGLVFHLQDPWVPTGPGAVQKQREHPVYPQ

SEQ ID NO: 17735 - protein, 685 aa, Homo sapiens
SEDCEVAGYRVLKGTEAVIIPYALHRDPRYFPNPEEFQPERFFPENAQGRHPYAYVPFSAGPRNCIGCLTQLYENAFFRGGDVASMYTPNAQYCQMRCTFHPRCLLFSFLPASSINDMEKRFGCFLKDSVTGTLPKVHRTGAVSGHSLKQCGHQISACHRDIYKGVDMRGVNFNVSKVSSVEECQKRCTSNIRCQFFSYATQTFHKAEYRNNCLLKYSPGGTPTAIKVLSNVESGFSLKPCALSEIGCHMNIFQHLAFSDVDVARVLTPDAFVCRTICTYHPNCLFFTFYTNVWKIESQRNVCLLKTSESGTPSSSTPQENTISGYSLLTCKRTLPEPCHSKIYPGVDFGGEELNVTFVKGVNVCQETCTKMIRCQFFTYSLLPEDCKEEKCKCFLRLSMDGSPTRIAYGTQGSSGYSLRLCNTGDNSVCTTKTSTRIVGGTNSSWGEWPWQVSLQVKLTAQRHLCGGSLIGHQWVLTAAHCFDGLPLQDVWRIYSGILNLSDITKDTPFSQIKEIIIHQNYKVSEGNHDIALIKLQAPLNYTEFQKPICLPSKGDTSTIYTNCWVTGWGFSKEKGEIQNILQKVNIPLVTNEECQKRYQDYKITQRMVCAGYKEGGKDACKGDSGGPLVCKHNGMWRLVGITSWGEGCARREQPGVYTKVAEYMDWILEKTQSSDGKAQMQSPA

SEQ ID NO: 17736 - protein, 1419 aa, Homo sapiens
MTTKRSLFVRLVPCRCLRGEEETVTTLDYSHCSLEQVPKEIFTFEKTLEELYLDANQIEELPKQLFNCQSLHKLSLPDNDLTTLPASIANLINLRELDVSKNGIQEFPENIKNCKVLTIVEASVNPISKLPDGFSQLLNLTQLYLNDAFLEFLPANFGRLTKLQILELRENQLKMLPKTMNRLTQLERLDLGSNEFTEVPEVLEQLSGLKEFWMDANRLTFIPGFIGSLKQLTYLDVSKNNIEMVEEGISTCENLQDLLLSSNSLQQLPETIGSLKNITTLKIDENQLMYLPDSIGGLISVEELDCSFNEVEALPSSIGQLTNLRTFAADHNYLQQLPPEIGSWKNITVLFLHSNKLETLPEEMGDMQKLKVINLSDNRLKNLPFSFTKLQQLTAMWLSDNQSKPLIPLQKETDSETQKMVLTNYMFPQQPRTEDVMFISDNESFNPSLWEEQRKQRAQVAFECDEDKDEREAPPREGNLKRYPTPYPDELKNMVKTVQTIVHRLKDEETNEDSGRDLKPHEDQQDINKDVGVKTSESTTTVKSKVDEREKYMIGNSVQKISEPEAEISPGSLPVTANMKASENLKHIVNHDDVFEESEELSSDEEMKMAEMRPPLIETSINQPKVVALSNNKKDDTKETDSLSDEVTHNSNQNNSNCSSPSRMSDSVSLNTDSSQDTSLCSPVKQTHIDINSKIRQEDENFNSLLQNGDILNSSTEEKFKAHDKKDFNLPEYDLNVEERLVLIEKSVDSTATADDTHKLDHINMNLNKLITNDTFQPEIMERSKTQDIVLGTSFLSINSKEETEHLENGNKYPNLESVNKVNGHSEETSQSPNRTEPHDSDCSVDLGISKSTEDLSPQKSGPVGSVVKSHSITNMEIGGLKIYDILSDNGPQQPSTTVKITSAVDGKNIVRSKSATLLYDQPLQVFTGSSSSSDLISGTKAIFKFDSNHNPEEPNIIRGPTSGPQSAPQIYGPPQYNIQYSSSAAVKDTLWHSKQNPQIDHASFPPQLLPRSESTENQSYAKHSANMNFSNHNNVRANTAYHLHQRLGPARHGEMWAISPNDRLIPAVTRSTIQRQSSVSSTASVNLGDPGSTRRAQIPEGDYLSYREFHSAGRTPPMMPGSQRPLSARTYSIDGPNASRPQSARPSINEIPERTMSVSDFNYSRTSPSKRPNARVGSEHSLLDPPGKSKVPRDWREQVLRHIEAKKLEKSMLSRSFNSNFTTVSSFHCGSSRDLHGSQGSLALSVADRRGSGGHIFRMPLSNGQMGQPLRPQANYSQIHHPPQASVARHPSREQLIDYLMLKVAHQPPYTQPHCSPRQGHELAKQEIRVRVEKDPELGFSISGGVGGRGNPFRPDDDGIFVTRVQPEGPASKLLQPGDKIIQANGYSFINIEHGQAVSLLKTFQNTVELIIVREVSS

SEQ ID NO: 17737 - protein, 617 aa, Homo sapiens
MLVPLAKLSCLAYQCFHALKIKKNYLPLCATRWSSTSTVPRITTHYTIYPRDKDKRWEGVNMERFAEEADVVIVGAGPAGLSAAVRLKQLAVAHEKDIRVCLVEKAAQIGAHTLSGACLDPGAFKELFPDWKEKGAPLNTPVTEDRFGILTEKYRIPVPILPGLPMNNHGNYIVRLGHLVSWMGEQAEALGVEVYPGYAAAEVLFHDDGSVKGIATNDVGIQKDGAPKATFERGLELHAKVTIFAEGCHGHLAKQLYKKFDLRANCEPQTYGIGLKELWVIDEKNWKPGRVDHTVGWPLDRHTYGGSFLYHLNEGEPLVALGLVVGLDYQNPYLSPFREFQRWKHHPSIRPTLEGGKRIAYGARALNEGGFQSIPKLTFPGGLLIGCSPGFMNVPKIKGTHTAMKSGILAAESIFNQLTSENLQSKTIGLHVTEYEDNLKNSWVWKELYSVRNIRPSCHGVLGVYGGMIYTGIFYWILRGMEPWTLKHKGSDFERLKPAKDCTPIEYPKPDGQISFDLLSSVALSGTNHEHDQPAHLTLRDDSIPVNRNLSIYDGPEQRFCPAGVYEFVPVEQGDGFRLQINAQNCVHCKTCDIKDPSQNINWVVPEGGGGPAYNGM

SEQ ID NO: 17738 - protein, 809 aa, Homo sapiens
MLRFPTCFPSFRVVGEKQLPQEIIFLVWSPKRDLIALANTAGEVLLHRLASFHRVWSFPPNENTGKEVTCLAWRPDGKLLAFALADTKKIVLCDVEKPESLHSFSVEAPVSCMHWMEVTVESSVLTSFYNAEDESNLLLPKLPTLPKNYSNTSKIFSEENSDEIIKLLGDVRLNILVLGGSSGFIELYAYGMFKIARVTGIAGTCLALCLSSDLKSLSVVTEVSTNGASEVSYFQLETNLLYSFLPEVTRMARKFTHISALLQYINLSLTCMCEAWEEILMQMDSRLTKFVQEKNTTTSVQDEFMHLLLWGKASAELQTLLMNQLTVKGLKKLGQSIESSYSSIQKLVISHLQSGSESLLYHLSELKGMASWKQKYEPLGLDAAGIEEAITAVGSFILKANELLQVIDSSMKNFKAFFRWLYVAMLRMTEDHVLPELNKVMTQKDITFVAEFLTEHFNEAPDLYNRKGKYFNVERVGQYLKDEDDDLVSPPNTEGNQWYDFLQNSSHLKESPLLFPYYPRKSLHFVKRRMENIIDQCLQKPADVIGKSMNQAICIPLYRDTRSEDSTRRLFKFPFLWNNKTSNLHYLLFTILEDSLYKMCILRRHTDISQSVSNGLIAIKFGSFTYATTEKVRRSIYSCLDAQFYDDETVTVVLKDTVGREGRDRLLVQLPLSLVYNSEDSAEYQFTGTYSTRLDEQCSAIPTRTMHFEKHWRLLESMKAQYVAGNGFRKVSCVLSSNLRHVRVFEMDIDDEWELDESSDEEEEASNKPVKIKEEVLSESEAENQQAGAAALAPEIVIKVEKLDPELDS

SEQ ID NO: 17739 - protein, 482 aa, Homo sapiens
MLKFQEAAKCVSGSTAISTYPKTLIARRYVLQQKLGSGSFGTVYLVSDKKAKRGEELKVLKEISVGELNPNETVQANLEAQLLSKLDHPAIVKFHASFVEQDNFCIITEYCEGRDLDDKIQEYKQAGKIFPENQIIEWFIQLLLGVDYMHERRILHRDLKSKNVFLKNNLLKIGDFGVSRLLMGSCDLATTLTGTPHYMSPEALKHQGYDTKSDIWSLACILYEMCCMNHAFAGSNFLSIVLKIVEGDTPSLPERYPKELNAIMESMLNKNPSLRPSAIEILKIPYLDEQLQNLMCRYSEMTLEDKNLDCQKEAAHIINAMQKRIHLQTLRALSEVQKMTPRERMRLRKLQAADEKARKLKKIVEEKYEENSKRMQELRSRNFQQLSVDVLHEKTHLKGMEEKEEQPEGRLSCSPQDEDEERWQGREEESDEPTLENLPESQPIPSMDLHELESIVEDATSDLGYHGDCNLISLDEYWKNEK

SEQ ID NO: 17740 - protein, 1504 aa, Homo sapiens
DNVIFVHNTIHLISQVMDNMVMACGGILPLLSAATSATHELENIEPTQGLSIEASVTFLQRLISLVDVLIFASSLGFTEIEAEKSMSSGGILRQCLRLVCAVAVRNCLECQQHSQLKTRGDKALKPMHSLIPLGKSAAKSPVDIVTGGISPVRDLDRLLQDMDINRLRAVVFRDIEDSKQAQFLALAVVYFISVLMVSKYRDILEPQNERHSQSCTETGSENENVSLSEITPAAFSTLTTASVEESESTSSARRRDSGIGEETATGLGSHVEVTPHTAPPGVSAGPDAISEVLSTLSLEVNKSPETKNDRGNDLDTKATPSVSVSKNVNVKDILRSLVNIPADGVTVDPALLPPACLGALGDLSVEQPVQFRSFDRSVIVAAKKSAVSPSTFNTSIPTNAVSVVSSVDSAQASDMGGESPGSRSSNAKLPSVPTVDSVSQDPVSNMSITERLEHALEKAAPLLREIFVDFAPFLSRTLLGSHGQELLIEGTSLVCMKSSSSVVELVMLLCSQEWQNSIQKNAGLAFIELVNEGRLLSQTMKDHLVRVANEAEFILSRQRAEDIHRHAEFESLCAQYSADKREDEKMCDHLIRAAKYRDHVTATQLIQKIINILTDKHGAWGNSAVSRPLEFWRLDYWEDDLRRRRRFVRNPLGSTHPEATLKTAVEHATDEDILAKGKQSIRSQALGNQNSENEILLEGDDDTLSSVDEKDLENLAGPVSLSTPAQLVAPSVVVKGTLSVTSSELYFEVDEEDPNFKKIDPKILAYTEGLHGKWLFTEIRSIFSRRYLLQNTALEIFMANRVAVMFNFPDPATVKKVVNYLPRVGVGTSFGLPQTRRISLASPRQLFKASNMTQRWQHREISNFEYLMFLNTIAGRSYNDLNQYPVFPWVITNYESEELDLTLPTNFRDLSKPIGALNPKRAAFFAERYESWEDDQVPKFHYGTHYSTASFVLAWLLRIEPFTTYFLNLQGGKFDHADRTFSSISRAWRNSQRDTSDIKELIPEFYYLPEMFVNFNNYNLGVMDDGTVVSDVELPPWAKTSEEFVHINRLALESEFVSCQLHQWIDLIFGYKQQGPEAVRALNVFYYLTYEGAVNLNSITDPVLREAVEAQIRSFGQTPSQLLIEPHPPRGSAMQVSPLMFTDKAQQDVIMVLKFPSNSPVTHVAANTQPGLATPAVITVTANRLFAVNKWHNLPAHQGAVQDQPYQLPVEIDPLIASNTGMHRRQITDLLDQSIQVHSQCFVITSDNRYILVCGFWDKSFRVYSTDTGRLIQVVFGHWDVVTCLARSESYIGGNCYILSGSRDATLLLWYWNGKCSGIGDNPGSETAAPRAILTGHDYEVTCAAVCAELGLVLSGSQEGPCLIHSMNGDLLRTLEGPENCLKPKLIQASREGHCVIFYENGLFCTFSVNGKLQATMETDDNIRAIQLSRDGQYLLTGGDRGVVVVRQVSDLKQLFAYPGCDAGIRAMALSYDQRCIISGMASGSIVLFYNDFNRWHHEYQTRY

SEQ ID NO: 17741 - protein, 169 aa, Homo sapiens
MRLLILTCLVAVALARPKLPLRYPERLQNPSESSEPIPLESREEYMNGMNRQRNILREKQTDEIKNCVVAEPEKMESSISSSSEEQFCRLNEYNQLQLQAAHAQEQIRRMNENSHVQVPFQQLNQLAAYPYAVWYYPQIMQYVPFPPFSDISNPTAHENYEKNNVMLQW

SEQ ID NO: 17742 - protein, 125 aa, Homo sapiens
MMDIYVCLKRPSWMVDNKRMRTASNFQWLLSTFILLYLMNQVNSQKKGAPHDLKCVTNNLQVWNCSWKAPSGTGRGTDYEVCIENRSRSCYQLEKTSIKIPALSHGDYEITINSLHDFGSSTSKF

SEQ ID NO: 17743 - protein, 354 aa, Homo sapiens
MFINIKSILWMCSTLIVTHALHKVKVGKSPPVRGSLSGKVSLPCHFSTMPTLPPSYNTSEFLRIKWSKIEVDKNGKDLKETTVLVAQNGNIKIGQDYKGRVSVPTHPEAVGDASLTVVKLLASDAGLYRCDVMYGIEDTQDTVSLTVDGVVFHYRAATSRYTLNFEAAQKACLDVGAVIATPEQLFAAYEDGFEQCDAGWLADQTVRYPIRAPRVGCYGDKMGKAGVRTYGFRSPQETYDVYCYVDHLDGDVFHLTVPSKFTFEEAAKECENQDARLATVGELQAAWRNGFDQCDYGWLSDASVRHPVTVARAQCGGGLLGVRTLYRFENQTGFPPPDSRFDAYCFKRKCLIPF

SEQ ID NO: 17744 - protein, 393 aa, Homo sapiens
MLKVSAVLCVCAAAWCSQSLAAAAAVAAAGGRSDGGNFLDDKQWLTTISQYDKEVGQWNKFRDDDYFRTWSPGKPFDQALDPAKDPCLKMKCSRHKVCIAQDSQTAVCISHRRLTHRMKEAGVDHRQWRGPILSTCKQCPVVYPSPVCGSDGHTYSFQCKLEYQACVLGKQISVKCEGHCPCPSDKPTSTSRNVKRGFDTSILPICKDSLGWMFNRLDTNYDLLLDQSELRSIYLDKNEQCTKAFFNSCDTYKDSLISNNEWCYCFQRQQDPPCQTELSNIQKRQGVKKLLGQYIPLCDEDGYYKPTQCHGSVGQCWCVDRYGNEVMGSRINGVADCAIDFEISGDFASGDFHEWTDDEDDEDDIMNDEDEIEDDDEDEGDDDDGGDDHDVYI

SEQ ID NO: 17745 - protein, 466 aa, Homo sapiens; identical to SEQ ID NO: 10907

SEQ ID NO: 17746 - protein, 233 aa, Homo sapiens
MRLLPLLRTVLWAAFLGSPLRGGSSLRHVVYWNSSNPSLRREGYTVQVNVNDYLDIYCPHYNSSGVGPGAGPGPGGGAEQYVLYMVSRNGYRTCNASQGFKRWECNRPHAPHSPIKFSEKFQRYSAFSLGYEFHAGHEYYYISTPTHNLHWKCLRMKVFVCCASTSHSGEKPVPTLPQFTMGPNVKINVLEDFEGENPQVPKLEKSISGTSPKREHLPLAVGIAFFLMTFLAS

SEQ ID NO: 17747 - protein, 794 aa, Homo sapiens
MSKSFQQSSLSRDSQGHGRDLSAAGIGLLAAATQSLSMPASLGRMNQGTARLASLMNLGMSSSLNQQGAHSALSSASTSSHNLQSIFNIGSRGPLPLSSQHRGDADQASNILASFGLSARDLDELSRYPEDKITPENLPQILLQLKRRRTEEGPTLSYGRDGRSATREPPYRVPRDDWEEKRHFRRDSFDDRGPSLNPVLDYDHGSRSQESGYYDRMDYEDDRLRDGERCRDDSFFGETSHNYHKFDSEYERMGRGPGPLQERSLFEKKRGAPPSSNIEDFHGLLPKGYPHLCSICDLPVHSNKEWSQHINGASHSRRCQLLLEIYPEWNPDNDTGHTMGDPFMLQQSTNPAPGILGPPPPSFHLGGPAVGPRGNLGAGNGNLQGPRHMQKGRVETSRVVHIMDFQRGKNLRYQLLQLVEPFGVISNHLILNKINEAFIEMATTEDAQAAVDYYTTTPALVFGKPVRVHLSQKYKRIKKPEGKPDQKFDQKQELGRVIHLSNLPHSGYSDSAVLKLAEPYGKIKNYILMRMKSQAFIEMETREDAMAMVDHCLKKALWFQGRCVKVDLSEKYKKLVLRIPNRGIDLLKKDKSRKRSYSPDGKESPSDKKSKTDGSQKTESSTEGKEQEEKSGEDGEKDTKDDQTEQEPNMLLESEDELLVDEEEAAALLESGSSVGDETDLANLGDVASDGKKEPSDKAVKKDGSASAAAKKKLKKVDKIEELDQENEAALENGIKNEENTEPGAESSENADDPNKDTSENADGQSDENKDDYTIPDEYRIGPYQPNVPVEISE

SEQ ID NO: 17748 - protein, 272 aa, Homo sapiens
MEYCRTPCTVSCNIPVVSGKECEEIIRKGGETSEMYLIQPDSSVKPYRVYCDMNTENGGWTVIQNRQDGSVDFGRKWDPYKQGFGNVATNTDGKNYCGLPGEYWLGNDKISQLTRMGPTELLIEMEDWKGDKVKAHYGGFTVQNEANKYQISVNKYRGTAGNALMDGASQLMGENRTMTIHNGMFFSTYDRDNDGWLTSDPRKQCSKEDGGGWWYNRCHAANPNGRYYWGGQYTWDMAKHGTDDGVVWMNWKGSWYSMRKMSMKIRPFFPQQ

SEQ ID NO: 17749 - protein, 360 aa, Homo sapiens
MDDVEVVYTIDIQKYIPCYQLFSFYNSSGEVNEQALKKILSNVKKNVVGWYKFRRHSDQIMTFRERLLHKNLQEHFSNQDLVFLLLTPSIITESCSTHRLEHSLYKPQKGLFHRVPLVVANLGMSEQLGYKTVSGSCMSTGFSRAVQTHSSKFFEEDGSLKEVHKINEMYASLQEELKSICKKVEDSEQAVDKLVKDVNRLKREIEKRRGAQIQAAREKNIQKDPQENIFLCQALRTFFPNSEFLHSCVMSLKNRHVSKSSCNYNHHLDVVDNLTLMVEHTDIPEASPASTPQIIKHKALDLDDRWQFKRSRLLDTQDKRSKADTGSSNQDKASKMSSPETDEEIEKMKGFGEYSRSPTF

SEQ ID NO: 17750 - protein, 87 aa, Homo sapiens
MWTVQNRESLGLLSFPVMITMVCCAHSTNEPSNMSYVKETVDRLLKGYDIRLRPDFGGLYTHHVFPAVLERQKAFLFWNPTEPHPRQ

SEQ ID NO: 17751 - protein, 372 aa, Homo sapiens
MEWKLERTAPRRVRTEEEMLWESIMRVLSKDLKQKRSQDSANVLDSVNATYSDFKSNFAKRLSAEVPVASSPITTRWQQSQTRALSSDSFGEEQSTTYLPEASGSVLKTPPEKETLTLGSRKEQLKTPSKGISETSNSALHFCKAPHAMDRDWKESVASKGQKCLKQLFVTQNVVQQANGKMQLCEQSECVWKGCKDGVRDESFHLKSSGDINDSILQPEVKIHITGLRNDYYLNILDWSFQNLVAIALGSAVYIWNGENHNGIENIDLSLTCNYISSVSWIKEGTCLAVGTSEGEVQLWDVVTKKRLRNMLGHLSVVGALSWNHFILSRLEFSGVISAHCNLHLPSSWDYRRPPPCLVGQDWGVFIITMFG

SEQ ID NO: 17752 - protein, 641 aa, Homo sapiens
MYGFVNHALELLVIRNYGPEVWEDIKKEAQLDEEGQFLVRIIYDDSKTYDLVAAASKVLNLNAGEILQMFGKMFFVFCQESGYDTILRVLGSNVREFLQKNESKHISDLHHCFLGIYLCCNNLDALHDHLATIYPGMRAPSFRCTDAEKGKGLILHYYSEREGLQDIVIGIIKTVAQQIHGTEIDMKVIQQRNEECDHTQFLIEEKESKEEDFYEDLDRFEENGTQESRISPYTFCKAFPFHIIFDRDLVVTQCGNAIYRVLPQLQPGNCSLLSVFSLVRPHIDISFHGILSHINTVFVLRSKEGLLDVEKLECEDELTGTEISCLRLKGQMIYLPEADSILFLCSPSVMNLDDLTRRGLYLSDIPLHDATRDLVLLGEQFREEYKLTQELEILTDRLQLTLRALEDEKKKTDTLLYSVLPPSVANELRHKRPVPAKRYDNVTILFSGIVGFNAFCSKHASGEGAMKIVNLLNDLYTRFDTLTDSRKNPFVYKVETVGDKYMTVSGLPEPCIHHARSICHLALDMMEIAGQVQVDGESVQITIGIHTGEVVTGVIGQRMPRYCLFGNTVNLTSRTETTGEKGKINVSEYTYRCLMSPENSDPQFHLEHRGPVSMKGKKEPMQVWFLSRKNTGTEETKQDDD

SEQ ID NO: 17753 - protein, 901 aa, Homo sapiens
MMMVMQPEGLGAGEGRFAGGGGGGEYMEQEEDWDRDLLLDPAWEKQQRKTFTAWCNSHLRKAGTQIENIEEDFRNGLKLMLLLEVISGERLPRPDKGKMRFHKIANVNKALDFIASKGVKLVSIGAEEIVDGNLKMTLGMIWTIILRFAIQDISVEETSAKEGLLLWCQRKTAPYRNVNVQNFHTSWKDGLALCALIHRHRPDLIDYAKLRKDDPIGNLNTAFEVAEKYLDIPKMLDAEDIVNTPKPDEKAIMTYVSCFYHAFAGAEQAETAANRICKVLAVNQENEKLMEEYEKLASELLEWIRRTVPWLENRVGEPSMSAMQRKLEDFRDYRRLHKPPRIQEKCQLEINFNTLQTKLRLSHRPAFMPSEGKLVSDIANAWRGLEQVEKGYEDWLLSEIRRLQRLQHLAEKFRQKASLHEAWTRGKEEMLSQRDYDSALLQEVRALLRRHEAFESDLAAHQDRVEHIAALAQELNELDYHEAASVNSRCQAICDQWDNLGTLTQKRRDALERMEKLLETIDRLQLEFARRAAPFNNWLDGAVEDLQDVWLVHSVEETQSLLTAHDQFKATLPEADRERGAIMGIQGEIQKICQTYGLRPCSTNPYITLSPQDINTKWDMVRKLVPSCDQTLQEELARQQVNERLRRQFAAQANAIGPWIQAKVEEVGRLAAGLAGSLEEQMAGLRQQEQNIINYKTNIDRLEGDHQLLQESLVFDNKHTVYSMEHIRVGWEQLLTSIARTINEVENQVLTRDAKGLSQEQLNEFRASFNHFDRKQNGMMEPDDFRACLISMGYDLGEVEFARIMTMVDPNAAGVVTFQAFIDFMTRETAETDTTEQVVASFKILAGDKNYITPEELRRELPAKQAEYCIRRMVPYKGSGAPAGALDYVAFSSALYGESDL

SEQ ID NO: 17754 - protein, 381 aa, Homo sapiens
MSNIYIQEPPTNGKVLLKTTAGDIDIELWSKEAPKACRNFIQLCLEAYYDNTIFHRVVPGFIVQGGDPTGTGSGGESIYGAPFKDEFHSRLRFNRRGLVAMANAGSHDNGSQFFFTLGRADELNNKHTIFGKVTGDTVYNMLRLSEVDIDDDERPHNPHKIKSCEVLFNPFDDIIPREIKRLKKEKPEEEVKKLKPKGTKNFSLLSFGEEAEEEEEEVNRVSQSMKGKSKSSHDLLKDDPHLSSVPVVESEKGDAPDLVDDGEDESAEHDEYIDGDEKNLMRERIAKKLKKDTSANVKSAGEGEVEKKSVSRSPPSLCLYLDYWIQLSRITQAYTSWYYYGFLDSSLSCVSSASLLLTRHNVYFTLQTHSTDHLAACFFMK

SEQ ID NO: 17755 - protein, 2232 aa, Homo sapiens
MDEEEDGAGAEESGQPRSFMRLNDLSGAGGRPGPGSAEKDPGSADSEAEGLPYPALAPVVFFYLSQDSRPRSWCLRTVCNPWFERISMLVILLNCVTLGMFRPCEDIACDSQRCRILQAFDDFIFAFFAVEMVVKMVALGIFGKKCYLGDTWNRLDFFIVIAGMLEYSLDLQNVSFSAVRTVRVLRPLRAINRVPSMRILVTLLLDTLPMLGNVLLLCFFVFFIFGIVGVQLWAGLLRNRCFLPENFSLPLSVDLERYYQTENEDESPFICSQPRENGMRSCRSVPTLRGDGGGGPPCGLDYEAYNSSSNTTCVNWNQYYTNCSAGEHNPFKGAINFDNIGYAWIAIFQVITLEGWVDIMYFVMDAHSFYNFIYFILLIIVGSFFMINLCLVVIATQFSETKQRESQLMREQRVRFLSNASTLASFSEPGSCYEELLKYLVYILRKAARRLAQVSRAAGVRVGLLSSPAPLGGQETQPSSSCSRSHRRLSVHHLVHHHHHHHHHYHLGNGTLRAPRASPEIQDRDANGSRRLMLPPPSTPALSGAPPGGAESVHSFYHADCHLEPVRCQAPPPRSPSEASGRTVGSGKVYPTVHTSPPPETLKEKALVEVAASSGPPTLTSLNIPPGPYSSMHKLLETQSTGACQSSCKISSPCLKADSGACGPDSCPYCARAGAGEVELADREMPDSDSEAVYEFTQDAQHSDLRDPHSRRQRSLGPDAEPSSVLAFWRLICDTFRKIVDSKYFGRGIMIAILVNTLSMGIEYHEQPEELTNALEISNIVFTSLFALEMLLKLLVYGPFGYIKNPYNIFDGVIVVISVWEIVGQQGGGLSVLRTFRLMRVLKLVRFLPALQRQLVVLMKTMDNVATFCMLLMLFIFIFSILGMHLFGCKFASERDGDTLPDRKNFDSLLWAIVTVFQILTQEDWNKVLYNGMASTSSWAALYFIALMTFGNYVLFNLLVAILVEGFQAEEISKREDASGQLSCIQLPVDSQGGDANKSESEPDFFSPSLDGDGDRKKCLALVSLGEHPELRKSLLPPLIIHTAATPMSLPKSTSTGLGEALGPASRRTSSSGSAEPGAAHEMKSPPSARSSPHSPWSAASSWTSRRSSRNSLGRAPSLKRRSPSGERRSLLSGEGQESQDEEESSEEERASPAGSDHRHRGSLEREAKSSFDLPDTLQVPGLHRTASGRGSASEHQDCNGKSASGRLARALRPDDPPLDGDDADDEGNLSKGERVRAWIRARLPACCLERDSWSAYIFPPQSRFRLLCHRIITHKMFDHVVLVIIFLNCITIAMERPKIDPHSAERIFLTLSNYIFTAVFLAEMTVKVVALGWCFGEQAYLRSSWNVLDGLLVLISVIDILVSMVSDSGTKILGMLRVLRLLRTLRPLRVISRAQGLKLVVETLMSSLKPIGNIVVICCAFFIIFGILGVQLFKGKFFVCQGEDTRNITNKSDCAEASYRWVRHKYNFDNLGQALMSLFVLASKDGWVDIMYDGLDAVGVDQQNFHKCRQHQEEEEARRREEKRLRRLEKKRRKAQCKPYYSDYSRFRLLVHHLCTSHYLDLFITGVIGLNVVTMAMEHYQQPQILDEALKICNYIFTVIFVLESVFKLVAFGFRRFFQDRWNQLDLAIVLLSIMGITLEEIEVNASLPINPTIIRIMRVLRIARVLKLLKMAVGMRALLDTVMQALPQVGNLGLLFMLLFFIFAALGVELFGDLECDETHPCEGLGRHATFRNFGMAFLTLFRVSTGDNWNGIMKDTLRDCDQESTCYNTVISPIYFVSFVLTAQFVLVNVVIAVLMKHLEESNKEAKEEAELEAELELEMKTLSPQPHSPLGSPFLWPGVEGPDSPDSPKPGALHPAAHARSASHFSLEHPTMQPHPTELPGPDLLTVRKSGVSRTHSLPNDSYMCRHGSTAEGPLGHRGWGLPKAQSGSVLSVHSQPADTSYILQLPKDAPHLLQPHSAPTWGTIPKLPPPGRSPLAQRPLRRQAAIRTDSLDVQGLGSREDLLAEVSGPSPPLARAYSFWGQSSTQAQQHSRSHSKISKHMTPPAPCPGPEPNWGKGPPETRSSLELDTELSWISGDLLPPGGQEEPPSPRDLKKCYSVEAQSCQRRPTSWLDEQRRHSIAVSCLDSGSQPHLGTDPSNLGGQPLGGPGSRPKKKLSPPSITIDPPESQGPRTPPSPGICLRRRAPSSDSKDPLASGPPDSMAASPSPKKDVLSLSGLSSDPADLDP

SEQ ID NO: 17756 - protein, 561 aa, Homo sapiens
MLSEQGLLSDCGNNYFQMTSCILSGSIQTTPQSKSNDYLTLNAGSQQERDQAKLTCPSEVSGTILQEREFEANKLQGMQQSDLFKAEYVLIVDSEGEDEAASRKVEQGPPGGIGTAAVRPKSLAISSSLVSDVVRPKTQGTDLKTSSHPEMLHGMAPQQKHGQLTSSPTTSEQLACKPPAFSFVSPTNPNTPPDPVNLEGASVLEEFHTRRLDVGGAVVEESATYFQTTAHSTPFSASKGTSSTLLFPHSTQLSGSNLPSSTAADPKPGLTSEVLKKTTLTSHVLSHGESPRTSSSPPSSSASLKSNSASYIPVRIVTHSLSPSPKPFTSSFHGSSSTICSQMSSSGNLSKSGVKSPVPSRLALLTAILKSNPSHQRPFSPASCPTFSLNSPASSTLTLDQKEKQTPPTPKKSLSSCSLRAGSPDQGELQVSELTQQSFHLPVFTKSTPLSQAPSLSPTKQASSSLASMNVERTPSPTLKSNTMLSLLQTSTSSSVGLPPVPPSSSLSSLKSKQDGDLRGPENPRNIHTYPSTLASSALSSLSPPINQRATFSSSEKCFHP

SEQ ID NO: 17757 - protein, 1043 aa, Homo sapiens
MVLGTVLLPPNSYGRDQDTSLCCLCTEASESALPDLTEALHRPYGCDVEPQALNEAIRWSSKENLLGATESDPNLFVALYDFVASGDNTLSITKGEKLRVLGYNQNGEWSEVRSKNGQGWVPSNYITPVNSLEKHSWYHGPVSRSAAEYLLSSLINGSFLVRESESSPGQLSISLRYEGRVYHYRINTTADGKVYVTAESRFSTLAELVHHHSTVADGLVTTLHYPAPKCNKPTVYGVSPIHDKWEMERTDITMKHKLGGGQYGEVYVGVWKKYSLTVAVKTLKEDTMEVEEFLKEAAVMKEIKHPNLVQLLGVCTLEPPFYIVTEYMPYGNLLDYLRECNREEVTAVVLLYMATQISSAMEYLEKKNFIHRDLAARNCLVGENHVVKVADFGLSRLMTGDTYTAHAGAKFPIKWTAPESLAYNTFSIKSDVWAFGVLLWEIATYGMSPYPGIDLSQVYDLLEKGYRMEQPEGCPPKVYELMRACWKWSPADRPSFAETHQAFETMFHDSSISEEVAEELGRAASSSSVVPYLPRLPILPSKTRTLKKQVENKENIEGAQDATENSASSLAPGFIRGAQASSGSPALPRKQRDKSPSSLLEDAKETCFTRDRKGGFFSSFMKKRNAPTPPKRSSSFREMENQPHKKYELTGLPEQDRMAMTLPRNCQRSKLQLERTVSTSSQPEENVDRANDMLPKKSEESAAPSRERPKAKLLPRGATALPLRTPSGDLAITEKDPPGVGVAGVAAAPKGKEKNGGARLGMAGVPEDGEQPGWPSPAKAAPVLPTTHNHKVPVLISPTLKHTPADVQLIGTDSQGNKFKLLSEHQVTSSGDKDRPRRVKPKCAPPPPPVMRLLQHPSICSDPTEEPTALTAGQSTSETQEGGKKAALGAVPISGKAGRPVMPPPQVPLPTSSISPAKMANGTAGTKVALRKTKQAAEKISADKISKEALLECADLLSSALTEPVPNSQLVDTGHQLLDYCSGYVDCIPQTRNKFAFREAVSKLELSLQELQVSSAAAGVPGTNPVLNNLLSCVQEISDVVQR

SEQ ID NO: 17758 - protein, 175 aa, Homo sapiens
MAVSASPVISATSSGAGVPGGLFRAEPLYSTPREPPRLTPNMINSFVVNNHSNSAGGGGRGNTNTNECRMVDMHGMKVASFLMDGQELICLPQVFDLFLKHLVGGLHTVYTKLKRLDISPVVCTVEQVRILRGLGAIQPGVNRCKLITRKDFETLFTDCTNARVSLCCPGCSAVV

SEQ ID NO: 17759 - protein, 231 aa, Homo sapiens
MVMAYFVENFWGEKNSGFDVLYHNMKHGQISTKELADFVRERTFAPVWDVFKTSTEKLANCHLDLVRKLQELIKEVQKYGEEQVKSHKKTKEEVAGTLEAVQTIQSITQALQKSKENYNAKCVEQERLKKEGATQREIEKAAVKSKKATDTYKLYVEKYALAKADFEQKMTETAQKFQDIEETHLIHIKEIIGSLSNAIKEIHLQIGQVHEEFINNMANTTVESLIQKFAE

SEQ ID NO: 17760 - protein, 672 aa, Homo sapiens
MDSTKEKCDSYKDDLLLRMGLNDNKAGMEGLDKEKINKIIMEATKGSRFYGNELKKEKQVNQRIENMMQQKAQITSQQLRKAQLQVDRFAMELEQSRNLSNTIVHIDMDAFYAAVEMRDNPELKDKPIAVGSMSMLSTSNYHARRFGVRAAMPGFIAKRLCPQLIIVPPNFDKYRAVSKEVKEILADYDPNFMAMSLDEAYLNITKHLEERQNWPEDKRRYFIKMGSSVENDNPGKEVNKLSEHERSISPLLFEESPSDVQPPGDPFQVNFEEQNNPQILQNSVVFGTSAQEVVKEIRFRIEQKTTLTASAGVRISSFPNEEDRKHQQRSIIGFLQAGNQALSATECTLEKTDKDKFVKPLEMSHKKSFFDKKRSERKWSHQDTFKCEAVNKQSFQTSQPFQVLKKKMNENLEISENSDDCQILTCPVCFRAQGCISLEALNKHVDECLDGPSISENFKMFSCSHVSATKVNKKENVPASSLCEKQDYEAHPKIKEISSVDCIALVDTIDNSSKAESIDALSNKHSKEECSSLPSKSFNIEHCHQNSSSTVSLENEDVGSFRQEYRQPYLCEVKTGQALVCPVCNVEQKTSDLTLFNVHVDVCLNKSFIQELRKDKFNPVNQPKESSRSTGSSSGVQKAVTRTKRPGLMTKYSTSKKIKPNNPKHTLDIFFK

SEQ ID NO: 17761 - protein, 244 aa, Homo sapiens
EEKRELKAALQSQENLIHEARIQKEKLQEKVKATNTQHAVEAISLESVSATCKQLSQELMEKYEELKRMEAHNNEYKAEIKKLKEQILQGEQSYSSALEGMKMEISHLTQELHQRDITIASTKGSSSDMEKRLRAEMQKAEDKAVEHKEILDQLESLKLENRHLSEMVMKLELGLHEAKEISLADLQENYIEALNKLVSENQQLQKDLMNTKSQLEISTQMCKKQNDRIFKPTHSRTTEFKNTE

SEQ ID NO: 17762 - protein, 261 aa, Homo sapiens
MLRNSTFKNMQRRHTTLREKGRRQAIRGPAYMFNEKGTSLTPEEERFLDSAEYGNIPVVRKMLEESKTLNFNCVDYMGQNALQLAVGNEHLEVTELLLKKENLARVGDALLLAISKGYVRIVEAILNHPAFAQGQRLTLSPLEQELRDDDFYAYDEDGTRFSHDITPIILAAHCQEYEIVHILLLKGARIERPHDYFCKCNECTEKQRKDSFSHSRSRMNAYKGLASAAYLSLSSEDPVLTALELSNELARLANIETEFKE

SEQ ID NO: 17763 - protein, 426 aa, Homo sapiens
MVGKWHLGFYRKECLPTRRGFDTFLGSLTGNVDYYTYDNCDGPGVCGFDLHEGENVAWGLSGQYSTMLYAQRASHILASHSPQRPLFLYVAFQAVHTPLQSPREYLYRYRTMGNVARRKYAAMVTCMDEAVRNITWALKRYGFYNNSVIIFSSDNGGQTFSGGSNWPLRGRKGTYWEGGVRGLGFVHSPLLKRKQRTSRALMHITDWYPTLVGLAGGTTSAADGLDGYDVWPAISEGRASPRTEILHNIDPLYNHAQHGSLEGGFGIWNTAVQAAIRVGEWKLLTGDPGYGDWIPPQTLATFPGSWWNLERMASVRQAVWLFNISADPYEREDLAGQRPDVVRTLLARLAEYNRTAIPVRYPAENPRAHPDFNGGAWGPWASDEEEEEEEGRARSFSRGRRKKKCKICKLRSFFRKLNTRLMSQRI

SEQ ID NO: 17764 - protein, 302 aa, Homo sapiens
NLLAEKVEQLMEWSSRRSIFRMNGDKFRKFIKAPPRNYSMIVMFTALQPQRQCSVCRQANEEYQILANSWRYSSAFCNKLFFSMVDYDEGTDVFQQLNMNSAPTFMHFPPKGRPKRADTFDLQRIGFAAEQLAKWIADRTDVHIRVFRPPNYSGTIALALLVSLVGGLLYLRRNNLEFIYNKTGWAMVSLCIVFAMTSGQMWNHIRGPPYAHKNPHNGQVSYIHGSSQAQFVAESHIILVLNAAITMGMVLLNEAATSKGDVGKRRIICLVGLGLVVFFFSFLLSIFRSKYHGYPYSDLDFE

SEQ ID NO: 17765 - protein, 888 aa, Homo sapiens
MSSMSSAEEQFQWQSQDGQKDIEDELTTGLELVDSCIRSLQESGILDPQDYSTGETGSRASYSSQHGHLGPELRALQSPEHHIDPIYEDRVYQKPPMRSLSQSQGDPLPPAHTGTYRTSTAPSSPGVDSVPLQRTGSQHGPQNAAAATFQRASYAAGPASNYADPYRQLQYCPSVESPYSKSGPALPPEGTLARSPSIDSIQKDPREFGWRDPELPEVIQMLQHQFPSVQSNAAAYLQHLCFGDNKIKAEIRRQGGIQLLVDLLDHRMTEVHRSACGALRNLVYGKANDDNKIALKNCGGIPALVRLLRKTTDLEIRELVTGVLWNLSSCDALKMPIIQDALAVLTNAVIIPHSGWENSPLQDDRKIQLHSSQVLRNATGCLRNVSSAGEEARRRMRECDGLTDALLYVIQSALGSSEIDSKTVENCVCILRNLSYRLAAETSQGQHMGTDELDGLLCGEANGKDAESSGCWGKKKKKKKSQDQWDGVGPLPDCAEPPKGIQMLWHPSIVKPYLTLLSECSNPDTLEGAAGALQNLAAGSWKWSVYIRAAVRKEKGLPILVELLRIDNDRVVCAVATALRNMALDVRNKELIGKYAMRDLVHRLPGGNNSNNTASKAMSDDTVTAVCCTLHEVITKNMENAKALRDAGGIEKLVGISKSKGDKHSPKVVKAASQVLNSMWQYRDLRSLYKKDGWSQYHFVASSSTIERDRQRPYSSSRTPSISPVRVSPNNRSASAPASPREMISLKERKTDYECTGSNATYHGAKGEHTSRKDAMTAQNTGISTLYRNSYGAPAEDIKHNQVSAQPVPQEPSRKDYETYQPFQNSTRNYDESFFEDQVHHRPPASEYTMHLGLKSTGNYVDFYSAARPYSELNYETSHYPASPDSWV

SEQ ID NO: 17766 - protein, 793 aa, Homo sapiens
MEGSPSLRRMTVMREKGRRQAVRGPAFMFNDRGTSLTAEEERFLDAAEYGNIPVVRKMLEESKTLNVNCVDYMGQNALQLAVGNEHLEVTELLLKKENLARIGDALLLAISKGYVRIVEAILNHPGFAASKRLTLSPCEQELQDDDFYAYDEDGTRFSPDITPIILAAHCQKYEVVHMLLMKGARIERPHDYFCKCGDCMEKQRHDSFSHSRSRINAYKGLASPAYLSLSSEDPVLTALELSNELAKLANIEKEFKNDYRKLSMQCKDFVVGVLDLCRDSEEVEAILNGDLESAEPLEVHRHKASLSRVKLAIKYEVKKLGKILRSPFMKFVAHAASFIIFLGLLVFNASDRFEGITTLPNITVTDYPKQIFRVKTTQFTWTEMLIMVWVLGMMWSECKELWLEGPREYILQLWNVLDFGMLSIFIAAFTARFLAFLQATKAQQYVDSYVQESDLSEVTLPPEIQYFTYARDKWLPSDPQIISEGLYAIAVVLSFSRIAYILPANESFGPLQISLGRTVKDIFKFMVLFIMVFFAFMIGMFILYSYYLGAKVNAAFTTVEESFKTLFWSIFGLSEVTSVVLKYDHKFIENIGYVLYGIYNVTMVVVLLNMLIAMINSSYQEIEDDSDVEWKFARSKLWLSYFDDGKTLPPPFSLVPSPKSFVYFIMRIVNFPKCRRRRLQKDIEMGMGNSKSRLNLFTQSNSRVFESHSFNSILNQPTRYQQIMKRLIKRYVLKAQVDKENDEVNEGELKEIKQDISSLRYELLEDKSQATEELAILIHKLSEKLNPSMLRCE

SEQ ID NO: 17767 - protein, 1311 aa, Homo sapiens
MELEDGVVYQEEPGGSGAVMSERVSGLAGSIYREFERLIGRYDEEVVKELMPLVVAVLENLDSVFAQDQEHQVELELLRDDNEQLITQYEREKALRKHAEEKFIEFEDSQEQEKKDLQTRVESLESQTRQLELKAKNYADQISRLEEREAELKKEYNALHQRHTEMIHNYMEHLERTKLHQLSGSDQLESTAHSRIRKERPISLGIFPLPAGDGLLTPDAQKGGETPGSEQWKFQELSQPRSHTSLKDELSDVSQGGSKATTPASTANSDVATIPTDTPLKEENEGFVKVTDAPNKSEISKHIEVQVAQETRNVSTGSAENEEKSEVQAIIESTPELDMDKDLSGYKGSSTPTKGIENKAFDRNTESLFEELSSAGSGLIGDVDEGADLLGMGREVENLILENTQLLETKNALNIVKNDLIAKVDELTCEKDVLQGELEAVKQAKLKLEEKNRELEEELRKARAEAEDARQKAKDDDDSDIPTAQRKRFTRVEMARVLMERNQYKERLMELQEAVRWTEMIRASRENPAMQEKKRSSIWQFVPTRFSRLFSSSSNTTKKPEPPVNLKYNAPTSHVTPSVKKRSSTLSQLPGDKSKAFDFLSEETEASLASRREQKREQYRQVKAHVQKEDGRVQAFGWSLPQKYKQVTNGQGENKMKNLPVPVYLRPLDEKDTSMKLWCAVGVNLSGGKTRDGGSVVGASVFYKDVAGLDTEGSKQRSASQSSLDKLDQELKEQQKELKNQEELSSLVWICTSTHSATKVLIIDAVQPGNILDSFTVCNSHVLCIASVPGARETDYPAGEDLSESGQVDKASLCGSMTSNSSAETDSLLGGITVVGCSAEGVTGAATSPSTNGASPVMDKPPEMEAENSEVDENVPTAEEATEATEGNAGSAEDTVDISQTGVYTEHVFTDPLGVQIPEDLSPVYQSSNDSDAYKDQISVLPNEQDLVREEAQKMSSLLPTMWLGAQNGCLYVHSSVAQWRKCLHSIKLKDSILSIVHVKGIVLVALADGTLAIFHRGVDGQWDLSNYHLLDLGRPHHSIRCMTVVHDKVWCGYRNKIYVVQPKAMKIEKSFDAHPRKESQVRQLAWVGDGVWVSIRLDSTLRLYHAHTYQHLQDVDIEPYVSKMLGTGKLGFSFVRITALMVSCNRLWVGTGNGVIISIPLTETNKTSGVPGNRPGSVIRVYGDENSDKVTPGTFIPYCSMAHAQLCFHGHRDAVKFFVAVPGQVISPQSSSSGTDLTGDKAGPSAQEPGSQTPLKSMLVISGGEGYIDFRMGDEGGESELLGEDLPLEPSVTKAERSHLIVWQVMYGNE

SEQ ID NO: 17768 - protein, 1114 aa, Homo sapiens
MSVRRELCSVMIFEVVEQAGAIILEDGQELDSWYVILNGTVEISHPDGKVENLFMGNSFGITPTLDKQYMHGIVRTKVDDCQFVCIAQQDYWRILNHVEKNTHKVEEEGEIVMVHEHRELDRSGTRKGHIVIKATPERLIMHLIEEHSIVDPTYIEDFLLTYRTFLESPLDVGIKLLEWFKIDSLRDKVTRIVLLWVNNHFNDFEGDPAMTRFLEEFEKNLEDTKMNGHLRLLNIACAAKAKWRQVVLQKASRESPLQFSLNGGSEKGFGIFVEGVEPGSKAADSGLKRGDQIMEVNGQNFENITFMKAVEILRNNTHLALTVKTNIFVFKELLFRTEQEKSGVPHIPKIAEKKSNRHSIQHVPGDIEQTSQEKGSKKVKANTVSGGRNKIRKILDKTRFSILPPKLFSDGGLSQSQDDSIVGTRHCRHSLAIMPIPGTLSSSSPDLLQPTTSMLDFSNPSDIPDQVIRVFKVDQQSCYIIISKDTTAKEVVFHAVHEFGLTGASDTYSLCEVSVTPEGVIKQRRLPDQFSKLADRIQLNGRYYLKNNMETETLCSDEDAQELVKESQLSMLQLSTIEVATQLSMRDFDLFRNIEPTEYIDDLFKLNSKTGNTHLKRFEDIVNQETFWVASEILTEANQLKRMKIIKHFIKIALHCRECKNFNSMFAIISGLNLASVARLRGTWEKLPSKYEKHLQDLQDIFDPSRNMAKYRNILSSQSMQPPIIPLFPVVKKDMTFLHEGNDSKVDGLVNFEKLRMISKEIRQVVRMTSANMDPAMMFRQRKKRWRSLGSLSQGSTNSNMLDVQGGAHKKRARRSSLLNAKKLYEDAQMARKVKQYLSSLDVETDEEKFQMMSLQWEPAYGTLTKNLSEKRSAKSSEMSPVPMRSAGQTTKAHLHQPHRVSQVLQVPAVNLHPIRKKGQTKDPALNTSLPQKVLGTTEEISGKKHTEDTISVASSLHSSPPASPQGSPHKVGSIISDHSSKISGQSCPGIGGAYLQKKILQITRSTAKRTDSTEKATEENRDRTSCENTTRKRMTSPFRRLRERMLSRERLVNSQKEDTDHNQATESCEKVKDVGSNIKDEKGSAIFNSNSQGNSNTLNCFYTRFKSKRRKTL

SEQ ID NO: 17769 - protein, 418 aa, Homo sapiens
MMYRTVGFGTRSRNLKPWMIAVLIVLSLTVVAVTIGLLVHFLVFDQKKEYYHGSFKILDPQINNNFGQSNTYQLKDLRETTENLVDEIFIDSAWKKNYIKNQVVRLTPEEDGVKVDVIMVFQFPSTEQRAVREKKIQSILNQKIRNLRALPINASSVQVNAMSSSTGELTVQASCGKRVVPLNVNRIASGVIAPKAAWPWQASLQYDNIHQCGATLISNTWLVTAAHCFQKYKNPHQWTVSFGTKINPPLMKRNVRRFIIHEKYRSAAREYDIAVVQVSSRVTFSDDIRQICLPEASASFQPNLTVHITGFGALYYGGESQNDLREARVKIISDDVCKQPQVYGNDIKPGMFCAGYMEGIYDACRGDSGGPLVTRDLKDTWYLIGIVSWGDNCGQKDKPGVYTQVTYYRNWIASKTGI

SEQ ID NO: 17770 - protein, 1145 aa, Homo sapiens
MLVTDLEYALDKKVEQDLWNHAFKNQITTLQGQAKNRANPNRSEVQANLSLFLEAASGFYTQLLQELCTVFNVDLPCRVKSSQLGIISNKQTHTSAIVKPQSSSCSYICQHCLVHLGDIARYRNQTSQAESYYRHAAQLVPSNGQPYNQLAILASSKGDHLTTIFYYCRSIAVKFPFPAASTNLQKALSKALESRDEVKTKWGVSDFIKAFIKFHGHVYLSKSLEKLSPLREKLEEQFKRLLFQKAFNSQQLVHVTVINLFQLHHLRDFSNETEQHTYSQDEQLCWTQLLALFMSFLGILCKCPLQNESQEESYNAYPLPAVKVSMDWLRLRPRVFQEAVVDERQYIWPWLISLLNSFHPHEEDLSSISATPLPEEFELQGFLALRPSFRNLDFSKGHQGITGDKEGQQRRIRQQRLISIGKWIADNQPRLIQCENEVGKLLFITEIPELILEDPSEAKENLILQETSVIESLAADGSPGLKSVLSTSRNLSNNCDTGEKPVVTFKENIKTREVNRDQGRSFPPKEVRRDYSKGITVTKNDGKKDNNKRKTETKKCTLEKLQETGKQNVAVQVKSQTELRKTPVSEARKTPVTQTPTQASNSQFIPIHHPGAFPPLPSRPGFPPPTYVIPPPVAFSMGSGYTFPAGVSVPGTFLQPTAHSPAGNQVQAGKQSHIPYSQQRPSGPGPMNQGPQQSQPPSQQPLTSLPAQPTAQSTSQLQVQALTQQQQSPTKAVPALGKSPPHHSGFQQYQQADASKQLWNPPQVQGPLGKIMPVKQPYYLQTQDPIKLFEPSLQPPVMQQQPLEKKMKPFPMEPYNHNPSEVKVPEFYWDSSYSMADNRSVMAQQANIDRRGKRSPGVFRPEQDPVPRMPFEDPKSSPLLPPDLLKSLAALEEEEELIFSNPPDLYPALLGPLASLPGRSLFKSLLEKPSELMSHSSSFLSLTGFSLNQERYPNNSMFNEVYGKNLTSSSKAELSPSMAPQETSLYSLFEGTPWSPSLPASSDHSTPASQSPHSSNPSSLPSSPPTHNHNSVPFSNFGPIGTPDNRDRRTADRWKTDKPAMGGFGIDYLSATSSSESSWHQASTPSGTWTGHGPSMEDSSAVLMESLKSIWSSSMMHPGPSALEQLLMQQKQKQQRGQGTMNPPH

SEQ ID NO: 17771 - protein, 611 aa, Homo sapiens
MSSSNVEVFIPVSQGNTNGFPATASNDLKAFTEGAVLSFHNICYRVKLKSGFLPCRKPVEKEILSNINGIMKPGLNAILGPTGGGKSSLLDVLAARKDPSGLSGDVLINGAPRPANFKCNSGYVVQDDVVMGTLTVRENLQFSAALRLATTMTNHEKNERINRVIQELGLDKVADSKVGTQFIRGVSGGERKRTSIGMELITDPSILFLDEPTTGLDSSTANAVLLLLKRMSKQGRTIIFSIHQPRYSIFKLFDSLTLLASGRLMFHGPAQEALGYFESAGYHCEAYNNPADFFLDIINGDSTAVALNREEDFKATEIIEPSKQDKPLIEKLAEIYVNSSFYKETKAELHQLSGGEKKKKITVFKEISYTTSFCHQLRWVSKRSFKNLLGNPQASIAQIIVTVVLGLVIGAIYFGLKNDSTGIQNRAGVLFFLTTNQCFSSVSAVELFVVEKKLFIHEYISGYYRVSSYFLGKLLSDLLPMRMLPSIIFTCIVYFMLGLKPKADAFFVMMFTLMMVAYSASSMALAIAAGQSVVSVATLLMTICFVFMMVCWSISQPLHLGCHGFSTSAFHDMDLRLCSIMNFWDKTSAQDSMQQETILVTMQHVLAKNIW

SEQ ID NO: 17772 - protein, 745 aa, Homo sapiens
MRKGLRATAARCGLGLGYLLQMLVLPALALLSASGTGSAAQDDDFFHELPETFPSDPPEPLPHFLIEPEEAYIVKNKPVNLYCKASPATQIYFKCNSEWVHQKDHIVDERVDETSGLIVREVSIEISRQQVEELFGPEDYWCQCVAWSSAGTTKSRKAYVRIAYLRKTFEQEPLGKEVSLEQEVLLQCRPPEGIPVAEVEWLKNEDIIDPVEDRNFYITIDHNLIIKQARLSDTANYTCVAKNIVAKRKSTTATVIVYVNGGWSTWTEWSVCNSRCGRGYQKRTRTCTNPAPLNGGAFCEGQSVQKIACTTLCPVDGRWTPWSKWSTCGTECTHWRRRECTAPAPKNGGKDCDGLVLQSKNCTDGLCMQSFIYPISTEQRTQNEYGFSSAPDSDDVALYVGIVIAVIVCLAISVVVALFVYRKNHRDFESDIIDSSALNGGFQPVNIKAARQDLLAVPPDLTSAAAMYRGPVYALHDVSDKIPMTNSPILDPLPNLKIKVYNTSGAVTPQDDLSEFTSKLSPQMTQSLLENEALSLKNQSLARQTDPSCTAFGSFNSLGGHLIVPNSGVSLLIPAGAIPQGRVYEMYVTVHRKETMRPPMDDSQTLLTPVVSCGPPGALLTRPVVLTMHHCADPNTEDWKILLKNQAAQGQWEDVVVVGEENFTTPCYIQLDAEACHILTENLSTYALVGHSTTKAAAKRLKLAIFGPLCCSSLEYSIRVYCLDDTQDALKEILHLERQMGGQLL

SEQ ID NO: 17773 - protein, 88 aa, Homo sapiens
MPKAPKGKSAGREKKVIHPYSRKAAQITREAHKQEKKEKLKNEKALRLNLVGEKLQWFQNHLDPQKKRYSKKDACELIERDSRHSKCK

SEQ ID NO: 17774 - protein, 935 aa, Homo sapiens
MESQEFIVLYTHQKMKKSKVWQDGILKITHLGNKAILYDDKGACLESLFLKCLEVKPGDDLESDRYLITVEEVKVAGAIGIVKQNVNKEAPELNSRTFISSGRSLGCQPSGLKRKFTGFQGPRQVPKKMVIMESGESAASHEAKKTGPTIFSPFCSMPPLFPTVGKKDVNNILADPENIVTYKNRERNAMDFSSVFSPSFQINPEVLCEENYFCSPVNSGNKLSDSLLTNEPVKRDSLASHYSGVSQNIRSKAQILALLKSESSSSCEELNSEMTEHFPQKQPQGSLKIATKPKYLIQQEECAEMKSTENLYYQHQSENTMRNKSRWAMYLSSQSSPIHSSTVDGNDTERKPKAQEDDVNSNLKDLSLQKIIQFVETYAEERKKYNVDQSVGNNDPSWNQEVKLEIPSFNESSSLQVTCSSAENDGILSESDIQEDNKIPFNQNDKGCIKGSVLIKENAQEVNTCGTLEKEYEQSESSLPELKHLQIESSNNSRISDDITDMISESKMDNESLNSIHESLSNVTQPFLEVTFNLNNFETSDTEEESQESNKISQDSESWVKDILVNDGNSCFQKRSENTNCEEIEGEHLPFLTSVSDKPTVTFPVKETLPSQFCDKTYVGFDMGICKTENTGKEIEEYSDTLSNFESFKWTDAVYGDNKEDANKPIQEVRINYDFALPPNKSKGINMNLHIPHIQNQIAENSNLFSEDAQPQPFILGSDLDKNDEHVLPSTSSSDNSVQLLNTNQNHYECIALDKSNTHISNSLFYPLGKKHLISKDTEAHISEPEDLGKIRSPPPDHVEVETAREGKQYWNPRNSSELSGLVNTISILKSLCEHSTALDSLEILKKKNTVFQQGTQQTYEPDSPPEVRKPFITVVSPKSPHLHKDSQQILKEDEVELSEPLQSVQFSSSGSKEETAFQAVIPKQIERKTCDPKG

SEQ ID NO: 17775 - protein, 142 aa, Homo sapiens
MLKVTVPSCSASSCSSVTASAAPGTASLVPDYWIDGSNRDALSDFFEVESELGRGATSIVYRCKQKGTQKPYALKVLKKTVDKKIVRTEIGVLLRLSHPNIIKLKEIFETPTEISLVLELVTGGELFDRIVEKGYYSERDAA

SEQ ID NO: 17776 - protein, 1048 aa, Homo sapiens
MNGNTALAIAKRLGYISVVDTLKVVTEEVTTTTTTITEKHKLNVPETMTEVLDVSDEEGDDTMTGDGGEYLRPEDLKELGDDSLPSSQFLDGMNYLRYSLEGGRSDSLRSFSSDRSHTLSHASYLRDSAVMDDSVVIPSHQVSTLAKEAERNSYRLSWGTENLDNVALSSSPIHSGFLVSFMVDARGGAMRGCRHNGLRIIIPPRKCTAPTRVTCRLVKRHRLATMPPMVEGEGLASRLIEVGPSGAQFLGPVIVEIPHFAALRGKERELVVLRSENGDSWKEHFCDYTEDELNEILNGMDEVLDSPEDLEKKRICRIITRDFPQYFAVVSRIKQDSNLIGPEGGVLSSTVVPQVQAVFPEGALTKRIRVGLQAQPMHSELVKKILGNKATFSPIVTLEPRRRKFHKPITMTIPVPKASSDVMLNGFGGDAPTLRLLCSITGGTTPAQWEDITGTTPLTFVNECVSFTTNVSARFWLIDCRQIQESVTFASQVYREIICVPYMAKFVVFAKSHDPIEARLRCFCMTDDKVDKTLEQQENFAEVARSRDVEVLEGKPIYVDCFGNLVPLTKSGQHHIFSFFAFKENRLPLFVKVRDTTQEPCGRLSFMKEPKSTRGLVHQAICNLNITLPIYTKESESDQEQEEEIDMTSEKNPQDEQERIEERLAYIADHLGFSWTELARELDFTEEQIHQIRIENPNSLQDQSHALLKYWLERDGKHATDTNLVECLTKINRMDIVHLMETNTEPLQERISHSYAEIEQTITLDHSEGFSVLQEELCTAQHKQKEEQAVSKESETCDHPPIVSEEDISVGYSTFQDGVPKTEGDSSATALFPQTHKEQVQQDFSGKMQDLPEESSLEYQQEYFVTTPGTETSETQKAMIVPSSPSKTPEEVSTPAEEEKLYLQTPTSSERGGSPIIQEPEEPSEHREESSPRKTSLVIVESADNQPETCERLDEDAAFEKGDDMPEIPPETVTEEEYIDEHGHTVVKKVTRKIIRRYVSSEGTEKEEIMVQGMPQEPVNIEEGDGYSKVIKRVVLKSDTEQSEDNNE

SEQ ID NO: 17777 - protein, 673 aa, Homo sapiens
MNPTETKAVKTEPEKKSQSTKLSVVHEKKSQEGKPKEHTEPKSLPKQASDTGSNDAHNKKAVSRSAEQQPSEKSTEPKTKPQDMISAGGESVAGITAISGKPGDKKKEKKSLTPAVPVESKPDKPSGKSGMDAALDDLIDTLGGPEETEEENTTYTGPEVSDPMSSTYIEELGKREVTIPPKYRELLAKPIGPDDAIDALSSDFTCGSPTAAGKKTEKEESTEVLKAQSAGTVRSAAPPQEKKRKVEKDTMSDQALEALSASLGTRQAEPELDLRSIKEVDEAKAKEEKLEKCGEDDETIPSEYRLKPATDKDGKPLLPEPEEKPKPRSESELIDELSEDFDRSECKEKPSKPTEKTEESKAAAPAPVSEAVCRTSMCSIQSAPPEPATLKGTVPDDAVEALADSLGKKEADPEDGKPVMDKVKEKAKEEDREKLGEKEETIPPDYRLEEVKDKDGKPLLPKESKEQLPPMSEDFLLDALSEDFSGPQNASSLKFEDAKLAAAISEVVSQTPASTTQAGAPPRDTSQSDKDLDDALDKLSDSLGQRQPDPDENKPMEDKVKEKAKAEHRDKLGERDDTIPPEYRHLLDDNGQDKPVKPPTKKSEDSKKPADDQDPIDALSGDLDSCPSTTETSQNTAKDKCKKAASSSKAPKNGGKAKDSAKTTEETSKPKDD

SEQ ID NO: 17778 - protein, 1651 aa, Homo sapiens
MAPTLFQKLFSKRTGLGAPGRDARDPDCGFSWPLPEFDPSQIRLIVYQDCERRGRNVLFDSSVKRRNEDISVSDLNTIYSYLHGMEILSNLREHQLRLMSARARYERYSGNQVLFCSETIARCWYILLSGSVLVKGSMVLPPCSFGKQFGGKRGCDCLVLEPSEMIVVENAKDNEDSILQREIPARQSRRRFRKINYKGERQTITDDVEVNSYLSLPADLTKMHLTENPHPQVTHVSSSQSGCSIASDSGSSSLSDIYQATESEVGDVDLTRLPEGPVDSEDDEEEDEEIDRTDPLQGRDLVRECLEKEPADKTDDDIEQLLEFMHQLPAFANMTMSVRRELCSVMIFEVVEQAGAIILEDGQELDSWYVILNGTVEISHPDGKVENLFMGNSFGITPTLDKQYMHGIVRTKVDDCQFVCIAQQDYWRILNHVEKNTHKVEEEGEIVMVHEHRELDRSGTRKGHIVIKATPERLIMHLIEEHSIVDPTYIEDFLLTYRTFLESPLDVGIKLLEWFKIDSLRDKVTRIVLLWVNNHFNDFEGDPAMTRFLEEFEKNLEDTKMNGHLRLLNIACAAKAKWRQVVLQKASRESPLQFSLNGGSEKGFGIFVEGVEPGSKAADSGLKRGDQIMEVNGQNFENITFMKAVEILRNNTHLALTVKTNIFVFKELLFRTEQEKSGVPHIPKIAEKKSNRHSIQHVPGDIEQTSQEKGSKKVKANTVSGGRNKIRKILDKTRFSILPPKLFSDGGLSQSQDDSIVGTRHCRHSLAIMPIPGTLSSSSPDLLQPTTSMLDFSNPSDIPDQVIRVFKVDQQSCYIIISKDTTAKEVVFHAVHEFGLTGASDTYSLCEVSVTPEGVIKQRRLPDQFSKLADRIQLNGRYYLKNNMETETLCSDEDAQELVKESQLSMLQLSTIEVATQLSMRDFDLFRNIEPTEYIDDLFKLNSKTGNTHLKRFEDIVNQETFWVASEILTEANQLKRMKIIKHFIKIALHCRECKNFNSMFAIISGLNLASVARLRGTWEKLPSKYEKHLQDLQDIFDPSRNMAKYRNILSSQSMQPPIIPLFPVVKKDMTFLHEGNDSKVDGLVNFEKLRMISKEIRQVVRMTSANMDPAMMFRQRSLSQGSTNSNMLDVQGGAHKKRARRSSLLNAKKLYEDAQMARKVKQYLSSLDVETDEEKFQMMSLQWEPAYGTLTKNLSEKRSAKSSEMSPVPMRSAGQTTKAHLHQPHRVSQVLQVPAVNLHPIRKKGQTKDPALNTSLPQKVLGTTEEISGKKHTEDTISVASSLHSSPPASPQGSPHKGYTLIPSAKSDNLSDSSHSEISSRSSIVSNCSVDSMSAALQDERCSSQALAVPESTGALEKTEHASGIGDHSQHGPGWTLLKPSLIKCLAVSSSVSNEEISQEHIIIEAADSGRGSWTSCSSSSHDNFQSLPNPKSWDFLNSYRHTHLDDPIAEVEPTDSEPYSCSKSCSRTCGQCKGSLERKSWTSSSSLSDTYEPNYGTVKQRVLESTPAESSEGLDPKDATDPVYKTVTSSTEKGLIVYCVTSPKKDDRYREPPPTPPGYLGISLADLKEGPHTHLKPPDYSVAVQRSKMMHNSLSRLPPASLSSNLVACVPSKIVTQPQRHNLQPFHPKLGDVTDADSEADENEQVSAV

SEQ ID NO: 17779 - protein, 60 aa, Homo sapiens
MEADIITNLRCRLKEAEEERLKAAQYGLQLVESQNELQNQLDKCRNEMMTMTERLLDLTC

SEQ ID NO: 17780 - protein, 624 aa, Homo sapiens
MFCTKLKDLKITGECPFSLLAPGQVPNESSEEAAGSSESCKATVPICQDIPEKNIQESLPQRKTSRSRVYLHTLAESICKLIFPEFERLNVALQRTLAKHKIKESRKSLEREDFEKTIAEQAVAAGVPVEVIKESLGEEVFKICYEEDENILGVVGGTLKDFLNSFSTLLKQSSHCQEAGKRGRLEDASILCLDKEDDFLHVYYFFPKRTTSLILPGIIKAAAHVLYETEVEVSLMPPCFHNDCSEFVNQPYLLYSVHMKSTKPSLSPSKPQSSLVIPTSLFCKTFPFHFMFDKDMTILQFGNGIRRLMNRRDFQGKPNFEEYFEILTPKINQTFSGIMTMLNMQFVVRVRRWDNSVKKSSRVMDLKGQMIYIVESSAILFLGSPCVDRLEDFTGRGLYLSDIPIHNALRDVVLIGEQARAQDGLKKRLGKLKATLEQAHQALEEEKKKTVDLLCSIFPCEVAQQLWQGQVVQAKKFSNVTMLFSDIVGFTAICSQCSPLQVITMLNALYTRFDQQCGELDVYKVETIGDAYCVAGGLHKESDTHAVQIALMALKMMELSDEVMSPHGEPIKMRIGLHSGSVFAGVVGVKMPRYCLFGNNVTLANKFESCSVPRKINVSPTTYR

SEQ ID NO: 17781 - protein, 101 aa, Homo sapiens
SACHLRKATCLLGRSIGLAYEGKCITKSCEDIQCTGGKKCLWDFKVGRGRCSLCDELCPDSKSDEPVCASDNATYASECAMKEAACSSGVLLEVKHSGSCN

SEQ ID NO: 17782 - protein, 1178 aa, Homo sapiens
MRSKARARKLAKSDGDVVNNMYEPNRDLLASHSAEDEAEDSAMSPIPVGPPSPFPTSEDFTPKEGSPYEAPVYIPEDIPIPADFELRESSIPGAGLGVWAKRKMEAGERLGPCVVVPRAAAKETDFGWEQILTDVEVSPQEGCITKQISEDLGSEKFCVDANQAGAGSWLKYIRVACSCDDQNLTMCQISEQIYYKVIKDIEPGEELLVHVKEGVYPLGTVPPGLDEEPTFRCDECDELFQSKLDLRRHKKYTCGSVGAALYEGLAEELKPEGLGGGSGQAHECKDCERMFPNKYSLEQHMVIHTEEREYKCDQCPKAFNWKSNLIRHQMSHDSGKRFECENCVKVFTDPSNLQRHIRSQHVGARAHACPDCGKTFATSSGLKQHKHIHSTVKPFICEVCHKSYTQFSNLCRHKRMHADCRTQIKCKDCGQMFSTTSSLNKHRRFCEGKNHYTPGGIFAPGLPLTPSPMMDKAKPSPSLNHASLGFNEYFPSRPHPGSLPFSTAPPTFPALTPGFPGIFPPSLYPRPPLLPPTSLLKSPLNHTQDAKLPSPLGNPALPLVSAVSNSSQGTTAAAGPEEKFESRLEDSCVEKLKTRSSDMSDGSDFEDVNTTTGTDLDTTTGTGSDLDSDVDSDPDKDKGKGKSAEGQPKFGGGLAPPGAPNSVAEVPVFYSQHSFFPPPDEQLLTATGAAGDSIKAIASIAEKYFGPGFMGMQEKKLGSLPYHSAFPFQFLPNFPHSLYPFTDRALAHNLLVKAEPKSPRDALKVGGPSAECPFDLTTKPKDVKPILPMPKGPSAPASGEEQPLDLSIGSRARASQNGGGREPRKNHVYGERKLGAGEGLPQVCPARMPQQPPLHYAKPSPFFMDPIYSRVEKRKVTDPVGALKEKYLRPSPLLFHPQMSAIETMTEKLESFAAMKADSGSSLQPLPHHPFNFRSPPPTLSDPILRKGKERYTCRYCGKIFPRSANLTRHLRTHTGEQPYRCKYCDRSFSISSNLQRHVRNIHNKEKPFKCHLCNRCFGQQTNLDRHLKKHEHENAPVSQHPGVLTNHLGTSASSPTSESDNHALLDEKEDSYFSEIRNFIANSEMNQASTRTEKRADMQIVDGSAQCPGLASEKQEDVEEEDDDDLEEDDEDSLAGKSQDDTVSPAPEPQAAYEDEEDEEPAASLAVGFDHTRRHMQ

SEQ ID NO: 17783 - protein, 556 aa, Homo sapiens
WNLVAVIKGQDDSLLPQNYCKGIMHLKHLIKFRTSEAQELTTVKMSKFGGGIGVPAKEERLKEAAEIHLRLGQIQRYCELMVELGEWDKALSIAPGVSVKYWKKLMQRRADQLIQEDKDDVIPYCIAIGDVKKLVHFFMSRGQLKEALLVAQAACEGNMQPLHVSVPKGASYSDDIYKEDFNELLHKVSKELAEWYFQDGRAVLAACCHLAIDNIELAMAYLIRGNELELAVCVGTVLGESAAPATHYALELLARKCMMISVCFPCVGYRNLAADLLLMIPDNELHLIKLCAFYPGCTEEINDLHDKCKLPTVEECMQLAETARADDNIFETVKYYLLSQEPEKALPIGISFVKEYISSSDWTLDTIYPVLDLLSYIRTEKLLLHTCTEARNELLILCGYIGALLAIRRQYQSIVPALYEYTSQLLKRREVSVPLKIEYLSEELDAWRACTQSTNRSLEDSPYTPPSDSQRMIYATLLKRLKEESLKGIIGPDYVTGSNLPSHSDIHISCLTGLKIQGPVFFLEDGKSAISLNDALMWAKVNPFSPLGTGIRLNPF

SEQ ID NO: 17784 - protein, 382 aa, Homo sapiens
MALNHTALPQDERLPHYLRDGDPFASKLSWEADLVAGFYLTIIGILSTFGNGYVLYMSSRRKKKLRPAEIMTINLAVCDLGISVVGKPFTIISCFCHRWVFGWIGCRWYGWAGFFFGCGSLITMTAVSLDRYLKICYLSYGVWLKRKHAYICLAAIWAYASFWTTMPLVGLGDYVPEPFGTSCTLDWWLAQASVGGQVFILNILFFCLLLPTAVIVFSYVKIIAKVKSSSKEVAHFDSRIHSSHVLEMKLTKVAMLICAGFLIAWIPYAVVSVWSAFGRPDSIPIQLSVVPTLLAKSAAMYNPIIYQVIDYKFACCQTGGLKATKKKSLEGFRLHTVTTVRKSSAVLEIHEEGRNKSASPNNLDADSHSNDDDCGKKYEPIF

SEQ ID NO: 17785 - protein, 1349 aa, Homo sapiens
MSAPVGPRGRLAPIPAASQPPLQPEMPDLSHLTEEERKIILAVMDRQKKEEEKEQSVLKKLHQQFEMYKEQVKKMGEESQQQQEQKGDAPTCGICHKTKFADGCGHNCSYCQTKFCARCGGRVSLRSNKVMWVCNLCRKQQEILTKSGAWFYNSGSNTPQQPDQKVLRGLRNEEAPQEKKPKLHEQTQFQGPSGDLSVPAVEKSRSHGLTRQHSIKNGSGVKHHIASDIASDRKRSPSVSRDQNRRYDQREEREEYSQYATSDTAMPRSPSDYADRRSQHEPQFYEDSDHLSYRDSNRRSHRHSKEYIVDDEDVESRDEYERQRREEEYQSRYRSDPNLARYPVKPQPYEEQMRIHAEVSRARHERRHSDVSLANADLEDSRISMLRMDRPSRQRSISERRAAMENQRSYSMERTREAQGPSSYAQRTTNHSPPTPRRSPLPIDRPDLRRTDSLRKQHHLDPSSAVRKTKREKMETMLRNDSLSSDQSESVRPPPPKPHKSKKGGKMRQISLSSSEEELASTPEYTSCDDVEIESESVSEKGDMDYNWLDHTSWHSSEASPMSLHPVTWQPSKDGDRLIGRILLNKRLKDGSVPRDSGAMLGLKVVGGKMTESGRLCAFITKVKKGSLADTVGHLRPGDEVLEWNGRLLQGATFEEVYNIILESKPEPQVELVVSRPIGDIPRIPDSTHAQLESSSSSFESQKMDRPSISVTSPMSPGMLRDVPQFLSGQLSSQSLSRRTTPFVPRVQIKLWFDKVGHQLIVTILGAKDLPSREDGRPRNPYVKIYFLPDRSDKNKRRTKTVKKTLEPKWNQTFIYSPVHRREFRERMLEITLWDQARVREEESEFLGEILIELETALLDDEPHWYKLQTHDVSSLPLPHPSPYMPRRQLHGESPTRRLQRSKRISDSEVSDYDCDDGIGVVSDYRHDGRDLQSSTLSVPEQVMSSNHCSPSGSPHRVDVIGRTRSWSPSVPPPQSRNVEQGLRGTRTMTGHYNTISRMDRHRVMDDHYSPDRDRDCEAADRQPYHRSRSTEQRPLLERTTTRSRSTERPDTNLMRSMPSLMTGRSAPPSPALSRSHPRTGSVQTSPSSTPVAGRRGRQLPQLPPKGTLDRKAGGKKLRSTVQRSTETGLAVEMRNWMTRQASRESTDGSMNSYSSEGNLIFPGVRLASDSQFSDFLDGLGPAQLVGRQTLATPAMGDIQVGMMDKKGQLEVEIIRARGLVVKPGSKTLPAPYVKVYLLDNGVCIAKKKTKVARKTLEPLYQQLLSFEESPQGKVLQIIVWGDYGRMDHKSFMGVAQILLDELELSNMVIGWFKLFPPSSLVDPTLAPLTRRASQSSLESSTGPSYSRS

SEQ ID NO: 17786 - protein, 388 aa, Homo sapiens
MMTITFLPYTFSLMVTFPDVPLGIFLFCVCVIAIGVVQALIVGYAFHFPHLLSPQIQRSAHRALYRRHVLGIVLQGPALCFAAAIFSLFFVPLSYLLMVTVILLPYVSKVTGWCRDRLLGHREPSAHPVEVFSFDLHEPLSKERVEAFSDGVYAIVATLLILDICEDNVPDPKDVKERFSGSLVAALSATGPRFLAYFGSFATVGLLWFAHHSLFLHVRKATRAMGLLNTLSLAFVGGLPLAYQQTSAFARQPRDELERVRVSCTIIFLASIFQLAMWTTALLHQAETLQPSVWFGGREHVLMFAKLALYPCASLLAFASTCLLSRFSVGIFHLMQIAVPCAFLLLRLLVGLALATLRVLRGLARPEHPPPAPTGQDDPQSQLLPAPC

SEQ ID NO: 17787 - protein, 980 aa, Homo sapiens
MACPALGLEALQPLQPEPPPEPAFSEAQKWIEQVTGRSFGDKDFRTGLENGILLCELLNAIKPGLVKKINRLPTPIAGLDNIILFLRGCKELGLKESQLFDPSDLQDTSNRVTVKSLDYSRKLKNVLVTIYWLGKAANSCTSYSGTTLNLKEFEGLLAQMRKDTDDIESPKRSIRDSGYIDCWDSERSDSLSPPRHGRDDSFDSLDSFGSRSRQTPSPDVVLRGSSDGRGSDSESDLPHRKLPDVKKDDMSARRTSHGEPKSAVPFNQYLPNKSNQTAYVPAPLRKKKAEREEYRKSWSTATSPLGGERPFRYGPRTPVSDDAESTSMFDMRCEEEAAVQPHSRARQEQLQLINNQLREEDDKWQDDLARWKSRRRSVSQDLIKKEEERKKMEKLLAGEDGTSERRKSIKTYREIVQEKERRERELHEAYKNARSQEEAEGILQQYIERFTISEAVLERLEMPKILERSHSTEPNLSSFLNDPNPMKYLRQQSLPPPKFTATVETTIARASVLDTSMSAGSGSPSKTVTPKAVPMLTPKPYSQPKNSQDVLKTFKVDGKVSVNGETVHREEEKERECPTVAPAHSLTKSQMFEGVARVHGSPLELKQDNGSIEINIKKPNSVPQELAATTEKTEPNSQEDKNDGGKSRKGNIELASSEPQHFTTTVTRCSPTVAFVEFPSSPQLKNDVSEEKDQKKPENEMSGKVELVLSQKERYQKEQDKLKEEWEKAQKEVEEEERRYYEEERKIIEDTVVPFTVSSSSADQLSTSSSMTEGSGTMNKIDLGNCQDEKQDRRWKKSFQGDDSDLLLKTRESDRLEEKGSLTEGALAHSGNPVSKGVHEDHQLDTEAGAPHCGTNPQLAQDPSQNQQTSNPTHSSEDVKPKTLPLDKSINHQIESPSERRKSISGKKLCSSCGLPLGKGAAMIIETLNLYFHIQCFRCGICKGQLGDAVSGTDVRIRNGLLNCNDCYMRSRSAGQPTTL

SEQ ID NO: 17788 - protein, 262 aa, Homo sapiens
VIKCKAAVAWEAGKPLSIEEIEVAPPKAHEVRIKIIATAVCHTDAYTLSGADPEGCFPVILGHEGAGIVESVGDTVIPLYIPQCGECKFCLNPKTNLCQKIRVTQGKGLMPDGTSRFTCKGKTILHYMGTSTFSEYTVVADISVAKIDPLAPLDKVCLLGCGISTGYGAAVNTAKLEPGSVCAVFGLGGVGLAVIMGCKVAGASRIIGVDINKDKFARAKEFGATECINPQDFSKPIQEVLIEMTDGGVDYSFECIGNVKVM

SEQ ID NO: 17789 - protein, 383 aa, Homo sapiens
MRLKIGFILRSLLVVGSFLGLVVLWSSLTPRPDDPSPLSRMREDRDVNDPMPNRGGNGLAPGEDRFKPVVPWPHVEGVEVDLESIRRINKAKNEQEHHAGGDSQKDIMQRQYLTFKPQTFTYHDPVLRPGILGNFEPKEPEPPGVVGGPGEKAKPLVLGPEFKQAIQASIKEFGFNMVASDMISLDRSVNDLRQEECKYWHYDENLLTSSVVIVFHNEGWSTLMRTVHSVIKRTPRKYLAEIVLIDDFSNKEHLKEKLDEYIKLWNGLVKVFRNERREGLIQARSIGAQKAKLGQVLIYLDAHCEVAVNWYAPLVAPISKDRTTCTVPLIDYIDGNDYSIEPQQGGDEDGFARGAWDWSLLWKRIPLSHKEKAKRKHKTEPYR

SEQ ID NO: 17790 - protein, 441 aa, Homo sapiens
MGHCHPGVVKAALKQMELLNTNSRFLHDNIVEYAKRLSATLPEKLSVCYFTNSGSEANDLALRLARQFRGHQDVITLDHAYHGHLSSLIEISPYKFQKGKDVKKEFVHVAPTPDTYRGKYREDHADSASAYADEVKKIIEDAHNSGRKIAAFIAESMQSCGGQIIPPAGYFQKVAEYVHGAGGVFIADEVQVGFGRVGKHFWSFQMYGEDFVPDIVTMGKPMGNGHPVACVVTTKEIAEAFSSSGMEYFNTYGGNPVSCAVGLAVLDIIENEDLQGNAKRVGNYLTELLKKQKAKHTLIGDIRGIGLFIGIDLVKDHLKRTPATAEAQHIIYKMKEKRVLLSADGPHRNVLKIKPPMCFTEEDAKFMVDQLDRILTVLEEAMGTKTESVTSENTPCKTKMLKEAHIELLRDSTTDSKENPSRKRNGMCTDTHSLLSKRLKT

SEQ ID NO: 17791 - protein, 936 aa, Homo sapiens
VYEADLAENSAPGTPILQLRAADLDVGVNGQIEYVFGAATESVRRLLRLDETSGWLSVLHRIDREEVNQLRFTVMARDRGQPPKTDKATVVLNIKDENDNVPSIEIRKIGRIPLKDGVANVAEDVLVDTPIALVQVSDRDQGENGVVTCTVVGDVPFQLKPASDTEGDQNKKKYFLHTSTPLDYEATREFNVVIVAVDSGSPSLSSNNSLIVKVGDTNDNPPMFGQSVVEVYFPENNIPGERVATVLATDADSGKNAEIAYSLDSSVMGIFAIDPDSGDILVNTVLDREQTDRYEFKVNAKDKGIPVLQGSTTVIVQVADKNDNDPKFMQDVFTFYVKENLQPNSPVGMVTVMDADKGRNAEMSLYIEENNNIFSIENDTGTIYSTMSFDREHQTTYTFRVKAVDGGDPPRSATATVSLFVMDENDNAPTVTLPKNISYTLLPPSSNVRTVVATVLATDSDDGINADLNYSIVGGNPFKLFEIDPTSGVVSLVGKLTQKHYGLHRLVVQVNDSGQPSQSTTTLVHVFVNESVSNATAIDSQIARSLHIPLTQDIAGDPSYEISKQRLSIVIGVVAGIMTVILIILIVVMARYCRSKNKNGYEAGKKDHEDFFTPQQHDKSKKPKKDKKNKKSKQPLYSSIVTVEASKPNGQRYDSVNEKLSDSPSMGRYRSVNGGPGSPDLARHYKSSSPLPTVQLHPQSPTAGKKHQAVQDLPPANTFVGAGDNISIGSDHCSEYSCQTNNKYSKQPFRRVTFSVVSQPQDPHQGSLQSCYDSGLEESETPSSKSSSGPRLGALPLPEDNYERTTPDGSVDSRPLPDVALTGKCTRECDEYGHSDSCWMPVRTSPERKKSQPKLSTFMPVDERGSQEKLANGEAAIMGDRNRNLLNKKLTSSYETFSAASFSKNEEANPEDIPLTKTGEYKPSPVNTLTRREVYL

SEQ ID NO: 17792 - protein, 436 aa, Homo sapiens
MVGQRVLLLVAFLLSGVLLSEAAKILTISTLGGSHYLLLDRVSQILQEHGHNVTMLHQSGKFLIPDIKEEEKSYQVIRWFSPEDHQKRIKKHFDSYIETALDGRKESEALVKLMEIFGTQCSYLLSRKDIMDSLKNENYDLVFVEAFDFCSFLIAEKLVKPFVAILPTTFGSLDFGLPSPLSYVPVFPSLLTDHMDFWGRVKNFLMFFSFSRSQWDMQSTFDNTIKEHFPEGSRPVLSHLLLKAELWFVNSDFAFDFARPLLPNTVYIGGLMEKPIKPVPQDLDNFIANFGDAGFVLVAFGSMLNTHQSQEVLKKMHNAFAHLPQGVIWTCQSSHWPRDVHLATNVKIVDWLPQSDLLAHPSIRLFVTHGGQNSVMEAIRHGVPMVGLPVNGDQHGNMVRVVAKNYGVSIRLNQVTADTLTLTMKQVIEDKRYVAL

SEQ ID NO: 17793 - protein, 135 aa, Homo sapiens
MEAPEYLDLDEIDFSDDISYSVTSLKTIPELCRRCDTQNEDRSVSSSSWNCGISTLITNTQKPTGIADVYSKFRPVKRVSPLKHQPETLENNESDDQKNQKVVEYQKGGESDLGPQPQELGPGDGVGGPPGKSSE

SEQ ID NO: 17794 - protein, 453 aa, Homo sapiens
NLLTSSVVIVFHNEGWSTLMRTVHSVIKRTPRKYLAEIVLIDDFSNKEHLKEKLDEYIKLWNGLVKVFRNERREGLIQARSIGAQKAKLGQVLIYLDAHCEVAVNWYAPLVAPISKDRTTCTVPLIDYIDGNDYSIEPQQGGDEDGFARGAWDWSLLWKRIPLSHKEKAKRKHKTEPYRSPAMAGGLFAIEREFFFELGLYDPGLQIWGGENFEISYKIWQCGGKLLFVPCSRVGHIYRLEGWQGNPPPIYVGSSPTLKNYVRVVEVWWDEYKDYFYASRPESQALPYGDISELKKFREDHNCKSFKWFMEEIAYDITSHYPLPPKNVDWGEIRGFETAYCIDSMGKTNGGFVELGPCHRMGGNQLFRINEANQLMQYDQCLTKGADGSKVMITHCNLNEFKEWQYFKNLHRFTHIPSGKCLDRSEVLHQVFISNCDSSKTTQKWEMNNIHSV

SEQ ID NO: 17795 - protein, 369 aa, Homo sapiens
MNKNEKHDDKLVMFTNQSEDSERCESMELDKKIQDLIERNASPHPKRFTPEAMPTHRNLCSLKTPGKTASMAHFVQGTSRMIAAESSTEHKECAEPSTRKNLMNSLEQKIRCLEKQRKELLEVNQQWDQQFRSMKELYERKVAELKTKLDAAERFLSTREKDPHQRQRKDDRQREDDRQRDLTRDRLQREEKEKERLNEELHELKEENKLLKGKNTLANKEKEHYECEIKRLNKALQDALNIKCSFSEDCLRKSRVEFCHEEMRTEMEVLKQQVQIYEEDFKKERSDRERLNQEKEELQQINETSQSQLNRLNSQIKACQMEKEKLEKQLKQMYCPPCNCGLVFHLQDPWVPTGPGAVQKQREHPVYPQ

SEQ ID NO: 17796 - protein, 1150 aa, Homo sapiens
MEPRPTAPSSGAPGLAGVGETPSAAALAAARVELPGTAVPSVPEDAAPASRDGGGVRDEGPAAAGDGLGRPLGPTPSQSRFQVDLVSENAGRAAAAAAAAAAAAAAAGAGAGAKQTPADGEASGESEPAKGSEEAKGRFRVNFVDPAASSSAEDSLSDAAGVGVDGPNVSFQNGGDTVLSEGSSLHSGGGGGSGHHQHYYYDTHTNTYYLRTFGHNTMDAVPRIDHYRHTAAQLGEKLLRPSLAELHDELEKEPFEDGFANGEESTPTRDAVVTYTAESKGVVKFGWIKGVLVRCMLNIWGVMLFIRLSWIVGQAGIGLSVLVIMMATVVTTITGLSTSAIATNGFVRGGGAYYLISRSLGPEFGGAIGLIFAFANAVAVAMYVVGFAETVVELLKEHSILMIDEINDIRIIGAITVVILLGISVAGMEWEAKAQIVLLVILLLAIGDFVIGTFIPLESKKPKGFFGYKSEIFNENFGPDFREEETFFSVFAIFFPAATGILAGANISGDLADPQSAIPKGTLLAILITTLVYVGIAVSVGSCVVRDATGNVNDTIVTELTNCTSAACKLNFDFSSCESSPCSYGLMNNFQVMSMVSGFTPLISAGIFSATLSSALASLVSAPKIFQALCKDNIYPAFQMFAKGYGKNNEPLRGYILTFLIALGFILIAELNVIAPIISNFFLASYALINFSVFHASLAKSPGWRPAFKYYNMWISLLGAILCCIVMFVINWWAALLTYVIVLGLYIYVTYKKPDVNWGSSTQALTYLNALQHSIRLSGVEDHVKNFRPQCLVMTGAPNSRPALLHLVHDFTKNVGLMICGHVHMGPRRQAMKEMSIDQAKYQRWLIKNKMKAFYAPVHADDLREGAQYLMQAAGLGRMKPNTLVLGFKKDWLQADMRDVDMYINLFHDAFDIQYGVVVIRLKEGLDISHLQGQEELLSSQEKSPGTKDVVVSVEYSKKSDLDTSKPLSEKPITHKVEEEDGKTATQPLLKKESKGPIVPLNVADQKLLEASTQFQKKQGKNTIDVWWLFDDGGLTLLIPYLLTTKKKWKDCKIRVFIGGKINRIDHDRRAMATLLSKFRIDFSDIMVLGDINTKPKKENIIAFEEIIEPYRLHEDDKEQDIADKMKEDEPWRITDNELELYKTKFYEPC

SEQ ID NO: 17797 - protein, 283 aa, Homo sapiens
MSEAGEEQPMETTGATENGHEAVPEGESPAGAGTGAAAGAGGATAAPPSGNQNGAEGDQINASKNEEDAGKMFVGGLSWDTSKKDLKDYFTKFGEVVDCTIKMDPNTGRSRGFGFILFKDAASVEKVLDQKEHRLDGRVIDPKKAMAMKKDPVKKIFVGGLNPEATEEKIREYFGEFGEIEAIELPMDPKLNKRRGFVFITFKEEEPVKKVLEKKFHTVSGSKCEIKVAQPKEVYQQQQYGSGGRGNRNRGNRGSGGGGGGQGSTNYGKSQRRGGHQNNYKPY

SEQ ID NO: 17798 - protein, 157 aa, Homo sapiens
MKNHLLFWGVLAVFIKAVHVKENGIHSEFRAQEDERIVLVDNKCKCARITSRIIRSSEDPNEDIVERNIRIIVPLNNRENISDPTSPLRTRFVYHLSDLCKKCDPTEVELDNQIVTATQSNICDEDSATETCYTYDRNKCYTAVVPLVYGGETKMVE

SEQ ID NO: 17799 - protein, 857 aa, Homo sapiens
MFWRRRKCDVMPIVLVRPTNRTRRLDSTGAGMGPSSHQQQESPLPTITHCAGCTTAWSPCSFNSPDMETPLQFQRGFFPEQPPPPPRSSHLHCQQQQQSQDKPCPPFAPLPHPHHHPHLAHQQPASGGSSPCLRCNSCASSGAPAAGAGDNLSLLLRTSSPGGAFRTRTSSPLSGSSCCCCCCSSRRGSQLNVSELTPSSHASALRQQYAQQSAQQSASASQYHQCHSLQPAASPTGSLGSLGSGPPLSHHHHHPHPAHHQHHQPQARRESNPFTEIAMSSCRYNGGVMRPLSNLSASRRNLHEMDSEAQPLQPPASVGGGGGASSPSAAAAAAAAVSSSAPEIVVSKPEHNNSNNLALYGTGGGGSTGGGGGGGGSGHGSSSGTKSSKKKNQNIGYKLGHRRALFEKRKRLSDYALIFGMFGIVVMVIETELSWGAYDKASLYSLALKCLISLSTIILLGLIIVYHAREIQLFMVDNGADDWRIAMTYERIFFICLEILVCAIHPIPGNYTFTWTARLAFSYAPSTTTADVDIILSIPMFLRLYLIARVMLLHSKLFTDASSRSIGALNKINFNTRFVMKTLMTICPGTVLLVFSISLWIIAAWTVRACERYHDQQDVTSNFLGAMWLISITFLSIGYGDMVPNTYCGKGVCLLTGIMGAGCTALVVAVVARKLELTKAEKHVHNFMMDTQLTKRVKNAAANVLRETWLIYKNTKLVKKIDHAKVRKHQRKFLQAIHQLRSVKMEQRKLNDQANTLVDLAKTQNIMYDMISDLNERSEDFEKRIVTLETKLETLIGSIHALPGLISQTIRQQQRDFIEAQMESYDKHVTYNAERSRSSSRRRRSSSTAPPTSSESS

SEQ ID NO: 17800 - protein, 983 aa, Homo sapiens
MQPTYLPWLSAKEKKTNEWNKNDDRLLQAVENGDAEKVASLLGKKGASATKHDSEGKTAFHLAAAKGHVECLRVMITHGVDVTAQDTTGHSALHLAAKNSHHECIRKLLQSKCPAESVDSSGKTALHYAAAQGCLQAVQILCEHKSPINLKDLDGNIPLLLAVQNGHSEICHFLLDHGADVNSRNKSGRTALMLACEIGSSNAVEALIKKGADLNLVDSLGYNALHYSKLSENAGIQSLLLSKISQDADLKTPTKPKQHDQVSKISSERSGTPKKRKAPPPPISPTQLSDVSSPRSITSTPLSGKESVFFAEPPFKAEISSIRENKDRLSDSTTGADSLLDISSEADQQDLLSLLQAKVASLTLHNKELQDKLQAKSPKEAEADLSFDSYHSTQTDLGPSLGKPGETSPPDSKSSPSVLIHSLGKSTTDNDVRIQQLQEILQDLQKRLESSEAERKQLQVELQSRRAELVCLNNTEISENSSDLSQKLKETQSKYEEAMKEVLSVQKQMKLGLVSPESMDNYSHFHELRVTEEEINVLKQDLQNALEESERNKEKVRELEEKLVEREKGTVIKPPVEEYEEMKSSYCSVIENMNKEKAFLFEKYQEAQEEIMKLKDTLKSQMTQEASDEAEDMKEAMNRMIDELNKQVSELSQLYKEAQAELEDYRKRKSLEDVTAEYIHKAEHEKLMQLTNVSRAKAEDALSEMKSQYSKVLNELTQLKQLVDAQKENSVSITEHLQVITTLRTAAKEMEEKISNLKEHLASKEVEVAKLEKQLLEEKAAMTDAMVPRSSYEKLQSSLESEVSVLASKLKESVKEKEKVHSEVVQIRSEVSQVKREKENIQTLLKSKEQEVNELLQKFQQAQEELAEMKRYAESSSKLEEDKDKKINEMSKEVTKLKEALNSLSQLSYSTSSSKRQSQQLEALQQQVKQLQNQLAECKKQHQEVISVYRMHLLYAVQGQMDEDVQKVLKQILTMCKNQSQKK

SEQ ID NO: 17801 - protein, 340 aa, Homo sapiens
MADEKPSNGVLVHMVKLLIKTFLDGIFDDLMENNVLNTDEIHLIGKCLKFVVSNAENLVDDITETAQIAGKIFREHLWNSKKQLSSDISSDGEREANMPGLNIRNKEFNYLHNRNGSELDLLGMDLLENLGYSVVIKENLTAQEMETALRQFAAHPEHQSSDSTFLVFMSHSILNGICGTKHWDQEPDVLHDDTIFEIFNNRNCQSLKDKPKVIIMQACRGNGAGIVWFTTDSGKASADTHGRLLQGNICNDAVTKAHVEKDFIAFKSSTPHNVSWRHETNGSVFISQIIYYFREYSWSHHLEEIFQKVQHSFETPNILTQLPTIERLSMTRYFYLFPGN

SEQ ID NO: 17802 - protein, 2490 aa, Homo sapiens
MVETAAEMEAYVLEDILEVESFILDQDDLENPMLETASKLLLSGTADGADLRTVDPETQARLEALLEAAGIGKLSTADGKAFADPEVLRRLTSSVSCALDEAAAALTRMRAESTANAGQSDNRSLAEACSEGDVNAVRKLLIEGRSVNEHTEEGESLLCLACSAGYYELAQVLLAMHANVEDRGIKGDITPLMAAANGGHVKIVKLLLAHKADVNAQSSTGNTALTYACAGGYVDVVKVLLESGASIEDHNENGHTPLMEAGSAGHVEVARLLLENGAGINTHSNEFKESALTLACYKGHLEMVRFLLEAGADQEHKTDEMHTALMEACMDGHVEVARLLLDSGAQVNMPADSFESPLTLAACGGHVELAALLIERGASLEEVNDEGYTPLMEAAREGHEEMVALLLGQGANINAQTEETQETALTLACCGGFLEVADFLIKAGADIELGCSTPLMEAAQEGHLELVKYLLAAGANVHATTATGDTALTYACENGHTDVADVLLQAGADLEHESEGGRTPLMKAARAGHVCTVQFLISKGANVNRTTANNDHTVLSLACAGGHLAVVELLLAHGADPTHRLKDGSTMLIEAAKGGHTSVVCYLLDYPNNLLSAPPPDVTQLTPPSHDLNRAPRVPVQALPMVVPPQEPDKPPANVATTLPIRNKAASKQKSSSHLPANSQDVQGYITNQSPESIVEEAQGKLTELEQRIKEAIEKNAQLQSLELAHADQLTKEKIEELNKTREEQIQKKQKILEELQKVERELQLKTQQQLKKQYLEVKAQRIQLQQQQQQSCQHLGLLTPVGVGEQLSEGDYARLQQVDPVLLKDEPQQTAAQMGFAPIQPLAMPQALPLAAGPLPPGSIANLTELQGVIVGQPVLGQAQLAGLGQGILTETQQGLMVASPAQTLNDTLDDIMAAVSGRASAMSNTPTHSIAASISQPQTPTPSPIISPSAMLPIYPAIDIDAQTESNHDTALTLACAGGHEELVQTLLERGASIEHRDKKGFTPLILAATAGHVGVVEILLDNGADIEAQSERTKDTPLSLACSGGRQEVVELLLARGANKEHRNVSDYTPLSLAASGGYVNIIKILLNAGAEINSRTGSKLGISPLMLAAMNGHTAAVKLLLDMGSDINAQIETNRNTALTLACFQGRTEVVSLLLDRKANVEHRAKTGLTPLMEAASGGYAEVGRVLLDKGADVNAPPVPSSRDTALTIAADKGHYKFCELLIGRGAHIDVRNKKGNTPLWLAANGGHLDVVQLLVQAGADVDAADNRKITPLMAAFRKGHVKVVRYLVKEVNQFPSDSECMRYIATITDKEMLKKCHLCMESIVQAKDRQAAEANKNASILLEELDLEKLREESRRLALAAKREKRKEKRRKKKEEQRRKLEEIEAKNKENFELQAAQEKEKLKVEDEPEVLTEPPSATTTTTIGISATWTTLAGSHGKRNNTITTTSSKRKNRKNKITPENVQIIFDDPLPISYSQPEKVNGESKSSSTSESGDSDNMRISSCSDESSNSNSSRKSDNHSPAVVTTTVSSKKQPSVLVTFPKEERKSVSGKASIKLSETISEGTSNSLSTCTKSGPSPLSSPNGKLTVASPKRGQKREEGWKEVVRRSKKVSVPSTVISRVIGRGGCNINAIREFTGAHIDIDKQKDKTGDRIITIRGGTESTRQATQLINALIKDPDKEIDELIPKNRLKSSSANSKIGSSAPTTTAANTSLMGIKMTTVALSSTSQTATALTVPAISSASTHKTIKNPVNNVRPGFPVSLPLAYPPPQFAHALLAAQTFQQIRPPRLPMTHFGGTFPPAQSTWGPFPVRPLSPARATNSPKPHMVPRHSNQNSSGSQVNSAGSLTSSPTTTTSSSASTVPGTSTNGSPSSPSVRRQLFVTVVKTSNATTTTVTTTASNNNTAPTNATYPMPTAKEHYPVSSPSSPSPPAQPGGVSRNSPLDCGSASPNKVASSSEQEAGSPPVVETTNTRPPNSSSSSGSSSAHSNQQQPPGSVSQEPRPPLQQSQVPPPEVRMTVPPLATSSAPVAVPSTAPVTYPMPQTPMGCPQPTPKMETPAIRPPPHGTTAPHKNSASVQNSSVAVLSVNHIKRPHSVPSSVQLPSTLSTQSACQNSVHPANKPIAPNFSAPLPFGPFSTLFENSPTSAHAFWGGSVVSSQSTPESMLSGKSSYLPNSDPLHQSDTSKAPGFRPPLQRPAPSPSGIVNMDSPYGSVTPSSTHLGNFASNISGGQMYGPGAPLGGAPAAANFNRQHFSPLSLLTPCSSASNDSSAQSVSSGVRAPSPAPSSVPLGSEKPSNVSQDRKVPVPIGTERSARIRQTGTSAPSVIGSNLSTSVGHSGIWSFEGIGGNQDKVDWCNPGMGNPMIHRPMSDPGVFSQHQAMERDSTGIVTPSGTFHQHVPAGYMDFPKVGGMPFSVYGNAMIPPVAPIPDGAGGPIFNGPHAADPSWNSLIKMVSSSTENNGPQTVWTGPWAPHMNSVHMNQLG

SEQ ID NO: 17803 - protein, 222 aa, Homo sapiens
MVRSGKNGDLHLKQIAYYKRTGEYHSTTLPSERSGIRRAAKKFVFKEKKLFYVGKDRKQNRLVIVSEEEKKKVLRECHENDSGAHHGISRTLTLVESNYYWTSVTNDVKQWVYACQHCQVAKNTVIVAPKQHLLKVENPWSLVTVDLMGPFHTSNRSHVYAIIMTDLFTKWIVILPLCDVSASEVSKAIINIFFLYGPPQKIIMDQRDEFIQQKVFISCKVQ

SEQ ID NO: 17804 - protein, 229 aa, Homo sapiens
MNLHFVFIFSKVIHSSWFLNTCLKIGLTFLCPWGAPTIFETMRKFGERPPPKRLTREAMRNYLKERGDQTVLILHAKVAQKSYGNEKRFFCPPPCVYLMGSGWKKKKEQMERDGCSEQESQPCAFIGIGNSDQEMQQLNLEGKNYCTAKTLYISDSDKRKHFMLSVKMFYGNSDDIGVFLSKRIKVISKPSKKKQSLKNADLCIASGTKVALFNRLRSQTVSTRYLHVE

SEQ ID NO: 17805 - protein, 2298 aa, Homo sapiens
MDEEEDGAGAEESGQPRSFMRLNDLSGAGGRPGPGSAEKDPGSADSEAEGLPYPALAPVVFFYLSQDSRPRSWCLRTVCNPWFERISMLVILLNCVTLGMFRPCEDIACDSQRCRILQAFDDFIFAFFAVEMVVKMVALGIFGKKCYLGDTWNRLDFFIVIAGMLEYSLDLQNVSFSAVRTVRVLRPLRAINRVPSMRILVTLLLDTLPMLGNVLLLCFFVFFIFGIVGVQLWAGLLRNRCFLPENFSLPLSVDLERYYQTENEDESPFICSQPRENGMRSCRSVPTLRGDGGGGPPCGLDYEAYNSSSNTTCVNWNQYYTNCSAGEHNPFKGAINFDNIGYAWIAIFQVITLEGWVDIMYFVMDAHSFYNFIYFILLIIVGSFFMINLCLVVIATQFSETKQRESQLMREQRVRFLSNASTLASFSEPGSCYEELLKYLVYILRKAARRLAQVSRAAGVRVGLLSSPAPLGGQETQPSSSCSRSHRRLSVHHLVHHHHHHHHHYHLGNGTLRAPRASPEIQDRDANGSRRLMLPPPSTPALSGAPPGGAESVHSFYHADCHLEPVRCQAPPPRSPSEASGRTVGSGKVYPTVHTSPPPETLKEKALVEVAASSGPPTLTSLNIPPGPYSSMHKLLETQSTGACQSSCKISSPCLKADSGACGPDSCPYCARAGAGEVELADREMPDSDSEAVYEFTQDAQHSDLRDPHSRRQRSLGPDAEPSSVLAFWRLICDTFRKIVDSKYFGRGIMIAILVNTLSMGIEYHEQPEELTNALEISNIVFTSLFALEMLLKLLVYGPFGYIKNPYNIFDGVIVVISVWEIVGQQGGGLSVLRTFRLMRVLKLVRFLPALQRQLVVLMKTMDNVATFCMLLMLFIFIFSILGMHLFGCKFASERDGDTLPDRKNFDSLLWAIVTVFQILTQEDWNKVLYNGMASTSSWAALYFIALMTFGNYVLFNLLVAILVEGFQAEGDANKSESEPDFFSPSLDGDGDRKKCLALVSLGEHPELRKSLLPPLIIHTAATPMSLPKSTSTGLGEALGPASRRTSSSGSAEPGAAHEMKSPPSARSSPHSPWSAASSWTSRRSSRNSLGRAPSLKRRSPSGERRSLLSGEGQESQDEEESSEEERASPAGSDHRHRGSLEREAKSSFDLPDTLQVPGLHRTASGRGSASEHQDCNGKSASGRLARALRPDDPPLDGDDADDEGNLSKGERVRAWIRARLPACCLERDSWSAYIFPPQSRFRLLCHRIITHKMFDHVVLVIIFLNCITIAMERPKIDPHSAERIFLTLSNYIFTAVFLAEMTVKVVALGWCFGEQAYLRSSWNVLDGLLVLISVIDILVSMVSDSGTKILGMLRVLRLLRTLRPLRVISRAQGLKLVVETLMSSLKPIGNIVVICCAFFIIFGILGVQLFKGKFFVCQGEDTRNITNKSDCAEASYRWVRHKYNFDNLGQALMSLFVLASKDGWVDIMYDGLDAVGVDQQPIMNHNPWMLLYFISFLLIVAFFVLNMFVGVVVENFHKCRQHQEEEEARRREEKRLRRLEKKRRSKEKQMAEAQCKPYYSDYSRFRLLVHHLCTSHYLDLFITGVIGLNVVTMAMEHYQQPQILDEALKICNYIFTVIFVLESVFKLVAFGFRRFFQDRWNQLDLAIVLLSIMGITLEEIEVNASLPINPTIIRIMRVLRIARVLKLLKMAVGMRALLDTVMQALPQVGNLGLLFMLLFFIFAALGVELFGDLECDETHPCEGLGRHATFRNFGMAFLTLFRVSTGDNWNGIMKDTLRDCDQESTCYNTVISPIYFVSFVLTAQFVLVNVVIAVLMKHLEESNKEAKEEAELEAELELEMKTLSPQPHSPLGSPFLWPGVEGPDSPDSPKPGALHPAAHARSASHFSLEHPTDRQLFDTISLLIQGSLEWELKLMDELAGPGGQPSAFPSAPSLGGSDPQMQPHPTELPGPDLLTVRKSGVSRTHSLPNDSYMCRHGSTAEGPLGHRGWGLPKAQSGSVLSVHSQPADTSYILQLPKDAPHLLQPHSAPTWGTIPKLPPPGRSPLAQRPLRRQAAIRTDSLDVQGLGSREDLLAEVSGPSPPLARAYSFWGQSSTQAQQHSRSHSKISKHMTPPAPCPGPEPNWGKGPPETRSSLELDTELSWISGDLLPPGGQEEPPSPRDLKKCYSVEAQSCQRRPTSWLDEQRRHSIAVSCLDSGSQPHLGTDPSNLGGQPLGGPGSRPKKKLSPPSITIDPPESQGPRTPPSPGICLRRRAPSSDSKDPLASGPPDSMAASPSPKKDVLSLSGLSSDPADLDP

SEQ ID NO: 17806 - protein, 683 aa, Homo sapiens
MACEIMPLQSAHVPQVSNVSATGELLERTIRSAVEQHLFDVNNSGGQSSEDSESGTLSASSATSARQRRRQSKEQDEVRHGRDKGLINKENTPSGFNHLDDCILNTQEVEKVHKNTFGCAGERSKPKRQKSSTKLSELHDNQDGLVNMESLNSTRSHERTGPDDFEWMSDERKGNEKDGGHTQHFESPTMKIQEHPSLSDTKQQRNQDAGDQEESFVSEVPQSDLTALCDEKNWEEPIPAFSSWQRENSDSDEAHLSPQAGRLIRQLLDEDSDPMLSPRFYAYGQSRQYLDDTEVPPSPPNSHSFMRRRSSSLGSYDDEQEDLTPAQLTRRIQSLKKKIRKFEDRFEEEKKYRPSHSDKAANPEVLKWTNDLAKFRRQLKESKLKISEEDLTPRMRQRSNTLPKSFGSQLEKEDEKKQELVDKAIKPSVEATLESIQRKLQEKRAESSRPEDIKDMTKDQIANEKVALQKALLYYESIHGRPVTKNERQVMKPLYDRYRLVKQILSRANTIPIIGSPSSKRRSPLLQPIIEGETASFFKEIKEEEEGSEDDSNVKPDFMVTLKTDFSARCFLDQFEDDADGFISPMDDKIPSKCSQDTGLSNLHAASIPELLEHLQEMREEKKRIRKKLRDFEDNFFRQNGRNVQKEDRTPMAEEYSEYKHIKAKLRLLEVLISKRDTDSKSM

SEQ ID NO: 17807 - protein, 176 aa, Homo sapiens
MPVERMRMRPWLEEQINSNTIPGLKWLNKEKKIFQIPWMHAARHGWDVEKDAPLFRNWAIHTGKHQPGVDKPDPKTWKANFRCAMNSLPDIEEVKDKSIKKGNNAFRVYRMLPLSERPSKKGKKPKTEKEDKVKHIKQEPVESSLGLSNGVSDLSPEYAVLTSTIKNEVDSTVNII

SEQ ID NO: 17808 - protein, 87 aa, Homo sapiens
MRLLLALLGVLLSVPGPPVLSLEASEEVELEPCLAPSLEQQEQELTVALGQPVRLCCGRAERGGHWYKEGSRLAPAGRVRGWRGRLE

SEQ ID NO: 17809 - protein, 229 aa, Homo sapiens
MALQGISVVELSGLAPGPFCAMVLADFGARVVRVDRPGSRYDVSRLGRGKRSLVLDLKQPRGAAVLRRLCKRSDVLLEPFRRGVMEKLQLGPEILQRENPRLIYARLSGFGQSGSFCRLAGHDINYLALSGGRNSIFKFFSVENSEIESVGSTSRTEHVGWWSTFLYDLQDSRWGIHGCWSNRTPVLRAADQRSLIPYFNLYLQFLNISMQNLFKVHTLLRPCYFLGQK

SEQ ID NO: 17810 - protein, 1753 aa, Homo sapiens
MDEEEDGAGAEESGQPRSFMRLNDLSGAGGRPGPGSAEKDPGSADSEAEGLPYPALAPVVFFYLSQDSRPRSWCLRTVCNPWFERISMLVILLNCVTLGMFRPCEDIACDSQRCRILQAFDDFIFAFFAVEMVVKMVALGIFGKKCYLGDTWNRLDFFIVIAGMLEYSLDLQNVSFSAVRTVRVLRPLRAINRVPSMRILVTLLLDTLPMLGNVLLLCFFVFFIFGIVGVQLWAGLLRNRCFLPENFSLPLSVDLERYYQTENEDESPFICSQPRENGMRSCRSVPTLRGDGGGGPPCGLDYEAYNSSSNTTCVNWNQYYTNCSAGEHNPFKGAINFDNIGYAWIAIFQVITLEGWVDIMYFVMDAHSFYNFIYFILLIIVGSFFMINLCLVVIATQFSETKQRESQLMREQRVRFLSNASTLASFSEPGSCYEELLKYLVYILRKAARRLAQVSRAAGVRVGLLSSPAPLGGQETQPSSSCSRSHRRLSVHHLVHHHHHHHHHYHLGNGTLRAPRASPEIQDRDANGSRRLMLPPPSTPALSGAPPGGAESVHSFYHADCHLEPVRCQAPPPRSPSEASGRTVGSGKVYPTVHTSPPPETLKEKALVEVAASSGPPTLTSLNIPPGPYSSMHKLLETQSTGACQSSCKISSPCLKADSGACGPDSCPYCARAGAGEVELADREMPDSDSEAVYEFTQDAQHSDLRDPHSRRQRSLGPDAEPSSVLAFWRLICDTFRKIVDSKYFGRGIMIAILVNTLSMGIEYHEQPEELTNALEISNIVFTSLFALEMLLKLLVYGPFGYIKNPYNIFDGVIVVISVWEIVGQQGGGLSVLRTFRLMRVLKLVRFLPALQRQLVVLMKTMDNVATFCMLLMLFIFIFSILGMHLFGCKFASERDGDTLPDRKNFDSLLWAIVTVFQILTQEDWNKVLYNGMASTSSWAALYFIALMTFGNYVLFNLLVAILVEGFQAEGDANKSESEPDFFSPSLDGDGDRKKCLALVSLGEHPELRKSLLPPLIIHTAATPMSLPKSTSTGLGEALGPASRRTSSSGSAEPGAAHEMKSPPSARSSPHSPWSAASSWTSRRSSRNSLGRAPSLKRRSPSGERRSLLSGEGQESQDEEESSEEERASPAGSDHRHRGSLEREAKSSFDLPDTLQVPGLHRTASGRGSASEHQDCNGKSASGRLARALRPDDPPLDGDDADDEGNLSKGERVRAWIRARLPACCLERDSWSAYIFPPQSRFRLLCHRIITHKMFDHVVLVIIFLNCITIAMERPKIDPHSAERIFLTLSNYIFTAVFLAEMTVKVVALGWCFGEQAYLRSSWNVLDGLLVLISVIDILVSMVSDSGTKILGMLRVLRLLRTLRPLRVISRAQGLKLVVETLMSSLKPIGNIVVICCAFFIIFGILGVQLFKGKFFVCQGEDTRNITNKSDCAEASYRWVRHKYNFDNLGQALMSLFVLASKDGWVDIMYDGLDAVGVDQQPIMNHNPWMLLYFISFLLIVAFFVLNMFVGVVVENFHKCRQHQEEEEARRREEKRLRRLEKKRRNLMLDDVIASGSSASAASEAQCKPYYSDYSRFRLLVHHLCTSHYLDLFITGVIGLNVVTMAMEHYQQPQILDEALKICNYIFTVIFVLESVFKLVAFGFRRFFQDRWNQLDLAIVLLSIMGITLEEIEVNASLPINPTIIRIMRVLRIARVLKLLKMAVGMRALLDTVMQALPQLWAWSSLETWSVTRHTPVRAWAVMPPFGTLAWPS

SEQ ID NO: 17811 - protein, 765 aa, Homo sapiens
MASTRSIELEHFEERDKRPRPGSRRGAPSSSGGSSSSGPKGNGLIPSPAHSAHCSFYRTRTLQALSSEKKAKKARFYRNGDRYFKGLVFAISSDRFRSFDALLIELTRSLSDNVNLPQGVRTIYTIDGSRKVTSLDELLEGESYVCASNEPFRKVDYTKNINPNWSVNIKGGTSRALAAASSVKSEVKESKDFIKPKLVTVIRSGVKPRKAVRILLNKKTAHSFEQVLTDITEAIKLDSGVVKRLCTLDGKQVTCLQDFFGDDDVFIACGPEKFRYAQDDFVLDHSECRVLKSSYSRSSAVKYSGSKSPGPSRRSKSPASVNGTPSSQLSTPKSTKSSSSSPTSPGSFRGLKISAHGRSSSNVNGGPELDRCISPEGVNGNRCSESSTLLEKYKIGKVIGDGNFAVVKECIDRSTGKEFALKIIDKAKCCGKEHLIENEVSILRRVKHPNIIMLVEEMETATELFLVMELVKGGDLFDAITSSTKYTERDGSAMVYNLANALRYLHGLSIVHRDIKPENLLVCEYPDGTKSLKLGDFGLATVVEGPLYTVCGTPTYVAPEIIAETGYGLKVDIWAAGVITYILLCGFPPFRSENNLQEDLFDQILAGKLEFPAPYWDNITDSAKELISQMLQVNVEARCTAGQILSHPWVSDDASQENNMQAEVTGKLKQHFNNALPKQNSTTTGVSVIMNTALDKEGQIFCSKHCQDSGRPGMEPISPVPPSVEEIPVPGEAVPAPTPPESPTPHPPPAAPGGERAGTWRRHRD

SEQ ID NO: 17812 - protein, 2250 aa, Homo sapiens
MDEEEDGAGAEESGQPRSFMRLNDLSGAGGRPGPGSAEKDPGSADSEAEGLPYPALAPVVFFYLSQDSRPRSWCLRTVCNPWFERISMLVILLNCVTLGMFRPCEDIACDSQRCRILQAFDDFIFAFFAVEMVVKMVALGIFGKKCYLGDTWNRLDFFIVIAGMLEYSLDLQNVSFSAVRTVRVLRPLRAINRVPSMRILVTLLLDTLPMLGNVLLLCFFVFFIFGIVGVQLWAGLLRNRCFLPENFSLPLSVDLERYYQTENEDESPFICSQPRENGMRSCRSVPTLRGDGGGGPPCGLDYEAYNSSSNTTCVNWNQYYTNCSAGEHNPFKGAINFDNIGYAWIAIFQVITLEGWVDIMYFVMDAHSFYNFIYFILLIIVGSFFMINLCLVVIATQFSETKQRESQLMREQRVRFLSNASTLASFSEPGSCYEELLKYLVYILRKAARRLAQVSRAAGVRVGLLSSPAPLGGQETQPSSSCSRSHRRLSVHHLVHHHHHHHHHYHLGNGTLRAPRASPEIQDRDANGSRRLMLPPPSTPALSGAPPGGAESVHSFYHADCHLEPVRCQAPPPRSPSEASGRTVGSGKVYPTVHTSPPPETLKEKALVEVAASSGPPTLTSLNIPPGPYSSMHKLLETQSTGACQSSCKISSPCLKADSGACGPDSCPYCARAGAGEVELADREMPDSDSEAVYEFTQDAQHSDLRDPHSRRQRSLGPDAEPSSVLAFWRLICDTFRKIVDSKYFGRGIMIAILVNTLSMGIEYHEQPEELTNALEISNIVFTSLFALEMLLKLLVYGPFGYIKNPYNIFDGVIVVISVWEIVGQQGGGLSVLRTFRLMRVLKLVRFLPALQRQLVVLMKTMDNVATFCMLLMLFIFIFSILGMHLFGCKFASERDGDTLPDRKNFDSLLWAIVTVFQILTQEDWNKVLYNGMASTSSWAALYFIALMTFGNYVLFNLLVAILVEGFQAEEISKREDASGQLSCIQLPVDSQGGDANKSESEPDFFSPSLDGDGDRKKCLALVSLGEHPELRKSLLPPLIIHTAATPMSLPKSTSTGLGEALGPASRRTSSSGSAEPGAAHEMKSPPSARSSPHSPWSAASSWTSRRSSRNSLGRAPSLKRRSPSGERRSLLSGEGQESQDEEESSEEERASPAGSDHRHRGSLEREAKSSFDLPDTLQVPGLHRTASGRGSASEHQDCNGKSASGRLARALRPDDPPLDGDDADDEGNLSKGERVRAWIRARLPACCLERDSWSAYIFPPQSRFRLLCHRIITHKMFDHVVLVIIFLNCITIAMERPKIDPHSAERIFLTLSNYIFTAVFLAEMTVKVVALGWCFGEQAYLRSSWNVLDGLLVLISVIDILVSMVSDSGTKILGMLRVLRLLRTLRPLRVISRAQGLKLVVETLMSSLKPIGNIVVICCAFFIIFGILGVQLFKGKFFVCQGEDTRNITNKSDCAEASYRWVRHKYNFDNLGQALMSLFVLASKDGWVDIMYDGLDAVGVDQQNFHKCRQHQEEEEARRREEKRLRRLEKKRRNLMLDDVIASGSSASAASEAQCKPYYSDYSRFRLLVHHLCTSHYLDLFITGVIGLNVVTMAMEHYQQPQILDEALKICNYIFTVIFVLESVFKLVAFGFRRFFQDRWNQLDLAIVLLSIMGITLEEIEVNASLPINPTIIRIMRVLRIARVLKLLKMAVGMRALLDTVMQALPQVGNLGLLFMLLFFIFAALGVELFGDLECDETHPCEGLGRHATFRNFGMAFLTLFRVSTGDNWNGIMKDTLRDCDQESTCYNTVISPIYFVSFVLTAQFVLVNVVIAVLMKHLEESNKEAKEEAELEAELELEMKTLSPQPHSPLGSPFLWPGVEGPDSPDSPKPGALHPAAHARSASHFSLEHPTMQPHPTELPGPDLLTVRKSGVSRTHSLPNDSYMCRHGSTAEGPLGHRGWGLPKAQSGSVLSVHSQPADTSYILQLPKDAPHLLQPHSAPTWGTIPKLPPPGRSPLAQRPLRRQAAIRTDSLDVQGLGSREDLLAEVSGPSPPLARAYSFWGQSSTQAQQHSRSHSKISKHMTPPAPCPGPEPNWGKGPPETRSSLELDTELSWISGDLLPPGGQEEPPSPRDLKKCYSVEAQSCQRRPTSWLDEQRRHSIAVSCLDSGSQPHLGTDPSNLGGQPLGGPGSRPKKKLSPPSITIDPPESQGPRTPPSPGICLRRRAPSSDSKDPLASGPPDSMAASPSPKKDVLSLSGLSSDPADLDP

SEQ ID NO: 17813 - protein, 836 aa, Homo sapiens
MSPEKQHREEDEVDSVLLSASKILNSSEGVKESGCSDTEYGCIAESENQIQPQSALKVLQQQLESFQALRMQTLQNVSMVQSEISEILNKSIIEVENPQFSSEKNLVFGTRIEKDLPTENQEENLSMEKSHHFEDSKTLHSVEEKLSGDSVNSLPQSVNVPSQIHSEDTLTLRTSTDNLSSNIIIHPSENSDILKNYNNFYRFLPTAPPNVMSQADTVILDKSKITVPFLKHGFCENLDDICHSIKQMKEELQKSHDGEVALTNELQTLQTDPDVHRNGKYDMSPIHQDKMNFIKEENLDGNLNEDIKSKRISELEALVKKLLPFRETVSKFHVHFCRKCKKLSKSEMHRGKKNEKNNKEIPITGKNITDLKFHSRVPRYTLSFLDQTKHEMKDKERQPFLVKQGSIISENEKTSKVNSVTEQCVAKIQYLQNYLKESVQIQKKVMELESENLNLKSKMKPLIFTTQSLIQKVETYEKQLKNLVEEKSTIQSKLSKTEEYSKECLKEFKKIISKYNVLQGQNKTLEEKNIQLSLEKQQMMEALDQLKSKEHKTQSDMAIVNNENNRMSIEMEAMKTNILLIQDEKEMLEKKTHQLLKEKSSLGNELKESQLEIIQLKEKERLAKTEQETLLQIIETVKDEKLNLETTLQESTAARQIMEREIENIQTYQSTAEENFLQEIKNAKSEASIYKNSLSEIGKECEMLSKMVMETKTDNQILKEELKKHSQENIKFENSISRLTEDKILLENYVRSIENERDTLEFEMRHLQREYLSLSDKICNQHNDPSKTTYISRREKFHFDNYTHEDTSSPQSRPLASDLKGIPSKLYHLLPSKIYK

SEQ ID NO: 17814 - protein, 1758 aa, Homo sapiens
MDEEEDGAGAEESGQPRSFMRLNDLSGAGGRPGPGSAEKDPGSADSEAEGLPYPALAPVVFFYLSQDSRPRSWCLRTVCNPWFERISMLVILLNCVTLGMFRPCEDIACDSQRCRILQAFDDFIFAFFAVEMVVKMVALGIFGKKCYLGDTWNRLDFFIVIAGMLEYSLDLQNVSFSAVRTVRVLRPLRAINRVPSMRILVTLLLDTLPMLGNVLLLCFFVFFIFGIVGVQLWAGLLRNRCFLPENFSLPLSVDLERYYQTENEDESPFICSQPRENGMRSCRSVPTLRGDGGGGPPCGLDYEAYNSSSNTTCVNWNQYYTNCSAGEHNPFKGAINFDNIGYAWIAIFQVITLEGWVDIMYFVMDAHSFYNFIYFILLIIVGSFFMINLCLVVIATQFSETKQRESQLMREQRVRFLSNASTLASFSEPGSCYEELLKYLVYILRKAARRLAQVSRAAGVRVGLLSSPAPLGGQETQPSSSCSRSHRRLSVHHLVHHHHHHHHHYHLGNGTLRAPRASPEIQDRDANGSRRLMLPPPSTPALSGAPPGGAESVHSFYHADCHLEPVRCQAPPPRSPSEASGRTVGSGKVYPTVHTSPPPETLKEKALVEVAASSGPPTLTSLNIPPGPYSSMHKLLETQSTGACQSSCKISSPCLKADSGACGPDSCPYCARAGAGEVELADREMPDSDSEAVYEFTQDAQHSDLRDPHSRRQRSLGPDAEPSSVLAFWRLICDTFRKIVDSKYFGRGIMIAILVNTLSMGIEYHEQPEELTNALEISNIVFTSLFALEMLLKLLVYGPFGYIKNPYNIFDGVIVVISVWEIVGQQGGGLSVLRTFRLMRVLKLVRFLPALQRQLVVLMKTMDNVATFCMLLMLFIFIFSILGMHLFGCKFASERDGDTLPDRKNFDSLLWAIVTVFQILTQEDWNKVLYNGMASTSSWAALYFIALMTFGNYVLFNLLVAILVEGFQAEEISKREDASGQLSCIQLPVDSQGGDANKSESEPDFFSPSLDGDGDRKKCLALVSLGEHPELRKSLLPPLIIHTAATPMSLPKSTSTGLGEALGPASRRTSSSGSAEPGAAHEMKSPPSARSSPHSPWSAASSWTSRRSSRNSLGRAPSLKRRSPSGERRSLLSGEGQESQDEEESSEEERASPAGSDHRHRGSLEREAKSSFDLPDTLQVPGLHRTASGRGSASEHQDCNGKSASGRLARALRPDDPPLDGDDADDEGNLSKGERVRAWIRARLPACCLERDSWSAYIFPPQSRFRLLCHRIITHKMFDHVVLVIIFLNCITIAMERPKIDPHSAERIFLTLSNYIFTAVFLAEMTVKVVALGWCFGEQAYLRSSWNVLDGLLVLISVIDILVSMVSDSGTKILGMLRVLRLLRTLRPLRVISRAQGLKLVVETLMSSLKPIGNIVVICCAFFIIFGILGVQLFKGKFFVCQGEDTRNITNKSDCAEASYRWVRHKYNFDNLGQALMSLFVLASKDGWVDIMYDGLDAVGVDQQPIMNHNPWMLLYFISFLLIVAFFVLNMFVGVVVENFHKCRQHQEEEEARRREEKRLRRLEKKRRKAQCKPYYSDYSRFRLLVHHLCTSHYLDLFITGVIGLNVVTMAMEHYQQPQILDEALKICNYIFTVIFVLESVFKLVAFGFRRFFQDRWNQLDLAIVLLSIMGITLEEIEVNASLPINPTIIRIMRVLRIARVLKLLKMAVGMRALLDTVMQALPQLWAWSSLETWSVTRHTPVRAWAVMPPFGTLAWPS

SEQ ID NO: 17815 - protein, 817 aa, Homo sapiens
MEIKEEGASEEGQHFLPTAQANDPGDCQFTSIQKTPNEPQLEFILACKDLVAPVRDRKLNTLVQISVIHPVEQSLTRYSSTEIVEGTRDPLFLTGVTFPSEYPIYEETKIKLTVYDVKDKSHDTVRTSVLPEHKDPPPEVGRSFLGYASFKVGELLKSKEQLLVLSLRTSDGGKVVGTIEVSVVKMGEIEDGEADHITTDVQGQKCALVCECTAPESVSGKDNLPFLNSVLKNPVCKLYRFPTSDNKWMRIREQMSESILSFHIPKELISLHIKEDLCRNQEIKELGELSPHWDNLRKNVLTHCDQMVNMYQDILTELSKETGSSFKSSSSKGEKTLEFVPINLHLQRMQVHSPHLKDALYDVITVGAPAAHFQGFKNGGLRKLLHRFETERRNTGYQFIYYSPENTAKAKEVLSNINQLQPLIATHADLLLNSASQHSPDSLKNSLKMLSEKTELFVHAFKDQLVRSALLALYTARPGGILKKPPSPKSSTEESSPQDQPPVMRGQDSIPHHSDYDEEEWDRVWANVGKSLNCIIAMVDKLIERDGGSEGSGGNNDGEKEPSLTDAIPSHPREDWYEQLYPLILTLKDCMGEVVNRAKQSLTFVLLQELAYSLPQCLMLTLRRDIVFSQALAGLVCGFIIKLQTSLYDPGFLQQLHTVGLIVQYEGLLSTYSDEIGMLEDMAVGISDLKKVAFKIIEAKSNDVLPVITGRREHYVVEVKLPARMFESLPLQIKEGQLLHVYPVLFNVGINEQQTLAERFGDVSLQESINQENFELLQEYYKIFMEKMPPDYISHFQEQNDLKALLENLLQNIQSKK

SEQ ID NO: 17816 - protein, 187 aa, Homo sapiens
METLCLRASFWLALVGCVISDNPERYSTNLSNHVDDFTTFRGTELSFLVTTHQPTNLVLPSNGSMHNYCPQQTKITSAFKYINTVISCTIFIVGMVGNATLLRIIYQNKCMRNGPNALIASLALGDLIYVVIDLPINVFKLLAGRWPFDHNDFGVFLCKLFPFLQKSSVGITVLNLCALSVDSSTKM

SEQ ID NO: 17817 - protein, 1006 aa, Homo sapiens
MTMKTKQRMLTEDWELFKQRRFIEEQLTNKKAVTGENNFTDTMRHMLSSRLSMPDCPNCNYRRRCACDDCSLSHILTCGIMDPPVTDDIHIHQLPLQVDPAPDYLAERSPPSVSSASSGSGSSSPITIQQHPRLILTDSGSAPTFCSDDEDVAPLSAKFADIYPLSNYDDTEVVANMNGIHSELNGGGENMALKDESPQISSTSSSSSEADDEEADGESSGEPPGAPKEDGVLGSRSPRTEESKADSPPPSYPTQQAEQAPNTCECHVCKQEASGLTPSAMTAGALPPGHQFLSPEKPTHPALHLYPHIHGHVPLHTVPHLPRPLIHPTLYATPPFTHSKALPPAPVQNHTNKHQVFNASLQDHIYPSCFGNTPEWNSSKFISLWGSEVMNDKNWNPGTFLPDTISGSEILGPTLSETRPEALPPPSSNETPAVSDSKEKKNAAKKKCLYNFQDAFMEANKVVMATSSATSSVSCTATTVQSSNSQFRVSSKRPPSVGDVFHGISKEDHRHSAPAAPRNSPTGLAPLPALSPAALSPAALSPASTPHLANLAAPSFPKTATTTPGFVDTRKSFCPAPLPPATDGSISAPPSVCSDPDCEGHRCENGVYDPQQDDGDESADEDSCSEHSSSTSTSTNQKEGKYCDCCYCEFFGHGGPPAAPTSRNYAEMREKLRLRLTKRKEEQPKKMDQISERESVVDHRRVEDLLQFINSSETKPVSSTRAAKRARHKQRKLEEKARLEAEARAREHLHLQEEQRRREEEEDEEEEEDRFKEEFQRLQELQKLRAVKKKKKERPSKDCPKLDMLTRNFQAATESVPNSGNIHNGSLEQTEEPETSSHSPSRHMNHSEPRPGLGADGDAADPVDTRDSKFLLPKEVNGKQHEPLSFFFDIMQHHKEGNGKQKLRQTSKASSEPARRPTEPPKATEGQSKPRAQTESKAKVVDLMSITEQKREERKVNSNNNNKKQLNHIKDEKSNPTPMEPTSPGEHQQNSKLVLAESPQPKGKNK

SEQ ID NO: 17818 - protein, 1930 aa, Homo sapiens
MEEGVQAPDWDSDETVIEGSVTESDLEEKELPWRRLLFDQDASLKSEFSLHPDTRGMCKGMPSPEIQLGFKLREDLQEQMNKNKMMPVLSEDTILQSQDETERNQALLQTRKNCSMFIGSFRQSGLSLNHQNIEGPEAESPEVLPHIEKELSEGRDSPEVSLLSGTAITVSDTVAVKETSLVEPEKILAAPNTFFEPRKEVTMTMTSEETKDEESSLETFVSALESLLTSPESTQEERLFELVSDFDRKELMNPLSDSLSSISIPLNSWSACHRDLLEDAKDDALPAELLEALNTLSEAKVETICHRKEGGSSLIARNECLEVEFNTSQTNEDCTQIAETLQDPNPSGLQTLAHQNITSCEPLSNKRNSNSVTNSSDQETACVLRRSSRLEKLKVSRDAKYSDHMYKMPEKILPKILGCEDLTNNNSSAQNFRMQDPALMIDGKEKNMHSARFKNGKQIRKNEQFSGKKEKMKVNKISLHSINRRNIFGENLVYKAALHDDADLVHHCIKKGGNVNQPSYAGWTALHEASVGGFYRTASELLKGGADVNIKGLYQITPLHDAVMNGHYKVAELLLLNGADPLFRNDDGKCALDEAKDLCMKRLLERYIPKHQKCLTSAQRSSIDPLDIEDVYQHKKPKFSSKSHIWHVYNENSNRQKLEHVKVNKGSKASLFINKEDVYEYYQKDPKNTKFGKSKHKQSTLDQIYSTGLRKGNLHNVKDPNTNVPKGIGRRKTQHKRTQVDDVDCNPRKILAVSPSRRINRLVTYQQHIPETHNDLPEELCEPSSLTLSSLRNGLDSSTEACSVSKEKHIQNLDLSDSQEVQCLELESVDQTEAVSFPGLLLHKEIKLPVVTTDKQPHTLQEQHHVLYKSHENSNLVPKDERFNKWENSFLSFVKENSDNDDDDDCSTSEKAITSKKVLCSTGGKKHYNFKENLTNKKEMGFQQFLLSEDHLSQENELKAVSLTTLPEQEAVNFSYSDNAVISEHVANYEQCIFGPSFDHSNGNPEQNSLACMRTLLTHEASKLTNHVELFKKPQDYIPRAPTFLMNQTDTHIVEKMAKNCDTERNYIDRDQKIIYSNEPLSIVAHSQVIETTKVEKRRQNHLESETIHNIDSHSTDNMSKELANISKLSQREKKEISHKPDEELTNNISGDEITIRNCEEIKEKTESEIHMPTNSQEHKTVQNFRKRQSFLKTTCNLGMKAGRINKRNARGESQLHLAVRRGNLPLVKALIESGADVNLNDNAGWTPLHEASNEGSIDIIVELLKAGAKVNCENIDGILPLHDAVANNHLKAAEILLQNGANPNQKDQKQKSALDEADDEKMKELLRSYGAIETVNRDESDAIVNEKIPAVRSKRHKQCFCDDGKTIDSSSLSHQERSRESLSVHQTLSAILQDIEEKQEYLLEFEIRNPEDAEQYIEKMLKIKKIMDNVLAKQKAERDDLAKKYRVSIESFKHGALREQLANLAARQKSLLVVAKKQKKISLKIQNCRNVTSLPCLSLRKLPPRSEISSEKDSQELTSLENLEHPQSGSLSPVSGSMQETQLSLETWNYSQNTNICLNSEAVRRGEFSGNDMNSKQNGSDCTLDGFPKSRHSDGTEKNKLPSQPVAFIGQTEYSQKENDLTEATDKDHEFYVSSPVIGKLNISETASVLAENAAHPSNIICDQDLSNYDPKRGNRKTSSQQSPTGASESLAHQGIAVLGSDTVHQMKPYLKKSVSVVPCADDSQISSSSGSGQQDTIKKALNYSTAPKKKCIQIKDLILLGRINPGNNILEFKTQETTHKASILLNGKLKVESGQIYKNPVTWLKDLLGGNSYVTWNYAWSKVTYLGKELLRYVSEDAPILPEPNSVPQQYQPCLPEVACLDDPVQEPNKSMFEKTKFGQGTSRESMQSSPRYLQINEILLISDQEFLPCHIMDQHWKFCVECEELTP

SEQ ID NO: 17819 - protein, 574 aa, Homo sapiens
MENWPTPSELVNTGFQSVLSQGNKKPQNRKEKEEKVEKRSNSDSKENRETKLNGPGENVSEDEAQSSNQRKRGWKRDREKRDDQDDVSSVRSEGGNIRGSFRGRGRGRGRGRGRGRGNPRLNFDYSYGYQEHGERTDQPFQTELNTSMMYYYDDGTGVQVYPVEEALLKEYIKRQIEYYFSVENLERDFFLRGKMDEQGFLPISLIAGFQRVQALTTNLNLILEALKDSTEVEIVDEKMRKKIEPEKWPIPGPPPRSVPPTDFSQLIDCPEFVPGQAFCSHTESAPNSPRIGSPLSPKKNSETSILQAMSRGLSTSLPDLDSEPWIEVKKRHQPAPVKLRESVSVPEGSLNQLCSSEEPEQEELDFLFDEEIEQIGRKNTFTDWSDNDSDYEIDDQDLNKILIVTQTPPYVKKHPGGDRTGTHMSRAKITSELAKVINDGLYYYEQDLWMEEDENKHTAIKQEVENFKKLNLISKEQFENLTPELPFEPNQEVPVAPSQSRQDLTDELAQKLFDVSEITSAAMVHSLPTAVPESPRIHPTRTPKTPRTPRLQDPNKTPRFYPVVKEPKAIDVKS

SEQ ID NO: 17820 - protein, 112 aa, Homo sapiens
NPTPSISWLKNGREFRGEHRIGGIKLRHQQWSLVMESVVPSDRGNYTCVVENKFGSIRQTYTLDVLERSPHRPILQAGLPANQTAVLGSDVEFHCKTAGANTTDKELEVLSL

SEQ ID NO: 17821 - protein, 471 aa, Homo sapiens
MGRESRHYRKRSASRGRSGSRSRSRSPSDKRSKRGDDRRSRSRDRDRRRERSRSRDKRRSRSRDRKRLRSRSKEKTDGGESSKEKKKDKDDKEDEKEKDAGNFDQNKLEEEMRKRKERVEKWREEQRKKAMENIGELKKEIEEMKQGKKWSLEDDDDDEDDPAEAEKEGNEMEGEELDPLDAYMEEVKEEVKKFNMRSVKGGGGNEKKSGPTVTKVVTVVTTKKAVVDSDKKKGELMENDQDAMEYSSEEEEVDLQTALTGYQTKQRKLLEPVDHGKIEYEPFRKNFYVEVPELAKMSQEEVNVFRLEMEGITVKGKGCPKPIKSWVQCGISMKILNSLKKHGYEKPTPIQTQAIPAIMSGRDLIGIAKTGSGKTIAFLLPMFRHIMDQRSLEEGEGPIAVIMTPTRELALQITKECKKFSKTLGLRVVCVYGGTGISEQIAELKRGAEIIVCTPGRMIDMLAANSGDAVR

SEQ ID NO: 17822 - protein, 777 aa, Homo sapiens
MVMAYFVENFWGEKNSGFDVLYHNMKHGQISTKELADFVRERATIEEAYSRSMTKLAKSASNYSQLGTFAPVWDVFKTSTEKLANCHLDLVRKLQELIKEVQKYGEEQVKSHKKTKEEVAGTLEAVQTIQSITQALQKSKENYNAKCVEQERLKKEGATQREIEKAAVKSKKATDTYKLYVEKYALAKADFEQKMTETAQVHEEFINNMANTTVESLIQKFAESKGTGKERPGLIEFEECDTASAVEGIKPRKRKTFALPGIIKKEKDAESVECPDADSLNIPDVDEEGYSIKPETNQNDTKENHFYSSSDSDSEDEEPKKYRIEIKPMHPNNSHHTMASLDELKVSIGNITLSPAISRHSPVQMNRNLSNEELTKSKPSAPPNEKGTSDLLAWDPLFGPSLDSSSSSSLTSSSSARPTTPLSVGTIVPPPRPASRPKLTSGKLSGINEIPRPFSPPVTSNTSPPPAAPLARAESSSSISSSASLSAANTPTVGVSRGPSPVSLGNQDTLPVAVALTESVNAYFKGADPTKCIVKITGDMTMSFPSGIIKVFTSNPTPAVLCFRVKNISRLEQILPNAQLVFSDPSQCDSNTKDFWMNMQAVTVYLKKLSEQNPAASYYNVDVLKYQVSSNGIQSTPLNLATYWKCSASTTDLRVDYKYNPEAMVAPSVLSNIQVVVPVDGGVTNMQSLPPAIWNAEQMKAFWKLSSISEKSENGGSGSLRAKFDLSEGPSKPTTLAVQFLSEGSTLSGVDFELVGTGYRLSLIKKRFATGRYLADC

SEQ ID NO: 17823 - protein, 362 aa, Homo sapiens
MDSDDEMVEEAVEGHLDDDGLPHGFCTVTYSSTDRFEGNFVHGEKNGRGKFFFFDGSTLEGYYVDDALQGQGVYTYEDGGVLQGTYVDGELNGPAQEYDTDGRLIFKGQYKDNIRHGVCWIYYPDGGSLVGEVNEDGEMTGEKIAYVYPDERTALYGKFIDGEMIEGKLATLMSTEEGRPHFELMPGNSVYHFDKSTSSCISTNALLPDPYESERVYVAESLISSAGEGLFSKVAVGPNTVMSFYNGVRITHQEVDSRDWALNGNTLSLDEETVIDVPEPYNHVSKYCASLGHKANHSFTPNCIYDIGQKNHLGTCKRSRFGAPLPKIPHLDQAPWVEHRKAGIPLYSAAQGLMLIMMFVSN

SEQ ID NO: 17824 - protein, 177 aa, Homo sapiens
MVATGSLSSKNPASISELLDCGYHPESLLSDFDYWDYVVPEPNLNEVIFEESTCQNLVKMLENCLSKSKQTKLGCSKVLVPEKLTQRIAQDVLRLSSTEPCGLRGCVMHVNLEIENVCKKLDRIVCDSSVVPTFELTLVFKQENCSWTSFRDFFFSRGRFSSGFRRTLILSSGFRLV

SEQ ID NO: 17825 - protein, 531 aa, Homo sapiens
MSVVGIDLGFLNCYIAVARSGGIETIANEYSDRCTPACISLGSRTRAIGNAAKSQIVTNVRNTIHGFKKLHGRSFDDPIVQTERIRLPYELQKMPNGSAGVKIPSFFTDAERRSVMAAAQVAGLNCLRLMNETTAVALAYGIYKQDLPPLDEKPRNVVFIDMGHSAYQVLVCAFNKGKLKVLATTFDPYLGGRNFDEALVDYFCDEFKTKYKINVKENSRALLRLYQECEKLKKLMSANASDLPLNIECFMNDLDVSSKMNRAQFEQLCASLLARVEPPLKAVMEQANLQREDISSIEIVGGATRIPAVKEQITKFFLKDISTTLNADEAVARGCALQCAILSPAFKVREFSITDLVPYSITLRWKTSFEDGSGECEVFCKNHPAPFSKVITFHKKEPFELEAFYTNLHEVPYPDARIGSFTIQNVFPQSDGDSSKVKVKVRVNIHGIFSVASASVIEKQNLEGDHSDAPMETETSFKNENKDNMDKMQVDQEEGHQKCHAEHTPEEEIDHTGAKTKSAVSDKQDRLNQTL

SEQ ID NO: 17826 - protein, 126 aa, Homo sapiens
MVLPPQASRKTKKKEGGALRAQRASSNVFSNFEQTQIQEFKEAFTLMDQNRDGFIDKEDLKDTYASLGKTNVKDDELDAMLKEASGPINFTMFLNLFGEKLSGTDAEETILNAFKMLDPDGKGKIN

SEQ ID NO: 17827 - protein, 822 aa, Homo sapiens
MRLHLLLLLALCGAGTTAAELSYSLRGNWSICNGNGSLELPGAVPGCVHSALFQQGLIQDSYYRFNDLNYRWVSLDNWTYSKEFKIPFEISKWQKVNLILEGVDTVSKILFNEVTIGETDNMFNRYEQCSFSWDWGPSFPTQGIWKDVRIEAYNICHLNYFTFSPIYDKSAQEWNLEIESTFDVVSSKPVGGQVIVAIPKLQTQQTYSIELQPGKRIVELFVNISKNITVETWWPHGHGNQTGYNMTVLFELDGGLNIEKSAKVYFRTVELIEEPIKGSPGLSFYFKINGFPIFLKGSNWIPADSFQDRVTSELLRLLLQSVVDANMNTLRVWGGGIYEQDEFYELCDELGIMVWQDFMFACALYPTDQGFLDSVTAEVAYQIKRLKSHPSIIIWSGNNENEEALMMNWYHISFTDRPIYIKDYVTLYVKNIRELVLAGDKSRPFITSSPTNGAETVAEAWVSQNPNSNYFGDVHFYDYISDCWNWKVFPKARFASEYGYQSWPSFSTLEKVSSTEDWSFNSKFSLHRQHHEGGNKQMLYQAGLHFKLPQSTDPLRTFKDTIYLTQVMQAQCVKTETEFYRRSRSEIVDQQGHTMGALYWQLNDIWQAPSWASLEYGGKWKMLHYFAQNFFAPLLPVGFENENTFYIYGVSDLHSDYSMTLSVRVHTWSSLEPVCSRVTERFVMKGGEAVCLYEEPVSELLRRCGNCTRESCVVSFYLSADHELLSPTNYHFLSSPKEAVGLCKAQITAIISQQGDIFVFDLETSAVAPFVWLDVGSIPGRFSDNGFLMTEKTRTILFYPWEPTSKNELEQSFHVTSLTDIY

SEQ ID NO: 17828 - protein, 489 aa, Homo sapiens
MSCGNEFVETLKKIGYPKADNLNGEDFDWLFEGVEDESFLKWFCGNVNEQNVLSERELEAFSILQKSGKPILEGAALDEALKTCKTSDLKTPRLDDKELEKLEDEVQTLLKLKNLKIQRRNKCQLMASVTSHKSLRLNAKEEEATKKLKQSQGILNAMITKISNELQALTDEVTQLMMFFRHSNLGQGTNPLVFLSQFSLEKYLSQEEQSTAALTLYTKKQFFQGIHEVVESSNEDNFQLLDIQTPSICDNQEILEERRLEMARLQLAYICAQHQLIHLKASNSSMKSSIKWAEESLHSLTSKAVDKENLDAKISSLTSEIMKLEKEVTQIKDRSLPAVVRENAQLLNMPVVKGDFDLQIAKQDYYTARQELVLNQLIKQKASFELLQLSYEIELRKHRDIYRQLENLVQELSQSNMMLYKQLEMLTDPSVSQQINPRNTIDTKDYSTHRLYQVLEGENKKKELFLTHGNLEEVAEAGEWHEPRRRGLQ

SEQ ID NO: 17829 - protein, 187 aa, Homo sapiens
MDISKGLPGMQGGLHIWISENRKMVPVPEGAYGNFFEEHCYVILHVPQSPKATQGASSDLHYWVGKQAGAEAQGAAEAFQQRLQDELGGQTVLHREAQGHESDCFCSYFRPGIIYRKGGLASDLKHVETNLFNIQRLLHIKGRKHVSATEVELSWNSFNKGDIFLLDLGKMMIQWNGPKTSISEKAR

SEQ ID NO: 17830 - protein, 894 aa, Homo sapiens
MIFWSFVAGVVTFYCSLGPDSLLPNIFFTIKYKPKQLGLQELFPQGHSCAVCGKVKCKRHRPSLLLENYQPWLDLKISSKVDASLSEVLELVLENFVYPWYRDVTDDESFVDELRITLRFFASVLIRRIHKVDIPSIITKKLLKAAMKHIEVIVKARQKVKNTEFLQQAALEEYGPELHVALRSRRDELHYLRKLTELLFPYILPPKATDCRSLTLLIREILSGSVFLPSLDFLADPDTVNHLLIIFIDDSPPEKATEPASPLVPFLQKFAEPRNKKPSVLKLELKQIREQQDLLFRFMNFLKQEGAVHVLQFCLTVEEFNDRILRPELSNDEMLSLHEELQKIYKTYCLDESIDKIRFDPFIVEEIQRIAEGPYIDVVKLQTMRCLFEAYEHVLSLLENVFTPMFCHSDEYFRQLLRGAESPTRNSKLNRGSLSLDDFRNTQKRGESFGISRIGSKIKGVFKSTTMEGAMLPNYGVAEGEDDFIEEGIVVMEDDSPVEAVSTPNTPRNLAAWKISIPYVDFFEDPSSERKEKKERIPVFCIDVERNDRRAVGHEPEHWSVYRRYLEFYVLESKLTEFHGAFPDAQLPSKRIIGPKNYEFLKSKREEFQEYLQKLLQHPELSNSQLLADFLSPNGGETQFLDKILPDVNLGKIIKSVPGKLMKEKGQHLEPFIMNFINSCESPKPKPSRPELTILSPTSENNKKLFNDLFKNNANRAENTERKQNQNYFMEVMTVEGVYDYLMYVGRVVFQVPDWLHHLLMGTRILFKNTLEMYTDYYLQCKLEQLFQEHRLVSLITLLRDAIFCENTEPRSLQDKQKGAKQTFEEMMNYIPDLLVKCIGEETKYESIRLLFDGLQQPVLNKQLTYVLLDIVIQELFPELNKVQKEVTSVTSWM

SEQ ID NO: 17831 - protein, 441 aa, Homo sapiens
WVWNQFFVLEEHMGPDPQYVGKLHSNSDKGDGSVKYILTGEGAGTIFIIDDTTGDIHSTKSLDREQKTHYVLHAQAIDRRTNKPLEPESEFIIKVQDINDNAPKFTDGPYIVTVPEMSDMGTSVLQVTATDADDPTYGNSARVVYSILQGQPYFSVDPKTGVIRTALHNMDREAREHYSVVIQAKDMAGQVGGLSGSTTVNITLTDVNDNPPRFPQKHYQLYVPESAQVGSAVGKIKANDADTGSNADMTYSIINGDGMGIFSISTDKETREGILSLKKPLNYEKKKSYTLNIEGANTHLDFRFSHLGPFKDATMLKIIVGDVDEPPLFSMPSYLMEVYENAKIGTVVGTVLAQDPDSTNSLVRYFINYNVEDDRFFNIDANTGTIRTTKVLDREETPWYNITVTASEIAAAAPSPSGFVHAREMGVCGPAMQKPSCPRLV

SEQ ID NO: 17832 - protein, 335 aa, Homo sapiens
MALKWTSVLLLIHLGCYFSSGSCGKVLVWTGEYSHWMNMKTILKELVQRGHEVTVLASSASILFDPNDAFTLKLEVYPTSLTKTEFENIIMQQVKRWSDIQKDSFWLYFSQEQEILWEFHDIFRNFCKDVVSNKKVMKKLQESRFDIIFADAFFPCGELLAALLNIPFVYSLCFTPGYTIERHSGGLIFPPSYIPVVMSKLSDQMTFMERVKNMIYVLYFDFWFQMCDMKKWDQFYSEVLGRPTTLFETMGKADIWLMRNSWSFQFPHPFLPNIDFVGGLHCKPAKPLPKEMEEFVQSSGENGVVVFSLGSVISNMTAERANVIATALAKIPQKI

SEQ ID NO: 17833 - protein, 623 aa, Homo sapiens
MSDEVFSTTLAYTKSPKVTKRTTFQDELIRAITARSARQRSSEYSDDFDSDEIVSLGDFSDTSADENSVNKKMNDFHISDDEEKNPSKLLFLKTNKSNGNITKDEPVCAIKNEEEMAPDGCEDIVVKSFSESQNKDEEFEKDKIKMKPKPRILSIKSTSSAENNSLDTDDHFKPSPRPRSMLKKKSHMEEKDGLEDKETALSEELELHSAPSSLPTPNGIQLEAEKKAFSENLDPEDSCLTSLASSSLKQILGDSFSPGSEGNASGKADHVTTAVEKSKESQVTADDLEEEKAKAELIMDDDRTVDPLLSKSQSILISTSATASSKKTIEDRNIKNKKSTNNRASSASARLMTSEFLKKSSSKRRTPSTTTSSHYLGTLKVLDQKPSQKQSIEPDRADNIRAAVYQEWLEKKNVYLHEMHRIKRIESENLRIQNEQKKAAKREEALASFEAWKAMKEKEAKKIAAKKRLEEKNKKKTEEENAARKGEALQAFEKWKEKKMEYLKEKNRKEREYERAKKQKEEETVAEKKKDNLTAVEKWNEKKEAFFKQKEKEKINEKRKEELKRAEKKDKDKQAINEYEKWLENKEKQERIERKQKKRHSFLESEALPPWSPPSRTVFAKVF

SEQ ID NO: 17834 - protein, 489 aa, Homo sapiens
MAGQRVLLLVGFLLPGVLLSEAAKILTISTVDFKKEEKSYQVISWLAPEDHQREFKKSFDFFLEETLGGRGKFENLLNVLEYLALQCSHFLNRKDIMDSLKNENFDMVIVETFDYCPFLIAEKLGKPFVAILSTSFGSLEFGLPIPLSYVPVFRSLLTDHMDFWGRVKNFLMFFSFCRRQQHMQSTFDNTIKEHFTEGSRPVLSHLLLKAELWFINSDFAFDFARPLLPNTVYVGGLMEKPIKPVPQDLENFIAKFGDSGFVLVTLGSMVNTCQNPEIFKEMNNAFAHLPQGVIWKCQCSHWPKDVHLAANVKIVDWLPQSDLLAHPSIRLFVTHGGQNSIMEAIQHGVPMVGIPLFGDQPENMVRVEAKKFGVSIQLKKLKAETLALKMKQIMEDKRYKSAAVAASVILRSHPLSPTQRLVGWIDHVLQTGGATHLKPYVFQQPWHEQYLLDVFVFLLGLTLGTLWLCGKLLGMAVWWLRGARKVKET

SEQ ID NO: 17835 - protein, 370 aa, Homo sapiens
MTLASRLSTAANTGQIDDPQEQHRVISSNLALIQVQATVVGLLAAVAALLLGVVSREEVDVAKVELLCASSVLTAFLAAFALGVLMVCIVIGARKLGVNPDNIATPIAASLGDLITLSILALVSSFFYRHKDSRYLTPLVCLSFAALTPVWVLIAKQSPPIVKILKFGWFPIILAMVISSFGGLILSKTVSKQQYKGMAIFTPVICGVGGNLVAIQTSRISTYLHMWSAPGVLPLQMKKFWPNPCSTFCTSEINSMSARVLLLLVVPGHLIFFYIIYLVEGQSVINSQTFVVLYLLAGLIQVTILLYLAEVMVRLTWHQALDPDNHCIPYLTGLGDLLGTGLLALCFFTDWLLKSKAELGGISELASGPP

SEQ ID NO: 17836 - protein, 788 aa, Homo sapiens
MAKAKKVGARRKASGAPAGARGGPAKANSNPFEVKVNRQKFQILGRKTRHDVGLPGVSRARALRKRTQTLLKEYKERDKSNVFRDKRFGEYNSNMSPEEKMMKRFALEQQRHHEKKSIYNLNEDEELTHYGQSLADIEKHNDIVDSDSDAEDRGTLSAELTAAHFGGGGGLLHKKTQQEGEEREKPKSRKELIEELIAKSKQEKRERQAQREDALELTEKLDQDWKEIQTLLSHKTPKSENRDKKEKPKPDAYDMMVRELGFEMKAQPSNRMKTEAELAKEEQEHLRKLEAERLRRMLGKDEDENVKKPKHMSADDLNDGFVLDKDDRRLLSYKDGKMNVEEDVQEEQSKEASDPESNEEEGDSSGGEDTEESDSPDSHLDLESNVESEEENEKPAKEQRQTPGKGLISGKERAGKATRDELPYTFAAPESYEELRSLLLGRSMEEQLLVVERIQKCNHPSLAEGNKAKLEKLFGFLLEYVGDLATDDPPDLTVIDKLVVHLYHLCQMFPESASDAIKFVLRDAMHEMEEMIETKGRAALPGLDVLIYLKITGLLFPTSDFWHPVVTPALVCLSQLLTKCPILSLQDVVKGLFVCCLFLEYVALSQRFIPELINFLLGILYIATPNKASQGSTLVHPFRALGKNSELLVVSAREDVATWQQSSLSLRWASRLRAPTSTEANHIRLSCLAVGLALLKRCVLMYGSLPSFHAIMGPLQALLTDHLADCSHPQELQELCQSTLTEMESQKQLCRPLTCEKSKPVPLKLFTPRLAGLEFPTSGNPPALAPQL

SEQ ID NO: 17837 - protein, 198 aa, Homo sapiens
MKVENFKTSEIQELFDIFTYSKGASMARMLSCFLNEHLFVSALKSYLKTFSYSNAEQDDLWRHFQMAIDDQSTVILPATIKNIMDSWTHQSGFPVITLNVSTGVMKQEPFYLENIKNRTLLTSNDTWIVPILWIKNGTTQPLVWLDQSSKVFPEMQVSDSDHDWVILNLNMTGYYRVNYDKLGWKKLNQQLEKDPKMR

SEQ ID NO: 17838 - protein, 142 aa, Homo sapiens
MADISSDGEREANMPGLNIRNKEFNYLHNRNGSELDLLGMUDLLENLGYSVVIKENLTAQMVLGLFGSPLTVEKPVQILMVGSCKVTSVMMLLQRLMWKRTSLLSNLPHHVQHSFETPNILTQLPTIERLSMTRYFYLFPGN

SEQ ID NO: 17839 - protein, 576 aa, Homo sapiens
MKLLHVFLLFLCFHLRFCKVTYTSQEDLVEKKCLAKKYTHLSCDKVFCQPWQRCIEGTCVCKLPYQCPKNGTAVCATNRRSFPTYCQQKSLECLHPGTKFLNNGTCTAEGKFSVSLKHGNTDSEGIVEVKLVDQDKTMFICKSSWSMREANVACLDLGFQQGADTQRRFKLSDLSINSTECLHVHCRGLETSLAECTFTKRRTMGYQDFADVVCYTQKADSPMDDFFQCVNGKYISQMKACDGINDCGDQSDELCCKACQGKGFHCKSGVCIPSQYQCNGEVDCITGEDEVGCAEETEILTADMDAERRRIKSLLPKLSCGVKNRMHIRRKRIVGGKRAQLGDLPWQVAIKDASGITCGGIYIGGCWILTAAHCLRASKTHRYQIWTTVVDWIHPDLKRIVIEYVDRIIFHENYNAGTYQNDIALIEMKKDGNKKDCELPRSIPACVPWSPYLFQPNDTCIVSGWGREKDNERVFSLQWGEVKLISNCSKFYGNRFYEKEMECAGTYDGSIDACKGDSGGPLVCMDANNVTYVWGVVSWGENCGKPEFPGVYTKVANYFDWISYHVGRPFISQYNV

SEQ ID NO: 17840 - protein, 293 aa, Homo sapiens
MRHAHLSREVESRVQIGDTFFEPISWHLATKVLGILCCGLFFGIVGLKIFFSKFQWKIQAELDWRRKHGQAELRDARKHAVEVTLDPETAHPKLCVSDLKTVTHRKAPQEVPHSEKRFTRKSVVASQSFQAGKHYWEVDGGHNKRWRVGVCRDDVDRRKEYVTLSPDHGYWVLRLNGEHLYFTLNPRFISVFPRTPPTKIGVFLDYECGTISFFNINDQSLIYTLTCRFEGLLRPYIEYPSYNEQNGTPIVICPVTQESEKEASWQRASAIPETSNSESSSQATTPFLPRGEM

SEQ ID NO: 17841 - protein, 532 aa, Homo sapiens
MELENIVANSLLLKARQGGYGKKSGRSKKWKEILTLPPVSQCSELRHSIEKDYSSLCDKQPIGRRLFRQFCDTKPTLKRHIEFLDAVAEYEVADDEDRSDCGLSILDRFFNDKLAAPLPEIPPDVVTECRLGLKEENPSKKAFEECTRVAHNYLRGEPFEEYQESSYFSQFLQWKWLERQPVTKNTFRHYRVLGKGGFGEVCACQVRATGKMYACKKLQKKRIKKRKGEAMALNEKRILEKVQSRFVVSLAYAYETKDALCLVLTIMNGGDLKFHIYNLGNPGFDEQRAVFYAAELCCGLEDLQRERIVYRDLKPENILLDDRGHIRISDLGLATEIPEGQRVRGRVGTVGYMAPEVVNNEKYTFSPDWWGLGCLIYEMIQGHSPFKKYKEKVKWEEVDQRIKNDTEEYSEKFSEDAKSICRMLLTKNPSKRLGCRGEGAAGVKQHPVFKDINFRRLEANMLEPPFCPDPHAVYCKDVLDIEQFSVVKGIYLDTADEDFYARFATGCVSIPWQNEGCLTMVPSEKEVEPKQC

SEQ ID NO: 17842 - protein, 283 aa, Homo sapiens
MPHSSLHPSIPCPRGHGAQKAALVLLSACLVTLWGLGEPPEHTLRYLVLHLASLQLGLLLNGVCSLAEELRHIHSRYRGSYWRTVRACLGCPLRRGALLLLSIYFYYSLPNAVGPPFTWMLALLGLSQALNILLGLKGLAPAEISAVCEKGNFNVAHGLAWSYYIGYLRLILPELQARIRTYNQHYNNLLRGAVSQRLYILLPLDCGVPDNLSMADPNIRFLDKLPQQTGDHAGIKDRVYSNSIYELLENGQRNLQMTAASRCPRRFSGTCGRRKRKRLLWAA

SEQ ID NO: 17843 - protein, 469 aa, Homo sapiens
MAFPAGFGWAAATAAYQVEGGWDADGKGPCVWDTFTHQGGERVFKNQTGDVACGSYTLWEEDLKCIKQLGLTHYRFSLSWSRLLPDGTTGFINQKGIDYYNKIIDDLLKNGVTPIVTLYHFDLPQTLEDQGGWLSEAIIESFDKYAQFCFSTFGDRVKQWITINEANVLSVMSYDLGMFPPGIPHFGTGGYQAAHNLIKAHARSWHSYDSLFRKKQKGMVSLSLFAVWLEPADPNSVSDQEAAKRAITFHLDLFAKPIFIDGDYPEVVKSQIASMSQKQGYPSSRLPEFTEEEKKMIKGTADFFAVQYYTTRLIKYQENKKGELGILQDAEIEFFPDPSWKNVDWIYVVPWGVCKLLKYIKDTYNNPVIYITENGFPQSDPAPLDDTQRWEYFRQTFQELFKAIQLDKVNLQVYCAWSLLDNFEWNQGYSSRFGLFHVDFEDPARPRVPYTSAKEUAKIIRNNGLEAHL

SEQ ID NO: 17844 - protein, 1488 aa, Homo sapiens
MAEARKRRELLPLIYHHLLRAGYVRAAREVKEQSGQKCFLAQPVTLLDIYTHWQQTSELGRKRKAEEDAALQAKKTRVSDPISTSESSEEEEEAEAETAKATPRLASTNSSVLGADLPSSMKEKAKAETEKAGKTGNSMPHPATGKTVANLLSGKSPRKSAEPSANTTLVSETEEEGSVPAFGAAAKPGMVSAGQADSSSEDTSSSSDETDVEGKPSVKPAQVKASSVSTKESPARKAAPAPGKVGDVTPQVKGGALPPAKRAKKPEEESESSEEGSESEEEAPAGTRSQVKASEKILQVRAASAPAKGTPGKGATPAPPGKAGAVASQTKAGKPEEDSESSSEESSDSEEETPAAKALLQAKASGKTSQVGAASAPAKESPRKGAAPAPPGKTGPAVAKAQAGKREEDSQSSSEESDSEEEAPAQAKPSGKAPQVRAASAPAKESPRKGAAPAPPRKTGPAAAQVQVGKQEEDSRSSSEESDSDREALAAMNAAQVKPLGKSPQVKPASTMGMGPLGKGAGPVPPGKVGPATPSAQVGKWEEDSESSSEESSDSSDGEVPTAVAPAQEKSLGNILQAKPTSSPAKGPPQKAGPVAVQVKAEKPMDNSESSEESSDSADSEEAPAAMTAAQAKPALKIPQTKACPKKTNTTASAKVAPVRVGTQAPRKAGTATSPAGSSPAVAGGTQRPAEDSSSSEESDSEEEKTGLAVTVGQAKSVGKGLQVKAASVPVKGSLGQGTAPVLPGKTGPTVTQVKAEKQEDSESSEEESDSEEAAASPAQVKTSVKKTQAKANPAAARAPSAKGTISAPGKVVTAAAQAKQRSPSKVKPPVRNPQNSTVLARGPASVPSVGKAVATAAQAQTGPEEDSGSSEEESDSEEEAETLAQVKPSGKTHQIRAALAPAKESPRKGAAPTPPGKTGPSAAQAGKQDDSGSSSEESDSDGEAPAAVTSAQKDSNSKPARSKTLAPAPPERNTEGSSESSEEELPLTQVIKPPLIFVDPNRSPAGPAATPAQAQAASTPRKARASESTARSSSSESEDEDVIPATQCLTPGIRTNVVTMPTAHPRIAPKASMAGASSSKESSRISDGKKQEGPATQVDSAVGTLPATSPQSTSVQAKGTNKLRKPKLPEVQQATKAPESSDDSEDSSDSSSGSEEDGEGPQGAKSAHTLVGPTPSRTETLVEETAAESSEDDVVAPSQSLLSGYMTPGLTPANSQASKATPKLDSSPSVSSTLAAKDDPDGKQEAKPQQAAGMLSPKTGGKEAASGTTPQKSRKPKKGAGNPQASTLALQSNITQCLLGQPWPLNEAQVQASVVKVLTELLEQERKKVVDTTKESSRKGWESRKRKLSGDQPAARTPRSKKKKKLGAGEGGEASVSPEKTSTTSKGKAKRDKASGDVKEKKGKGSLGSQGAKDEPEEELQKGMGTVEGGDQSNPKSKKEKKKSDKRKKDKEKKEKKKKAKKASTKDSESPSQKKKKKKKKTAEQTV

SEQ ID NO: 17845 - protein, 177 aa, Homo sapiens
MRLLILTCLVAVALARPKLPLRYPERLQNPSESSEPIPLESREEYMNGMNRQRNILREKQTDEIKDTRNESTQNCVVAEPEKMESSISSSSEEQFCRLNEYNQLQLQAAHAQEQIRRMNENSHVQVPFQQLNQLAAYPYAVWYYPQIMQYVPFPPFSDISNPTAHENYEKNNVMLQW

SEQ ID NO: 17846 - protein, 1246 aa, Homo sapiens
MKVRLLRQLSAAAKVKAPSGLQGPPQAHQFISLLLEEYGALCQAARSISTFLGTLENEHLKKFQVTWELHNKHLFENLVFSEPLLQSNLPALVSQIRLGTTTHDTCSEDTYSTLLQRYQRSEEELRRVAEEWLECQKRIDAYVDEQDLQTSVNKSIDTGTLVQSWLRGAAMTMKTKQRMLTEDWELFKQRRFIEEQLTNKKAVTGENNFTDTMRHMLSSRLSMPDCPNCNYRRRCACDDCSLSHILTCGIMDPPVTDDIHIHQLPLQVDPAPDYLAERSPPSVSSASSGSGSSSPITIQQHPRLILTDSGSAPTFDDEDVAPLSAKFADIYPLSNYDDTEVVANMNGIHSELNGGGENMALKDESPQISSTSSSSSEADDEEADGESSGEPPGAPKEDGVLGSRSPRTEESKADSPPPSYPTQQAEQAPNTCECHVCKQEASGLTPSAMTAGALPPGHQFLSPEKPTHPALHLYPHIHGHVPLHTVPHLPRPLIHPTLYATPPFTHSKALPPAPVQNHTNKHQVFNASLQDHIYPSCFGNTPEWNSSKFISLWGSEVMNDKNWNPGTFLPDTISGSEILGPTLSETRPEALPPPSSNETPAVSDSKEKKNAAKKKCLYNFQDAFMEANKVVMATSSATSSVSCTATTVQSSNSQFRVSSKRPPSVGDVFHGISKEDHRHSAPAAPRNSPTGLAPLPALSPAALSPAALSPASTPHLANLAAPSFPKTATTTPGFVDTRKSFCPAPLPPATDGSISAPPSVCSDPDCEGHRCENGVYDPQQDDGDESADEDSCSEHSSSTSTSTNQKEGKYCDCCYCEFFGHGGPPAAPTSRNYAEMREKLRLRLTKRKEEQPKKMDQISERESVVDHRRVEDLLQFINSSETKPVSSTRAAKRARHKQRKLEEKARLEAEARAREHLHLQEEQRRREEEEDEEEEEDRFKEEFQRLQELQKLRAVKKKKKERPSKDCPKLDMLTRNFQAATESVPNSGNIHNGSLEQTEEPETSSHSPSRHMNHSEPRPGLGADGDAADPVDTRDSKFLLPKEVNGKQHEPLSFFFDIMQHHKEGNGKQKLRQTSKASSEPARRPTEPPKATEGQSKPRAQTESKAKVVDLMSITEQKREERKVNSNNNNKKQLNHIKDEKSNPTPMEPTSPGEHQQNSKLVLAESPQPKGKNKKNKKKKGDRVNNSIDDVFLPKDIDLDSVDMDETEREVEYFKRFCLDSARQTRQRLSINWSNFSLKKATFAAH

SEQ ID NO: 17847 - protein, 452 aa, Homo sapiens
WPRQIVSSIGLCRYGGRIDCCWGWARQSWGQCQPVCQPRCKHGECIGPNKCKCHPGYAGKTCNQDLNECGLKPRPCKHRCMNTYGSYKCYCLNGYMLMPDGSCSSALTCSMANCQYGCDVVKGQIRCQCPSPGLQLAPDGRTCVDVDECATGRASCPRFRQCVNTFGSYICKCHKGFDLMYIGGKYQCHDIDECSLGQYQCSSFARCYNIRGSYKCKCKEGYQGDGLTCVYIPKVMIEPSGPIHVPKGNGTILKGDTGNNNWIPDVGSTWWPPKTPYIPPIITNRPTSKPTTRPTPKPTPIPTPPPPPPLPTELRTPLPPTTPERPTTGLTTIAPAASTPPGGITVDNRVQTDPQKPRGDVFIPRQPSNDLFEIFEIERGVSADDEAKDDPGVLVHSCNFDHGLCGWIREKDNDLHWEPIRDPAEILQGTQFREIFIGCILSASCVTSYLGC

SEQ ID NO: 17848 - protein, 158 aa, Homo sapiens
MEADIITNLRCRLKEAEEERLKAAQYGLQLVESQNELQNQLDKCRNEMMTMTESYEQEKYTLQREVELKSRMLESLSCECEAIKQQQKMHLEKLEEQLSRSHGQEVNELKTKIEKLKVELDEARLSEKQLKHQVDHQKELLSCKSEELRVMSERVQES

SEQ ID NO: 17849 - protein, 328 aa, Homo sapiens
MAVQESAAQLSMTLKVQEYPTLKVPYETLNKRFRAAQKNIDRETSHVTMVVAELEKTLSGCPAVDSVVSLLDGVVEKLSVLKRKAVESIQAEDESAKLCKRRIEHLKEHSSDQPAAASVWKRKRMDRMMVEHLLRCGYYNTAVKLARQSGIETCKKALQPSRREPAGRGAPGHGHAGLPARHAHLPVQGPSGPCTVADADPAVPVRQLPTTPAGKQFCVHPHPAGWPLSHQDTCYKEDGSSKSPDCPVCSRSLNKLAQPLPMAHCANSRLVCKISGDVMNENNPPMMLPNGYVYGYNSLLSIRQDDKVVCPRTKEVFHFSQAEKVYIM

SEQ ID NO: 17850 - protein, 1238 aa, Homo sapiens
MDALCGSGELGSKFWDSNLSVHTENPDLTPCFQNSLLAWVPCIYLWVALPCYLLYLRHHCRGYIILSHLSKLKMVLGVLLWCVSWADLFYSFHGLVHGRAPAPVFFVTPLVVGVTMLLATLLIQYERLQGVQSSGVLIIFWFLCVVCAIVPFRSKILLAKAEGEISDPFRFTTFYIHFALVLSALILACFREKPPFFSAKNVDPNPYPETSAGFLSRLFFWWFTKMAIYGYRHPLEEKDLWSLKEEDRSQMVVQQLLEAWRKQEKQTARHKASAAPGKNASGEDEVLLGARPRPRKPSFLKALLATFGSSFLISACFKLIQDLLSFINPQLLSILIRFISNPMAPSWWGFLVAGLMFLCSMMQSLILQHYYHYIFVTGVKFRTGIMGVIYRKALVITNSVKRASTVGEIVNLMSVDAQRFMDLAPFLNLLWSAPLQIILAIYFLWQNLGPSVLAGVAFMVLLIPLNGAVAVKMRAFQVKQMKLKDSRIKLMSEILNGIKVLKLYAWEPSFLKQVEGIRQGELQLLRTAAYLHTTTTFTWMCSPFLVTLITLWVYVYVDPNNVLDAEKAFVSVSLFNILRLPLNMLPQLISNLTQASVSLKRIQQFLSQEELDPQSVERKTISPGYAITIHSGTFTWAQDLPPTLHSLDIQVPKGALVAVVGPVGCGKSSLVSALLGEMEKLEGKVHMKGSVAYVPQQAWIQNCTLQENVLFGKALNPKRYQQTLEACALLADLEMLPGGDQTEIGEKGINLSGGQRQRVSLARAVYSDADIFLLDDPLSAVDSHVAKHIFDHVIGPEGVLAGKTRVLVTHGISFLPQTDFIIVLADGQVSEMGPYPALLQRNGSFANFLCNYAPDEDQGHLEDSWTALEGAEDKEALLIEDTLSNHTDLTDNDPVTYVVQKQFMRQLSALSSDGEGQGRPVPRRHLGPSEKVQVTEAKADGALTQEEKAAIGTVELSVFWDYAKAVGLCTTLAICLLYVGQSAAAIGANVWLSAWTNDAMADSRQNNTSLRLGVYAALGILQGFLVMLAAMAMAAGGIQAARVLHQALLHNKIRSPQSFFDTTPSGRILNCFSKDIYVVDEVLAPVILMLLNSFFNAISTLVVIMASTPLFTVVILPLAVLYTLVQRFYAATSRQLKRLESVSRSPIYSHFSETVTGASVIRAYNRSRDFEIISDTKVDANQRSCYPYIISNRSEAASLAPCSSRNSQQALWCSGSLSLLSPKQKTGPALPLPHFLLI

SEQ ID NO: 17851 - protein, 622 aa, Homo sapiens
MTYWRLENIAKTEPPKIFRVKPVLGIKRMIQIEWIKPELAPVSSDLKYTLRFRTVNSTSWMEVNFAKNRKDKNQTYNLTGLQPFTEYVIALRCAVKESKFWSDWSQEKMGMTEEEAPCGLELWRVLKPAEADGRRPVRLLWKKARGAPVLEKTLGYNIWYYPESNTNLTETMNTTNQQLELHLGGESFWVSMISYNSLGKSPVATLRIPAIQEKSFQCIEVMQACVAEDQLVVKWQSSALDVNTWMIEWFPDVDSEPTTLSWESVSQATNWTIQQDKLKPFWCYNISVYPMLHDKVGEPYSIQAYAKEGVPSEGPETKVENIGVKTVTITWKEIPKSERKGIICNYTIFYQAEGGKGFSKTVNSSILQYGLESLKRKTSYIVQVMASTSAGGTNGTSINFKTLSFSVFEIILITSLIGGGLLILIILTVAYGLKKPNKLTHLCWPTVPNPAESSIATWHGDDFKDKLNLKESDDSVNTEDRILKPCSTPSDKLVIDKLVVNFGNVLQEIFTDEARTGQENNLGGEKNGYVTCPFRPDCPLGKSFEELPVSPEIPPRKSQYLRSRMPEGTRPEAKEQLLFSGQSLVPDHLCEEGAPNPYLKNSVTAREFLVSEKLPEHTKGEV

SEQ ID NO: 17852 - protein, 1521 aa, Homo sapiens
MRGVGWQMLSLSLGLVLAILNKVAPQACPAQCSCSGSTVDCHGLALRSVPRNIPRNTERLDLNGNNITRITKTDFAGLRHLRVLQLMENKISTIERGAFQDLKELERLRLNRNHLQLFPELLFLGTAKLYRLDLSENQIQAIPRKAFRGAVDIKNLQLDYNQISCIEDGAFRALRDLEVLTLNNNNITRLSVASFNHMPKLRTFRLHSNNLYCDCHLAWLSDWLRQRPRVGLYTQCMGPSHLRGHNVAEVQKREFVCSGHQSFMAPSCSVLHCPAACTCSNNIVDCRGKGLTEIPTNLPETITEIRLEQNTIKVIPPGAFSPYKKLRRIDLSNNQISELAPDAFQGLRSLNSLVLYGNKITELPKSLFEGLFSLQLLLLNANKINCLRVDAFQDLHNLNLLSLYDNKLQTIAKGTFSPLRAIQTMHLAQNPFICDCHLKWLADYLHTNPIETSGARCTSPRRLANKRIGQIKSKKFRCSGTEDYRSKLSGDCFADLACPEKCRCEGTTVDCSNQKLNKIPEHIPQYTAELRLNNNEFTVLEATGIFKKLPQLRKINFSNNKITDIEEGAFEGASGVNEILLTSNRLENVQHKMFKGLESLKTLMLRSNRITCVGNDSFIGLSSVRLLSLYDNQITTVAPGAFDTLHSLSTLNLLANPFNCNCYLAWLGEWLRKKRIVTGNPRCQKPYFLKEIPIQDVAIQDFTCDDGNDDNSCSPLSRCPTECTCLDTVVRCSNKGLKVLPKGIPRDVTELYLDGNQFTLVPKELSNYKHLTLIDLSNNRISTLSNQSFSNMTQLLTLILSYNRLRCIPPRTFDGLKSLRLLSLHGNDISVVPEGAFNDLSALSHLAIGANPLYCDCNMQWLSDWVKSEYKEPGIARCAGPGEMADKLLLTTPSKKFTCQGPVDVNILAKCNPCLSNPCKNDGTCNSDPVDFYRCTCPYGFKGQDCDVPIHACISNPCKHGGTCHLKEGEEDGFWCICADGFEGENCEVNVDDCEDNDCENNSTCVDGINNYTCLCPPEYTGELCEEKLDFCAQDLNPCQHDSKCILTPKGFKCDCTPGYVGEHCDIDFDDCQDNKCKNGAHCTDAVNGYTCICPEGYSGLFCEFSPPMVLPRTSPCDNFDCQNGAQCIVRINEPICQCLPGYQGEKCEKLVSVNFINKESYLQIPSAKVRPQTNITLQIATDEDSGILLYKGDKDHIAVELYRGRVRASYDTGSHPASAIYSVETINDGNFHIVELLALDQSLSLSVDGGNPKIITNLSKQSTLNFDSPLYVGGMPGKSNVASLRQAPGQNGTSFHGCIRNLYINSELQDFQKVPMQTGILPGCEPCHKKVCAHGTCQPSSQAGFTCECQEGWMGPLCDQRTNDPCLGNKCVHGTCLPINAFSYSCKCLEGHGGVLCDEEEDLFNPCQAIKCKHGKCRLSGLGQPYCECSSGYTGDSCDREISCRGERIRDYYQKQQGYAACQTTKKVSRLECRGGCAGGQCCGPLRSKRRKYSFECTDGSSFVDEVEKVVKCGCTRCVS

SEQ ID NO: 17853 - protein, 2537 aa, Homo sapiens
MEDFRGIAEESFPSFLTNSLFGNSGILENVTLSSNLGLPVAVSTLARDRSSTDNRYPDIQASYLVEGRFSVPSGSSPGSQSDAEPRERLQLSFQDDDSISRKKSYVESQRLSNALSKQSALQMETAGPEEEPAGATESLQGQDLFNRASPLEQAQDSPIDFHLQSWMNNKEPKIVVLDAGKHFEDKTLKSDLSHTSLLENEKLILPTSLEDSSDDDIDDEMFYDDHLEAYFEQLAIPGMIYEDLEGPEPPEKGFKLPTNGLRQANENGSLNCKFQSENNSSLISLDSHSSETTHKESEESQVICLPGTSNSIGTGDSRRYTDGMLPFSSGTWGTEKEIENLKGIVPDLNSECASKDVLVKTLRAIDVKLNSDNFHDANANRGGFDLTDPVKQGAECPHQNKTVLHMDGCLDTETPTVSIQENVDVASLKPISDSGINFTDAIWSPTCERRTCECHESIEKNKDKTDLPQSVVYQNEEGRWVTDLAYYTSFNSKQNLNVSLSDEMNEDFRSGSEAFDLIAQDEEEFNKEHQFIQEENIDAHNTSVALGDTSWGATINYSLLRKSRSTSDLDKDDASYLRLSLGEFFAQRSEALGCLGGGNNVKRPSFGYFIRSPEKREPIALIRKSDVSRGNLEKEMAHLNHDLYSGDLNEQSQAQLSEGSITLQVEAVESTSQVDENDVTLTADKGKTEDTFFMSNKPQRYKDKLPDSGDSMLRISTIASAIAEASVNTDPSQLAAMIKALSNKTRDKTFQEDEKQKDYSHVRHFLPNDLEKSNGSNALDMEKYLKKTEVSRYESALENFSRASMSDTWDLSLPKEQTTQDIHPVDLSATSVSVRAPEENTAAIVYVENGESENQESFRTINSSNSVTNRENNSAVVDVKTCSIDNKLQDVGNDEKATSISTPSDSYSSVRNPRITSLCLLKDCEEIRDNRENQRQNECVSEISNSEKHVTFENHRIVSPKNSDLKNTSPEHGGRGSEDEQESFRPSTSPLSHSSPSEISGTSSSGCALESFGSAAQQQQPPCEQELSPLVCSPAGVSRLTYVSEPESSYPTTATDDALEDRKSDITSELSTTIIQGSPAALEERAMEKLREKVPFQNRGKGTLSSIIQNNSDTRKATETTSLSSKPEYVKPDFRWSKDPSSKSGNLLETSEVGWTSNPEELDPIRLALLGKSGLSCQVGSATSHPVSCQEPIDEDQRISPKDKSTAGREFSGQVSHQTTSENQCTPIPSSTVHSSVADMQNMPAAVHALLTQPSLSAAPFAQRYLGTLPSTGSTTLPQCHAGNATVCGFSGGLPYPAVAGEPVQNSVAVGICLGSNIGSGWMGTSSLCNPYSNTLNQNLLSTTKPFPVPSVGTNCGIEPWDSGVTSGLGSVRVPEELKLPHACCVGIASQTLLSVLNPTDRWLQVSIGVLSISVNGEKVDLSTYRCLVFKNKAIIRPHATEEIKVLFIPSSPGVFRCTFSVASWPCSTDAETIVQAEALASTVTLTAIAESPVIEVETEKKDVLDFGDLTYGGWKALPLKLINRTHATVPIRLIINANAVAWRCFTFSKESVRAPVEVAPCADVVTRLAGPSVVNHMMPASYDGQDPEFLMIWVLFHSPKKQISSSDILDSAEEFSAKVDIEVDSPNPTPVLRSVSLRARAGIARIHAPRDLQTMHFLAKVASSRKQHLPLKNAGNIEVYLDIKVPEQGSHFSVDPKNLLLKPGEEHEVIVSFTPKDPEACEERILKIFVQPFGPQYEVVLKGEVISSGSKPLSPGPCLDIPSILSNKQFLAWGGVPLGRTQLQKLALRNNSASTTQHLRLLIRGQDQDCFQLQNTFGSEQRLTSNCEIRIHPKEDIFISVLFAPTRLSCMLARLEIKQLGNRSQPGIKFTIPLSGYGGTSNLILEGVKKLSDSYMVTVNGLVPGKESKIVFSVRNTGSRAAFVKAVGFKDSQKKVLLDPKVLRIFPDKFVLKERTQENVTLIYNPSDRGINNKTATELSTVYLFGGDEISRQQYRRALLHKPEMIKQILPEHSVLQNINFVEAFQDELLVTEVYDLPQRPNDVQLFYGSMCKIILSVIGEFRDCISSREFLQPSSKASLESTSDLGASGKHGGNVSLDVLPVKGPQGSPLLSRAARPPLDQLASEEPWTVLPEHLILVAPSPCDMAKTGRFQIVNNSVRLLRFELCWPAHCLTVTPQHGCVAPESKLQILVSPNSSLSTKQSMFPWSGLIYIHCDDGQKKIVKVQIREDLTQVELLTRLTSKPFGILSPVSEPSVSHLVKPMTKPPSTKVEIRNKSITFPTTEPGETSESCLELENHGTTDVKWHLSSLAPPYVKGVDESGDVFRATYAAFRCSPISGLLESHGIQKVSITFLPRGRGDYAQFWDVECHPLKEPHMKHTLRFQLSGQSIEAENEPENACLSTDSLIKIDHLVKPRRQAVSEASARIPEQLDVTARGVYAPEDVYRFRPTSVGESRTLKVNLRNNSFITHSLKFLSPREPFYVKHSKYSLRAQHYINMPVQFKPKSAGKFEALLVIQTDEGKSIAIRLIGEALGKN

SEQ ID NO: 17854 - protein, 919 aa, Homo sapiens
MGPEALSSLLLLLLVASGDADMKGHFDPAKCRYALGMQDRTIPDSDISASSSWSDSTAARHSRLESSDGDGAWCPAGSVFPKEEEYLQVDLQRLHLVALVGTQGRHAGGLGKEFSRSYRLRYSRDGRRWMGWKDRWGQEVISGNEDPEGVVLKDLGPPMVARLVRFYPRADRVMSVCLRVELYGCLWRDGLLSYTAPVGQTMYLSEAVYLNDSTYDGHTVGGLQYGGLGQLADGVVGLDDFRKSQELRVWPGYDYVGWSNHSFSSGYVEMEFEFDRLRAFQAMQVHCNNMHTLGARLPGGVECRFRRGPAMAWEGEPMRHNLGGNLGDPRARAVSVPLGGRVARFLQCRFLFAGPWLLFSEISFISDVVNNSSPALGGTFPPAPWWPPGPPPTNFSSLELEPRGQQPVAKAEGSPTAILIGCLVAIILLLLLIIALMLWRLHWRRLLSKAERRVLEEELTVHLSVPGDTILINNRPGPREPPPYQEPRPRGNPPHSAPCVPNGSALLLSNPAYRLLLATYARPPRGPGPPTPAWAKPTNTQAYSGDYMEPEKPGAPLLPPPPQNSVPHYAEADIVTLQGVTGGNTYAVPALPPGAVGDGPPRVDFPRSRLRFKEKLGEGQFGEVHLCEVDSPQDLVSLDFPLNVRKGHPLLVAVKILRPDATKNASFSLFSRNDFLKEVKIMSRLKDPNIIRLLGVCVQDDPLCMITDYMENGDLNQFLSAHQLEDKAAEGAPGDGQAAQGPTISYPMLLHVAAQIASGMRYLATLNFVHRDLATRNCLVGENFTIKIADFGMSRNLYAGDYYRVQGRAVLPIRWMAWECILMGKFTTASDVWAFGVTLWEVLMLCRAQPFGQLTDEQVIENAGEFFRDQGRQVYLSRPPACPQGLYELMLRCWSRESEQRPPFSQLHRFLAEDALNTV

SEQ ID NO: 17855 - protein, 1793 aa, Homo sapiens
MLSFHFWKSRGQPTDAASSVADGIQTPRCCRRCQANNWTGQLSYRTLATVSAGAAAPQPQTTSTASSRSLPTSLRLAAAPPQGLKNWEVVAAVAAVPTALGPVQIRGTLLRATLQPLRGQRRTQDFPSDHHCLFLSLKPGQGLIMEAAPPELNSKARQAEVGDGVSSAQDSQELKQQLWPLPKPSASSQREAKYVDMCASAEVQRESPQTMKLTLGHCPGGQRASRSPKEKAQDEPSSKTPSPQNNPASSQLSRSQHSASEEGGNFSSSSSSSPMNKAEEDGLSKMEDSTTSTGALATSSSSLGFESESGESEGCQAVGGEGEKISGGGGGGKGGGGGGAGDGTECRDIIAKSQGSRDPPKVEEAHYITTHEIQLSEVEQDMDFDVGLASRWDFEDNNVIYSFVDYASFGGSDETPGDITSLTEEDDDNSCYLSTTPSTNTTRTPSPTSSDLARPNAGRSGRDTSSTEVGSGPSDSGPTPPPTGPGTAPLTEPLPETPEAASGAAAAAASSCGSAASQILLSIKPASRAINEPSNVRAKQNIIYAAKHEGDMSLRVSTAAEHNSSSLKQNPAAAVAQDHAKKFIAVPARLQTRCGAIRAKELVDYSSGASSAVSELDDADKEVRNLTSRAFRSLAYPYFEALNISSRESSTTLSEVGFGRWSTFLDLKCGGVGARVEQSLLRSSAASVAAGLRKGSGARATADQLYIQSKKSQTKALEFVVSKVEGEIKHVETPLCFQKQVQTGSRVVTLLEPLNVRSESKASSAPGPGRATKGPGKGPGSAYTDDGSETSEGSKPTSRADGPQKSKFASSLLKNVISKKMQREHEFKMERGEVMDTSHHLSGTSKETEGARGSERQRERGLQRQSSRHSEAGSEYTVVSMSDAGGEGSVAGSKSPVFKASTPRERNAGPGRNFTDGHTEVCEIKKSASETVKGIFLRSQNSAFRSWKEKEAEKREEQAPIGKLKLPKGGDWRADLGEISASKNTIMSRLFVPNIQQTPKDKQPRKQATKYPAAQATSTAVIRPKAPEIKIRLGSVQQPSSDFNIAKLLTPKLAGGSASNLFKTIEDNSRAQQKLFRGDNLEKVPHFQVRDIRDKSKAQGPLHQVRDVRKLIKGSGDSSDKGSVTPEQGLTGPKPRQLSAAAGGSGSLSPMVITCQAVVNQREDSMDREPRESMGKGGGSRVLNSSSPEGTVLVHRASGRLPVATIAPNKPEQGSYLPVLKIVSKASTQKTPEKLKEEEVKEEGKATKPARNALEKLTAAVRSMEELYSFNRNEWKRKSDPLPMMMDSHVLSLIASEEREGVVVADGDHDKLSKRLGEVEERGTGNKAGVVLRGAPIERLQRRNSNPSAESVSARAAAFENLARERPRSLYIPPVHKDVERTQPLQPLPPLPSNRNVFTVSASSIQKTGGVAGKFPQGPSPESPSAAKGIKSQGLRSLKISPATRAPPDEVTNRKSGSNLEKSNSDCENYLTIPLKGSSAAGELLSRPGASREGPPNSSAATLCSLPPLSARSQVPSSSKGSQVSGTSRPAWRTKPDNPRETVAAPPGPQSPEHPPTTIYHQPPLPFTLQGAQPQVLCFSPPSMPAPAPAASAPVPTDPFQQAQPQQTQRKMLLDVTTGQYYLVDTPVQPMTRRLFDPETGQYVDVPMTSQQQAVAPMSISVPPLALSPGAYGPTYMIYPGFLPTVLPTNALQPTPIARAPRGSELSPMVAEPSSKEAAATFTEAPYFMASGQSPASSTSSAPAATSQLLGAKAFAQLHGKPVISITSQPLGPRIIAPPSFDGTTMSFVVEHR

SEQ ID NO: 17856 - protein, 1182 aa, Homo sapiens
MGQQVGRVGEAPGLQQPQPRGIRGSSAARPSGRRRDPAGRTTETGFNIFTQHDHFASCVEDGFEGDKTGGSSPEALHRPYGCDVEPQALNEAIRWSSKENLLGATESDPNLFVALYDFVASGDNTLSITKGEKLRVLGYNQNGEWSEVRSKNGQGWVPSNYITPVNSLEKHSWYHGPVSRSAAEYLLSSLINGSFLVRESESSPGQLSISLRYEGRVYHYRINTTADGKVYVTAESRFSTLAELVHHHSTVADGLVTTLHYPAPKCNKPTVYGVSPIHDKWEMERTDITMKHKLGGGQYGEVYVGVWKKYSLTVAVKTLKEDTMEVEEFLKEAAVMKEIKHPNLVQLLGVCTLEPPFYIVTEYMPYGNLLDYLRECNREEVTAVVLLYMATQISSAMEYLEKKNFIHRDLAARNCLVGENHVVKVADFGLSRLMTGDTYTAHAGAKFPIKWTAPESLAYNTFSIKSDVWAFGVLLWEIATYGMSPYPGIDLSQVYDLLEKGYRMEQPEGCPPKVYELMRACWKWSPADRPSFAETHQAFETMFHDSSISEEVAEELGRAASSSSVVPYLPRLPILPSKTRTLKKQVENKENIEGAQDATENSASSLAPGFIRGAQASSGSPALPRKQRDKSPSSLLEDAKETCFTRDRKGGFFSSFMKKRNAPTPPKRSSSFREMENQPHKKYELTGNFSSVASLQHADGFSFTPAQQEANLVPPKCYGGSFAQRNLCNDDGGGGGGSGTAGGGWSGITGFFTPRLIKKTLGLRAGKPTASDDTSKPFPRSNSTSSMSSGLPEQDRMAMTLPRNCQRSKLQLERTVSTSSQPEENVDRANDMLPKKSEESAAPSRERPKAKLLPRGATALPLRTPSGDLAITEKDPPGVGVAGVAAAPKGKEKNGGARLGMAGVPEDGEQPGWPSPAKAAPVLPTTHNHKVPVLISPTLKHTPADVQLIGTDSQGNKFKLLSEHQVTSSGDKDRPRRVKPKCAPPPPPVMRLLQHPSICSDPTEEPTALTAGQSTSETQEGGKKAALGAVPISGKAGRPVMPPPQVPLPTSSISPAKMANGTAGTKVALRKTKQAAEKISADKISKEALLECADLLSSALTEPVPNSQLVDTGHQLLDYCSGYVDCIPQTRNKFAFREAVSKLELSLQELQVSSAAAGVPGTNPVLNNLLSCVQEISDVVQR

SEQ ID NO: 17857 - protein, 874 aa, Homo sapiens
MANLKIELSKLDSEAWPGALDIEKEKLMLINEKEELLKELQFVTPQKRTQDELERLEAERQRLEEELLSVRGTPSRALAERLRLEERRKELLQKLEETTKLTTYLHSQLKSLSASTLSMSSGSSLGSLASSRGSLNTSSRGSLNSLSSTELYYSSQSDQIDVDYQYKLDFLLQEKSGYIPSGPITTIHENEVVKSPSQPGQSGLCGVAAAATGHTPPLAEAPKSVASLSSRSSLSSLSPPGSPLVLEGTFPMSSSHDASLHQFTADFEDCELSSHFADISLIENQILLDSDSGGASQSLSEDKDLNECAREPLYEGTADVEKSLPKRRVIHLLGEKTTCVSAAVSDESVAGDSGVYEAFVKQPSEMEDVTYSEEDVAIVETAQVQIGLRYNAKSSSFMVIIAQLRNLHAFLIPHTSKVYFRVAVLPSSTDVSCLFRTKVHPPTESILFNDVFRVAISQTALQQKTLRVDLCSVSKHRREECLAGTQISLADLPFSSEVFTLWYNLLPSKQMPCKKNEENEDSVFQPNQPLVDSIDLDAVSALLARTSAELLAVEQELAQEEEEESGQEEPRGPDGDWLTMLREASDEIVAEKEAEVKLPEDSSCTEDLSSCTSVPEMNEDGNRKESNCAKDLRSQPPTRIPTLVDKETNTDEAANDNMAVRPKERSSLSSRQHPFVRSSVIVRSQTFSPGERNQYICRLNRSDSDSSTLAKKSLFVRNSTERRSLRVKRTVCQSVLRRTTQECPVRTSLDLELDLQASLTRQSRLNDELQALRDLRQKLEELKAQGETDLPPGVLEDERFQRLLKQAEKQAEQSKEEQKQGLNAEKLMRQVSKDVCRLREQSQKVPRQVQSFREKIAYFTRAKISIPSLPADDV

SEQ ID NO: 17858 - protein, 774 aa, Homo sapiens
MAATTANPEMTSDVPSLGPAIASGNSGPGIQGGGAIVQRAIKRRPGLDFDDDGEGNSKFLRCDDDQMSNDKERFARENHSEIERRRRNKMTAYITELSDMVPTCSALARKPDKLTILRMAVSHMKSLRGTGNTSTDGSYKPSFLTDQELKHLILEAADGFLFIVSCETGRVVYVSDSVTPVLNQPQSEWFGSTLYDQVHPDDVDKLREQLSTSENALTGRILDLKTGTVKKEGQQSSMRMCMGSRRSFICRMRCGSSSVDPVSVNRLSFVRNRCRNGLGSVKDGEPHFVVVHCTGYIKAWPPAGVSLPDDDPEAGQGSKFCLVAIGRLQVTSSPNCTDMSNVCQPTEFISRHNIEGIFTFVDHRCVATVGYQPQELLGKNIVEFCHPEDQQLLRDSFQQVVKLKGQVLSVMFRFRSKNQEWLWMRTSSFTFQNPYSDEIEYIICTNTNVKNSSQEPRPTLSNTIQRPQLGPTANLPLEMGSGQLAPRQQQQQTELDMVPGRDGLASYNHSQVVQPVTTTGPEHSKPLEKSDGLFAQDRDPRFSEIYHNINADQSKGISSSTVPATQQLFSQGNTFPPTPRPAENFRNSGLAPPVTIVQPSASAGQMLAQISRHSNPTQGATPTWTPTTRSGFSAQQVATQATAKTRTSQFGVGSFQTPSSFSSMSLPGAPTASPGAAAYPSLTNRGSNFAPETGQTAGQFQTRTAEGVGVWPQWQGQQPHHRSSSSEQHVQQPPAQQPGQPEVFQEMLSMLGDQSNSYNNEEFPDLTMFPPFSE

SEQ ID NO: 17859 - protein, 226 aa, Homo sapiens
MKVENFKTSEIQELFDIFTYSKGASMARMLSCFLNEHLFVSALKSYLKTFSYSNAEQDDLWRHFQMAIDDQSTVILPATIKNIMDSWTHQSGFPVITLNVSTGVMKQEPFYLENIKNRTLLTSNDTWIVPILWIKNGTTQPLVWLDQSSKVFPEMQVSDSDHDWVILNLNMTGYYRVNYDKLGWKKLNQQLEKDPKAIPVIHRLQLIDDAFSLSNLQDFGHLKVPN

SEQ ID NO: 17860 - protein, 475 aa, Homo sapiens
MELENIVANTVLLKAREGGGGNRKGKSKKWRQMLQFPHISQCEELRLSLERDYHSLCERQPIGRLLFREFCATRPELSRCVAFLDGVAEYEVTPDDKRKACGRQLTQNFLSHTGPDLIPEVPRQLVTNCTQRLEQGPCKDLFQELTRLTHEYLSVAPFADYLDSIYFNRFLQWKWLERQPVTKNTFRQYRVLGKGGFGEVCACQVRATGKMYACKKLEKKRIKKRKGEAMALNEKQILEKVNSRFVVSLAYAYETKDALCLVLTLMNGGDLKFHIYHMGQAGFPEARAVFYAAEICCGLEDLHRERIVYRDLKPENILLDDHGHIRISDLGLAVHVPEGQTIKGRVGTVGYMAPEVVKNERYTFSPDWWALGCLLYEMIAGQSPFQQRKKKIKREEVERLVKEVPEEYSERFSPQARSLCSQLLCKDPAERLGCRGGSAREVKEHPLFKKLNFKRLGAGMLEPPFKPDVSAAHSC

SEQ ID NO: 17861 - protein, 777 aa, Homo sapiens
MNKDYQKFWSSPSDPVHFEVDTSHEKVESMSESDTMNVSNLSQGVMLSHSPICMETTGTTCDLPQNEIKNFERENEYESTLCEDAYGTLDNLLNDNNIENYSTNALIQPVDTISISSLRQFETVCKFHWVEAFDDEMTEKPEFQSQVYNYAKDNNIKQDSFKEENPMETSVSANTDQLGNEYFRQPPPRSPPLIHCSGEMLKFTEKSLAKSIAKESALNPSQPPSFLCKTAVPSKEIQNYGEIPEMSVSYEKEVTAEGVERPEIVSTWSSAGISWRSEACRENCEMPDWEQSAESLQPVQEDMALNEVLQKLKHTNRKQEVRIQELQCSNLYLEKRVKELQMKITKQQVFIDVINKLKENVEELIEDKYKIILEKNDTKKTLQNLEEVLANTQKHLQESRNDKEMLQLQFKKIKANYVCLQERYMTEMQQKNKSVSQYLEMDKTLSKKEEEVERLQQLKKELEKATASALDLLKREKEAQEQEFLSLQEEFQKLEKENLEERQKLKSRLEKLLTQVRNLQFMSENERTKNIKLQQQINEVKNENAKLKQQVARSEEQNYVPKFETAQLKDQLEEVLKSDITKDTKTTHSNLLPDCSPCEERLNPADIKRASQLASKMHSLLALMVGLLTCQDIINSDAEHFKESEKVSDIMLQKLKSLHLKKKTLDKEVIDCDSDEAKSIRDVPTLLGAKLDKYHSLNEELDFLVTSYEEIIECADQRLAISHSQIAHLEERNKHLEDLIRKPREKARKPRSKSLENHPKSMTMMPALFKENRNDLD

SEQ ID NO: 17862 - protein, 129 aa, Homo sapiens
MARQPPPPWVHAAFLLCLLSLGGAIEIPMDPSIQNELTQPPTITKQSAKDHIVDPRDNILIECEAKGNPAPSFHWTRNSRFFNIAKDPRVSMRRRSGTLVIDFRSGGRPEEYEGEYQCFARNKFGTALS

SEQ ID NO: 17863 - protein, 511 aa, Homo sapiens
MKTKLNIYNMQFLLFVFLVWDPARLVLANIQEDEAKNNITIFTRILDRLLDGYDNRLRPGLGDSITEVFTNIYVTSFGPVSDTDMEYTIDVFFRQKWKDERLKFKGPMNILRLNNLMASKIWTPDTFFHNGKKSVAHNMTMPNKLLRIQDDGTLLYTMRLTVQAECPMHLEDFPMDAHSCPLKFGSYAYTTSEVTYIWTYNASDSVQVAPDGSRLNQYDLLGQSIGKETIKSSTGEYTVMTAHFHLKRKIGYFVIQTYLPCIMTVILSQVSFWLNRESVPARTVFGVTTVLTMTTLSISARNSLPKVAYATAMDWFIAVCYAFVFSALIEFATVNYFTKRGWAWDGKSVVNDKSPSIKAEGITLTYNSVKAILQGAKLIWSKYIAFSWPSLFQEKTLEYLEKWMDCLTFKQSSKKEKASVMIQNNAYAVAVANYAPNLSKDPVLSTISKSATTPEPNKKPENKPAEAKKTFNSVSKIDRMSRIVFPVLFGTFNLVYWATYLNREPVLGVSP

SEQ ID NO: 17864 - protein, 94 aa, Homo sapiens
MTAEGDAPELPEERELMTNCSNMSLRKVPADLTPATTTLDLSYNLLFQLQSSDFHSVSKLRVLILCHNRIQQLDLKTFEFNKELRYLDLSNNRL

SEQ ID NO: 17865 - protein, 390 aa, Homo sapiens
MAEQLALVIGGTIGGLLLLLLIGASCCLWRRFCATLTYEELPGTPAMATTAASSGQRDRPCQPHARTQLSRPPAVPFVVPPTLQGRDWVPLHSGEWADAPWDPCPASELLPHTSSGGLGDACMVGAINPELYKFPEDKSETDFPDGCLGRLWFSVEYEQEAERLLVGLIKAQHLQAPSETCSPLVKLYLLPDERRFLQSKTKRKTSNPQFDEHFIFQVSSKTITQRVLKFSVYHVDRQRKHQLLGQVLFPLKNETLVGDCRRVIWRDLEAESLEPPSEFGDLQFCLSYNDYLSRLTVVVLRAKGLRLQEDRGIVSVFVKVSLMNHNKFVKCKKTSAVLGSINPVYNETFSFKADATELDTASLSLTVVQNMEGDKQATTVELFLFHLTSG

SEQ ID NO: 17866 - protein, 2826 aa, Homo sapiens
MGNENSTSDNQRTLSAQTPRSAQPPGNSQNIKRKQQDTPGSPDHRDASSIGSVGLGGFCTASESSASLDPCLVSPEVTEPRKDPQGARGPEGSLLPSPPPSQEREHPSSSMPFAECPPEGCLASPAAAPEDGPQTQSPRREPAPNAPGDIAAAFPAERDSSTPYQEIAAVPSAGRERQPKEEGQKSSFSFSSGIDQSPGMSPVPLREPMKAPLCGEGDQPGGFESQEKEAAGGFPPAESRQGVASVQVTPEAPAAAQQGTESSAVLEKSPLKPMAPIPQDPAPRASDRERGQGEAPPQYLTDDLEFLRACHLPRSNSGAAPEAEVNAASQESCQQPVGAYLPHAELPWGLPSPALVPEAGGSGKEALDTIDVQGHPQTGMRGTKPNQVVCVAAGGQPEGGLPVSPEPSLLTPTEEAHPASSLASFPAAQIPIAVEEPGSSSRESVSKAGMPVSADAAKEVVDAGLVGLERQVSDLGSKGEHPEGDPGEVPAPSPQERGEHLNTEQSHEVQPGVPPPPLPKEQSHEVQPGAPPPPLPKAPSESARGPPGPTDGAKVHEDSTSPAVAKEGSRSPGDSPGGKEEAPEPPDGGDPGNLQGEDSQAFSSKRDPEVGKDELSKPSSDAESRDHPSSHSAQPPRKGGAGHTDGPHSQTAEADASGLPHKLGEEDPVLPPVPDGAGEPTVPEGAIWEGSGLQPKCPDTLQSREGLGRMESFLTLESEKSDFPPTPVAEVAPKAQEGESTLEIRKMGSCDGEGLLTSPDQPRGPACDASRQEFHAGVPHPPQGENLAADLGLTALILDQDQQGIPSCPGEGWIRGAASEWPLLSSEKHLQPSQAQPETSIFDVLKEQAQPPENGKETSPSHPGFKDQGADSSQIHVPVEPQEDNNLPTHGGQEQALGSELQSQLPKGTLSDTPTSSPTDMVWESSLTEESELSAPTRQKLPALGEKRPEGACGDGQSSRVSPPAADVLKDFSLAGNFSRKETCCTGQGPNKSQQALADALEEGSQHEEACQRHPGASEAADGCSPLWGLSKREMASGNTGEAPPCQPDSVALLDAVPCLPALAPASPGVTPTQDAPETEACDETQEGRQQPVPAPQQKMECWATSDAESPKLLASFPSAGEQGGEAGAAETGGSAGAGDPGKQQAPEKPGEATLSCGLLQTEHCLTSGEEASTSALRESCQAEHPMASCQDALLPARELGGIPRSTMDFSTHQAVPDPKELLLSGPPEVAAPDTPYLHVDSAAQRGAEDSGVKAVSSADPRAPGESPCPVGEPPLALENAASLKLFAGSLAPLLQPGAAGGEIPAVQASSGSPKARTTEGPVDSMPCLDRMPLLAKGKQATGEEKAATAPGAGAKASGEGMAGDAAGETEGSMERMGEPSQDPKQGTSGGVDTSSEQIATLTGFPDFREHIAKIFEKPVLGALATPGEKAGAGRSAVGKDLTRPLGPEKLLDGPPGVDVTLLPAPPARLQVEKKQQLAGEAEISHLALQDPASDKLLGPAGLTWERNLPGAGVGKEMAGVPPTLREDERPEGPGAAWPGLEGQAYSQLERSRQELASGLPSPAATQELPVERAAAFQVAPHSHGEEAVAQDRIPSGKQHQETSACDSPHGEDGPGDFAHTGVPGHVPRSTCAPSPQREVLTVPEANSEPWTLDTLGGERRPGVTAGILEMRNALGNQSTPAPPTGEVADTPLEPGKVAGAAGEAEGDITLSTAETQACASGDLPEAGTTRTFSVVAGDLVLPGSCQDPACSDKAPGMEGTAALHGDSPARPQQAKEQPGPERPIPAGDGKVCVSSPPEPDETHDPKLQHLAPEELHTDRESPRPGPSMLPSVPKKDAPRVMDKVTSDETRGAEGTESSPVADDIIQPAAPADLESPTLAASSYHGDVVGQVSTDLIAQRSSDSEEAFETPESTTPVKAPPAPPPPPPEVIPEPEVSTQPPPEEPGCGSETVPVPDGPRSDSVEGSPFRPPSHSFSAVFDEDKPIASSGTYNLDFDNIELVDTFQTLEPRASDAKNQEGKVNTRRKSTDSVPISKSTLSRSLSLQASDFDGASSSGNPEAVALAPDAYSTGSSSASSTLKRTKKPRPPSLKKKQTTKKPTETPPVKETQQEPDEESLVPSGENLASETKTESAKTEGPSPALLEETPLEPAVGPKAACPLDSESAEGVVPPASGGGRVQNSPPVGRKTLPLTTAPEAGEVTPSDSGGQEDSPAKGLSVRLEFDYSEDKSSWDNQQENPPPTKKIGKKPVAKMPLRRPKMKKTPEKLDNTPASPPRSPAEPNDIPIAKGTYTFDIDKWDDPNFNPFSSTSKMQESPKLPQQSYNFDPDTCDESVDPFKTSSKTPSSPSKSPASFEIPASAMEANGVDGDGLNKPAKKKKTPLKTDTFRVKKSPKRSPLSDPPSQDPTPAATPETPPVISAVVHATDEEKLAVTNQKWTCMTVDLEADKQDYPQPSDLSTFVNETKFSSPTEELDYRNSYEIEYMEKIGSSLPQDDDAPKKQALYLMFDTSQESPVKSSPVRMSESPTPCSGSSFEETEALVNTAAKNQHPVPRGLAPNQESHLQVPEKSSQKELEAMGLGTPSEAIEIREAAHPTDVSISKTALYSRIGTAEVEKPAGLLFQQPDLDSALQIARAEIITKEREVSEWKDKYEESRREVMEMRKIVAEYEKTIAQMIEDEQREKSVSHQTVQQLVLEKEQALADLNSVEKSLADLFRRYEKMKEVLEGFRKNEEVLKRCAQEYLSRVKKEEQRYQALKVHAEEKLDRANAEIAQVRGKAQQEQAAHQASLRKEQLRVDALERTLEQKNKEIEELTKICDELIAKMGKS

SEQ ID NO: 17867 - protein, 385 aa, Homo sapiens
GFGTRSRNLKPWMIAVLIVLSLTVVAVTIGLLVHFLVFDPQINNNFGQSNTYQLKDLRETTENLVDEIFIDSAWKKNYIKNQVVRLTPEEDGVKVDVIMVFQFPSTEQRAVREKKIQSILNQKIRNLRALPINASSVQVNGCGKRVVPLNVNRIASGVIAPKAAWPWQASLQYDNIHQCGATLISNTWLVTAAHCFQKYKNPHQWTVSFGTKINPPLMKRNVRRFIIHEKYRSAAREYDIAVVQVSSRVTFSDDIRQICLPEASASFQPNLTVHITGFGALYYGGESQNDLREARVKIISDDVCKQPQVYGNDIKPGMFCAGYMEGIYDACRGDSGGPLVTRDLKDTWYLIGIVSWGDNCGQKDKPGVYTQVTYYRNWIASKTGI

SEQ ID NO: 17868 - protein, 1004 aa, Homo sapiens
MRGSGPRGAGRRRPPSGGGDTPITPASLAGCYSAPRRAPLWTCLLLCAALRTLLASPSNEVNLLDSRTVMGDLGWIAFPKNGWEEIGEVDENYAPIHTYQVCKVMEQNQNNWLLTSWISNEGASRIFIELKFTLRDCNSLPGGLGTCKETFNMYYFESDDQNGRNIKENQYIKIDTIAADESFTELDLGDRVMKLNTEVRDVGPLSKKGFYLAFQDVGACIALVSVRVYYKKCPSVVRHLAVFPDTITGADSSQLLEVSGSCVNHSVTDEPPKMHCSAEGEWLVPIGKCMCKAGYEEKNGTCQVCRPGFFKASPHIQSCGKCPPHSYTHEEASTSCVCEKDYFRRESDPPTMACTRPPSAPRNAISNVNETSVFLEWIPPADTGGRKDVSYYIACKKCNSHAGVCEECGGHVRYLPRQSGLKNTSVMMVDLLAHTNYTFEIEAVNGVSDLSPGARQYVSVNVTTNQAAPSPVTNVKKGKIAKNSISLSWQEPDRPNGIILEYEIKYFEKDQETSYTIIKSKETTITAEGLKPASVYVFQIRARTAAGYGVFSRRFEFETTPVSVAASSDQSQIPVIAVSVTVGVILLAVVIGVLLSGSCCECGCGRASSLCAVAHPSLIWRCGYSKAKQDPEEEKMHFHNGHIKLPGVRTYIDPHTYEDPNQAVHEFAKEIEASCITIERVIGAGEFGEVCSGRLKLPGKRELPVAIKTLKVGYTEKQRRDFLGEASIMGQFDHPNIIHLEGVVTKSKPVMIVTEYMENGSLDTFLKKNDGQFTVIQLVGMLRGISAGMKYLSDMGYVHRDLAARNILINSNLVCKVSDFGLSRVLEDDPEAAYTTRGGKIPIRWTAPEAIAFRKFTSASDVWSYGIVMWEVVSYGERPYWEMTNQDVIKAVEEGYRLPSPMDCPAALYQLMLDCWQKERNSRPKFDEIVNMLDKLIRNPSSLKTLVNASCRVSNLLAEHSPLGSGAYRSVGEWLEAIKMGRYTEIFMENGYSSMDAVAQVTLE

SEQ ID NO: 17869 - protein, 77 aa, Homo sapiens
MLQCLVTGHPRPQVRWTKTAGSASDKFQETSVFNETLRIERIARTQGGRYYCKAENGVGVPAIKSIRVDVQYLDEPM

SEQ ID NO: 17870 - protein, 1004 aa, Homo sapiens
MDKILEGLVSSSHPLPLKRVIVRKVVESAEHWLDEAQCEAMFDLTTRLILEGQDPFQRQVGHQVLEAYARYHRPEFESFFNKTFVLGLLHQGYHSLDRKDVAILDYIHNGLKLIMSCPSVLDLFSLLQVEVLRMVCERPEPQLCARLSDLLTDFVQCIPKGKLSITFCQQLVRTIGHFQCVSTQERELREYVSQVTKVSNLLQNIWKAEPATLLPSLQEVFASISSTDASFEPSVALASLVQHIPLQMITVLIRSLTTDPNVKDASMTQALCRMIDWLSWPLAQHVDTWVIALLKGLAAVQKFTILIDVTLLKIELVFNRLWFPLVRPGALAVLSHMLLSFQHSPEAFHLIVPHVVNLVHSFKNDGLPSSTAFLVQLTELIHCMMYHYSGFPDLYEPILEAIKDFPKPSEEKIKLILNQSAWTSQSNSLASCLSRLSGKSETGKTGLINLGNTCYMNSVIQALFMATDFRRQVLSLNLNGCNSLMKKLQHLFAFLAHTQREAYAPRIFFEASRPPWFTPRSQQDCSEYLRFLLDRLHEEEKILKVQASHKPSEILECSETSLQEVASKAAVLTETPRTSDGEKTLIEKMFGGKLRTHIRCLNCRSTSQKVEAFTDLSLAFCPSSSLENMSVQDPASSPSIQDGGLMQASVPGPSEEPVVYNPTTAAFICDSLVNEKTIGSPPNEFYCSENTSVPNESNKILVNKDVPQKPGGETTPSVTDLLNYFLAPEILTGDNQYYCENCASLQNAEKTMQITEEPEYLILTLLRFSYDQKYHVRRKILDNVSLPLVLELPVKRITSFSSLSESWSVDVDFTDLSENLAKKLKPSGTDEASCTKLVPYLLSSVVVHSGISSESGHYYSYARNITSTDSSYQMYHQSEALALASSQSHLLGRDSPSAVFEQDLENKEMSKEWFLFNDSRVTFTSFQSVQKITSRFPKDTAYVLLYKKQHSTNGLSGNNPTSGLWINGDPPLQKELMDAITKDNKLYLQVSWKYKLYLLKILNN

SEQ ID NO: 17871 - protein, 1214 aa, Homo sapiens
MEKYVRLQKIGEGSFGKAILVKSTEDGRQYVIKEINISRMSSKEREESRREVAVLANMKHPNIVQYRESFEENGSLYIVMDYCEGGDLFKRINAQKGVLFQEDQILDWFVQICLALKHVHDRKILHRDIKSQNIFLTKDGTVQLGDFGIARVLNSTVELARTCIGTPYYLSPEICENKPYNNKSDIWALGCVLYELCTLKHAFEAGSMKNLVLKIISGSFPPVSLHYSYDLRSLVSQLFKRNPRDRPSVNSILEKGFIAKRIEKFLSPQLIAEEFCLKTFSKFGSQPIPAKRPASGQNSISVMPAQKITKPAAKYGIPLAYKKYGDKKLHEKKPLQKHKQAHQTPEKRVNTGEERRKISEEAARKRRLEFIEKEKKQKDQIISLMKAEQMKRQEKERLERINRAREQGWRNVLSAGGSGEVKAPFLGSGGTIAPSSFSSRGQYEHYHAIFDQMQQQRAEDNEAKWKREIYGRGLPERQKGQLAVERAKQVEEFLQRKREAMQNKARAEGHMVYLARLRQIRLQNFNERQQIKAKLRGEKKEANHSEGQEGSEEADMRRKKIESLKAHANARAAVLKEQLERKRKEAYEREKKVWEEHLVAKGVKSSDVSPPLGQHETGGSPSKQQMRSVISVTSALKEVGVDSSLTDTRETSEEMQKTNNAISSKREILRRLNENLKAQEDEKGKQNLSDTFEINVHEDAKEHEKEKSVSSDRKKWEAGGQLVIPLDELTLDTSFSTTERHTVGEVIKLGPNGSPRRAWGKSPTDSVLKILGEAELQLQTELLENTTIRSEISPEGEKYKPLITGEKKVQCISHEINPSAIVDSPVETKSPEFSEASPQMSLKLEGNLEEPDDLETEILQEPSGTNKDESLPCTITDVWISEEKETKETQSADRITIQENEVSEDGVSSTVDQLSDIHIEPGTNDSQHSKCDVDKSVQPEPFFHKVVHSEHLNLVPQVQSVQCSPEESFAFRSHSHLPPKNKNKNSLLIGLSTGLFDANNPKMLRTCSLPDLSKLFRTLMDVPTVGDVRQDNLEIDEIEDENIKEGPSDSEDIVFEETDTDLQELQASMEQLLREQPGEEYSEEEESVLKNSDVEPTANGTDVADEDDNPSSESALNEEWHSDNSDGEIASECECDSVFNHLEELRLHLEQEMGFEKFFEVYEKIKAIHEDEDENIEICSKIVQNILGNEHQHLYAKILHLVMADGAYQEDNDE

SEQ ID NO: 17872 - protein, 1085 aa, Homo sapiens
MRGGRGRGKRARSAAAAPGSEASFTESRGLQNKNRGGANGKGRRGSLNASGRRTPPNCAAEDIKASPSSTNKRKNKPPMELDLNSSSEDNKPGKRVRTNSRSTPTTPQGKPETTFLDQGCSSPVLIDCPHPNCNKKYKHINGLRYHQAHAHLDPENKLEFEPDSEDKISDCEEGLSNVALECSEPSTSVSAYDQLKAPASPGAGNPPGTPKGKRELMSNGPGSIIGAKAGKNSGKKKGLNNELNNLPVISNMTAALDSCSAADGSLAAEMPKLEAEGLIDKKNLGDKEKGKKATNCKTDKNLSKLKSARPIAPAPAPTPPQLIAIPTATFTTTTTGTIPGLPSLTTTVVQATPKSPPLKPIQPKPTIMGEPITVNPALVSLKDKKKKEKRKLKDKEGKETGSPKMDAKLGKLEDSKGASKDLPGHFLKDHLNKNEGLANGLSESQESRMASIKAEADKVYTFTDNAPSPSIGSASRLECSTLVNGQAPMAPLHVLTQNGAESSAAKTSSPAYSDISDAADDGGSDSRSEGMRSKASSPSDIISSKDSVVKGHSSTTAQSSQLKESHSPYYHSYDPYYSPSYMHPGQVGAPAAGNSGSTQGMKIKKESEEDAEKKDKAEQLDSKKVDHNSASLQPQHQSVITQRHPALAQSLYYGQYAYGLYMDQKSLMATSPAYRQQYEKYYEDQRLAEQKMAQTGRGDCERKSELPLKELGKEETKQKNMPSATISKAPSTPEPNKNHSKLGPSVPNKTEETGKSQLLSNHQQQLQADSFKAKQMENHQLIKEAVEMKSVMDSMKQTGVDPTSRFKQDPDSRTWHHYVYQPKYLDQQKSEELDREKKLKEDSPRKTPNKESGVPSLPVSLTSIKEEPKEAKHPDSQSMEESKLKNDDRKTPVNWKDSRGTRVAVSSPMSQHQSYIQYLHAYPYPQMYDPSHPAYRAVSPVLMHSYPGAYLSPGFHYPVYGKMSGREETEKVNTSPSVNTKTTTESKALDLLQQHANQYRSKSPAPVEKATAEREREAERERDRHSPFGQRHLHTHHHTHVGMGYPLIPGQYDPFQGLTSAALVASQQVAAQASASGMFPGQRRE

SEQ ID NO: 17873 - protein, 369 aa, Homo sapiens
MSVKWTSVILLIQLSFCFSSGNCGKVLVWAAEYSHWMNIKTILDELIQRGHEVTVLASSASILFDPNNSSALKIEIYPTSLTKTELENFIMQQIKRWSDLPKDTFWLYFSQVQEIMSIFGDITRKFCKDVVSNKKFMKKVQESRFDVIFADAIFPCSELLAELFNIPFVYSLSFSPGYTFEKHSGGFIFPPSYVPVVMSELTDQMTFMERVKNMIYVLYFDFWFEIFDMKKWDQFYSEVLGRPTTLSETMGKADVWLIRNSWNFQFPYPLLPNVDFVGGLHCKPAKPLPKEMEDFVQSSGENGVVVFSLGSMVSNMTEERANVIASALAQIPQKVLWRFDGNKPDTLGLNTRLYKWIPQNDLLDIKRML

SEQ ID NO: 17874 - protein, 983 aa, Homo sapiens
MEMKLPGQEGFEASSAPRNIPSGELDSNPDPGTGPSPDGPSDTESKELGVPKDPLLFIQLNELLGWPQALEWRETGSSSASLLLDMGEMPSITLSTHLHHRWVLFEEKLEVAAGRWSAPHVPTLALPSLQKLRSLLAEGLVLLDCPAQSLLELVEQVTRVESLSPELRGQLQALLLQRPQHYNQTTGTRPCWGSTHPRKASDNEEAPLREQCQNPLRQKLPPGAEAGTVLAGELGFLAQPLGAFVRLRNPVVLGSLTEVSLPSRFFCLLLGPCMLGKGYHEMGRAAAVLLSDPQFQWSVRRASNLHDLLAALDAFLEEVTVLPPGRWDPTARIPPPKCLPSQHKRLPSQQREIRGPAVPRLTSAEDRHRHGPHAHSPELQRTGRLFGGLIQDVRRKVPWYPSDFLDALHLQCFSAVLYIYLATVTNAITFGGLLGDATDGAQGVLESFLGTAVAGAAFCLMAGQPLTILSSTGPVLVFERLLFSFSRDYSLDYLPFRLWVGIWVATFCLVLVATEASVLVRYFTRFTEEGFCALISLIFIYDAVGKMLNLTHTYPIQKPGSSAYGCLCQYPGPGGNESQWIRTRPKDRDDIVSMDLGLINASLLPPPECTRQGGHPRGPGCHTVPDIAFFSLLLFLTSFFFAMALKCVKTSRFFPSVVRKGLSDFSSVLAILLGCGLDAFLGLATPKLMVPREFKPTLPGRGWLVSPFGANPWWWSVAAALPALLLSILIFMDQQITAVILNRMEYRLQKGAGFHLDLFCVAVLMLLTSALGLPWYVSATVISLAHMDSLRRESRACAPGERPNFLGIREQRLTGLVVFILTGASIFLAPVLKFIPMPVLYGIFLYMGVAALSSIQFTNRVKLLLMPAKHQPDLLLLRHVPLTRVHLFTAIQLACLGLLWIIKSTPAAIIFPLMLLGLVGVRKALERVFSPQELLWLDELMPEEERSIPEKGLEPEHSFSGSDSEDSELMYQPKAPEINISVN

SEQ ID NO: 17875 - protein, 157 aa, Homo sapiens
MNPVPQMEMQKSPVFCVAHAGSCRPELFLFGHLGSSWGLDLKEEEPRSFEVTRREGLSSHNELLASCGKKFCSRGSRCVLSRKTGEPECQCLEACRPSYVPVCGSDGRFYENHCKLHRAACLLGKRITVIHSKDCFLKGDTCTMAGYARLKNVLLAL

SEQ ID NO: 17876 - protein, 921 aa, Homo sapiens
MEERGGVYAGRGLELVFWEWEVVTVMSVFSRSRIKCVPADVYSFIYSCHTTGLSLNNDRLYKLTYSTEVLLDRGKGKLQDSVGYRISSNVDVALLWRNPDGDDDQLIQITMKDVNVENVNQQRGEKSIFKGKSPSKIMGKENLEALQRPTLLHLIHGKVKEFYSYQNEAVAIENIKRGLASLFQTQLSSGTTNEVDISGNCKVTYQAHQDKVIKIKALDSCKIARSGFTTPNQVLGVSSKATSVTTYKIEDSFVIAVLAEETHNFGLNFLQTIKGKIVSKQKLELKTTEAGPRLMSGKQAAAIIKAVDSKYTAIPIVGQVFQSHCKGCPSLSELWRSTRKYLQPDNLSKAEAVRNFLAFIQHLRTAKKEEILQILKMENKEVLPQLVDAVTSAQTSDSLEAILDFLDFKSDSSIILQERFLYACGFASHPNEELLRALISKFKGSIGSSDIRETVMIITGTLVRKLCQNEGCKLKAVVEAKKLILGGLEKAEKKEDTRMYLLALKNALLPEGIPSLLKYAEAGEGPISHLATTALQRYDLPFITDEVKKTLNRIYHQNRKVHEKTVRTAAAAIILNNNPSYMDVKNILLSIGELPQEMNKYMLAIVQDILRFEMPASKIVRRVLKEMVAHNYDRFSRSGSSSAYTGYIERSPRSASTYSLDILYSGSGILRRSNLNIFQYIGKAGLHGSQVVIEAQGLEALIAATPDEGEENLDSYAGMSAILFDVQLRPVTFFNGYSDLMSKMLSASGDPISVVKGLILLIDHSQELQLQSGLKANIEVQGGLAIDISGAMEFSLWYRESKTRVKNRVTVVITTDITVDSSFVKAGLETSTETEAGLEFISTVQFSQYPFLVCMQMDKDEAPFRQFEKKYERLSTGRGYVSQKRKESVLAGCEFPLHQENSEMCKVVFAPQPDSTSSGWF

SEQ ID NO: 17877 - protein, 828 aa, Homo sapiens
CCKKHGLRGMRWKCRVCLDYDLCTQCYMHNKHELAHAFDRYETAHSRPVTLSPRQGLPRIPLRGIFQGAKVVRGPDWEWGSQDGGEGKPGRVVDIRGWDVETGRSVASVTWADGTTNVYRVGHKGKVDLKCVGEAAGGFYYKDHLPRLGKPAELQRRVSADSQPFQHGDKVKCLLDTDVLREMQEGHGGWNPRMAEFIGQTGTVHRITDRGDVRVQFNHETRWTFHPGALTKALGRVGKVVKVFGDGNLRVAVAGQRWTFSPSCLVAYRPEEDANLDVAERARENKSSLSVALDKLRAQKSDPEHPGRLVVEVALGNAARALDLLRRRPEQVDTKNQGRTALQVAAYLGQVELIRLLLQARAGVDLPDDEGNTALHYAALGNQPEATRVLLSAGCRADAINSTQSTALHVAVQRGFLEVVRALCERGCDVNLPDAHSDTPLHSAISAGTGASGIVEVLTEVPNIDVTATNSQGFTLLHHASLKGHALAVRKILARARQLVDAKKEDGFTALHLAALNNHREVAQILIREGRCDVNVRNRKLQSPLHLAVQQAHVGLVPLLVDAGCSVNAEDEEGDTALHVALQRHQLLPLVADGAGGDPGPLQLLSRLQASGLPGSAELTVGAAVACFLALEGADVSYTNHRGRSPLDLAAEGRVLKALQGCAQRFRERQAGGGAAPGPRQTLGTPNTVTNLHVGAAPGPEAAECLVCSELALLVLFSPCQHRTVCEECARRMKKCIRCQVVVSKKLRPDGSEVASAAPAPGPPRQLVEELQSRYRQMEERITCPICIDSHIRLVFQCGHGACAPCGSALSACPICRQPIRDRIQIFV

SEQ ID NO: 17878 - protein, 606 aa, Homo sapiens; identical to SEQ ID NO: 10908

SEQ ID NO: 17879 - protein, 180 aa, Homo sapiens
MTILGTTFGMVFSLLQVVSGESGYAQNGDLEDAELDDYSFSCYSQLEVNGSQHSLTCAFEDPDVNITNLEFEICGALVEVKCLNFRKLQEIYFIETKKFLLIGKSNICVKVGEKSLTCKKIDLTTIVKPEAPFDLSVVYREGANDFVVTFNTSHLQKKYVKVLMHDVAYRQEKDENKWTD

SEQ ID NO: 17880 - protein, 616 aa, Homo sapiens
MLDTFRLLVSVGHWLPKPNVISLLEQEAELWAVESRLPQGVYPDLETRPKVKLSVLKQGISEEISNSVILVERFLWDGLWYCRGEDTEGHWEWSCESLESLAVPVAFTPVKTPVLEQWQRNGFGENISLNPDLPHQPMTPERQSPHTWGTRGKREKPDLNVLQKTCVKEKPYKCQECGKAFSHSSALIEHHRTHTGERPYECHECLKGFRNSSALTKHQRIHTGEKPYKCTQCGRTFNQIAPLIQHQRTHTGEKPYECSECGKSFSFRSSFSQHERTHTGEKPYECSECGKAFRQSIHLTQHLRIHTGEKPYQCGECGKAFSHSSSLTKHQRIHTGEKPYECHECGKAFTQITPLIQHQRTHTGEKPYECGECGKAFSQSTLLTEHRRIHTGEKPYGCNECGKTFSHSSSLSQHERTHTGEKPYECSQCGKAFRQSTHLTQHQRIHTGEKPYECNDCGKAFSHSSSLTKHQRIHTGEKPYECNQCGRAFSQLAPLIQHQRIHTGEKPYECNQCGRAFSQSSLLIEHQRIHTKEKPYGCNECGKSFSHSSSLSQHERTHTGEKPYECHDCGKSFRQSTHLTQHRRIHTGEKPYACRDCGKAFTHSSSLTKHQRTHTG

SEQ ID NO: 17881 - protein, 589 aa, Homo sapiens
MNLHQVLTGAVNPGDHCFSVGSIGDQRFTAYASGCDIVILGSDFERLQIIPGAKHGNIQVGCVDCSMQQGKIAASYGNVISIFEPVNLPKQKKNLELYSQWQKSGQFFLESIAHNITWDPTGSRLLTGSSYLQLWSNTNLEKPTEDENLNKTDLNFGDWKCIWHCKTASQVHLMKFSPDGEFFATAGKDDCLLKVWYNVENWRTAVTSPDGSSEKQSQGEIDFSFVYLAHPRAVNGFSWRKTSKYMPRASVCNVLLTCCKDNVCRLWVETFLPNDCLLYGGDCSHWTESINLTNNFKRNASSKERVQNALEVNLRHFRRGRRRSLALVAHTGYLPHQQDPHHVHRNTPLHANALCHFHIAASINPATDIPLLPSITSLSLNENEEKTGPFVVHWLNNKELHFTLSMEVFLQQLRKSFEQPSSEASVEDSNQADVKSDEETDDGVDDLKINPEKKELGCDKMVPNSSFTSLSSAAIDHQIEVLLSEWSKNADMLFSIHPMDGSLLVWHVDWLDEYQPGMFRQVQVSFVSRIPVAFPTGDANSLCKSIMMYACTKNVDLAIQQGKQKPSGLTRSTSMLISSGHNKSSNSLK

SEQ ID NO: 17882 - protein, 230 aa, Homo sapiens
SLHPGSLLKDLDTEKYFHLVLPTDELAEPKKSHRQSHRKKVLPEIYLTRLLSTKGTLQKFLDDLFKAILSIREDKPPLAVKYFFDFLEEQAEKRGISDPDTLHIWKTNSLPLRFWVNILKNPQFVFDIDKTDHIDACLSVIAQAFIDACSISDLQLGKDSPTNKLLYAKEIPEYRKIVQRYYKQIQDMTPLSEQEMNAHLAEESRKYQNEFNTNVAMAEIYKYAKRYRPQ

SEQ ID NO: 17883 - protein, 337 aa, Homo sapiens
TASGRGSASEHQDCNGKSASGRLARALRPDDPPLDGDDADDEGNLSKGERVRAWIRARLPACCLERDSWSAYIFPPQSRFRLLCHRIITHKMFDHVVLVIIFLNCITIAMERPKIDPHSAERIFLTLSNYIFTAVFLAEMTVKVVALGWCFGEQAYLRSSWNVLDGLLVLISVIDILVSMVSDSGTKILGMLRVLRLLRTLRPLRVISRAQGLKLVVETLMSSLKPIGNIVVICCAFFIIFGILGVQLFKGKFFVCQGEDTRNITNKSDCAEASYRWVRHKYNFDNLGQALMSLFVLASKDGWVDIMYDGLDAVGVDQQVGLRWAGSICGLRSLSMG

SEQ ID NO: 17884 - protein, 158 aa, Homo sapiens
MLNNLLLFSLQISLIGTTLGGNVLIWPMEGSHWLNVKIIIDELIKKEHNVTVLVASGALFITPTSNPSLTFEIYKVPFGKERIEGVIKDFVLTWLENRPSPSTIWRFYQEMAKVIKDFHMVSQEICDGVLKNQQLMAKLKKSKFEVLVSDPVFPCGDI

SEQ ID NO: 17885 - protein, 160 aa, Homo sapiens
GCCNIYRSIIGFVKLRSNKVKRSQKLVYMGKLKEKESFGEISVLLQVPFTCTIITKKEVEMAIIEDKDLFELDPVTKQLMLQTAKPTFGHLTDEDVKNEYLKKEQQKEWKDFKIASWTKEITDFICLYEKHQDNFTLPKIAHLERITKRIKNNSILIHLE

SEQ ID NO: 17886 - protein, 1028 aa, Homo sapiens
MAMALQRVRIAEKYGKNYLCLLQAVFVAETDLLLRIKDISHFLMQDIAFLSGGRGKDNAWIITFPENCNFRCIPEEVIAKVLTYLTSIARQNGSDSRFTIILDRRLDTWSSLKISLQKISASFPGNLHLVLVLRPTSFLQRTFTDIGFWFSQEDFMLKLPVVMLSSVSDLLTYIDDKQLTPELGGTLQYCHSEWIIFRNAIENFALTVKEMAQMLQSFGTELAETELPDDIPSIEEILAIRAERYHLLKNDITAVTKEGKILLTNLEVPDTEGAVSSRLECHRQISGDWQTINKLLTQVHDMETAFDGFWEKHQLKMEQYLQLWKFEQDFQQLVTEVEFLLNQQAELADVTGTIAQVKQKIKKLENLDENSQELLSKAQFVILHGHKLAANHHYALDLICQRCNELRYLSDILVNEIKAKRIQLSRTFKMHKLLQQARQCCDEGECLLANQEIDKFQSKEDAQKALQDIENFLEMALPFINYEPETLQYEFDVILSPELKVQMKTIQLKLENIRSIFENQQAGFRNLADKHVRPIQFVVPTPENLVTSGTPFFSSKQGKKTWRQNQSNLKIEVVPDCQEKRSSGPSSSLDNGNSLDVLKNHVLNELIQTERVYVRELYTVLLGYRAEMDNPEMFDLMPPLLRNKKDILFGNMAEIYEFHNDIFLSSLENCAHAPERVGPCFLERKDDFQMYAKYCQNKPRSETIWRKYSECAFFQECQRKLKHRLRLDSYLLKPVQRITKYQLLLKELLKYSKDCEGSALLKKALDAMLDLLKSVNDSMHQIAINGYIGNLNELGKMIMQGGFSVWIGHKKGATKMKDLARFKPMQRHLFLYEKAIVFCKRRVESGEGSDRYPSYSFKHCWKMDEVGITEYVKGDNRKFEIWYGEKEEVYIVQASNVDVKMTWLKEIRNILLKQQELLTVKKRKQQDQLTERDKFQISLQQNDEKQQGAFISTEETELEHTSTVVEVCEAIASVQAEANTVWTEASQSAEISEEPAEWSSNYFYPTYDENEEENRPLMRPVSEMALLY

SEQ ID NO: 17887 - protein, 171 aa, Homo sapiens
MPDSPVDVKTQSRLTPPTMPPPPTTQGAPRTSSFTPTTLTNGTSHSPTALNGAPSPPNGFSNGPSSSSSSSLANQQLPPACGARQLSKLKRFLTTLQQFGNDISPEIGERVRTLVLGLVNSTLTIEEFHSKLQEATNFPLRPFVIPFLKANLPLLQRELLHCARLAKQNPA

SEQ ID NO: 17888 - protein, 374 aa, Homo sapiens
SRERRFRLFASIECEGQLFMTPYDFILAVTTDEPKVAKTWKSLSKQELNQMLAETPPVWKGSSKLFRNLKEKGVISYTEYLFLLCILTKPHAGFRIAFNMFDTDGNEMVDKKEFLVLQEIFRKKNEKREIKGDEEKRAMLVLKTDAEELVSRSYWDTLRRNTSQALFSDLAERADDITSLVTDTTLLVHFFGKKGKAELNFEDFYRFMDNLQTEVLEIEFLSYSNGMNTISEEDFAHILLRYTNVENTSVFLENVRYSIPEEKGITFDEFRSFFQFLNNLEDFAIALNMYNFASRSIGQDEFKRAVYVATGLKFSPHLVNTVFKIFDVDKDDQLSYKEFIGIMKDRLHRGFRGYKTVQKYPTFKSCLKKELHSR

SEQ ID NO: 17889 - protein, 988 aa, Homo sapiens
AKDGTKDGLERTRAAVKRGRSFIRTKSLIAQDHRSSLEEEQNLFIDVDCKHPEAILTPMPEGLSQQQVVRRYILGSVVDSEKNYVDALKRILEQYEKPLSEMEPKVLSERKLKTVFYRVKEILQCHSLFQIALASRVSEWDSVEMIGDVFVASFSKSMVLDAYSEYVNNFSTAVAVLKKTCATKPAFLEFLKQEQEASPDRTTLYSLMMKPIQRFPQFILLLQDMLKNTSKGHPDRLPLQMALTELETLAEKLNERKRDADQRCEVKQIAKAINERYLNKLLSSGSRYLIRSDDMIETVYNDRGEIVKTKERRVFMLNDVLMCATVSSRPSHDSRVMSSQRYLLKWSVPLGHVDAIEYGSSAGTGEHSRHLAVHPPESLAVVANAKPNKVYMGPGQLYQDLQNLLHDLNVIGQITQLIGNLKGNYQNLNQSVAHDWTSGLQRLILKKEDEIRAADCCRIQLQLPGKQDKSGRPTFFTAVFNTFTPAIKESWVNSLQMAKLALEEENHMGWFCVEDDGNHIKKEKHPLLVGHMPVMVAKQQEFKIGSCTHQMGQIAIVSFQNSTPKVIECFNVESRILCMLYVPVEEKRREPGAPPDPETPAVRASDVPTICVGTEEGSISIYKSSQGSKKVRLQHFFTPEKSTVMSLACTSQSLYAGLVNGAVASYARAPDGSWDSEPQKVIKLGVLPVRSLLMMEDTLWAASGGQVFIISVETHAVEGQLEAHQEEGMVISHMAVSGVGIWIAFTSGSTLRLFHTETLKHLQDINIATPVHNMLPGHQRLSVTSLLVCHGLLMVGTSLGVLVALPVPRLQGIPKVTGRGMVSYHAHNSPVKFIVLATALHEKDKDKSRDSLAPGPEPQDEDQKDALPSGGAGSSLSQGDPDAAIWLGDSLGSMTQKSDLSSSSGSLSLSHGSSSLEHRSEDSTIYDLLKDPVSLRSKARRAKKAKASSALVVCGGQGHRRVHRKARQPHQEELAPTVMVWQIPLLNI

SEQ ID NO: 17890 - protein, 1119 aa, Homo sapiens
MPRPELPLPEGWEEARDFDGKVYYIDHTNRTTSWIDPRDRYTKPLTFADCISDELPLGWEEAYDPQVGDYFIDHNTKTTQIEDPRVQWRREQEHMLKDYLVVAQEALSAQKEIYQVKQQRLELAQQEYQQLHAVWEHKLGSQVSLVSGSSSSSKYDPEILKAEIATAKSRVNKLKREMVHLQHELQFKERGFQTLKKIDKKMSDAQGSYKLDEAQAVLRETKAIKKAITCGEKEKQDLIKSLAMLKDGFRTDRGSHSDLWSSSSSLESSSFPLPKQYLDVSSQTDISGSFGINSNNQLAEKVRLRLRYEEAKRRIANLKIQLAKLDSEAWPGVLDSERDRLILINEKEELLKEMRFISPRKWTQGEVEQLEMARKRLEKDLQAARDTQSKALTERLKLNSKRNQLVRELEEATRQVATLHSQLKSLSSSMQSLSSGSSPGSLTSSRGSLVASSLDSSTSASFTDLYYDPFEQLDSELQSKVEFLLLEGATGFRPSGCITTIHEDEVAKTQKAEGGGRLQALRSLSGTPKSMTSLSPRSSLSSPSPPCSPLMADPLLAGDAFLNSLEFEDPELSATLCELSLGNSAQERYRLEEPGTEGKQLGQAVNTAQGCGLKVACVSAAVSDESVAGDSGVYEASVQRLGASEAAAFDSDESEAVGATRIQIALKYDEKNKQFAILIIQLSNLSALLQQQDQKVNIRVAVLPCSESTTCLFRTRPLDASDTLVFNEVFWVSMSYPALHQKTLRVDVCTTDRSHLEECLGGAQISLAEVCRSGERSTRWYNLLSYKYLKKQSRELKPVGVMAPASGPASTDAVSALLEQTAVELEKRQEGRSSTQTLEDSWRYEETSENEAVAEEEEEEVEEEEGEEDVFTEKASPDMDGYPALKVDKETNTETPAPSPTVVRPKDRRVGTPSQGPFLRGSTIIRSKTFSPGPQSQYVCRLNRSDSDSSTLSKKPPFVRNSLERRSVRMKRPSPPPQPSSVKSLRSERLIRTSLDLELDLQATRTWHSQLTQEISVLKELKEQLEQAKSHGEKELPQWLREDERFRLLLRMLEKRQMDRAEHKGELQTDKMMRAAAKDVHRLRGQSCKEPPEVQSFREKMAFFTRPRMNIPALSADDV

SEQ ID NO: 17891 - protein, 1159 aa, Homo sapiens
MRGQAAAPGPVWILAPLLLLLLLLGRRARAAAGADAGPGPEPCATLVQGKFFGYFSAAAVFPANASRCSWTLRNPDPRRYTLYMKVAKAPVPCSGPGRVRTYQFDSFLESTRTYLGVESFDEVLRLCDPSAPLAFLQASKQFLQMRRQQPPQHDGLRPRAGPPGPTDDFSVEYLVVGNRNPSRAACQMLCRWLDACLAGSRSSHPCGIMQTPCACLGGEAGGPAAGPLAPRGDVCLRDAVAGGPENCLTSLTQDRGGHGATGGWKLWSLWGECTRDCGGGLQTRTRTCLPAPGVEGGGCEGVLEEGRQCNREACGPAGRTSSRSQSLRSTDARRREELGDELQQFGFPAPQTGDPAAEEWSPWSVCSSTCGEGWQTRTRFCVSSSYSTQCSGPLREQRLCNNSAVCPVHGAWDEWSPWSLCSSTCGRGFRDRTRTCRPPQFGGNPCEGPEKQTKFCNIALCPGRAVDGNWNEWSSWSACSASCSQGRQQRTRECNGPSYGGAECQGHWVETRDCFLQQCPVDGKWQAWASWGSCSVTCGAGSQRRERVCSGPFFGGAACQGPQDEYRQCGTQRCPEPHEICDEDNFGAVIWKETPAGEVAAVRCPRNATGLILRRCELDEEGIAYWEPPTYIRCVSIDYRNIQMMTREHLAKAQRGLPGEGVSEVIQTLVEISQDGTSYSGDLLSTIDVLRNMTEIFRRAYYSPTPGDVQNFVQILSNLLAEENRDKWEEAQLAGPNAKELFRLVEDFVDVIGFRMKDLRDAYQVTDNLVLSIHKLPASGATDISFPMKGWRATGDWAKVPEDRVTVSKSVFSTGLTEADEASVFVVGTVLYRNLGSFLALQRNTTVLNSKVISVTVKPPPRSLRTPLEIEFAHMYNGTTNQTCILWDETDVPSSSAPPQLGPWSWRGCRTVPLDALRTRCLCDRLSTFAILAQLSADANMEKATLPSVTLIVGCGVSSLTLLMLVIIYVSVWRYIRSERSVILINFCLSIISSNALILIGQTQTRNKVVCTLVAAFLHFFFLSSFCWVLTEAWQSYMAVTGHLRNRLIRKRFLCLGWGLPALVVAISVGFTKAKGYSTMNYCWLSLEGGLLYAFVGPAAAVVLGLPVELLRGAAAAGADLDVGCARRHRPPLRPLPDPLRCLRLAGGLRHRHGALYPP

SEQ ID NO: 17892 - protein, 504 aa, Homo sapiens
MPEKRLTAEPPTITEEEFEDSLATDDFLVDYFNEFLSLPTFSEAIRFNADYGVFEVANDAPQFLEKQLKKILQNQQPRNPIYDVVRKGKNEVKPVQMNAPDEDETINVNYNIMCLSREEGIKWIKKERLPAFLESDCYFEYRLAKLVSQVRWSKSGMNFTVGSNFSPWIVKKPPSLPPPATEEDNLVIMKKFYVSLGEASYTQTKDWFALAKQSQQTVSTFSLPCCVPYNKLKSPAISSVSENFIFDDGVHPRTKKDPSKTNKLISEFEEEEGEEEEVSVSLQDTPSQALLRVYLEKKQDVDESLTMHFSTCEEFLSSYIYFILRGAIQQIVGKPVGETPDYINFNNITKVSFDDCFESIHGKNFLSELVQTTKERSEEIEQTSLSSKNESAGPESRADWCISHRTYDIGNRKEFERFKKFIKGTLGERYWWLWMDIERLKVLKDPGRHQRHLEKMKKCYLVSNGDYYLSAEILSKFKLLDGSQWNEEHLRNIQSEVLKPLLLY

SEQ ID NO: 17893 - protein, 215 aa, Homo sapiens
MPGEATETVPATEQELPQSQAETGSGTASDSGESVPGIEEQDSTQTTTQKAWLVAAAEIDEEPVGKAKQSRSEKRARKAMSKLGLLQVTGVTRVTIWKSKNILFVITKLDVYKSPASDAYIVFGEAKIQDLSQQAQLAAAEKFRVQGEAVGNIQENTQTPTVQEESEEEEVDETGVEVKDVKLVMSQANVSRAKAVRALKNNSNDIVNAIMELTV

SEQ ID NO: 17894 - protein, 122 aa, Homo sapiens
MVMEKPSPLLVGREFVRQYYTLLNQAPDMLHRFYGKNSSYVHGGLDSNGKPADAVYGQKEIHRKVMSQNFTNCHTKIRHVDAHATLNDGVVVQVMGLLSNNNQALRRFMQTFVLAPESLKKK

SEQ ID NO: 17895 - protein, 2792 aa, Homo sapiens
MTSIHFVVHPLPGTEDQLNDRLREVSEKLNKYNLNSHPPLNVLEQATIKQCVVGPNHAAFLLEDGRVCRIGFSVQPDRLELGKPDNNDGSKLNSNSGAGRTSRPGRTSDSPWFLSGSETLGRLAGNTLGSRWSSGVGGSGGGSSGRSSAGARDSRRQTRVIRTGRDRGSGLLGSQPQPVIPASVIPEELISQAQVVLQGKSRSVIIRELQRTNLDVNLAVNNLLSRDDEDGDDGDDTASESYLPGEDLMSLLDADIHSAHPSVIIDADAMFSEDISYFGYPSFRRSSLSRLGSSRERDSELLRERESVLRLRERRWLDGASFDNERGSTSKEGEPNLDKKNTPVQSPVSLGEDLQWWPDKDGTKFICIGALYSELLAVSSKGELYQWKWSESEPYRNAQNPSLHHPRATFLGLTNEKIVLLSANSIRATVATENNKVATWVDETLSSVASKLEHTAQTYSELQGERIVSLHCCALYTCAQLENSLYWWGVVPFSQRKKMLEKARAKNKKPKSSAGISSMPNITVGTQVCLRNNPLYHAGAVAFSISAGIPKVGVLMESVWNMNDSCRFQLRSPESLKNMEKASKTTEAKPESKQEPVKTEMGPPPSPASTCSDASSIASSASMPYKRRRSTPAPKEEEKVNEEQWSLREVVFVEDVKNVPVGKVLKVDGAYVAVKFPGTSSNTNCQNSSGPDADPSSLLQDCRLLRIDELQVVKTGGTPKVPDCFQRTPKKLCIPEKTEILAVNVDSKGVHAVLKTGNWVRYCIFDLATGKAEQENNFPTSSIAFLGQNERNVAIFTAGQESPIILRDGNGTIYPMAKDCMGGIRDPDWLDLPPISSLGMGVHSLINLPANSTIKKKAAVIIMAVEKQTLMQHILRCDYEACRQYLMNLEQAVVLEQNLQMLQTFISHRCDGNRNILHACVSVCFPTSNKETKEEEEAERSERNTFAERLSAVEAIANAISVVSSNGPGNRAGSSSSRSLRLREMMRRSLRAAGLGRHEAGASSSDHQDPVSPPIAPPSWVPDPPAMDPDGDIDFILAPAVGSLTTAATGTGQGPSTSTIPGPSTEPSVVESKDRKANAHFILKLLCDSVVLQPYLRELLSAKDARGMTPFMSAVSGRAYPAAITILETAQKIAKAEISSSEKEEDVFMGMVCPSGTNPDDSPLYVLCCNDTCSFTWTGAEHINQDIFECRTCGLLESLCCCTECARVCHKGHDCKLKRTSPTAYCDCWEKCKCKTLIAGQKSARLDLLYRLLTATNLVTLPNSRGEHLLLFLVQTVARQTVEHCQYRPPRIREDRNRKTASPEDSDMPDHDLEPPRFAQLALERVLQDWNALKSMIMFGSQENKDPLSASSRIGHLLPEEQVYLNQQSGTIRLDCFTHCLIVKCTADILLLDTLLGTLVKELQNKYTPGRREEAIAVTMRFLRSVARVFVILSVEMASSKKKNNFIPQPIGKCKRVFQALLPYAVEELCNVAESLIVPVRMGIARPTAPFTLASTSIDAMQGSEELFSVEPLPPRPSSDQSSSSSQSQSSYIIRNPQQRRISQSQPVRGRDEEQDDIVSADVEEVEVVEGVAGEEDHHDEQEEHGEENAEAEGQHDEHDEDGSDMELDLLAAAETESDSESNHSNQDNASGRRSVVTAATAGSEAGASSVPAFFSEDDSQSNDSSDSDSSSSQSDDIEQETFMLDEPLERTTNSSHANGAAQAPRSMQWAVRNTQHQRAASTAPSSTSTPAASSAGLIYIDPSNLRRSGTISTSAAAAAAALEASNASSYLTSASSLARAYSIVIRQISDLMGLIPKYNHLVYSQIPAAVKLTYQDAVNLQNYVEEKLIPTWNWMVSIMDSTEAQLRYGSALASAGDPGHPNHPLHASQNSARRERMTAREEASLRTLEGRRRATLLSARQGMMSARGDFLNYALSLMRSHNDEHSDVLPVLDVCSLKHVAYVFQALIYWIKAMNQQTTLDTPQLERKRTRELLELGIDNEDSEHENDDDTNQSATLNDKDDDSLPAETGQNHPFFRRSDSMTFLGCIPPNPFEVPLAEAIPLADQPHLLQPNARKEDLFGRPSQGLYSSSASSGKCLMEVTVDRNCLEVLPTKMSYAANLKNVMNMQNRQKKEGEEQPVLPEETESSKPGPSAHDLAAQLKSSLLAEIGLTESEGPPLTSFRPQCSFMGMVISHDMLLGRWRLSLELFGRVFMEDVGAEPGSILTELGGFEVKESKFRREMEKLRNQQSRDLSLEVDRDRDLLIQQTMRQLNNHFGRRCATTPMAVHRVKVTFKDEPGEGSGVARSFYTAIAQAFLSNEKLPNLECIQNANKGTHTSLMQRLRNRGERDREREREREMRRSSGLRAGSRRDRDRDFRRQLSIDTRPFRPASEGNPSDDPEPLPAHRQALGERLYPRVQAMQPAFASKITGMLLELSPAQLLLLLASEDSLRARVDEAMELIIAHGRENGADSILDLGLVDSSEKVQENRKRHGSSRSVVDMDLDDTDDGDDNAPLFYQPGKRGFYTPRPGKNTEARLNCFRNIGRILGLCLLQNELCPITLNRHVIKVLLGRKVNWHDFAFFDPVMYESLRQLILASQSSDADAVFSAMDLAFAIDLCKEEGGGQVELIPNGVNIPVTPQNVYEYVRKYAEHRMLVVAEQPLHAMRKGLLDVLPKNSLEDLTAEDFRLLVNGCGEVNVQMLISFTSFNDESGENAEKLLQFKRWFWSIVEKMSMTERQDLVYFWTSSPSLPASEEGFQPMPSITIRPPDDQHLPTANTCISRLYVPLYSSKQILKQKLLLAIKTKNFGFV

SEQ ID NO: 17896 - protein, 538 aa, Homo sapiens
MSSPLASELSELAALRPGFRLSAPHARVAPRAATHARGRGRASHAGQPRLRSSCPGPSPGKRRVVPSGGAQPRVLPALSSRSHLFPMASHPQTRIQAYLEKNKIGPLFEELMTKLITETPDQPIPFLIDHLQSKQGNRGQLQRTLSGSAALWAESEKSESKGTRRDFRSYDKPWQLNAKKPKKSKSDLAVSNISPPSPDSKSLPRSVEHPKWNWRTKPQSRDFDELNHILQESKKLGKALENLSRSIAISDELDKETVTFNSSLLRPRVIGEWIGREENDADPLAAEMLQPPIPRSKNDQWESEDSGSSPAGSLKMEPKNKGLKQQQQQHKKLLAAMLSQDSFESIHSPTPSVTEEDIDNEDDAMELLEDLNDLRMEGVTTLVPSGSKFNQGRPTYPAEPQAKVTLNICSRCARLQGDNLEERTEESLPILHSPDEKIPDSFDSLPGTEEALMEEGDEFEKASKLTGPGEASSGVGHSLKNYMEEDESLKQLQVVHQPWILPSDTESEGVEAEQEKRSADLLLCVPCSSCPTLVYSGL

SEQ ID NO: 17897 - protein, 841 aa, Homo sapiens
MTAVHAGNINFKWDPKSLEIRTLAVERLLEPLVTQVTTLVNTNSKGPSNKKRGRSKKAHVLAASVEQATENFLEKGDKIAKESQFLKEELVAAVEDVRKQGDLMKAAAGEFADDPCSSVKRGNMVRAARALLSAVTRLLILADMADVYKLLVQLKVVEDGILKLRNAGNEQDLGIQYKALKPEVDKLNIMAAKRQQELKDVGHRDQMAAARGILQKNVPILYTASQACLQHPDVAAYKANRDLIYKQLQQAVTGISNAAQATASDDASQHQGGGGGELAYALNNFDKQIIVDPLSFSEERFRPSLEERLESIISGAALMADSSCTRDDRRERIVAECNAVRQALQDLLSEYMGNAGRKERSDALNSAIDKMTKKTRDLRRQLRKAVMDHVSDSFLETNVPLLVLIEAAKNGNEKEVKEYAQVFREHANKLIEVANLACSISNNEEGVKLVRMSASQLEALCPQVINAALALAAKPQSKLAQENMDLFKEQWEKQVRVLTDAVDDITSIDDFLAVSENHILEDVNKCVIALQEKDVDGLDRTAGAIRGRAARVIHVVTSEMDNYEPGVYTEKVLEATKLLSNTVMPRFTEQVEAAVEALSSDPAQPMDENEFIDASRLVYDGIRDIRKAVLMIRTPEELDDSDFETEDFDVRSRTSVQTEDDQLIAGQSARAIMAQLPQEQKAKIAEQVASFQEEKSKLDAEVSKWDDSGNDIIVLAKQMCMIMMEMTDFTRGKGPLKNTSDVISAAKKIAEAGSRMDKLGRTIADHCPDSACKQDLLAYLQRIALYCHQLNICSKVKAEVQNLGGELVVSGNCDTCGALQGLKGWPPPLCWPLTGWTAPCP

SEQ ID NO: 17898 - protein, 65 aa, Homo sapiens
MGDPERPEAAGLDQDEMESCSVTRPECSGVISAHCNLCLLGSSDSPASASRVAGTTEIIFRHQRK

SEQ ID NO: 17899 - protein, 1231 aa, Homo sapiens
MCKCCNLFSPNQSELLSHVSEKHMEEGVNVDEIIIPLRPLSTPEPPNSSKTGDEFLVMKRKRGRPKGSTKKSSTEEELAENIVSPTEDSPLAPEEGNSLPPSSLECSKCCRKFSNTRQLRKHICIIVLNLGEEEGEAGNESDLELEKKCKEDDREKASKRPRSQKTEKVQKISGKEARQLSGAKKPIISVVLTAHEAIPGATKIVPVEAGPPETGATNSETTSADLVPRRGYQEYAIQQTPYEQPMKSSRLGPTQLKIFTCEYCNKVFKFKHSLQAHLRIHTNEKPYKCPQCSYASAIKANLNVHLRKHTGEKFACDYCSFTCLSKGHLKVHIERVHKKIKQHCRFCKKKYSDVKNLIKHIRDAHDPQDKKVKEALDELCLMTREGKRQLLYDCHICERKFKNELDRDRHMLVHGDKWPFACELCGHGATKYQALELHVRKHPFVYVCAVCRKKFVSSIRLRTHIKEVHGAAQEALVFTSSINQSFCLLEPGGDIQQEALGDQLQLVEEEFALQGVNALKEEACPGDTQLEEGRKEPEAPGEMPAPAVHLASPQAESTALPPCELETTVVSSSDLHSQEVVSDDFLLKNDTSSAEAHAAPEKPPDMQHRSSVQTQGEVITLLLSKAQSAGSDQESHGAQSPLGEGQNMAVLSAGDPDPSRCLRSNPAEASDLLPPVAGGGDTITHQPDSCKAAPEHRSGITAFMKVLNSLQKKQMNTSLCERIRKVYGDLECEYCGKLFWYQVHFDMHVRTHTREHLYYCSQCHYSSITKNCLKRHVIQKHSNILLKCPTDGCDYSTPDKYKLQAHLKVHTALDKRSYSCPVCEKSFSEDRLIKSHIKTNHPEVSMSTISEVLGRRVQLKGLIGKRAMKCPYCDFYFMKNGSDLQRHIWAHEGVKPFKCSLCEYATRSKSNLKAHMNRHSTEKTHLCDMCGKKFKSKGTLKSHKLLHTADGKQFKCTVCDYTAAQKPQLLRHMEQHVSFKPFRCAHCHYSCNISGSLKRHYNRKHPNEEYANVGTGELAAEVLIQQGGLKCPVCSFVYGTKWEFNRHLKNKHGLKVVEIDGDPKWETATEAPEEPSTQYLHITEAEEDVQGTQAAVAALQDLRYTSESGDRLDPTAVNILQQIIELGAETHDATALASVVAMAPGTVTVVKQVTEEEPSSNHTVMIQETVQQASVELAEQHHLVVSSDDVEGIETVTVYTQGGEASEFIVYVQEAMQPVEEQAVEQPAQEL

SEQ ID NO: 17900 - protein, 837 aa, Homo sapiens
MTYRFCSQFSKGVYAIFGFYERRTVNMLTSFCGALHVCFITPSFPVDTSNQFVLQLRPELQDALISIIDHYKWQKFVYIYDADRGLSVLQKVLDTAAEKNWQVTAVNILTTTEEGYRMLFQDLEKKKERLVVVDCESERLNAILGQIIKLEKNGIGYHYILANLGFMDIDLNKFKESGANVTGFQLVNYTDTIPAKIMQQWKNSDARDHTRVDWKRPKYTSALTYDGVKVMAEAFQSLRRQRIDISRRGNAGDCLANPAVPWGQGIDIQRALQQVRFEGLTGNVQFNEKGRRTNYTLHVIEMKHDGIRKIGYWNEDDKFVPAATDAQAGGDNSSVQNRTYIVTTILEDPYVMLKKNANQFEGNDRYEGYCVELAAEIAKHVGYSYRLEIVSDGKYGARDPDTKAWNGMVGELVYGRADVAVAPLTITLVREEVIDFSKPFMSLGISIMIKKPQKSKPGVFSFLDPLAYEIWMCIVFAYIGVSVVLFLVSRFSPYEWHSEEFEEGRDQTTSDQSNEFGIFNSLWFSLGAFMQQGCDISPRSLSGRIVGGVWWFFTLIIISSYTANLAAFLTVERMVSPIESAEDLAKQTEIAYGTLEAGSTKEFFRRSKIAVFEKMWTYMKSAEPSVFVRTTEEGMIRVRKSKGKYAYLLESTMNEYIEQRKPCDTMKVGGNLDSKGYGIATPKGSALRNPVNLAVLKLNEQGLLDKLKNKWWYDKGECGSGGGDSKDKTSALSLSNVAGVFYILIGGLGLAMLVALIEFCYKSRSESKRMKGFCLIPQQSINEAIRTSTLPRNSGAGASSGGSGENGRVVSHDFPKSMQSIPCMSHSSGMPLGATGL

SEQ ID NO: 17901 - protein, 698 aa, Homo sapiens
MSYTLDSLGNPSAYRRVTETRSSFSRVSGSPSSGFRSQSWSRGSPSTVSSSYKRSMLAPRLAYSSAMLSSAESSLDFSQSSSLLNGGSGPGGDYKLSRSNEKEQLQGLNDRFAGYIEKVHYLEQQNKEIEAEIQALRQKQASHAQLGDAYDQEIRELRATLEMVNHEKAQVQLDSDHLEEDIHRLKERFEEEARLRDDTEAAIRALRKDIEEASLVKVELDKKVQSLQDEVAFLRSNHEEEVADLLAQIQASHITVERKDYLKTDISTALKEIRSQLESHSDQNMHQAEEWFKCRYAKLTEAAEQNKEAIRSAKEEIAEYRRQLQSKSIELESVRGTKESLERQLSDIEERHNHDLSSYQDTIQQLENELRGTKWEMARHLREYQDLLNVKMALDIEIAAYRKLLEGEETRFSTFAGSITGPLYTHRPPITISSKIQKPKVEAPKLKVQHKFVEEIIEETKVEDEKSEMEEALTAITEELAVSMKEEKKEAAEEKEEEPEAEEEEVAAKKSPVKATAPEVKEEEGEKEEEEGQEEEEEEDEGAKSDQAEEGGSEKEGSSEKEEGEQEEGETEAEAEGEEAEAKEEKKVEGKEEVEQETKEKGSGREEEKGVVTNGLDLSPADEKKGGDKSEEKVVVTKTVEKITSEGGDGATKYITKSVTVTQKVEEHEETFEEKLVSTKKVEKVTSHAIVKEVTQSD

SEQ ID NO: 17902 - protein, 2535 aa, Homo sapiens
MVSPPLLIISVAGTIECKPDHLLWRPGSTSPQSVSFLHGKVVMESLGPPNHHSQSTLRPPLPPPHNHTLSHHHSSANSLNRNSLTNRRSQIHAPAPAPNDLATTPESVQLQDSWVLNSNVPLETRHFLFKTSSGSTPLFSSSSPGYPLTSGTVYTPPPRLLPRNTFSRKAFKLKKPSKYCSWKCAALSAIAAALLLAILLAYFIVPWSLKNSSIDSGEAEVGRRVTQEVPPGVFWRSQIHISQPQFLKFNISLGKDALFGVYIRRGLPPSHAQYDFMERLDGKEKWSVVESPRERRSIQTLVQNEAVFVQYLDVGLWHLAFYNDGKDKEMVSFNTVVLDSVQDCPRNCHGNGECVSGVCHCFPGFLGADCAKAACPVLCSGNGQYSKGTCQCYSGWKGAECDVPMNQCIDPSCGGHGSCIDGNCVCSAGYKGEHCEEVDCLDPTCSSHGVCVNGECLCSPGWGGLNCELARVQCPDQCSGHGTYLPDTGLCSCDPNWMGPDCSVEVCSVDCGTHGVCIGGACRCEEGWTGAACDQRVCHPRCIEHGTCKDGKCECREGWNGEHCTIGRQTAGTETDGCPDLCNGNGRCTLGQNSWQCVCQTGWRGPGCNVAMETSCADNKDNEGDGLVDCLDPDCCLQSACQNSLLCRGSRDPLDIIQQGQTDWPAVKSFYDRIKLLAGKDSTHIIPGENPFNSSLVSLIRGQVVTTDGTPLVGVNVSFVKYPKYGYTITRQDGTFDLIANGGASLTLHFERAPFMSQERTVWLPWNSFYAMDTLVMKTEENSIPSCDLSGFVRPDPIIISSPLSTFFSAAPGQNPIVPETQVLHEEIELPGSNVKLRYLSSRTAGYKSLLKITMTQSTVPLNLIRVHLMVAVEGHLFQKSFQASPNLAYTFIWDKTDAYGQRVYGLSDAVVSVGFEYETCPSLILWEKRTALLQGFELDPSNLGGWSLDKHHILNVKSGILHKGTGENQFLTQQPAIITSIMGNGRRRSISCPSCNGLAEGNKLLAPVALAVGIDGSLYVGDFNYIRRIFPSRNVTSILELRNNPAHKYYLAVDPVSGSLYVSDTNSRRIYRVKSLSGTKDLAGNSEVVAGTGEQCLPFDEARCGDGGKAIDATLMSPRGIAVDKNGLMYFVDATMIRKVDQNGIISTLLGSNDLTAVRPLSCDSSMDVAQVRLEWPTDLAVNPMDNSLYVLENNVILRITENHQVSIIAGRPMHCQVPGIDYSLSKLAIHSALESASAIAISHTGVLYITETDEKKINRLRQVTTNGEICLLAGAASDCDCKNDVNCNCYSGDDAYATDAILNSPSSLAVAPDGTIYIADLGNIRIRAVSKNKPVLNAFNQYEAASPGEQELYVFNADGIHQYTVSLVTGEYLYNFTYSTDNDVTELIDNNGNSLKIRRDSSGMPRHLLMPDNQIITLTVGTNGGLKVVSTQNLELGLMTYDGNTGLLATKSDETGWTTFYDYDHEGRLTNVTRPTGVVTSLHREMEKSITIDIENSNRDDDVTVITNLSSVEASYTVVQDQVRNSYQLCNNGTLRVMYANGMGISFHSEPHVLAGTITPTIGRCNISLPMENGLNSIEWRLRKEQIKGKVTIFGRKLRVHGRNLLSIDYDRNIRTEKIYDDHRKFTLRIIYDQVGRPFLWLPSSGLAAVNVSYFFNGRLAGLQRGAMSERTDIDKQGRIVSRMFADGKVWSYSYLDKSMVLLLQSQRQYIFEYDSSDRLLAVTMPSVARHSMSTHTSIGYIRNIYNPPESNASVIFDYSDDGRILKTSFLGTGRQVFYKYGKLSKLSEIVYDSTAVTFGYDETTGVLKMVNLQSGGFSCTIRYRKIGPLVDKQIYRFSEEGMVNARFDYTYHDNSFRIASIKPVISETPLPVDLYRYDEISGKVEHFGKFGVIYYDINQIITTAVMTLSKHFDTHGRIKEVQYEMFRSLMYWMTVQYDSMGRVIKRELKLGPYANTTKYTYDYDGDGQLQSVAVNDRPTWRYSYDLNGNLHLLNPGNSVRLMPLRYDLRDRITRLGDVQYKIDDDGYLCQRGSDIFEYNSKGLLTRAYNKASGWSVQYRYDGVGRRASYKTNLGHHLQYFYSDLHNPTRITHVYNHSNSEITSLYYDLQGHLFAMESSSGEEYYVASDNTGTPLAVFSINGLMIKQLQYTAYGEIYYDSNPDFQMVIGFHGGLYDPLTKLVHFTQRDYDVLAGRWTSPDYTMWKNVGKEPAPFNLYMFKSNNPLSSELDLKNYVTDVKSWLVMFGFQLSNIIPGFPRAKMYFVPPPYELSESQASENGQLITGVQQTTERHNQAFMALEGQVITKKLHASIREKAGHWFATTTPIIGKGIMFAIKEGRVTTGVSSIASEDSRKVASVLNNAYYLDKMHYSIEGKDTHYFVKIGSADGDLVTLGTTIGRKVLESGVNVTVSQPTLLVNGRTRRFTNIEFQYSTLLLSIRYGLTPDTLDEEKARVLDQARQRALGTAWAKEQQKARDGREGSRLWTEGEKQQLLSTGRVQGYEGYYVLPVEQYPELADSSSNIQFLRQNEMGKR

SEQ ID NO: 17903 - protein, 1145 aa, Homo sapiens
MCKCCNLFSPNQSELLSHVSEKHMEEGVNVDEIIIPLRPLSTPEPPNSSKTGDEFLVMKRKRGRPKGSTKKSSTEEELAENIVSPTEDSPLAPEEGNSLPPSSLECSKCCRKFSNTRQLRKHICIIVLNLGEEEGEAGNESDLELEKKCKEDDREKASKRPRSQKTEKVQKISGKEARQLSGAKKPIISVVLTAHEAIPGATKIVPVEAGPPETGATNSETTSADLVPRRGYQEYAIQQTPYEQPMKSSRLGPTQLKIFTCEYCNKVFKFKHSLQAHLRIHTNEKPYKCPQCSYASAIKANLNVHLRKHTGEKFACDYCSFTCLSKGHLKVHIERVHKKIKQHCRFCKKKYSDVKNLIKHIRDAHDPQDKKVKEALDELCLMTREGKRQLLYDCHICERKFKNELDRDRHMLVHGDKWPFACELCGHGATKYQALELHVRKHPFVYVCAVCRKKFVSSIRLRTHIKEVHGAAQEALVFTSSINQSFCLLEPGGDIQQEALGDQLQLVEEEFALQGVNALKEEACPGDTQLEEGRKEPEAPGEMPAPAVHLASPQAESTALPPCELETTVVSSSDLHSQEVVSDDFLLKNDTSSAEAHAAPEKPPDMQHRSSVQTQGEVITLLLSKAQSAGSDQESHGAQSPLGEGQNMAVLSAGDPDPSRCLRSNPAEASDLLPPVAGGGDTITHQPDSCKAAPEHRSGITAFMKVLNSLQKKQMNTSLCERIRKVYGDLECEYCGKLFWYQVHFDMHVRTHTREHLYYCSQCHYSSITKNCLKRHVIQKHSNILLKCPTDGCDYSTPDKYKLQAHLKVHTALDKRSYSCPVCEKSFSEDRLIKSHIKTNHPEVSMSTISEVLGRRVQLKGLIGKRAMKCPYCDFYFMKNGSDLQRHIWAHEGVKPFKCSLCEYATRSKSNLKAHMNRHSTEKTHLCDMCGKKFKSKGTLKSHKLLHTADGKQFKCTVCDYTAAQKPQLLRHMEQHVSFKPFRCAHCHYSCNISGSLKRHYNRKHPNEEYANVGTGELAAEVLIQQGGLKCPVCSFVYGTKWEFNRHLKNKHGLKVVEIDGDPKWEVTEEEPSSNHTVMIQETVQQASVELAEQHHLVVSSDDVEGIETVTVYTQGGEASEFIVYVQEAMQPVEEQAVEQPAQEL

SEQ ID NO: 17904 - protein, 346 aa, Homo sapiens
MLFKQQAWLRQKLLVLGSLAVGSLLYLVARVGSLDRLQPICPIEGRLGGARTQAEFPLRALQFKRGLLHEFRKGNASKEQVRLHDLVQQLPKAIIIGVRKGGTRALLEMLNLHPAVVKASQEIHFFDNDENYGKGIEWYRKKMPFSYPQQITIEKSPAYFITEEVPERIYKMNSSIKLLIIVREPTTRAISDYTQVLEGKERKNKTYYKFEKLAIDPNTCEVNTKYKAVRTSIYTKHLERWLKYFPIEQFHVVDGDRLITEPLPELQLVEKFLNLPPRISQYNLYFNATRGFYCLRFNIIFNKCLAGSKGRIHPEVDPSVITKLRKFFHPFNQKFYQITGRTLNWP

SEQ ID NO: 17905 - protein, 328 aa, Homo sapiens
MNHKTCYNPLFNYEDMQEITQHFAVCHVDAPGQQDGAASFPAGYMYPSMDQLAEMLPGVLQQFGLKSIIGMGTGAGAYILTRFALNNPEMVEGLVLINVNPCAEGWMDWAASKISGWTQALPDMVVSHLFGKEEMQSNVEVVHTYRQHIVNDMNPGNLHLFINAYNSRRDLEIERPMPGTHTVTLQCPALLVVGDSSPAVDAVVECNSKLDPTKTTLLKMADCGGLPQISQPAKLAEAFKYFVQGMGYMPSASMTRLMRSRTASGSSVTSLDGTRSRSHTSEGTRSRSHTSEGTRSRSHTSEGAHLDITPNSGAAGNSAGPKSMEVSC

SEQ ID NO: 17906 - protein, 1826 aa, Homo sapiens
MGDSKVKVAVRIRPMNRRETDLHTKCVVDVDANKVILNPVNTNLSKGDARGQPKVFAYDHCFWSMDESVKEKYAGQDIVFKCLGENILQNAFDGYNACIFAYGQTGSGKSYTMMGTADQPGLIPRLCSGLFERTQKEENEEQSFKVEVSYMEIYNEKVRDLLDPKGSRQTLKVREHSVLGPYVDGLSKLAVTSYKDIESLMSEGNKSRTVAATNMNEESSRSHAVFKITLTHTLYDVKSGTSGEKVGKLSLVDLAGSERATKTGAAGDRLKEGSNINKSLTTLGLVISALADQSAGKNKNKFVPYRDSVLTWLLKDSLGGNSKTAMVATVSPAADNYDETLSTLRYADRAKHIVNHAVVNEDPNARIIRDLREEVEKLREQLTKAEAMKSPELKDRLEESEKLIQEMTVTWEEKLRKTEEIAQERQKQLESLGISLQSSGIKVGDDKCFLVNLNADPALNELLVYYLKEHTLIGSANSQDIQLCGMGILPEHCIIDITSEGQVMLTPQKNTRTFVNGSSVSSPIQLHHGDRILWGNNHFFRLNLPKKKKKAEREDEDQDPSMKNENSSEQLDVDGDSSSEVSSEVNFNYEYAQMEVTMKALGSNDPMQSILNSLEQQHEEEKRSALERQRLMYEHELEQLRRRLSPEKQNCRSMDRFSFHSPSAQQRLRQWAEEREATLNNSLMRLREQIVKANLLVREANYIAEELDKRTEYKVTLQIPASSLDANRKRGSLLSEPAIQVRRKGKGKQIWSLEKLDNRLLDMRDLYQEWKECEEDNPVIRSYFKRADPFYDEQENHSLIGVANVFLESLFYDVKLQYAVPIINQKGEVAGRLHVEVMRLSGDVGERIAGGDEVAEVSFEKETQENKLVCMVKILQATGLPQHLSHFVFCKYSFWDQQEPVIVAPEVDTSSSSVSKEPHCMVVFDHCNEFSVNITEDFIEHLSEGALAIEVYGHKINDPRKNPALWDLGIIQAKTRSLRDRWSEVTRKLEFWVQILEQNENGEYCPVEVISAKDVPTGGIFQLRQGQSRRVQVEVKSVQESGTLPLMEECILSVGIGCVKVRPLRAPRTHETFHEEEEDMDSYQDRDLERLRRKWLNALTKRQEYLDQQLQKLVSKRDKTEDDADREAQLLEMRLTLTEERNAVMVPSAGSGIPGAPAEWTPVPGMETHIPVIFLDLNADDFSSQDNLDDPEAGGWDATLTGEEEEEFFELQIVKQHDGEVKAEASWDSAVHGCPQLSRGTPVDERLFLIVRVTVQLSHPADMQLVLRKRICVNVHGRQGFAQSLLKKMSHRSSIPGCGVTFEIVSNIPEDAQGVEEREALARMAANVENPASADSEAYIEKYLRSVLAVENLLTLDRLRQEVAVKEQLTGKGKLSRRSISSPNVNRLSGSRQDLIPSYSLGSNKGRWESQQDVSQTTVSRGIAPAPALSVSPQNNHSPDPGLSNLAASYLNPVKSFVPQMPKLLKSLFPVRDEKRGKRPSPLAHQPVPRIMVQSASPDIRVTRMEEAQPEMGPDVLVQTMGAPALKICDKPAKVPSPPPVIAVTAVTPAPEAQDGPPSPLSEASSGYFSHSVSTATLSDALGPGLDAAAPPGSMPTAPEAEPEAPISHPPPPTAVPAEEPPGPQQLVSPGRERPDLEAPAPGSPFRVRRVRASELRSFSRMLAGDPGCSPGAEGNAPAPGAGGQALASDSEEADEVPEWLREGEFVTVGAHKTGVVRYVGPADFQEGTWVGVELDLPSGKNDGSIGGKQYFRCNPGYGLLVRPSRVRRATGPVRRRSTGLRLGAPEARRSATLSGSATNLASLTAALAKADRSHKNPENRKSWAS

SEQ ID NO: 17907 - protein, 1306 aa, Homo sapiens
MDQREPLPPAPAENEMKYDTNNNEEEEGEQFDFDSGDEIPEADRQAPSAPETGGAGASEAPAPTGGEDGAGAETTPVAEPTKLVLPMKVNPYSVIDITPFQEDQPPTPVPSAEEENVGLHVPCGYLVPVPCGYAVPSNLPLLLPAYSSPVIICATSLDEEAETPEVTEDRQPNSLSSEEPPTSEDQVGREDSALARWAADPANTAWMENPEEAIYDDVPRENSDSEPDEMIYDDVENGDEGGNSSLEYGWSSSEFESYEEQSDSECKNGIPRSFLRSNHKKQMQKLVKAAKDGTKDGLERTRAAVKRGRSFIRTKSLIAQDHRSSLEEEQNLFIDVDCKHPEAILTPMPEGLSQQQVVRRYILGSVVDSEKNYVDALKRILEQYEKPLSEMEPKVLSERKLKTVFYRVKEILQCHSLFQIALASRVSEWDSVEMIGDVFVASFSKSMVLDAYSEYVNNFSTAVAVLKKTCATKPAFLEFLKQEQEASPDRTTLYSLMMKPIQRFPQFILLLQDMLKNTSKGHPDRLPLQMALTELETLAEKLNERKRDADQRCEVKQIAKAINERYLNKLLSSGSRYLIRSDDMIETVYNDRGEIVKTKERRVFMLNDVLMCATVSSRPSHDSRVMSSQRYLLKWSVPLGHVDAIEYGSSAGTGEHSRHLAVHPPESLAVVANAKPNKVYMGPGQLYQDLQNLLHDLNVIGQITQLIGNLKGNYQNLNQSVAHDWTSGLQRLILKKEDEIRAADCCRIQLQLPGKQDKSGRPTFFTAVFNTFTPAIKESWVNSLQMAKLALEEENHMGWFCVEDDGNHIKKEKHPLLVGHMPVMVAKQQEFKIECAAYNPEPYLNNESQPDSFSTAHGFLWIGSCTHQMGQIAIVSFQNSTPKVIECFNVESRILCMLYVPVEEKRREPGAPPDPETPAVRASDVPTICVGTEEGSISIYKSSQGSKKVRLQHFFTPEKSTVMSLACTSQSLYAGLVNGAVASYARAPDGSWDSEPQKVIKLGVLPVRSLLMMEDTLWAASGGQVFIISVETHAVEGQLEAHQEEGMVISHMAVSGVGIWIAFTSGSTLRLFHTETLKHLQDINIATPVHNMLPGHQRLSVTSLLVCHGLLMVGTSLGVLVALPVPRLQGIPKVTGRGMVSYHAHNSPVKFIVLATALHEKDKDKSRDSLAPGPEPQDEDQKDALPSGGAGSSLSQGDPDAAIWLGDSLGSMTQKSDLSSSSGSLSLSHGSSSLEHRSEDSTIYDLLKDPVSLRSKARRAKKAKASSALVVCGGQGHRRVHRKARQPHQEELAPTVMVWQIPLLNI

SEQ ID NO: 17908 - protein, 411 aa, Homo sapiens
MDKLDANVSSEEGFGSVEKVVLLTFLSTVILMAILGNLLVMVAVCWDRQLRKIKTNYFIVSLAFADLLVSVLVMPFGAIELVQDIWIYGEVFCLVRTSLDVLLTTASIFHLCCISLDRYYAICCQPLVYRNKMTPLRIALMLGGCWVIPTFISFLPIMQGWNNIGIIDLIEKRKFNQNSNSTYCVFMVNKPYAITCSVVAFYIPFLLMVLAYYRIYVTAKEHAHQIQMLQRAGASSESRPQSADQHSTHRMRTETKAAKTLCIIMGCFCLCWAPFFVTNIVDPFIDYTVPGQVWTAFLWLGYINSGLNPFLYAFLNKSFRRAFLIILCCDDERYRRPSILGQTVPCSTTTINGSTHVLSSGTETDRKKLWNKEEKIDQTIQMPKRKRKKKASLSYEDLILLGRKSCFREGK

SEQ ID NO: 17909 - protein, 826 aa, Homo sapiens
MQHIFAFFCTGFLGAVVGANFPNNIQIGGLFPNQQSQEHAAFRFALSQLTEPPKLLPQIDIVNISDSFEMTYRCLSVLQKVLDTAAEKNWQVTAVNILTTTEEGYRMLFQDLEKKKERLVVVDCESERLNAILGQIIKLEKNGIGYHYILANLGFMDIDLNKFKESGANVTGFQLVNYTDTIPAKIMQQWKNSDARDHTRVDWKRPKYTSALTYDGVKVMAEAFQSLRRQRIDISRRGNAGDCLANPAVPWGQGIDIQRALQQVRFEGLTGNVQFNEKGRRTNYTLHVIEMKHDGIRKIGYWNEDDKFVPAATDAQAGGDNSSVQNRTYIVTTILEDPYVMLKKNANQFEGNDRYEGYCVELAAEIAKHVGYSYRLEIVSDGKYGARDPDTKAWNGMVGELVYGRADVAVAPLTITLVREEVIDFSKPFMSLGISIMIKKPQKSKPGVFSFLDPLAYEIWMCIVFAYIGVSVVLFLVSRFSPYEWHSEEFEEGRDQTTSDQSNEFGIFNSLWFSLGAFMQQGCDISPRSLSGRIVGGVWWFFTLIIISSYTANLAAFLTVERMVSPIESAEDLAKQTEIAYGTLEAGSTKEFFRRSKIAVFEKMWTYMKSAEPSVFVRTTEEGMIRVRKSKGKYAYLLESTMNEYIEQRKPCDTMKVGGNLDSKGYGIATPKGSALRNPVNLAVLKLNEQGLLDKLKNKWWYDKGECGSGGGDSKDKTSALSLSNVAGVFYILIGGLGLAMLVALIEFCYKSRSESKRMKGFCLIPQQSINEAIRTSTLPRNSGAGASSGGSGENGRVVSHDFPKSMQSIPCMSHSSGMPLGATGL

SEQ ID NO: 17910 - protein, 225 aa, Homo sapiens
MFYAHFVLSKRGPLAKIWLAAHWDKKLTKAHVFECNLESSVESIISPKVKMALRTSGHLLLGVVRIYHRKAKYLLADCNEAFIKIKMAFRPGVVDLPEENREAAYNAITLPEEFHDFDQPLPDLDDIDVAQQFSLNQSRVEEITMREEVGNISILQENDFGDFGMDDREIMREGSAFEDDDMLVSTTTSNLLLESEQSTSNLNEKINHLEYEDQYKDDNFGEGND

SEQ ID NO: 17911 - protein, 749 aa, Homo sapiens
MQAWRKGPDGPQKTSSDSMSRLMDSDMDYERPNVETIKCVVVGDNAVGKTRLICARACNATLTQYQLLATHVPTVWAIDQYRVCQEVLERSRDVVDDVSVSLRLWDTFGDHHKDRRFAYGRSDVVVLCFSIANPNSLHHVKTMWYPEIKHFCPRAPVILVGCQLDLRYADLEAVNRARRPLARPIKPNEILPPEKGREVAKELGIPYYETSVVAQFGIKDVFDNAIRAALISRRHLQFWKSHLRNVQRPLLQAPFLPPKPPPPIIVVPDPPSSSEECPAHLLEDPLCADVILVLQERVRIFAHKIYLSTSSSKFYDLFLMDLSEGELGGPSEPGGTHPEDHQGHSDQHHHHHHHHHGRDFLLRAASFDVCESVDEAGGSGPAGLRASTSDGILRGNGTGYLPGRGRVLSSWSRAFVSIQEEMAEDPLTYKSRLMVVVKMDSSIQPGPFRAVLKYLYTGELDENERDLMHIAHIAELLEVFDLRMMVANILNNEAFMNQEITKAFHVRRTNRVKECLAKGTFSDVTFILDDGTISAHKPLLISSCDWMAAMFGGPFVESSTREVVFPYTSKSCMRAVLEYLYTGMFTSSPDLDDMKLIILANRLCLPHLVALTEQYTVTGLMEATQMMVDIDGDVLVFLELAQFHCAYQLADWCLHHICTNYNNVCRKFPRDMKAMSPENQEYFEKHRWPPVWYLKEEDHYQRARKEREKEDYLHLKRQPKRRWLFWNSPSSPSSSAASSSSPSSSSAVV

SEQ ID NO: 17912 - protein, 523 aa, Homo sapiens
MTLRAAVFDLDGVLALPAVFGVLGRTEEALALPRGLLNDAFQKGGPEGATTRLMKGEITLSQWIPLMEENCRKCSETAKVCLPKNFSIKEIFDKAISARKINRPMLQAALMLRKKGFTTAILTNTWLDDRAERDGLAQLMCELKMHFDFLIESCQVGMVKPEPQIYKFLLDTLKASPSEVVFLDDIGANLKPARDLGMVTILVQDTDTALKELEKVTGIQLLNTPAPLPTSCNPSDMSHGYVTVKIPALAQAGYRVLAMDMKGYGESSAPPEIEEYCMEVLCKEMVTFLDKLGLSQAVFIGHDWGGMLVWYMALFYPERVRAVASLNTPFIPANPNMSPLESIKANPVFDYQLYFQEPGVAEAELEQNLSRTFKSLFRASDESVLSMHKVCEAGGLFVNSPEEPSLSRMVTEEEIQFYVQQFKKSGFRGPLNWYRNMERNWKWACKSLGRKILIPALMVTAEKDFVLVPQMSQHMEDWIPHLKRGHIEDCGHWTQMDKPTEVNQILIKWLDSDARNPPVVSKM

SEQ ID NO: 17913 - protein, 250 aa, Homo sapiens
MAADGVDERSPLLSASHSGNVTPTAPPYLQESSPRVTNIFSAELPPPYTAIASPDASGIPVINCRVCQSLINLDGKLHQHVVKCTVCNEATPIKNPPTGKKYVRCPCNCLLICKDTSRRIGCPRPNCRRIINLGPVMLISEEQPAQPALPIQPEGTRVVCGHCGNTFLWMELRFNTLAKCPHCKKISSVGSALPRRRCCAYITIGMICIFIGVGLTVGTPDFARRFRATYVSWAIAYLLGLICLIRACYW

SEQ ID NO: 17914 - protein, 1088 aa, Homo sapiens
MALHFQSLAELEVLCTHLYIGTDLTQRIEAEKALLELIDSPECLSKCQLLLEQGTTSYAQLLAATCLSKLVSRVSPLPVEQRMDIRNYILNYVASQPKLAPFVIQALIQVIAKITKLGWFEVQKDQFVFREIIADVKKFLQGTVEHCIIGVIILSELTQEMNLVDYSRPSAKHRKIATSFRDTSLKDVLVLACSLLKEVFAKPLNLQDQCQQNLVMQVLKLVLNCLNFDFIGSSADESADDLCTVQIPTTWRTIFLEPETLDLFFNLYHSLPPLLSQLALSCLVQFASTRRSLFNSPERAKYLGNLIKGVKRILENPQGLSDPGNYHEFCRFLARLKTNYQLGELVMVKEYPEVIRLIANFTITSLQHWEFAPNSVHYLLTLWQRMVASVPFVKSTEPHLLDTYAPEITKAFITSRLDSVAIVVRDHLDDPLDDTATVFQQLEQLCTVSRCEYEKTCALLVQLFDQNAQNYQKLLHPYSGVTVDITIQEGRLAWLVYLVGTVVGGRLTYTSTDEHDAMDGELSCRVFQLISLMDTGLPRCCNEKIELAILWFLDQFRKTYVGDQLQRTSKVYARMSEVLGITDDNHVLETFMTKIVTNLKYWGRYEPVISRTLQFLNDLSVGYILLKKLVKIDAVKFMLKNHTSEHFPFLGISDNHSLSDFRCRTTFYTALTRLLMVDLGEDEDEFENFMLPLTVAFETVLQIFNNNFKQEDVKRMLIGLARDLRGIAFALNTKTSYTMLFDWMYPTYLPLLQNAVERWYGEPTCTTPILKLMAELMQNRSQRLNFDVSSPNGILLFREASKMVCTYGNQILSLGSLSKDQIYPMKLKGISICYSALKSALCGNYVSFGVFKLYGDNHFDNVLQAFVKMLLSVSHSDLLQYRKLSQSYYPLLECLTQDHMSFIINLEPPVLMYVLTSISEGLTTLDTVVSSSCCTSLDYIVTYLFKHIAKEGKKPLRCREATQAGQRLLHFMQQNPDVLQQMMSVLMNTIVFEDCRNQWSVSRPLLGLILLNEKYFSELRASLINSQPLPKQEVLAQCFRNLMEGVEQNLSVKNRDRFTQNLSVFRRDVAEALRSDGNTEPCSLDMMS

SEQ ID NO: 17915 - protein, 677 aa, Homo sapiens
MAERKQSGKAAEDEEVPAFFKNLGSGSPKPRQKFCGMFCPVEGSSENKTIDFDSLSVGRGSGQVVAQQRDVAHLGPDPQPPYSRQGRRAGGEPSVESGRKVEIRRASGKEALQNINDQSDRLLIKGGKIVNDDQSFYADIYMEDGLIKQIGENLIVPGGVKTIEAHSRMVIPGGIDVHTRFQMPDQGMTSADDFFQGTKAALAGGTTMIIDHVVPEPGTSLLAAFDQWREWADSKSCCDYSLHVDISEWHKGIQEEMEALVKDHGVNSFLVYMAFKDRFQLTDCQIYEVLSVIRDIGAIAQVHAENGDIIAEEQQRILDLGITGPEGHVLSRPEEVEAEAVNRAITIANQTNCPLYITKVMSKSSAEVIAQARKKGTVVYGEPITASLGTDGSHYWSKNWAKAAAFVTSPPLSPDPTTPDFLNSLLSCGDLQVTGSAHCTFNTAQKAVGKDNFTLIPEGTNGTEERMSVIWDKAVVTGKMDENQFVAVTSTNAAKVFNLYPRKGRIAVGSDADLVIWDPDSVKTISAKTHNSSLEYNIFEGMECRGSPLVVISQGKIVLEDGTLHVTEGSGRYIPRKPFPDFVYKRIKARSRLAELRGVPRGLYDGPVCEVSVTPKTVTPASSAKTSPAKQQAPPVRNLHQSGFSLSGAQIDDNIPRRTTQRIVAPPGGRANITSLG

SEQ ID NO: 17916 - protein, 322 aa, Homo sapiens
MHSLESSLIDIMRAENDTIKGQSSLFPMEDGFLDDGRGDQPLHSGLGSPHCFSHQNGERVERYSRKVFVGGLPPDIDEDEITASFRRFGPLIVDWPHKAESKSYFPPKGYAFLLFQDESSVQALIDACIEEDGKLYLCVSSPTIKDKPVQIRPWNLSDSDFVMDGSQPLDPRKTIFVGGVPRPLRAVELAMIMDRLYGGVCYAGIDTDPELKYPKGAGRVAFSNQQSYIAAISARFVQLQHGEIDKRVEVKPYVLDDQLCDECQGARCGGKFAPFFCANVTCLQYYCEYCWAAIHSRAGREFHKPLVKEGGDRPRHISFRWN

SEQ ID NO: 17917 - protein, 232 aa, Homo sapiens
MGCVQCKDKEATKLTEERDGSLNQSSGYRYGTDPTPQHYPSFGVTSIPNYNNFHAAGGQGLTVFGGVNSSSHTGTLRTRGGTGVTLFVALYDYEARTEDDLSFHKGEKFQILNSSEGDWWEARSLTTGETGYIPSNYVAPVDSIQAEEWYFGKLGRKDAERQLLSFGNPRGTFLIRESETTKGAYSLSIRDWDDMKGDHVKHYKIRKLDNGGYYITTRAQFETLQQLVQHYS

SEQ ID NO: 17918 - protein, 176 aa, Homo sapiens
MEASRTNIDESAMPPPPPQGVKRKAGQIDPEPVMPPQQVEQMEIPPVELPPEEPPNICQLIPELELLPEKEKEKEKEKEDDEEEEDEDASGGDQDQEERRWNKRTQQMLHGLQRALAKTGAESISLLELCRNTNRKQAAAKFYSFLVLKKQQAIELTQEEPYSDIIATPGPRFHII

SEQ ID NO: 17919 - protein, 1057 aa, Homo sapiens
MTTHVTLEDALSNVDLLEELPLPDQQPCIEPPPSSIMYQANFDTNFEDRNAFVTGIARYIEQATVHSSMVMGFGLYLMDGNVSNIYKLDAKKRINLSKIDKFFKQLQVVPLFGDMQIELARYIKTSAHYEENKSKWTCTQSSISPQYNICEQMVQIRDDHIRFISELARYSNSEVVTGSGLDSQKSDEEYRELFDLALRGLQLLSKWSAHVMEVYSWKLVHPTDKFCNKDCPGTAEEYERATRYNYTSEEKFAFVEVIAMIKGLQVLMGRMESVFNQAIRNTIYAALQDFAQVTLREPLRQAVRKKKNVLISVLQAIRKTICDWEGGREPPNDPCLRGEKDPKGGFDIKVPRRAVGPSSTQLYMVRTMLESLIADKSGSKKTLRSSLDGPIVLAIEDFHKQSFFFTHLLNISEALQQCCDLSQLWFREFFLELTMGRRIQFPIEMSMPWILTDHILETKEPSMMEYVLYPLDLYNDSAYYALTKFKKQFLYDEIEAEVNLCFDQFVYKLADQIFAYYKAMAGSVLLDKRFRAECKNYGVIIPYPPSNRYETLLKQRHVQLLGRSIDLNRLITQRISAAMYKSLDQAISRFESEDLTSIVELEWLLEINRLTHRLLCKHMTLDSFDAMFREANHNVSAPYGRITLHVFWELNFDFLPNYCYNGSTNRFVRTAIPFTQEPQRDKPANVQPYYLYGSKPLNIAYSHIYSSYRNFVGPPHFKTICRLLGYQGIAVVMEELLKIVKSLLQGTILQYVKTLIEVMPKICRLPRHEYGSPGILEFFHHQLKDIIEYAELKTDVFQSLREVGNAILFCLLIEQALSQEEVCDLLHAAPFQNILPRVYIKEGERLEVRMKRLEAKYAPLHLVPLIERLGTPQQIAIAREGDLLTKERLCCGLSMFEVILTRIRSYLQDPIWRGPPPTNGVMHVDECVEFHRLWSAMQFVYCIPVGTNEFTAEQCFGDGLNWAGCSIIVLLGQQRRFDLFDFCYHLLKVQRQDGKDEIIKNVPLKKMADRIRKYQILNNEVFAILNKYMKSVETDSSTVEHVRCFQPPIHQSLATTC

SEQ ID NO: 17920 - protein, 252 aa, Homo sapiens
MINDMTNVEDEHLQHQFHRIYIHRYENVSILFADVKGFTNLSTTLSAQELVRMLNELFARFDRLAHEHHCLRIKILGDCYYCVSGLPEPRQDHAHCCVEMGLSMIKTIRYVRSRTKHDVDMRIGIHSGSVLCGVLGLRKWQFDVWSWDVDIANKLESGGIPGRIHISKATLDCLNGDYNVEEGHGKERNEFLRKHNIETYLIKQPEDSLLSLPEDIVKESVSSSDRRNSGATFTEGSWSPELPFDNIVGKQN

SEQ ID NO: 17921 - protein, 692 aa, Homo sapiens
MAKRSRSEDEDDDLQYADHDYEVPQQKGLKKLWNRVKWTRDEDDKLKKLVEQHGTDDWTLIASHLQNRSDFQCQHRWQKVLNPELIKGPWTKEEDQRVIELVQKYGPKRWSLIAKHLKGRIGKQCRERWHNHLNPEVKKSSWTEEEDRIIYEAHKRLGNRWAEIAKLLPGRTDNSIKNHWNSTMRRKVEQEGYLQDGIKSERSSSKLQHKPCAAMDHMQTQNQFYIPVQIPGYQYVSPEGNCIEHVQPTSAFIQQPFIDEDPDKEKKIKELEMLLMSAENEVRRKRIPSQPGSFSSWSGSFLMDDNMSNTLNSLDEHTSEFYSMDENQPVSAQQNSPTKFLAVEANAVLSSLQTIPEFAETLELIESDPVAWSDVTSFDISDAAASPIKSTPVKLMRIQHNEGAMECQFNVSLVLEGKKNTCNGGNSEAVPLTSPNIAKFSTPPAILRKKRKMRVGHSPGSELRDGSLNDGGNMALKHTPLKTLPFSPSQFFNTCPGNEQLNIENPSFTSTPICGQKALITTPLHKETTPKDQKENVGFRTPTIRRSILGTTPRTPTPFKNALAAQEKKYGPLKIVSQPLAFLEEDIREVLKEETGTDLFLKEEDEPAYKSCKQENTASGKKVRKSLVLDNWEKEESGTQLLTEDISDMQSNCEWETVVYGKTEDQLIMTEQARRYLSTYTATSSTSRALIL

SEQ ID NO: 17922 - protein, 402 aa, Homo sapiens
MDSSAAPTNASNCTDALAYSSCSPAPSPGSWVNLSHLDGNLSDPCGPNRTDLGGRDSLCPPTGSPSMITAITIMALYSIVCVVGLFGNFLVMYVIVRYTKMKTATNIYIFNLALADALATSTLPFQSVNYLMGTWPFGTILCKIVISIDYYNMFTSIFTLCTMSVDRYIAVCHPVKALDFRTPRNAKIINVCNWILSSAIGLPVMFMATTKYRQGSIDCTLTFSHPTWYWENLLKICVFIFAFIMPVLIITVCYGLMILRLKSVRMLSGSKEKDRNLRRITRMVLVVVAVFIVCWTPIHIYVIIKALVTIPETTFQTVSWHFCIALGYTNSCLNPVLYAFLDENFKRCFREFCIPTSSNIEQQNSTRIRQNTRDHPSTANTVDRTNHQIRDPISNLPRVSVF

SEQ ID NO: 17923 - protein, 523 aa, Homo sapiens
MFGIQESIQRSGSSMKEEPLGSGMNAVRTWMQGAGVLDANTAAQSGVGLARAHFEKQPPSNLRKSNFFHFVLALYDRQGQPVEIERTAFVGFVEKEKEANSEKTNNGIHYRLQLLYSNGIRTEQDFYVRLIDSMTKQAIVYEGQDKNPEMCRVLLTHEIMCSRCCDKKSCGNRNETPSDPVIIDRFFLKFFLKCNQNCLKNAGNPRDMRRFQVVVSTTVNVDGHVLAVSDNMFVHNNSKHGRRARRLDPSEATPCIKAISPSEGWTTGGATVIIIGDNFFDGLQVIFGTMLVWSELITPHAIRVQTPPRHIPGVVEVTLSYKSKQFCKGTPGRFIYTALNEPTIDYGFQRLQKVIPRHPGDPERLPKEVILKRAADLVEALYGMPHNNQEIILKRAADIAEALYSVPRNHNQLPALANTSVHAGMMGVNSFSGQLAVNVSEASQATNQVVPSSPTMASSTSLPSNCSSSSGIFSFSPANMVSAVKQKSAFAPVVRPQTSPPPTCTSTNGNSLQAISGMIVPPM

SEQ ID NO: 17924 - protein, 459 aa, Homo sapiens
MWQIVFFTLSCDLVLAAAYNNFRKSMDSIGKKQYQVQHGSCSYTFLLPEMDNCRSSSSPYVSNAVQRDAPLEYDDSVQRLQVLENIMENNTQWLMKLENYIQDNMKKEMVEIQQNAVQNQTAVMIEIGTNLLNQTAEQTRKLTDVEAQVLNQTTRLELQLLEHSLSTNKLEKQILDQTSEINKLQDKNSFLEKKVLAMEDKHIIQLQSIKEEKDQLQVLVSKQNSIIEELEKKIVTATVNNSVLQKQQHDLMETVNNLLTMMSTSNSKDPTVAKEEQISFRDCAEVFKSGHTTNGIYTLTFPNSTEEIKAYCDMEAGGGGWTIIQRREDGSVDFQRTWKEYKVGFGNPSGEYWLGNEFVSQLTNQQRYVLKIHLKDWEGNEAYSLYEHFYLSSEELNYRIHLKGLTGTAGKISSISQPGNDFSTKDGDNDKCICKCSQMLTGGRDDFLSSYLYWQGMIS

SEQ ID NO: 17925 - protein, 109 aa, Homo sapiens
MAYSQGGGKKKVCYYYDVCVFSILGDIGNYYYGQGHPMKPHRIRMTHNLLLNYGLYRKMEIYRPHKATAEEMTKYHSDEYIKFLRSIRPDNMSEYSKQMQRFNVGEDCP

SEQ ID NO: 17926 - protein, 600 aa, Homo sapiens
MSGQTLTDRIAAAQYSVTGSAVARAVCKATTHEVMGPKKKHLDYLIQATNETNVNIPQMADTLFERATNSSWVVVFKALVTTHHLMVHGNERFIQYLASRNTLFNLSNFLDKSGSHGYDMSTFIRRYSRYLNEKAFSYRQMAFDFARVKKGADGVMRTMAPEKLLKSMPILQGQIDALLEFDVHPNELTNGVINAAFMLLFKDLIKLFACYNDGVINLLEKFFEMKKGQCKDALEIYKRFLTRMTRVSEFLKVAEAPSSLMETLEQHLNTLEGKKPGNKSGAPSPLSKSSPATTVTSPNSTPAKTIDTSPPVDLFATASAAVPVSTSKPSSDLLDLQPDFSSGGAAAAAAPAPPPPAGGATAWGGFGGSFMAPSPSPVTPAQNNLLQPNFEAAFGTTPSTSSSSSFDPSVFDGLGDLLMPTMAPAGQPAPVSMVPPSPAMAASKALGSDLDSSLASLVGNLGISGTTTKKGDLQWNAGEKKLTGGANWQPKVAPATWSAGVPPSAPLQGAVPPTSSVPPVAGAPSVGQPGAGFGMPPAGTGMPMMPQQPVMFAQPMMRPPFGAAAVPGTQLSPSPTPASQSPKKPPAKDPLADLNIKDFL

SEQ ID NO: 17927 - protein, 1017 aa, Homo sapiens
MKLEISPHRKRSDDSDEDEPCAISGKWTFQRDSKRWSRLEEFDVFSPKQDLVPGSPDDSHPKDGPSPGGTLMDLSERQEVSSVRSLSSTGSLPSHAPPSEDAATPRTNSVISVCSSSNLAGNDDSFGSLPSPKELSSFSFSMKGHEKTAKSKTRSLLKRMESLKLKSSHHSKHKAPSKLGLIISGPILQEGMDEEKLKQLNCVEISALNGNRINVPMVRKRSVSNSTQTSSSSSQSETSSAVSTPSPVTRTRSLSACNKRVGMYLEGFDPFNQSTFNNVVEQNFKNRESYPEDTVFYIPEDHKPGTFPKALTNGSFSPSGNNGSVNWRTGSFHGPGHISLRRENSSDSPKELKRRNSSSSMSSRLSIYDNVPGSILYSSSGDLADLENEDIFPELDDILYHVKGMQRIVNQWSEKFSDEGDSDSALDSVSPCPSSPKQIHLDVDNDRTTPSDLDSTGNSLNEPEEPSEIPERRDSGVGASLTRSNRHRLRWHSFQSSHRPSLNSVSLQINCQSVAQMNLLQKYSLLKLTALLEKYTPSNKHGFSWAVPKFMKRIKVPDYKDRSVFGVPLTVNVQRTGQPLPQSIQQAMRYLRNHCLDQVGLFRKSGVKSRIQALRQMNEGAIDCVNYEGQSAYDVADMLKQYFRDLPEPLMTNKLSETFLQIYQYVPKDQRLQAIKAAIMLLPDENREVLQTLLYFLSDVTAAVKENQMTPTNLAVCLAPSLFHLNTLKRENSSPRVMQRKQSLGKPDQKDLNENLAATQGLAHMIAECKKLFQVPEEMSRCRNSYTEQELKPLTLEALGHLGNDDSADYQHFLQDCVDGLFKEVKEKFKGWVSYSTSEQAELSYKKVSEGPPLRLWRSVIEVPAVPEEILKRLLKEQHLWDVDLLDSKVIEILDSQTEIYQYVQNSMAPHPARDYVVLRTWRTNLPKGACALLLTSVDHDRAPVVGVRVNVLLSRYLIEPCGPGKSKLTYMCRVDLRGHMPEWYTKSFGHLCAAEVVKIRDSFSNQNTETKDTKSR

SEQ ID NO: 17928 - protein, 1326 aa, Homo sapiens
MNKMALASFMKGRTVIGTPDEETMDIELPKKYHEMVGVIFSDTFSYRLKFNWGYRIPVIKEHSEYTEHCWAMHGEIFCYLAKYWLKGFVAFQAAINAAIIEVTTNHSVMEELTSVIGINMKIPPFISKGEIMNEWFHFTCLVSFSSFIYFASLNVARERGKFKKLMTVMGLRESAFWLSWGLTYICFIFIMSIFMALVITSIPIVFHTGFMVIFTLYSLYGLSLIALAFLMSVLIRKPMLAGLAGFLFTVFWGCLGFTVLYRQLPLSLGWVLSLLSPFAFTAGMAQITHLDNYLSGVIFPDPSGDSYKMIATFFILAFDTLFYLIFTLYFERVLPDKDGHGDSPLFFLKSSFWSKHQNTHHEIFENEINPEHSSDDSFEPVSPEFHGKEAIRIRNVIKEYNGKTGKVEALQGIFFDIYEGQITAILGHNGAGKSTLLNILSGLSVSTEGSATIYNTQLSEITDMEEIRKNIGFCPQFNFQFDFLTVRENLRVFAKIKGIQPKEVEQEVKRIIMELDMQSIQDIIAKKLSGGQKRKLTLGIAILGDPQVLLLDEPTAGLDPFSRHRVWSLLKEHKVDRLILFSTQFMDEADILADRKVFLSNGKLKCAGSSLFLKRKWGIGYHLSLHRNEMCDTEKITSLIKQHIPDAKLTTESEEKLVYSLPLEKTNKFPDLYSDLDKCSDQGIRNYAVSVTSLNEVFLNLEGKSAIDEPDFDIGKQEKIHVTRNTGDESEMEQVLCSLPETRKAVSSAALWRRQIYAVATLRFLKLRRERRALLCLLLVLGIAFIPIILEKIMYKVTRETHCWEFSPSMYFLSLEQIPKTPLTSLLIVNNTGSNIEDLVHSLKCQDIVLEIDDFRNRNGSDDPSYNGAIIVSGDQKDYRFSVACNTKKLNCFPVLMGIVSNALMGIFNFTELIQMESTSFSRDDIVLDLGFIDGSIFLLLITNCVSPFIGMSSISDYKKNVQSQLWISGLWPSAYWCGQALVDIPLYFLILFSIHLIYYFIFLGFQLSWELMFVLVVCIIGCAVSLIFLTYVLSFIFRKWRKNNGFWSFGFFIILICVSTIMVSTQYEKLNLILCMIFIPSFTLLGYVMLLIQLDFMRNLDSLDNRINEVNKTILLTTLIPYLQSVIFLFVIRCLEMKYGNEIMNKDPVFRISPRSRETHPNPEEPEEEDEDVQAERVQAANALTAPNLEEEPVITASCLHKEYYETKKSCFSTRKKKIAIRNVSFCVKKGEVLGLLGHNGAGKSTSIKMITGCTKPTAGVVVLQGSRASVRQQHDNSLKFLGYCPQENSLWPKLTMKEHLELYAAVKGLGKEDAALSISRCALC

SEQ ID NO: 17929 - protein, 368 aa, Homo sapiens
MSNLKMKEAALIYLDRSGGLQKFIDDCKYYNDSKQSYAVYRFKILINPSDVVELDAELGNHILHQPLKAAEVFQSVCFIAVKTLSLIGQLQTETQINIVLKLTHLPPLPSYGLDLCEFPLDYTSQRFYMMQGIVIAMTTITKYTQGARFLCSDEACPLSKGFQYIRVHVPGATESATIRNDFLCNLCASSLQEDRKFRVLGDKQIVEIIATKALRAFQGYSNNQPFRFQSLTIFLRDESVNKMNIGNEYKIIGIPTCVKTSQTAVCIEANSITFCNSKVPSGISDNFRCLLSLTSSSCWKFTAILANIFASQITPPGTYNLLKLCLLMSLVQTTDRNKELEDCLDILIITSDTLLIDRYICDMNFYKY

SEQ ID NO: 17930 - protein, 437 aa, Homo sapiens
MALRAKAEVCMAVPWLSLQRAQALGTRAARVPRTVLPFEAMPRRPGNRWLRLLQIWREQGYEDLHLEVHQTFQELGPIFRYDLGGAGMVCVMLPEDVEKLQQVDSLHPHRMSLEPWVAYRQHRGHKCGVFLLNGPEWRFNRLRLNPEVLSPNAVQRFLPMVDAVARDFSQALKKKVLQNARGSLTLDVQPSIFHYTIEASNLALFGERLGLVGHSPSSASLNFLHALEVMFKSTVQLMFMPRSLSRWTSPKVWKEHFEAWDCIFQYGDNCIQKIYQELAFSRPQQYTSIVAELLLNAELSPDAIKANSMELTAGSVDTTVFPLLMTLFELARNPNVQQALRQESLAAAASISEHPQKATTELPLLRAALKETLRLYPVGLFLERVASSDLVLQNYHIPAGVLKHLQVETLTQEDIKMVYSFILRPSMFPLLTFRAIN

SEQ ID NO: 17931 - protein, 110 aa, Homo sapiens
MTKKTRDLRRQLRKAVMDHVSDSFLETNVPLLVLIEAAKNGNEKEVKEYAQVFREHANKLIEVANLACSISNNEEGVKLVRMSASQLEALCPQVINAALALAAKPQSKLA

SEQ ID NO: 17932 - protein, 724 aa, Homo sapiens
MSAEGYQYRALYDYKKEREEDIDLHLGDILTVNKGSLVALGFSDGQEARPEEIGWLNGYNETTGERGDFPGTYVEYIGRKKISPPTPKPRPPRPLPVAPGSSKTEADVEQQALTLPDLAEQFAPPDIAPPLLIKLVEAIEKKGLECSTLYRTQSSSNLAELRQLLDCDTPSVDLEMIDVHVLADAFKRYLLDLPNPVIPAAVYSEMISLAPEVQSSEEYIQLLKKLIRSPSIPHQYWLTLQYLLKHFFKLSQTSSKNLLNARVLSEIFSPMLFRFSAASSDNTENLIKVIEILISTEWNERQPAPALPPKPPKPTTVANNGMNNNMSLQDAEWYWGDISREEVNEKLRDTADGTFLVRDASTKMHGDYTLTLRKGGNNKLIKIFHRDGKYGFSDPLTFSSVVELINHYRNESLAQYNPKLDVKLLYPVSKYQQDQVVKEDNIEAVGKKLHEYNTQFQEKSREYDRLYEEYTRTSQEIQMKRTAIEAFNETIKIFEEQCQTQERYSKEYIEKFKREGNEKEIQRIMHNYDKLKSRISEIIDSRRRLEEDLKKQAAEYREIDKRMNSIKPDLIQLRKTRDQYLMWLTQKGVRQKKLNEWLGNENTEDQYSLVEDDEDLPHHDEKTWNVGSSNRNKAENLLRGKRDGTFLVRESSKQGCYACSVVVDGEVKHCVINKTATGYGFAEPYNLYSSLKELVLHYQHTSLVQHNDSLNVTLAYPVYAQQRR

SEQ ID NO: 17933 - protein, 645 aa, Homo sapiens
MVAERTHKAAATGARGPGELGAPGTVALVAARAERGARLPSPGSCGLLTLALCSLALSLLAHFRTAELQARVLRLEAERGEQQMETAILGRVNQLLDEKWKLHSRRRREAPKTSPGCNCPPGPPGQPGTRGFPGFPGPIGLDGKPGHPGPKGDMGLTGPPGQPGPQGQKGEKGQCGEYPHRLLPLLNSVRLAPPPVIKRRTFQGEQSQASIQGPPGPPGPPGPSGPLGHPGLPGPMGPPGLPGPPGPKGDPGIQGYHGRKGERGMPGMPGKHGAKGAPGIAVAGMKGEPGIPGTKGEKGAEGSPGLPGLLGQKGEKGDAGNSIGGGRGEPGPPGLPGPPGPKGEAGVDGQVGPPGQPGDKGERGAAGEQGPDGPKGSKGEPGKGEMVDYNGNINEALQEIRTLALMGPPGLPGQIGPPGAPGIPGQKGEIGLPGPPGHDGEKGPRGKPGDMGPPGPQGPPGKDGPPGVKGENGHPGSPGEKGEKGETGQAGSPVPGLPGPEGPPGPPGLQGVPGPKGEAGLDGAKGEKGFQGEKGDRGPLGLPGASGLDGRPGPPGTPGPIGVPGPAGPKGERGSKGDPGMTGPTGAAGLPGLHGPPGDKGNRGERGKKGSRGPKGDKGDQGAPGLDAPCPLGEDGLPVQGCWNK

SEQ ID NO: 17934 - protein, 153 aa, Homo sapiens
DSRDGGGGKDATGSEDYENLPTSASVSTHMTAGAMAGILEHSVMYPVDSVKTRMQSLSPDPKAQYTSIYGALKKIMRTEGFWRPLRGVNVMIMGAGPAHAMYFACYENMKRTLNDVFHHQGNSHLANGIAGSMATLLHDAVMNPAEVHPLHHL

SEQ ID NO: 17935 - protein, 945 aa, Homo sapiens
MSERAADDVRGEPRRAAAAAGGAAAAAARQQQQQQQQQQPPPPQPQRQQHPPPPPRRTRPEDGGPGAASTSAAAMATVGERRPLPSPEVMLGQSWNLWVEASKLPGKDGTELDESFKEFGKNREVMGLCREDMPIFGFCPAHDDFYLVVCNDCNQVVKPQAFQSHYERRHSSSSKPPLAVPPTSVFSFFPSLSKSKGGSASGSNRSSSGGVLSASSSSSKLLKSPKEKLQLRGNTRPMHPIQQSRVPHGRIMTPSVKVEKIHPKMDGTLLKSAVGPTCPATVSSLVKPGLNCPSIPKPTLPSPGQILNGKGLPAPPTLEKKPEDNSNNRKFLNKRLSEREFDPDIHCGVIDLDTKKPCTRSLTCKTHSLTQRRAVQGRRKRFDVLLAEHKNKTREKELIRHPDSQQPPQPLRDPHPAPPRTSQEPHQNPHGVIPSESKPFVASKPKPHTPSLPRPPGCPAQQGGSAPIDPPPVHESPHPPLPATEPASRLSSEEGEGDDKEESVEKLDCHYSGHHPQPASFCTFGSRQIGRGYYVFDSRWNRLRCALNLMVEKHLNAQLWKKIPPVPSTTSPISTRIPHRTNSVPTSQCGVSYLAAATVSTSPVLLSSTCISPNSKSVPAHGTTLNAQPAASGAMDPVCSMQSRQVSSSSSSPSTPSGLSSVPSSPMSRKPQKLKSSKSLRPKESSGNSTNCQNASSSTSGGSGKKRKNSSPLLVHSSSSSSSSSSSSHSMESFRKNCVAHSGPPYPSTVTSSHSIGLNCVTNKANAVNVRHDQSGRGPPTGSPAESIKRMSVMVNSSDSTLSLGPFIHQSNELPVNSHGSFSHSHTPLDKLIGKKRKCSPSSSSINNSSSKPTKVAKVPAVNNVHMKHTGTIPGAQGLMNSSLLHQDISSPCLRTGISATSPQSPDLKSKGTSLTAENSTGRNNADTFEDKLHLHSALWTPRCL

SEQ ID NO: 17936 - protein, 785 aa, Homo sapiens
MEKLTFYAVSAPEKLDRIGSYLAERLSRDVVRHRSGYVLIAMEALDQLLMACHSQSIKPFVESFLHMVAKLLESGEPKLQVLGTNSFVKFANIEEDTPSYHRRYDFFVSRFSAMCHSCHSDPEIRTEIRIAGIRGIQGVVRKTVNDELRATIWEPQHMDKIVPSLLFNMQKIEEVDSRIGPPSSPSATDKEENPAVLAENCFRELLGRATFGNMNNAVRPVFAHLDHHKLWDPNEFAVHCFKIIMYSIQAQYSHHVIQEILGHLDARKKDAPRVRAGIIQVLLEAVAIAAKGSIGPTVLEVFNTLLKHLRLSVEFEANDLQGGSVGSVNLNTSSKDNDEKIVQNAIIQTIGFFGSNLPDYQRSEIMMFIMGKVPVFGTSTHTLDISQLGDLGTRRIQIMLLRSLLMVTSGYKAKTIVTALPGSFLDPLLSPSLMEDYELRQLVLEVMHNLMDRHDNRAKLRGIRIIPDVADLKIKREKICRQDTSFMKKNGQQLYRHIYLGCKEEDNVQKNYELLYTSLALITIELANEEVVIDLIRLAIALQDSAIINEDNLPMFHRCGIMALVAAYLNFVSQMIAVPAFCQHVSKVIEIRTMEAPYFLPEHIFRDKCMLPKSLEKHEKDLYFLTNKIAESLGGSGYSVERLSVPYVPQVTDEDRLSRRKSIVDTVSIQVDILSNNVPSDDVVSNTEEITFEALKKAIDTSGMEEQEKEKRRLVIEKFQKAPFEEIAAQCESKANLLHDRLAQILELTIRPPPSPSGTLTITSGHAQYQSVPVYEMKFPDLCVY

SEQ ID NO: 17937 - protein, 248 aa, Homo sapiens
QFDTKVIIQTLLKYPINHFWGVSSIYRMILQQDFTSIRFPALEHCYTGGEVVLPKDQEEWKRRTGLLLYENYGQSETGLICATYWGMKIKPGFMGKATPPYDVQGDPEKTAKVECGDFYNTGDRGKMDEEGYICFLGRSDDIINASGYRIGPAEVESALVEHPAVAESAVVGSPDPIRGEVVKAFIVLTPQFLSHDKDQLTKELQQHVKSVTAPYKYPRKVEFVSELPKTITGKIERKELRKKETGQM

SEQ ID NO: 17938 - protein, 718 aa, Homo sapiens
MDELHSLDPRRQELLEARFTGVASGSTGSTGSCSVGAKASTNNESSNHSFGSLGSLSDKESETPEKKQSESSRGRKRKAENQNESSQGKSIGGRGHKISDYFEYQGGNGSSPVRGIPPAIRSPQNSHSHSTPSSSVRPNSPSPTALAFGDHPIVQPKQLSFKIIQTDLTMLKLAALESNKIQDLEKKEGRIDDLLRANCDLRRQIDEQQKLLEKYKERLNKCISMSKKLLIEKSTQEKLSSREKSMQDRLRLGHFTTVRHGASFTEQWTDGFAFQNLVKQQEWVNQQREDIERQRKLLAKRKPPTANNSQAPSTNSEPKQRKNKAVNGAENDPFVRPNLPQLLTLAEYHEQEEIFKLRLGHLKKEEAEIQAELERLERVRNLHIRELKRINNEDNSQFKDHPTLNERYLLLHLLGRGGFSEVYKAFDLYEQRYAAVKIHQLNKSWRDEKKENYHKHACREYRIHKELDHPRIVKLYDYFSLDTDTFCTVLEYCEGNDLDFYLKQHKLMSEKEARSIVMQIVNALRYLNEIKPPIIHYDLKPGNILLVDGTACGEIKITDFGLSKIMDDDSYGVDGMDLTSQGAGTYWYLPPECFVVGKEPPKISNKVDVWSVGVIFFQCLYGRKPFGHNQSQQDILQENTILKATEVQFPVKPVVSSEAKAFIRRCLAYRKEDRFDVHQLANDPYLLPHMRRSNSSGNLHMAGLTASPTPPSSSIITY

SEQ ID NO: 17939 - protein, 536 aa, Homo sapiens
AREQINQQTAYIDGSNVYGSSERESQALRDPSVPRGLLKTGFPWPPSGKPLLPFSTGPPTECARQEQESPCFLAGDHRANEHLALAAMHTLWFREHNRMATELSALNPHWEGNTVYQEARKIVGAELQHITYSHWLPKVLGDPGTRMLRGYRGYNPNVNAGIINSFATAAFRFGHTLINPILYRLNATLGEISEGHLPFHKALFSPSRIIKEGGIDPVLRGLFGVAAKWRAPSYLLSPELTQRLFSAAYSAAVDSAATIIQRGRDHGIPPYVDFRVFCNLTSVKNFEDLQNEIKDSEIRQKLRKFWYENPGVFTPAQLTQLKQASLSRVLCDNGDSIQQVQADVFVKAEYPQDYLNCSEIPKVDLRVWQDCCADCRSRGQFRAVTQESQKKRSAQYSYPVDKDMELSHLRSRQQDKIYVGEDARNVTVLAKTKFSQDFSTFAAEIQETITALREQINKLEARLRQAGCTDVRGVPRKAEERWMKEDCTHCICESGQVTCVVEICPPAPCPSPELVKGTCCPVCRDRGMPSDSPEKR

SEQ ID NO: 17940 - protein, 407 aa, Homo sapiens
DCKLQDRCRKCYSPRSGQACPPALAAAWLRRCERRGGRPRGGRRKELTLGLRPARCSAPGPAKDDAWRPQAGRSSSDTNESEIKSNEEPLLRKSSRRFVIFPIQYPDIWKMYKQAQASFWTAEEVDLSKDLPHWNKLKADEKYFISHILAFFAASDGIVNENLVERFSQEVQVPEARCFYGFQILIENVHSEMYSLLIDTYIRDPKKREFLFNAIETMPYVKKKADWALRWIADRKSTFGERVVAFAAVEGVFFSGSFAAIFWLKKRGLMPGLTFSNELISRDEGLHCDFACLMFQYLVNKPSEERVREIIVDAVKIEQEFLTEALPVGLIGMNCILMKQYIEFVADRLLVELGFSKVFQAENPFDFMENISLEGKTNFFEKRVSEYQRFAVMAETTDNVFTLDADF

SEQ ID NO: 17941 - protein, 561 aa, Homo sapiens
MMHPEPGKFYQINPEEYEHPNPWKESFQQLYKGAHVKPGFAEHFYSNPARYKGRENMLYYDTIEDALGGVQEAHFDGLIFVHSGIYTDEWIYIESPITMIGAAPGKVADKVIIENTRDSTFVFMEGSEDAYVGYMTIRFNPDDKSAQHHNAHHCLEITVNCSPIIDHCIIRSTCTVGSAVCVSGQGACPTIKHCNISDCENVGLYITDHAQGIYEDNEISNNALAGIWVKNHGNPIIRRNHIHHGRDVGVFTFDHGMGYFESCNIHRNRIAGFEVKAYANPTVVRCEIHHGQTGGIYVHEKGRGQFIENKIYANNFAGVWITSNSDPTIRGNSIFNGNQGGVYIFGDGRGLIEGNDIYGNALAGIQIRTNSCPIVRHNKIHDGQHGGIYVHEKGQGVIEENEVYSNTLAGVWVTTGSTPVLRRNRIHSGKQVGVYFYDNGHGVLEDNDIYNHMYSGVQIRTGSNPKIRRNKIWGGQNGGILVYNSGLGCIEDNEIFDNAMAGVWIKTDSNPTLRRNKIHDGRDGGICIFNGGRGIVVNFALVKNPVFHYSSISLMINDIAN

SEQ ID NO: 17942 - protein, 270 aa, Homo sapiens
KSTVTPLILPKRRRGSGVFCANCLTTKTSLWRKNANGGYVCNACGLYQKLHSTPRPLNIIKQNNGEQIIRRRTRKRLNPEALQAEQLNKQQRGSNEEQVNGSPLERRSEDHLTESHQREIPLPSLSKYEAQGSLTKSHSAQQPVLVSQTLDIHKRMQPLHIQIKSPQESTGDPGNSSSVSEGKGSSERGSPIEKYMRPAKHPNYSPPGSPIEKYQYPLFGLPFVHNDFQSEADWLRFWSKYKLSVPGNPHYLSHVPGLPNPCQNYVPYPT

SEQ ID NO: 17943 - protein, 749 aa, Homo sapiens
MATGGGPFEDGMNDQDLPNWSNENVDDRLNNMDWGAQQKKANRSSEKNKKKFGVESDKRVTNDISPESSPGVGRRRTKTPHTFPHSRYMSQMSVPEQAELEKLKQRINFSDLDQRSIGSDSQGRATAANNKRQLSENRKPFNFLPMQINTNKSKDASTNPPNRETIGSAQCKELFASALSNDLLQNCQVSEEDGRGEPAMESSQIVSRLVQIRDYITKASSMREDLVEKNERSANVERLTHLIDHLKEQEKSYMKFLKKILARENEEEDVRTIDSAVGSGSVAESTSLNIDVQSEASDTTARDPQQEPMEEIENLKKQHDLLKRMLQQQEQLRALQGRQAALLALQHKAEQAIAVMDDSVVAETAGSLSGVSITSELNEELNDLIQRFHNQLRDSQPPAVPDNRRQAESLSLTREVSQSRKPSASERLPDEKVELFSKMRVLQEKKQKMDKLLGELHTLRDQHLNNSSSSPQRSVDQRSTSAPSASVGLAPVVNGESNSLTSSVPYPTASLVSQNESENEGHLNPSEKLQKLNEVRKRLNELRELVHYYEQTSDMMTDAVNENRKDEETEESEYDSEHENSEPVTNIRNPQVASTWNEVNSHSNAQCVSNNRDGRTVNSNCEINNRSAANIRALNMPPSLDCRYNREGEQEIHVAQGEDDEEEEEEAEEEGVSGASLSSHRSSLVDEHPEDAEFEQKINRLMAAKQKLRQLQDLVAMVQDDDAAQGVISASASNLDDFYPAEEDTKQNS

SEQ ID NO: 17944 - protein, 413 aa, Homo sapiens
MVGIRKTAGEHLGVTFRVEGGELVIARILHGGMVAQQGLLHVGDIIKEVNGQPVGSDPRALQELLRNASGSVILKILPSYQEPHLPRQVFVKCHFDYDPARDSLIPCKEAGLRFNAGDLLQIVNQDDANWWQACHVEGGSAGLIPSQLLEEKRKAFVKRDLELTPNSGTLCGSLSGKKKKRMMYLTTKNAEFDRHELLIYEEVARMPPFRRKTLVLIGAQGVGRRSLKNKLIMWDPDRYGTTVPYTSRRPKDSEREGQGYSFVSRGEMEADVRAGRYLEHGEYEGNLYGTRIDSIRGVVAAGKVCVLDVNPQAVKVLRTAEFVPYVVFIEAPDFETLRAMNRAALESGISTKQLTEADLRRTVEESSRIQRGYGHYFDLCLVNSNLERTFRELQTAMEKLRTEPQWVPVSWVY

SEQ ID NO: 17945 - protein, 808 aa, Homo sapiens
MKMAPQNADPESMQVQELSVPLPDPQKAGGAEAENCETISEGSIDRIPMRLWVMHGAVMFGREFCYAMETALVTPILLQIGLPEQYYSLTWFLSPILGLIFTPLIGSASDRCTLSWGRRRPFILALCVGVLFGVALFLNGSAIGLALGDVPNRQPIGIVLTVLGVVVLDFSADATEGPIRAYLLDVVDSEEQDMALNIHAFSAGLGGAIGYVLGGLDWTQTFLGSWFRTQNQVLFFFAAIIFTVSVALHLFSIDEEQYSPQQERSAEEPGALDGGEPHGVPAFPDEVQSEHELALDYPDVDIMRSKSDSALHVPDTALDLEPELLFLHDIEPSIFHDASYPATPRSTSQELAKTKLPRLATFLKEAAKEDETLLDNHLNEAKVPNGSGSPTKDALGGYTRVDTKPSATSSSMRRRRHAFRRQASSTFSYYGKLGSHCYRYRRANAVVLIKPSRSMSDLYDMQKRQRQHRHRNQSGATTSSGDTESEEGEGETTVRLLWLSMLKMPRELMRLCLCHLLTWFSVIAEAVFYTDFMGQVIFEGDPKAPSNSTAWQAYNAGVKMGCWGLVIYAATGAICSALLQKYLDNYDLSVRVIYVLGTLGFSVGTAVMAMFPNVYVAMVTISTMGIVSMSISYCPYALLGQYHDIKQYIHHSPGNSKRGFGIDCAILSCQVYISQILVASALGGVVDAVGTVRVIPMVASVGSFLGFLTATFLVIYPNVSEEAKEEQKGLSSPLAGEGRAGGNSEKPTVLKLTRKEGLQGPVETESVTPAGIDVCQISSHWLVPQLLESIFLYDYFRKKIFFSTMWFS

SEQ ID NO: 17946 - protein, 520 aa, Homo sapiens
MAAVAAEAAATAASPGEGGAGEAEPEMEPIPGSEAGTDPLPVTATEASVPDGETDGQQSAPQADEPPLPPPPPPPGELARSPEAVGPELEAEEKLSVRVAESAAAAPQGGPELPPSPASPPEQPPAPEEREEPPLPQPVAPALVPPAGGDSTVSQLIPGSEVRVTLDHIIEDALVVSFRFGEKLFSGVLMDLSKRFGPHGIPVTVFPKREYKDKPEAMPLQSNTFQEGTEVKCEANGAVPDDPSPVPHPELSLAESLWTSKPPPLFHEGAPYPPPLFIRDTYNQSIPQPPPRKIKRPKRKMYREEPTSIMNAIKLRPRQVLCDKCKNSVVAEKKEIRKGSSATDSSKYEDKKRRNESVTTVNKKLKTDHKVDGKNQNESQKRNAVVKVSNIAHSRGRVVKVSAQANTSKAQLSTKKVLQSKNMDHAKAREVLKIAKEKAQKKQNETSTSKNAHSKVHFTRRYQNPSSGSLPPRVRLKPQRYRNEENDSSLKTGLEKMRSGKMAPKPQSRCTSTRSAAQRH

SEQ ID NO: 17947 - protein, 916 aa, Homo sapiens
VLLEHRTIDVNLEGENGNTAVIIACTTNNSEALQILLKKGAKPCKSNKWGCFPIHQAAFSGSKECMEIILRFGEEHGYSRQLHINFMNNGKATPLHLAVQNGDLEMIKMCLDNGAQIDPVEKGRCTAIHFAATQGATEIVKLMISSYSGSVDIVNTTDGCHETMLHRASLFDHHELADYLISVGADINKIDSEGRSPLILATASASWNIVNLLLSKGAQVDIKDNFGRNFLHLTVQQPYGLKNLRPEFMQMQQIKELVMDEDNDGCTPLHYACRQGGPGSVNNLLGFNVSIHSKSKDKKSPLHFAASYGRINTCQRLLQDISDTRLLNEGDLHGMTPLHLAAKNGHDKVVQLLLKKGALFLSDHNGWTALHHASMGGYTQTMKVILDTNLKCTDRLDEDGNTALHFAAREGHAKAVALLLSHNADIVLNKQQASFLHLALHNKRKEVVLTIIRSKRWDECLKIFSHNSPGNKCPITEMIEYLPECMKVLLDFCMLHSTEDKSCRDYYIEYNFKYLQCPLEFTKKTPTQDVIYEPLTALNAMVQNNRIELLNHPVCKEYLLMKWLAYGFRAHMMNLGSYCLGLIPMTILVVNIKPGMAFNSTGIINETSDHSEILDTTNSYLIKTCMILVFLSSIFGYCKEAGQIFQQKRNYFMDISNVLEWIIYTTGIIFVLPLFVEIPAHLQWQCGAIAVYFYWMNFLLYLQRFENCGIFIVMLEVILKTLLRSTVVFIFLLLAFGLSFYILLNLQDPFSSPLLSIIQTFSMMLGDINYRESFLEPYLRNELAHPVLSFAQLVSFTIFVPIVLMNLLIGLAVGDIAEVQKHASLKRIAMQVELHTSLEKKLPLWFLRKVDQKSTIVYPNKPRSGGMLFHIFCFLFCTGEIRQEIPNADKSLEMEILKQKYRKTTCAFVLTLIPVG

SEQ ID NO: 17948 - protein, 120 aa, Homo sapiens
MFYAHFVLSKRGPLAKIWLAAHWDKKLTKAHVFECNLESSVESIISPKVKMALRTSGHLLLGVVRIYHRKAKYLLADCNEAFIKIKMAFRPGVVDLPEENREAAYNAITLPEEFHDFDQP

SEQ ID NO: 17949 - protein, 168 aa, Homo sapiens
MEQPPAPKSKLKKLSEDSLTKQPEEVFDVLEKLGEGSYGSVFKAIHKESGQVVAIKQVPVESDLQEIIKEISIMQQCDSPYVVKYYGSYFKNTDLWIVMEYCGAGSVSDIIRLRNKTGFLTDTTEGSASCDLRMDLTLFHLGAEFLHYLLLYEADPLSCVFSLLVFSV

SEQ ID NO: 17950 - protein, 526 aa, Homo sapiens
MLSVGLGFLRTELGLDLGLEPKRYPGWVILVGTGALGLLLLFLLGYGWAAACAGARKKRRSPPRKREEAAAVPAAAPDDLALLKNLRSEEQKKKNRKKLSEKPKPNGRTVEVAEGEAVRTPQSVTAKQPPEIDKKNEKSKKNKKKSKSDAKAVQNSSRHDGKEVDEGAWETKISHREKRQQRKRDKVLTDSGSLDSTIPGIENTITVTTEQLTTASFPVGSKKNKGDSHLNVQVSNFKSGKGDSTLQVSSGLNENLTVNGGGWNEKSVKLSSQISAGEEKWNSVSPASAGKRKTEPSAWSQDTGDANTNGKDWGRSWSDRSIFSGIDGLSSADPNSDWNAPAEEWGNWVDEERASLLKSQEPIPDDQKVSDDDKEKGEGALPTGKSKKKKKKKKKQGEDNSTAQDTEELEKEIREDLPVNTSKTRPKQEKAFSLKTISTSDPAEVLVKNSQPIKTLPPATSTEPSVILSKSDSDKSSSQVPPILQETDKSKSNTKQNSVPPSQTKSETSWESPKQIKKKKKARRET

SEQ ID NO: 17951 - protein, 597 aa, Homo sapiens
MSWAPPPQVGQNLRSQTVLRILNGMEDLMWVAMEERRFRALASFTMPVAATNSETAMQQVLDNLGSLPSATGAAELDLIFLRGIMESPIVRSLAKAHERLEETKLEAVRDNNLELVQEILRDLAQLAEQSSTAAELAHILQEPHFQSLLETHDSVASKTYETPPPSPGLDPTFSNQPVPPDAVRMVGIRKTAGEHLGVTFRVEGGELVIARILHGGMVAQQGLLHVGDIIKEVNGQPVGSDPRALQELLRNASGSVILKILPSYQEPHLPRQVFVKCHFDYDPARDSLIPCKEAGLRFNAGDLLQIVNQDDANWWQACHVEGGSAGLIPSQLLEEKRKAFVKRDLELTPNSGTLCGSLSGKKKKRMMYLTTKNAEFDRHELLIYEEVARMPPFRRKTLVLIGAQGVGRRSLKNKLIMWDPDRYGTTVPYTSRRPKDSEREGQGYSFVSRGEMEADVRAGRYLEHGEYEGNLYGTRIDSIRGVVAAGKVCVLDVNPQAVKVLRTAEFVPYVVFIEAPDFETLRAMNRAALESGISTKQLTEADLRRTVEESSRIQRGYGHYFDLCLVNSNLERTFRELQTAMEKLRTEPQWVPVSWVY

SEQ ID NO: 17952 - protein, 666 aa, Homo sapiens
MKKLQGAHLRKPVTPDLLMTPSDQGDVDLDVDFAAHRGNWTGKLDFLLSCIGYCVGLGNVWRFPYRAYTNGGGAFLVPYFLMLAICGIPLFFLELSLGQFSSLGPLAVWKISPLFKGAGAAMLLIVGLVAIYYNMIIAYVLFYLFASLTSDLPWEHCGNWWNTELCLEHRVSKDGNGALPLNLTCTVSPSEEYWSRYVLHIQGSQGIGSPGEIRWNLCLCLLLAWVIVFLCILKGVKSSGKVVYFTATFPYLILLMLLVRGVTLPGAWKGIQFYLTPQFHHLLSSKVWIEAALQIFYSLGVGFGGLLTFASYNTFHQNIYRDTFIVTLGNAITSILAGFAIFSVLGYMSQELGVPVDQVAKAGPGLAFVVYPQAMTMLPLSPFWSFLFFFMLLTLGLDSQFAFLETIVTAVTDEFPYYLRPKKAVFSGLICVAMYLMGLILTTDGGMYWLVLLDDYSASFGLMVVVITTCLAVTRVYGIQRFCRDIHMMLGFKPGLYFRACWLFLSPATLLALMVYSIVKYQPSEYGSYRFPPWAELLGILMGLLSCLMIPAGMLVAVLREEGSLWERLQQASRPAMDWGPSLEENRTGMYVATLAGSQSPKPLMVHMRKGTSARGLLYARMTVSATYIRSTDKMLSCLQGAHSSAETCLGDFKPEICGEEVTVVG

SEQ ID NO: 17953 - protein, 1252 aa, Homo sapiens
MPEKRLTAEPPTITEEEFEDSLATDDFLVDYFNEFLSLPTFSEAIRFNADYGVFEVANDAPQFLEKQLKKILQNQQPRNPIYDVVRKGKNEVKPVQMNAPDEDETINVNYNIMCLSREEGIKWIKKERLPAFLESDCYFEYRLAKLVSQVRWSKSGMNFTVGSNFSPWIVKKPPSLPPPATEEDNLASYTQTKDWFALAKQSQQTVSTFSLPCCVPYNKLKSPAISSVSENFIFDDGVHPRTKKDPSKTNKLISEFEEEEGEEEEVSVSLQDTPSQALLRVYLEKKQDVDESLTMHFSTCEEFLSSYIYFILRGAIQQIVGKPVGETPDYINFNNITKVSFDDCFESIHGKNFLSELVQTTKERSEEIEQTSLSSKNESAGPESRADWCISHRTYDIGNRKEFERFKKFIKGTLGERYWWLWMDIERLKVLKDPGRHQRHLEKMKKCYLVSNGDYYLSAEILSKFKLLDGSQWNEEHLRNIQSEVLKPLLLYWAPRFCVTHSASTKYASAELKFWHLRQAKPRKDIDPFPQMATLLPLRPKSCIPQIPEIQKEEFSLSQPPKSPNKSPEVKTATQKPWKRELLYPGSSKDDVIEKGSKYMSESSKVIHLTSFTDISECLKPQLDRRYAYTEEPRVKTVSDVGALGGSDMENLLQSLYVENRAGFFFTKFCEHSGNKLWKNSVYFWFDLQAYHQLFYQETLQPFKVCKQAQYLFATYVAPSATLDIGLQQEKKKEIYMKIQPPFEDLFDTAEEYILLLLLEPWTKMVKSDQIAYKKVELVEETRQLDSTYFRKLQALHKETFSKKAEDTTCEIGTGILSLSNVSKRTEYWDNVPAEYKHFKFSDLLNNKLEFEHFRQFLETHSSSMDLMCWTDIEQFRRITYRDRNQRKAKSIYIKNKYLNKKYFFGPNSPASLYQQNQVMHLSGGWGKILHEQLDAPVLVEIQKHVQNRLENVWLPLFLASEQFAARQKIKVQMKDIAEELLLQKAEKKIGVWKPVESKWISSSCKIIAFRKALLNPVTSRQFQRFVALKGDLLENGLLFWQEVQKYKDLCHSHCDESVIQKKITTIINCFINSSIPPALQIDIPVEQAQKIIEHRKELGPYVFREAQMTIFGVLFKFWPQFCEFRKNLTDENIMSVLERRQEYNKQKKKLAVLEDEKSGKDGIKQYANTSVPAIKTALLSDSFLGLQPYGRQPTWCYSKYIEALEQERILLKIQEELEKKLFAGLQPLTNFKASSSTMSLKKNMSAHSSQK

SEQ ID NO: 17954 - protein, 181 aa, Homo sapiens
MEAMNVEKASADGNLPEVISNIKETLKIVSRTPVNITMAGDSGNGMSTFISALRNTGHEGKASPPTELVKATQRCASYFSSHFSNVVLWDLPGTGSATTTLENYLMEMQFNRYDFIMVASAQFSMNHVMLAKTAEDMGKKFYIVWTKLDMDLSTGALPEVQLLQIRENVLENLQKERVCEY

SEQ ID NO: 17955 - protein, 116 aa, Homo sapiens
MDSPIQIFRGEPGPTCAPSACLPPNSSAWFPGWAEPDSNGSAGSEDAQLEPAHISPAIPVIITAVYSVVFVVGLVGNSLVMFVIIRLEFQWKTTKPCDELRDPKGTGVKPGREALD

SEQ ID NO: 17956 - protein, 129 aa, Homo sapiens
MESKALLVLTLAVWLQSLTASRGGVAAADQRRDFIDIESKFALRTPEDTAEDTCHLIPGVAESVATCHFNHSSKTFMVIHGWTVTGMYESWVPKLVAALYKREPDSNVIVVDWLSRAQEHYPVSAGYTK

SEQ ID NO: 17957 - protein, 141 aa, Homo sapiens
SPRTPPQRFYSSEHEYSGLNIVRPSTGKIVNELFKEAREHGAVPLNEATRASGDDKSKSFTGGGYRLGSSFCKRSEYIYGENQLQDVQILLKLWSNGFSLDDGELRPYNEPTNAQFLESVKRGVTLIACMPEIQQLMLEIF

SEQ ID NO: 17958 - protein, 635 aa, Homo sapiens
MEGRGPYRIYDPGGSVPSGEASAAFERLVKENSRLKEKMQGIKMLGELLEESQMEATRLRQKAEELVKDNELLPPPSPSLGSFDPLAELTGKDSNVTASPTAPACPSDKPAPVQKPPSSGTSSEFEVVTPEEQNSPESSSHANAMALGPLPREDGNLMLHLQRLETTLSVCAEEPDHGQLFTHLGRMALEFNRLASKVHKNEQRTSILQTLCEQLRKENEALKAKLDKGLEQRDQAAERLREENLELKKLLMSNGNKEGASGRPGSPKMEGTGKKAVAGQQQASVTAGKVPEVVALGAAEKKVKMLEQQRSELLEVNKQWDQHFRSMKQQYEQKITELRQKLADLQKQVTDLEAEREQKQRDFDRKLLLAKSKIEMEETDKEQLTAEAKELRQKVKYLQDQLSPLTRQREYQEKEIQRLNKALEEALSIQTPPSSPPTAFGSPEGAGALLRKQELVTQNELLKQQVKIFEEDFQRERSDRERMNEEKEELKKQVEKLQAQVTLSNAQLKAFKDEEKAREALRQQKRKAKASGERYHVEPHPEHLCGAYPYAYPPMPAMVPHHGFEDWSQIRYPPPPMAMEHPPPLPNSRLFHLPEYTWRLPCGGVRNPNQSSQVMDPPTARPTEPEPADLRLPRN

SEQ ID NO: 17959 - protein, 575 aa, Homo sapiens
MAMSQESLTFKDVFVDFTLEEWQQLDSAQKNLYRDVMLENYSHLVSVGHLVGKPDVIFRLGPGDESWMADGGTPVRTCAVWEVDEQIDHYKESQDKFLWQAAFIGKETLKDESGQECKICRKIIYLNTDFVSVKQRLPKYYSWERCSKHHLNFLGQNRSYVRKKDDGCKAYWKVCLHYNLHKAQPAERFFDPNQRGKALHQKQALRKSQRSQTGEKLYKCTECGKVFIQKANLVVHQRTHTGEKPYECCECAKAFSQKSTLIAHQRTHTGEKPYECSECGKTFIQKSTLIKHQRTHTGEKPFVCDKCPKAFKSSYHLIRHEKTHIRQAFYKGIKCTTSSLIYQRIHTSEKPQCSEHGKASDEKPSPTKHWRTHTKENIYECSKCGKSFRGKSHLSVHQRIHTGEKPYECSICGKTFSGKSHLSVHHRTHTGEKPYECRRCGKAFGEKSTLIVHQRMHTGEKPYKCNECGKAFSEKSPLIKHQRIHTGERPYECTDCKKAFSRKSTLIKHQRIHTGEKPYKCSECGKAFSVKSTLIVHHRTHTGEKPYECRDCGKAFSGKSTLIKHQRSHTGDKNL

SEQ ID NO: 17960 - protein, 561 aa, Homo sapiens
RSKLRKPKPVPLRKKAIGGEFSDTNAAVEGTPLPKASYHFSPEELDENTSPLLGDARFQKSPPDLKETPGTLSSDTNDSGVELGEESRSSPLKLEFDFTEDTGNIEARKALPRKLGRKLGSTLTPKIQKDGISKSAGLEQPTDPVARDGPLSQTSSKPDPSQWESPSFNPFGSHSVLQNSPPLSSEGSYHFDPDNFDESMDPFKPTTTLTSSDFCSPTGNHVNEILESPKKAKSRLITTTEQVKFLCFLLSGCKVKKHETQSLALDACSRDEGAVISQISDISNRDGHATDEEKLASTSCGQKSAGAEVKGIEKETCQKMEEDGSTVLGLLESSAEKAPVSVSCGGESPLDGICLSESDKTAVLTLIREEIITKEIEANEWKKKYEETRQEVLEMRKIVAEYEKTIAQMIDEQRTSMTSQKSFQQLTMEKEQALADLNSVERSLSDLFRRYENLKGVLEGFKKNEEALKKCAQDYLARVKQEEQRYQALKIHAEEKLDKANEEIAQVRTKAKAESAALHAGLRKEQMKVESLERALQQKNQEIEELTKICDELIAKLGKTD

SEQ ID NO: 17961 - protein, 191 aa, Homo sapiens
MSLALRSELVVDKTKRKKRRELSEEQKQEIKDAFELFDTDKDEAIDYHELKVAMRALGFDVKKADVLKILKDYDREATGKITFEDFNEVVTDWILERDPHEEILKAFKLFDDDDSGKISLRNLRRVARELGENMSDEELRAMIEEFDKDGDGEILKNILLLPIWSRCLSLNREFFSEVNQEEFIAIMTGDI

SEQ ID NO: 17962 - protein, 1005 aa, Homo sapiens
MAGALRRGRALGSRPSGPTVSSRRSPQCPVAQEGLGARSRPRVAPRSLARCGPSSRLMGWKPSEARGQSQSFQASGLQPRSLKAARRATGRPDRSRAARPTMDPSAHRSRAAPPNMDPDPQAGVQVGMRVVRGVDWKWGQQDGGEGGVGTVVELGRHGSPSTPDRTVVVQWDQGTRTNYRAGYQGAHDLLLYDNAQIGVRHPNIICDCCKKHGLRGMRWKCRVCLDYDLCTQCYMHNKHELAHAFDRYETAHSRPVTLSPRQGLPRIPLRGIFQGAKVVRGPDWEWGSQDGKPAELQRRVSADSQPFQHGDKVKCLLDTDVLREMQEGHGGWNPRMAEFIGQTGTVHRITDRGDVRVQFNHETRWTFHPGALTKHHSFWVGDVVRVIGDLDTVKRLQAGHGEWTDDMAPALGRVGKVVKVFGDGNLRVAVAGQRWTFSPSCLVAYRPEEDANLDVAERARENKSSLSVALDKLRAQKSDPEHPGRLVVEVALGNAARALDLLRRRPEQVDTKNQGRTALQVAAYLGQVELIRLLLQARAGVDLPDDEGNTALHYAALGNQPEATRVLLSAGCRADAINSTQSTALHVAVQRGFLEVVRALCERGCDVNLPDAHSDTPLHSAISAGTGASGIVEVLTEVPNIDVTATNSQGFTLLHHASLKGHALAVRKILARARQLVDAKKEDGFTALHLAALNNHREVAQILIREGRCDVNVRNRKLQSPLHLAVQQAHVGLVPLLVDAGCSVNAEDEEGDTALHVALQRHQLLPLVADGAGGDPGPLQLLSRLQASGLPGSAELTVGAAVACFLALEGADVSYTNHRGRSPLDLAAEGRVLKALQGCAQRFRERQAGGGAAPGPRQTLGTPNTVTNLHVGAAPGPEAAECLVCSELALLVLFSPCQHRTVCEECARRMKKCIRCQVVVSKKLRPDGSEVASAAPAPGPPRQLVEELQSRYRQMEERITCPICIDSHIRLVFQCGHGACAPCGSALSACPICRQPIRDRIQIFV

SEQ ID NO: 17963 - protein, 937 aa, Homo sapiens
MDPFRPSFRGQSPIHPSQCQAVRMPGCWPQASKPLDPALGRGAPAGRGHVFGKPEEPSTQRGPAQRESVGLVSMFRGLGIETVSKTPLKREMLPSGRGILGRGLSANLVRKDREELSPTFWDPKVLAAGDSKMAETSVGWSRTLGRGSSDASLLPLGRAAGGISREVDKPPCTFSTPSRGPPQLSSPPALPQSPLHSPDRPLVLTVEHKEKELIVKQGSKGTPQSLGLNLVKIQCHNEAVYQYHVTFSPNVECKSMRFGMLKDHQAVTGNVTAFDGSILYLPVKLQQVLELKSQRKTDSAEISIKIQMTKILEPCSDLCIPFYNVVFRRVMKLLDMKLVGRNFYDPTSAMVLQQHRLQIWPGYAASIRRTDGGLFLLADVSHKVIRNDCVLDVMHAIYQQNKEHFQDECTKLLVGNIVITRYNNRTYRIDDVDWNKTPKDSFTMSDGKEITFLEYYSKNYGITVKEEDQPLLIHRPSERQDNHGMLLKGEILLLPELSFMTGIPEKMKKDFRAMKDLAQQINLSPKQHHSALECLLQRIAKNEAATNELMRWGLRLQKDVHKIEGRVLPMERINLKNTSFITSQELNWVKEVTRDPSILTIPMHFWALFYPKRAMDQARELVNMLEKIAGPIGMRMSPPAWVELKDDRIETYVRTIQSTLGAEGKIQMVVCIIMGPRDDLYGAIKKLCCVQSPVPSQVVNVRTIGQPTRLRSVAQKILLQINCKLGGELWGVDIPLKQLMVIGMDVYHDPSRGMRSVVGFVASINLTLTKWYSRVVFQMPHQEIVDSLKLCLVGSLKKFYEVNHCLPEKIVVYRDGVSDGQLKTVANYEIPQLQKCFEAFENYQPKMVVFVVQKKISTNLYLAAPQNFVTPTPGTVVDHTITSCEWLTFKLCHMYWNWPGTIRVPAPCKYAHKLAFLSGHILHHEPAIQLCENLFFL

SEQ ID NO: 17964 - protein, 1263 aa, Homo sapiens
MEPPGGSLGPGRGTRDKKKGRSPDELPSAGGDGGKSKKFLERFTSMRIKKEKEKPNSAHRNSSASYGDDPTAQSLQDVSDEQVLVLFEQMLLDMNLNEEKQQPLREKDIIIKREMVSQYLYTSKAGMSQKESSKSAMMYIQELRSGLRDMPLLSCLESLRVSLNNNPVSWVQTFGAEGLASLLDILKRLHDEKEETAGSYDSRNKHEIIRCLKAFMNNKFGIKTMLETEEGILLLVRAMDPAVPNMMIDAAKLLSALCILPQPEDMNERVLEAMTERAEMDEVERFQPLLDGLKSGTTIALKVGCLQLINALITPAEELDFRVHIRSELMRLGLHQVLQDLREIENEDMRVQLNVFDEQGEEDSYDLKGRLDDIRMEMDDFNEVFQILLNTVKDSKAEPHFLSILQHLLLVRNDYEARPQYYKLIEECISQIVLHKNGADPDFKCRHLQIEIEGLIDQMIDKTKVEKSEAKAAELEKKLDSELTARHELQVEMKKMESDFEQKLQDLQGEKDALHSEKQQIATEKQDLEAEVSQLTGEVAKLTKELEDAKKEMASLSAAAITVPPSVPSRAPVPPAPPLPGDSGTIIPPPPAPGDSTTPPPPPPPPPPPPPLPGGVCISSPPSLPGGTAISPPPPLSGDATIPPPPPLPEGVGIPSPSSLPGGTAIPPPPPLPGSARIPPPPPPLPGSAGIPPPPPPLPGEAGMPPPPPPLPGGPGIPPPPPFPGGPGIPPPPPGMGMPPPPPFGFGVPAAPVLPFGLTPKKLYKPEVQLRRPNWSKLVAEDLSQDCFWTKVKEDRFENNELFAKLTLTFSAQTKTSKAKKDQEGGEEKKSVQKKKVKELKVLDSKTAQNLSIFLGSFRMPYQEIKNVILEVNEAVLTESMIQNLIKQMPEPEQLKMLSELKDEYDDLAESEQFGVVMGTVPRLRPRLNAILFKLQFSEQVENIKPEIVSVTAACEELRKSESFSNLLEITLLVGNYMNAGSRNAGAFGFNISFLCKLRDTKSTDQKMTLLHFLAELCENDYPDVLKFPDELAHVEKASRVSAENLQKNLDQMKKQISDVERDVQNFPAATDEKDKFVEKMTSFVKDAQEQYNKLRMMHSNMETLYKELGEYFLFDPKKLSVEEFFMDLHNFRNMFLQAVKENQKRRETEEKMRRAKLAKEKAEKERLEKQQKREQLIDMNAEGDETGVMDSLLEALQSGAAFRRKRGPRQANRKAGCAVTSLLASELTKDDAMAAVPAKVSKNSETFPTILEEAKELVGRAS

SEQ ID NO: 17965 - protein, 128 aa, Homo sapiens
MSDKSDLKAELERKKQRLAQIREEKKRKEEERKKKEADMQQKKEPVQDDSDLDRKRRETEALLQSIGISPEPPLVPTPMSPSSKSVSTPSEAGSQDSGDLGPLTRTLQWDTDPSVLQLQSDSELGYMS

SEQ ID NO: 17966 - protein, 1202 aa, Homo sapiens
PRDSLRSLEQVAYKKGVKHLSALLDPEVLSIFVPPFISKEDSQMAGANCGTLGKTRMRSLRKKREKPRPEQWKGLPGPPRAPEPEDVAVPGGVDLLTLPQLCFPGGVCVATEPKEDCVHFLVLTDVCGNRTYGVVAQYYRPLHDEYCFYNGKTHRECPGCFVPFAVCVVSRFPYYNSLKDCLSCLLALLKPCKDFEVDSHIKDFAAKLSLIPSPPPGPLHLVFNMKSLQIVLPARADPESPILDLDLHLPLLCFRPEKVLQILTCILTEQRIVFFSSDWALLTLVTECFMAYLYPLQWQHPFVPILSDQMLDFVMAPTSFLMGCHLDHFEEVSKEADGLVLINIDHGSITYSKSTDDNVDIPDVPLLAAQTFIQRDVKNHLNYEHRVFNSEEFLKTRAPGDHQFYKQVLDTYMFHSFLKARLNRRMDAFAQMDLDTQSEEDRINGMLLSPRRPTVEKRASRKSSHLHVTHRRMVVSMPNLQDIAMPELAPRNSSLRLTDTAGCRGSSAVLNVTPKSPYTFKIPEIHFPLESKCVQAYHAHFVSMLSEAMCFLAPDNSLLLARYLYLRGLVYLMQGQLLNALLDFQNLYKTDIRIFPTDLVKRTVESMSAPEWEGAEQAPELMRLISEILDKPHEASKLDDHVKKFKLPKKHMQLGDFMKRVQESGIVKDASIIHRLFEALTVGQEKQIDPETFKDFYNCWKETEAEAQEVSLPWLVMEHLDKNECVCKLSSSVKTNLGVGKIAMTQKRLFLLTEGRPGYLEISTFRNIEEVRRTTTTFLLRRIPTLKIRVASKKEVFEANLKTECDLWHLMVKEMWAGKKLADDHKDPHYVQQALTNVLLMDAVVGTLQSPGAIYAASKLSYFDKMSNEMPMTLPETTLETLKHKINPSAGEAFPQAVDVLLYTPGHLDPAEKVEDAHPKLWCALSEGKVTVFNASSWTIHQHSFKVGTAKVNCMVMADQNQVWVGSEDSVIYIINVHSMSCNKQLTAHCSSVTDLIVQDGQEAPSNVYSCSMDGMVLVWNVSTLQVTSRFQLPRGGLTSIRLHGGRLWCCTGNSIMVMKMNGSLHQELKIEENFKDTSTSFLAFQLLPEEEQLWAACAGRSEVYIWSLKDLAQPPQRVPLEDCSEINCMIRVKKQVWVGSRGLGQGTPKGKIYVIDAERKTVEKELVAHMDTVRTLCSAEDRYVLSGSGREEGKVAIWKGE

SEQ ID NO: 17967 - protein, 747 aa, Homo sapiens
MEGSKTPLQSSPSAQELKAPLERRHSSSSKPPLAVPPTSVFSFFPSLSKSKGGSASGSNRSSSGGVLSASSSSSKLLKSPKEKLQLRGNTRPMHPIQQSRVPHGRIMTPSVKVEKIHPKMDGTLLKSAVGPTCPATVSSLVKPGLNCPSIPKPTLPSPGQILNGKGLPAPPTLEKKPEDNSNNRKFLNKRLSEREFDPDIHCGVIDLDTKKPCTRSLTCKTHSLTQRRAVQGRRKRFDVLLAEHKNKTREKELIRHPDSQQPPQPLRDPHPAPPRTSQEPHQNPHGVIPSESKPFVASKPKPHTPSLPRPPGCPAQQGGSAPIDPPPVHESPHPPLPATEPASRLSSEEGEGDDKEESVEKLDCHYSGHHPQPASFCTFGSRQIGRGYYVFDSRWNRLRCALNLMVEKHLNAQLWKKIPPVPSTTSPISTRIPHRTNSVPTSQCGVSYLAAATVSTSPVLLSSTCISPNSKSVPAHGTTLNAQPAASGAMDPVCSMQSRQVSSSSSSPSTPSGLSSVPSSPMSRKPQKLKSSKSLRPKESSGNSTNCQNASSSTSGGSGKKRKNSSPLLVHSSSSSSSSSSSSHSMESFRKNCVAHSGPPYPSTVTSSHSIGLNCVTNKANAVNVRHDQSGRGPPTGSPAESIKRMSVMVNSSDSTLSLGPFIHQSNELPVNSHGSFSHSHTPLDKLIGKKRKCSPSSSSINNSSSKPTKVAKVPAVNNVHMKHTGTIPGAQGLMNSSLLHQPKARP

SEQ ID NO: 17968 - protein, 1857 aa, Homo sapiens
MFGLKVKKKRNKAEKGLILANKAAKDSQGDTEALQEEPSHQEGPRGDLVHDDASIFPVPSASPKRRSKLLTKIHDGEVRSQNYQIAITITEARQLVGENIDPVVTIEIGDEKKQSTVKEGTNSPFYNEYFVFDFIGPQVHLFDKIIKISVFHHKLIGSVLIGSFKVDLGTVYNQPGHQFCNKWALLTDPGDIRTGTKGYLKCDISVMGKGDVLKTSPKTSDTEEPIEKNLLIPNGFPLERPWARFYVRLYKAEGLPKMNSSIMANVTKAFVGDSKDLVDPFVEVSFAGQMGRTTVQKNCADPVWHEQVIFKEMFPPLCRRVKIQVWDEGSMNDVALATHFIDLKKISNEQDGDKGFLPTFGPAWINLYGSPRNHSLMDDYQEMNEGFGEGVSFRGRILVEIAVEILSGRAQESKFSKALKELKLPSKDKDSKSSKGKDKADKTEDGKSQQASNKTNSTEVEVESFDVPPEIVPEKNEEFLLFGAFFEATMIDRKIGDKPISFEVSIGNFGNLIDGGSHHGSKKSAESAEEDLLPLLHEGQGDVAHDVPIPMASTTHPEKPLVTEGNRNYNYLPFEAKKPCVYFISSWGDQTFRLHWSNMLEKMADFLEESIEEVRELIKISQEAPEEKMKTVLSDFISRSSAFISEAEKKPKMLNQTTLDKKRLTLCWQELEAMCKEAKGIIQQQKKKLSVDEMIHEAQNFVEKIRFLVDEPQHTIPDVFIWMLSNNRRVAYARIASKDLLYSPVAGQMGKHCGKIKTHFLKPPGKRPAGWSVQAKVDVYLWLGSIKHASAILDNLPVGYEAEMSSKGAGTNHPPSNLLYQEQHVFQLRAHMYQARGLIAADSNGLSDPFAKVTFLSHCQTTKIISQTLSPTWNQMLLFNDLVLHGDVKELAESPPLVVVELYDSDAVGKPEYLGATVAAPVVKLADQDYEPPRLCYHPIFCGNLSGGDLLAVFELLQVPPSGLQGLPPVEPPDITQIYPVPANIRPVLSKYRVEVLFWGVREMKKVQLLSVDRPQALIECGGQGVKSCVIQSYKNNPNFSIQADAFEVELPENELLHPPLSICVVDWRAFGRSTLVGTYTINYLKQFLCKLREPLAPITQVDGTQPGHDISDSLTATESSGAHSSSQDPPADHIYVDVEPPPTVVPDSAQAQPAILVDVPDSSPMLEPEHTPVAQEPPKDGKPKDPRKPSRRSTKRRKRTIADESAENVIDWWSKYYASLKKAQKAKERNPKGKKGNTEAKPDEVVVDIEDGPKKKKDKMLKKKPKDDGIPNLAILQIYDGDLESEFNNFEDWVKTFELFRGKSTEDDHGLDGDRVIGKFKGSFCIYKSPQDSSSEDSGQLRIQQGIPPNHPVTVLIRVYIVAAFNLSPADPDGKSDPYIVIKLGKTEIKDRDKYIPKQLNPVFGRSFEIQATFPKESLLSILIYDHDMIGTDDLIGETKIDLENRFYSKHRAICGLQSQYEIEGYNAWRDTSKPTEILTKLCKDNKLDGPYFHPGKIQIGNQVFSGKTIFTEEDTDETVESYEHLALKVLHSWEDIPEVGCRLVPEHIETRPLYHKDKPGMEQGRLQMWVDMFPKDMPQPGPPVDISPRRPKGYELRVTIWNTEDVILEDENIFTGQKSSDIYVKGWLKGLEDDKQETDVHYNSLTGEGNFNWRFLFPFQYLPAEKQMVITKRENIFSLEKMECKTPAVLVLQVWDFERLSSDDFLGTLEMNLNSFPRAAKSAKACDLAKFENASEETKISIFQQKRVRGWWPFSKSKELTGKVEAEFHLVTAEEAEKNPVGKARKEPEPLAKPNRPDTSFSWFMSPFKCLYYLIWKNYKKYIIIAFILIILIIFLVLFIYTLPGAISRRIVVGS

SEQ ID NO: 17969 - protein, 576 aa, Homo sapiens
MPVAATNSETAMQQVLDNLGSLPSATGAAELDLIFLRGIMESPIVRSLAKVIMVLWFMQQNVFVPMKYMLKYFGAHERLEETKLEAVRDNNLELVQEILRDLAQLAEQSSTAAELAHILQEPHFQSLLETHDSVASKTYETPPPSPGLDPTFSNQPVPPDAVRMVGIRKTAGEHLGVTFRVEGGELVIARILHGGMVAQQGLLHVGDIIKEVNGQPVGSDPRALQELLRNASGSVILKILPSYQEPHLPRQVFVKCHFDYDPARDSLIPCKEAGLRFNAGDLLQIVNQDDANWWQACHVEGGSAGLIPSQLLEEKRKAFVKRDLELTPNSGTLCGSLSGKKKKRMMYLTTKNAEFDRHELLIYEEVARMPPFRRKTLVLIGAQGVGRRSLKNKLIMWDPDRYGTTVPYTSRRPKDSEREGQGYSFVSRGEMEADVRAGRYLEHGEYEGNLYGTRIDSIRGVVAAGKVCVLDVNPQAVKVLRTAEFVPYVVFIEAPDFETLRAMNRAALESGISTKQLTEADLRRTVEESSRIQRGYGHYFDLCLVNSNLERTFRELQTAMEKLRTEPQWVPVSWVY

SEQ ID NO: 17970 - protein, 923 aa, Homo sapiens
MGSGAGELGRAERLPVLFLFLLSLFCPALCEQIRYRIPEEMPKGSVVGNLATDLGFSVQELPTRKLRVSSEKPYFTVSAESGELLVSSRLDREEICGKKPACALEFEAVAENPLNFYHVNVEIEDINDHTPKFTQNSFELQISESAQPGTRFILGSAHDADIGSNTLQNYQLSPSDHFSLINKEKSDGSKYPEMVLKTPLDREKQKSYHLTLTALDFGAPPLSSTAQIHVLVTDANDNAPVFSQDVYRVSLSENVYPGTTVLQVTATDQDEGVNAEITFSFSEASQITQFDLNSNTGEITVLNTLDFEEVKEYSIVLEARDGGGMIAQCTVEVEVIDENDNAPEVIFQSLPNLIMEDAELGTHIALLKVRDKDSRHNGEVTCKLEGDVPFKILTSSRNTYKLVTDAVLDREQNPEYNITVTATDRGKPPLSSSSSITLHIGDVNDNAPVFSQSSYIVHVAENNPPGASISQVRASDPDLGPNGQVSYCIMASDLEQRELSSYVSISAESGVVFAQRAFDHEQLRAFELTLQARDQGSPALSANVSLRVLVDDRNDNAPRVLYPALGPDGSALFDMVPHAAEPGYLVTKVVAVDADSGHNAWLSYHVLQASEPGLFSLGLRTGEVRTARALGDRDAVRQRLLVAVRDGGQPPLSATATLHLVFADSLQEVLPDITDRPDPSDLQAELQFYLVVALALISVLFLVAMILAIALRLRRSSSPASWSCFQPGLCVKSESVVPPNYSEGTLPYSYNLCVAHTGKTEFNFLKCSEQLSSGQDILCGDSSGALFPLCNSSELTSHQQAPPNTDWRFSQAQRPGTSGSQNGDDTGTWPNNQFDTEMLQAMILASASEAADGSSTLGGGAGTMGLSARYGPQFTLQHVPDYRQNVYIPGSNATLTNAAGKRDGKAPAGGNGNKKKSGKKEKK

SEQ ID NO: 17971 - protein, 888 aa, Homo sapiens
MARRSSFQSCQIISLFTFAVGVNICLGFTAHRIKRAEGWEEGPPTVLSDSPWTNISGSCKGRCFELQEAGPPDCRCDNLCKSYTSCCHDFDELCLKTARGWECTKDRCGEVRNEENACHCSEDCLARGDCCTNYQVVCKGESHWVDDDCEEIKAAECPAGFVRPPLIIFSVDGFRASYMKKGSKVMPNIEKLRSCGTHSPYMRPVYPTKTFPNLYTLATGLYPESHGIVGNSMYDPVFDATFHLRGREKFNHRWWGGQPLWITATKQGVKAGTFFWSVVIPHERRILTILQWLTLPDHERPSVYAFYSEQPDFSGHKYGPFGPEMTNPLREIDKIVGQLMDGLKQLKLHRCVNVIFVGDHGMEDVTCDRTEFLSNYLTNVDDITLVPGTLGRIRSKFSNNAKYDPKAIIANLTCKKPDQHFKPYLKQHLPKRLHYANNRRIEDIHLLVERRWHVARKPLDVYKKPSGKCFFQGDHGFDNKVNSMQTVFVGYGSTFKYKTKVPPFENIELYNVMCDLLGLKPAPNNGTHGSLNHLLRTNTFRPTMPEEVTRPNYPGIMYLQSDFDLGCTCDDKVEPKNKLDELNKRLHTKGSTEAETRKFRGSRNENKENINGNFEPRKERHLLYGRPAVLYRTRYDILYHTDFESGYSEIFLMPLWTSYTVSKQAEVSSVPDHLTSCVRPDVRVSPSFSQNCLAYKNDKQMSYGFLFPPYLSSSPEAKYDAFLVTNMVPMYPAFKRVWNYFQRVLVKKYASERNGVNVISGPIFDYDYDGLHDTEDKIKQYVEGSSIPVPTHYYSIITSCLDFTQPADKCDGPLSVSSFILPHRPDNEESCNSSEDESKWVEELMKMHTARVRDIEHLTSLDFFRKTSRSYPEILTLKTYLHTYESEI

SEQ ID NO: 17972 - protein, 467 aa, Homo sapiens
MEMFTFLLTCIFLPLLRGHSLFTCEPITVPRCMKMAYNMTFFPNLMGHYDQSIAAVEMEHFLPLANLECSPNIETFLCKAFVPTCIEQIHVVPPCRKLCEKVYSDCKKLIDTFGIRWPEELECDRLQYCDETVPVTFDPHTEFLGPQKKTEQVQRDIGFWCPRHLKTSGGQGYKFLGIDQCAPPCPNMYFKSDELEFAKSFIGTVSIFCLCATLFTFLTFLIDVRRFRYPERPIIYYSVCYSIVSLMYFIGFLLGDSTACNKADEKLELGDTVVLGSQNKACTVLFMLLYFFTMAGTVWWVILTITWFLAAGRKWSCEAIEQKAVWFHAVAWGTPGFLTVMLLAMNKVEGDNISGVCFVGLYDLDASRYFVLLPLCLCVFVGLSLLLAGIISLNHVRQVIQHDGRNQEKLKKFMIRIGVFSGLYLVPLVTLLGCYVYEQVNRITWEITWVSDHCRQYHIPCPYQSNQ

SEQ ID NO: 17973 - protein, 146 aa, Homo sapiens
MTMYKSKRRHQRYINMAGEPKPYRPKPGNKRPLSALYRLESKEPFLSVGLFDYHGRVPPPPRAVIPLKRPRVAVTTTRRGKGVFSMKGGSRSTASGSTGSKLKSDELQTIKKELTQIKTKIDSLLGRLEKIEKQQKAEAVSTDKVI

SEQ ID NO: 17974 - protein, 196 aa, Homo sapiens
MAEGGGPEPGEQERRSSGPRPPSARDLQLALAELYEDEVKCKSSKSNRPKATVFKSPRTPPQRFYSSEHEYSGLNIVRPSTGKIVNELFKEAREHGAVPLNEATRASGDDKSKSFTGGGYRLGSSFCKRSEYIYGENQLQDVQILLKLWSNGFSLDDGELRPYNEPTNAQFLESVKRGVTLIACMPEIQQLMLEIF

SEQ ID NO: 17975 - protein, 424 aa, Homo sapiens
MPPFLITLFLFHSCCLRANGHLREGMTLLKTEFALHLYQSVAACRNETNFVISPAGVSLPLEILQFGAEGSTGQQLADALGYTVHDKRVKDFLHAVYATLPTSSQGTEMELACSLFVQVGTPLSPCFVEHVSWWANSSLEPADLSEPNSTAIQTSEGASRETAGGGPSEGPGGWPWEQVSAAFAQLVLVSTMSFQGTWRKRFSSTDTQILPFTCAYGLVLQVPMMHQTTEVNYGQFQDTAGHQVGVLELPYLGSAVSLFLVLPRDKDTPLSHIEPHLTASTIHLWTTSLRRARMDVFLPRFRIQNQFNLKSILNSWGVTDLFDPLKANLKGISGQDGFYVSEAIHKAKIEVLEEGTKASGATALLLLKRSRIPIFKADRPFIYFLREPNTGITVFFDRIQIIYQCLSSNKGSFVHYPLKNKHSF

SEQ ID NO: 17976 - protein, 387 aa, Homo sapiens
MDKLDANVSSEEGFGSVEKVVLLTFLSTVILMAILGNLLVMVAVCWDRQLRKIKTNYFIVSLAFADLLVSVLVMPFGAIELVQDIWIYGEVFCLVRTSLDVLLTTASIFHLCCISLDRYYAICCQPLVYRNKMTPLRIALMLGGCWVIPTFISFLPIMQGWNNIGIIDLIEKRKFNQNSNSTYCVFMVNKPYAITCSVVAFYIPFLLMVLAYYRIYVTAKEHAHQIQMLQRAGASSESRPQSADQHSTHRMRTETKAAKTLCIIMGCFCLCWAPFFVTNIVDPFIDYTVPGQVWTAFLWLGYINSGLNPFLYAFLNKSFRRAFLIILCCDDERYRRPSILGQTVPCSTTTINGSTHVLRYTVLHRGHHQELEKLPIHNDPESLESCF

SEQ ID NO: 17977 - protein, 215 aa, Homo sapiens
MNFLLSWVHWSLALLLYLHHAKWSQAAPMAEGGGQNHHEVVKFMDVYQRSYCHPIETLVDIFQEYPDEIEYIFKPSCVPLMRCGGCCNDEGLECVPTEESNITMQIMRIKPHQGQHIGEMSFLQHNKCECRPKKDRARQEKKSVRGKGKGQKRKRKKSRYKSWSVPCGPCSERRKHLFVQDPQTCKCSCKNTDSRCKARQLELNERTCRCDKPRR

SEQ ID NO: 17978 - protein, 817 aa, Homo sapiens
MCAPGIHVSSEGWEEVRSVDSEEGTIEARRAVAGDLDYYWLDPATWHSRETSPISSHPVTWQPSKEGDRLIGRVILNKRTTMPKDSGALLGLKVVGGKMTDLGRLGAFITKVKKGSLADVVGHLRAGDEVLEWNGKPLPGATNEEVYNIILESKSEPQVEIIVSRPIGDIPRIPESSHPPLESSSSSFESQKMERPSISVISPTSPGALKDAPQVLPGQLSVKLWYDKVGHQLIVNVLQATDLPARVDGRPRNPYVKMYFLPDRSDKSKRRTKTVKKILEPKWNQTFVYSHVHRRDFRERMLEITVWDQPRVQEEESEFLGEILIELETALLDDEPHWYKLQTHDESSLPLPQPSPFMPRRHIHGESSSKKLQRSQRISDSDISDYEVDDGIGVVPPVGYRSSARESKSTTLTVPEQQRTTHHRSRSVSPHRGNDQGKPRSRLPNVPLQRSLDEIHPTRRSRSPTRHHDASRSPVDHRTRDVDSQYLSEQDSELLMLPRAKRGRSAECLHTTSELQPFLDRARSASTNCLRPDTSLHSPERERMHRQRSPTQSPPADTSFSSRRGRQLPQVPVRSGSIEQESGHKKLKSTIQRSTETGMAAEMRKMVRQPSRESTDGSINSYSSEGNLIFPGVRLGADSQFSDFLDGLGPAQLVGRQTLATPAMGDIQIGMEDKKGQLEVEVIRARSLTQKPGSKSTPAPYVKVYLLENGACIAKKKTRIARKTLDPLYQQSLVFDESPQGKVLQVIVWGDYGRMDHKCFMGVAQILLEELDLSSMVIGWYKLFPPSSLVDPTLTPLTRRASQSSLESSTGPPCIRS
